United States Patent Application Publication US 2018/0305689 A1 - sequence listing, part 83

SEQ ID NO: 1222362 - RNA, 19 nt, Artificial Sequence
  Description of Artificial Sequence: Synthetic oligonucleotide
  Sense strand starting at position 3806 of SEQ ID NO: 917272
cagagugcauuugaauaau

SEQ ID NO: 1222363 - RNA, 19 nt, Artificial Sequence
  Description of Artificial Sequence: Synthetic oligonucleotide
  Antisense strand to SEQ ID NO: 1222362
auuauucaaaugcacucug

SEQ ID NO: 1222364 - RNA, 19 nt, Artificial Sequence
  Description of Artificial Sequence: Synthetic oligonucleotide
  Sense strand starting at position 3856 of SEQ ID NO: 917272
gcuugagaaguuugcaaag

SEQ ID NO: 1222365 - RNA, 19 nt, Artificial Sequence
  Description of Artificial Sequence: Synthetic oligonucleotide
  Antisense strand to SEQ ID NO: 1222364
cuuugcaaacuucucaagc

SEQ ID NO: 1222366 - RNA, 19 nt, Artificial Sequence
  Description of Artificial Sequence: Synthetic oligonucleotide
  Sense strand starting at position 3901 of SEQ ID NO: 917272
ggugccuggaucuaagagu

SEQ ID NO: 1222367 - RNA, 19 nt, Artificial Sequence
  Description of Artificial Sequence: Synthetic oligonucleotide
  Antisense strand to SEQ ID NO: 1222366
acucuuagauccaggcacc

SEQ ID NO: 1222368 - RNA, 19 nt, Artificial Sequence
  Description of Artificial Sequence: Synthetic oligonucleotide
  Sense strand starting at position 3940 of SEQ ID NO: 917272
guacaaauucuagaguuac

SEQ ID NO: 1222369 - RNA, 19 nt, Artificial Sequence
  Description of Artificial Sequence: Synthetic oligonucleotide
  Antisense strand to SEQ ID NO: 1222368
guaacucuagaauuuguac

SEQ ID NO: 1222370 - RNA, 19 nt, Artificial Sequence
  Description of Artificial Sequence: Synthetic oligonucleotide
  Sense strand starting at position 3977 of SEQ ID NO: 917272
gugauaguacaaggacaua

SEQ ID NO: 1222371 - RNA, 19 nt, Artificial Sequence
  Description of Artificial Sequence: Synthetic oligonucleotide
  Antisense strand to SEQ ID NO: 1222370
uauguccuuguacuaucac

SEQ ID NO: 1222372 - RNA, 19 nt, Artificial Sequence
  Description of Artificial Sequence: Synthetic oligonucleotide
  Sense strand starting at position 3977 of SEQ ID NO: 917273
gugauaguacaaggacaua

SEQ ID NO: 1222373 - RNA, 19 nt, Artificial Sequence
  Description of Artificial Sequence: Synthetic oligonucleotide
  Antisense strand to SEQ ID NO: 1222372
uauguccuuguacuaucac

SEQ ID NO: 1222374 - RNA, 19 nt, Artificial Sequence
  Description of Artificial Sequence: Synthetic oligonucleotide
  Sense strand starting at position 342 of SEQ ID NO: 917273
aaugcucauccaggugauu

SEQ ID NO: 1222375 - RNA, 19 nt, Artificial Sequence
  Description of Artificial Sequence: Synthetic oligonucleotide
  Antisense strand to SEQ ID NO: 1222374
aaucaccuggaugagcauu

SEQ ID NO: 1222376 - RNA, 19 nt, Artificial Sequence
  Description of Artificial Sequence: Synthetic oligonucleotide
  Sense strand starting at position 421 of SEQ ID NO: 917273
aaugacaaugugugaugga

SEQ ID NO: 1222377 - RNA, 19 nt, Artificial Sequence
  Description of Artificial Sequence: Synthetic oligonucleotide
  Antisense strand to SEQ ID NO: 1222376
uccaucacacauugucauu

SEQ ID NO: 1222378 - RNA, 19 nt, Artificial Sequence
  Description of Artificial Sequence: Synthetic oligonucleotide
  Sense strand starting at position 552 of SEQ ID NO: 917273
agaugaaguugcucauaau

SEQ ID NO: 1222379 - RNA, 19 nt, Artificial Sequence
  Description of Artificial Sequence: Synthetic oligonucleotide
  Antisense strand to SEQ ID NO: 1222378
auuaugagcaacuucaucu

SEQ ID NO: 1222380 - RNA, 19 nt, Artificial Sequence
  Description of Artificial Sequence: Synthetic oligonucleotide
  Sense strand starting at position 553 of SEQ ID NO: 917273
gaugaaguugcucauaaug

SEQ ID NO: 1222381 - RNA, 19 nt, Artificial Sequence
  Description of Artificial Sequence: Synthetic oligonucleotide
  Antisense strand to SEQ ID NO: 1222380
cauuaugagcaacuucauc

SEQ ID NO: 1222382 - RNA, 19 nt, Artificial Sequence
  Description of Artificial Sequence: Synthetic oligonucleotide
  Sense strand starting at position 610 of SEQ ID NO: 917273
ugcuuuauaggguaaguuu

SEQ ID NO: 1222383 - RNA, 19 nt, Artificial Sequence
  Description of Artificial Sequence: Synthetic oligonucleotide
  Antisense strand to SEQ ID NO: 1222382
aaacuuacccuauaaagca

SEQ ID NO: 1222384 - RNA, 19 nt, Artificial Sequence
  Description of Artificial Sequence: Synthetic oligonucleotide
  Sense strand starting at position 686 of SEQ ID NO: 917273
agaacugggcccugacaaa

SEQ ID NO: 1222385 - RNA, 19 nt, Artificial Sequence
  Description of Artificial Sequence: Synthetic oligonucleotide
  Antisense strand to SEQ ID NO: 1222384
uuugucagggcccaguucu

SEQ ID NO: 1222386 - RNA, 19 nt, Artificial Sequence
  Description of Artificial Sequence: Synthetic oligonucleotide
  Sense strand starting at position 715 of SEQ ID NO: 917273
ugaccuugcagaggagaau

SEQ ID NO: 1222387 - RNA, 19 nt, Artificial Sequence
  Description of Artificial Sequence: Synthetic oligonucleotide
  Antisense strand to SEQ ID NO: 1222386
auucuccucugcaagguca

SEQ ID NO: 1222388 - RNA, 19 nt, Artificial Sequence
  Description of Artificial Sequence: Synthetic oligonucleotide
  Sense strand starting at position 835 of SEQ ID NO: 917273
auaguuacagguuggagau

SEQ ID NO: 1222389 - RNA, 19 nt, Artificial Sequence
  Description of Artificial Sequence: Synthetic oligonucleotide
  Antisense strand to SEQ ID NO: 1222388
aucuccaaccuguaacuau

SEQ ID NO: 1222390 - RNA, 19 nt, Artificial Sequence
  Description of Artificial Sequence: Synthetic oligonucleotide
  Sense strand starting at position 836 of SEQ ID NO: 917273
uaguuacagguuggagaua

SEQ ID NO: 1222391 - RNA, 19 nt, Artificial Sequence
  Description of Artificial Sequence: Synthetic oligonucleotide
  Antisense strand to SEQ ID NO: 1222390
uaucuccaaccuguaacua

SEQ ID NO: 1222392 - RNA, 19 nt, Artificial Sequence
  Description of Artificial Sequence: Synthetic oligonucleotide
  Sense strand starting at position 1010 of SEQ ID NO: 917273
uuuagagguucuuuacuaa

SEQ ID NO: 1222393 - RNA, 19 nt, Artificial Sequence
  Description of Artificial Sequence: Synthetic oligonucleotide
  Antisense strand to SEQ ID NO: 1222392
uuaguaaagaaccucuaaa

SEQ ID NO: 1222394 - RNA, 19 nt, Artificial Sequence
  Description of Artificial Sequence: Synthetic oligonucleotide
  Sense strand starting at position 1013 of SEQ ID NO: 917273
agagguucuuuacuaaaug

SEQ ID NO: 1222395 - RNA, 19 nt, Artificial Sequence
  Description of Artificial Sequence: Synthetic oligonucleotide
  Antisense strand to SEQ ID NO: 1222394
cauuuaguaaagaaccucu

SEQ ID NO: 1222396 - RNA, 19 nt, Artificial Sequence
  Description of Artificial Sequence: Synthetic oligonucleotide
  Sense strand starting at position 1024 of SEQ ID NO: 917273
acuaaaugucaguaaguau

SEQ ID NO: 1222397 - RNA, 19 nt, Artificial Sequence
  Description of Artificial Sequence: Synthetic oligonucleotide
  Antisense strand to SEQ ID NO: 1222396
auacuuacugacauuuagu

SEQ ID NO: 1222398 - RNA, 19 nt, Artificial Sequence
  Description of Artificial Sequence: Synthetic oligonucleotide
  Sense strand starting at position 1409 of SEQ ID NO: 917273
gugugugaacaacacauua

SEQ ID NO: 1222399 - RNA, 19 nt, Artificial Sequence
  Description of Artificial Sequence: Synthetic oligonucleotide
  Antisense strand to SEQ ID NO: 1222398
uaauguguuguucacacac

SEQ ID NO: 1222400 - RNA, 19 nt, Artificial Sequence
  Description of Artificial Sequence: Synthetic oligonucleotide
  Sense strand starting at position 1492 of SEQ ID NO: 917273
guucuuuauuccuuaagag

SEQ ID NO: 1222401 - RNA, 19 nt, Artificial Sequence
  Description of Artificial Sequence: Synthetic oligonucleotide
  Antisense strand to SEQ ID NO: 1222400
cucuuaaggaauaaagaac

SEQ ID NO: 1222402 - RNA, 19 nt, Artificial Sequence
  Description of Artificial Sequence: Synthetic oligonucleotide
  Sense strand starting at position 1504 of SEQ ID NO: 917273
uuaagaggacucugugcau

SEQ ID NO: 1222403 - RNA, 19 nt, Artificial Sequence
  Description of Artificial Sequence: Synthetic oligonucleotide
  Antisense strand to SEQ ID NO: 1222402
augcacagaguccucuuaa

SEQ ID NO: 1222404 - RNA, 19 nt, Artificial Sequence
  Description of Artificial Sequence: Synthetic oligonucleotide
  Sense strand starting at position 1508 of SEQ ID NO: 917273
gaggacucugugcauagua

SEQ ID NO: 1222405 - RNA, 19 nt, Artificial Sequence
  Description of Artificial Sequence: Synthetic oligonucleotide
  Antisense strand to SEQ ID NO: 1222404
uacuaugcacagaguccuc

SEQ ID NO: 1222406 - RNA, 19 nt, Artificial Sequence
  Description of Artificial Sequence: Synthetic oligonucleotide
  Sense strand starting at position 1652 of SEQ ID NO: 917273
cgggaagauucaguucuug

SEQ ID NO: 1222407 - RNA, 19 nt, Artificial Sequence
  Description of Artificial Sequence: Synthetic oligonucleotide
  Antisense strand to SEQ ID NO: 1222406
caagaacugaaucuucccg

SEQ ID NO: 1222408 - RNA, 19 nt, Artificial Sequence
  Description of Artificial Sequence: Synthetic oligonucleotide
  Sense strand starting at position 2103 of SEQ ID NO: 917273
agacaaacugaaugcuauu

SEQ ID NO: 1222409 - RNA, 19 nt, Artificial Sequence
  Description of Artificial Sequence: Synthetic oligonucleotide
  Antisense strand to SEQ ID NO: 1222408
aauagcauucaguuugucu

SEQ ID NO: 1222410 - RNA, 19 nt, Artificial Sequence
  Description of Artificial Sequence: Synthetic oligonucleotide
  Sense strand starting at position 2122 of SEQ ID NO: 917273
uuaucaguuugaucaguau

SEQ ID NO: 1222411 - RNA, 19 nt, Artificial Sequence
  Description of Artificial Sequence: Synthetic oligonucleotide
  Antisense strand to SEQ ID NO: 1222410
auacugaucaaacugauaa

SEQ ID NO: 1222412 - RNA, 19 nt, Artificial Sequence
  Description of Artificial Sequence: Synthetic oligonucleotide
  Sense strand starting at position 2477 of SEQ ID NO: 917273
uguauuaauagacgaggaa

SEQ ID NO: 1222413 - RNA, 19 nt, Artificial Sequence
  Description of Artificial Sequence: Synthetic oligonucleotide
  Antisense strand to SEQ ID NO: 1222412
uuccucgucuauuaauaca

SEQ ID NO: 1222414 - RNA, 19 nt, Artificial Sequence
  Description of Artificial Sequence: Synthetic oligonucleotide
  Sense strand starting at position 2582 of SEQ ID NO: 917273
uuugaucccuacuuuggaa

SEQ ID NO: 1222415 - RNA, 19 nt, Artificial Sequence
  Description of Artificial Sequence: Synthetic oligonucleotide
  Antisense strand to SEQ ID NO: 1222414
uuccaaaguagggaucaaa

SEQ ID NO: 1222416 - RNA, 19 nt, Artificial Sequence
  Description of Artificial Sequence: Synthetic oligonucleotide
  Sense strand starting at position 2645 of SEQ ID NO: 917273
cuaccauguguuuauccau

SEQ ID NO: 1222417 - RNA, 19 nt, Artificial Sequence
  Description of Artificial Sequence: Synthetic oligonucleotide
  Antisense strand to SEQ ID NO: 1222416
auggauaaacacaugguag

SEQ ID NO: 1222418 - RNA, 19 nt, Artificial Sequence
  Description of Artificial Sequence: Synthetic oligonucleotide
  Sense strand starting at position 2697 of SEQ ID NO: 917273
acuggaaugccagggcuau

SEQ ID NO: 1222419 - RNA, 19 nt, Artificial Sequence
  Description of Artificial Sequence: Synthetic oligonucleotide
  Antisense strand to SEQ ID NO: 1222418
auagcccuggcauuccagu

SEQ ID NO: 1222420 - RNA, 19 nt, Artificial Sequence
  Description of Artificial Sequence: Synthetic oligonucleotide
  Sense strand starting at position 2698 of SEQ ID NO: 917273
cuggaaugccagggcuaua

SEQ ID NO: 1222421 - RNA, 19 nt, Artificial Sequence
  Description of Artificial Sequence: Synthetic oligonucleotide
  Antisense strand to SEQ ID NO: 1222420
uauagcccuggcauuccag

SEQ ID NO: 1222422 - RNA, 19 nt, Artificial Sequence
  Description of Artificial Sequence: Synthetic oligonucleotide
  Sense strand starting at position 2726 of SEQ ID NO: 917273
cuucuaucuguguacaauu

SEQ ID NO: 1222423 - RNA, 19 nt, Artificial Sequence
  Description of Artificial Sequence: Synthetic oligonucleotide
  Antisense strand to SEQ ID NO: 1222422
aauuguacacagauagaag

SEQ ID NO: 1222424 - RNA, 19 nt, Artificial Sequence
  Description of Artificial Sequence: Synthetic oligonucleotide
  Sense strand starting at position 2736 of SEQ ID NO: 917273
uguacaauuucgguaaccu

SEQ ID NO: 1222425 - RNA, 19 nt, Artificial Sequence
  Description of Artificial Sequence: Synthetic oligonucleotide
  Antisense strand to SEQ ID NO: 1222424
agguuaccgaaauuguaca

SEQ ID NO: 1222426 - RNA, 19 nt, Artificial Sequence
  Description of Artificial Sequence: Synthetic oligonucleotide
  Sense strand starting at position 2766 of SEQ ID NO: 917273
guuggauccguagauugac

SEQ ID NO: 1222427 - RNA, 19 nt, Artificial Sequence
  Description of Artificial Sequence: Synthetic oligonucleotide
  Antisense strand to SEQ ID NO: 1222426
gucaaucuacggauccaac

SEQ ID NO: 1222428 - RNA, 19 nt, Artificial Sequence
  Description of Artificial Sequence: Synthetic oligonucleotide
  Sense strand starting at position 2774 of SEQ ID NO: 917273
cguagauugacaugaugaa

SEQ ID NO: 1222429 - RNA, 19 nt, Artificial Sequence
  Description of Artificial Sequence: Synthetic oligonucleotide
  Antisense strand to SEQ ID NO: 1222428
uucaucaugucaaucuacg

SEQ ID NO: 1222430 - RNA, 19 nt, Artificial Sequence
  Description of Artificial Sequence: Synthetic oligonucleotide
  Sense strand starting at position 2787 of SEQ ID NO: 917273
gaugaaagcugucuuguaa

SEQ ID NO: 1222431 - RNA, 19 nt, Artificial Sequence
  Description of Artificial Sequence: Synthetic oligonucleotide
  Antisense strand to SEQ ID NO: 1222430
uuacaagacagcuuucauc

SEQ ID NO: 1222432 - RNA, 19 nt, Artificial Sequence
  Description of Artificial Sequence: Synthetic oligonucleotide
  Sense strand starting at position 3325 of SEQ ID NO: 917273
guacaugcucaguaaacug

SEQ ID NO: 1222433 - RNA, 19 nt, Artificial Sequence
  Description of Artificial Sequence: Synthetic oligonucleotide
  Antisense strand to SEQ ID NO: 1222432
caguuuacugagcauguac

SEQ ID NO: 1222434 - RNA, 19 nt, Artificial Sequence
  Description of Artificial Sequence: Synthetic oligonucleotide
  Sense strand starting at position 3359 of SEQ ID NO: 917273
uguucuguucuuccgcuua

SEQ ID NO: 1222435 - RNA, 19 nt, Artificial Sequence
  Description of Artificial Sequence: Synthetic oligonucleotide
  Antisense strand to SEQ ID NO: 1222434
uaagcggaagaacagaaca

SEQ ID NO: 1222436 - RNA, 19 nt, Artificial Sequence
  Description of Artificial Sequence: Synthetic oligonucleotide
  Sense strand starting at position 3382 of SEQ ID NO: 917273
aggaaacugaggugguuaa

SEQ ID NO: 1222437 - RNA, 19 nt, Artificial Sequence
  Description of Artificial Sequence: Synthetic oligonucleotide
  Antisense strand to SEQ ID NO: 1222436
uuaaccaccucaguuuccu

SEQ ID NO: 1222438 - RNA, 19 nt, Artificial Sequence
  Description of Artificial Sequence: Synthetic oligonucleotide
  Sense strand starting at position 3477 of SEQ ID NO: 917273
gugucaauuccugaaauca

SEQ ID NO: 1222439 - RNA, 19 nt, Artificial Sequence
  Description of Artificial Sequence: Synthetic oligonucleotide
  Antisense strand to SEQ ID NO: 1222438
ugauuucaggaauugacac

SEQ ID NO: 1222440 - RNA, 19 nt, Artificial Sequence
  Description of Artificial Sequence: Synthetic oligonucleotide
  Sense strand starting at position 3612 of SEQ ID NO: 917273
uauagagagucaguuaaau

SEQ ID NO: 1222441 - RNA, 19 nt, Artificial Sequence
  Description of Artificial Sequence: Synthetic oligonucleotide
  Antisense strand to SEQ ID NO: 1222440
auuuaacugacucucuaua

SEQ ID NO: 1222442 - RNA, 19 nt, Artificial Sequence
  Description of Artificial Sequence: Synthetic oligonucleotide
  Sense strand starting at position 3680 of SEQ ID NO: 917273
ugaacagauugcucugaaa

SEQ ID NO: 1222443 - RNA, 19 nt, Artificial Sequence
  Description of Artificial Sequence: Synthetic oligonucleotide
  Antisense strand to SEQ ID NO: 1222442
uuucagagcaaucuguuca

SEQ ID NO: 1222444 - RNA, 19 nt, Artificial Sequence
  Description of Artificial Sequence: Synthetic oligonucleotide
  Sense strand starting at position 3752 of SEQ ID NO: 917273
ggaauuguauacucccuca

SEQ ID NO: 1222445 - RNA, 19 nt, Artificial Sequence
  Description of Artificial Sequence: Synthetic oligonucleotide
  Antisense strand to SEQ ID NO: 1222444
ugagggaguauacaauucc

SEQ ID NO: 1222446 - RNA, 19 nt, Artificial Sequence
  Description of Artificial Sequence: Synthetic oligonucleotide
  Sense strand starting at position 3757 of SEQ ID NO: 917273
uguauacucccucaaaugu

SEQ ID NO: 1222447 - RNA, 19 nt, Artificial Sequence
  Description of Artificial Sequence: Synthetic oligonucleotide
  Antisense strand to SEQ ID NO: 1222446
acauuugagggaguauaca

SEQ ID NO: 1222448 - RNA, 19 nt, Artificial Sequence
  Description of Artificial Sequence: Synthetic oligonucleotide
  Sense strand starting at position 3767 of SEQ ID NO: 917273
cucaaaugucaaugcuaag

SEQ ID NO: 1222449 - RNA, 19 nt, Artificial Sequence
  Description of Artificial Sequence: Synthetic oligonucleotide
  Antisense strand to SEQ ID NO: 1222448
cuuagcauugacauuugag

SEQ ID NO: 1222450 - RNA, 19 nt, Artificial Sequence
  Description of Artificial Sequence: Synthetic oligonucleotide
  Sense strand starting at position 3787 of SEQ ID NO: 917273
cuggcuccuugguuagaaa

SEQ ID NO: 1222451 - RNA, 19 nt, Artificial Sequence
  Description of Artificial Sequence: Synthetic oligonucleotide
  Antisense strand to SEQ ID NO: 1222450
uuucuaaccaaggagccag

SEQ ID NO: 1222452 - RNA, 19 nt, Artificial Sequence
  Description of Artificial Sequence: Synthetic oligonucleotide
  Sense strand starting at position 3844 of SEQ ID NO: 917272
ccaguaucuguuuacugua

SEQ ID NO: 1222453 - RNA, 19 nt, Artificial Sequence
  Description of Artificial Sequence: Synthetic oligonucleotide
  Antisense strand to SEQ ID NO: 1222452
uacaguaaacagauacugg

SEQ ID NO: 1222454 - RNA, 19 nt, Artificial Sequence
  Description of Artificial Sequence: Synthetic oligonucleotide
  Sense strand starting at position 3977 of SEQ ID NO: 917274
gugauaguacaaggacaua

SEQ ID NO: 1222455 - RNA, 19 nt, Artificial Sequence
  Description of Artificial Sequence: Synthetic oligonucleotide
  Antisense strand to SEQ ID NO: 1222454
uauguccuuguacuaucac

SEQ ID NO: 1222456 - RNA, 19 nt, Artificial Sequence
  Description of Artificial Sequence: Synthetic oligonucleotide
  Sense strand starting at position 62 of SEQ ID NO: 917274
ucuaaaugggagcaguuau

SEQ ID NO: 1222457 - RNA, 19 nt, Artificial Sequence
  Description of Artificial Sequence: Synthetic oligonucleotide
  Antisense strand to SEQ ID NO: 1222456
auaacugcucccauuuaga

SEQ ID NO: 1222458 - RNA, 19 nt, Artificial Sequence
  Description of Artificial Sequence: Synthetic oligonucleotide
  Sense strand starting at position 124 of SEQ ID NO: 917274
augugauagcauuaagacu

SEQ ID NO: 1222459 - RNA, 19 nt, Artificial Sequence
  Description of Artificial Sequence: Synthetic oligonucleotide
  Antisense strand to SEQ ID NO: 1222458
agucuuaaugcuaucacau

SEQ ID NO: 1222460 - RNA, 19 nt, Artificial Sequence
  Description of Artificial Sequence: Synthetic oligonucleotide
  Sense strand starting at position 143 of SEQ ID NO: 917274
acauauauuugagacuguu

SEQ ID NO: 1222461 - RNA, 19 nt, Artificial Sequence
  Description of Artificial Sequence: Synthetic oligonucleotide
  Antisense strand to SEQ ID NO: 1222460
aacagucucaaauauaugu

SEQ ID NO: 1222462 - RNA, 19 nt, Artificial Sequence
  Description of Artificial Sequence: Synthetic oligonucleotide
  Sense strand starting at position 155 of SEQ ID NO: 917274
gacuguugugacuggauac

SEQ ID NO: 1222463 - RNA, 19 nt, Artificial Sequence
  Description of Artificial Sequence: Synthetic oligonucleotide
  Antisense strand to SEQ ID NO: 1222462
guauccagucacaacaguc

SEQ ID NO: 1222464 - RNA, 19 nt, Artificial Sequence
  Description of Artificial Sequence: Synthetic oligonucleotide
  Sense strand starting at position 156 of SEQ ID NO: 917274
acuguugugacuggauacu

SEQ ID NO: 1222465 - RNA, 19 nt, Artificial Sequence
  Description of Artificial Sequence: Synthetic oligonucleotide
  Antisense strand to SEQ ID NO: 1222464
aguauccagucacaacagu

SEQ ID NO: 1222466 - RNA, 19 nt, Artificial Sequence
  Description of Artificial Sequence: Synthetic oligonucleotide
  Sense strand starting at position 166 of SEQ ID NO: 917274
cuggauacuugacucucaa

SEQ ID NO: 1222467 - RNA, 19 nt, Artificial Sequence
  Description of Artificial Sequence: Synthetic oligonucleotide
  Antisense strand to SEQ ID NO: 1222466
uugagagucaaguauccag

SEQ ID NO: 1222468 - RNA, 19 nt, Artificial Sequence
  Description of Artificial Sequence: Synthetic oligonucleotide
  Sense strand starting at position 193 of SEQ ID NO: 917274
agguacaacgaauguuaga

SEQ ID NO: 1222469 - RNA, 19 nt, Artificial Sequence
  Description of Artificial Sequence: Synthetic oligonucleotide
  Antisense strand to SEQ ID NO: 1222468
ucuaacauucguuguaccu

SEQ ID NO: 1222470 - RNA, 19 nt, Artificial Sequence
  Description of Artificial Sequence: Synthetic oligonucleotide
  Sense strand starting at position 281 of SEQ ID NO: 917274
agaccaagauuguuugcaa

SEQ ID NO: 1222471 - RNA, 19 nt, Artificial Sequence
  Description of Artificial Sequence: Synthetic oligonucleotide
  Antisense strand to SEQ ID NO: 1222470
uugcaaacaaucuuggucu

SEQ ID NO: 1222472 - RNA, 19 nt, Artificial Sequence
  Description of Artificial Sequence: Synthetic oligonucleotide
  Sense strand starting at position 282 of SEQ ID NO: 917274
gaccaagauuguuugcaau

SEQ ID NO: 1222473 - RNA, 19 nt, Artificial Sequence
  Description of Artificial Sequence: Synthetic oligonucleotide
  Antisense strand to SEQ ID NO: 1222472
auugcaaacaaucuugguc

SEQ ID NO: 1222474 - RNA, 19 nt, Artificial Sequence
  Description of Artificial Sequence: Synthetic oligonucleotide
  Sense strand starting at position 427 of SEQ ID NO: 917274
ucagaacauuuccagaaag

SEQ ID NO: 1222475 - RNA, 19 nt, Artificial Sequence
  Description of Artificial Sequence: Synthetic oligonucleotide
  Antisense strand to SEQ ID NO: 1222474
cuuucuggaaauguucuga

SEQ ID NO: 1222476 - RNA, 19 nt, Artificial Sequence
  Description of Artificial Sequence: Synthetic oligonucleotide
  Sense strand starting at position 504 of SEQ ID NO: 917274
ugaugucuagauuaccauu

SEQ ID NO: 1222477 - RNA, 19 nt, Artificial Sequence
  Description of Artificial Sequence: Synthetic oligonucleotide
  Antisense strand to SEQ ID NO: 1222476
aaugguaaucuagacauca

SEQ ID NO: 1222478 - RNA, 19 nt, Artificial Sequence
  Description of Artificial Sequence: Synthetic oligonucleotide
  Sense strand starting at position 506 of SEQ ID NO: 917274
augucuagauuaccauuau

SEQ ID NO: 1222479 - RNA, 19 nt, Artificial Sequence
  Description of Artificial Sequence: Synthetic oligonucleotide
  Antisense strand to SEQ ID NO: 1222478
auaaugguaaucuagacau

SEQ ID NO: 1222480 - RNA, 19 nt, Artificial Sequence
  Description of Artificial Sequence: Synthetic oligonucleotide
  Sense strand starting at position 650 of SEQ ID NO: 917274
uacugauaauaggucuuga

SEQ ID NO: 1222481 - RNA, 19 nt, Artificial Sequence
  Description of Artificial Sequence: Synthetic oligonucleotide
  Antisense strand to SEQ ID NO: 1222480
ucaagaccuauuaucagua

SEQ ID NO: 1222482 - RNA, 19 nt, Artificial Sequence
  Description of Artificial Sequence: Synthetic oligonucleotide
  Sense strand starting at position 803 of SEQ ID NO: 917274
aaguaaauaugaucguaac

SEQ ID NO: 1222483 - RNA, 19 nt, Artificial Sequence
  Description of Artificial Sequence: Synthetic oligonucleotide
  Antisense strand to SEQ ID NO: 1222482
guuacgaucauauuuacuu

SEQ ID NO: 1222484 - RNA, 19 nt, Artificial Sequence
  Description of Artificial Sequence: Synthetic oligonucleotide
  Sense strand starting at position 809 of SEQ ID NO: 917274
auaugaucguaaccuacua

SEQ ID NO: 1222485 - RNA, 19 nt, Artificial Sequence
  Description of Artificial Sequence: Synthetic oligonucleotide
  Antisense strand to SEQ ID NO: 1222484
uaguagguuacgaucauau

SEQ ID NO: 1222486 - RNA, 19 nt, Artificial Sequence
  Description of Artificial Sequence: Synthetic oligonucleotide
  Sense strand starting at position 1162 of SEQ ID NO: 917274
aauuaagacgcuuacaguu

SEQ ID NO: 1222487 - RNA, 19 nt, Artificial Sequence
  Description of Artificial Sequence: Synthetic oligonucleotide
  Antisense strand to SEQ ID NO: 1222486
aacuguaagcgucuuaauu

SEQ ID NO: 1222488 - RNA, 19 nt, Artificial Sequence
  Description of Artificial Sequence: Synthetic oligonucleotide
  Sense strand starting at position 1396 of SEQ ID NO: 917274
ccgggaauucggcacaauu

SEQ ID NO: 1222489 - RNA, 19 nt, Artificial Sequence
  Description of Artificial Sequence: Synthetic oligonucleotide
  Antisense strand to SEQ ID NO: 1222488
aauugugccgaauucccgg

SEQ ID NO: 1222490 - RNA, 19 nt, Artificial Sequence
  Description of Artificial Sequence: Synthetic oligonucleotide
  Sense strand starting at position 2197 of SEQ ID NO: 917274
gcgaaaucgagugaacuuu

SEQ ID NO: 1222491 - RNA, 19 nt, Artificial Sequence
  Description of Artificial Sequence: Synthetic oligonucleotide
  Antisense strand to SEQ ID NO: 1222490
aaaguucacucgauuucgc

SEQ ID NO: 1222492 - RNA, 19 nt, Artificial Sequence
  Description of Artificial Sequence: Synthetic oligonucleotide
  Sense strand starting at position 2205 of SEQ ID NO: 917274
gagugaacuuuccugaguu

SEQ ID NO: 1222493 - RNA, 19 nt, Artificial Sequence
  Description of Artificial Sequence: Synthetic oligonucleotide
  Antisense strand to SEQ ID NO: 1222492
aacucaggaaaguucacuc

SEQ ID NO: 1222494 - RNA, 19 nt, Artificial Sequence
  Description of Artificial Sequence: Synthetic oligonucleotide
  Sense strand starting at position 2294 of SEQ ID NO: 917274
gccuaaaggccauggaauu

SEQ ID NO: 1222495 - RNA, 19 nt, Artificial Sequence
  Description of Artificial Sequence: Synthetic oligonucleotide
  Antisense strand to SEQ ID NO: 1222494
aauuccauggccuuuaggc

SEQ ID NO: 1222496 - RNA, 19 nt, Artificial Sequence
  Description of Artificial Sequence: Synthetic oligonucleotide
  Sense strand starting at position 2384 of SEQ ID NO: 917274
cucucuguccuugagaucu

SEQ ID NO: 1222497 - RNA, 19 nt, Artificial Sequence
  Description of Artificial Sequence: Synthetic oligonucleotide
  Antisense strand to SEQ ID NO: 1222496
agaucucaaggacagagag

SEQ ID NO: 1222498 - RNA, 19 nt, Artificial Sequence
  Description of Artificial Sequence: Synthetic oligonucleotide
  Sense strand starting at position 2496 of SEQ ID NO: 917274
ugccuagucccagaccaau

SEQ ID NO: 1222499 - RNA, 19 nt, Artificial Sequence
  Description of Artificial Sequence: Synthetic oligonucleotide
  Antisense strand to SEQ ID NO: 1222498
auuggucugggacuaggca

SEQ ID NO: 1222500 - RNA, 19 nt, Artificial Sequence
  Description of Artificial Sequence: Synthetic oligonucleotide
  Sense strand starting at position 2518 of SEQ ID NO: 917274
gaggaagcucuuggcagau

SEQ ID NO: 1222501 - RNA, 19 nt, Artificial Sequence
  Description of Artificial Sequence: Synthetic oligonucleotide
  Antisense strand to SEQ ID NO: 1222500
aucugccaagagcuuccuc

SEQ ID NO: 1222502 - RNA, 19 nt, Artificial Sequence
  Description of Artificial Sequence: Synthetic oligonucleotide
  Sense strand starting at position 2628 of SEQ ID NO: 917274
gacucaaaguacucgauga

SEQ ID NO: 1222503 - RNA, 19 nt, Artificial Sequence
  Description of Artificial Sequence: Synthetic oligonucleotide
  Antisense strand to SEQ ID NO: 1222502
ucaucgaguacuuugaguc

SEQ ID NO: 1222504 - RNA, 19 nt, Artificial Sequence
  Description of Artificial Sequence: Synthetic oligonucleotide
  Sense strand starting at position 2633 of SEQ ID NO: 917274
aaaguacucgaugacgagu

SEQ ID NO: 1222505 - RNA, 19 nt, Artificial Sequence
  Description of Artificial Sequence: Synthetic oligonucleotide
  Antisense strand to SEQ ID NO: 1222504
acucgucaucgaguacuuu

SEQ ID NO: 1222506 - RNA, 19 nt, Artificial Sequence
  Description of Artificial Sequence: Synthetic oligonucleotide
  Sense strand starting at position 2728 of SEQ ID NO: 917274
caacuaaugcgagguagaa

SEQ ID NO: 1222507 - RNA, 19 nt, Artificial Sequence
  Description of Artificial Sequence: Synthetic oligonucleotide
  Antisense strand to SEQ ID NO: 1222506
uucuaccucgcauuaguug

SEQ ID NO: 1222508 - RNA, 19 nt, Artificial Sequence
  Description of Artificial Sequence: Synthetic oligonucleotide
  Sense strand starting at position 2730 of SEQ ID NO: 917274
acuaaugcgagguagaaua

SEQ ID NO: 1222509 - RNA, 19 nt, Artificial Sequence
  Description of Artificial Sequence: Synthetic oligonucleotide
  Antisense strand to SEQ ID NO: 1222508
uauucuaccucgcauuagu

SEQ ID NO: 1222510 - RNA, 19 nt, Artificial Sequence
  Description of Artificial Sequence: Synthetic oligonucleotide
  Sense strand starting at position 2758 of SEQ ID NO: 917274
gucguuacugcguucauua

SEQ ID NO: 1222511 - RNA, 19 nt, Artificial Sequence
  Description of Artificial Sequence: Synthetic oligonucleotide
  Antisense strand to SEQ ID NO: 1222510
uaaugaacgcaguaacgac

SEQ ID NO: 1222512 - RNA, 19 nt, Artificial Sequence
  Description of Artificial Sequence: Synthetic oligonucleotide
  Sense strand starting at position 2942 of SEQ ID NO: 917274
gggauuuggcccugcucaa

SEQ ID NO: 1222513 - RNA, 19 nt, Artificial Sequence
  Description of Artificial Sequence: Synthetic oligonucleotide
  Antisense strand to SEQ ID NO: 1222512
uugagcagggccaaauccc

SEQ ID NO: 1222514 - RNA, 19 nt, Artificial Sequence
  Description of Artificial Sequence: Synthetic oligonucleotide
  Sense strand starting at position 2994 of SEQ ID NO: 917274
ucauaagucccagggaaac

SEQ ID NO: 1222515 - RNA, 19 nt, Artificial Sequence
  Description of Artificial Sequence: Synthetic oligonucleotide
  Antisense strand to SEQ ID NO: 1222514
guuucccugggacuuauga

SEQ ID NO: 1222516 - RNA, 19 nt, Artificial Sequence
  Description of Artificial Sequence: Synthetic oligonucleotide
  Sense strand starting at position 3053 of SEQ ID NO: 917274
agcauccugggcugagaua

SEQ ID NO: 1222517 - RNA, 19 nt, Artificial Sequence
  Description of Artificial Sequence: Synthetic oligonucleotide
  Antisense strand to SEQ ID NO: 1222516
uaucucagcccaggaugcu

SEQ ID NO: 1222518 - RNA, 19 nt, Artificial Sequence
  Description of Artificial Sequence: Synthetic oligonucleotide
  Sense strand starting at position 3248 of SEQ ID NO: 917274
cucugugagguugacucua

SEQ ID NO: 1222519 - RNA, 19 nt, Artificial Sequence
  Description of Artificial Sequence: Synthetic oligonucleotide
  Antisense strand to SEQ ID NO: 1222518
uagagucaaccucacagag

SEQ ID NO: 1222520 - RNA, 19 nt, Artificial Sequence
  Description of Artificial Sequence: Synthetic oligonucleotide
  Sense strand starting at position 3337 of SEQ ID NO: 917274
uuuaauagguucccugaga

SEQ ID NO: 1222521 - RNA, 19 nt, Artificial Sequence
  Description of Artificial Sequence: Synthetic oligonucleotide
  Antisense strand to SEQ ID NO: 1222520
ucucagggaaccuauuaaa

SEQ ID NO: 1222522 - RNA, 19 nt, Artificial Sequence
  Description of Artificial Sequence: Synthetic oligonucleotide
  Sense strand starting at position 3338 of SEQ ID NO: 917274
uuaauagguucccugagac

SEQ ID NO: 1222523 - RNA, 19 nt, Artificial Sequence
  Description of Artificial Sequence: Synthetic oligonucleotide
  Antisense strand to SEQ ID NO: 1222522
gucucagggaaccuauuaa

SEQ ID NO: 1222524 - RNA, 19 nt, Artificial Sequence
  Description of Artificial Sequence: Synthetic oligonucleotide
  Sense strand starting at position 3387 of SEQ ID NO: 917274
gcaagaucuggaggauuau

SEQ ID NO: 1222525 - RNA, 19 nt, Artificial Sequence
  Description of Artificial Sequence: Synthetic oligonucleotide
  Antisense strand to SEQ ID NO: 1222524
auaauccuccagaucuugc

SEQ ID NO: 1222526 - RNA, 19 nt, Artificial Sequence
  Description of Artificial Sequence: Synthetic oligonucleotide
  Sense strand starting at position 3495 of SEQ ID NO: 917274
agaagaaucuggcugucau

SEQ ID NO: 1222527 - RNA, 19 nt, Artificial Sequence
  Description of Artificial Sequence: Synthetic oligonucleotide
  Antisense strand to SEQ ID NO: 1222526
augacagccagauucuucu

SEQ ID NO: 1222528 - RNA, 19 nt, Artificial Sequence
  Description of Artificial Sequence: Synthetic oligonucleotide
  Sense strand starting at position 3496 of SEQ ID NO: 917274
gaagaaucuggcugucauu

SEQ ID NO: 1222529 - RNA, 19 nt, Artificial Sequence
  Description of Artificial Sequence: Synthetic oligonucleotide
  Antisense strand to SEQ ID NO: 1222528
aaugacagccagauucuuc

SEQ ID NO: 1222530 - RNA, 19 nt, Artificial Sequence
  Description of Artificial Sequence: Synthetic oligonucleotide
  Sense strand starting at position 3737 of SEQ ID NO: 917274
gcaaccggucugggaauaa

SEQ ID NO: 1222531 - RNA, 19 nt, Artificial Sequence
  Description of Artificial Sequence: Synthetic oligonucleotide
  Antisense strand to SEQ ID NO: 1222530
uuauucccagaccgguugc

SEQ ID NO: 1222532 - RNA, 19 nt, Artificial Sequence
  Description of Artificial Sequence: Synthetic oligonucleotide
  Sense strand starting at position 3747 of SEQ ID NO: 917274
ugggaauaaucuccugguu

SEQ ID NO: 1222533 - RNA, 19 nt, Artificial Sequence
  Description of Artificial Sequence: Synthetic oligonucleotide
  Antisense strand to SEQ ID NO: 1222532
aaccaggagauuauuccca

SEQ ID NO: 1222534 - RNA, 19 nt, Artificial Sequence
  Description of Artificial Sequence: Synthetic oligonucleotide
  Sense strand starting at position 3923 of SEQ ID NO: 917275
gagaguccaugacucaaca

SEQ ID NO: 1222535 - RNA, 19 nt, Artificial Sequence
  Description of Artificial Sequence: Synthetic oligonucleotide
  Antisense strand to SEQ ID NO: 1222534
uguugagucauggacucuc

SEQ ID NO: 1222536 - RNA, 19 nt, Artificial Sequence
  Description of Artificial Sequence: Synthetic oligonucleotide
  Sense strand starting at position 6 of SEQ ID NO: 917275
uucuacuaccuguaauguu

SEQ ID NO: 1222537 - RNA, 19 nt, Artificial Sequence
  Description of Artificial Sequence: Synthetic oligonucleotide
  Antisense strand to SEQ ID NO: 1222536
aacauuacagguaguagaa

SEQ ID NO: 1222538 - RNA, 19 nt, Artificial Sequence
  Description of Artificial Sequence: Synthetic oligonucleotide
  Sense strand starting at position 158 of SEQ ID NO: 917275
ggugccaaguacuuuaaga

SEQ ID NO: 1222539 - RNA, 19 nt, Artificial Sequence
  Description of Artificial Sequence: Synthetic oligonucleotide
  Antisense strand to SEQ ID NO: 1222538
ucuuaaaguacuuggcacc

SEQ ID NO: 1222540 - RNA, 19 nt, Artificial Sequence
  Description of Artificial Sequence: Synthetic oligonucleotide
  Sense strand starting at position 197 of SEQ ID NO: 917275
gcaaguauucugggaucca

SEQ ID NO: 1222541 - RNA, 19 nt, Artificial Sequence
  Description of Artificial Sequence: Synthetic oligonucleotide
  Antisense strand to SEQ ID NO: 1222540
uggaucccagaauacuugc

SEQ ID NO: 1222542 - RNA, 19 nt, Artificial Sequence
  Description of Artificial Sequence: Synthetic oligonucleotide
  Sense strand starting at position 288 of SEQ ID NO: 917275
gccauccauuuguccuaga

SEQ ID NO: 1222543 - RNA, 19 nt, Artificial Sequence
  Description of Artificial Sequence: Synthetic oligonucleotide
  Antisense strand to SEQ ID NO: 1222542
ucuaggacaaauggauggc

SEQ ID NO: 1222544 - RNA, 19 nt, Artificial Sequence
  Description of Artificial Sequence: Synthetic oligonucleotide
  Sense strand starting at position 291 of SEQ ID NO: 917275
auccauuuguccuagaaug

SEQ ID NO: 1222545 - RNA, 19 nt, Artificial Sequence
  Description of Artificial Sequence: Synthetic oligonucleotide
  Antisense strand to SEQ ID NO: 1222544
cauucuaggacaaauggau

SEQ ID NO: 1222546 - RNA, 19 nt, Artificial Sequence
  Description of Artificial Sequence: Synthetic oligonucleotide
  Sense strand starting at position 408 of SEQ ID NO: 917275
gagucaggaucuuucuacu

SEQ ID NO: 1222547 - RNA, 19 nt, Artificial Sequence
  Description of Artificial Sequence: Synthetic oligonucleotide
  Antisense strand to SEQ ID NO: 1222546
aguagaaagauccugacuc

SEQ ID NO: 1222548 - RNA, 19 nt, Artificial Sequence
  Description of Artificial Sequence: Synthetic oligonucleotide
  Sense strand starting at position 421 of SEQ ID NO: 917275
ucuacuaaaugacagagaa

SEQ ID NO: 1222549 - RNA, 19 nt, Artificial Sequence
  Description of Artificial Sequence: Synthetic oligonucleotide
  Antisense strand to SEQ ID NO: 1222548
uucucugucauuuaguaga

SEQ ID NO: 1222550 - RNA, 19 nt, Artificial Sequence
  Description of Artificial Sequence: Synthetic oligonucleotide
  Sense strand starting at position 435 of SEQ ID NO: 917275
gagaauggucagugcuuga

SEQ ID NO: 1222551 - RNA, 19 nt, Artificial Sequence
  Description of Artificial Sequence: Synthetic oligonucleotide
  Antisense strand to SEQ ID NO: 1222550
ucaagcacugaccauucuc

SEQ ID NO: 1222552 - RNA, 19 nt, Artificial Sequence
  Description of Artificial Sequence: Synthetic oligonucleotide
  Sense strand starting at position 438 of SEQ ID NO: 917275
aauggucagugcuugagau

SEQ ID NO: 1222553 - RNA, 19 nt, Artificial Sequence
  Description of Artificial Sequence: Synthetic oligonucleotide
  Antisense strand to SEQ ID NO: 1222552
aucucaagcacugaccauu

SEQ ID NO: 1222554 - RNA, 19 nt, Artificial Sequence
  Description of Artificial Sequence: Synthetic oligonucleotide
  Sense strand starting at position 440 of SEQ ID NO: 917275
uggucagugcuugagauca

SEQ ID NO: 1222555 - RNA, 19 nt, Artificial Sequence
  Description of Artificial Sequence: Synthetic oligonucleotide
  Antisense strand to SEQ ID NO: 1222554
ugaucucaagcacugacca

SEQ ID NO: 1222556 - RNA, 19 nt, Artificial Sequence
  Description of Artificial Sequence: Synthetic oligonucleotide
  Sense strand starting at position 1070 of SEQ ID NO: 917275
uuucuaggaugguuaucua

SEQ ID NO: 1222557 - RNA, 19 nt, Artificial Sequence
  Description of Artificial Sequence: Synthetic oligonucleotide
  Antisense strand to SEQ ID NO: 1222556
uagauaaccauccuagaaa

SEQ ID NO: 1222558 - RNA, 19 nt, Artificial Sequence
  Description of Artificial Sequence: Synthetic oligonucleotide
  Sense strand starting at position 1074 of SEQ ID NO: 917275
uaggaugguuaucuaccua

SEQ ID NO: 1222559 - RNA, 19 nt, Artificial Sequence
  Description of Artificial Sequence: Synthetic oligonucleotide
  Antisense strand to SEQ ID NO: 1222558
uagguagauaaccauccua

SEQ ID NO: 1222560 - RNA, 19 nt, Artificial Sequence
  Description of Artificial Sequence: Synthetic oligonucleotide
  Sense strand starting at position 1102 of SEQ ID NO: 917275
uuuaaagggucgucaagga

SEQ ID NO: 1222561 - RNA, 19 nt, Artificial Sequence
  Description of Artificial Sequence: Synthetic oligonucleotide
  Antisense strand to SEQ ID NO: 1222560
uccuugacgacccuuuaaa

SEQ ID NO: 1222562 - RNA, 19 nt, Artificial Sequence
  Description of Artificial Sequence: Synthetic oligonucleotide
  Sense strand starting at position 1116 of SEQ ID NO: 917275
aaggaagguuucguaaauc

SEQ ID NO: 1222563 - RNA, 19 nt, Artificial Sequence
  Description of Artificial Sequence: Synthetic oligonucleotide
  Antisense strand to SEQ ID NO: 1222562
gauuuacgaaaccuuccuu

SEQ ID NO: 1222564 - RNA, 19 nt, Artificial Sequence
  Description of Artificial Sequence: Synthetic oligonucleotide
  Sense strand starting at position 1127 of SEQ ID NO: 917275
cguaaaucugugucagcuu

SEQ ID NO: 1222565 - RNA, 19 nt, Artificial Sequence
  Description of Artificial Sequence: Synthetic oligonucleotide
  Antisense strand to SEQ ID NO: 1222564
aagcugacacagauuuacg

SEQ ID NO: 1222566 - RNA, 19 nt, Artificial Sequence
  Description of Artificial Sequence: Synthetic oligonucleotide
  Sense strand starting at position 1180 of SEQ ID NO: 917275
acucaaguguacuccugaa

SEQ ID NO: 1222567 - RNA, 19 nt, Artificial Sequence
  Description of Artificial Sequence: Synthetic oligonucleotide
  Antisense strand to SEQ ID NO: 1222566
uucaggaguacacuugagu

SEQ ID NO: 1222568 - RNA, 19 nt, Artificial Sequence
  Description of Artificial Sequence: Synthetic oligonucleotide
  Sense strand starting at position 1492 of SEQ ID NO: 917275
auauaaucgcaaugacauc

SEQ ID NO: 1222569 - RNA, 19 nt, Artificial Sequence
  Description of Artificial Sequence: Synthetic oligonucleotide
  Antisense strand to SEQ ID NO: 1222568
gaugucauugcgauuauau

SEQ ID NO: 1222570 - RNA, 19 nt, Artificial Sequence
  Description of Artificial Sequence: Synthetic oligonucleotide
  Sense strand starting at position 1543 of SEQ ID NO: 917275
auuacugcccuuugaguaa

SEQ ID NO: 1222571 - RNA, 19 nt, Artificial Sequence
  Description of Artificial Sequence: Synthetic oligonucleotide
  Antisense strand to SEQ ID NO: 1222570
uuacucaaagggcaguaau

SEQ ID NO: 1222572 - RNA, 19 nt, Artificial Sequence
  Description of Artificial Sequence: Synthetic oligonucleotide
  Sense strand starting at position 1546 of SEQ ID NO: 917275
acugcccuuugaguaauua

SEQ ID NO: 1222573 - RNA, 19 nt, Artificial Sequence
  Description of Artificial Sequence: Synthetic oligonucleotide
  Antisense strand to SEQ ID NO: 1222572
uaauuacucaaagggcagu

SEQ ID NO: 1222574 - RNA, 19 nt, Artificial Sequence
  Description of Artificial Sequence: Synthetic oligonucleotide
  Sense strand starting at position 1562 of SEQ ID NO: 917275
uuaccaauugauggguuua

SEQ ID NO: 1222575 - RNA, 19 nt, Artificial Sequence
  Description of Artificial Sequence: Synthetic oligonucleotide
  Antisense strand to SEQ ID NO: 1222574
uaaacccaucaauugguaa

SEQ ID NO: 1222576 - RNA, 19 nt, Artificial Sequence
  Description of Artificial Sequence: Synthetic oligonucleotide
  Sense strand starting at position 1564 of SEQ ID NO: 917275
accaauugauggguuuaau

SEQ ID NO: 1222577 - RNA, 19 nt, Artificial Sequence
  Description of Artificial Sequence: Synthetic oligonucleotide
  Antisense strand to SEQ ID NO: 1222576
auuaaacccaucaauuggu

SEQ ID NO: 1222578 - RNA, 19 nt, Artificial Sequence
  Description of Artificial Sequence: Synthetic oligonucleotide
  Sense strand starting at position 1573 of SEQ ID NO: 917275
uggguuuaauaugcaaaca

SEQ ID NO: 1222579 - RNA, 19 nt, Artificial Sequence
  Description of Artificial Sequence: Synthetic oligonucleotide
  Antisense strand to SEQ ID NO: 1222578
uguuugcauauuaaaccca

SEQ ID NO: 1222580 - RNA, 19 nt, Artificial Sequence
  Description of Artificial Sequence: Synthetic oligonucleotide
  Sense strand starting at position 1584 of SEQ ID NO: 917275
ugcaaacaccucugagcua

SEQ ID NO: 1222581 - RNA, 19 nt, Artificial Sequence
  Description of Artificial Sequence: Synthetic oligonucleotide
  Antisense strand to SEQ ID NO: 1222580
uagcucagagguguuugca

SEQ ID NO: 1222582 - RNA, 19 nt, Artificial Sequence
  Description of Artificial Sequence: Synthetic oligonucleotide
  Sense strand starting at position 1682 of SEQ ID NO: 917275
ucucacauccaauguguga

SEQ ID NO: 1222583 - RNA, 19 nt, Artificial Sequence
  Description of Artificial Sequence: Synthetic oligonucleotide
  Antisense strand to SEQ ID NO: 1222582
ucacacauuggaugugaga

SEQ ID NO: 1222584 - RNA, 19 nt, Artificial Sequence
  Description of Artificial Sequence: Synthetic oligonucleotide
  Sense strand starting at position 1686 of SEQ ID NO: 917275
acauccaaugugugacaua

SEQ ID NO: 1222585 - RNA, 19 nt, Artificial Sequence
  Description of Artificial Sequence: Synthetic oligonucleotide
  Antisense strand to SEQ ID NO: 1222584
uaugucacacauuggaugu

SEQ ID NO: 1222586 - RNA, 19 nt, Artificial Sequence
  Description of Artificial Sequence: Synthetic oligonucleotide
  Sense strand starting at position 1695 of SEQ ID NO: 917275
gugugacauacauacgguu

SEQ ID NO: 1222587 - RNA, 19 nt, Artificial Sequence
  Description of Artificial Sequence: Synthetic oligonucleotide
  Antisense strand to SEQ ID NO: 1222586
aaccguauguaugucacac

SEQ ID NO: 1222588 - RNA, 19 nt, Artificial Sequence
  Description of Artificial Sequence: Synthetic oligonucleotide
  Sense strand starting at position 2068 of SEQ ID NO: 917275
cgaggagucgcugaacuac

SEQ ID NO: 1222589 - RNA, 19 nt, Artificial Sequence
  Description of Artificial Sequence: Synthetic oligonucleotide
  Antisense strand to SEQ ID NO: 1222588
guaguucagcgacuccucg

SEQ ID NO: 1222590 - RNA, 19 nt, Artificial Sequence
  Description of Artificial Sequence: Synthetic oligonucleotide
  Sense strand starting at position 2657 of SEQ ID NO: 917275
ugcugcuuucggaggugau

SEQ ID NO: 1222591 - RNA, 19 nt, Artificial Sequence
  Description of Artificial Sequence: Synthetic oligonucleotide
  Antisense strand to SEQ ID NO: 1222590
aucaccuccgaaagcagca

SEQ ID NO: 1222592 - RNA, 19 nt, Artificial Sequence
  Description of Artificial Sequence: Synthetic oligonucleotide
  Sense strand starting at position 2890 of SEQ ID NO: 917275
gcauauggccuuuaggauu

SEQ ID NO: 1222593 - RNA, 19 nt, Artificial Sequence
  Description of Artificial Sequence: Synthetic oligonucleotide
  Antisense strand to SEQ ID NO: 1222592
aauccuaaaggccauaugc

SEQ ID NO: 1222594 - RNA, 19 nt, Artificial Sequence
  Description of Artificial Sequence: Synthetic oligonucleotide
  Sense strand starting at position 2939 of SEQ ID NO: 917275
auugcuuucgacugaauuu

SEQ ID NO: 1222595 - RNA, 19 nt, Artificial Sequence
  Description of Artificial Sequence: Synthetic oligonucleotide
  Antisense strand to SEQ ID NO: 1222594
aaauucagucgaaagcaau

SEQ ID NO: 1222596 - RNA, 19 nt, Artificial Sequence
  Description of Artificial Sequence: Synthetic oligonucleotide
  Sense strand starting at position 2946 of SEQ ID NO: 917275
ucgacugaauuuggauuua

SEQ ID NO: 1222597 - RNA, 19 nt, Artificial Sequence
  Description of Artificial Sequence: Synthetic oligonucleotide
  Antisense strand to SEQ ID NO: 1222596
uaaauccaaauucagucga

SEQ ID NO: 1222598 - RNA, 19 nt, Artificial Sequence
  Description of Artificial Sequence: Synthetic oligonucleotide
  Sense strand starting at position 2983 of SEQ ID NO: 917275
guuuguggacucuaggaua

SEQ ID NO: 1222599 - RNA, 19 nt, Artificial Sequence
  Description of Artificial Sequence: Synthetic oligonucleotide
  Antisense strand to SEQ ID NO: 1222598
uauccuagaguccacaaac

SEQ ID NO: 1222600 - RNA, 19 nt, Artificial Sequence
  Description of Artificial Sequence: Synthetic oligonucleotide
  Sense strand starting at position 3315 of SEQ ID NO: 917275
cuaagaguuucgguuacag

SEQ ID NO: 1222601 - RNA, 19 nt, Artificial Sequence
  Description of Artificial Sequence: Synthetic oligonucleotide
  Antisense strand to SEQ ID NO: 1222600
cuguaaccgaaacucuuag

SEQ ID NO: 1222602 - RNA, 19 nt, Artificial Sequence
  Description of Artificial Sequence: Synthetic oligonucleotide
  Sense strand starting at position 3317 of SEQ ID NO: 917275
aagaguuucgguuacagaa

SEQ ID NO: 1222603 - RNA, 19 nt, Artificial Sequence
  Description of Artificial Sequence: Synthetic oligonucleotide
  Antisense strand to SEQ ID NO: 1222602
uucuguaaccgaaacucuu

SEQ ID NO: 1222604 - RNA, 19 nt, Artificial Sequence
  Description of Artificial Sequence: Synthetic oligonucleotide
  Sense strand starting at position 3440 of SEQ ID NO: 917275
uuauuagagcuauagacuc

SEQ ID NO: 1222605 - RNA, 19 nt, Artificial Sequence
  Description of Artificial Sequence: Synthetic oligonucleotide
  Antisense strand to SEQ ID NO: 1222604
gagucuauagcucuaauaa

SEQ ID NO: 1222606 - RNA, 19 nt, Artificial Sequence
  Description of Artificial Sequence: Synthetic oligonucleotide
  Sense strand starting at position 3472 of SEQ ID NO: 917275
agagauauucuaggcccaa

SEQ ID NO: 1222607 - RNA, 19 nt, Artificial Sequence
  Description of Artificial Sequence: Synthetic oligonucleotide
  Antisense strand to SEQ ID NO: 1222606
uugggccuagaauaucucu

SEQ ID NO: 1222608 - RNA, 19 nt, Artificial Sequence
  Description of Artificial Sequence: Synthetic oligonucleotide
  Sense strand starting at position 3552 of SEQ ID NO: 917275
gggagugaauucgugaccu

SEQ ID NO: 1222609 - RNA, 19 nt, Artificial Sequence
  Description of Artificial Sequence: Synthetic oligonucleotide
  Antisense strand to SEQ ID NO: 1222608
aggucacgaauucacuccc

SEQ ID NO: 1222610 - RNA, 19 nt, Artificial Sequence
  Description of Artificial Sequence: Synthetic oligonucleotide
  Sense strand starting at position 3554 of SEQ ID NO: 917275
gagugaauucgugaccuug

SEQ ID NO: 1222611 - RNA, 19 nt, Artificial Sequence
  Description of Artificial Sequence: Synthetic oligonucleotide
  Antisense strand to SEQ ID NO: 1222610
caaggucacgaauucacuc

SEQ ID NO: 1222612 - RNA, 19 nt, Artificial Sequence
  Description of Artificial Sequence: Synthetic oligonucleotide
  Sense strand starting at position 3634 of SEQ ID NO: 917275
uguaauccagcugagucau

SEQ ID NO: 1222613 - RNA, 19 nt, Artificial Sequence
  Description of Artificial Sequence: Synthetic oligonucleotide
  Antisense strand to SEQ ID NO: 1222612
augacucagcuggauuaca

SEQ ID NO: 1222614 - RNA, 19 nt, Artificial Sequence
  Description of Artificial Sequence: Synthetic oligonucleotide
  Sense strand starting at position 3892 of SEQ ID NO: 917276
agguuuggagcagauaagu

SEQ ID NO: 1222615 - RNA, 19 nt, Artificial Sequence
  Description of Artificial Sequence: Synthetic oligonucleotide
  Antisense strand to SEQ ID NO: 1222614
acuuaucugcuccaaaccu

SEQ ID NO: 1222616 - RNA, 19 nt, Artificial Sequence
  Description of Artificial Sequence: Synthetic oligonucleotide
  Sense strand starting at position 2 of SEQ ID NO: 917276
gagaauggucagugcuuga

SEQ ID NO: 1222617 - RNA, 19 nt, Artificial Sequence
  Description of Artificial Sequence: Synthetic oligonucleotide
  Antisense strand to SEQ ID NO: 1222616
ucaagcacugaccauucuc

SEQ ID NO: 1222618 - RNA, 19 nt, Artificial Sequence
  Description of Artificial Sequence: Synthetic oligonucleotide
  Sense strand starting at position 5 of SEQ ID NO: 917276
aauggucagugcuugagau

SEQ ID NO: 1222619 - RNA, 19 nt, Artificial Sequence
  Description of Artificial Sequence: Synthetic oligonucleotide
  Antisense strand to SEQ ID NO: 1222618
aucucaagcacugaccauu

SEQ ID NO: 1222620 - RNA, 19 nt, Artificial Sequence
  Description of Artificial Sequence: Synthetic oligonucleotide
  Sense strand starting at position 7 of SEQ ID NO: 917276
uggucagugcuugagauca

SEQ ID NO: 1222621 - RNA, 19 nt, Artificial Sequence
  Description of Artificial Sequence: Synthetic oligonucleotide
  Antisense strand to SEQ ID NO: 1222620
ugaucucaagcacugacca

SEQ ID NO: 1222622 - RNA, 19 nt, Artificial Sequence
  Description of Artificial Sequence: Synthetic oligonucleotide
  Sense strand starting at position 208 of SEQ ID NO: 917276
uguuacuguuaugugauua

SEQ ID NO: 1222623 - RNA, 19 nt, Artificial Sequence
  Description of Artificial Sequence: Synthetic oligonucleotide
  Antisense strand to SEQ ID NO: 1222622
uaaucacauaacaguaaca

SEQ ID NO: 1222624 - RNA, 19 nt, Artificial Sequence
  Description of Artificial Sequence: Synthetic oligonucleotide
  Sense strand starting at position 629 of SEQ ID NO: 917276
gcagcaaauuucuaggaug

SEQ ID NO: 1222625 - RNA, 19 nt, Artificial Sequence
  Description of Artificial Sequence: Synthetic oligonucleotide
  Antisense strand to SEQ ID NO: 1222624
cauccuagaaauuugcugc

SEQ ID NO: 1222626 - RNA, 19 nt, Artificial Sequence
  Description of Artificial Sequence: Synthetic oligonucleotide
  Sense strand starting at position 632 of SEQ ID NO: 917276
gcaaauuucuaggaugguu

SEQ ID NO: 1222627 - RNA, 19 nt, Artificial Sequence
  Description of Artificial Sequence: Synthetic oligonucleotide
  Antisense strand to SEQ ID NO: 1222626
aaccauccuagaaauuugc

SEQ ID NO: 1222628 - RNA, 19 nt, Artificial Sequence
  Description of Artificial Sequence: Synthetic oligonucleotide
  Sense strand starting at position 637 of SEQ ID NO: 917276
uuucuaggaugguuaucua

SEQ ID NO: 1222629 - RNA, 19 nt, Artificial Sequence
  Description of Artificial Sequence: Synthetic oligonucleotide
  Antisense strand to SEQ ID NO: 1222628
uagauaaccauccuagaaa

SEQ ID NO: 1222630 - RNA, 19 nt, Artificial Sequence
  Description of Artificial Sequence: Synthetic oligonucleotide
  Sense strand starting at position 641 of SEQ ID NO: 917276
uaggaugguuaucuaccua

SEQ ID NO: 1222631 - RNA, 19 nt, Artificial Sequence
  Description of Artificial Sequence: Synthetic oligonucleotide
  Antisense strand to SEQ ID NO: 1222630
uagguagauaaccauccua

SEQ ID NO: 1222632 - RNA, 19 nt, Artificial Sequence
  Description of Artificial Sequence: Synthetic oligonucleotide
  Sense strand starting at position 669 of SEQ ID NO: 917276
uuuaaagggucgucaagga

SEQ ID NO: 1222633 - RNA, 19 nt, Artificial Sequence
  Description of Artificial Sequence: Synthetic oligonucleotide
  Antisense strand to SEQ ID NO: 1222632
uccuugacgacccuuuaaa

SEQ ID NO: 1222634 - RNA, 19 nt, Artificial Sequence
  Description of Artificial Sequence: Synthetic oligonucleotide
  Sense strand starting at position 683 of SEQ ID NO: 917276
aaggaagguuucguaaauc

SEQ ID NO: 1222635 - RNA, 19 nt, Artificial Sequence
  Description of Artificial Sequence: Synthetic oligonucleotide
  Antisense strand to SEQ ID NO: 1222634
gauuuacgaaaccuuccuu

SEQ ID NO: 1222636 - RNA, 19 nt, Artificial Sequence
  Description of Artificial Sequence: Synthetic oligonucleotide
  Sense strand starting at position 694 of SEQ ID NO: 917276
cguaaaucugugucagcuu

SEQ ID NO: 1222637 - RNA, 19 nt, Artificial Sequence
  Description of Artificial Sequence: Synthetic oligonucleotide
  Antisense strand to SEQ ID NO: 1222636
aagcugacacagauuuacg

SEQ ID NO: 1222638 - RNA, 19 nt, Artificial Sequence
  Description of Artificial Sequence: Synthetic oligonucleotide
  Sense strand starting at position 722 of SEQ ID NO: 917276
gcaagucuuugagucaacu

SEQ ID NO: 1222639 - RNA, 19 nt, Artificial Sequence
  Description of Artificial Sequence: Synthetic oligonucleotide
  Antisense strand to SEQ ID NO: 1222638
aguugacucaaagacuugc

SEQ ID NO: 1222640 - RNA, 19 nt, Artificial Sequence
  Description of Artificial Sequence: Synthetic oligonucleotide
  Sense strand starting at position 747 of SEQ ID NO: 917276
acucaaguguacuccugaa

SEQ ID NO: 1222641 - RNA, 19 nt, Artificial Sequence
  Description of Artificial Sequence: Synthetic oligonucleotide
  Antisense strand to SEQ ID NO: 1222640
uucaggaguacacuugagu

SEQ ID NO: 1222642 - RNA, 19 nt, Artificial Sequence
  Description of Artificial Sequence: Synthetic oligonucleotide
  Sense strand starting at position 831 of SEQ ID NO: 917276
cugagaaauucugaauaac

SEQ ID NO: 1222643 - RNA, 19 nt, Artificial Sequence
  Description of Artificial Sequence: Synthetic oligonucleotide
  Antisense strand to SEQ ID NO: 1222642
guuauucagaauuucucag

SEQ ID NO: 1222644 - RNA, 19 nt, Artificial Sequence
  Description of Artificial Sequence: Synthetic oligonucleotide
  Sense strand starting at position 1059 of SEQ ID NO: 917276
auauaaucgcaaugacauc

SEQ ID NO: 1222645 - RNA, 19 nt, Artificial Sequence
  Description of Artificial Sequence: Synthetic oligonucleotide
  Antisense strand to SEQ ID NO: 1222644
gaugucauugcgauuauau

SEQ ID NO: 1222646 - RNA, 19 nt, Artificial Sequence
  Description of Artificial Sequence: Synthetic oligonucleotide
  Sense strand starting at position 1110 of SEQ ID NO: 917276
auuacugcccuuugaguaa

SEQ ID NO: 1222647 - RNA, 19 nt, Artificial Sequence
  Description of Artificial Sequence: Synthetic oligonucleotide
  Antisense strand to SEQ ID NO: 1222646
uuacucaaagggcaguaau

SEQ ID NO: 1222648 - RNA, 19 nt, Artificial Sequence
  Description of Artificial Sequence: Synthetic oligonucleotide
  Sense strand starting at position 1113 of SEQ ID NO: 917276
acugcccuuugaguaauua

SEQ ID NO: 1222649 - RNA, 19 nt, Artificial Sequence
  Description of Artificial Sequence: Synthetic oligonucleotide
  Antisense strand to SEQ ID NO: 1222648
uaauuacucaaagggcagu

SEQ ID NO: 1222650 - RNA, 19 nt, Artificial Sequence
  Description of Artificial Sequence: Synthetic oligonucleotide
  Sense strand starting at position 1129 of SEQ ID NO: 917276
uuaccaauugauggguuua

SEQ ID NO: 1222651 - RNA, 19 nt, Artificial Sequence
  Description of Artificial Sequence: Synthetic oligonucleotide
  Antisense strand to SEQ ID NO: 1222650
uaaacccaucaauugguaa

SEQ ID NO: 1222652 - RNA, 19 nt, Artificial Sequence
  Description of Artificial Sequence: Synthetic oligonucleotide
  Sense strand starting at position 1131 of SEQ ID NO: 917276
accaauugauggguuuaau

SEQ ID NO: 1222653 - RNA, 19 nt, Artificial Sequence
  Description of Artificial Sequence: Synthetic oligonucleotide
  Antisense strand to SEQ ID NO: 1222652
auuaaacccaucaauuggu

SEQ ID NO: 1222654 - RNA, 19 nt, Artificial Sequence
  Description of Artificial Sequence: Synthetic oligonucleotide
  Sense strand starting at position 1140 of SEQ ID NO: 917276
uggguuuaauaugcaaaca

SEQ ID NO: 1222655 - RNA, 19 nt, Artificial Sequence
  Description of Artificial Sequence: Synthetic oligonucleotide
  Antisense strand to SEQ ID NO: 1222654
uguuugcauauuaaaccca

SEQ ID NO: 1222656 - RNA, 19 nt, Artificial Sequence
  Description of Artificial Sequence: Synthetic oligonucleotide
  Sense strand starting at position 1151 of SEQ ID NO: 917276
ugcaaacaccucugagcua

SEQ ID NO: 1222657 - RNA, 19 nt, Artificial Sequence
  Description of Artificial Sequence: Synthetic oligonucleotide
  Antisense strand to SEQ ID NO: 1222656
uagcucagagguguuugca

SEQ ID NO: 1222658 - RNA, 19 nt, Artificial Sequence
  Description of Artificial Sequence: Synthetic oligonucleotide
  Sense strand starting at position 1249 of SEQ ID NO: 917276
ucucacauccaauguguga

SEQ ID NO: 1222659 - RNA, 19 nt, Artificial Sequence
  Description of Artificial Sequence: Synthetic oligonucleotide
  Antisense strand to SEQ ID NO: 1222658
ucacacauuggaugugaga

SEQ ID NO: 1222660 - RNA, 19 nt, Artificial Sequence
  Description of Artificial Sequence: Synthetic oligonucleotide
  Sense strand starting at position 1253 of SEQ ID NO: 917276
acauccaaugugugacaua

SEQ ID NO: 1222661 - RNA, 19 nt, Artificial Sequence
  Description of Artificial Sequence: Synthetic oligonucleotide
  Antisense strand to SEQ ID NO: 1222660
uaugucacacauuggaugu

SEQ ID NO: 1222662 - RNA, 19 nt, Artificial Sequence
  Description of Artificial Sequence: Synthetic oligonucleotide
  Sense strand starting at position 1262 of SEQ ID NO: 917276
gugugacauacauacgguu

SEQ ID NO: 1222663 - RNA, 19 nt, Artificial Sequence
  Description of Artificial Sequence: Synthetic oligonucleotide
  Antisense strand to SEQ ID NO: 1222662
aaccguauguaugucacac

SEQ ID NO: 1222664 - RNA, 19 nt, Artificial Sequence
  Description of Artificial Sequence: Synthetic oligonucleotide
  Sense strand starting at position 1635 of SEQ ID NO: 917276
cgaggagucgcugaacuac

SEQ ID NO: 1222665 - RNA, 19 nt, Artificial Sequence
  Description of Artificial Sequence: Synthetic oligonucleotide
  Antisense strand to SEQ ID NO: 1222664
guaguucagcgacuccucg

SEQ ID NO: 1222666 - RNA, 19 nt, Artificial Sequence
  Description of Artificial Sequence: Synthetic oligonucleotide
  Sense strand starting at position 2224 of SEQ ID NO: 917276
ugcugcuuucggaggugau

SEQ ID NO: 1222667 - RNA, 19 nt, Artificial Sequence
  Description of Artificial Sequence: Synthetic oligonucleotide
  Antisense strand to SEQ ID NO: 1222666
aucaccuccgaaagcagca

SEQ ID NO: 1222668 - RNA, 19 nt, Artificial Sequence
  Description of Artificial Sequence: Synthetic oligonucleotide
  Sense strand starting at position 2457 of SEQ ID NO: 917276
gcauauggccuuuaggauu

SEQ ID NO: 1222669 - RNA, 19 nt, Artificial Sequence
  Description of Artificial Sequence: Synthetic oligonucleotide
  Antisense strand to SEQ ID NO: 1222668
aauccuaaaggccauaugc

SEQ ID NO: 1222670 - RNA, 19 nt, Artificial Sequence
  Description of Artificial Sequence: Synthetic oligonucleotide
  Sense strand starting at position 2506 of SEQ ID NO: 917276
auugcuuucgacugaauuu

SEQ ID NO: 1222671 - RNA, 19 nt, Artificial Sequence
  Description of Artificial Sequence: Synthetic oligonucleotide
  Antisense strand to SEQ ID NO: 1222670
aaauucagucgaaagcaau

SEQ ID NO: 1222672 - RNA, 19 nt, Artificial Sequence
  Description of Artificial Sequence: Synthetic oligonucleotide
  Sense strand starting at position 2513 of SEQ ID NO: 917276
ucgacugaauuuggauuua

SEQ ID NO: 1222673 - RNA, 19 nt, Artificial Sequence
  Description of Artificial Sequence: Synthetic oligonucleotide
  Antisense strand to SEQ ID NO: 1222672
uaaauccaaauucagucga

SEQ ID NO: 1222674 - RNA, 19 nt, Artificial Sequence
  Description of Artificial Sequence: Synthetic oligonucleotide
  Sense strand starting at position 2550 of SEQ ID NO: 917276
guuuguggacucuaggaua

SEQ ID NO: 1222675 - RNA, 19 nt, Artificial Sequence
  Description of Artificial Sequence: Synthetic oligonucleotide
  Antisense strand to SEQ ID NO: 1222674
uauccuagaguccacaaac

SEQ ID NO: 1222676 - RNA, 19 nt, Artificial Sequence
  Description of Artificial Sequence: Synthetic oligonucleotide
  Sense strand starting at position 2882 of SEQ ID NO: 917276
cuaagaguuucgguuacag

SEQ ID NO: 1222677 - RNA, 19 nt, Artificial Sequence
  Description of Artificial Sequence: Synthetic oligonucleotide
  Antisense strand to SEQ ID NO: 1222676
cuguaaccgaaacucuuag

SEQ ID NO: 1222678 - RNA, 19 nt, Artificial Sequence
  Description of Artificial Sequence: Synthetic oligonucleotide
  Sense strand starting at position 2884 of SEQ ID NO: 917276
aagaguuucgguuacagaa

SEQ ID NO: 1222679 - RNA, 19 nt, Artificial Sequence
  Description of Artificial Sequence: Synthetic oligonucleotide
  Antisense strand to SEQ ID NO: 1222678
uucuguaaccgaaacucuu

SEQ ID NO: 1222680 - RNA, 19 nt, Artificial Sequence
  Description of Artificial Sequence: Synthetic oligonucleotide
  Sense strand starting at position 3007 of SEQ ID NO: 917276
uuauuagagcuauagacuc

SEQ ID NO: 1222681 - RNA, 19 nt, Artificial Sequence
  Description of Artificial Sequence: Synthetic oligonucleotide
  Antisense strand to SEQ ID NO: 1222680
gagucuauagcucuaauaa

SEQ ID NO: 1222682 - RNA, 19 nt, Artificial Sequence
  Description of Artificial Sequence: Synthetic oligonucleotide
  Sense strand starting at position 3039 of SEQ ID NO: 917276
agagauauucuaggcccaa

SEQ ID NO: 1222683 - RNA, 19 nt, Artificial Sequence
  Description of Artificial Sequence: Synthetic oligonucleotide
  Antisense strand to SEQ ID NO: 1222682
uugggccuagaauaucucu

SEQ ID NO: 1222684 - RNA, 19 nt, Artificial Sequence
  Description of Artificial Sequence: Synthetic oligonucleotide
  Sense strand starting at position 3119 of SEQ ID NO: 917276
gggagugaauucgugaccu

SEQ ID NO: 1222685 - RNA, 19 nt, Artificial Sequence
  Description of Artificial Sequence: Synthetic oligonucleotide
  Antisense strand to SEQ ID NO: 1222684
aggucacgaauucacuccc

SEQ ID NO: 1222686 - RNA, 19 nt, Artificial Sequence
  Description of Artificial Sequence: Synthetic oligonucleotide
  Sense strand starting at position 3121 of SEQ ID NO: 917276
gagugaauucgugaccuug

SEQ ID NO: 1222687 - RNA, 19 nt, Artificial Sequence
  Description of Artificial Sequence: Synthetic oligonucleotide
  Antisense strand to SEQ ID NO: 1222686
caaggucacgaauucacuc

SEQ ID NO: 1222688 - RNA, 19 nt, Artificial Sequence
  Description of Artificial Sequence: Synthetic oligonucleotide
  Sense strand starting at position 3201 of SEQ ID NO: 917276
uguaauccagcugagucau

SEQ ID NO: 1222689 - RNA, 19 nt, Artificial Sequence
  Description of Artificial Sequence: Synthetic oligonucleotide
  Antisense strand to SEQ ID NO: 1222688
augacucagcuggauuaca

SEQ ID NO: 1222690 - RNA, 19 nt, Artificial Sequence
  Description of Artificial Sequence: Synthetic oligonucleotide
  Sense strand starting at position 3459 of SEQ ID NO: 917276
agguuuggagcagauaagu

SEQ ID NO: 1222691 - RNA, 19 nt, Artificial Sequence
  Description of Artificial Sequence: Synthetic oligonucleotide
  Antisense strand to SEQ ID NO: 1222690
acuuaucugcuccaaaccu

SEQ ID NO: 1222692 - RNA, 19 nt, Artificial Sequence
  Description of Artificial Sequence: Synthetic oligonucleotide
  Sense strand starting at position 3599 of SEQ ID NO: 917276
guaaccucccacuauugua

SEQ ID NO: 1222693 - RNA, 19 nt, Artificial Sequence
  Description of Artificial Sequence: Synthetic oligonucleotide
  Antisense strand to SEQ ID NO: 1222692
uacaauagugggagguuac

SEQ ID NO: 1222694 - RNA, 19 nt, Artificial Sequence
  Description of Artificial Sequence: Synthetic oligonucleotide
  Sense strand starting at position 3869 of SEQ ID NO: 917277
acguacaugaccuguugau

SEQ ID NO: 1222695 - RNA, 19 nt, Artificial Sequence
  Description of Artificial Sequence: Synthetic oligonucleotide
  Antisense strand to SEQ ID NO: 1222694
aucaacaggucauguacgu

SEQ ID NO: 1222696 - RNA, 19 nt, Artificial Sequence
  Description of Artificial Sequence: Synthetic oligonucleotide
  Sense strand starting at position 14 of SEQ ID NO: 917277
uuggccaugcuugauaauu

SEQ ID NO: 1222697 - RNA, 19 nt, Artificial Sequence
  Description of Artificial Sequence: Synthetic oligonucleotide
  Antisense strand to SEQ ID NO: 1222696
aauuaucaagcauggccaa

SEQ ID NO: 1222698 - RNA, 19 nt, Artificial Sequence
  Description of Artificial Sequence: Synthetic oligonucleotide
  Sense strand starting at position 24 of SEQ ID NO: 917277
uugauaauucuguaguugu

SEQ ID NO: 1222699 - RNA, 19 nt, Artificial Sequence
  Description of Artificial Sequence: Synthetic oligonucleotide
  Antisense strand to SEQ ID NO: 1222698
acaacuacagaauuaucaa

SEQ ID NO: 1222700 - RNA, 19 nt, Artificial Sequence
  Description of Artificial Sequence: Synthetic oligonucleotide
  Sense strand starting at position 136 of SEQ ID NO: 917277
agaucuccucauugaagac

SEQ ID NO: 1222701 - RNA, 19 nt, Artificial Sequence
  Description of Artificial Sequence: Synthetic oligonucleotide
  Antisense strand to SEQ ID NO: 1222700
gucuucaaugaggagaucu

SEQ ID NO: 1222702 - RNA, 19 nt, Artificial Sequence
  Description of Artificial Sequence: Synthetic oligonucleotide
  Sense strand starting at position 263 of SEQ ID NO: 917277
ucgaauuaccauuagguca

SEQ ID NO: 1222703 - RNA, 19 nt, Artificial Sequence
  Description of Artificial Sequence: Synthetic oligonucleotide
  Antisense strand to SEQ ID NO: 1222702
ugaccuaaugguaauucga

SEQ ID NO: 1222704 - RNA, 19 nt, Artificial Sequence
  Description of Artificial Sequence: Synthetic oligonucleotide
  Sense strand starting at position 400 of SEQ ID NO: 917277
agauauagccauugagaua

SEQ ID NO: 1222705 - RNA, 19 nt, Artificial Sequence
  Description of Artificial Sequence: Synthetic oligonucleotide
  Antisense strand to SEQ ID NO: 1222704
uaucucaauggcuauaucu

SEQ ID NO: 1222706 - RNA, 19 nt, Artificial Sequence
  Description of Artificial Sequence: Synthetic oligonucleotide
  Sense strand starting at position 523 of SEQ ID NO: 917277
gauagaugucauggucagg

SEQ ID NO: 1222707 - RNA, 19 nt, Artificial Sequence
  Description of Artificial Sequence: Synthetic oligonucleotide
  Antisense strand to SEQ ID NO: 1222706
ccugaccaugacaucuauc

SEQ ID NO: 1222708 - RNA, 19 nt, Artificial Sequence
  Description of Artificial Sequence: Synthetic oligonucleotide
  Sense strand starting at position 1114 of SEQ ID NO: 917277
aguucugagcuauauagga

SEQ ID NO: 1222709 - RNA, 19 nt, Artificial Sequence
  Description of Artificial Sequence: Synthetic oligonucleotide
  Antisense strand to SEQ ID NO: 1222708
uccuauauagcucagaacu

SEQ ID NO: 1222710 - RNA, 19 nt, Artificial Sequence
  Description of Artificial Sequence: Synthetic oligonucleotide
  Sense strand starting at position 2103 of SEQ ID NO: 917277
uugcaugucgggaguagua

SEQ ID NO: 1222711 - RNA, 19 nt, Artificial Sequence
  Description of Artificial Sequence: Synthetic oligonucleotide
  Antisense strand to SEQ ID NO: 1222710
uacuacucccgacaugcaa

SEQ ID NO: 1222712 - RNA, 19 nt, Artificial Sequence
  Description of Artificial Sequence: Synthetic oligonucleotide
  Sense strand starting at position 2122 of SEQ ID NO: 917277
guuuguguaauaucgcgau

SEQ ID NO: 1222713 - RNA, 19 nt, Artificial Sequence
  Description of Artificial Sequence: Synthetic oligonucleotide
  Antisense strand to SEQ ID NO: 1222712
aucgcgauauuacacaaac

SEQ ID NO: 1222714 - RNA, 19 nt, Artificial Sequence
  Description of Artificial Sequence: Synthetic oligonucleotide
  Sense strand starting at position 2244 of SEQ ID NO: 917277
cgccucguucuaguaugua

SEQ ID NO: 1222715 - RNA, 19 nt, Artificial Sequence
  Description of Artificial Sequence: Synthetic oligonucleotide
  Antisense strand to SEQ ID NO: 1222714
uacauacuagaacgaggcg

SEQ ID NO: 1222716 - RNA, 19 nt, Artificial Sequence
  Description of Artificial Sequence: Synthetic oligonucleotide
  Sense strand starting at position 2266 of SEQ ID NO: 917277
uuugacuugucucuuugaa

SEQ ID NO: 1222717 - RNA, 19 nt, Artificial Sequence
  Description of Artificial Sequence: Synthetic oligonucleotide
  Antisense strand to SEQ ID NO: 1222716
uucaaagagacaagucaaa

SEQ ID NO: 1222718 - RNA, 19 nt, Artificial Sequence
  Description of Artificial Sequence: Synthetic oligonucleotide
  Sense strand starting at position 2268 of SEQ ID NO: 917277
ugacuugucucuuugaacu

SEQ ID NO: 1222719 - RNA, 19 nt, Artificial Sequence
  Description of Artificial Sequence: Synthetic oligonucleotide
  Antisense strand to SEQ ID NO: 1222718
aguucaaagagacaaguca

SEQ ID NO: 1222720 - RNA, 19 nt, Artificial Sequence
  Description of Artificial Sequence: Synthetic oligonucleotide
  Sense strand starting at position 2296 of SEQ ID NO: 917277
uuuguaagacgugaacagu

SEQ ID NO: 1222721 - RNA, 19 nt, Artificial Sequence
  Description of Artificial Sequence: Synthetic oligonucleotide
  Antisense strand to SEQ ID NO: 1222720
acuguucacgucuuacaaa

SEQ ID NO: 1222722 - RNA, 19 nt, Artificial Sequence
  Description of Artificial Sequence: Synthetic oligonucleotide
  Sense strand starting at position 2302 of SEQ ID NO: 917277
agacgugaacaguaguauu

SEQ ID NO: 1222723 - RNA, 19 nt, Artificial Sequence
  Description of Artificial Sequence: Synthetic oligonucleotide
  Antisense strand to SEQ ID NO: 1222722
aauacuacuguucacgucu

SEQ ID NO: 1222724 - RNA, 19 nt, Artificial Sequence
  Description of Artificial Sequence: Synthetic oligonucleotide
  Sense strand starting at position 2336 of SEQ ID NO: 917277
aagauuacaugaguugguu

SEQ ID NO: 1222725 - RNA, 19 nt, Artificial Sequence
  Description of Artificial Sequence: Synthetic oligonucleotide
  Antisense strand to SEQ ID NO: 1222724
aaccaacucauguaaucuu

SEQ ID NO: 1222726 - RNA, 19 nt, Artificial Sequence
  Description of Artificial Sequence: Synthetic oligonucleotide
  Sense strand starting at position 2339 of SEQ ID NO: 917277
auuacaugaguugguuaua

SEQ ID NO: 1222727 - RNA, 19 nt, Artificial Sequence
  Description of Artificial Sequence: Synthetic oligonucleotide
  Antisense strand to SEQ ID NO: 1222726
uauaaccaacucauguaau

SEQ ID NO: 1222728 - RNA, 19 nt, Artificial Sequence
  Description of Artificial Sequence: Synthetic oligonucleotide
  Sense strand starting at position 2340 of SEQ ID NO: 917277
uuacaugaguugguuauag

SEQ ID NO: 1222729 - RNA, 19 nt, Artificial Sequence
  Description of Artificial Sequence: Synthetic oligonucleotide
  Antisense strand to SEQ ID NO: 1222728
cuauaaccaacucauguaa

SEQ ID NO: 1222730 - RNA, 19 nt, Artificial Sequence
  Description of Artificial Sequence: Synthetic oligonucleotide
  Sense strand starting at position 2381 of SEQ ID NO: 917277
ugguuuguagaauaauuac

SEQ ID NO: 1222731 - RNA, 19 nt, Artificial Sequence
  Description of Artificial Sequence: Synthetic oligonucleotide
  Antisense strand to SEQ ID NO: 1222730
guaauuauucuacaaacca

SEQ ID NO: 1222732 - RNA, 19 nt, Artificial Sequence
  Description of Artificial Sequence: Synthetic oligonucleotide
  Sense strand starting at position 2387 of SEQ ID NO: 917277
guagaauaauuacucaguu

SEQ ID NO: 1222733 - RNA, 19 nt, Artificial Sequence
  Description of Artificial Sequence: Synthetic oligonucleotide
  Antisense strand to SEQ ID NO: 1222732
aacugaguaauuauucuac

SEQ ID NO: 1222734 - RNA, 19 nt, Artificial Sequence
  Description of Artificial Sequence: Synthetic oligonucleotide
  Sense strand starting at position 2412 of SEQ ID NO: 917277
auuauaaagguucgauaag

SEQ ID NO: 1222735 - RNA, 19 nt, Artificial Sequence
  Description of Artificial Sequence: Synthetic oligonucleotide
  Antisense strand to SEQ ID NO: 1222734
cuuaucgaaccuuuauaau

SEQ ID NO: 1222736 - RNA, 19 nt, Artificial Sequence
  Description of Artificial Sequence: Synthetic oligonucleotide
  Sense strand starting at position 2478 of SEQ ID NO: 917277
uugaaauuaugagccugua

SEQ ID NO: 1222737 - RNA, 19 nt, Artificial Sequence
  Description of Artificial Sequence: Synthetic oligonucleotide
  Antisense strand to SEQ ID NO: 1222736
uacaggcucauaauuucaa

SEQ ID NO: 1222738 - RNA, 19 nt, Artificial Sequence
  Description of Artificial Sequence: Synthetic oligonucleotide
  Sense strand starting at position 2481 of SEQ ID NO: 917277
aaauuaugagccuguagga

SEQ ID NO: 1222739 - RNA, 19 nt, Artificial Sequence
  Description of Artificial Sequence: Synthetic oligonucleotide
  Antisense strand to SEQ ID NO: 1222738
uccuacaggcucauaauuu

SEQ ID NO: 1222740 - RNA, 19 nt, Artificial Sequence
  Description of Artificial Sequence: Synthetic oligonucleotide
  Sense strand starting at position 2689 of SEQ ID NO: 917277
aguguauguauccauuaga

SEQ ID NO: 1222741 - RNA, 19 nt, Artificial Sequence
  Description of Artificial Sequence: Synthetic oligonucleotide
  Antisense strand to SEQ ID NO: 1222740
ucuaauggauacauacacu

SEQ ID NO: 1222742 - RNA, 19 nt, Artificial Sequence
  Description of Artificial Sequence: Synthetic oligonucleotide
  Sense strand starting at position 2692 of SEQ ID NO: 917277
guauguauccauuagaagu

SEQ ID NO: 1222743 - RNA, 19 nt, Artificial Sequence
  Description of Artificial Sequence: Synthetic oligonucleotide
  Antisense strand to SEQ ID NO: 1222742
acuucuaauggauacauac

SEQ ID NO: 1222744 - RNA, 19 nt, Artificial Sequence
  Description of Artificial Sequence: Synthetic oligonucleotide
  Sense strand starting at position 2762 of SEQ ID NO: 917277
aagauaacucaggguuugu

SEQ ID NO: 1222745 - RNA, 19 nt, Artificial Sequence
  Description of Artificial Sequence: Synthetic oligonucleotide
  Antisense strand to SEQ ID NO: 1222744
acaaacccugaguuaucuu

SEQ ID NO: 1222746 - RNA, 19 nt, Artificial Sequence
  Description of Artificial Sequence: Synthetic oligonucleotide
  Sense strand starting at position 2790 of SEQ ID NO: 917277
uggcuaucgcuggaauuag

SEQ ID NO: 1222747 - RNA, 19 nt, Artificial Sequence
  Description of Artificial Sequence: Synthetic oligonucleotide
  Antisense strand to SEQ ID NO: 1222746
cuaauuccagcgauagcca

SEQ ID NO: 1222748 - RNA, 19 nt, Artificial Sequence
  Description of Artificial Sequence: Synthetic oligonucleotide
  Sense strand starting at position 2801 of SEQ ID NO: 917277
ggaauuagaucccuggcuu

SEQ ID NO: 1222749 - RNA, 19 nt, Artificial Sequence
  Description of Artificial Sequence: Synthetic oligonucleotide
  Antisense strand to SEQ ID NO: 1222748
aagccagggaucuaauucc

SEQ ID NO: 1222750 - RNA, 19 nt, Artificial Sequence
  Description of Artificial Sequence: Synthetic oligonucleotide
  Sense strand starting at position 2871 of SEQ ID NO: 917277
gucaccugacuuugagacu

SEQ ID NO: 1222751 - RNA, 19 nt, Artificial Sequence
  Description of Artificial Sequence: Synthetic oligonucleotide
  Antisense strand to SEQ ID NO: 1222750
agucucaaagucaggugac

SEQ ID NO: 1222752 - RNA, 19 nt, Artificial Sequence
  Description of Artificial Sequence: Synthetic oligonucleotide
  Sense strand starting at position 3119 of SEQ ID NO: 917277
uccaucagagcugacuuua

SEQ ID NO: 1222753 - RNA, 19 nt, Artificial Sequence
  Description of Artificial Sequence: Synthetic oligonucleotide
  Antisense strand to SEQ ID NO: 1222752
uaaagucagcucugaugga

SEQ ID NO: 1222754 - RNA, 19 nt, Artificial Sequence
  Description of Artificial Sequence: Synthetic oligonucleotide
  Sense strand starting at position 3306 of SEQ ID NO: 917277
ucccauucccucugaagga

SEQ ID NO: 1222755 - RNA, 19 nt, Artificial Sequence
  Description of Artificial Sequence: Synthetic oligonucleotide
  Antisense strand to SEQ ID NO: 1222754
uccuucagagggaauggga

SEQ ID NO: 1222756 - RNA, 19 nt, Artificial Sequence
  Description of Artificial Sequence: Synthetic oligonucleotide
  Sense strand starting at position 3319 of SEQ ID NO: 917277
gaaggacaaccuugugacu

SEQ ID NO: 1222757 - RNA, 19 nt, Artificial Sequence
  Description of Artificial Sequence: Synthetic oligonucleotide
  Antisense strand to SEQ ID NO: 1222756
agucacaagguuguccuuc

SEQ ID NO: 1222758 - RNA, 19 nt, Artificial Sequence
  Description of Artificial Sequence: Synthetic oligonucleotide
  Sense strand starting at position 3405 of SEQ ID NO: 917277
ugauaucaccuuuguagau

SEQ ID NO: 1222759 - RNA, 19 nt, Artificial Sequence
  Description of Artificial Sequence: Synthetic oligonucleotide
  Antisense strand to SEQ ID NO: 1222758
aucuacaaaggugauauca

SEQ ID NO: 1222760 - RNA, 19 nt, Artificial Sequence
  Description of Artificial Sequence: Synthetic oligonucleotide
  Sense strand starting at position 3406 of SEQ ID NO: 917277
gauaucaccuuuguagaug

SEQ ID NO: 1222761 - RNA, 19 nt, Artificial Sequence
  Description of Artificial Sequence: Synthetic oligonucleotide
  Antisense strand to SEQ ID NO: 1222760
caucuacaaaggugauauc

SEQ ID NO: 1222762 - RNA, 19 nt, Artificial Sequence
  Description of Artificial Sequence: Synthetic oligonucleotide
  Sense strand starting at position 3421 of SEQ ID NO: 917277
gaugguucuuaccucagga

SEQ ID NO: 1222763 - RNA, 19 nt, Artificial Sequence
  Description of Artificial Sequence: Synthetic oligonucleotide
  Antisense strand to SEQ ID NO: 1222762
uccugagguaagaaccauc

SEQ ID NO: 1222764 - RNA, 19 nt, Artificial Sequence
  Description of Artificial Sequence: Synthetic oligonucleotide
  Sense strand starting at position 3423 of SEQ ID NO: 917277
ugguucuuaccucaggagu

SEQ ID NO: 1222765 - RNA, 19 nt, Artificial Sequence
  Description of Artificial Sequence: Synthetic oligonucleotide
  Antisense strand to SEQ ID NO: 1222764
acuccugagguaagaacca

SEQ ID NO: 1222766 - RNA, 19 nt, Artificial Sequence
  Description of Artificial Sequence: Synthetic oligonucleotide
  Sense strand starting at position 3486 of SEQ ID NO: 917277
acagccuauuaaguugaaa

SEQ ID NO: 1222767 - RNA, 19 nt, Artificial Sequence
  Description of Artificial Sequence: Synthetic oligonucleotide
  Antisense strand to SEQ ID NO: 1222766
uuucaacuuaauaggcugu

SEQ ID NO: 1222768 - RNA, 19 nt, Artificial Sequence
  Description of Artificial Sequence: Synthetic oligonucleotide
  Sense strand starting at position 3489 of SEQ ID NO: 917277
gccuauuaaguugaaaucu

SEQ ID NO: 1222769 - RNA, 19 nt, Artificial Sequence
  Description of Artificial Sequence: Synthetic oligonucleotide
  Antisense strand to SEQ ID NO: 1222768
agauuucaacuuaauaggc

SEQ ID NO: 1222770 - RNA, 19 nt, Artificial Sequence
  Description of Artificial Sequence: Synthetic oligonucleotide
  Sense strand starting at position 3523 of SEQ ID NO: 917277
uggcccaaaucauugaauu

SEQ ID NO: 1222771 - RNA, 19 nt, Artificial Sequence
  Description of Artificial Sequence: Synthetic oligonucleotide
  Antisense strand to SEQ ID NO: 1222770
aauucaaugauuugggcca

SEQ ID NO: 1222772 - RNA, 19 nt, Artificial Sequence
  Description of Artificial Sequence: Synthetic oligonucleotide
  Sense strand starting at position 3524 of SEQ ID NO: 917277
ggcccaaaucauugaauuc

SEQ ID NO: 1222773 - RNA, 19 nt, Artificial Sequence
  Description of Artificial Sequence: Synthetic oligonucleotide
  Antisense strand to SEQ ID NO: 1222772
gaauucaaugauuugggcc

SEQ ID NO: 1222774 - RNA, 19 nt, Artificial Sequence
  Description of Artificial Sequence: Synthetic oligonucleotide
  Sense strand starting at position 3634 of SEQ ID NO: 917278
uuugguaugcuauggaaag

SEQ ID NO: 1222775 - RNA, 19 nt, Artificial Sequence
  Description of Artificial Sequence: Synthetic oligonucleotide
  Antisense strand to SEQ ID NO: 1222774
cuuuccauagcauaccaaa

SEQ ID NO: 1222776 - RNA, 19 nt, Artificial Sequence
  Description of Artificial Sequence: Synthetic oligonucleotide
  Sense strand starting at position 89 of SEQ ID NO: 917278
ucaugacugggaugucaca

SEQ ID NO: 1222777 - RNA, 19 nt, Artificial Sequence
  Description of Artificial Sequence: Synthetic oligonucleotide
  Antisense strand to SEQ ID NO: 1222776
ugugacaucccagucauga

SEQ ID NO: 1222778 - RNA, 19 nt, Artificial Sequence
  Description of Artificial Sequence: Synthetic oligonucleotide
  Sense strand starting at position 143 of SEQ ID NO: 917278
ccugaaagucacuacguuu

SEQ ID NO: 1222779 - RNA, 19 nt, Artificial Sequence
  Description of Artificial Sequence: Synthetic oligonucleotide
  Antisense strand to SEQ ID NO: 1222778
aaacguagugacuuucagg

SEQ ID NO: 1222780 - RNA, 19 nt, Artificial Sequence
  Description of Artificial Sequence: Synthetic oligonucleotide
  Sense strand starting at position 146 of SEQ ID NO: 917278
gaaagucacuacguuuaag

SEQ ID NO: 1222781 - RNA, 19 nt, Artificial Sequence
  Description of Artificial Sequence: Synthetic oligonucleotide
  Antisense strand to SEQ ID NO: 1222780
cuuaaacguagugacuuuc

SEQ ID NO: 1222782 - RNA, 19 nt, Artificial Sequence
  Description of Artificial Sequence: Synthetic oligonucleotide
  Sense strand starting at position 149 of SEQ ID NO: 917278
agucacuacguuuaagaga

SEQ ID NO: 1222783 - RNA, 19 nt, Artificial Sequence
  Description of Artificial Sequence: Synthetic oligonucleotide
  Antisense strand to SEQ ID NO: 1222782
ucucuuaaacguagugacu

SEQ ID NO: 1222784 - RNA, 19 nt, Artificial Sequence
  Description of Artificial Sequence: Synthetic oligonucleotide
  Sense strand starting at position 229 of SEQ ID NO: 917278
gcauaaagauaguucugaa

SEQ ID NO: 1222785 - RNA, 19 nt, Artificial Sequence
  Description of Artificial Sequence: Synthetic oligonucleotide
  Antisense strand to SEQ ID NO: 1222784
uucagaacuaucuuuaugc

SEQ ID NO: 1222786 - RNA, 19 nt, Artificial Sequence
  Description of Artificial Sequence: Synthetic oligonucleotide
  Sense strand starting at position 305 of SEQ ID NO: 917278
gguuucucugaacacugua

SEQ ID NO: 1222787 - RNA, 19 nt, Artificial Sequence
  Description of Artificial Sequence: Synthetic oligonucleotide
  Antisense strand to SEQ ID NO: 1222786
uacaguguucagagaaacc

SEQ ID NO: 1222788 - RNA, 19 nt, Artificial Sequence
  Description of Artificial Sequence: Synthetic oligonucleotide
  Sense strand starting at position 310 of SEQ ID NO: 917278
cucugaacacuguagcauu

SEQ ID NO: 1222789 - RNA, 19 nt, Artificial Sequence
  Description of Artificial Sequence: Synthetic oligonucleotide
  Antisense strand to SEQ ID NO: 1222788
aaugcuacaguguucagag

SEQ ID NO: 1222790 - RNA, 19 nt, Artificial Sequence
  Description of Artificial Sequence: Synthetic oligonucleotide
  Sense strand starting at position 380 of SEQ ID NO: 917278
agauguagccauugagaua

SEQ ID NO: 1222791 - RNA, 19 nt, Artificial Sequence
  Description of Artificial Sequence: Synthetic oligonucleotide
  Antisense strand to SEQ ID NO: 1222790
uaucucaauggcuacaucu

SEQ ID NO: 1222792 - RNA, 19 nt, Artificial Sequence
  Description of Artificial Sequence: Synthetic oligonucleotide
  Sense strand starting at position 602 of SEQ ID NO: 917278
ccgaguaagggucauagca

SEQ ID NO: 1222793 - RNA, 19 nt, Artificial Sequence
  Description of Artificial Sequence: Synthetic oligonucleotide
  Antisense strand to SEQ ID NO: 1222792
ugcuaugacccuuacucgg

SEQ ID NO: 1222794 - RNA, 19 nt, Artificial Sequence
  Description of Artificial Sequence: Synthetic oligonucleotide
  Sense strand starting at position 628 of SEQ ID NO: 917278
ggaucucuaggauguccaa

SEQ ID NO: 1222795 - RNA, 19 nt, Artificial Sequence
  Description of Artificial Sequence: Synthetic oligonucleotide
  Antisense strand to SEQ ID NO: 1222794
uuggacauccuagagaucc

SEQ ID NO: 1222796 - RNA, 19 nt, Artificial Sequence
  Description of Artificial Sequence: Synthetic oligonucleotide
  Sense strand starting at position 987 of SEQ ID NO: 917278
acucucuauguccagacua

SEQ ID NO: 1222797 - RNA, 19 nt, Artificial Sequence
  Description of Artificial Sequence: Synthetic oligonucleotide
  Antisense strand to SEQ ID NO: 1222796
uagucuggacauagagagu

SEQ ID NO: 1222798 - RNA, 19 nt, Artificial Sequence
  Description of Artificial Sequence: Synthetic oligonucleotide
  Sense strand starting at position 989 of SEQ ID NO: 917278
ucucuauguccagacuauc

SEQ ID NO: 1222799 - RNA, 19 nt, Artificial Sequence
  Description of Artificial Sequence: Synthetic oligonucleotide
  Antisense strand to SEQ ID NO: 1222798
gauagucuggacauagaga

SEQ ID NO: 1222800 - RNA, 19 nt, Artificial Sequence
  Description of Artificial Sequence: Synthetic oligonucleotide
  Sense strand starting at position 1036 of SEQ ID NO: 917278
aggguuagaucugcuagag

SEQ ID NO: 1222801 - RNA, 19 nt, Artificial Sequence
  Description of Artificial Sequence: Synthetic oligonucleotide
  Antisense strand to SEQ ID NO: 1222800
cucuagcagaucuaacccu

SEQ ID NO: 1222802 - RNA, 19 nt, Artificial Sequence
  Description of Artificial Sequence: Synthetic oligonucleotide
  Sense strand starting at position 1092 of SEQ ID NO: 917278
gaaguugugagcuauguag

SEQ ID NO: 1222803 - RNA, 19 nt, Artificial Sequence
  Description of Artificial Sequence: Synthetic oligonucleotide
  Antisense strand to SEQ ID NO: 1222802
cuacauagcucacaacuuc

SEQ ID NO: 1222804 - RNA, 19 nt, Artificial Sequence
  Description of Artificial Sequence: Synthetic oligonucleotide
  Sense strand starting at position 1096 of SEQ ID NO: 917278
uugugagcuauguaggacu

SEQ ID NO: 1222805 - RNA, 19 nt, Artificial Sequence
  Description of Artificial Sequence: Synthetic oligonucleotide
  Antisense strand to SEQ ID NO: 1222804
aguccuacauagcucacaa

SEQ ID NO: 1222806 - RNA, 19 nt, Artificial Sequence
  Description of Artificial Sequence: Synthetic oligonucleotide
  Sense strand starting at position 1115 of SEQ ID NO: 917278
gggccugagaucgaagcuu

SEQ ID NO: 1222807 - RNA, 19 nt, Artificial Sequence
  Description of Artificial Sequence: Synthetic oligonucleotide
  Antisense strand to SEQ ID NO: 1222806
aagcuucgaucucaggccc

SEQ ID NO: 1222808 - RNA, 19 nt, Artificial Sequence
  Description of Artificial Sequence: Synthetic oligonucleotide
  Sense strand starting at position 2105 of SEQ ID NO: 917278
uuguguaauaucgcgagcu

SEQ ID NO: 1222809 - RNA, 19 nt, Artificial Sequence
  Description of Artificial Sequence: Synthetic oligonucleotide
  Antisense strand to SEQ ID NO: 1222808
agcucgcgauauuacacaa

SEQ ID NO: 1222810 - RNA, 19 nt, Artificial Sequence
  Description of Artificial Sequence: Synthetic oligonucleotide
  Sense strand starting at position 2115 of SEQ ID NO: 917278
ucgcgagcuguccuuuagu

SEQ ID NO: 1222811 - RNA, 19 nt, Artificial Sequence
  Description of Artificial Sequence: Synthetic oligonucleotide
  Antisense strand to SEQ ID NO: 1222810
acuaaaggacagcucgcga

SEQ ID NO: 1222812 - RNA, 19 nt, Artificial Sequence
  Description of Artificial Sequence: Synthetic oligonucleotide
  Sense strand starting at position 2117 of SEQ ID NO: 917278
gcgagcuguccuuuaguug

SEQ ID NO: 1222813 - RNA, 19 nt, Artificial Sequence
  Description of Artificial Sequence: Synthetic oligonucleotide
  Antisense strand to SEQ ID NO: 1222812
caacuaaaggacagcucgc

SEQ ID NO: 1222814 - RNA, 19 nt, Artificial Sequence
  Description of Artificial Sequence: Synthetic oligonucleotide
  Sense strand starting at position 2131 of SEQ ID NO: 917278
aguugacugcucuaacagu

SEQ ID NO: 1222815 - RNA, 19 nt, Artificial Sequence
  Description of Artificial Sequence: Synthetic oligonucleotide
  Antisense strand to SEQ ID NO: 1222814
acuguuagagcagucaacu

SEQ ID NO: 1222816 - RNA, 19 nt, Artificial Sequence
  Description of Artificial Sequence: Synthetic oligonucleotide
  Sense strand starting at position 2137 of SEQ ID NO: 917278
cugcucuaacaguagaaau

SEQ ID NO: 1222817 - RNA, 19 nt, Artificial Sequence
  Description of Artificial Sequence: Synthetic oligonucleotide
  Antisense strand to SEQ ID NO: 1222816
auuucuacuguuagagcag

SEQ ID NO: 1222818 - RNA, 19 nt, Artificial Sequence
  Description of Artificial Sequence: Synthetic oligonucleotide
  Sense strand starting at position 2139 of SEQ ID NO: 917278
gcucuaacaguagaaauua

SEQ ID NO: 1222819 - RNA, 19 nt, Artificial Sequence
  Description of Artificial Sequence: Synthetic oligonucleotide
  Antisense strand to SEQ ID NO: 1222818
uaauuucuacuguuagagc

SEQ ID NO: 1222820 - RNA, 19 nt, Artificial Sequence
  Description of Artificial Sequence: Synthetic oligonucleotide
  Sense strand starting at position 2387 of SEQ ID NO: 917278
ccuagaauguagccaauaa

SEQ ID NO: 1222821 - RNA, 19 nt, Artificial Sequence
  Description of Artificial Sequence: Synthetic oligonucleotide
  Antisense strand to SEQ ID NO: 1222820
uuauuggcuacauucuagg

SEQ ID NO: 1222822 - RNA, 19 nt, Artificial Sequence
  Description of Artificial Sequence: Synthetic oligonucleotide
  Sense strand starting at position 2391 of SEQ ID NO: 917278
gaauguagccaauaacugu

SEQ ID NO: 1222823 - RNA, 19 nt, Artificial Sequence
  Description of Artificial Sequence: Synthetic oligonucleotide
  Antisense strand to SEQ ID NO: 1222822
acaguuauuggcuacauuc

SEQ ID NO: 1222824 - RNA, 19 nt, Artificial Sequence
  Description of Artificial Sequence: Synthetic oligonucleotide
  Sense strand starting at position 2453 of SEQ ID NO: 917278
uuugaaaccgaguauuauu

SEQ ID NO: 1222825 - RNA, 19 nt, Artificial Sequence
  Description of Artificial Sequence: Synthetic oligonucleotide
  Antisense strand to SEQ ID NO: 1222824
aauaauacucgguuucaaa

SEQ ID NO: 1222826 - RNA, 19 nt, Artificial Sequence
  Description of Artificial Sequence: Synthetic oligonucleotide
  Sense strand starting at position 2573 of SEQ ID NO: 917278
auuggucucguuuaauaag

SEQ ID NO: 1222827 - RNA, 19 nt, Artificial Sequence
  Description of Artificial Sequence: Synthetic oligonucleotide
  Antisense strand to SEQ ID NO: 1222826
cuuauuaaacgagaccaau

SEQ ID NO: 1222828 - RNA, 19 nt, Artificial Sequence
  Description of Artificial Sequence: Synthetic oligonucleotide
  Sense strand starting at position 2582 of SEQ ID NO: 917278
guuuaauaaggaugucuua

SEQ ID NO: 1222829 - RNA, 19 nt, Artificial Sequence
  Description of Artificial Sequence: Synthetic oligonucleotide
  Antisense strand to SEQ ID NO: 1222828
uaagacauccuuauuaaac

SEQ ID NO: 1222830 - RNA, 19 nt, Artificial Sequence
  Description of Artificial Sequence: Synthetic oligonucleotide
  Sense strand starting at position 2591 of SEQ ID NO: 917278
ggaugucuuagacgacuag

SEQ ID NO: 1222831 - RNA, 19 nt, Artificial Sequence
  Description of Artificial Sequence: Synthetic oligonucleotide
  Antisense strand to SEQ ID NO: 1222830
cuagucgucuaagacaucc

SEQ ID NO: 1222832 - RNA, 19 nt, Artificial Sequence
  Description of Artificial Sequence: Synthetic oligonucleotide
  Sense strand starting at position 2629 of SEQ ID NO: 917278
guauuaauagauggucuca

SEQ ID NO: 1222833 - RNA, 19 nt, Artificial Sequence
  Description of Artificial Sequence: Synthetic oligonucleotide
  Antisense strand to SEQ ID NO: 1222832
ugagaccaucuauuaauac

SEQ ID NO: 1222834 - RNA, 19 nt, Artificial Sequence
  Description of Artificial Sequence: Synthetic oligonucleotide
  Sense strand starting at position 2706 of SEQ ID NO: 917278
ucuggagagcaggaguauu

SEQ ID NO: 1222835 - RNA, 19 nt, Artificial Sequence
  Description of Artificial Sequence: Synthetic oligonucleotide
  Antisense strand to SEQ ID NO: 1222834
aauacuccugcucuccaga

SEQ ID NO: 1222836 - RNA, 19 nt, Artificial Sequence
  Description of Artificial Sequence: Synthetic oligonucleotide
  Sense strand starting at position 2869 of SEQ ID NO: 917278
agacuuuguucuguacaaa

SEQ ID NO: 1222837 - RNA, 19 nt, Artificial Sequence
  Description of Artificial Sequence: Synthetic oligonucleotide
  Antisense strand to SEQ ID NO: 1222836
uuuguacagaacaaagucu

SEQ ID NO: 1222838 - RNA, 19 nt, Artificial Sequence
  Description of Artificial Sequence: Synthetic oligonucleotide
  Sense strand starting at position 2888 of SEQ ID NO: 917278
agcacaugauucucagaau

SEQ ID NO: 1222839 - RNA, 19 nt, Artificial Sequence
  Description of Artificial Sequence: Synthetic oligonucleotide
  Antisense strand to SEQ ID NO: 1222838
auucugagaaucaugugcu

SEQ ID NO: 1222840 - RNA, 19 nt, Artificial Sequence
  Description of Artificial Sequence: Synthetic oligonucleotide
  Sense strand starting at position 2982 of SEQ ID NO: 917278
uugcauugggaucaacagu

SEQ ID NO: 1222841 - RNA, 19 nt, Artificial Sequence
  Description of Artificial Sequence: Synthetic oligonucleotide
  Antisense strand to SEQ ID NO: 1222840
acuguugaucccaaugcaa

SEQ ID NO: 1222842 - RNA, 19 nt, Artificial Sequence
  Description of Artificial Sequence: Synthetic oligonucleotide
  Sense strand starting at position 3121 of SEQ ID NO: 917278
cugaguaaaugaguuugua

SEQ ID NO: 1222843 - RNA, 19 nt, Artificial Sequence
  Description of Artificial Sequence: Synthetic oligonucleotide
  Antisense strand to SEQ ID NO: 1222842
uacaaacucauuuacucag

SEQ ID NO: 1222844 - RNA, 19 nt, Artificial Sequence
  Description of Artificial Sequence: Synthetic oligonucleotide
  Sense strand starting at position 3124 of SEQ ID NO: 917278
aguaaaugaguuuguaacu

SEQ ID NO: 1222845 - RNA, 19 nt, Artificial Sequence
  Description of Artificial Sequence: Synthetic oligonucleotide
  Antisense strand to SEQ ID NO: 1222844
aguuacaaacucauuuacu

SEQ ID NO: 1222846 - RNA, 19 nt, Artificial Sequence
  Description of Artificial Sequence: Synthetic oligonucleotide
  Sense strand starting at position 3491 of SEQ ID NO: 917278
guuacaugcauguauggau

SEQ ID NO: 1222847 - RNA, 19 nt, Artificial Sequence
  Description of Artificial Sequence: Synthetic oligonucleotide
  Antisense strand to SEQ ID NO: 1222846
auccauacaugcauguaac

SEQ ID NO: 1222848 - RNA, 19 nt, Artificial Sequence
  Description of Artificial Sequence: Synthetic oligonucleotide
  Sense strand starting at position 3546 of SEQ ID NO: 917278
cucuuaucagcugaagaua

SEQ ID NO: 1222849 - RNA, 19 nt, Artificial Sequence
  Description of Artificial Sequence: Synthetic oligonucleotide
  Antisense strand to SEQ ID NO: 1222848
uaucuucagcugauaagag

SEQ ID NO: 1222850 - RNA, 19 nt, Artificial Sequence
  Description of Artificial Sequence: Synthetic oligonucleotide
  Sense strand starting at position 3579 of SEQ ID NO: 917278
gcugaaguccacuggaaau

SEQ ID NO: 1222851 - RNA, 19 nt, Artificial Sequence
  Description of Artificial Sequence: Synthetic oligonucleotide
  Antisense strand to SEQ ID NO: 1222850
auuuccaguggacuucagc

SEQ ID NO: 1222852 - RNA, 19 nt, Artificial Sequence
  Description of Artificial Sequence: Synthetic oligonucleotide
  Sense strand starting at position 3628 of SEQ ID NO: 917278
gccucugggcucuaauaac

SEQ ID NO: 1222853 - RNA, 19 nt, Artificial Sequence
  Description of Artificial Sequence: Synthetic oligonucleotide
  Antisense strand to SEQ ID NO: 1222852
guuauuagagcccagaggc

SEQ ID NO: 1222854 - RNA, 19 nt, Artificial Sequence
  Description of Artificial Sequence: Synthetic oligonucleotide
  Sense strand starting at position 3696 of SEQ ID NO: 917280
agaaucaagucagucauua

SEQ ID NO: 1222855 - RNA, 19 nt, Artificial Sequence
  Description of Artificial Sequence: Synthetic oligonucleotide
  Antisense strand to SEQ ID NO: 1222854
uaaugacugacuugauucu

SEQ ID NO: 1222856 - RNA, 19 nt, Artificial Sequence
  Description of Artificial Sequence: Synthetic oligonucleotide
  Sense strand starting at position 38 of SEQ ID NO: 917280
gcggaucacuuucuauaag

SEQ ID NO: 1222857 - RNA, 19 nt, Artificial Sequence
  Description of Artificial Sequence: Synthetic oligonucleotide
  Antisense strand to SEQ ID NO: 1222856
cuuauagaaagugauccgc

SEQ ID NO: 1222858 - RNA, 19 nt, Artificial Sequence
  Description of Artificial Sequence: Synthetic oligonucleotide
  Sense strand starting at position 129 of SEQ ID NO: 917280
cuacuuuacguguaacuuu

SEQ ID NO: 1222859 - RNA, 19 nt, Artificial Sequence
  Description of Artificial Sequence: Synthetic oligonucleotide
  Antisense strand to SEQ ID NO: 1222858
aaaguuacacguaaaguag

SEQ ID NO: 1222860 - RNA, 19 nt, Artificial Sequence
  Description of Artificial Sequence: Synthetic oligonucleotide
  Sense strand starting at position 330 of SEQ ID NO: 917280
gucauaagagcuugagaag

SEQ ID NO: 1222861 - RNA, 19 nt, Artificial Sequence
  Description of Artificial Sequence: Synthetic oligonucleotide
  Antisense strand to SEQ ID NO: 1222860
cuucucaagcucuuaugac

SEQ ID NO: 1222862 - RNA, 19 nt, Artificial Sequence
  Description of Artificial Sequence: Synthetic oligonucleotide
  Sense strand starting at position 355 of SEQ ID NO: 917280
aggaaaucuuccgcacauu

SEQ ID NO: 1222863 - RNA, 19 nt, Artificial Sequence
  Description of Artificial Sequence: Synthetic oligonucleotide
  Antisense strand to SEQ ID NO: 1222862
aaugugcggaagauuuccu

SEQ ID NO: 1222864 - RNA, 19 nt, Artificial Sequence
  Description of Artificial Sequence: Synthetic oligonucleotide
  Sense strand starting at position 356 of SEQ ID NO: 917280
ggaaaucuuccgcacauug

SEQ ID NO: 1222865 - RNA, 19 nt, Artificial Sequence
  Description of Artificial Sequence: Synthetic oligonucleotide
  Antisense strand to SEQ ID NO: 1222864
caaugugcggaagauuucc

SEQ ID NO: 1222866 - RNA, 19 nt, Artificial Sequence
  Description of Artificial Sequence: Synthetic oligonucleotide
  Sense strand starting at position 693 of SEQ ID NO: 917280
acaagaggcucuguaauca

SEQ ID NO: 1222867 - RNA, 19 nt, Artificial Sequence
  Description of Artificial Sequence: Synthetic oligonucleotide
  Antisense strand to SEQ ID NO: 1222866
ugauuacagagccucuugu

SEQ ID NO: 1222868 - RNA, 19 nt, Artificial Sequence
  Description of Artificial Sequence: Synthetic oligonucleotide
  Sense strand starting at position 915 of SEQ ID NO: 917280
ggaaguugaacuugaggua

SEQ ID NO: 1222869 - RNA, 19 nt, Artificial Sequence
  Description of Artificial Sequence: Synthetic oligonucleotide
  Antisense strand to SEQ ID NO: 1222868
uaccucaaguucaacuucc

SEQ ID NO: 1222870 - RNA, 19 nt, Artificial Sequence
  Description of Artificial Sequence: Synthetic oligonucleotide
  Sense strand starting at position 930 of SEQ ID NO: 917280
gguaauagcgcgaggugua

SEQ ID NO: 1222871 - RNA, 19 nt, Artificial Sequence
  Description of Artificial Sequence: Synthetic oligonucleotide
  Antisense strand to SEQ ID NO: 1222870
uacaccucgcgcuauuacc

SEQ ID NO: 1222872 - RNA, 19 nt, Artificial Sequence
  Description of Artificial Sequence: Synthetic oligonucleotide
  Sense strand starting at position 1455 of SEQ ID NO: 917280
gcagguaauccaggaugua

SEQ ID NO: 1222873 - RNA, 19 nt, Artificial Sequence
  Description of Artificial Sequence: Synthetic oligonucleotide
  Antisense strand to SEQ ID NO: 1222872
uacauccuggauuaccugc

SEQ ID NO: 1222874 - RNA, 19 nt, Artificial Sequence
  Description of Artificial Sequence: Synthetic oligonucleotide
  Sense strand starting at position 2486 of SEQ ID NO: 917280
uugguugucgugucacuga

SEQ ID NO: 1222875 - RNA, 19 nt, Artificial Sequence
  Description of Artificial Sequence: Synthetic oligonucleotide
  Antisense strand to SEQ ID NO: 1222874
ucagugacacgacaaccaa

SEQ ID NO: 1222876 - RNA, 19 nt, Artificial Sequence
  Description of Artificial Sequence: Synthetic oligonucleotide
  Sense strand starting at position 2491 of SEQ ID NO: 917280
ugucgugucacugaaagua

SEQ ID NO: 1222877 - RNA, 19 nt, Artificial Sequence
  Description of Artificial Sequence: Synthetic oligonucleotide
  Antisense strand to SEQ ID NO: 1222876
uacuuucagugacacgaca

SEQ ID NO: 1222878 - RNA, 19 nt, Artificial Sequence
  Description of Artificial Sequence: Synthetic oligonucleotide
  Sense strand starting at position 2653 of SEQ ID NO: 917280
gaugcuuuacgauaguuua

SEQ ID NO: 1222879 - RNA, 19 nt, Artificial Sequence
  Description of Artificial Sequence: Synthetic oligonucleotide
  Antisense strand to SEQ ID NO: 1222878
uaaacuaucguaaagcauc

SEQ ID NO: 1222880 - RNA, 19 nt, Artificial Sequence
  Description of Artificial Sequence: Synthetic oligonucleotide
  Sense strand starting at position 2656 of SEQ ID NO: 917280
gcuuuacgauaguuuauuu

SEQ ID NO: 1222881 - RNA, 19 nt, Artificial Sequence
  Description of Artificial Sequence: Synthetic oligonucleotide
  Antisense strand to SEQ ID NO: 1222880
aaauaaacuaucguaaagc

SEQ ID NO: 1222882 - RNA, 19 nt, Artificial Sequence
  Description of Artificial Sequence: Synthetic oligonucleotide
  Sense strand starting at position 2821 of SEQ ID NO: 917280
guugaaucgcgcccuuaga

SEQ ID NO: 1222883 - RNA, 19 nt, Artificial Sequence
  Description of Artificial Sequence: Synthetic oligonucleotide
  Antisense strand to SEQ ID NO: 1222882
ucuaagggcgcgauucaac

SEQ ID NO: 1222884 - RNA, 19 nt, Artificial Sequence
  Description of Artificial Sequence: Synthetic oligonucleotide
  Sense strand starting at position 2843 of SEQ ID NO: 917280
acaacaguugcagaucuaa

SEQ ID NO: 1222885 - RNA, 19 nt, Artificial Sequence
  Description of Artificial Sequence: Synthetic oligonucleotide
  Antisense strand to SEQ ID NO: 1222884
uuagaucugcaacuguugu

SEQ ID NO: 1222886 - RNA, 19 nt, Artificial Sequence
  Description of Artificial Sequence: Synthetic oligonucleotide
  Sense strand starting at position 3184 of SEQ ID NO: 917280
ugucauauuuaugagugau

SEQ ID NO: 1222887 - RNA, 19 nt, Artificial Sequence
  Description of Artificial Sequence: Synthetic oligonucleotide
  Antisense strand to SEQ ID NO: 1222886
aucacucauaaauaugaca

SEQ ID NO: 1222888 - RNA, 19 nt, Artificial Sequence
  Description of Artificial Sequence: Synthetic oligonucleotide
  Sense strand starting at position 3194 of SEQ ID NO: 917280
augagugauuaucugauca

SEQ ID NO: 1222889 - RNA, 19 nt, Artificial Sequence
  Description of Artificial Sequence: Synthetic oligonucleotide
  Antisense strand to SEQ ID NO: 1222888
ugaucagauaaucacucau

SEQ ID NO: 1222890 - RNA, 19 nt, Artificial Sequence
  Description of Artificial Sequence: Synthetic oligonucleotide
  Sense strand starting at position 3198 of SEQ ID NO: 917280
gugauuaucugaucacuga

SEQ ID NO: 1222891 - RNA, 19 nt, Artificial Sequence
  Description of Artificial Sequence: Synthetic oligonucleotide
  Antisense strand to SEQ ID NO: 1222890
ucagugaucagauaaucac

SEQ ID NO: 1222892 - RNA, 19 nt, Artificial Sequence
  Description of Artificial Sequence: Synthetic oligonucleotide
  Sense strand starting at position 3209 of SEQ ID NO: 917280
aucacugauuuggguauga

SEQ ID NO: 1222893 - RNA, 19 nt, Artificial Sequence
  Description of Artificial Sequence: Synthetic oligonucleotide
  Antisense strand to SEQ ID NO: 1222892
ucauacccaaaucagugau

SEQ ID NO: 1222894 - RNA, 19 nt, Artificial Sequence
  Description of Artificial Sequence: Synthetic oligonucleotide
  Sense strand starting at position 3234 of SEQ ID NO: 917280
guaagagcuccugaaugcu

SEQ ID NO: 1222895 - RNA, 19 nt, Artificial Sequence
  Description of Artificial Sequence: Synthetic oligonucleotide
  Antisense strand to SEQ ID NO: 1222894
agcauucaggagcucuuac

SEQ ID NO: 1222896 - RNA, 19 nt, Artificial Sequence
  Description of Artificial Sequence: Synthetic oligonucleotide
  Sense strand starting at position 3271 of SEQ ID NO: 917280
agaggagggugucaagaaa

SEQ ID NO: 1222897 - RNA, 19 nt, Artificial Sequence
  Description of Artificial Sequence: Synthetic oligonucleotide
  Antisense strand to SEQ ID NO: 1222896
uuucuugacacccuccucu

SEQ ID NO: 1222898 - RNA, 19 nt, Artificial Sequence
  Description of Artificial Sequence: Synthetic oligonucleotide
  Sense strand starting at position 3289 of SEQ ID NO: 917280
augauugggucacugaaug

SEQ ID NO: 1222899 - RNA, 19 nt, Artificial Sequence
  Description of Artificial Sequence: Synthetic oligonucleotide
  Antisense strand to SEQ ID NO: 1222898
cauucagugacccaaucau

SEQ ID NO: 1222900 - RNA, 19 nt, Artificial Sequence
  Description of Artificial Sequence: Synthetic oligonucleotide
  Sense strand starting at position 3300 of SEQ ID NO: 917280
acugaauguuucuugugua

SEQ ID NO: 1222901 - RNA, 19 nt, Artificial Sequence
  Description of Artificial Sequence: Synthetic oligonucleotide
  Antisense strand to SEQ ID NO: 1222900
uacacaagaaacauucagu

SEQ ID NO: 1222902 - RNA, 19 nt, Artificial Sequence
  Description of Artificial Sequence: Synthetic oligonucleotide
  Sense strand starting at position 3352 of SEQ ID NO: 917280
gaaugcaaaggcgaauaau

SEQ ID NO: 1222903 - RNA, 19 nt, Artificial Sequence
  Description of Artificial Sequence: Synthetic oligonucleotide
  Antisense strand to SEQ ID NO: 1222902
auuauucgccuuugcauuc

SEQ ID NO: 1222904 - RNA, 19 nt, Artificial Sequence
  Description of Artificial Sequence: Synthetic oligonucleotide
  Sense strand starting at position 3361 of SEQ ID NO: 917280
ggcgaauaaucuccaaagc

SEQ ID NO: 1222905 - RNA, 19 nt, Artificial Sequence
  Description of Artificial Sequence: Synthetic oligonucleotide
  Antisense strand to SEQ ID NO: 1222904
gcuuuggagauuauucgcc

SEQ ID NO: 1222906 - RNA, 19 nt, Artificial Sequence
  Description of Artificial Sequence: Synthetic oligonucleotide
  Sense strand starting at position 3424 of SEQ ID NO: 917280
guuaucacaucaguuugaa

SEQ ID NO: 1222907 - RNA, 19 nt, Artificial Sequence
  Description of Artificial Sequence: Synthetic oligonucleotide
  Antisense strand to SEQ ID NO: 1222906
uucaaacugaugugauaac

SEQ ID NO: 1222908 - RNA, 19 nt, Artificial Sequence
  Description of Artificial Sequence: Synthetic oligonucleotide
  Sense strand starting at position 3427 of SEQ ID NO: 917280
aucacaucaguuugaagua

SEQ ID NO: 1222909 - RNA, 19 nt, Artificial Sequence
  Description of Artificial Sequence: Synthetic oligonucleotide
  Antisense strand to SEQ ID NO: 1222908
uacuucaaacugaugugau

SEQ ID NO: 1222910 - RNA, 19 nt, Artificial Sequence
  Description of Artificial Sequence: Synthetic oligonucleotide
  Sense strand starting at position 3471 of SEQ ID NO: 917280
gcaagaucuuuguucuuga

SEQ ID NO: 1222911 - RNA, 19 nt, Artificial Sequence
  Description of Artificial Sequence: Synthetic oligonucleotide
  Antisense strand to SEQ ID NO: 1222910
ucaagaacaaagaucuugc

SEQ ID NO: 1222912 - RNA, 19 nt, Artificial Sequence
  Description of Artificial Sequence: Synthetic oligonucleotide
  Sense strand starting at position 3474 of SEQ ID NO: 917280
agaucuuuguucuugauaa

SEQ ID NO: 1222913 - RNA, 19 nt, Artificial Sequence
  Description of Artificial Sequence: Synthetic oligonucleotide
  Antisense strand to SEQ ID NO: 1222912
uuaucaagaacaaagaucu

SEQ ID NO: 1222914 - RNA, 19 nt, Artificial Sequence
  Description of Artificial Sequence: Synthetic oligonucleotide
  Sense strand starting at position 3496 of SEQ ID NO: 917280
uuauccuucuguguaacua

SEQ ID NO: 1222915 - RNA, 19 nt, Artificial Sequence
  Description of Artificial Sequence: Synthetic oligonucleotide
  Antisense strand to SEQ ID NO: 1222914
uaguuacacagaaggauaa

SEQ ID NO: 1222916 - RNA, 19 nt, Artificial Sequence
  Description of Artificial Sequence: Synthetic oligonucleotide
  Sense strand starting at position 3504 of SEQ ID NO: 917280
cuguguaacuacccaguga

SEQ ID NO: 1222917 - RNA, 19 nt, Artificial Sequence
  Description of Artificial Sequence: Synthetic oligonucleotide
  Antisense strand to SEQ ID NO: 1222916
ucacuggguaguuacacag

SEQ ID NO: 1222918 - RNA, 19 nt, Artificial Sequence
  Description of Artificial Sequence: Synthetic oligonucleotide
  Sense strand starting at position 3508 of SEQ ID NO: 917280
guaacuacccagugagcuu

SEQ ID NO: 1222919 - RNA, 19 nt, Artificial Sequence
  Description of Artificial Sequence: Synthetic oligonucleotide
  Antisense strand to SEQ ID NO: 1222918
aagcucacuggguaguuac

SEQ ID NO: 1222920 - RNA, 19 nt, Artificial Sequence
  Description of Artificial Sequence: Synthetic oligonucleotide
  Sense strand starting at position 3594 of SEQ ID NO: 917280
gcucaugucagugugcuga

SEQ ID NO: 1222921 - RNA, 19 nt, Artificial Sequence
  Description of Artificial Sequence: Synthetic oligonucleotide
  Antisense strand to SEQ ID NO: 1222920
ucagcacacugacaugagc

SEQ ID NO: 1222922 - RNA, 19 nt, Artificial Sequence
  Description of Artificial Sequence: Synthetic oligonucleotide
  Sense strand starting at position 3698 of SEQ ID NO: 917280
uguucuguucuuugggaua

SEQ ID NO: 1222923 - RNA, 19 nt, Artificial Sequence
  Description of Artificial Sequence: Synthetic oligonucleotide
  Antisense strand to SEQ ID NO: 1222922
uaucccaaagaacagaaca

SEQ ID NO: 1222924 - RNA, 19 nt, Artificial Sequence
  Description of Artificial Sequence: Synthetic oligonucleotide
  Sense strand starting at position 3751 of SEQ ID NO: 917280
gcaggauuucgaggugguu

SEQ ID NO: 1222925 - RNA, 19 nt, Artificial Sequence
  Description of Artificial Sequence: Synthetic oligonucleotide
  Antisense strand to SEQ ID NO: 1222924
aaccaccucgaaauccugc

SEQ ID NO: 1222926 - RNA, 19 nt, Artificial Sequence
  Description of Artificial Sequence: Synthetic oligonucleotide
  Sense strand starting at position 3770 of SEQ ID NO: 917280
gugcuacuaggcguuauau

SEQ ID NO: 1222927 - RNA, 19 nt, Artificial Sequence
  Description of Artificial Sequence: Synthetic oligonucleotide
  Antisense strand to SEQ ID NO: 1222926
auauaacgccuaguagcac

SEQ ID NO: 1222928 - RNA, 19 nt, Artificial Sequence
  Description of Artificial Sequence: Synthetic oligonucleotide
  Sense strand starting at position 3772 of SEQ ID NO: 917280
gcuacuaggcguuauauua

SEQ ID NO: 1222929 - RNA, 19 nt, Artificial Sequence
  Description of Artificial Sequence: Synthetic oligonucleotide
  Antisense strand to SEQ ID NO: 1222928
uaauauaacgccuaguagc

SEQ ID NO: 1222930 - RNA, 19 nt, Artificial Sequence
  Description of Artificial Sequence: Synthetic oligonucleotide
  Sense strand starting at position 3791 of SEQ ID NO: 917280
gugucagagaccugacaaa

SEQ ID NO: 1222931 - RNA, 19 nt, Artificial Sequence
  Description of Artificial Sequence: Synthetic oligonucleotide
  Antisense strand to SEQ ID NO: 1222930
uuugucaggucucugacac

SEQ ID NO: 1222932 - RNA, 19 nt, Artificial Sequence
  Description of Artificial Sequence: Synthetic oligonucleotide
  Sense strand starting at position 3849 of SEQ ID NO: 917280
guaucaguucugcacauau

SEQ ID NO: 1222933 - RNA, 19 nt, Artificial Sequence
  Description of Artificial Sequence: Synthetic oligonucleotide
  Antisense strand to SEQ ID NO: 1222932
auaugugcagaacugauac

SEQ ID NO: 1222934 - RNA, 19 nt, Artificial Sequence
  Description of Artificial Sequence: Synthetic oligonucleotide
  Sense strand starting at position 3885 of SEQ ID NO: 917281
ugcucauugcaucagcaaa

SEQ ID NO: 1222935 - RNA, 19 nt, Artificial Sequence
  Description of Artificial Sequence: Synthetic oligonucleotide
  Antisense strand to SEQ ID NO: 1222934
uuugcugaugcaaugagca

SEQ ID NO: 1222936 - RNA, 19 nt, Artificial Sequence
  Description of Artificial Sequence: Synthetic oligonucleotide
  Sense strand starting at position 19 of SEQ ID NO: 917281
uuauguaacugauugacca

SEQ ID NO: 1222937 - RNA, 19 nt, Artificial Sequence
  Description of Artificial Sequence: Synthetic oligonucleotide
  Antisense strand to SEQ ID NO: 1222936
uggucaaucaguuacauaa

SEQ ID NO: 1222938 - RNA, 19 nt, Artificial Sequence
  Description of Artificial Sequence: Synthetic oligonucleotide
  Sense strand starting at position 66 of SEQ ID NO: 917281
ugaaccuuccuaggacuaa

SEQ ID NO: 1222939 - RNA, 19 nt, Artificial Sequence
  Description of Artificial Sequence: Synthetic oligonucleotide
  Antisense strand to SEQ ID NO: 1222938
uuaguccuaggaagguuca

SEQ ID NO: 1222940 - RNA, 19 nt, Artificial Sequence
  Description of Artificial Sequence: Synthetic oligonucleotide
  Sense strand starting at position 122 of SEQ ID NO: 917281
gucauugcaguccaaagaa

SEQ ID NO: 1222941 - RNA, 19 nt, Artificial Sequence
  Description of Artificial Sequence: Synthetic oligonucleotide
  Antisense strand to SEQ ID NO: 1222940
uucuuuggacugcaaugac

SEQ ID NO: 1222942 - RNA, 19 nt, Artificial Sequence
  Description of Artificial Sequence: Synthetic oligonucleotide
  Sense strand starting at position 497 of SEQ ID NO: 917281
accugugcguuauuauuua

SEQ ID NO: 1222943 - RNA, 19 nt, Artificial Sequence
  Description of Artificial Sequence: Synthetic oligonucleotide
  Antisense strand to SEQ ID NO: 1222942
uaaauaauaacgcacaggu

SEQ ID NO: 1222944 - RNA, 19 nt, Artificial Sequence
  Description of Artificial Sequence: Synthetic oligonucleotide
  Sense strand starting at position 523 of SEQ ID NO: 917281
auucuauuguaaccagaug

SEQ ID NO: 1222945 - RNA, 19 nt, Artificial Sequence
  Description of Artificial Sequence: Synthetic oligonucleotide
  Antisense strand to SEQ ID NO: 1222944
caucugguuacaauagaau

SEQ ID NO: 1222946 - RNA, 19 nt, Artificial Sequence
  Description of Artificial Sequence: Synthetic oligonucleotide
  Sense strand starting at position 633 of SEQ ID NO: 917281
uuuacuuucucuuugggaa

SEQ ID NO: 1222947 - RNA, 19 nt, Artificial Sequence
  Description of Artificial Sequence: Synthetic oligonucleotide
  Antisense strand to SEQ ID NO: 1222946
uucccaaagagaaaguaaa

SEQ ID NO: 1222948 - RNA, 19 nt, Artificial Sequence
  Description of Artificial Sequence: Synthetic oligonucleotide
  Sense strand starting at position 634 of SEQ ID NO: 917281
uuacuuucucuuugggaag

SEQ ID NO: 1222949 - RNA, 19 nt, Artificial Sequence
  Description of Artificial Sequence: Synthetic oligonucleotide
  Antisense strand to SEQ ID NO: 1222948
cuucccaaagagaaaguaa

SEQ ID NO: 1222950 - RNA, 19 nt, Artificial Sequence
  Description of Artificial Sequence: Synthetic oligonucleotide
  Sense strand starting at position 882 of SEQ ID NO: 917281
acaggaugugauggcucaa

SEQ ID NO: 1222951 - RNA, 19 nt, Artificial Sequence
  Description of Artificial Sequence: Synthetic oligonucleotide
  Antisense strand to SEQ ID NO: 1222950
uugagccaucacauccugu

SEQ ID NO: 1222952 - RNA, 19 nt, Artificial Sequence
  Description of Artificial Sequence: Synthetic oligonucleotide
  Sense strand starting at position 907 of SEQ ID NO: 917281
aaaugugguuucuuacaga

SEQ ID NO: 1222953 - RNA, 19 nt, Artificial Sequence
  Description of Artificial Sequence: Synthetic oligonucleotide
  Antisense strand to SEQ ID NO: 1222952
ucuguaagaaaccacauuu

SEQ ID NO: 1222954 - RNA, 19 nt, Artificial Sequence
  Description of Artificial Sequence: Synthetic oligonucleotide
  Sense strand starting at position 1096 of SEQ ID NO: 917281
agcaucuuauaguugauga

SEQ ID NO: 1222955 - RNA, 19 nt, Artificial Sequence
  Description of Artificial Sequence: Synthetic oligonucleotide
  Antisense strand to SEQ ID NO: 1222954
ucaucaacuauaagaugcu

SEQ ID NO: 1222956 - RNA, 19 nt, Artificial Sequence
  Description of Artificial Sequence: Synthetic oligonucleotide
  Sense strand starting at position 1145 of SEQ ID NO: 917281
uccguaucacaagaaagua

SEQ ID NO: 1222957 - RNA, 19 nt, Artificial Sequence
  Description of Artificial Sequence: Synthetic oligonucleotide
  Antisense strand to SEQ ID NO: 1222956
uacuuucuugugauacgga

SEQ ID NO: 1222958 - RNA, 19 nt, Artificial Sequence
  Description of Artificial Sequence: Synthetic oligonucleotide
  Sense strand starting at position 1366 of SEQ ID NO: 917281
ugaucuuccugccuuagga

SEQ ID NO: 1222959 - RNA, 19 nt, Artificial Sequence
  Description of Artificial Sequence: Synthetic oligonucleotide
  Antisense strand to SEQ ID NO: 1222958
uccuaaggcaggaagauca

SEQ ID NO: 1222960 - RNA, 19 nt, Artificial Sequence
  Description of Artificial Sequence: Synthetic oligonucleotide
  Sense strand starting at position 1368 of SEQ ID NO: 917281
aucuuccugccuuaggaaa

SEQ ID NO: 1222961 - RNA, 19 nt, Artificial Sequence
  Description of Artificial Sequence: Synthetic oligonucleotide
  Antisense strand to SEQ ID NO: 1222960
uuuccuaaggcaggaagau

SEQ ID NO: 1222962 - RNA, 19 nt, Artificial Sequence
  Description of Artificial Sequence: Synthetic oligonucleotide
  Sense strand starting at position 1381 of SEQ ID NO: 917281
aggaaacucccguauaguu

SEQ ID NO: 1222963 - RNA, 19 nt, Artificial Sequence
  Description of Artificial Sequence: Synthetic oligonucleotide
  Antisense strand to SEQ ID NO: 1222962
aacuauacgggaguuuccu

SEQ ID NO: 1222964 - RNA, 19 nt, Artificial Sequence
  Description of Artificial Sequence: Synthetic oligonucleotide
  Sense strand starting at position 1625 of SEQ ID NO: 917281
gauagaaaguuugccuaac

SEQ ID NO: 1222965 - RNA, 19 nt, Artificial Sequence
  Description of Artificial Sequence: Synthetic oligonucleotide
  Antisense strand to SEQ ID NO: 1222964
guuaggcaaacuuucuauc

SEQ ID NO: 1222966 - RNA, 19 nt, Artificial Sequence
  Description of Artificial Sequence: Synthetic oligonucleotide
  Sense strand starting at position 1626 of SEQ ID NO: 917281
auagaaaguuugccuaacu

SEQ ID NO: 1222967 - RNA, 19 nt, Artificial Sequence
  Description of Artificial Sequence: Synthetic oligonucleotide
  Antisense strand to SEQ ID NO: 1222966
aguuaggcaaacuuucuau

SEQ ID NO: 1222968 - RNA, 19 nt, Artificial Sequence
  Description of Artificial Sequence: Synthetic oligonucleotide
  Sense strand starting at position 1627 of SEQ ID NO: 917281
uagaaaguuugccuaacug

SEQ ID NO: 1222969 - RNA, 19 nt, Artificial Sequence
  Description of Artificial Sequence: Synthetic oligonucleotide
  Antisense strand to SEQ ID NO: 1222968
caguuaggcaaacuuucua

SEQ ID NO: 1222970 - RNA, 19 nt, Artificial Sequence
  Description of Artificial Sequence: Synthetic oligonucleotide
  Sense strand starting at position 1638 of SEQ ID NO: 917281
ccuaacugguuuguuaaga

SEQ ID NO: 1222971 - RNA, 19 nt, Artificial Sequence
  Description of Artificial Sequence: Synthetic oligonucleotide
  Antisense strand to SEQ ID NO: 1222970
ucuuaacaaaccaguuagg

SEQ ID NO: 1222972 - RNA, 19 nt, Artificial Sequence
  Description of Artificial Sequence: Synthetic oligonucleotide
  Sense strand starting at position 1639 of SEQ ID NO: 917281
cuaacugguuuguuaagau

SEQ ID NO: 1222973 - RNA, 19 nt, Artificial Sequence
  Description of Artificial Sequence: Synthetic oligonucleotide
  Antisense strand to SEQ ID NO: 1222972
aucuuaacaaaccaguuag

SEQ ID NO: 1222974 - RNA, 19 nt, Artificial Sequence
  Description of Artificial Sequence: Synthetic oligonucleotide
  Sense strand starting at position 1736 of SEQ ID NO: 917281
aaaggagacuacuaggaau

SEQ ID NO: 1222975 - RNA, 19 nt, Artificial Sequence
  Description of Artificial Sequence: Synthetic oligonucleotide
  Antisense strand to SEQ ID NO: 1222974
auuccuaguagucuccuuu

SEQ ID NO: 1222976 - RNA, 19 nt, Artificial Sequence
  Description of Artificial Sequence: Synthetic oligonucleotide
  Sense strand starting at position 1838 of SEQ ID NO: 917281
gugugauguaauuaagagu

SEQ ID NO: 1222977 - RNA, 19 nt, Artificial Sequence
  Description of Artificial Sequence: Synthetic oligonucleotide
  Antisense strand to SEQ ID NO: 1222976
acucuuaauuacaucacac

SEQ ID NO: 1222978 - RNA, 19 nt, Artificial Sequence
  Description of Artificial Sequence: Synthetic oligonucleotide
  Sense strand starting at position 1888 of SEQ ID NO: 917281
ggaggaucagccugaaaug

SEQ ID NO: 1222979 - RNA, 19 nt, Artificial Sequence
  Description of Artificial Sequence: Synthetic oligonucleotide
  Antisense strand to SEQ ID NO: 1222978
cauuucaggcugauccucc

SEQ ID NO: 1222980 - RNA, 19 nt, Artificial Sequence
  Description of Artificial Sequence: Synthetic oligonucleotide
  Sense strand starting at position 1898 of SEQ ID NO: 917281
ccugaaauguuggucagua

SEQ ID NO: 1222981 - RNA, 19 nt, Artificial Sequence
  Description of Artificial Sequence: Synthetic oligonucleotide
  Antisense strand to SEQ ID NO: 1222980
uacugaccaacauuucagg

SEQ ID NO: 1222982 - RNA, 19 nt, Artificial Sequence
  Description of Artificial Sequence: Synthetic oligonucleotide
  Sense strand starting at position 1899 of SEQ ID NO: 917281
cugaaauguuggucaguag

SEQ ID NO: 1222983 - RNA, 19 nt, Artificial Sequence
  Description of Artificial Sequence: Synthetic oligonucleotide
  Antisense strand to SEQ ID NO: 1222982
cuacugaccaacauuucag

SEQ ID NO: 1222984 - RNA, 19 nt, Artificial Sequence
  Description of Artificial Sequence: Synthetic oligonucleotide
  Sense strand starting at position 1900 of SEQ ID NO: 917281
ugaaauguuggucaguagu

SEQ ID NO: 1222985 - RNA, 19 nt, Artificial Sequence
  Description of Artificial Sequence: Synthetic oligonucleotide
  Antisense strand to SEQ ID NO: 1222984
acuacugaccaacauuuca

SEQ ID NO: 1222986 - RNA, 19 nt, Artificial Sequence
  Description of Artificial Sequence: Synthetic oligonucleotide
  Sense strand starting at position 1993 of SEQ ID NO: 917281
uguggaaaugaaugagugu

SEQ ID NO: 1222987 - RNA, 19 nt, Artificial Sequence
  Description of Artificial Sequence: Synthetic oligonucleotide
  Antisense strand to SEQ ID NO: 1222986
acacucauucauuuccaca

SEQ ID NO: 1222988 - RNA, 19 nt, Artificial Sequence
  Description of Artificial Sequence: Synthetic oligonucleotide
  Sense strand starting at position 2014 of SEQ ID NO: 917281
cuuccugaugccuaagacu

SEQ ID NO: 1222989 - RNA, 19 nt, Artificial Sequence
  Description of Artificial Sequence: Synthetic oligonucleotide
  Antisense strand to SEQ ID NO: 1222988
agucuuaggcaucaggaag

SEQ ID NO: 1222990 - RNA, 19 nt, Artificial Sequence
  Description of Artificial Sequence: Synthetic oligonucleotide
  Sense strand starting at position 2159 of SEQ ID NO: 917281
ucuccucaguucuuugaca

SEQ ID NO: 1222991 - RNA, 19 nt, Artificial Sequence
  Description of Artificial Sequence: Synthetic oligonucleotide
  Antisense strand to SEQ ID NO: 1222990
ugucaaagaacugaggaga

SEQ ID NO: 1222992 - RNA, 19 nt, Artificial Sequence
  Description of Artificial Sequence: Synthetic oligonucleotide
  Sense strand starting at position 2160 of SEQ ID NO: 917281
cuccucaguucuuugacau

SEQ ID NO: 1222993 - RNA, 19 nt, Artificial Sequence
  Description of Artificial Sequence: Synthetic oligonucleotide
  Antisense strand to SEQ ID NO: 1222992
augucaaagaacugaggag

SEQ ID NO: 1222994 - RNA, 19 nt, Artificial Sequence
  Description of Artificial Sequence: Synthetic oligonucleotide
  Sense strand starting at position 2161 of SEQ ID NO: 917281
uccucaguucuuugacaua

SEQ ID NO: 1222995 - RNA, 19 nt, Artificial Sequence
  Description of Artificial Sequence: Synthetic oligonucleotide
  Antisense strand to SEQ ID NO: 1222994
uaugucaaagaacugagga

SEQ ID NO: 1222996 - RNA, 19 nt, Artificial Sequence
  Description of Artificial Sequence: Synthetic oligonucleotide
  Sense strand starting at position 2166 of SEQ ID NO: 917281
aguucuuugacauagagug

SEQ ID NO: 1222997 - RNA, 19 nt, Artificial Sequence
  Description of Artificial Sequence: Synthetic oligonucleotide
  Antisense strand to SEQ ID NO: 1222996
cacucuaugucaaagaacu

SEQ ID NO: 1222998 - RNA, 19 nt, Artificial Sequence
  Description of Artificial Sequence: Synthetic oligonucleotide
  Sense strand starting at position 2173 of SEQ ID NO: 917281
ugacauagaguguauguca

SEQ ID NO: 1222999 - RNA, 19 nt, Artificial Sequence
  Description of Artificial Sequence: Synthetic oligonucleotide
  Antisense strand to SEQ ID NO: 1222998
ugacauacacucuauguca

SEQ ID NO: 1223000 - RNA, 19 nt, Artificial Sequence
  Description of Artificial Sequence: Synthetic oligonucleotide
  Sense strand starting at position 2548 of SEQ ID NO: 917281
uaggaugugcuuuauauac

SEQ ID NO: 1223001 - RNA, 19 nt, Artificial Sequence
  Description of Artificial Sequence: Synthetic oligonucleotide
  Antisense strand to SEQ ID NO: 1223000
guauauaaagcacauccua

SEQ ID NO: 1223002 - RNA, 19 nt, Artificial Sequence
  Description of Artificial Sequence: Synthetic oligonucleotide
  Sense strand starting at position 3373 of SEQ ID NO: 917281
cuugaucucuagcuagaca

SEQ ID NO: 1223003 - RNA, 19 nt, Artificial Sequence
  Description of Artificial Sequence: Synthetic oligonucleotide
  Antisense strand to SEQ ID NO: 1223002
ugucuagcuagagaucaag

SEQ ID NO: 1223004 - RNA, 19 nt, Artificial Sequence
  Description of Artificial Sequence: Synthetic oligonucleotide
  Sense strand starting at position 3429 of SEQ ID NO: 917281
guuuaaucccaguacucuu

SEQ ID NO: 1223005 - RNA, 19 nt, Artificial Sequence
  Description of Artificial Sequence: Synthetic oligonucleotide
  Antisense strand to SEQ ID NO: 1223004
aagaguacugggauuaaac

SEQ ID NO: 1223006 - RNA, 19 nt, Artificial Sequence
  Description of Artificial Sequence: Synthetic oligonucleotide
  Sense strand starting at position 3517 of SEQ ID NO: 917281
accaguaauuggucaguua

SEQ ID NO: 1223007 - RNA, 19 nt, Artificial Sequence
  Description of Artificial Sequence: Synthetic oligonucleotide
  Antisense strand to SEQ ID NO: 1223006
uaacugaccaauuacuggu

SEQ ID NO: 1223008 - RNA, 19 nt, Artificial Sequence
  Description of Artificial Sequence: Synthetic oligonucleotide
  Sense strand starting at position 3518 of SEQ ID NO: 917281
ccaguaauuggucaguuac

SEQ ID NO: 1223009 - RNA, 19 nt, Artificial Sequence
  Description of Artificial Sequence: Synthetic oligonucleotide
  Antisense strand to SEQ ID NO: 1223008
guaacugaccaauuacugg

SEQ ID NO: 1223010 - RNA, 19 nt, Artificial Sequence
  Description of Artificial Sequence: Synthetic oligonucleotide
  Sense strand starting at position 3520 of SEQ ID NO: 917281
aguaauuggucaguuacau

SEQ ID NO: 1223011 - RNA, 19 nt, Artificial Sequence
  Description of Artificial Sequence: Synthetic oligonucleotide
  Antisense strand to SEQ ID NO: 1223010
auguaacugaccaauuacu

SEQ ID NO: 1223012 - RNA, 19 nt, Artificial Sequence
  Description of Artificial Sequence: Synthetic oligonucleotide
  Sense strand starting at position 3958 of SEQ ID NO: 917281
ugcugauguauauguaaga

SEQ ID NO: 1223013 - RNA, 19 nt, Artificial Sequence
  Description of Artificial Sequence: Synthetic oligonucleotide
  Antisense strand to SEQ ID NO: 1223012
ucuuacauauacaucagca

SEQ ID NO: 1223014 - RNA, 19 nt, Artificial Sequence
  Description of Artificial Sequence: Synthetic oligonucleotide
  Sense strand starting at position 3983 of SEQ ID NO: 917282
cuuugcuuugaauauagga

SEQ ID NO: 1223015 - RNA, 19 nt, Artificial Sequence
  Description of Artificial Sequence: Synthetic oligonucleotide
  Antisense strand to SEQ ID NO: 1223014
uccuauauucaaagcaaag

SEQ ID NO: 1223016 - RNA, 19 nt, Artificial Sequence
  Description of Artificial Sequence: Synthetic oligonucleotide
  Sense strand starting at position 28 of SEQ ID NO: 917282
cuggaaacuugauuauucu

SEQ ID NO: 1223017 - RNA, 19 nt, Artificial Sequence
  Description of Artificial Sequence: Synthetic oligonucleotide
  Antisense strand to SEQ ID NO: 1223016
agaauaaucaaguuuccag

SEQ ID NO: 1223018 - RNA, 19 nt, Artificial Sequence
  Description of Artificial Sequence: Synthetic oligonucleotide
  Sense strand starting at position 104 of SEQ ID NO: 917282
cagaaugaauaugauggau

SEQ ID NO: 1223019 - RNA, 19 nt, Artificial Sequence
  Description of Artificial Sequence: Synthetic oligonucleotide
  Antisense strand to SEQ ID NO: 1223018
auccaucauauucauucug

SEQ ID NO: 1223020 - RNA, 19 nt, Artificial Sequence
  Description of Artificial Sequence: Synthetic oligonucleotide
  Sense strand starting at position 113 of SEQ ID NO: 917282
uaugauggaucagagauuu

SEQ ID NO: 1223021 - RNA, 19 nt, Artificial Sequence
  Description of Artificial Sequence: Synthetic oligonucleotide
  Antisense strand to SEQ ID NO: 1223020
aaaucucugauccaucaua

SEQ ID NO: 1223022 - RNA, 19 nt, Artificial Sequence
  Description of Artificial Sequence: Synthetic oligonucleotide
  Sense strand starting at position 185 of SEQ ID NO: 917282
gucacaauggaguauguua

SEQ ID NO: 1223023 - RNA, 19 nt, Artificial Sequence
  Description of Artificial Sequence: Synthetic oligonucleotide
  Antisense strand to SEQ ID NO: 1223022
uaacauacuccauugugac

SEQ ID NO: 1223024 - RNA, 19 nt, Artificial Sequence
  Description of Artificial Sequence: Synthetic oligonucleotide
  Sense strand starting at position 236 of SEQ ID NO: 917282
ucaugcauuccauauggaa

SEQ ID NO: 1223025 - RNA, 19 nt, Artificial Sequence
  Description of Artificial Sequence: Synthetic oligonucleotide
  Antisense strand to SEQ ID NO: 1223024
uuccauauggaaugcauga

SEQ ID NO: 1223026 - RNA, 19 nt, Artificial Sequence
  Description of Artificial Sequence: Synthetic oligonucleotide
  Sense strand starting at position 290 of SEQ ID NO: 917282
cuggauauuugugaucaaa

SEQ ID NO: 1223027 - RNA, 19 nt, Artificial Sequence
  Description of Artificial Sequence: Synthetic oligonucleotide
  Antisense strand to SEQ ID NO: 1223026
uuugaucacaaauauccag

SEQ ID NO: 1223028 - RNA, 19 nt, Artificial Sequence
  Description of Artificial Sequence: Synthetic oligonucleotide
  Sense strand starting at position 724 of SEQ ID NO: 917282
caaaguaguagguagugua

SEQ ID NO: 1223029 - RNA, 19 nt, Artificial Sequence
  Description of Artificial Sequence: Synthetic oligonucleotide
  Antisense strand to SEQ ID NO: 1223028
uacacuaccuacuacuuug

SEQ ID NO: 1223030 - RNA, 19 nt, Artificial Sequence
  Description of Artificial Sequence: Synthetic oligonucleotide
  Sense strand starting at position 942 of SEQ ID NO: 917282
acaaucauauaggagauua

SEQ ID NO: 1223031 - RNA, 19 nt, Artificial Sequence
  Description of Artificial Sequence: Synthetic oligonucleotide
  Antisense strand to SEQ ID NO: 1223030
uaaucuccuauaugauugu

SEQ ID NO: 1223032 - RNA, 19 nt, Artificial Sequence
  Description of Artificial Sequence: Synthetic oligonucleotide
  Sense strand starting at position 953 of SEQ ID NO: 917282
ggagauuaauacuucgaua

SEQ ID NO: 1223033 - RNA, 19 nt, Artificial Sequence
  Description of Artificial Sequence: Synthetic oligonucleotide
  Antisense strand to SEQ ID NO: 1223032
uaucgaaguauuaaucucc

SEQ ID NO: 1223034 - RNA, 19 nt, Artificial Sequence
  Description of Artificial Sequence: Synthetic oligonucleotide
  Sense strand starting at position 955 of SEQ ID NO: 917282
agauuaauacuucgauacu

SEQ ID NO: 1223035 - RNA, 19 nt, Artificial Sequence
  Description of Artificial Sequence: Synthetic oligonucleotide
  Antisense strand to SEQ ID NO: 1223034
aguaucgaaguauuaaucu

SEQ ID NO: 1223036 - RNA, 19 nt, Artificial Sequence
  Description of Artificial Sequence: Synthetic oligonucleotide
  Sense strand starting at position 966 of SEQ ID NO: 917282
ucgauacuuuccuuccgaa

SEQ ID NO: 1223037 - RNA, 19 nt, Artificial Sequence
  Description of Artificial Sequence: Synthetic oligonucleotide
  Antisense strand to SEQ ID NO: 1223036
uucggaaggaaaguaucga

SEQ ID NO: 1223038 - RNA, 19 nt, Artificial Sequence
  Description of Artificial Sequence: Synthetic oligonucleotide
  Sense strand starting at position 1123 of SEQ ID NO: 917282
cuuauaauagcuuaugcga

SEQ ID NO: 1223039 - RNA, 19 nt, Artificial Sequence
  Description of Artificial Sequence: Synthetic oligonucleotide
  Antisense strand to SEQ ID NO: 1223038
ucgcauaagcuauuauaag

SEQ ID NO: 1223040 - RNA, 19 nt, Artificial Sequence
  Description of Artificial Sequence: Synthetic oligonucleotide
  Sense strand starting at position 1144 of SEQ ID NO: 917282
aguaguuagaaacaguauu

SEQ ID NO: 1223041 - RNA, 19 nt, Artificial Sequence
  Description of Artificial Sequence: Synthetic oligonucleotide
  Antisense strand to SEQ ID NO: 1223040
aauacuguuucuaacuacu

SEQ ID NO: 1223042 - RNA, 19 nt, Artificial Sequence
  Description of Artificial Sequence: Synthetic oligonucleotide
  Sense strand starting at position 1183 of SEQ ID NO: 917282
uugucuugcccugauaaug

SEQ ID NO: 1223043 - RNA, 19 nt, Artificial Sequence
  Description of Artificial Sequence: Synthetic oligonucleotide
  Antisense strand to SEQ ID NO: 1223042
cauuaucagggcaagacaa

SEQ ID NO: 1223044 - RNA, 19 nt, Artificial Sequence
  Description of Artificial Sequence: Synthetic oligonucleotide
  Sense strand starting at position 1192 of SEQ ID NO: 917282
ccugauaaugugggaaucu

SEQ ID NO: 1223045 - RNA, 19 nt, Artificial Sequence
  Description of Artificial Sequence: Synthetic oligonucleotide
  Antisense strand to SEQ ID NO: 1223044
agauucccacauuaucagg

SEQ ID NO: 1223046 - RNA, 19 nt, Artificial Sequence
  Description of Artificial Sequence: Synthetic oligonucleotide
  Sense strand starting at position 1331 of SEQ ID NO: 917282
uauaaacugcuguggagaa

SEQ ID NO: 1223047 - RNA, 19 nt, Artificial Sequence
  Description of Artificial Sequence: Synthetic oligonucleotide
  Antisense strand to SEQ ID NO: 1223046
uucuccacagcaguuuaua

SEQ ID NO: 1223048 - RNA, 19 nt, Artificial Sequence
  Description of Artificial Sequence: Synthetic oligonucleotide
  Sense strand starting at position 1346 of SEQ ID NO: 917282
agaaacgaguucuuggaaa

SEQ ID NO: 1223049 - RNA, 19 nt, Artificial Sequence
  Description of Artificial Sequence: Synthetic oligonucleotide
  Antisense strand to SEQ ID NO: 1223048
uuuccaagaacucguuucu

SEQ ID NO: 1223050 - RNA, 19 nt, Artificial Sequence
  Description of Artificial Sequence: Synthetic oligonucleotide
  Sense strand starting at position 1348 of SEQ ID NO: 917282
aaacgaguucuuggaaaga

SEQ ID NO: 1223051 - RNA, 19 nt, Artificial Sequence
  Description of Artificial Sequence: Synthetic oligonucleotide
  Antisense strand to SEQ ID NO: 1223050
ucuuuccaagaacucguuu

SEQ ID NO: 1223052 - RNA, 19 nt, Artificial Sequence
  Description of Artificial Sequence: Synthetic oligonucleotide
  Sense strand starting at position 1418 of SEQ ID NO: 917282
gccguuucucgacuuacuu

SEQ ID NO: 1223053 - RNA, 19 nt, Artificial Sequence
  Description of Artificial Sequence: Synthetic oligonucleotide
  Antisense strand to SEQ ID NO: 1223052
aaguaagucgagaaacggc

SEQ ID NO: 1223054 - RNA, 19 nt, Artificial Sequence
  Description of Artificial Sequence: Synthetic oligonucleotide
  Sense strand starting at position 1427 of SEQ ID NO: 917282
cgacuuacuuauucccuga

SEQ ID NO: 1223055 - RNA, 19 nt, Artificial Sequence
  Description of Artificial Sequence: Synthetic oligonucleotide
  Antisense strand to SEQ ID NO: 1223054
ucagggaauaaguaagucg

SEQ ID NO: 1223056 - RNA, 19 nt, Artificial Sequence
  Description of Artificial Sequence: Synthetic oligonucleotide
  Sense strand starting at position 1430 of SEQ ID NO: 917282
cuuacuuauucccugaugu

SEQ ID NO: 1223057 - RNA, 19 nt, Artificial Sequence
  Description of Artificial Sequence: Synthetic oligonucleotide
  Antisense strand to SEQ ID NO: 1223056
acaucagggaauaaguaag

SEQ ID NO: 1223058 - RNA, 19 nt, Artificial Sequence
  Description of Artificial Sequence: Synthetic oligonucleotide
  Sense strand starting at position 1431 of SEQ ID NO: 917282
uuacuuauucccugaugua

SEQ ID NO: 1223059 - RNA, 19 nt, Artificial Sequence
  Description of Artificial Sequence: Synthetic oligonucleotide
  Antisense strand to SEQ ID NO: 1223058
uacaucagggaauaaguaa

SEQ ID NO: 1223060 - RNA, 19 nt, Artificial Sequence
  Description of Artificial Sequence: Synthetic oligonucleotide
  Sense strand starting at position 1443 of SEQ ID NO: 917282
ugauguauccacugccuga

SEQ ID NO: 1223061 - RNA, 19 nt, Artificial Sequence
  Description of Artificial Sequence: Synthetic oligonucleotide
  Antisense strand to SEQ ID NO: 1223060
ucaggcaguggauacauca

SEQ ID NO: 1223062 - RNA, 19 nt, Artificial Sequence
  Description of Artificial Sequence: Synthetic oligonucleotide
  Sense strand starting at position 1446 of SEQ ID NO: 917282
uguauccacugccugaaua

SEQ ID NO: 1223063 - RNA, 19 nt, Artificial Sequence
  Description of Artificial Sequence: Synthetic oligonucleotide
  Antisense strand to SEQ ID NO: 1223062
uauucaggcaguggauaca

SEQ ID NO: 1223064 - RNA, 19 nt, Artificial Sequence
  Description of Artificial Sequence: Synthetic oligonucleotide
  Sense strand starting at position 1447 of SEQ ID NO: 917282
guauccacugccugaauau

SEQ ID NO: 1223065 - RNA, 19 nt, Artificial Sequence
  Description of Artificial Sequence: Synthetic oligonucleotide
  Antisense strand to SEQ ID NO: 1223064
auauucaggcaguggauac

SEQ ID NO: 1223066 - RNA, 19 nt, Artificial Sequence
  Description of Artificial Sequence: Synthetic oligonucleotide
  Sense strand starting at position 1568 of SEQ ID NO: 917282
cuggaacugucgccagaaa

SEQ ID NO: 1223067 - RNA, 19 nt, Artificial Sequence
  Description of Artificial Sequence: Synthetic oligonucleotide
  Antisense strand to SEQ ID NO: 1223066
uuucuggcgacaguuccag

SEQ ID NO: 1223068 - RNA, 19 nt, Artificial Sequence
  Description of Artificial Sequence: Synthetic oligonucleotide
  Sense strand starting at position 1626 of SEQ ID NO: 917282
ggacucucgaaaugaucca

SEQ ID NO: 1223069 - RNA, 19 nt, Artificial Sequence
  Description of Artificial Sequence: Synthetic oligonucleotide
  Antisense strand to SEQ ID NO: 1223068
uggaucauuucgagagucc

SEQ ID NO: 1223070 - RNA, 19 nt, Artificial Sequence
  Description of Artificial Sequence: Synthetic oligonucleotide
  Sense strand starting at position 1631 of SEQ ID NO: 917282
cucgaaaugauccaccgau

SEQ ID NO: 1223071 - RNA, 19 nt, Artificial Sequence
  Description of Artificial Sequence: Synthetic oligonucleotide
  Antisense strand to SEQ ID NO: 1223070
aucgguggaucauuucgag

SEQ ID NO: 1223072 - RNA, 19 nt, Artificial Sequence
  Description of Artificial Sequence: Synthetic oligonucleotide
  Sense strand starting at position 2767 of SEQ ID NO: 917282
uagcccucuggugaacaaa

SEQ ID NO: 1223073 - RNA, 19 nt, Artificial Sequence
  Description of Artificial Sequence: Synthetic oligonucleotide
  Antisense strand to SEQ ID NO: 1223072
uuuguucaccagagggcua

SEQ ID NO: 1223074 - RNA, 19 nt, Artificial Sequence
  Description of Artificial Sequence: Synthetic oligonucleotide
  Sense strand starting at position 3101 of SEQ ID NO: 917282
gugcaauugucauuauuaa

SEQ ID NO: 1223075 - RNA, 19 nt, Artificial Sequence
  Description of Artificial Sequence: Synthetic oligonucleotide
  Antisense strand to SEQ ID NO: 1223074
uuaauaaugacaauugcac

SEQ ID NO: 1223076 - RNA, 19 nt, Artificial Sequence
  Description of Artificial Sequence: Synthetic oligonucleotide
  Sense strand starting at position 3123 of SEQ ID NO: 917282
uaccgacucguuuacucaa

SEQ ID NO: 1223077 - RNA, 19 nt, Artificial Sequence
  Description of Artificial Sequence: Synthetic oligonucleotide
  Antisense strand to SEQ ID NO: 1223076
uugaguaaacgagucggua

SEQ ID NO: 1223078 - RNA, 19 nt, Artificial Sequence
  Description of Artificial Sequence: Synthetic oligonucleotide
  Sense strand starting at position 3126 of SEQ ID NO: 917282
cgacucguuuacucaaaca

SEQ ID NO: 1223079 - RNA, 19 nt, Artificial Sequence
  Description of Artificial Sequence: Synthetic oligonucleotide
  Antisense strand to SEQ ID NO: 1223078
uguuugaguaaacgagucg

SEQ ID NO: 1223080 - RNA, 19 nt, Artificial Sequence
  Description of Artificial Sequence: Synthetic oligonucleotide
  Sense strand starting at position 3628 of SEQ ID NO: 917282
gaggacucccgguaucuuu

SEQ ID NO: 1223081 - RNA, 19 nt, Artificial Sequence
  Description of Artificial Sequence: Synthetic oligonucleotide
  Antisense strand to SEQ ID NO: 1223080
aaagauaccgggaguccuc

SEQ ID NO: 1223082 - RNA, 19 nt, Artificial Sequence
  Description of Artificial Sequence: Synthetic oligonucleotide
  Sense strand starting at position 3879 of SEQ ID NO: 917282
ggcuuuacugaagagguuu

SEQ ID NO: 1223083 - RNA, 19 nt, Artificial Sequence
  Description of Artificial Sequence: Synthetic oligonucleotide
  Antisense strand to SEQ ID NO: 1223082
aaaccucuucaguaaagcc

SEQ ID NO: 1223084 - RNA, 19 nt, Artificial Sequence
  Description of Artificial Sequence: Synthetic oligonucleotide
  Sense strand starting at position 3897 of SEQ ID NO: 917282
uuuagagauguuugguucu

SEQ ID NO: 1223085 - RNA, 19 nt, Artificial Sequence
  Description of Artificial Sequence: Synthetic oligonucleotide
  Antisense strand to SEQ ID NO: 1223084
agaaccaaacaucucuaaa

SEQ ID NO: 1223086 - RNA, 19 nt, Artificial Sequence
  Description of Artificial Sequence: Synthetic oligonucleotide
  Sense strand starting at position 3899 of SEQ ID NO: 917282
uagagauguuugguucucu

SEQ ID NO: 1223087 - RNA, 19 nt, Artificial Sequence
  Description of Artificial Sequence: Synthetic oligonucleotide
  Antisense strand to SEQ ID NO: 1223086
agagaaccaaacaucucua

SEQ ID NO: 1223088 - RNA, 19 nt, Artificial Sequence
  Description of Artificial Sequence: Synthetic oligonucleotide
  Sense strand starting at position 3903 of SEQ ID NO: 917282
gauguuugguucucucaua

SEQ ID NO: 1223089 - RNA, 19 nt, Artificial Sequence
  Description of Artificial Sequence: Synthetic oligonucleotide
  Antisense strand to SEQ ID NO: 1223088
uaugagagaaccaaacauc

SEQ ID NO: 1223090 - RNA, 19 nt, Artificial Sequence
  Description of Artificial Sequence: Synthetic oligonucleotide
  Sense strand starting at position 3904 of SEQ ID NO: 917282
auguuugguucucucauaa

SEQ ID NO: 1223091 - RNA, 19 nt, Artificial Sequence
  Description of Artificial Sequence: Synthetic oligonucleotide
  Antisense strand to SEQ ID NO: 1223090
uuaugagagaaccaaacau

SEQ ID NO: 1223092 - RNA, 19 nt, Artificial Sequence
  Description of Artificial Sequence: Synthetic oligonucleotide
  Sense strand starting at position 3968 of SEQ ID NO: 917282
caaccuaggcgaugaagau

SEQ ID NO: 1223093 - RNA, 19 nt, Artificial Sequence
  Description of Artificial Sequence: Synthetic oligonucleotide
  Antisense strand to SEQ ID NO: 1223092
aucuucaucgccuagguug

SEQ ID NO: 1223094 - RNA, 19 nt, Artificial Sequence
  Description of Artificial Sequence: Synthetic oligonucleotide
  Sense strand starting at position 3978 of SEQ ID NO: 917283
gaugaagauuggcuuuaca

SEQ ID NO: 1223095 - RNA, 19 nt, Artificial Sequence
  Description of Artificial Sequence: Synthetic oligonucleotide
  Antisense strand to SEQ ID NO: 1223094
uguaaagccaaucuucauc

SEQ ID NO: 1223096 - RNA, 19 nt, Artificial Sequence
  Description of Artificial Sequence: Synthetic oligonucleotide
  Sense strand starting at position 44 of SEQ ID NO: 917283
ccuguuaugccggcuacua

SEQ ID NO: 1223097 - RNA, 19 nt, Artificial Sequence
  Description of Artificial Sequence: Synthetic oligonucleotide
  Antisense strand to SEQ ID NO: 1223096
uaguagccggcauaacagg

SEQ ID NO: 1223098 - RNA, 19 nt, Artificial Sequence
  Description of Artificial Sequence: Synthetic oligonucleotide
  Sense strand starting at position 605 of SEQ ID NO: 917283
gguaaugacacguagguga

SEQ ID NO: 1223099 - RNA, 19 nt, Artificial Sequence
  Description of Artificial Sequence: Synthetic oligonucleotide
  Antisense strand to SEQ ID NO: 1223098
ucaccuacgugucauuacc

SEQ ID NO: 1223100 - RNA, 19 nt, Artificial Sequence
  Description of Artificial Sequence: Synthetic oligonucleotide
  Sense strand starting at position 725 of SEQ ID NO: 917283
agcagaggcacugguaauu

SEQ ID NO: 1223101 - RNA, 19 nt, Artificial Sequence
  Description of Artificial Sequence: Synthetic oligonucleotide
  Antisense strand to SEQ ID NO: 1223100
aauuaccagugccucugcu

SEQ ID NO: 1223102 - RNA, 19 nt, Artificial Sequence
  Description of Artificial Sequence: Synthetic oligonucleotide
  Sense strand starting at position 914 of SEQ ID NO: 917283
agcuuugaccugcaagaac

SEQ ID NO: 1223103 - RNA, 19 nt, Artificial Sequence
  Description of Artificial Sequence: Synthetic oligonucleotide
  Antisense strand to SEQ ID NO: 1223102
guucuugcaggucaaagcu

SEQ ID NO: 1223104 - RNA, 19 nt, Artificial Sequence
  Description of Artificial Sequence: Synthetic oligonucleotide
  Sense strand starting at position 923 of SEQ ID NO: 917283
cugcaagaacucuggauau

SEQ ID NO: 1223105 - RNA, 19 nt, Artificial Sequence
  Description of Artificial Sequence: Synthetic oligonucleotide
  Antisense strand to SEQ ID NO: 1223104
auauccagaguucuugcag

SEQ ID NO: 1223106 - RNA, 19 nt, Artificial Sequence
  Description of Artificial Sequence: Synthetic oligonucleotide
  Sense strand starting at position 1001 of SEQ ID NO: 917283
uugggaagggcuuaccuua

SEQ ID NO: 1223107 - RNA, 19 nt, Artificial Sequence
  Description of Artificial Sequence: Synthetic oligonucleotide
  Antisense strand to SEQ ID NO: 1223106
uaagguaagcccuucccaa

SEQ ID NO: 1223108 - RNA, 19 nt, Artificial Sequence
  Description of Artificial Sequence: Synthetic oligonucleotide
  Sense strand starting at position 1103 of SEQ ID NO: 917283
uuaagcaagucugugaaca

SEQ ID NO: 1223109 - RNA, 19 nt, Artificial Sequence
  Description of Artificial Sequence: Synthetic oligonucleotide
  Antisense strand to SEQ ID NO: 1223108
uguucacagacuugcuuaa

SEQ ID NO: 1223110 - RNA, 19 nt, Artificial Sequence
  Description of Artificial Sequence: Synthetic oligonucleotide
  Sense strand starting at position 1104 of SEQ ID NO: 917283
uaagcaagucugugaacau

SEQ ID NO: 1223111 - RNA, 19 nt, Artificial Sequence
  Description of Artificial Sequence: Synthetic oligonucleotide
  Antisense strand to SEQ ID NO: 1223110
auguucacagacuugcuua

SEQ ID NO: 1223112 - RNA, 19 nt, Artificial Sequence
  Description of Artificial Sequence: Synthetic oligonucleotide
  Sense strand starting at position 1113 of SEQ ID NO: 917283
cugugaacaucccugagaa

SEQ ID NO: 1223113 - RNA, 19 nt, Artificial Sequence
  Description of Artificial Sequence: Synthetic oligonucleotide
  Antisense strand to SEQ ID NO: 1223112
uucucagggauguucacag

SEQ ID NO: 1223114 - RNA, 19 nt, Artificial Sequence
  Description of Artificial Sequence: Synthetic oligonucleotide
  Sense strand starting at position 1114 of SEQ ID NO: 917283
ugugaacaucccugagaau

SEQ ID NO: 1223115 - RNA, 19 nt, Artificial Sequence
  Description of Artificial Sequence: Synthetic oligonucleotide
  Antisense strand to SEQ ID NO: 1223114
auucucagggauguucaca

SEQ ID NO: 1223116 - RNA, 19 nt, Artificial Sequence
  Description of Artificial Sequence: Synthetic oligonucleotide
  Sense strand starting at position 1163 of SEQ ID NO: 917283
ggaaaucuaugacuuaggu

SEQ ID NO: 1223117 - RNA, 19 nt, Artificial Sequence
  Description of Artificial Sequence: Synthetic oligonucleotide
  Antisense strand to SEQ ID NO: 1223116
accuaagucauagauuucc

SEQ ID NO: 1223118 - RNA, 19 nt, Artificial Sequence
  Description of Artificial Sequence: Synthetic oligonucleotide
  Sense strand starting at position 1401 of SEQ ID NO: 917283
aaugucaugccagguaaau

SEQ ID NO: 1223119 - RNA, 19 nt, Artificial Sequence
  Description of Artificial Sequence: Synthetic oligonucleotide
  Antisense strand to SEQ ID NO: 1223118
auuuaccuggcaugacauu

SEQ ID NO: 1223120 - RNA, 19 nt, Artificial Sequence
  Description of Artificial Sequence: Synthetic oligonucleotide
  Sense strand starting at position 1411 of SEQ ID NO: 917283
cagguaaaucagugaguca

SEQ ID NO: 1223121 - RNA, 19 nt, Artificial Sequence
  Description of Artificial Sequence: Synthetic oligonucleotide
  Antisense strand to SEQ ID NO: 1223120
ugacucacugauuuaccug

SEQ ID NO: 1223122 - RNA, 19 nt, Artificial Sequence
  Description of Artificial Sequence: Synthetic oligonucleotide
  Sense strand starting at position 1464 of SEQ ID NO: 917283
gacauaguccaaggcaaga

SEQ ID NO: 1223123 - RNA, 19 nt, Artificial Sequence
  Description of Artificial Sequence: Synthetic oligonucleotide
  Antisense strand to SEQ ID NO: 1223122
ucuugccuuggacuauguc

SEQ ID NO: 1223124 - RNA, 19 nt, Artificial Sequence
  Description of Artificial Sequence: Synthetic oligonucleotide
  Sense strand starting at position 1495 of SEQ ID NO: 917283
uagggagauuaggauauuu

SEQ ID NO: 1223125 - RNA, 19 nt, Artificial Sequence
  Description of Artificial Sequence: Synthetic oligonucleotide
  Antisense strand to SEQ ID NO: 1223124
aaauauccuaaucucccua

SEQ ID NO: 1223126 - RNA, 19 nt, Artificial Sequence
  Description of Artificial Sequence: Synthetic oligonucleotide
  Sense strand starting at position 1518 of SEQ ID NO: 917283
ccaagauugugggcuuuag

SEQ ID NO: 1223127 - RNA, 19 nt, Artificial Sequence
  Description of Artificial Sequence: Synthetic oligonucleotide
  Antisense strand to SEQ ID NO: 1223126
cuaaagcccacaaucuugg

SEQ ID NO: 1223128 - RNA, 19 nt, Artificial Sequence
  Description of Artificial Sequence: Synthetic oligonucleotide
  Sense strand starting at position 1522 of SEQ ID NO: 917283
gauugugggcuuuagucau

SEQ ID NO: 1223129 - RNA, 19 nt, Artificial Sequence
  Description of Artificial Sequence: Synthetic oligonucleotide
  Antisense strand to SEQ ID NO: 1223128
augacuaaagcccacaauc

SEQ ID NO: 1223130 - RNA, 19 nt, Artificial Sequence
  Description of Artificial Sequence: Synthetic oligonucleotide
  Sense strand starting at position 1639 of SEQ ID NO: 917283
uucuacaucucgucacaga

SEQ ID NO: 1223131 - RNA, 19 nt, Artificial Sequence
  Description of Artificial Sequence: Synthetic oligonucleotide
  Antisense strand to SEQ ID NO: 1223130
ucugugacgagauguagaa

SEQ ID NO: 1223132 - RNA, 19 nt, Artificial Sequence
  Description of Artificial Sequence: Synthetic oligonucleotide
  Sense strand starting at position 1680 of SEQ ID NO: 917283
agagcaucucuaggacuaa

SEQ ID NO: 1223133 - RNA, 19 nt, Artificial Sequence
  Description of Artificial Sequence: Synthetic oligonucleotide
  Antisense strand to SEQ ID NO: 1223132
uuaguccuagagaugcucu

SEQ ID NO: 1223134 - RNA, 19 nt, Artificial Sequence
  Description of Artificial Sequence: Synthetic oligonucleotide
  Sense strand starting at position 1730 of SEQ ID NO: 917283
uaggaaugcucacuggaaa

SEQ ID NO: 1223135 - RNA, 19 nt, Artificial Sequence
  Description of Artificial Sequence: Synthetic oligonucleotide
  Antisense strand to SEQ ID NO: 1223134
uuuccagugagcauuccua

SEQ ID NO: 1223136 - RNA, 19 nt, Artificial Sequence
  Description of Artificial Sequence: Synthetic oligonucleotide
  Sense strand starting at position 1731 of SEQ ID NO: 917283
aggaaugcucacuggaaau

SEQ ID NO: 1223137 - RNA, 19 nt, Artificial Sequence
  Description of Artificial Sequence: Synthetic oligonucleotide
  Antisense strand to SEQ ID NO: 1223136
auuuccagugagcauuccu

SEQ ID NO: 1223138 - RNA, 19 nt, Artificial Sequence
  Description of Artificial Sequence: Synthetic oligonucleotide
  Sense strand starting at position 1776 of SEQ ID NO: 917283
aguagaauuucccaagcac

SEQ ID NO: 1223139 - RNA, 19 nt, Artificial Sequence
  Description of Artificial Sequence: Synthetic oligonucleotide
  Antisense strand to SEQ ID NO: 1223138
gugcuugggaaauucuacu

SEQ ID NO: 1223140 - RNA, 19 nt, Artificial Sequence
  Description of Artificial Sequence: Synthetic oligonucleotide
  Sense strand starting at position 1817 of SEQ ID NO: 917283
ccaagaauuuccugauugg

SEQ ID NO: 1223141 - RNA, 19 nt, Artificial Sequence
  Description of Artificial Sequence: Synthetic oligonucleotide
  Antisense strand to SEQ ID NO: 1223140
ccaaucaggaaauucuugg

SEQ ID NO: 1223142 - RNA, 19 nt, Artificial Sequence
  Description of Artificial Sequence: Synthetic oligonucleotide
  Sense strand starting at position 1842 of SEQ ID NO: 917283
cugagaaugucacugauca

SEQ ID NO: 1223143 - RNA, 19 nt, Artificial Sequence
  Description of Artificial Sequence: Synthetic oligonucleotide
  Antisense strand to SEQ ID NO: 1223142
ugaucagugacauucucag

SEQ ID NO: 1223144 - RNA, 19 nt, Artificial Sequence
  Description of Artificial Sequence: Synthetic oligonucleotide
  Sense strand starting at position 1843 of SEQ ID NO: 917283
ugagaaugucacugaucau

SEQ ID NO: 1223145 - RNA, 19 nt, Artificial Sequence
  Description of Artificial Sequence: Synthetic oligonucleotide
  Antisense strand to SEQ ID NO: 1223144
augaucagugacauucuca

SEQ ID NO: 1223146 - RNA, 19 nt, Artificial Sequence
  Description of Artificial Sequence: Synthetic oligonucleotide
  Sense strand starting at position 1849 of SEQ ID NO: 917283
ugucacugaucauuacaga

SEQ ID NO: 1223147 - RNA, 19 nt, Artificial Sequence
  Description of Artificial Sequence: Synthetic oligonucleotide
  Antisense strand to SEQ ID NO: 1223146
ucuguaaugaucagugaca

SEQ ID NO: 1223148 - RNA, 19 nt, Artificial Sequence
  Description of Artificial Sequence: Synthetic oligonucleotide
  Sense strand starting at position 1956 of SEQ ID NO: 917283
gggcuugaaagucaugagu

SEQ ID NO: 1223149 - RNA, 19 nt, Artificial Sequence
  Description of Artificial Sequence: Synthetic oligonucleotide
  Antisense strand to SEQ ID NO: 1223148
acucaugacuuucaagccc

SEQ ID NO: 1223150 - RNA, 19 nt, Artificial Sequence
  Description of Artificial Sequence: Synthetic oligonucleotide
  Sense strand starting at position 1979 of SEQ ID NO: 917283
gggacaacucacuguguca

SEQ ID NO: 1223151 - RNA, 19 nt, Artificial Sequence
  Description of Artificial Sequence: Synthetic oligonucleotide
  Antisense strand to SEQ ID NO: 1223150
ugacacagugaguuguccc

SEQ ID NO: 1223152 - RNA, 19 nt, Artificial Sequence
  Description of Artificial Sequence: Synthetic oligonucleotide
  Sense strand starting at position 2046 of SEQ ID NO: 917283
cuccauuguggccaggaua

SEQ ID NO: 1223153 - RNA, 19 nt, Artificial Sequence
  Description of Artificial Sequence: Synthetic oligonucleotide
  Antisense strand to SEQ ID NO: 1223152
uauccuggccacaauggag

SEQ ID NO: 1223154 - RNA, 19 nt, Artificial Sequence
  Description of Artificial Sequence: Synthetic oligonucleotide
  Sense strand starting at position 2128 of SEQ ID NO: 917283
ugauuugugcugugagcag

SEQ ID NO: 1223155 - RNA, 19 nt, Artificial Sequence
  Description of Artificial Sequence: Synthetic oligonucleotide
  Antisense strand to SEQ ID NO: 1223154
cugcucacagcacaaauca

SEQ ID NO: 1223156 - RNA, 19 nt, Artificial Sequence
  Description of Artificial Sequence: Synthetic oligonucleotide
  Sense strand starting at position 2428 of SEQ ID NO: 917283
aggacacaucugugugaac

SEQ ID NO: 1223157 - RNA, 19 nt, Artificial Sequence
  Description of Artificial Sequence: Synthetic oligonucleotide
  Antisense strand to SEQ ID NO: 1223156
guucacacagauguguccu

SEQ ID NO: 1223158 - RNA, 19 nt, Artificial Sequence
  Description of Artificial Sequence: Synthetic oligonucleotide
  Sense strand starting at position 2528 of SEQ ID NO: 917283
ggaauacagaguuauugcu

SEQ ID NO: 1223159 - RNA, 19 nt, Artificial Sequence
  Description of Artificial Sequence: Synthetic oligonucleotide
  Antisense strand to SEQ ID NO: 1223158
agcaauaacucuguauucc

SEQ ID NO: 1223160 - RNA, 19 nt, Artificial Sequence
  Description of Artificial Sequence: Synthetic oligonucleotide
  Sense strand starting at position 2536 of SEQ ID NO: 917283
gaguuauugcuugauggac

SEQ ID NO: 1223161 - RNA, 19 nt, Artificial Sequence
  Description of Artificial Sequence: Synthetic oligonucleotide
  Antisense strand to SEQ ID NO: 1223160
guccaucaagcaauaacuc

SEQ ID NO: 1223162 - RNA, 19 nt, Artificial Sequence
  Description of Artificial Sequence: Synthetic oligonucleotide
  Sense strand starting at position 2562 of SEQ ID NO: 917283
uucugucugguugaugaaa

SEQ ID NO: 1223163 - RNA, 19 nt, Artificial Sequence
  Description of Artificial Sequence: Synthetic oligonucleotide
  Antisense strand to SEQ ID NO: 1223162
uuucaucaaccagacagaa

SEQ ID NO: 1223164 - RNA, 19 nt, Artificial Sequence
  Description of Artificial Sequence: Synthetic oligonucleotide
  Sense strand starting at position 2592 of SEQ ID NO: 917283
agagauuguagugauaguu

SEQ ID NO: 1223165 - RNA, 19 nt, Artificial Sequence
  Description of Artificial Sequence: Synthetic oligonucleotide
  Antisense strand to SEQ ID NO: 1223164
aacuaucacuacaaucucu

SEQ ID NO: 1223166 - RNA, 19 nt, Artificial Sequence
  Description of Artificial Sequence: Synthetic oligonucleotide
  Sense strand starting at position 2698 of SEQ ID NO: 917283
uauuuauguguauggugua

SEQ ID NO: 1223167 - RNA, 19 nt, Artificial Sequence
  Description of Artificial Sequence: Synthetic oligonucleotide
  Antisense strand to SEQ ID NO: 1223166
uacaccauacacauaaaua

SEQ ID NO: 1223168 - RNA, 19 nt, Artificial Sequence
  Description of Artificial Sequence: Synthetic oligonucleotide
  Sense strand starting at position 2790 of SEQ ID NO: 917283
auguaauacuucuuuggag

SEQ ID NO: 1223169 - RNA, 19 nt, Artificial Sequence
  Description of Artificial Sequence: Synthetic oligonucleotide
  Antisense strand to SEQ ID NO: 1223168
cuccaaagaaguauuacau

SEQ ID NO: 1223170 - RNA, 19 nt, Artificial Sequence
  Description of Artificial Sequence: Synthetic oligonucleotide
  Sense strand starting at position 2791 of SEQ ID NO: 917283
uguaauacuucuuuggagu

SEQ ID NO: 1223171 - RNA, 19 nt, Artificial Sequence
  Description of Artificial Sequence: Synthetic oligonucleotide
  Antisense strand to SEQ ID NO: 1223170
acuccaaagaaguauuaca

SEQ ID NO: 1223172 - RNA, 19 nt, Artificial Sequence
  Description of Artificial Sequence: Synthetic oligonucleotide
  Sense strand starting at position 3494 of SEQ ID NO: 917283
uacgccuggcucuaugaau

SEQ ID NO: 1223173 - RNA, 19 nt, Artificial Sequence
  Description of Artificial Sequence: Synthetic oligonucleotide
  Antisense strand to SEQ ID NO: 1223172
auucauagagccaggcgua

SEQ ID NO: 1223174 - RNA, 19 nt, Artificial Sequence
  Description of Artificial Sequence: Synthetic oligonucleotide
  Sense strand starting at position 3500 of SEQ ID NO: 917284
uggcucuaugaauguuaau

SEQ ID NO: 1223175 - RNA, 19 nt, Artificial Sequence
  Description of Artificial Sequence: Synthetic oligonucleotide
  Antisense strand to SEQ ID NO: 1223174
auuaacauucauagagcca

SEQ ID NO: 1223176 - RNA, 19 nt, Artificial Sequence
  Description of Artificial Sequence: Synthetic oligonucleotide
  Sense strand starting at position 2 of SEQ ID NO: 917284
auaaucguuccauauuaga

SEQ ID NO: 1223177 - RNA, 19 nt, Artificial Sequence
  Description of Artificial Sequence: Synthetic oligonucleotide
  Antisense strand to SEQ ID NO: 1223176
ucuaauauggaacgauuau

SEQ ID NO: 1223178 - RNA, 19 nt, Artificial Sequence
  Description of Artificial Sequence: Synthetic oligonucleotide
  Sense strand starting at position 31 of SEQ ID NO: 917284
uagauuugguaacaaggga

SEQ ID NO: 1223179 - RNA, 19 nt, Artificial Sequence
  Description of Artificial Sequence: Synthetic oligonucleotide
  Antisense strand to SEQ ID NO: 1223178
ucccuuguuaccaaaucua

SEQ ID NO: 1223180 - RNA, 19 nt, Artificial Sequence
  Description of Artificial Sequence: Synthetic oligonucleotide
  Sense strand starting at position 70 of SEQ ID NO: 917284
gcuauuauuugugugccuu

SEQ ID NO: 1223181 - RNA, 19 nt, Artificial Sequence
  Description of Artificial Sequence: Synthetic oligonucleotide
  Antisense strand to SEQ ID NO: 1223180
aaggcacacaaauaauagc

SEQ ID NO: 1223182 - RNA, 19 nt, Artificial Sequence
  Description of Artificial Sequence: Synthetic oligonucleotide
  Sense strand starting at position 192 of SEQ ID NO: 917284
uuuacucuuggauguuuaa

SEQ ID NO: 1223183 - RNA, 19 nt, Artificial Sequence
  Description of Artificial Sequence: Synthetic oligonucleotide
  Antisense strand to SEQ ID NO: 1223182
uuaaacauccaagaguaaa

SEQ ID NO: 1223184 - RNA, 19 nt, Artificial Sequence
  Description of Artificial Sequence: Synthetic oligonucleotide
  Sense strand starting at position 208 of SEQ ID NO: 917284
uaaccuuggcuccgacaga

SEQ ID NO: 1223185 - RNA, 19 nt, Artificial Sequence
  Description of Artificial Sequence: Synthetic oligonucleotide
  Antisense strand to SEQ ID NO: 1223184
ucugucggagccaagguua

SEQ ID NO: 1223186 - RNA, 19 nt, Artificial Sequence
  Description of Artificial Sequence: Synthetic oligonucleotide
  Sense strand starting at position 221 of SEQ ID NO: 917284
gacagaauguuccuuguau

SEQ ID NO: 1223187 - RNA, 19 nt, Artificial Sequence
  Description of Artificial Sequence: Synthetic oligonucleotide
  Antisense strand to SEQ ID NO: 1223186
auacaaggaacauucuguc

SEQ ID NO: 1223188 - RNA, 19 nt, Artificial Sequence
  Description of Artificial Sequence: Synthetic oligonucleotide
  Sense strand starting at position 222 of SEQ ID NO: 917284
acagaauguuccuuguauc

SEQ ID NO: 1223189 - RNA, 19 nt, Artificial Sequence
  Description of Artificial Sequence: Synthetic oligonucleotide
  Antisense strand to SEQ ID NO: 1223188
gauacaaggaacauucugu

SEQ ID NO: 1223190 - RNA, 19 nt, Artificial Sequence
  Description of Artificial Sequence: Synthetic oligonucleotide
  Sense strand starting at position 428 of SEQ ID NO: 917284
gcugucacucaguaaugag

SEQ ID NO: 1223191 - RNA, 19 nt, Artificial Sequence
  Description of Artificial Sequence: Synthetic oligonucleotide
  Antisense strand to SEQ ID NO: 1223190
cucauuacugagugacagc

SEQ ID NO: 1223192 - RNA, 19 nt, Artificial Sequence
  Description of Artificial Sequence: Synthetic oligonucleotide
  Sense strand starting at position 527 of SEQ ID NO: 917284
ccagcacugccauaaagau

SEQ ID NO: 1223193 - RNA, 19 nt, Artificial Sequence
  Description of Artificial Sequence: Synthetic oligonucleotide
  Antisense strand to SEQ ID NO: 1223192
aucuuuauggcagugcugg

SEQ ID NO: 1223194 - RNA, 19 nt, Artificial Sequence
  Description of Artificial Sequence: Synthetic oligonucleotide
  Sense strand starting at position 739 of SEQ ID NO: 917284
ucaagaagguuucuugacu

SEQ ID NO: 1223195 - RNA, 19 nt, Artificial Sequence
  Description of Artificial Sequence: Synthetic oligonucleotide
  Antisense strand to SEQ ID NO: 1223194
agucaagaaaccuucuuga

SEQ ID NO: 1223196 - RNA, 19 nt, Artificial Sequence
  Description of Artificial Sequence: Synthetic oligonucleotide
  Sense strand starting at position 740 of SEQ ID NO: 917284
caagaagguuucuugacuu

SEQ ID NO: 1223197 - RNA, 19 nt, Artificial Sequence
  Description of Artificial Sequence: Synthetic oligonucleotide
  Antisense strand to SEQ ID NO: 1223196
aagucaagaaaccuucuug

SEQ ID NO: 1223198 - RNA, 19 nt, Artificial Sequence
  Description of Artificial Sequence: Synthetic oligonucleotide
  Sense strand starting at position 748 of SEQ ID NO: 917284
uuucuugacuugccaagau

SEQ ID NO: 1223199 - RNA, 19 nt, Artificial Sequence
  Description of Artificial Sequence: Synthetic oligonucleotide
  Antisense strand to SEQ ID NO: 1223198
aucuuggcaagucaagaaa

SEQ ID NO: 1223200 - RNA, 19 nt, Artificial Sequence
  Description of Artificial Sequence: Synthetic oligonucleotide
  Sense strand starting at position 896 of SEQ ID NO: 917284
agggcagcucuugaguaua

SEQ ID NO: 1223201 - RNA, 19 nt, Artificial Sequence
  Description of Artificial Sequence: Synthetic oligonucleotide
  Antisense strand to SEQ ID NO: 1223200
uauacucaagagcugcccu

SEQ ID NO: 1223202 - RNA, 19 nt, Artificial Sequence
  Description of Artificial Sequence: Synthetic oligonucleotide
  Sense strand starting at position 964 of SEQ ID NO: 917284
cugaaaguucuccacguuu

SEQ ID NO: 1223203 - RNA, 19 nt, Artificial Sequence
  Description of Artificial Sequence: Synthetic oligonucleotide
  Antisense strand to SEQ ID NO: 1223202
aaacguggagaacuuucag

SEQ ID NO: 1223204 - RNA, 19 nt, Artificial Sequence
  Description of Artificial Sequence: Synthetic oligonucleotide
  Sense strand starting at position 1176 of SEQ ID NO: 917284
ucaguuauguagccaaaug

SEQ ID NO: 1223205 - RNA, 19 nt, Artificial Sequence
  Description of Artificial Sequence: Synthetic oligonucleotide
  Antisense strand to SEQ ID NO: 1223204
cauuuggcuacauaacuga

SEQ ID NO: 1223206 - RNA, 19 nt, Artificial Sequence
  Description of Artificial Sequence: Synthetic oligonucleotide
  Sense strand starting at position 1224 of SEQ ID NO: 917284
ggcuguguugaggacgaaa

SEQ ID NO: 1223207 - RNA, 19 nt, Artificial Sequence
  Description of Artificial Sequence: Synthetic oligonucleotide
  Antisense strand to SEQ ID NO: 1223206
uuucguccucaacacagcc

SEQ ID NO: 1223208 - RNA, 19 nt, Artificial Sequence
  Description of Artificial Sequence: Synthetic oligonucleotide
  Sense strand starting at position 1299 of SEQ ID NO: 917284
cuuuguagucucugagaau

SEQ ID NO: 1223209 - RNA, 19 nt, Artificial Sequence
  Description of Artificial Sequence: Synthetic oligonucleotide
  Antisense strand to SEQ ID NO: 1223208
auucucagagacuacaaag

SEQ ID NO: 1223210 - RNA, 19 nt, Artificial Sequence
  Description of Artificial Sequence: Synthetic oligonucleotide
  Sense strand starting at position 1310 of SEQ ID NO: 917284
cugagaaucgcccugcgua

SEQ ID NO: 1223211 - RNA, 19 nt, Artificial Sequence
  Description of Artificial Sequence: Synthetic oligonucleotide
  Antisense strand to SEQ ID NO: 1223210
uacgcagggcgauucucag

SEQ ID NO: 1223212 - RNA, 19 nt, Artificial Sequence
  Description of Artificial Sequence: Synthetic oligonucleotide
  Sense strand starting at position 1485 of SEQ ID NO: 917284
cuaagauaccugggugucu

SEQ ID NO: 1223213 - RNA, 19 nt, Artificial Sequence
  Description of Artificial Sequence: Synthetic oligonucleotide
  Antisense strand to SEQ ID NO: 1223212
agacacccagguaucuuag

SEQ ID NO: 1223214 - RNA, 19 nt, Artificial Sequence
  Description of Artificial Sequence: Synthetic oligonucleotide
  Sense strand starting at position 1913 of SEQ ID NO: 917284
ggagaugcgcgcuccuaca

SEQ ID NO: 1223215 - RNA, 19 nt, Artificial Sequence
  Description of Artificial Sequence: Synthetic oligonucleotide
  Antisense strand to SEQ ID NO: 1223214
uguaggagcgcgcaucucc

SEQ ID NO: 1223216 - RNA, 19 nt, Artificial Sequence
  Description of Artificial Sequence: Synthetic oligonucleotide
  Sense strand starting at position 2043 of SEQ ID NO: 917284
gggucaaagaccuggcaga

SEQ ID NO: 1223217 - RNA, 19 nt, Artificial Sequence
  Description of Artificial Sequence: Synthetic oligonucleotide
  Antisense strand to SEQ ID NO: 1223216
ucugccaggucuuugaccc

SEQ ID NO: 1223218 - RNA, 19 nt, Artificial Sequence
  Description of Artificial Sequence: Synthetic oligonucleotide
  Sense strand starting at position 2044 of SEQ ID NO: 917284
ggucaaagaccuggcagaa

SEQ ID NO: 1223219 - RNA, 19 nt, Artificial Sequence
  Description of Artificial Sequence: Synthetic oligonucleotide
  Antisense strand to SEQ ID NO: 1223218
uucugccaggucuuugacc

SEQ ID NO: 1223220 - RNA, 19 nt, Artificial Sequence
  Description of Artificial Sequence: Synthetic oligonucleotide
  Sense strand starting at position 2106 of SEQ ID NO: 917284
gucauacaauugccugaaa

SEQ ID NO: 1223221 - RNA, 19 nt, Artificial Sequence
  Description of Artificial Sequence: Synthetic oligonucleotide
  Antisense strand to SEQ ID NO: 1223220
uuucaggcaauuguaugac

SEQ ID NO: 1223222 - RNA, 19 nt, Artificial Sequence
  Description of Artificial Sequence: Synthetic oligonucleotide
  Sense strand starting at position 2251 of SEQ ID NO: 917284
uucacuguccgcguuaguu

SEQ ID NO: 1223223 - RNA, 19 nt, Artificial Sequence
  Description of Artificial Sequence: Synthetic oligonucleotide
  Antisense strand to SEQ ID NO: 1223222
aacuaacgcggacagugaa

SEQ ID NO: 1223224 - RNA, 19 nt, Artificial Sequence
  Description of Artificial Sequence: Synthetic oligonucleotide
  Sense strand starting at position 2343 of SEQ ID NO: 917284
gugguuaguccugagauca

SEQ ID NO: 1223225 - RNA, 19 nt, Artificial Sequence
  Description of Artificial Sequence: Synthetic oligonucleotide
  Antisense strand to SEQ ID NO: 1223224
ugaucucaggacuaaccac

SEQ ID NO: 1223226 - RNA, 19 nt, Artificial Sequence
  Description of Artificial Sequence: Synthetic oligonucleotide
  Sense strand starting at position 2391 of SEQ ID NO: 917284
uacagaaaguugucacgaa

SEQ ID NO: 1223227 - RNA, 19 nt, Artificial Sequence
  Description of Artificial Sequence: Synthetic oligonucleotide
  Antisense strand to SEQ ID NO: 1223226
uucgugacaacuuucugua

SEQ ID NO: 1223228 - RNA, 19 nt, Artificial Sequence
  Description of Artificial Sequence: Synthetic oligonucleotide
  Sense strand starting at position 2398 of SEQ ID NO: 917284
aguugucacgaauagaaac

SEQ ID NO: 1223229 - RNA, 19 nt, Artificial Sequence
  Description of Artificial Sequence: Synthetic oligonucleotide
  Antisense strand to SEQ ID NO: 1223228
guuucuauucgugacaacu

SEQ ID NO: 1223230 - RNA, 19 nt, Artificial Sequence
  Description of Artificial Sequence: Synthetic oligonucleotide
  Sense strand starting at position 2586 of SEQ ID NO: 917284
ccuguuaugccggcuacua

SEQ ID NO: 1223231 - RNA, 19 nt, Artificial Sequence
  Description of Artificial Sequence: Synthetic oligonucleotide
  Antisense strand to SEQ ID NO: 1223230
uaguagccggcauaacagg

SEQ ID NO: 1223232 - RNA, 19 nt, Artificial Sequence
  Description of Artificial Sequence: Synthetic oligonucleotide
  Sense strand starting at position 3147 of SEQ ID NO: 917284
gguaaugacacguagguga

SEQ ID NO: 1223233 - RNA, 19 nt, Artificial Sequence
  Description of Artificial Sequence: Synthetic oligonucleotide
  Antisense strand to SEQ ID NO: 1223232
ucaccuacgugucauuacc

SEQ ID NO: 1223234 - RNA, 19 nt, Artificial Sequence
  Description of Artificial Sequence: Synthetic oligonucleotide
  Sense strand starting at position 3267 of SEQ ID NO: 917284
agcagaggcacugguaauu

SEQ ID NO: 1223235 - RNA, 19 nt, Artificial Sequence
  Description of Artificial Sequence: Synthetic oligonucleotide
  Antisense strand to SEQ ID NO: 1223234
aauuaccagugccucugcu

SEQ ID NO: 1223236 - RNA, 19 nt, Artificial Sequence
  Description of Artificial Sequence: Synthetic oligonucleotide
  Sense strand starting at position 3456 of SEQ ID NO: 917284
agcuuugaccugcaagaac

SEQ ID NO: 1223237 - RNA, 19 nt, Artificial Sequence
  Description of Artificial Sequence: Synthetic oligonucleotide
  Antisense strand to SEQ ID NO: 1223236
guucuugcaggucaaagcu

SEQ ID NO: 1223238 - RNA, 19 nt, Artificial Sequence
  Description of Artificial Sequence: Synthetic oligonucleotide
  Sense strand starting at position 3465 of SEQ ID NO: 917284
cugcaagaacucuggauau

SEQ ID NO: 1223239 - RNA, 19 nt, Artificial Sequence
  Description of Artificial Sequence: Synthetic oligonucleotide
  Antisense strand to SEQ ID NO: 1223238
auauccagaguucuugcag

SEQ ID NO: 1223240 - RNA, 19 nt, Artificial Sequence
  Description of Artificial Sequence: Synthetic oligonucleotide
  Sense strand starting at position 3543 of SEQ ID NO: 917284
uugggaagggcuuaccuua

SEQ ID NO: 1223241 - RNA, 19 nt, Artificial Sequence
  Description of Artificial Sequence: Synthetic oligonucleotide
  Antisense strand to SEQ ID NO: 1223240
uaagguaagcccuucccaa

SEQ ID NO: 1223242 - RNA, 19 nt, Artificial Sequence
  Description of Artificial Sequence: Synthetic oligonucleotide
  Sense strand starting at position 3645 of SEQ ID NO: 917284
uuaagcaagucugugaaca

SEQ ID NO: 1223243 - RNA, 19 nt, Artificial Sequence
  Description of Artificial Sequence: Synthetic oligonucleotide
  Antisense strand to SEQ ID NO: 1223242
uguucacagacuugcuuaa

SEQ ID NO: 1223244 - RNA, 19 nt, Artificial Sequence
  Description of Artificial Sequence: Synthetic oligonucleotide
  Sense strand starting at position 3646 of SEQ ID NO: 917284
uaagcaagucugugaacau

SEQ ID NO: 1223245 - RNA, 19 nt, Artificial Sequence
  Description of Artificial Sequence: Synthetic oligonucleotide
  Antisense strand to SEQ ID NO: 1223244
auguucacagacuugcuua

SEQ ID NO: 1223246 - RNA, 19 nt, Artificial Sequence
  Description of Artificial Sequence: Synthetic oligonucleotide
  Sense strand starting at position 3655 of SEQ ID NO: 917284
cugugaacaucccugagaa

SEQ ID NO: 1223247 - RNA, 19 nt, Artificial Sequence
  Description of Artificial Sequence: Synthetic oligonucleotide
  Antisense strand to SEQ ID NO: 1223246
uucucagggauguucacag

SEQ ID NO: 1223248 - RNA, 19 nt, Artificial Sequence
  Description of Artificial Sequence: Synthetic oligonucleotide
  Sense strand starting at position 3656 of SEQ ID NO: 917284
ugugaacaucccugagaau

SEQ ID NO: 1223249 - RNA, 19 nt, Artificial Sequence
  Description of Artificial Sequence: Synthetic oligonucleotide
  Antisense strand to SEQ ID NO: 1223248
auucucagggauguucaca

SEQ ID NO: 1223250 - RNA, 19 nt, Artificial Sequence
  Description of Artificial Sequence: Synthetic oligonucleotide
  Sense strand starting at position 3705 of SEQ ID NO: 917284
ggaaaucuaugacuuaggu

SEQ ID NO: 1223251 - RNA, 19 nt, Artificial Sequence
  Description of Artificial Sequence: Synthetic oligonucleotide
  Antisense strand to SEQ ID NO: 1223250
accuaagucauagauuucc

SEQ ID NO: 1223252 - RNA, 19 nt, Artificial Sequence
  Description of Artificial Sequence: Synthetic oligonucleotide
  Sense strand starting at position 3943 of SEQ ID NO: 917284
aaugucaugccagguaaau

SEQ ID NO: 1223253 - RNA, 19 nt, Artificial Sequence
  Description of Artificial Sequence: Synthetic oligonucleotide
  Antisense strand to SEQ ID NO: 1223252
auuuaccuggcaugacauu

SEQ ID NO: 1223254 - RNA, 19 nt, Artificial Sequence
  Description of Artificial Sequence: Synthetic oligonucleotide
  Sense strand starting at position 3953 of SEQ ID NO: 917284
cagguaaaucagugaguca

SEQ ID NO: 1223255 - RNA, 19 nt, Artificial Sequence
  Description of Artificial Sequence: Synthetic oligonucleotide
  Antisense strand to SEQ ID NO: 1223254
ugacucacugauuuaccug

SEQ ID NO: 1223256 - RNA, 19 nt, Artificial Sequence
  Description of Artificial Sequence: Synthetic oligonucleotide
  Sense strand starting at position 3953 of SEQ ID NO: 917285
cagguaaaucagugaguca

SEQ ID NO: 1223257 - RNA, 19 nt, Artificial Sequence
  Description of Artificial Sequence: Synthetic oligonucleotide
  Antisense strand to SEQ ID NO: 1223256
ugacucacugauuuaccug

SEQ ID NO: 1223258 - RNA, 19 nt, Artificial Sequence
  Description of Artificial Sequence: Synthetic oligonucleotide
  Sense strand starting at position 106 of SEQ ID NO: 917285
cagaauauguggcugaauu

SEQ ID NO: 1223259 - RNA, 19 nt, Artificial Sequence
  Description of Artificial Sequence: Synthetic oligonucleotide
  Antisense strand to SEQ ID NO: 1223258
aauucagccacauauucug

SEQ ID NO: 1223260 - RNA, 19 nt, Artificial Sequence
  Description of Artificial Sequence: Synthetic oligonucleotide
  Sense strand starting at position 107 of SEQ ID NO: 917285
agaauauguggcugaauuc

SEQ ID NO: 1223261 - RNA, 19 nt, Artificial Sequence
  Description of Artificial Sequence: Synthetic oligonucleotide
  Antisense strand to SEQ ID NO: 1223260
gaauucagccacauauucu

SEQ ID NO: 1223262 - RNA, 19 nt, Artificial Sequence
  Description of Artificial Sequence: Synthetic oligonucleotide
  Sense strand starting at position 108 of SEQ ID NO: 917285
gaauauguggcugaauucu

SEQ ID NO: 1223263 - RNA, 19 nt, Artificial Sequence
  Description of Artificial Sequence: Synthetic oligonucleotide
  Antisense strand to SEQ ID NO: 1223262
agaauucagccacauauuc

SEQ ID NO: 1223264 - RNA, 19 nt, Artificial Sequence
  Description of Artificial Sequence: Synthetic oligonucleotide
  Sense strand starting at position 114 of SEQ ID NO: 917285
guggcugaauucuaaauuu

SEQ ID NO: 1223265 - RNA, 19 nt, Artificial Sequence
  Description of Artificial Sequence: Synthetic oligonucleotide
  Antisense strand to SEQ ID NO: 1223264
aaauuuagaauucagccac

SEQ ID NO: 1223266 - RNA, 19 nt, Artificial Sequence
  Description of Artificial Sequence: Synthetic oligonucleotide
  Sense strand starting at position 276 of SEQ ID NO: 917285
cugacaugauuauaaauga

SEQ ID NO: 1223267 - RNA, 19 nt, Artificial Sequence
  Description of Artificial Sequence: Synthetic oligonucleotide
  Antisense strand to SEQ ID NO: 1223266
ucauuuauaaucaugucag

SEQ ID NO: 1223268 - RNA, 19 nt, Artificial Sequence
  Description of Artificial Sequence: Synthetic oligonucleotide
  Sense strand starting at position 347 of SEQ ID NO: 917285
agaaauacuugagacaacu

SEQ ID NO: 1223269 - RNA, 19 nt, Artificial Sequence
  Description of Artificial Sequence: Synthetic oligonucleotide
  Antisense strand to SEQ ID NO: 1223268
aguugucucaaguauuucu

SEQ ID NO: 1223270 - RNA, 19 nt, Artificial Sequence
  Description of Artificial Sequence: Synthetic oligonucleotide
  Sense strand starting at position 442 of SEQ ID NO: 917285
ucaggcuaacaaugucaua

SEQ ID NO: 1223271 - RNA, 19 nt, Artificial Sequence
  Description of Artificial Sequence: Synthetic oligonucleotide
  Antisense strand to SEQ ID NO: 1223270
uaugacauuguuagccuga

SEQ ID NO: 1223272 - RNA, 19 nt, Artificial Sequence
  Description of Artificial Sequence: Synthetic oligonucleotide
  Sense strand starting at position 480 of SEQ ID NO: 917285
uguagagagcacuguggaa

SEQ ID NO: 1223273 - RNA, 19 nt, Artificial Sequence
  Description of Artificial Sequence: Synthetic oligonucleotide
  Antisense strand to SEQ ID NO: 1223272
uuccacagugcucucuaca

SEQ ID NO: 1223274 - RNA, 19 nt, Artificial Sequence
  Description of Artificial Sequence: Synthetic oligonucleotide
  Sense strand starting at position 482 of SEQ ID NO: 917285
uagagagcacuguggaaau

SEQ ID NO: 1223275 - RNA, 19 nt, Artificial Sequence
  Description of Artificial Sequence: Synthetic oligonucleotide
  Antisense strand to SEQ ID NO: 1223274
auuuccacagugcucucua

SEQ ID NO: 1223276 - RNA, 19 nt, Artificial Sequence
  Description of Artificial Sequence: Synthetic oligonucleotide
  Sense strand starting at position 494 of SEQ ID NO: 917285
uggaaauauagauguggua

SEQ ID NO: 1223277 - RNA, 19 nt, Artificial Sequence
  Description of Artificial Sequence: Synthetic oligonucleotide
  Antisense strand to SEQ ID NO: 1223276
uaccacaucuauauuucca

SEQ ID NO: 1223278 - RNA, 19 nt, Artificial Sequence
  Description of Artificial Sequence: Synthetic oligonucleotide
  Sense strand starting at position 535 of SEQ ID NO: 917285
guuguuucuguguuucuau

SEQ ID NO: 1223279 - RNA, 19 nt, Artificial Sequence
  Description of Artificial Sequence: Synthetic oligonucleotide
  Antisense strand to SEQ ID NO: 1223278
auagaaacacagaaacaac

SEQ ID NO: 1223280 - RNA, 19 nt, Artificial Sequence
  Description of Artificial Sequence: Synthetic oligonucleotide
  Sense strand starting at position 551 of SEQ ID NO: 917285
uaugacuagcuuuguuuga

SEQ ID NO: 1223281 - RNA, 19 nt, Artificial Sequence
  Description of Artificial Sequence: Synthetic oligonucleotide
  Antisense strand to SEQ ID NO: 1223280
ucaaacaaagcuagucaua

SEQ ID NO: 1223282 - RNA, 19 nt, Artificial Sequence
  Description of Artificial Sequence: Synthetic oligonucleotide
  Sense strand starting at position 553 of SEQ ID NO: 917285
ugacuagcuuuguuugaga

SEQ ID NO: 1223283 - RNA, 19 nt, Artificial Sequence
  Description of Artificial Sequence: Synthetic oligonucleotide
  Antisense strand to SEQ ID NO: 1223282
ucucaaacaaagcuaguca

SEQ ID NO: 1223284 - RNA, 19 nt, Artificial Sequence
  Description of Artificial Sequence: Synthetic oligonucleotide
  Sense strand starting at position 555 of SEQ ID NO: 917285
acuagcuuuguuugagauu

SEQ ID NO: 1223285 - RNA, 19 nt, Artificial Sequence
  Description of Artificial Sequence: Synthetic oligonucleotide
  Antisense strand to SEQ ID NO: 1223284
aaucucaaacaaagcuagu

SEQ ID NO: 1223286 - RNA, 19 nt, Artificial Sequence
  Description of Artificial Sequence: Synthetic oligonucleotide
  Sense strand starting at position 597 of SEQ ID NO: 917285
ggugaauaagauuggugga

SEQ ID NO: 1223287 - RNA, 19 nt, Artificial Sequence
  Description of Artificial Sequence: Synthetic oligonucleotide
  Antisense strand to SEQ ID NO: 1223286
uccaccaaucuuauucacc

SEQ ID NO: 1223288 - RNA, 19 nt, Artificial Sequence
  Description of Artificial Sequence: Synthetic oligonucleotide
  Sense strand starting at position 757 of SEQ ID NO: 917285
gugacagcuccagagagua

SEQ ID NO: 1223289 - RNA, 19 nt, Artificial Sequence
  Description of Artificial Sequence: Synthetic oligonucleotide
  Antisense strand to SEQ ID NO: 1223288
uacucucuggagcugucac

SEQ ID NO: 1223290 - RNA, 19 nt, Artificial Sequence
  Description of Artificial Sequence: Synthetic oligonucleotide
  Sense strand starting at position 796 of SEQ ID NO: 917285
gaacaaacguguuucuuuc

SEQ ID NO: 1223291 - RNA, 19 nt, Artificial Sequence
  Description of Artificial Sequence: Synthetic oligonucleotide
  Antisense strand to SEQ ID NO: 1223290
gaaagaaacacguuuguuc

SEQ ID NO: 1223292 - RNA, 19 nt, Artificial Sequence
  Description of Artificial Sequence: Synthetic oligonucleotide
  Sense strand starting at position 864 of SEQ ID NO: 917285
cgcccucaccucuaggaau

SEQ ID NO: 1223293 - RNA, 19 nt, Artificial Sequence
  Description of Artificial Sequence: Synthetic oligonucleotide
  Antisense strand to SEQ ID NO: 1223292
auuccuagaggugagggcg

SEQ ID NO: 1223294 - RNA, 19 nt, Artificial Sequence
  Description of Artificial Sequence: Synthetic oligonucleotide
  Sense strand starting at position 1024 of SEQ ID NO: 917285
gucagaacugcucaguuuc

SEQ ID NO: 1223295 - RNA, 19 nt, Artificial Sequence
  Description of Artificial Sequence: Synthetic oligonucleotide
  Antisense strand to SEQ ID NO: 1223294
gaaacugagcaguucugac

SEQ ID NO: 1223296 - RNA, 19 nt, Artificial Sequence
  Description of Artificial Sequence: Synthetic oligonucleotide
  Sense strand starting at position 2729 of SEQ ID NO: 917285
gcacucuaucuuugauuag

SEQ ID NO: 1223297 - RNA, 19 nt, Artificial Sequence
  Description of Artificial Sequence: Synthetic oligonucleotide
  Antisense strand to SEQ ID NO: 1223296
cuaaucaaagauagagugc

SEQ ID NO: 1223298 - RNA, 19 nt, Artificial Sequence
  Description of Artificial Sequence: Synthetic oligonucleotide
  Sense strand starting at position 2752 of SEQ ID NO: 917285
cucagaauacccuggugaa

SEQ ID NO: 1223299 - RNA, 19 nt, Artificial Sequence
  Description of Artificial Sequence: Synthetic oligonucleotide
  Antisense strand to SEQ ID NO: 1223298
uucaccaggguauucugag

SEQ ID NO: 1223300 - RNA, 19 nt, Artificial Sequence
  Description of Artificial Sequence: Synthetic oligonucleotide
  Sense strand starting at position 2753 of SEQ ID NO: 917285
ucagaauacccuggugaac

SEQ ID NO: 1223301 - RNA, 19 nt, Artificial Sequence
  Description of Artificial Sequence: Synthetic oligonucleotide
  Antisense strand to SEQ ID NO: 1223300
guucaccaggguauucuga

SEQ ID NO: 1223302 - RNA, 19 nt, Artificial Sequence
  Description of Artificial Sequence: Synthetic oligonucleotide
  Sense strand starting at position 2786 of SEQ ID NO: 917285
guugauuguucuccugaaa

SEQ ID NO: 1223303 - RNA, 19 nt, Artificial Sequence
  Description of Artificial Sequence: Synthetic oligonucleotide
  Antisense strand to SEQ ID NO: 1223302
uuucaggagaacaaucaac

SEQ ID NO: 1223304 - RNA, 19 nt, Artificial Sequence
  Description of Artificial Sequence: Synthetic oligonucleotide
  Sense strand starting at position 2880 of SEQ ID NO: 917285
ggcucugacuuagcaggua

SEQ ID NO: 1223305 - RNA, 19 nt, Artificial Sequence
  Description of Artificial Sequence: Synthetic oligonucleotide
  Antisense strand to SEQ ID NO: 1223304
uaccugcuaagucagagcc

SEQ ID NO: 1223306 - RNA, 19 nt, Artificial Sequence
  Description of Artificial Sequence: Synthetic oligonucleotide
  Sense strand starting at position 2892 of SEQ ID NO: 917285
gcagguaaucugugcaaag

SEQ ID NO: 1223307 - RNA, 19 nt, Artificial Sequence
  Description of Artificial Sequence: Synthetic oligonucleotide
  Antisense strand to SEQ ID NO: 1223306
cuuugcacagauuaccugc

SEQ ID NO: 1223308 - RNA, 19 nt, Artificial Sequence
  Description of Artificial Sequence: Synthetic oligonucleotide
  Sense strand starting at position 2893 of SEQ ID NO: 917285
cagguaaucugugcaaagu

SEQ ID NO: 1223309 - RNA, 19 nt, Artificial Sequence
  Description of Artificial Sequence: Synthetic oligonucleotide
  Antisense strand to SEQ ID NO: 1223308
acuuugcacagauuaccug

SEQ ID NO: 1223310 - RNA, 19 nt, Artificial Sequence
  Description of Artificial Sequence: Synthetic oligonucleotide
  Sense strand starting at position 2894 of SEQ ID NO: 917285
agguaaucugugcaaaguu

SEQ ID NO: 1223311 - RNA, 19 nt, Artificial Sequence
  Description of Artificial Sequence: Synthetic oligonucleotide
  Antisense strand to SEQ ID NO: 1223310
aacuuugcacagauuaccu

SEQ ID NO: 1223312 - RNA, 19 nt, Artificial Sequence
  Description of Artificial Sequence: Synthetic oligonucleotide
  Sense strand starting at position 3116 of SEQ ID NO: 917285
uaggauuguggcuaaccga

SEQ ID NO: 1223313 - RNA, 19 nt, Artificial Sequence
  Description of Artificial Sequence: Synthetic oligonucleotide
  Antisense strand to SEQ ID NO: 1223312
ucgguuagccacaauccua

SEQ ID NO: 1223314 - RNA, 19 nt, Artificial Sequence
  Description of Artificial Sequence: Synthetic oligonucleotide
  Sense strand starting at position 3119 of SEQ ID NO: 917285
gauuguggcuaaccgaaau

SEQ ID NO: 1223315 - RNA, 19 nt, Artificial Sequence
  Description of Artificial Sequence: Synthetic oligonucleotide
  Antisense strand to SEQ ID NO: 1223314
auuucgguuagccacaauc

SEQ ID NO: 1223316 - RNA, 19 nt, Artificial Sequence
  Description of Artificial Sequence: Synthetic oligonucleotide
  Sense strand starting at position 3187 of SEQ ID NO: 917285
gcaggaaaccucuguaagc

SEQ ID NO: 1223317 - RNA, 19 nt, Artificial Sequence
  Description of Artificial Sequence: Synthetic oligonucleotide
  Antisense strand to SEQ ID NO: 1223316
gcuuacagagguuuccugc

SEQ ID NO: 1223318 - RNA, 19 nt, Artificial Sequence
  Description of Artificial Sequence: Synthetic oligonucleotide
  Sense strand starting at position 3252 of SEQ ID NO: 917285
gccucagaggcuugugaag

SEQ ID NO: 1223319 - RNA, 19 nt, Artificial Sequence
  Description of Artificial Sequence: Synthetic oligonucleotide
  Antisense strand to SEQ ID NO: 1223318
cuucacaagccucugaggc

SEQ ID NO: 1223320 - RNA, 19 nt, Artificial Sequence
  Description of Artificial Sequence: Synthetic oligonucleotide
  Sense strand starting at position 3261 of SEQ ID NO: 917285
gcuugugaaguccagugaa

SEQ ID NO: 1223321 - RNA, 19 nt, Artificial Sequence
  Description of Artificial Sequence: Synthetic oligonucleotide
  Antisense strand to SEQ ID NO: 1223320
uucacuggacuucacaagc

SEQ ID NO: 1223322 - RNA, 19 nt, Artificial Sequence
  Description of Artificial Sequence: Synthetic oligonucleotide
  Sense strand starting at position 3356 of SEQ ID NO: 917285
caguaagucgugccuuagu

SEQ ID NO: 1223323 - RNA, 19 nt, Artificial Sequence
  Description of Artificial Sequence: Synthetic oligonucleotide
  Antisense strand to SEQ ID NO: 1223322
acuaaggcacgacuuacug

SEQ ID NO: 1223324 - RNA, 19 nt, Artificial Sequence
  Description of Artificial Sequence: Synthetic oligonucleotide
  Sense strand starting at position 3358 of SEQ ID NO: 917285
guaagucgugccuuaguuu

SEQ ID NO: 1223325 - RNA, 19 nt, Artificial Sequence
  Description of Artificial Sequence: Synthetic oligonucleotide
  Antisense strand to SEQ ID NO: 1223324
aaacuaaggcacgacuuac

SEQ ID NO: 1223326 - RNA, 19 nt, Artificial Sequence
  Description of Artificial Sequence: Synthetic oligonucleotide
  Sense strand starting at position 3389 of SEQ ID NO: 917285
acguguguugaaugaccaa

SEQ ID NO: 1223327 - RNA, 19 nt, Artificial Sequence
  Description of Artificial Sequence: Synthetic oligonucleotide
  Antisense strand to SEQ ID NO: 1223326
uuggucauucaacacacgu

SEQ ID NO: 1223328 - RNA, 19 nt, Artificial Sequence
  Description of Artificial Sequence: Synthetic oligonucleotide
  Sense strand starting at position 3392 of SEQ ID NO: 917285
uguguugaaugaccaagau

SEQ ID NO: 1223329 - RNA, 19 nt, Artificial Sequence
  Description of Artificial Sequence: Synthetic oligonucleotide
  Antisense strand to SEQ ID NO: 1223328
aucuuggucauucaacaca

SEQ ID NO: 1223330 - RNA, 19 nt, Artificial Sequence
  Description of Artificial Sequence: Synthetic oligonucleotide
  Sense strand starting at position 3593 of SEQ ID NO: 917285
uuaccaugauuaguaagau

SEQ ID NO: 1223331 - RNA, 19 nt, Artificial Sequence
  Description of Artificial Sequence: Synthetic oligonucleotide
  Antisense strand to SEQ ID NO: 1223330
aucuuacuaaucaugguaa

SEQ ID NO: 1223332 - RNA, 19 nt, Artificial Sequence
  Description of Artificial Sequence: Synthetic oligonucleotide
  Sense strand starting at position 3772 of SEQ ID NO: 917285
cuacgucuacauggaguau

SEQ ID NO: 1223333 - RNA, 19 nt, Artificial Sequence
  Description of Artificial Sequence: Synthetic oligonucleotide
  Antisense strand to SEQ ID NO: 1223332
auacuccauguagacguag

SEQ ID NO: 1223334 - RNA, 19 nt, Artificial Sequence
  Description of Artificial Sequence: Synthetic oligonucleotide
  Sense strand starting at position 3810 of SEQ ID NO: 917285
ugaagauuggagugucugu

SEQ ID NO: 1223335 - RNA, 19 nt, Artificial Sequence
  Description of Artificial Sequence: Synthetic oligonucleotide
  Antisense strand to SEQ ID NO: 1223334
acagacacuccaaucuuca

SEQ ID NO: 1223336 - RNA, 19 nt, Artificial Sequence
  Description of Artificial Sequence: Synthetic oligonucleotide
  Sense strand starting at position 3907 of SEQ ID NO: 917286
auugauguauggucuguuu

SEQ ID NO: 1223337 - RNA, 19 nt, Artificial Sequence
  Description of Artificial Sequence: Synthetic oligonucleotide
  Antisense strand to SEQ ID NO: 1223336
aaacagaccauacaucaau

SEQ ID NO: 1223338 - RNA, 19 nt, Artificial Sequence
  Description of Artificial Sequence: Synthetic oligonucleotide
  Sense strand starting at position 28 of SEQ ID NO: 917286
aacugaaacgucuguccuu

SEQ ID NO: 1223339 - RNA, 19 nt, Artificial Sequence
  Description of Artificial Sequence: Synthetic oligonucleotide
  Antisense strand to SEQ ID NO: 1223338
aaggacagacguuucaguu

SEQ ID NO: 1223340 - RNA, 19 nt, Artificial Sequence
  Description of Artificial Sequence: Synthetic oligonucleotide
  Sense strand starting at position 67 of SEQ ID NO: 917286
gcuucuacaguuugaaauu

SEQ ID NO: 1223341 - RNA, 19 nt, Artificial Sequence
  Description of Artificial Sequence: Synthetic oligonucleotide
  Antisense strand to SEQ ID NO: 1223340
aauuucaaacuguagaagc

SEQ ID NO: 1223342 - RNA, 19 nt, Artificial Sequence
  Description of Artificial Sequence: Synthetic oligonucleotide
  Sense strand starting at position 98 of SEQ ID NO: 917286
aguauacuccuuuaucgga

SEQ ID NO: 1223343 - RNA, 19 nt, Artificial Sequence
  Description of Artificial Sequence: Synthetic oligonucleotide
  Antisense strand to SEQ ID NO: 1223342
uccgauaaaggaguauacu

SEQ ID NO: 1223344 - RNA, 19 nt, Artificial Sequence
  Description of Artificial Sequence: Synthetic oligonucleotide
  Sense strand starting at position 155 of SEQ ID NO: 917286
gugaaugaggucugagaau

SEQ ID NO: 1223345 - RNA, 19 nt, Artificial Sequence
  Description of Artificial Sequence: Synthetic oligonucleotide
  Antisense strand to SEQ ID NO: 1223344
auucucagaccucauucac

SEQ ID NO: 1223346 - RNA, 19 nt, Artificial Sequence
  Description of Artificial Sequence: Synthetic oligonucleotide
  Sense strand starting at position 245 of SEQ ID NO: 917286
uuucuuagaagacgguaua

SEQ ID NO: 1223347 - RNA, 19 nt, Artificial Sequence
  Description of Artificial Sequence: Synthetic oligonucleotide
  Antisense strand to SEQ ID NO: 1223346
uauaccgucuucuaagaaa

SEQ ID NO: 1223348 - RNA, 19 nt, Artificial Sequence
  Description of Artificial Sequence: Synthetic oligonucleotide
  Sense strand starting at position 300 of SEQ ID NO: 917286
acaagcugcuucuugcuaa

SEQ ID NO: 1223349 - RNA, 19 nt, Artificial Sequence
  Description of Artificial Sequence: Synthetic oligonucleotide
  Antisense strand to SEQ ID NO: 1223348
uuagcaagaagcagcuugu

SEQ ID NO: 1223350 - RNA, 19 nt, Artificial Sequence
  Description of Artificial Sequence: Synthetic oligonucleotide
  Sense strand starting at position 357 of SEQ ID NO: 917286
acaacucuaucguccagua

SEQ ID NO: 1223351 - RNA, 19 nt, Artificial Sequence
  Description of Artificial Sequence: Synthetic oligonucleotide
  Antisense strand to SEQ ID NO: 1223350
uacuggacgauagaguugu

SEQ ID NO: 1223352 - RNA, 19 nt, Artificial Sequence
  Description of Artificial Sequence: Synthetic oligonucleotide
  Sense strand starting at position 359 of SEQ ID NO: 917286
aacucuaucguccaguaag

SEQ ID NO: 1223353 - RNA, 19 nt, Artificial Sequence
  Description of Artificial Sequence: Synthetic oligonucleotide
  Antisense strand to SEQ ID NO: 1223352
cuuacuggacgauagaguu

SEQ ID NO: 1223354 - RNA, 19 nt, Artificial Sequence
  Description of Artificial Sequence: Synthetic oligonucleotide
  Sense strand starting at position 362 of SEQ ID NO: 917286
ucuaucguccaguaagaaa

SEQ ID NO: 1223355 - RNA, 19 nt, Artificial Sequence
  Description of Artificial Sequence: Synthetic oligonucleotide
  Antisense strand to SEQ ID NO: 1223354
uuucuuacuggacgauaga

SEQ ID NO: 1223356 - RNA, 19 nt, Artificial Sequence
  Description of Artificial Sequence: Synthetic oligonucleotide
  Sense strand starting at position 407 of SEQ ID NO: 917286
ugcagaaugacguguauuu

SEQ ID NO: 1223357 - RNA, 19 nt, Artificial Sequence
  Description of Artificial Sequence: Synthetic oligonucleotide
  Antisense strand to SEQ ID NO: 1223356
aaauacacgucauucugca

SEQ ID NO: 1223358 - RNA, 19 nt, Artificial Sequence
  Description of Artificial Sequence: Synthetic oligonucleotide
  Sense strand starting at position 417 of SEQ ID NO: 917286
cguguauuugauuggcaga

SEQ ID NO: 1223359 - RNA, 19 nt, Artificial Sequence
  Description of Artificial Sequence: Synthetic oligonucleotide
  Antisense strand to SEQ ID NO: 1223358
ucugccaaucaaauacacg

SEQ ID NO: 1223360 - RNA, 19 nt, Artificial Sequence
  Description of Artificial Sequence: Synthetic oligonucleotide
  Sense strand starting at position 418 of SEQ ID NO: 917286
guguauuugauuggcagau

SEQ ID NO: 1223361 - RNA, 19 nt, Artificial Sequence
  Description of Artificial Sequence: Synthetic oligonucleotide
  Antisense strand to SEQ ID NO: 1223360
aucugccaaucaaauacac

SEQ ID NO: 1223362 - RNA, 19 nt, Artificial Sequence
  Description of Artificial Sequence: Synthetic oligonucleotide
  Sense strand starting at position 420 of SEQ ID NO: 917286
guauuugauuggcagaugu

SEQ ID NO: 1223363 - RNA, 19 nt, Artificial Sequence
  Description of Artificial Sequence: Synthetic oligonucleotide
  Antisense strand to SEQ ID NO: 1223362
acaucugccaaucaaauac

SEQ ID NO: 1223364 - RNA, 19 nt, Artificial Sequence
  Description of Artificial Sequence: Synthetic oligonucleotide
  Sense strand starting at position 428 of SEQ ID NO: 917286
uuggcagaugucuaccgaa

SEQ ID NO: 1223365 - RNA, 19 nt, Artificial Sequence
  Description of Artificial Sequence: Synthetic oligonucleotide
  Antisense strand to SEQ ID NO: 1223364
uucgguagacaucugccaa

SEQ ID NO: 1223366 - RNA, 19 nt, Artificial Sequence
  Description of Artificial Sequence: Synthetic oligonucleotide
  Sense strand starting at position 475 of SEQ ID NO: 917286
aauagaguugcucgucucu

SEQ ID NO: 1223367 - RNA, 19 nt, Artificial Sequence
  Description of Artificial Sequence: Synthetic oligonucleotide
  Antisense strand to SEQ ID NO: 1223366
agagacgagcaacucuauu

SEQ ID NO: 1223368 - RNA, 19 nt, Artificial Sequence
  Description of Artificial Sequence: Synthetic oligonucleotide
  Sense strand starting at position 515 of SEQ ID NO: 917286
gaaucuuaacgcuggugua

SEQ ID NO: 1223369 - RNA, 19 nt, Artificial Sequence
  Description of Artificial Sequence: Synthetic oligonucleotide
  Antisense strand to SEQ ID NO: 1223368
uacaccagcguuaagauuc

SEQ ID NO: 1223370 - RNA, 19 nt, Artificial Sequence
  Description of Artificial Sequence: Synthetic oligonucleotide
  Sense strand starting at position 516 of SEQ ID NO: 917286
aaucuuaacgcugguguaa

SEQ ID NO: 1223371 - RNA, 19 nt, Artificial Sequence
  Description of Artificial Sequence: Synthetic oligonucleotide
  Antisense strand to SEQ ID NO: 1223370
uuacaccagcguuaagauu

SEQ ID NO: 1223372 - RNA, 19 nt, Artificial Sequence
  Description of Artificial Sequence: Synthetic oligonucleotide
  Sense strand starting at position 545 of SEQ ID NO: 917286
cagagugcucgccgagaau

SEQ ID NO: 1223373 - RNA, 19 nt, Artificial Sequence
  Description of Artificial Sequence: Synthetic oligonucleotide
  Antisense strand to SEQ ID NO: 1223372
auucucggcgagcacucug

SEQ ID NO: 1223374 - RNA, 19 nt, Artificial Sequence
  Description of Artificial Sequence: Synthetic oligonucleotide
  Sense strand starting at position 557 of SEQ ID NO: 917286
cgagaauuccauuagccag

SEQ ID NO: 1223375 - RNA, 19 nt, Artificial Sequence
  Description of Artificial Sequence: Synthetic oligonucleotide
  Antisense strand to SEQ ID NO: 1223374
cuggcuaauggaauucucg

SEQ ID NO: 1223376 - RNA, 19 nt, Artificial Sequence
  Description of Artificial Sequence: Synthetic oligonucleotide
  Sense strand starting at position 564 of SEQ ID NO: 917286
uccauuagccaguggaauu

SEQ ID NO: 1223377 - RNA, 19 nt, Artificial Sequence
  Description of Artificial Sequence: Synthetic oligonucleotide
  Antisense strand to SEQ ID NO: 1223376
aauuccacuggcuaaugga

SEQ ID NO: 1223378 - RNA, 19 nt, Artificial Sequence
  Description of Artificial Sequence: Synthetic oligonucleotide
  Sense strand starting at position 627 of SEQ ID NO: 917286
guuaaauuagagugcugac

SEQ ID NO: 1223379 - RNA, 19 nt, Artificial Sequence
  Description of Artificial Sequence: Synthetic oligonucleotide
  Antisense strand to SEQ ID NO: 1223378
gucagcacucuaauuuaac

SEQ ID NO: 1223380 - RNA, 19 nt, Artificial Sequence
  Description of Artificial Sequence: Synthetic oligonucleotide
  Sense strand starting at position 843 of SEQ ID NO: 917286
ccucaaaugcacugcgaaa

SEQ ID NO: 1223381 - RNA, 19 nt, Artificial Sequence
  Description of Artificial Sequence: Synthetic oligonucleotide
  Antisense strand to SEQ ID NO: 1223380
uuucgcagugcauuugagg

SEQ ID NO: 1223382 - RNA, 19 nt, Artificial Sequence
  Description of Artificial Sequence: Synthetic oligonucleotide
  Sense strand starting at position 1507 of SEQ ID NO: 917286
cuugauaacuucuucugga

SEQ ID NO: 1223383 - RNA, 19 nt, Artificial Sequence
  Description of Artificial Sequence: Synthetic oligonucleotide
  Antisense strand to SEQ ID NO: 1223382
uccagaagaaguuaucaag

SEQ ID NO: 1223384 - RNA, 19 nt, Artificial Sequence
  Description of Artificial Sequence: Synthetic oligonucleotide
  Sense strand starting at position 1508 of SEQ ID NO: 917286
uugauaacuucuucuggaa

SEQ ID NO: 1223385 - RNA, 19 nt, Artificial Sequence
  Description of Artificial Sequence: Synthetic oligonucleotide
  Antisense strand to SEQ ID NO: 1223384
uuccagaagaaguuaucaa

SEQ ID NO: 1223386 - RNA, 19 nt, Artificial Sequence
  Description of Artificial Sequence: Synthetic oligonucleotide
  Sense strand starting at position 1820 of SEQ ID NO: 917286
gcugcagagcaggagaaau

SEQ ID NO: 1223387 - RNA, 19 nt, Artificial Sequence
  Description of Artificial Sequence: Synthetic oligonucleotide
  Antisense strand to SEQ ID NO: 1223386
auuucuccugcucugcagc

SEQ ID NO: 1223388 - RNA, 19 nt, Artificial Sequence
  Description of Artificial Sequence: Synthetic oligonucleotide
  Sense strand starting at position 1980 of SEQ ID NO: 917286
ugcaguucucaggaaauga

SEQ ID NO: 1223389 - RNA, 19 nt, Artificial Sequence
  Description of Artificial Sequence: Synthetic oligonucleotide
  Antisense strand to SEQ ID NO: 1223388
ucauuuccugagaacugca

SEQ ID NO: 1223390 - RNA, 19 nt, Artificial Sequence
  Description of Artificial Sequence: Synthetic oligonucleotide
  Sense strand starting at position 2030 of SEQ ID NO: 917286
gcaaaugacuuacccggau

SEQ ID NO: 1223391 - RNA, 19 nt, Artificial Sequence
  Description of Artificial Sequence: Synthetic oligonucleotide
  Antisense strand to SEQ ID NO: 1223390
auccggguaagucauuugc

SEQ ID NO: 1223392 - RNA, 19 nt, Artificial Sequence
  Description of Artificial Sequence: Synthetic oligonucleotide
  Sense strand starting at position 2047 of SEQ ID NO: 917286
aucacaugaugcgcuaaau

SEQ ID NO: 1223393 - RNA, 19 nt, Artificial Sequence
  Description of Artificial Sequence: Synthetic oligonucleotide
  Antisense strand to SEQ ID NO: 1223392
auuuagcgcaucaugugau

SEQ ID NO: 1223394 - RNA, 19 nt, Artificial Sequence
  Description of Artificial Sequence: Synthetic oligonucleotide
  Sense strand starting at position 2398 of SEQ ID NO: 917286
gcgcuaagucgcuuuauug

SEQ ID NO: 1223395 - RNA, 19 nt, Artificial Sequence
  Description of Artificial Sequence: Synthetic oligonucleotide
  Antisense strand to SEQ ID NO: 1223394
caauaaagcgacuuagcgc

SEQ ID NO: 1223396 - RNA, 19 nt, Artificial Sequence
  Description of Artificial Sequence: Synthetic oligonucleotide
  Sense strand starting at position 2405 of SEQ ID NO: 917286
gucgcuuuauugccauaaa

SEQ ID NO: 1223397 - RNA, 19 nt, Artificial Sequence
  Description of Artificial Sequence: Synthetic oligonucleotide
  Antisense strand to SEQ ID NO: 1223396
uuuauggcaauaaagcgac

SEQ ID NO: 1223398 - RNA, 19 nt, Artificial Sequence
  Description of Artificial Sequence: Synthetic oligonucleotide
  Sense strand starting at position 2470 of SEQ ID NO: 917286
gagugugaugguugaaauc

SEQ ID NO: 1223399 - RNA, 19 nt, Artificial Sequence
  Description of Artificial Sequence: Synthetic oligonucleotide
  Antisense strand to SEQ ID NO: 1223398
gauuucaaccaucacacuc

SEQ ID NO: 1223400 - RNA, 19 nt, Artificial Sequence
  Description of Artificial Sequence: Synthetic oligonucleotide
  Sense strand starting at position 2811 of SEQ ID NO: 917286
gcgagaaagucuccucuuu

SEQ ID NO: 1223401 - RNA, 19 nt, Artificial Sequence
  Description of Artificial Sequence: Synthetic oligonucleotide
  Antisense strand to SEQ ID NO: 1223400
aaagaggagacuuucucgc

SEQ ID NO: 1223402 - RNA, 19 nt, Artificial Sequence
  Description of Artificial Sequence: Synthetic oligonucleotide
  Sense strand starting at position 3164 of SEQ ID NO: 917286
gggagucauuguuuggguu

SEQ ID NO: 1223403 - RNA, 19 nt, Artificial Sequence
  Description of Artificial Sequence: Synthetic oligonucleotide
  Antisense strand to SEQ ID NO: 1223402
aacccaaacaaugacuccc

SEQ ID NO: 1223404 - RNA, 19 nt, Artificial Sequence
  Description of Artificial Sequence: Synthetic oligonucleotide
  Sense strand starting at position 3235 of SEQ ID NO: 917286
ucaccuuggcgggaugaau

SEQ ID NO: 1223405 - RNA, 19 nt, Artificial Sequence
  Description of Artificial Sequence: Synthetic oligonucleotide
  Antisense strand to SEQ ID NO: 1223404
auucaucccgccaagguga

SEQ ID NO: 1223406 - RNA, 19 nt, Artificial Sequence
  Description of Artificial Sequence: Synthetic oligonucleotide
  Sense strand starting at position 3832 of SEQ ID NO: 917286
gggaaguuugugugcagag

SEQ ID NO: 1223407 - RNA, 19 nt, Artificial Sequence
  Description of Artificial Sequence: Synthetic oligonucleotide
  Antisense strand to SEQ ID NO: 1223406
cucugcacacaaacuuccc

SEQ ID NO: 1223408 - RNA, 19 nt, Artificial Sequence
  Description of Artificial Sequence: Synthetic oligonucleotide
  Sense strand starting at position 3833 of SEQ ID NO: 917286
ggaaguuugugugcagaga

SEQ ID NO: 1223409 - RNA, 19 nt, Artificial Sequence
  Description of Artificial Sequence: Synthetic oligonucleotide
  Antisense strand to SEQ ID NO: 1223408
ucucugcacacaaacuucc

SEQ ID NO: 1223410 - RNA, 19 nt, Artificial Sequence
  Description of Artificial Sequence: Synthetic oligonucleotide
  Sense strand starting at position 3834 of SEQ ID NO: 917286
gaaguuugugugcagagag

SEQ ID NO: 1223411 - RNA, 19 nt, Artificial Sequence
  Description of Artificial Sequence: Synthetic oligonucleotide
  Antisense strand to SEQ ID NO: 1223410
cucucugcacacaaacuuc

SEQ ID NO: 1223412 - RNA, 19 nt, Artificial Sequence
  Description of Artificial Sequence: Synthetic oligonucleotide
  Sense strand starting at position 3848 of SEQ ID NO: 917286
gagagaaagcuuugcugua

SEQ ID NO: 1223413 - RNA, 19 nt, Artificial Sequence
  Description of Artificial Sequence: Synthetic oligonucleotide
  Antisense strand to SEQ ID NO: 1223412
uacagcaaagcuuucucuc

SEQ ID NO: 1223414 - RNA, 19 nt, Artificial Sequence
  Description of Artificial Sequence: Synthetic oligonucleotide
  Sense strand starting at position 3849 of SEQ ID NO: 917286
agagaaagcuuugcuguac

SEQ ID NO: 1223415 - RNA, 19 nt, Artificial Sequence
  Description of Artificial Sequence: Synthetic oligonucleotide
  Antisense strand to SEQ ID NO: 1223414
guacagcaaagcuuucucu

SEQ ID NO: 1223416 - RNA, 19 nt, Artificial Sequence
  Description of Artificial Sequence: Synthetic oligonucleotide
  Sense strand starting at position 3850 of SEQ ID NO: 917287
gagaaagcuuugcuguacu

SEQ ID NO: 1223417 - RNA, 19 nt, Artificial Sequence
  Description of Artificial Sequence: Synthetic oligonucleotide
  Antisense strand to SEQ ID NO: 1223416
aguacagcaaagcuuucuc

SEQ ID NO: 1223418 - RNA, 19 nt, Artificial Sequence
  Description of Artificial Sequence: Synthetic oligonucleotide
  Sense strand starting at position 234 of SEQ ID NO: 917287
aguaauaguuucucugaaa

SEQ ID NO: 1223419 - RNA, 19 nt, Artificial Sequence
  Description of Artificial Sequence: Synthetic oligonucleotide
  Antisense strand to SEQ ID NO: 1223418
uuucagagaaacuauuacu

SEQ ID NO: 1223420 - RNA, 19 nt, Artificial Sequence
  Description of Artificial Sequence: Synthetic oligonucleotide
  Sense strand starting at position 235 of SEQ ID NO: 917287
guaauaguuucucugaaau

SEQ ID NO: 1223421 - RNA, 19 nt, Artificial Sequence
  Description of Artificial Sequence: Synthetic oligonucleotide
  Antisense strand to SEQ ID NO: 1223420
auuucagagaaacuauuac

SEQ ID NO: 1223422 - RNA, 19 nt, Artificial Sequence
  Description of Artificial Sequence: Synthetic oligonucleotide
  Sense strand starting at position 285 of SEQ ID NO: 917287
agcuuagcacuguacaaua

SEQ ID NO: 1223423 - RNA, 19 nt, Artificial Sequence
  Description of Artificial Sequence: Synthetic oligonucleotide
  Antisense strand to SEQ ID NO: 1223422
uauuguacagugcuaagcu

SEQ ID NO: 1223424 - RNA, 19 nt, Artificial Sequence
  Description of Artificial Sequence: Synthetic oligonucleotide
  Sense strand starting at position 295 of SEQ ID NO: 917287
uguacaauaguacggaaau

SEQ ID NO: 1223425 - RNA, 19 nt, Artificial Sequence
  Description of Artificial Sequence: Synthetic oligonucleotide
  Antisense strand to SEQ ID NO: 1223424
auuuccguacuauuguaca

SEQ ID NO: 1223426 - RNA, 19 nt, Artificial Sequence
  Description of Artificial Sequence: Synthetic oligonucleotide
  Sense strand starting at position 473 of SEQ ID NO: 917287
ucaaauguuccagguucua

SEQ ID NO: 1223427 - RNA, 19 nt, Artificial Sequence
  Description of Artificial Sequence: Synthetic oligonucleotide
  Antisense strand to SEQ ID NO: 1223426
uagaaccuggaacauuuga

SEQ ID NO: 1223428 - RNA, 19 nt, Artificial Sequence
  Description of Artificial Sequence: Synthetic oligonucleotide
  Sense strand starting at position 485 of SEQ ID NO: 917287
gguucuacauuggcuugaa

SEQ ID NO: 1223429 - RNA, 19 nt, Artificial Sequence
  Description of Artificial Sequence: Synthetic oligonucleotide
  Antisense strand to SEQ ID NO: 1223428
uucaagccaauguagaacc

SEQ ID NO: 1223430 - RNA, 19 nt, Artificial Sequence
  Description of Artificial Sequence: Synthetic oligonucleotide
  Sense strand starting at position 662 of SEQ ID NO: 917287
uuaacugaacugugccaaa

SEQ ID NO: 1223431 - RNA, 19 nt, Artificial Sequence
  Description of Artificial Sequence: Synthetic oligonucleotide
  Antisense strand to SEQ ID NO: 1223430
uuuggcacaguucaguuaa

SEQ ID NO: 1223432 - RNA, 19 nt, Artificial Sequence
  Description of Artificial Sequence: Synthetic oligonucleotide
  Sense strand starting at position 809 of SEQ ID NO: 917287
ccauaagugucacuaucuu

SEQ ID NO: 1223433 - RNA, 19 nt, Artificial Sequence
  Description of Artificial Sequence: Synthetic oligonucleotide
  Antisense strand to SEQ ID NO: 1223432
aagauagugacacuuaugg

SEQ ID NO: 1223434 - RNA, 19 nt, Artificial Sequence
  Description of Artificial Sequence: Synthetic oligonucleotide
  Sense strand starting at position 914 of SEQ ID NO: 917287
auagauaaauagcuucuga

SEQ ID NO: 1223435 - RNA, 19 nt, Artificial Sequence
  Description of Artificial Sequence: Synthetic oligonucleotide
  Antisense strand to SEQ ID NO: 1223434
ucagaagcuauuuaucuau

SEQ ID NO: 1223436 - RNA, 19 nt, Artificial Sequence
  Description of Artificial Sequence: Synthetic oligonucleotide
  Sense strand starting at position 1050 of SEQ ID NO: 917287
acgucacagcuugaaauua

SEQ ID NO: 1223437 - RNA, 19 nt, Artificial Sequence
  Description of Artificial Sequence: Synthetic oligonucleotide
  Antisense strand to SEQ ID NO: 1223436
uaauuucaagcugugacgu

SEQ ID NO: 1223438 - RNA, 19 nt, Artificial Sequence
  Description of Artificial Sequence: Synthetic oligonucleotide
  Sense strand starting at position 1216 of SEQ ID NO: 917287
agcuuuauacgggagcaca

SEQ ID NO: 1223439 - RNA, 19 nt, Artificial Sequence
  Description of Artificial Sequence: Synthetic oligonucleotide
  Antisense strand to SEQ ID NO: 1223438
ugugcucccguauaaagcu

SEQ ID NO: 1223440 - RNA, 19 nt, Artificial Sequence
  Description of Artificial Sequence: Synthetic oligonucleotide
  Sense strand starting at position 1236 of SEQ ID NO: 917287
ucuucucuaggguaagauu

SEQ ID NO: 1223441 - RNA, 19 nt, Artificial Sequence
  Description of Artificial Sequence: Synthetic oligonucleotide
  Antisense strand to SEQ ID NO: 1223440
aaucuuacccuagagaaga

SEQ ID NO: 1223442 - RNA, 19 nt, Artificial Sequence
  Description of Artificial Sequence: Synthetic oligonucleotide
  Sense strand starting at position 1274 of SEQ ID NO: 917287
uugguagucauugauugca

SEQ ID NO: 1223443 - RNA, 19 nt, Artificial Sequence
  Description of Artificial Sequence: Synthetic oligonucleotide
  Antisense strand to SEQ ID NO: 1223442
ugcaaucaaugacuaccaa

SEQ ID NO: 1223444 - RNA, 19 nt, Artificial Sequence
  Description of Artificial Sequence: Synthetic oligonucleotide
  Sense strand starting at position 1298 of SEQ ID NO: 917287
cuguuagaaucuguaucag

SEQ ID NO: 1223445 - RNA, 19 nt, Artificial Sequence
  Description of Artificial Sequence: Synthetic oligonucleotide
  Antisense strand to SEQ ID NO: 1223444
cugauacagauucuaacag

SEQ ID NO: 1223446 - RNA, 19 nt, Artificial Sequence
  Description of Artificial Sequence: Synthetic oligonucleotide
  Sense strand starting at position 1363 of SEQ ID NO: 917287
aucuguagucuuuguauuu

SEQ ID NO: 1223447 - RNA, 19 nt, Artificial Sequence
  Description of Artificial Sequence: Synthetic oligonucleotide
  Antisense strand to SEQ ID NO: 1223446
aaauacaaagacuacagau

SEQ ID NO: 1223448 - RNA, 19 nt, Artificial Sequence
  Description of Artificial Sequence: Synthetic oligonucleotide
  Sense strand starting at position 1463 of SEQ ID NO: 917287
ugagauuaguuggaauuua

SEQ ID NO: 1223449 - RNA, 19 nt, Artificial Sequence
  Description of Artificial Sequence: Synthetic oligonucleotide
  Antisense strand to SEQ ID NO: 1223448
uaaauuccaacuaaucuca

SEQ ID NO: 1223450 - RNA, 19 nt, Artificial Sequence
  Description of Artificial Sequence: Synthetic oligonucleotide
  Sense strand starting at position 1647 of SEQ ID NO: 917287
ugccuccaguucuuaagaa

SEQ ID NO: 1223451 - RNA, 19 nt, Artificial Sequence
  Description of Artificial Sequence: Synthetic oligonucleotide
  Antisense strand to SEQ ID NO: 1223450
uucuuaagaacuggaggca

SEQ ID NO: 1223452 - RNA, 19 nt, Artificial Sequence
  Description of Artificial Sequence: Synthetic oligonucleotide
  Sense strand starting at position 2072 of SEQ ID NO: 917287
agccgauugcuguucaugu

SEQ ID NO: 1223453 - RNA, 19 nt, Artificial Sequence
  Description of Artificial Sequence: Synthetic oligonucleotide
  Antisense strand to SEQ ID NO: 1223452
acaugaacagcaaucggcu

SEQ ID NO: 1223454 - RNA, 19 nt, Artificial Sequence
  Description of Artificial Sequence: Synthetic oligonucleotide
  Sense strand starting at position 2129 of SEQ ID NO: 917287
cccugugaaugcucaaaug

SEQ ID NO: 1223455 - RNA, 19 nt, Artificial Sequence
  Description of Artificial Sequence: Synthetic oligonucleotide
  Antisense strand to SEQ ID NO: 1223454
cauuugagcauucacaggg

SEQ ID NO: 1223456 - RNA, 19 nt, Artificial Sequence
  Description of Artificial Sequence: Synthetic oligonucleotide
  Sense strand starting at position 2182 of SEQ ID NO: 917287
gauguugauuuauagauga

SEQ ID NO: 1223457 - RNA, 19 nt, Artificial Sequence
  Description of Artificial Sequence: Synthetic oligonucleotide
  Antisense strand to SEQ ID NO: 1223456
ucaucuauaaaucaacauc

SEQ ID NO: 1223458 - RNA, 19 nt, Artificial Sequence
  Description of Artificial Sequence: Synthetic oligonucleotide
  Sense strand starting at position 2367 of SEQ ID NO: 917287
cuaggaaagguguaugugu

SEQ ID NO: 1223459 - RNA, 19 nt, Artificial Sequence
  Description of Artificial Sequence: Synthetic oligonucleotide
  Antisense strand to SEQ ID NO: 1223458
acacauacaccuuuccuag

SEQ ID NO: 1223460 - RNA, 19 nt, Artificial Sequence
  Description of Artificial Sequence: Synthetic oligonucleotide
  Sense strand starting at position 2369 of SEQ ID NO: 917287
aggaaagguguauguguau

SEQ ID NO: 1223461 - RNA, 19 nt, Artificial Sequence
  Description of Artificial Sequence: Synthetic oligonucleotide
  Antisense strand to SEQ ID NO: 1223460
auacacauacaccuuuccu

SEQ ID NO: 1223462 - RNA, 19 nt, Artificial Sequence
  Description of Artificial Sequence: Synthetic oligonucleotide
  Sense strand starting at position 2592 of SEQ ID NO: 917287
guuuaauauuaaccaggca

SEQ ID NO: 1223463 - RNA, 19 nt, Artificial Sequence
  Description of Artificial Sequence: Synthetic oligonucleotide
  Antisense strand to SEQ ID NO: 1223462
ugccugguuaauauuaaac

SEQ ID NO: 1223464 - RNA, 19 nt, Artificial Sequence
  Description of Artificial Sequence: Synthetic oligonucleotide
  Sense strand starting at position 2785 of SEQ ID NO: 917287
gaaauaaccuagguuaggu

SEQ ID NO: 1223465 - RNA, 19 nt, Artificial Sequence
  Description of Artificial Sequence: Synthetic oligonucleotide
  Antisense strand to SEQ ID NO: 1223464
accuaaccuagguuauuuc

SEQ ID NO: 1223466 - RNA, 19 nt, Artificial Sequence
  Description of Artificial Sequence: Synthetic oligonucleotide
  Sense strand starting at position 2794 of SEQ ID NO: 917287
uagguuagguguccaacau

SEQ ID NO: 1223467 - RNA, 19 nt, Artificial Sequence
  Description of Artificial Sequence: Synthetic oligonucleotide
  Antisense strand to SEQ ID NO: 1223466
auguuggacaccuaaccua

SEQ ID NO: 1223468 - RNA, 19 nt, Artificial Sequence
  Description of Artificial Sequence: Synthetic oligonucleotide
  Sense strand starting at position 2795 of SEQ ID NO: 917287
agguuagguguccaacauu

SEQ ID NO: 1223469 - RNA, 19 nt, Artificial Sequence
  Description of Artificial Sequence: Synthetic oligonucleotide
  Antisense strand to SEQ ID NO: 1223468
aauguuggacaccuaaccu

SEQ ID NO: 1223470 - RNA, 19 nt, Artificial Sequence
  Description of Artificial Sequence: Synthetic oligonucleotide
  Sense strand starting at position 2816 of SEQ ID NO: 917287
gggaguaguuaagcaauac

SEQ ID NO: 1223471 - RNA, 19 nt, Artificial Sequence
  Description of Artificial Sequence: Synthetic oligonucleotide
  Antisense strand to SEQ ID NO: 1223470
guauugcuuaacuacuccc

SEQ ID NO: 1223472 - RNA, 19 nt, Artificial Sequence
  Description of Artificial Sequence: Synthetic oligonucleotide
  Sense strand starting at position 2817 of SEQ ID NO: 917287
ggaguaguuaagcaauaca

SEQ ID NO: 1223473 - RNA, 19 nt, Artificial Sequence
  Description of Artificial Sequence: Synthetic oligonucleotide
  Antisense strand to SEQ ID NO: 1223472
uguauugcuuaacuacucc

SEQ ID NO: 1223474 - RNA, 19 nt, Artificial Sequence
  Description of Artificial Sequence: Synthetic oligonucleotide
  Sense strand starting at position 2866 of SEQ ID NO: 917287
aaaguugaguaguuggaaa

SEQ ID NO: 1223475 - RNA, 19 nt, Artificial Sequence
  Description of Artificial Sequence: Synthetic oligonucleotide
  Antisense strand to SEQ ID NO: 1223474
uuuccaacuacucaacuuu

SEQ ID NO: 1223476 - RNA, 19 nt, Artificial Sequence
  Description of Artificial Sequence: Synthetic oligonucleotide
  Sense strand starting at position 2913 of SEQ ID NO: 917287
aacauuuagugacauggga

SEQ ID NO: 1223477 - RNA, 19 nt, Artificial Sequence
  Description of Artificial Sequence: Synthetic oligonucleotide
  Antisense strand to SEQ ID NO: 1223476
ucccaugucacuaaauguu

SEQ ID NO: 1223478 - RNA, 19 nt, Artificial Sequence
  Description of Artificial Sequence: Synthetic oligonucleotide
  Sense strand starting at position 2938 of SEQ ID NO: 917287
ucaugcuauguauagucaa

SEQ ID NO: 1223479 - RNA, 19 nt, Artificial Sequence
  Description of Artificial Sequence: Synthetic oligonucleotide
  Antisense strand to SEQ ID NO: 1223478
uugacuauacauagcauga

SEQ ID NO: 1223480 - RNA, 19 nt, Artificial Sequence
  Description of Artificial Sequence: Synthetic oligonucleotide
  Sense strand starting at position 2941 of SEQ ID NO: 917287
ugcuauguauagucaaaga

SEQ ID NO: 1223481 - RNA, 19 nt, Artificial Sequence
  Description of Artificial Sequence: Synthetic oligonucleotide
  Antisense strand to SEQ ID NO: 1223480
ucuuugacuauacauagca

SEQ ID NO: 1223482 - RNA, 19 nt, Artificial Sequence
  Description of Artificial Sequence: Synthetic oligonucleotide
  Sense strand starting at position 3031 of SEQ ID NO: 917287
ucguuagaugguuauauua

SEQ ID NO: 1223483 - RNA, 19 nt, Artificial Sequence
  Description of Artificial Sequence: Synthetic oligonucleotide
  Antisense strand to SEQ ID NO: 1223482
uaauauaaccaucuaacga

SEQ ID NO: 1223484 - RNA, 19 nt, Artificial Sequence
  Description of Artificial Sequence: Synthetic oligonucleotide
  Sense strand starting at position 3414 of SEQ ID NO: 917287
auugcuauguauuccauuu

SEQ ID NO: 1223485 - RNA, 19 nt, Artificial Sequence
  Description of Artificial Sequence: Synthetic oligonucleotide
  Antisense strand to SEQ ID NO: 1223484
aaauggaauacauagcaau

SEQ ID NO: 1223486 - RNA, 19 nt, Artificial Sequence
  Description of Artificial Sequence: Synthetic oligonucleotide
  Sense strand starting at position 3494 of SEQ ID NO: 917287
guuaguuggaacugaagua

SEQ ID NO: 1223487 - RNA, 19 nt, Artificial Sequence
  Description of Artificial Sequence: Synthetic oligonucleotide
  Antisense strand to SEQ ID NO: 1223486
uacuucaguuccaacuaac

SEQ ID NO: 1223488 - RNA, 19 nt, Artificial Sequence
  Description of Artificial Sequence: Synthetic oligonucleotide
  Sense strand starting at position 3509 of SEQ ID NO: 917287
aguaguugaugaucaaaug

SEQ ID NO: 1223489 - RNA, 19 nt, Artificial Sequence
  Description of Artificial Sequence: Synthetic oligonucleotide
  Antisense strand to SEQ ID NO: 1223488
cauuugaucaucaacuacu

SEQ ID NO: 1223490 - RNA, 19 nt, Artificial Sequence
  Description of Artificial Sequence: Synthetic oligonucleotide
  Sense strand starting at position 3733 of SEQ ID NO: 917287
uuuccuaagugaucagcaa

SEQ ID NO: 1223491 - RNA, 19 nt, Artificial Sequence
  Description of Artificial Sequence: Synthetic oligonucleotide
  Antisense strand to SEQ ID NO: 1223490
uugcugaucacuuaggaaa

SEQ ID NO: 1223492 - RNA, 19 nt, Artificial Sequence
  Description of Artificial Sequence: Synthetic oligonucleotide
  Sense strand starting at position 3737 of SEQ ID NO: 917287
cuaagugaucagcaagacu

SEQ ID NO: 1223493 - RNA, 19 nt, Artificial Sequence
  Description of Artificial Sequence: Synthetic oligonucleotide
  Antisense strand to SEQ ID NO: 1223492
agucuugcugaucacuuag

SEQ ID NO: 1223494 - RNA, 19 nt, Artificial Sequence
  Description of Artificial Sequence: Synthetic oligonucleotide
  Sense strand starting at position 3947 of SEQ ID NO: 917287
cauagaagauuuggcauga

SEQ ID NO: 1223495 - RNA, 19 nt, Artificial Sequence
  Description of Artificial Sequence: Synthetic oligonucleotide
  Antisense strand to SEQ ID NO: 1223494
ucaugccaaaucuucuaug

SEQ ID NO: 1223496 - RNA, 19 nt, Artificial Sequence
  Description of Artificial Sequence: Synthetic oligonucleotide
  Sense strand starting at position 3977 of SEQ ID NO: 917288
augggauguuaucuuucuu

SEQ ID NO: 1223497 - RNA, 19 nt, Artificial Sequence
  Description of Artificial Sequence: Synthetic oligonucleotide
  Antisense strand to SEQ ID NO: 1223496
aagaaagauaacaucccau

SEQ ID NO: 1223498 - RNA, 19 nt, Artificial Sequence
  Description of Artificial Sequence: Synthetic oligonucleotide
  Sense strand starting at position 33 of SEQ ID NO: 917288
gauggaauggcgcauauau

SEQ ID NO: 1223499 - RNA, 19 nt, Artificial Sequence
  Description of Artificial Sequence: Synthetic oligonucleotide
  Antisense strand to SEQ ID NO: 1223498
auauaugcgccauuccauc

SEQ ID NO: 1223500 - RNA, 19 nt, Artificial Sequence
  Description of Artificial Sequence: Synthetic oligonucleotide
  Sense strand starting at position 35 of SEQ ID NO: 917288
uggaauggcgcauauauua

SEQ ID NO: 1223501 - RNA, 19 nt, Artificial Sequence
  Description of Artificial Sequence: Synthetic oligonucleotide
  Antisense strand to SEQ ID NO: 1223500
uaauauaugcgccauucca

SEQ ID NO: 1223502 - RNA, 19 nt, Artificial Sequence
  Description of Artificial Sequence: Synthetic oligonucleotide
  Sense strand starting at position 44 of SEQ ID NO: 917288
gcauauauuagcuguggca

SEQ ID NO: 1223503 - RNA, 19 nt, Artificial Sequence
  Description of Artificial Sequence: Synthetic oligonucleotide
  Antisense strand to SEQ ID NO: 1223502
ugccacagcuaauauaugc

SEQ ID NO: 1223504 - RNA, 19 nt, Artificial Sequence
  Description of Artificial Sequence: Synthetic oligonucleotide
  Sense strand starting at position 149 of SEQ ID NO: 917288
ggguuucccggauagacau

SEQ ID NO: 1223505 - RNA, 19 nt, Artificial Sequence
  Description of Artificial Sequence: Synthetic oligonucleotide
  Antisense strand to SEQ ID NO: 1223504
augucuauccgggaaaccc

SEQ ID NO: 1223506 - RNA, 19 nt, Artificial Sequence
  Description of Artificial Sequence: Synthetic oligonucleotide
  Sense strand starting at position 185 of SEQ ID NO: 917288
uaacgcucucaucauguga

SEQ ID NO: 1223507 - RNA, 19 nt, Artificial Sequence
  Description of Artificial Sequence: Synthetic oligonucleotide
  Antisense strand to SEQ ID NO: 1223506
ucacaugaugagagcguua

SEQ ID NO: 1223508 - RNA, 19 nt, Artificial Sequence
  Description of Artificial Sequence: Synthetic oligonucleotide
  Sense strand starting at position 192 of SEQ ID NO: 917288
cucaucaugugagucacau

SEQ ID NO: 1223509 - RNA, 19 nt, Artificial Sequence
  Description of Artificial Sequence: Synthetic oligonucleotide
  Antisense strand to SEQ ID NO: 1223508
augugacucacaugaugag

SEQ ID NO: 1223510 - RNA, 19 nt, Artificial Sequence
  Description of Artificial Sequence: Synthetic oligonucleotide
  Sense strand starting at position 364 of SEQ ID NO: 917288
gcgguuagugguuucugau

SEQ ID NO: 1223511 - RNA, 19 nt, Artificial Sequence
  Description of Artificial Sequence: Synthetic oligonucleotide
  Antisense strand to SEQ ID NO: 1223510
aucagaaaccacuaaccgc

SEQ ID NO: 1223512 - RNA, 19 nt, Artificial Sequence
  Description of Artificial Sequence: Synthetic oligonucleotide
  Sense strand starting at position 501 of SEQ ID NO: 917288
acaggcgguugcucuaauu

SEQ ID NO: 1223513 - RNA, 19 nt, Artificial Sequence
  Description of Artificial Sequence: Synthetic oligonucleotide
  Antisense strand to SEQ ID NO: 1223512
aauuagagcaaccgccugu

SEQ ID NO: 1223514 - RNA, 19 nt, Artificial Sequence
  Description of Artificial Sequence: Synthetic oligonucleotide
  Sense strand starting at position 696 of SEQ ID NO: 917288
gcccgcaaucgcuucuaaa

SEQ ID NO: 1223515 - RNA, 19 nt, Artificial Sequence
  Description of Artificial Sequence: Synthetic oligonucleotide
  Antisense strand to SEQ ID NO: 1223514
uuuagaagcgauugcgggc

SEQ ID NO: 1223516 - RNA, 19 nt, Artificial Sequence
  Description of Artificial Sequence: Synthetic oligonucleotide
  Sense strand starting at position 777 of SEQ ID NO: 917288
ucuacuuaacccgagacga

SEQ ID NO: 1223517 - RNA, 19 nt, Artificial Sequence
  Description of Artificial Sequence: Synthetic oligonucleotide
  Antisense strand to SEQ ID NO: 1223516
ucgucucggguuaaguaga

SEQ ID NO: 1223518 - RNA, 19 nt, Artificial Sequence
  Description of Artificial Sequence: Synthetic oligonucleotide
  Sense strand starting at position 884 of SEQ ID NO: 917288
aagguuucgucccucaagu

SEQ ID NO: 1223519 - RNA, 19 nt, Artificial Sequence
  Description of Artificial Sequence: Synthetic oligonucleotide
  Antisense strand to SEQ ID NO: 1223518
acuugagggacgaaaccuu

SEQ ID NO: 1223520 - RNA, 19 nt, Artificial Sequence
  Description of Artificial Sequence: Synthetic oligonucleotide
  Sense strand starting at position 886 of SEQ ID NO: 917288
gguuucgucccucaagugu

SEQ ID NO: 1223521 - RNA, 19 nt, Artificial Sequence
  Description of Artificial Sequence: Synthetic oligonucleotide
  Antisense strand to SEQ ID NO: 1223520
acacuugagggacgaaacc

SEQ ID NO: 1223522 - RNA, 19 nt, Artificial Sequence
  Description of Artificial Sequence: Synthetic oligonucleotide
  Sense strand starting at position 890 of SEQ ID NO: 917288
ucgucccucaaguguaaga

SEQ ID NO: 1223523 - RNA, 19 nt, Artificial Sequence
  Description of Artificial Sequence: Synthetic oligonucleotide
  Antisense strand to SEQ ID NO: 1223522
ucuuacacuugagggacga

SEQ ID NO: 1223524 - RNA, 19 nt, Artificial Sequence
  Description of Artificial Sequence: Synthetic oligonucleotide
  Sense strand starting at position 892 of SEQ ID NO: 917288
gucccucaaguguaagaaa

SEQ ID NO: 1223525 - RNA, 19 nt, Artificial Sequence
  Description of Artificial Sequence: Synthetic oligonucleotide
  Antisense strand to SEQ ID NO: 1223524
uuucuuacacuugagggac

SEQ ID NO: 1223526 - RNA, 19 nt, Artificial Sequence
  Description of Artificial Sequence: Synthetic oligonucleotide
  Sense strand starting at position 1016 of SEQ ID NO: 917288
cccauuuacucucagcgaa

SEQ ID NO: 1223527 - RNA, 19 nt, Artificial Sequence
  Description of Artificial Sequence: Synthetic oligonucleotide
  Antisense strand to SEQ ID NO: 1223526
uucgcugagaguaaauggg

SEQ ID NO: 1223528 - RNA, 19 nt, Artificial Sequence
  Description of Artificial Sequence: Synthetic oligonucleotide
  Sense strand starting at position 2113 of SEQ ID NO: 917288
gggagaucucuucgcacug

SEQ ID NO: 1223529 - RNA, 19 nt, Artificial Sequence
  Description of Artificial Sequence: Synthetic oligonucleotide
  Antisense strand to SEQ ID NO: 1223528
cagugcgaagagaucuccc

SEQ ID NO: 1223530 - RNA, 19 nt, Artificial Sequence
  Description of Artificial Sequence: Synthetic oligonucleotide
  Sense strand starting at position 2114 of SEQ ID NO: 917288
ggagaucucuucgcacugu

SEQ ID NO: 1223531 - RNA, 19 nt, Artificial Sequence
  Description of Artificial Sequence: Synthetic oligonucleotide
  Antisense strand to SEQ ID NO: 1223530
acagugcgaagagaucucc

SEQ ID NO: 1223532 - RNA, 19 nt, Artificial Sequence
  Description of Artificial Sequence: Synthetic oligonucleotide
  Sense strand starting at position 2156 of SEQ ID NO: 917288
aagaguauugcacgucuua

SEQ ID NO: 1223533 - RNA, 19 nt, Artificial Sequence
  Description of Artificial Sequence: Synthetic oligonucleotide
  Antisense strand to SEQ ID NO: 1223532
uaagacgugcaauacucuu

SEQ ID NO: 1223534 - RNA, 19 nt, Artificial Sequence
  Description of Artificial Sequence: Synthetic oligonucleotide
  Sense strand starting at position 2252 of SEQ ID NO: 917288
uuugucuaaugagugugua

SEQ ID NO: 1223535 - RNA, 19 nt, Artificial Sequence
  Description of Artificial Sequence: Synthetic oligonucleotide
  Antisense strand to SEQ ID NO: 1223534
uacacacucauuagacaaa

SEQ ID NO: 1223536 - RNA, 19 nt, Artificial Sequence
  Description of Artificial Sequence: Synthetic oligonucleotide
  Sense strand starting at position 2255 of SEQ ID NO: 917288
gucuaaugaguguguacuu

SEQ ID NO: 1223537 - RNA, 19 nt, Artificial Sequence
  Description of Artificial Sequence: Synthetic oligonucleotide
  Antisense strand to SEQ ID NO: 1223536
aaguacacacucauuagac

SEQ ID NO: 1223538 - RNA, 19 nt, Artificial Sequence
  Description of Artificial Sequence: Synthetic oligonucleotide
  Sense strand starting at position 2256 of SEQ ID NO: 917288
ucuaaugaguguguacuuu

SEQ ID NO: 1223539 - RNA, 19 nt, Artificial Sequence
  Description of Artificial Sequence: Synthetic oligonucleotide
  Antisense strand to SEQ ID NO: 1223538
aaaguacacacucauuaga

SEQ ID NO: 1223540 - RNA, 19 nt, Artificial Sequence
  Description of Artificial Sequence: Synthetic oligonucleotide
  Sense strand starting at position 2288 of SEQ ID NO: 917288
uguacuucucuuuagcaga

SEQ ID NO: 1223541 - RNA, 19 nt, Artificial Sequence
  Description of Artificial Sequence: Synthetic oligonucleotide
  Antisense strand to SEQ ID NO: 1223540
ucugcuaaagagaaguaca

SEQ ID NO: 1223542 - RNA, 19 nt, Artificial Sequence
  Description of Artificial Sequence: Synthetic oligonucleotide
  Sense strand starting at position 2353 of SEQ ID NO: 917288
uguguaucuuuagcaguga

SEQ ID NO: 1223543 - RNA, 19 nt, Artificial Sequence
  Description of Artificial Sequence: Synthetic oligonucleotide
  Antisense strand to SEQ ID NO: 1223542
ucacugcuaaagauacaca

SEQ ID NO: 1223544 - RNA, 19 nt, Artificial Sequence
  Description of Artificial Sequence: Synthetic oligonucleotide
  Sense strand starting at position 2357 of SEQ ID NO: 917288
uaucuuuagcagugagugu

SEQ ID NO: 1223545 - RNA, 19 nt, Artificial Sequence
  Description of Artificial Sequence: Synthetic oligonucleotide
  Antisense strand to SEQ ID NO: 1223544
acacucacugcuaaagaua

SEQ ID NO: 1223546 - RNA, 19 nt, Artificial Sequence
  Description of Artificial Sequence: Synthetic oligonucleotide
  Sense strand starting at position 2358 of SEQ ID NO: 917288
aucuuuagcagugagugua

SEQ ID NO: 1223547 - RNA, 19 nt, Artificial Sequence
  Description of Artificial Sequence: Synthetic oligonucleotide
  Antisense strand to SEQ ID NO: 1223546
uacacucacugcuaaagau

SEQ ID NO: 1223548 - RNA, 19 nt, Artificial Sequence
  Description of Artificial Sequence: Synthetic oligonucleotide
  Sense strand starting at position 2368 of SEQ ID NO: 917288
gugaguguauccguuuaac

SEQ ID NO: 1223549 - RNA, 19 nt, Artificial Sequence
  Description of Artificial Sequence: Synthetic oligonucleotide
  Antisense strand to SEQ ID NO: 1223548
guuaaacggauacacucac

SEQ ID NO: 1223550 - RNA, 19 nt, Artificial Sequence
  Description of Artificial Sequence: Synthetic oligonucleotide
  Sense strand starting at position 2371 of SEQ ID NO: 917288
aguguauccguuuaacaag

SEQ ID NO: 1223551 - RNA, 19 nt, Artificial Sequence
  Description of Artificial Sequence: Synthetic oligonucleotide
  Antisense strand to SEQ ID NO: 1223550
cuuguuaaacggauacacu

SEQ ID NO: 1223552 - RNA, 19 nt, Artificial Sequence
  Description of Artificial Sequence: Synthetic oligonucleotide
  Sense strand starting at position 2377 of SEQ ID NO: 917288
uccguuuaacaaggcaaau

SEQ ID NO: 1223553 - RNA, 19 nt, Artificial Sequence
  Description of Artificial Sequence: Synthetic oligonucleotide
  Antisense strand to SEQ ID NO: 1223552
auuugccuuguuaaacgga

SEQ ID NO: 1223554 - RNA, 19 nt, Artificial Sequence
  Description of Artificial Sequence: Synthetic oligonucleotide
  Sense strand starting at position 2537 of SEQ ID NO: 917288
gagggcuugggccauauga

SEQ ID NO: 1223555 - RNA, 19 nt, Artificial Sequence
  Description of Artificial Sequence: Synthetic oligonucleotide
  Antisense strand to SEQ ID NO: 1223554
ucauauggcccaagcccuc

SEQ ID NO: 1223556 - RNA, 19 nt, Artificial Sequence
  Description of Artificial Sequence: Synthetic oligonucleotide
  Sense strand starting at position 2539 of SEQ ID NO: 917288
gggcuugggccauaugaau

SEQ ID NO: 1223557 - RNA, 19 nt, Artificial Sequence
  Description of Artificial Sequence: Synthetic oligonucleotide
  Antisense strand to SEQ ID NO: 1223556
auucauauggcccaagccc

SEQ ID NO: 1223558 - RNA, 19 nt, Artificial Sequence
  Description of Artificial Sequence: Synthetic oligonucleotide
  Sense strand starting at position 2571 of SEQ ID NO: 917288
auauuuaagccguguugau

SEQ ID NO: 1223559 - RNA, 19 nt, Artificial Sequence
  Description of Artificial Sequence: Synthetic oligonucleotide
  Antisense strand to SEQ ID NO: 1223558
aucaacacggcuuaaauau

SEQ ID NO: 1223560 - RNA, 19 nt, Artificial Sequence
  Description of Artificial Sequence: Synthetic oligonucleotide
  Sense strand starting at position 2584 of SEQ ID NO: 917288
guugauucuagccgaagca

SEQ ID NO: 1223561 - RNA, 19 nt, Artificial Sequence
  Description of Artificial Sequence: Synthetic oligonucleotide
  Antisense strand to SEQ ID NO: 1223560
ugcuucggcuagaaucaac

SEQ ID NO: 1223562 - RNA, 19 nt, Artificial Sequence
  Description of Artificial Sequence: Synthetic oligonucleotide
  Sense strand starting at position 2585 of SEQ ID NO: 917288
uugauucuagccgaagcau

SEQ ID NO: 1223563 - RNA, 19 nt, Artificial Sequence
  Description of Artificial Sequence: Synthetic oligonucleotide
  Antisense strand to SEQ ID NO: 1223562
augcuucggcuagaaucaa

SEQ ID NO: 1223564 - RNA, 19 nt, Artificial Sequence
  Description of Artificial Sequence: Synthetic oligonucleotide
  Sense strand starting at position 2716 of SEQ ID NO: 917288
gcagaaaccuagcacauuu

SEQ ID NO: 1223565 - RNA, 19 nt, Artificial Sequence
  Description of Artificial Sequence: Synthetic oligonucleotide
  Antisense strand to SEQ ID NO: 1223564
aaaugugcuagguuucugc

SEQ ID NO: 1223566 - RNA, 19 nt, Artificial Sequence
  Description of Artificial Sequence: Synthetic oligonucleotide
  Sense strand starting at position 2818 of SEQ ID NO: 917288
auccaaauuuguuggaaag

SEQ ID NO: 1223567 - RNA, 19 nt, Artificial Sequence
  Description of Artificial Sequence: Synthetic oligonucleotide
  Antisense strand to SEQ ID NO: 1223566
cuuuccaacaaauuuggau

SEQ ID NO: 1223568 - RNA, 19 nt, Artificial Sequence
  Description of Artificial Sequence: Synthetic oligonucleotide
  Sense strand starting at position 2820 of SEQ ID NO: 917288
ccaaauuuguuggaaagua

SEQ ID NO: 1223569 - RNA, 19 nt, Artificial Sequence
  Description of Artificial Sequence: Synthetic oligonucleotide
  Antisense strand to SEQ ID NO: 1223568
uacuuuccaacaaauuugg

SEQ ID NO: 1223570 - RNA, 19 nt, Artificial Sequence
  Description of Artificial Sequence: Synthetic oligonucleotide
  Sense strand starting at position 2873 of SEQ ID NO: 917288
guuauaaugggagggugaa

SEQ ID NO: 1223571 - RNA, 19 nt, Artificial Sequence
  Description of Artificial Sequence: Synthetic oligonucleotide
  Antisense strand to SEQ ID NO: 1223570
uucacccucccauuauaac

SEQ ID NO: 1223572 - RNA, 19 nt, Artificial Sequence
  Description of Artificial Sequence: Synthetic oligonucleotide
  Sense strand starting at position 2931 of SEQ ID NO: 917288
uccuuaauguucuuguaca

SEQ ID NO: 1223573 - RNA, 19 nt, Artificial Sequence
  Description of Artificial Sequence: Synthetic oligonucleotide
  Antisense strand to SEQ ID NO: 1223572
uguacaagaacauuaagga

SEQ ID NO: 1223574 - RNA, 19 nt, Artificial Sequence
  Description of Artificial Sequence: Synthetic oligonucleotide
  Sense strand starting at position 2961 of SEQ ID NO: 917288
ggcuuauugggaggacgga

SEQ ID NO: 1223575 - RNA, 19 nt, Artificial Sequence
  Description of Artificial Sequence: Synthetic oligonucleotide
  Antisense strand to SEQ ID NO: 1223574
uccguccucccaauaagcc

SEQ ID NO: 1223576 - RNA, 19 nt, Artificial Sequence
  Description of Artificial Sequence: Synthetic oligonucleotide
  Sense strand starting at position 3005 of SEQ ID NO: 917289
gugauauuacuacaaaugu

SEQ ID NO: 1223577 - RNA, 19 nt, Artificial Sequence
  Description of Artificial Sequence: Synthetic oligonucleotide
  Antisense strand to SEQ ID NO: 1223576
acauuuguaguaauaucac

SEQ ID NO: 1223578 - RNA, 19 nt, Artificial Sequence
  Description of Artificial Sequence: Synthetic oligonucleotide
  Sense strand starting at position 9 of SEQ ID NO: 917289
uauugagcuguuuaccaag

SEQ ID NO: 1223579 - RNA, 19 nt, Artificial Sequence
  Description of Artificial Sequence: Synthetic oligonucleotide
  Antisense strand to SEQ ID NO: 1223578
cuugguaaacagcucaaua

SEQ ID NO: 1223580 - RNA, 19 nt, Artificial Sequence
  Description of Artificial Sequence: Synthetic oligonucleotide
  Sense strand starting at position 15 of SEQ ID NO: 917289
gcuguuuaccaaggagaca

SEQ ID NO: 1223581 - RNA, 19 nt, Artificial Sequence
  Description of Artificial Sequence: Synthetic oligonucleotide
  Antisense strand to SEQ ID NO: 1223580
ugucuccuugguaaacagc

SEQ ID NO: 1223582 - RNA, 19 nt, Artificial Sequence
  Description of Artificial Sequence: Synthetic oligonucleotide
  Sense strand starting at position 78 of SEQ ID NO: 917289
gggacuccacgacaguuua

SEQ ID NO: 1223583 - RNA, 19 nt, Artificial Sequence
  Description of Artificial Sequence: Synthetic oligonucleotide
  Antisense strand to SEQ ID NO: 1223582
uaaacugucguggaguccc

SEQ ID NO: 1223584 - RNA, 19 nt, Artificial Sequence
  Description of Artificial Sequence: Synthetic oligonucleotide
  Sense strand starting at position 245 of SEQ ID NO: 917289
cucauuacuccuggaauag

SEQ ID NO: 1223585 - RNA, 19 nt, Artificial Sequence
  Description of Artificial Sequence: Synthetic oligonucleotide
  Antisense strand to SEQ ID NO: 1223584
cuauuccaggaguaaugag

SEQ ID NO: 1223586 - RNA, 19 nt, Artificial Sequence
  Description of Artificial Sequence: Synthetic oligonucleotide
  Sense strand starting at position 281 of SEQ ID NO: 917289
cuuagauaauaugcuaagu

SEQ ID NO: 1223587 - RNA, 19 nt, Artificial Sequence
  Description of Artificial Sequence: Synthetic oligonucleotide
  Antisense strand to SEQ ID NO: 1223586
acuuagcauauuaucuaag

SEQ ID NO: 1223588 - RNA, 19 nt, Artificial Sequence
  Description of Artificial Sequence: Synthetic oligonucleotide
  Sense strand starting at position 323 of SEQ ID NO: 917289
augcauucugaugaugugu

SEQ ID NO: 1223589 - RNA, 19 nt, Artificial Sequence
  Description of Artificial Sequence: Synthetic oligonucleotide
  Antisense strand to SEQ ID NO: 1223588
acacaucaucagaaugcau

SEQ ID NO: 1223590 - RNA, 19 nt, Artificial Sequence
  Description of Artificial Sequence: Synthetic oligonucleotide
  Sense strand starting at position 329 of SEQ ID NO: 917289
ucugaugauguguaaagca

SEQ ID NO: 1223591 - RNA, 19 nt, Artificial Sequence
  Description of Artificial Sequence: Synthetic oligonucleotide
  Antisense strand to SEQ ID NO: 1223590
ugcuuuacacaucaucaga

SEQ ID NO: 1223592 - RNA, 19 nt, Artificial Sequence
  Description of Artificial Sequence: Synthetic oligonucleotide
  Sense strand starting at position 511 of SEQ ID NO: 917289
aagugaggugucugaacca

SEQ ID NO: 1223593 - RNA, 19 nt, Artificial Sequence
  Description of Artificial Sequence: Synthetic oligonucleotide
  Antisense strand to SEQ ID NO: 1223592
ugguucagacaccucacuu

SEQ ID NO: 1223594 - RNA, 19 nt, Artificial Sequence
  Description of Artificial Sequence: Synthetic oligonucleotide
  Sense strand starting at position 653 of SEQ ID NO: 917289
cggugaaaugaguggaaau

SEQ ID NO: 1223595 - RNA, 19 nt, Artificial Sequence
  Description of Artificial Sequence: Synthetic oligonucleotide
  Antisense strand to SEQ ID NO: 1223594
auuuccacucauuucaccg

SEQ ID NO: 1223596 - RNA, 19 nt, Artificial Sequence
  Description of Artificial Sequence: Synthetic oligonucleotide
  Sense strand starting at position 654 of SEQ ID NO: 917289
ggugaaaugaguggaaauu

SEQ ID NO: 1223597 - RNA, 19 nt, Artificial Sequence
  Description of Artificial Sequence: Synthetic oligonucleotide
  Antisense strand to SEQ ID NO: 1223596
aauuuccacucauuucacc

SEQ ID NO: 1223598 - RNA, 19 nt, Artificial Sequence
  Description of Artificial Sequence: Synthetic oligonucleotide
  Sense strand starting at position 1679 of SEQ ID NO: 917289
agaguucagugucuggaga

SEQ ID NO: 1223599 - RNA, 19 nt, Artificial Sequence
  Description of Artificial Sequence: Synthetic oligonucleotide
  Antisense strand to SEQ ID NO: 1223598
ucuccagacacugaacucu

SEQ ID NO: 1223600 - RNA, 19 nt, Artificial Sequence
  Description of Artificial Sequence: Synthetic oligonucleotide
  Sense strand starting at position 1890 of SEQ ID NO: 917289
gauauucuagcgcauauag

SEQ ID NO: 1223601 - RNA, 19 nt, Artificial Sequence
  Description of Artificial Sequence: Synthetic oligonucleotide
  Antisense strand to SEQ ID NO: 1223600
cuauaugcgcuagaauauc

SEQ ID NO: 1223602 - RNA, 19 nt, Artificial Sequence
  Description of Artificial Sequence: Synthetic oligonucleotide
  Sense strand starting at position 1940 of SEQ ID NO: 917289
ugucaagguccucacagua

SEQ ID NO: 1223603 - RNA, 19 nt, Artificial Sequence
  Description of Artificial Sequence: Synthetic oligonucleotide
  Antisense strand to SEQ ID NO: 1223602
uacugugaggaccuugaca

SEQ ID NO: 1223604 - RNA, 19 nt, Artificial Sequence
  Description of Artificial Sequence: Synthetic oligonucleotide
  Sense strand starting at position 1945 of SEQ ID NO: 917289
agguccucacaguacaauu

SEQ ID NO: 1223605 - RNA, 19 nt, Artificial Sequence
  Description of Artificial Sequence: Synthetic oligonucleotide
  Antisense strand to SEQ ID NO: 1223604
aauuguacugugaggaccu

SEQ ID NO: 1223606 - RNA, 19 nt, Artificial Sequence
  Description of Artificial Sequence: Synthetic oligonucleotide
  Sense strand starting at position 2219 of SEQ ID NO: 917289
gaaucauggcaguguaaac

SEQ ID NO: 1223607 - RNA, 19 nt, Artificial Sequence
  Description of Artificial Sequence: Synthetic oligonucleotide
  Antisense strand to SEQ ID NO: 1223606
guuuacacugccaugauuc

SEQ ID NO: 1223608 - RNA, 19 nt, Artificial Sequence
  Description of Artificial Sequence: Synthetic oligonucleotide
  Sense strand starting at position 2268 of SEQ ID NO: 917289
agguuaauggcuugaauua

SEQ ID NO: 1223609 - RNA, 19 nt, Artificial Sequence
  Description of Artificial Sequence: Synthetic oligonucleotide
  Antisense strand to SEQ ID NO: 1223608
uaauucaagccauuaaccu

SEQ ID NO: 1223610 - RNA, 19 nt, Artificial Sequence
  Description of Artificial Sequence: Synthetic oligonucleotide
  Sense strand starting at position 2269 of SEQ ID NO: 917289
gguuaauggcuugaauuau

SEQ ID NO: 1223611 - RNA, 19 nt, Artificial Sequence
  Description of Artificial Sequence: Synthetic oligonucleotide
  Antisense strand to SEQ ID NO: 1223610
auaauucaagccauuaacc

SEQ ID NO: 1223612 - RNA, 19 nt, Artificial Sequence
  Description of Artificial Sequence: Synthetic oligonucleotide
  Sense strand starting at position 2318 of SEQ ID NO: 917289
uuaguuucucuguagugag

SEQ ID NO: 1223613 - RNA, 19 nt, Artificial Sequence
  Description of Artificial Sequence: Synthetic oligonucleotide
  Antisense strand to SEQ ID NO: 1223612
cucacuacagagaaacuaa

SEQ ID NO: 1223614 - RNA, 19 nt, Artificial Sequence
  Description of Artificial Sequence: Synthetic oligonucleotide
  Sense strand starting at position 2386 of SEQ ID NO: 917289
ugacacuuacauugugauu

SEQ ID NO: 1223615 - RNA, 19 nt, Artificial Sequence
  Description of Artificial Sequence: Synthetic oligonucleotide
  Antisense strand to SEQ ID NO: 1223614
aaucacaauguaaguguca

SEQ ID NO: 1223616 - RNA, 19 nt, Artificial Sequence
  Description of Artificial Sequence: Synthetic oligonucleotide
  Sense strand starting at position 2446 of SEQ ID NO: 917289
agaggcguacgguagaaau

SEQ ID NO: 1223617 - RNA, 19 nt, Artificial Sequence
  Description of Artificial Sequence: Synthetic oligonucleotide
  Antisense strand to SEQ ID NO: 1223616
auuucuaccguacgccucu

SEQ ID NO: 1223618 - RNA, 19 nt, Artificial Sequence
  Description of Artificial Sequence: Synthetic oligonucleotide
  Sense strand starting at position 2499 of SEQ ID NO: 917289
uugcgaaaucagugcauuu

SEQ ID NO: 1223619 - RNA, 19 nt, Artificial Sequence
  Description of Artificial Sequence: Synthetic oligonucleotide
  Antisense strand to SEQ ID NO: 1223618
aaaugcacugauuucgcaa

SEQ ID NO: 1223620 - RNA, 19 nt, Artificial Sequence
  Description of Artificial Sequence: Synthetic oligonucleotide
  Sense strand starting at position 2541 of SEQ ID NO: 917289
cuguuaucaguguaaauca

SEQ ID NO: 1223621 - RNA, 19 nt, Artificial Sequence
  Description of Artificial Sequence: Synthetic oligonucleotide
  Antisense strand to SEQ ID NO: 1223620
ugauuuacacugauaacag

SEQ ID NO: 1223622 - RNA, 19 nt, Artificial Sequence
  Description of Artificial Sequence: Synthetic oligonucleotide
  Sense strand starting at position 2621 of SEQ ID NO: 917289
guauacuaugcauggaaga

SEQ ID NO: 1223623 - RNA, 19 nt, Artificial Sequence
  Description of Artificial Sequence: Synthetic oligonucleotide
  Antisense strand to SEQ ID NO: 1223622
ucuuccaugcauaguauac

SEQ ID NO: 1223624 - RNA, 19 nt, Artificial Sequence
  Description of Artificial Sequence: Synthetic oligonucleotide
  Sense strand starting at position 2626 of SEQ ID NO: 917289
cuaugcauggaagaguuua

SEQ ID NO: 1223625 - RNA, 19 nt, Artificial Sequence
  Description of Artificial Sequence: Synthetic oligonucleotide
  Antisense strand to SEQ ID NO: 1223624
uaaacucuuccaugcauag

SEQ ID NO: 1223626 - RNA, 19 nt, Artificial Sequence
  Description of Artificial Sequence: Synthetic oligonucleotide
  Sense strand starting at position 2634 of SEQ ID NO: 917289
ggaagaguuuaggcaauaa

SEQ ID NO: 1223627 - RNA, 19 nt, Artificial Sequence
  Description of Artificial Sequence: Synthetic oligonucleotide
  Antisense strand to SEQ ID NO: 1223626
uuauugccuaaacucuucc

SEQ ID NO: 1223628 - RNA, 19 nt, Artificial Sequence
  Description of Artificial Sequence: Synthetic oligonucleotide
  Sense strand starting at position 2685 of SEQ ID NO: 917289
caaauaggcguuuggagaa

SEQ ID NO: 1223629 - RNA, 19 nt, Artificial Sequence
  Description of Artificial Sequence: Synthetic oligonucleotide
  Antisense strand to SEQ ID NO: 1223628
uucuccaaacgccuauuug

SEQ ID NO: 1223630 - RNA, 19 nt, Artificial Sequence
  Description of Artificial Sequence: Synthetic oligonucleotide
  Sense strand starting at position 2740 of SEQ ID NO: 917289
gaggauugcgaucacuuuc

SEQ ID NO: 1223631 - RNA, 19 nt, Artificial Sequence
  Description of Artificial Sequence: Synthetic oligonucleotide
  Antisense strand to SEQ ID NO: 1223630
gaaagugaucgcaauccuc

SEQ ID NO: 1223632 - RNA, 19 nt, Artificial Sequence
  Description of Artificial Sequence: Synthetic oligonucleotide
  Sense strand starting at position 2760 of SEQ ID NO: 917289
guacaugacuacuuggaau

SEQ ID NO: 1223633 - RNA, 19 nt, Artificial Sequence
  Description of Artificial Sequence: Synthetic oligonucleotide
  Antisense strand to SEQ ID NO: 1223632
auuccaaguagucauguac

SEQ ID NO: 1223634 - RNA, 19 nt, Artificial Sequence
  Description of Artificial Sequence: Synthetic oligonucleotide
  Sense strand starting at position 2762 of SEQ ID NO: 917289
acaugacuacuuggaaugu

SEQ ID NO: 1223635 - RNA, 19 nt, Artificial Sequence
  Description of Artificial Sequence: Synthetic oligonucleotide
  Antisense strand to SEQ ID NO: 1223634
acauuccaaguagucaugu

SEQ ID NO: 1223636 - RNA, 19 nt, Artificial Sequence
  Description of Artificial Sequence: Synthetic oligonucleotide
  Sense strand starting at position 2809 of SEQ ID NO: 917289
gauagaacccaguagucuu

SEQ ID NO: 1223637 - RNA, 19 nt, Artificial Sequence
  Description of Artificial Sequence: Synthetic oligonucleotide
  Antisense strand to SEQ ID NO: 1223636
aagacuacuggguucuauc

SEQ ID NO: 1223638 - RNA, 19 nt, Artificial Sequence
  Description of Artificial Sequence: Synthetic oligonucleotide
  Sense strand starting at position 2992 of SEQ ID NO: 917289
cuguaaacguaaccagaaa

SEQ ID NO: 1223639 - RNA, 19 nt, Artificial Sequence
  Description of Artificial Sequence: Synthetic oligonucleotide
  Antisense strand to SEQ ID NO: 1223638
uuucugguuacguuuacag

SEQ ID NO: 1223640 - RNA, 19 nt, Artificial Sequence
  Description of Artificial Sequence: Synthetic oligonucleotide
  Sense strand starting at position 3025 of SEQ ID NO: 917289
ggaguccuuaggcaaaguu

SEQ ID NO: 1223641 - RNA, 19 nt, Artificial Sequence
  Description of Artificial Sequence: Synthetic oligonucleotide
  Antisense strand to SEQ ID NO: 1223640
aacuuugccuaaggacucc

SEQ ID NO: 1223642 - RNA, 19 nt, Artificial Sequence
  Description of Artificial Sequence: Synthetic oligonucleotide
  Sense strand starting at position 3415 of SEQ ID NO: 917289
uggauuaucucacuugauu

SEQ ID NO: 1223643 - RNA, 19 nt, Artificial Sequence
  Description of Artificial Sequence: Synthetic oligonucleotide
  Antisense strand to SEQ ID NO: 1223642
aaucaagugagauaaucca

SEQ ID NO: 1223644 - RNA, 19 nt, Artificial Sequence
  Description of Artificial Sequence: Synthetic oligonucleotide
  Sense strand starting at position 3708 of SEQ ID NO: 917289
ccuauuuguuagucuugua

SEQ ID NO: 1223645 - RNA, 19 nt, Artificial Sequence
  Description of Artificial Sequence: Synthetic oligonucleotide
  Antisense strand to SEQ ID NO: 1223644
uacaagacuaacaaauagg

SEQ ID NO: 1223646 - RNA, 19 nt, Artificial Sequence
  Description of Artificial Sequence: Synthetic oligonucleotide
  Sense strand starting at position 3756 of SEQ ID NO: 917289
agagccaauuauguaaaua

SEQ ID NO: 1223647 - RNA, 19 nt, Artificial Sequence
  Description of Artificial Sequence: Synthetic oligonucleotide
  Antisense strand to SEQ ID NO: 1223646
uauuuacauaauuggcucu

SEQ ID NO: 1223648 - RNA, 19 nt, Artificial Sequence
  Description of Artificial Sequence: Synthetic oligonucleotide
  Sense strand starting at position 3774 of SEQ ID NO: 917289
auagguaccuuucuauauu

SEQ ID NO: 1223649 - RNA, 19 nt, Artificial Sequence
  Description of Artificial Sequence: Synthetic oligonucleotide
  Antisense strand to SEQ ID NO: 1223648
aauauagaaagguaccuau

SEQ ID NO: 1223650 - RNA, 19 nt, Artificial Sequence
  Description of Artificial Sequence: Synthetic oligonucleotide
  Sense strand starting at position 3827 of SEQ ID NO: 917289
aucacucuucuugggaaua

SEQ ID NO: 1223651 - RNA, 19 nt, Artificial Sequence
  Description of Artificial Sequence: Synthetic oligonucleotide
  Antisense strand to SEQ ID NO: 1223650
uauucccaagaagagugau

SEQ ID NO: 1223652 - RNA, 19 nt, Artificial Sequence
  Description of Artificial Sequence: Synthetic oligonucleotide
  Sense strand starting at position 3901 of SEQ ID NO: 917289
uaaauuacgcaugaaguua

SEQ ID NO: 1223653 - RNA, 19 nt, Artificial Sequence
  Description of Artificial Sequence: Synthetic oligonucleotide
  Antisense strand to SEQ ID NO: 1223652
uaacuucaugcguaauuua

SEQ ID NO: 1223654 - RNA, 19 nt, Artificial Sequence
  Description of Artificial Sequence: Synthetic oligonucleotide
  Sense strand starting at position 3909 of SEQ ID NO: 917289
gcaugaaguuauguuaaac

SEQ ID NO: 1223655 - RNA, 19 nt, Artificial Sequence
  Description of Artificial Sequence: Synthetic oligonucleotide
  Antisense strand to SEQ ID NO: 1223654
guuuaacauaacuucaugc

SEQ ID NO: 1223656 - RNA, 19 nt, Artificial Sequence
  Description of Artificial Sequence: Synthetic oligonucleotide
  Sense strand starting at position 3962 of SEQ ID NO: 917289
acuugauuguuaccauacu

SEQ ID NO: 1223657 - RNA, 19 nt, Artificial Sequence
  Description of Artificial Sequence: Synthetic oligonucleotide
  Antisense strand to SEQ ID NO: 1223656
aguaugguaacaaucaagu

SEQ ID NO: 1223658 - RNA, 19 nt, Artificial Sequence
  Description of Artificial Sequence: Synthetic oligonucleotide
  Sense strand starting at position 3962 of SEQ ID NO: 917290
acuugauuguuaccauacu

SEQ ID NO: 1223659 - RNA, 19 nt, Artificial Sequence
  Description of Artificial Sequence: Synthetic oligonucleotide
  Antisense strand to SEQ ID NO: 1223658
aguaugguaacaaucaagu

SEQ ID NO: 1223660 - RNA, 19 nt, Artificial Sequence
  Description of Artificial Sequence: Synthetic oligonucleotide
  Sense strand starting at position 85 of SEQ ID NO: 917290
uuuacuuucgcuuagaugu

SEQ ID NO: 1223661 - RNA, 19 nt, Artificial Sequence
  Description of Artificial Sequence: Synthetic oligonucleotide
  Antisense strand to SEQ ID NO: 1223660
acaucuaagcgaaaguaaa

SEQ ID NO: 1223662 - RNA, 19 nt, Artificial Sequence
  Description of Artificial Sequence: Synthetic oligonucleotide
  Sense strand starting at position 98 of SEQ ID NO: 917290
agauguauuucuuacaaag

SEQ ID NO: 1223663 - RNA, 19 nt, Artificial Sequence
  Description of Artificial Sequence: Synthetic oligonucleotide
  Antisense strand to SEQ ID NO: 1223662
cuuuguaagaaauacaucu

SEQ ID NO: 1223664 - RNA, 19 nt, Artificial Sequence
  Description of Artificial Sequence: Synthetic oligonucleotide
  Sense strand starting at position 170 of SEQ ID NO: 917290
augggaauuccacggauau

SEQ ID NO: 1223665 - RNA, 19 nt, Artificial Sequence
  Description of Artificial Sequence: Synthetic oligonucleotide
  Antisense strand to SEQ ID NO: 1223664
auauccguggaauucccau

SEQ ID NO: 1223666 - RNA, 19 nt, Artificial Sequence
  Description of Artificial Sequence: Synthetic oligonucleotide
  Sense strand starting at position 171 of SEQ ID NO: 917290
ugggaauuccacggauauc

SEQ ID NO: 1223667 - RNA, 19 nt, Artificial Sequence
  Description of Artificial Sequence: Synthetic oligonucleotide
  Antisense strand to SEQ ID NO: 1223666
gauauccguggaauuccca

SEQ ID NO: 1223668 - RNA, 19 nt, Artificial Sequence
  Description of Artificial Sequence: Synthetic oligonucleotide
  Sense strand starting at position 181 of SEQ ID NO: 917290
acggauaucucccuagguu

SEQ ID NO: 1223669 - RNA, 19 nt, Artificial Sequence
  Description of Artificial Sequence: Synthetic oligonucleotide
  Antisense strand to SEQ ID NO: 1223668
aaccuagggagauauccgu

SEQ ID NO: 1223670 - RNA, 19 nt, Artificial Sequence
  Description of Artificial Sequence: Synthetic oligonucleotide
  Sense strand starting at position 182 of SEQ ID NO: 917290
cggauaucucccuagguuc

SEQ ID NO: 1223671 - RNA, 19 nt, Artificial Sequence
  Description of Artificial Sequence: Synthetic oligonucleotide
  Antisense strand to SEQ ID NO: 1223670
gaaccuagggagauauccg

SEQ ID NO: 1223672 - RNA, 19 nt, Artificial Sequence
  Description of Artificial Sequence: Synthetic oligonucleotide
  Sense strand starting at position 246 of SEQ ID NO: 917290
uuugucuguuucucuacaa

SEQ ID NO: 1223673 - RNA, 19 nt, Artificial Sequence
  Description of Artificial Sequence: Synthetic oligonucleotide
  Antisense strand to SEQ ID NO: 1223672
uuguagagaaacagacaaa

SEQ ID NO: 1223674 - RNA, 19 nt, Artificial Sequence
  Description of Artificial Sequence: Synthetic oligonucleotide
  Sense strand starting at position 247 of SEQ ID NO: 917290
uugucuguuucucuacaaa

SEQ ID NO: 1223675 - RNA, 19 nt, Artificial Sequence
  Description of Artificial Sequence: Synthetic oligonucleotide
  Antisense strand to SEQ ID NO: 1223674
uuuguagagaaacagacaa

SEQ ID NO: 1223676 - RNA, 19 nt, Artificial Sequence
  Description of Artificial Sequence: Synthetic oligonucleotide
  Sense strand starting at position 362 of SEQ ID NO: 917290
gcaaaucaugucgccuagu

SEQ ID NO: 1223677 - RNA, 19 nt, Artificial Sequence
  Description of Artificial Sequence: Synthetic oligonucleotide
  Antisense strand to SEQ ID NO: 1223676
acuaggcgacaugauuugc

SEQ ID NO: 1223678 - RNA, 19 nt, Artificial Sequence
  Description of Artificial Sequence: Synthetic oligonucleotide
  Sense strand starting at position 365 of SEQ ID NO: 917290
aaucaugucgccuaguauu

SEQ ID NO: 1223679 - RNA, 19 nt, Artificial Sequence
  Description of Artificial Sequence: Synthetic oligonucleotide
  Antisense strand to SEQ ID NO: 1223678
aauacuaggcgacaugauu

SEQ ID NO: 1223680 - RNA, 19 nt, Artificial Sequence
  Description of Artificial Sequence: Synthetic oligonucleotide
  Sense strand starting at position 373 of SEQ ID NO: 917290
cgccuaguauuagcaaaga

SEQ ID NO: 1223681 - RNA, 19 nt, Artificial Sequence
  Description of Artificial Sequence: Synthetic oligonucleotide
  Antisense strand to SEQ ID NO: 1223680
ucuuugcuaauacuaggcg

SEQ ID NO: 1223682 - RNA, 19 nt, Artificial Sequence
  Description of Artificial Sequence: Synthetic oligonucleotide
  Sense strand starting at position 437 of SEQ ID NO: 917290
cacggucccagugaaguuu

SEQ ID NO: 1223683 - RNA, 19 nt, Artificial Sequence
  Description of Artificial Sequence: Synthetic oligonucleotide
  Antisense strand to SEQ ID NO: 1223682
aaacuucacugggaccgug

SEQ ID NO: 1223684 - RNA, 19 nt, Artificial Sequence
  Description of Artificial Sequence: Synthetic oligonucleotide
  Sense strand starting at position 446 of SEQ ID NO: 917290
agugaaguuugugcauuau

SEQ ID NO: 1223685 - RNA, 19 nt, Artificial Sequence
  Description of Artificial Sequence: Synthetic oligonucleotide
  Antisense strand to SEQ ID NO: 1223684
auaaugcacaaacuucacu

SEQ ID NO: 1223686 - RNA, 19 nt, Artificial Sequence
  Description of Artificial Sequence: Synthetic oligonucleotide
  Sense strand starting at position 563 of SEQ ID NO: 917290
gcaacaugcugaguagcaa

SEQ ID NO: 1223687 - RNA, 19 nt, Artificial Sequence
  Description of Artificial Sequence: Synthetic oligonucleotide
  Antisense strand to SEQ ID NO: 1223686
uugcuacucagcauguugc

SEQ ID NO: 1223688 - RNA, 19 nt, Artificial Sequence
  Description of Artificial Sequence: Synthetic oligonucleotide
  Sense strand starting at position 586 of SEQ ID NO: 917290
cugagugaccgcgaugaau

SEQ ID NO: 1223689 - RNA, 19 nt, Artificial Sequence
  Description of Artificial Sequence: Synthetic oligonucleotide
  Antisense strand to SEQ ID NO: 1223688
auucaucgcggucacucag

SEQ ID NO: 1223690 - RNA, 19 nt, Artificial Sequence
  Description of Artificial Sequence: Synthetic oligonucleotide
  Sense strand starting at position 613 of SEQ ID NO: 917290
uugcaaccacuuggaaauu

SEQ ID NO: 1223691 - RNA, 19 nt, Artificial Sequence
  Description of Artificial Sequence: Synthetic oligonucleotide
  Antisense strand to SEQ ID NO: 1223690
aauuuccaagugguugcaa

SEQ ID NO: 1223692 - RNA, 19 nt, Artificial Sequence
  Description of Artificial Sequence: Synthetic oligonucleotide
  Sense strand starting at position 641 of SEQ ID NO: 917290
uggagcaagagguauguaa

SEQ ID NO: 1223693 - RNA, 19 nt, Artificial Sequence
  Description of Artificial Sequence: Synthetic oligonucleotide
  Antisense strand to SEQ ID NO: 1223692
uuacauaccucuugcucca

SEQ ID NO: 1223694 - RNA, 19 nt, Artificial Sequence
  Description of Artificial Sequence: Synthetic oligonucleotide
  Sense strand starting at position 643 of SEQ ID NO: 917290
gagcaagagguauguaaga

SEQ ID NO: 1223695 - RNA, 19 nt, Artificial Sequence
  Description of Artificial Sequence: Synthetic oligonucleotide
  Antisense strand to SEQ ID NO: 1223694
ucuuacauaccucuugcuc

SEQ ID NO: 1223696 - RNA, 19 nt, Artificial Sequence
  Description of Artificial Sequence: Synthetic oligonucleotide
  Sense strand starting at position 665 of SEQ ID NO: 917290
uuaugaaccuguguaucca

SEQ ID NO: 1223697 - RNA, 19 nt, Artificial Sequence
  Description of Artificial Sequence: Synthetic oligonucleotide
  Antisense strand to SEQ ID NO: 1223696
uggauacacagguucauaa

SEQ ID NO: 1223698 - RNA, 19 nt, Artificial Sequence
  Description of Artificial Sequence: Synthetic oligonucleotide
  Sense strand starting at position 861 of SEQ ID NO: 917290
aggaguaugagcugcaaca

SEQ ID NO: 1223699 - RNA, 19 nt, Artificial Sequence
  Description of Artificial Sequence: Synthetic oligonucleotide
  Antisense strand to SEQ ID NO: 1223698
uguugcagcucauacuccu

SEQ ID NO: 1223700 - RNA, 19 nt, Artificial Sequence
  Description of Artificial Sequence: Synthetic oligonucleotide
  Sense strand starting at position 2032 of SEQ ID NO: 917290
acgauccgccuggaguaau

SEQ ID NO: 1223701 - RNA, 19 nt, Artificial Sequence
  Description of Artificial Sequence: Synthetic oligonucleotide
  Antisense strand to SEQ ID NO: 1223700
auuacuccaggcggaucgu

SEQ ID NO: 1223702 - RNA, 19 nt, Artificial Sequence
  Description of Artificial Sequence: Synthetic oligonucleotide
  Sense strand starting at position 2043 of SEQ ID NO: 917290
ggaguaauucuccacgccu

SEQ ID NO: 1223703 - RNA, 19 nt, Artificial Sequence
  Description of Artificial Sequence: Synthetic oligonucleotide
  Antisense strand to SEQ ID NO: 1223702
aggcguggagaauuacucc

SEQ ID NO: 1223704 - RNA, 19 nt, Artificial Sequence
  Description of Artificial Sequence: Synthetic oligonucleotide
  Sense strand starting at position 2119 of SEQ ID NO: 917290
ucauguugcugggcacaaa

SEQ ID NO: 1223705 - RNA, 19 nt, Artificial Sequence
  Description of Artificial Sequence: Synthetic oligonucleotide
  Antisense strand to SEQ ID NO: 1223704
uuugugcccagcaacauga

SEQ ID NO: 1223706 - RNA, 19 nt, Artificial Sequence
  Description of Artificial Sequence: Synthetic oligonucleotide
  Sense strand starting at position 2383 of SEQ ID NO: 917290
cugacauguacauguguau

SEQ ID NO: 1223707 - RNA, 19 nt, Artificial Sequence
  Description of Artificial Sequence: Synthetic oligonucleotide
  Antisense strand to SEQ ID NO: 1223706
auacacauguacaugucag

SEQ ID NO: 1223708 - RNA, 19 nt, Artificial Sequence
  Description of Artificial Sequence: Synthetic oligonucleotide
  Sense strand starting at position 2404 of SEQ ID NO: 917290
augugauacgaguguuuau

SEQ ID NO: 1223709 - RNA, 19 nt, Artificial Sequence
  Description of Artificial Sequence: Synthetic oligonucleotide
  Antisense strand to SEQ ID NO: 1223708
auaaacacucguaucacau

SEQ ID NO: 1223710 - RNA, 19 nt, Artificial Sequence
  Description of Artificial Sequence: Synthetic oligonucleotide
  Sense strand starting at position 2407 of SEQ ID NO: 917290
ugauacgaguguuuauaug

SEQ ID NO: 1223711 - RNA, 19 nt, Artificial Sequence
  Description of Artificial Sequence: Synthetic oligonucleotide
  Antisense strand to SEQ ID NO: 1223710
cauauaaacacucguauca

SEQ ID NO: 1223712 - RNA, 19 nt, Artificial Sequence
  Description of Artificial Sequence: Synthetic oligonucleotide
  Sense strand starting at position 2411 of SEQ ID NO: 917290
acgaguguuuauaugcguu

SEQ ID NO: 1223713 - RNA, 19 nt, Artificial Sequence
  Description of Artificial Sequence: Synthetic oligonucleotide
  Antisense strand to SEQ ID NO: 1223712
aacgcauauaaacacucgu

SEQ ID NO: 1223714 - RNA, 19 nt, Artificial Sequence
  Description of Artificial Sequence: Synthetic oligonucleotide
  Sense strand starting at position 2417 of SEQ ID NO: 917290
guuuauaugcguuaccuag

SEQ ID NO: 1223715 - RNA, 19 nt, Artificial Sequence
  Description of Artificial Sequence: Synthetic oligonucleotide
  Antisense strand to SEQ ID NO: 1223714
cuagguaacgcauauaaac

SEQ ID NO: 1223716 - RNA, 19 nt, Artificial Sequence
  Description of Artificial Sequence: Synthetic oligonucleotide
  Sense strand starting at position 2466 of SEQ ID NO: 917290
gcagguacuuugguugaau

SEQ ID NO: 1223717 - RNA, 19 nt, Artificial Sequence
  Description of Artificial Sequence: Synthetic oligonucleotide
  Antisense strand to SEQ ID NO: 1223716
auucaaccaaaguaccugc

SEQ ID NO: 1223718 - RNA, 19 nt, Artificial Sequence
  Description of Artificial Sequence: Synthetic oligonucleotide
  Sense strand starting at position 2467 of SEQ ID NO: 917290
cagguacuuugguugaauu

SEQ ID NO: 1223719 - RNA, 19 nt, Artificial Sequence
  Description of Artificial Sequence: Synthetic oligonucleotide
  Antisense strand to SEQ ID NO: 1223718
aauucaaccaaaguaccug

SEQ ID NO: 1223720 - RNA, 19 nt, Artificial Sequence
  Description of Artificial Sequence: Synthetic oligonucleotide
  Sense strand starting at position 2468 of SEQ ID NO: 917290
agguacuuugguugaauua

SEQ ID NO: 1223721 - RNA, 19 nt, Artificial Sequence
  Description of Artificial Sequence: Synthetic oligonucleotide
  Antisense strand to SEQ ID NO: 1223720
uaauucaaccaaaguaccu

SEQ ID NO: 1223722 - RNA, 19 nt, Artificial Sequence
  Description of Artificial Sequence: Synthetic oligonucleotide
  Sense strand starting at position 2469 of SEQ ID NO: 917290
gguacuuugguugaauuac

SEQ ID NO: 1223723 - RNA, 19 nt, Artificial Sequence
  Description of Artificial Sequence: Synthetic oligonucleotide
  Antisense strand to SEQ ID NO: 1223722
guaauucaaccaaaguacc

SEQ ID NO: 1223724 - RNA, 19 nt, Artificial Sequence
  Description of Artificial Sequence: Synthetic oligonucleotide
  Sense strand starting at position 2523 of SEQ ID NO: 917290
gucguagauacgcaauacu

SEQ ID NO: 1223725 - RNA, 19 nt, Artificial Sequence
  Description of Artificial Sequence: Synthetic oligonucleotide
  Antisense strand to SEQ ID NO: 1223724
aguauugcguaucuacgac

SEQ ID NO: 1223726 - RNA, 19 nt, Artificial Sequence
  Description of Artificial Sequence: Synthetic oligonucleotide
  Sense strand starting at position 2526 of SEQ ID NO: 917290
guagauacgcaauacuugu

SEQ ID NO: 1223727 - RNA, 19 nt, Artificial Sequence
  Description of Artificial Sequence: Synthetic oligonucleotide
  Antisense strand to SEQ ID NO: 1223726
acaaguauugcguaucuac

SEQ ID NO: 1223728 - RNA, 19 nt, Artificial Sequence
  Description of Artificial Sequence: Synthetic oligonucleotide
  Sense strand starting at position 2532 of SEQ ID NO: 917290
acgcaauacuuguugaacu

SEQ ID NO: 1223729 - RNA, 19 nt, Artificial Sequence
  Description of Artificial Sequence: Synthetic oligonucleotide
  Antisense strand to SEQ ID NO: 1223728
aguucaacaaguauugcgu

SEQ ID NO: 1223730 - RNA, 19 nt, Artificial Sequence
  Description of Artificial Sequence: Synthetic oligonucleotide
  Sense strand starting at position 2775 of SEQ ID NO: 917290
ggauuacacugauaaagag

SEQ ID NO: 1223731 - RNA, 19 nt, Artificial Sequence
  Description of Artificial Sequence: Synthetic oligonucleotide
  Antisense strand to SEQ ID NO: 1223730
cucuuuaucaguguaaucc

SEQ ID NO: 1223732 - RNA, 19 nt, Artificial Sequence
  Description of Artificial Sequence: Synthetic oligonucleotide
  Sense strand starting at position 3169 of SEQ ID NO: 917290
gguagacaugagcagguau

SEQ ID NO: 1223733 - RNA, 19 nt, Artificial Sequence
  Description of Artificial Sequence: Synthetic oligonucleotide
  Antisense strand to SEQ ID NO: 1223732
auaccugcucaugucuacc

SEQ ID NO: 1223734 - RNA, 19 nt, Artificial Sequence
  Description of Artificial Sequence: Synthetic oligonucleotide
  Sense strand starting at position 3177 of SEQ ID NO: 917290
ugagcagguauguaauguu

SEQ ID NO: 1223735 - RNA, 19 nt, Artificial Sequence
  Description of Artificial Sequence: Synthetic oligonucleotide
  Antisense strand to SEQ ID NO: 1223734
aacauuacauaccugcuca

SEQ ID NO: 1223736 - RNA, 19 nt, Artificial Sequence
  Description of Artificial Sequence: Synthetic oligonucleotide
  Sense strand starting at position 3680 of SEQ ID NO: 917290
gcgaaagggccuuaaagaa

SEQ ID NO: 1223737 - RNA, 19 nt, Artificial Sequence
  Description of Artificial Sequence: Synthetic oligonucleotide
  Antisense strand to SEQ ID NO: 1223736
uucuuuaaggcccuuucgc

SEQ ID NO: 1223738 - RNA, 19 nt, Artificial Sequence
  Description of Artificial Sequence: Synthetic oligonucleotide
  Sense strand starting at position 3755 of SEQ ID NO: 917291
ggcauucgucuugugagug

SEQ ID NO: 1223739 - RNA, 19 nt, Artificial Sequence
  Description of Artificial Sequence: Synthetic oligonucleotide
  Antisense strand to SEQ ID NO: 1223738
cacucacaagacgaaugcc

SEQ ID NO: 1223740 - RNA, 19 nt, Artificial Sequence
  Description of Artificial Sequence: Synthetic oligonucleotide
  Sense strand starting at position 387 of SEQ ID NO: 917291
aacagaaauuugugguaga

SEQ ID NO: 1223741 - RNA, 19 nt, Artificial Sequence
  Description of Artificial Sequence: Synthetic oligonucleotide
  Antisense strand to SEQ ID NO: 1223740
ucuaccacaaauuucuguu

SEQ ID NO: 1223742 - RNA, 19 nt, Artificial Sequence
  Description of Artificial Sequence: Synthetic oligonucleotide
  Sense strand starting at position 388 of SEQ ID NO: 917291
acagaaauuugugguagau

SEQ ID NO: 1223743 - RNA, 19 nt, Artificial Sequence
  Description of Artificial Sequence: Synthetic oligonucleotide
  Antisense strand to SEQ ID NO: 1223742
aucuaccacaaauuucugu

SEQ ID NO: 1223744 - RNA, 19 nt, Artificial Sequence
  Description of Artificial Sequence: Synthetic oligonucleotide
  Sense strand starting at position 390 of SEQ ID NO: 917291
agaaauuugugguagauua

SEQ ID NO: 1223745 - RNA, 19 nt, Artificial Sequence
  Description of Artificial Sequence: Synthetic oligonucleotide
  Antisense strand to SEQ ID NO: 1223744
uaaucuaccacaaauuucu

SEQ ID NO: 1223746 - RNA, 19 nt, Artificial Sequence
  Description of Artificial Sequence: Synthetic oligonucleotide
  Sense strand starting at position 477 of SEQ ID NO: 917291
ccagucuacucugucacaa

SEQ ID NO: 1223747 - RNA, 19 nt, Artificial Sequence
  Description of Artificial Sequence: Synthetic oligonucleotide
  Antisense strand to SEQ ID NO: 1223746
uugugacagaguagacugg

SEQ ID NO: 1223748 - RNA, 19 nt, Artificial Sequence
  Description of Artificial Sequence: Synthetic oligonucleotide
  Sense strand starting at position 613 of SEQ ID NO: 917291
gaauuacuuguggaguuua

SEQ ID NO: 1223749 - RNA, 19 nt, Artificial Sequence
  Description of Artificial Sequence: Synthetic oligonucleotide
  Antisense strand to SEQ ID NO: 1223748
uaaacuccacaaguaauuc

SEQ ID NO: 1223750 - RNA, 19 nt, Artificial Sequence
  Description of Artificial Sequence: Synthetic oligonucleotide
  Sense strand starting at position 658 of SEQ ID NO: 917291
agugucaaccugugugaua

SEQ ID NO: 1223751 - RNA, 19 nt, Artificial Sequence
  Description of Artificial Sequence: Synthetic oligonucleotide
  Antisense strand to SEQ ID NO: 1223750
uaucacacagguugacacu

SEQ ID NO: 1223752 - RNA, 19 nt, Artificial Sequence
  Description of Artificial Sequence: Synthetic oligonucleotide
  Sense strand starting at position 660 of SEQ ID NO: 917291
ugucaaccugugugauaua

SEQ ID NO: 1223753 - RNA, 19 nt, Artificial Sequence
  Description of Artificial Sequence: Synthetic oligonucleotide
  Antisense strand to SEQ ID NO: 1223752
uauaucacacagguugaca

SEQ ID NO: 1223754 - RNA, 19 nt, Artificial Sequence
  Description of Artificial Sequence: Synthetic oligonucleotide
  Sense strand starting at position 671 of SEQ ID NO: 917291
gugauauaucauuaguccu

SEQ ID NO: 1223755 - RNA, 19 nt, Artificial Sequence
  Description of Artificial Sequence: Synthetic oligonucleotide
  Antisense strand to SEQ ID NO: 1223754
aggacuaaugauauaucac

SEQ ID NO: 1223756 - RNA, 19 nt, Artificial Sequence
  Description of Artificial Sequence: Synthetic oligonucleotide
  Sense strand starting at position 686 of SEQ ID NO: 917291
uccugacaugauugucaua

SEQ ID NO: 1223757 - RNA, 19 nt, Artificial Sequence
  Description of Artificial Sequence: Synthetic oligonucleotide
  Antisense strand to SEQ ID NO: 1223756
uaugacaaucaugucagga

SEQ ID NO: 1223758 - RNA, 19 nt, Artificial Sequence
  Description of Artificial Sequence: Synthetic oligonucleotide
  Sense strand starting at position 688 of SEQ ID NO: 917291
cugacaugauugucauauu

SEQ ID NO: 1223759 - RNA, 19 nt, Artificial Sequence
  Description of Artificial Sequence: Synthetic oligonucleotide
  Antisense strand to SEQ ID NO: 1223758
aauaugacaaucaugucag

SEQ ID NO: 1223760 - RNA, 19 nt, Artificial Sequence
  Description of Artificial Sequence: Synthetic oligonucleotide
  Sense strand starting at position 697 of SEQ ID NO: 917291
uugucauauuaggucucau

SEQ ID NO: 1223761 - RNA, 19 nt, Artificial Sequence
  Description of Artificial Sequence: Synthetic oligonucleotide
  Antisense strand to SEQ ID NO: 1223760
augagaccuaauaugacaa

SEQ ID NO: 1223762 - RNA, 19 nt, Artificial Sequence
  Description of Artificial Sequence: Synthetic oligonucleotide
  Sense strand starting at position 817 of SEQ ID NO: 917291
ucaggauuugcgcaguacu

SEQ ID NO: 1223763 - RNA, 19 nt, Artificial Sequence
  Description of Artificial Sequence: Synthetic oligonucleotide
  Antisense strand to SEQ ID NO: 1223762
aguacugcgcaaauccuga

SEQ ID NO: 1223764 - RNA, 19 nt, Artificial Sequence
  Description of Artificial Sequence: Synthetic oligonucleotide
  Sense strand starting at position 862 of SEQ ID NO: 917291
uauagugauuuggaugaga

SEQ ID NO: 1223765 - RNA, 19 nt, Artificial Sequence
  Description of Artificial Sequence: Synthetic oligonucleotide
  Antisense strand to SEQ ID NO: 1223764
ucucauccaaaucacuaua

SEQ ID NO: 1223766 - RNA, 19 nt, Artificial Sequence
  Description of Artificial Sequence: Synthetic oligonucleotide
  Sense strand starting at position 1115 of SEQ ID NO: 917291
uugugaauuuccgcccaac

SEQ ID NO: 1223767 - RNA, 19 nt, Artificial Sequence
  Description of Artificial Sequence: Synthetic oligonucleotide
  Antisense strand to SEQ ID NO: 1223766
guugggcggaaauucacaa

SEQ ID NO: 1223768 - RNA, 19 nt, Artificial Sequence
  Description of Artificial Sequence: Synthetic oligonucleotide
  Sense strand starting at position 2115 of SEQ ID NO: 917291
gagcgaccucgggacuaaa

SEQ ID NO: 1223769 - RNA, 19 nt, Artificial Sequence
  Description of Artificial Sequence: Synthetic oligonucleotide
  Antisense strand to SEQ ID NO: 1223768
uuuagucccgaggucgcuc

SEQ ID NO: 1223770 - RNA, 19 nt, Artificial Sequence
  Description of Artificial Sequence: Synthetic oligonucleotide
  Sense strand starting at position 2184 of SEQ ID NO: 917291
ccgcguuuccggucucuga

SEQ ID NO: 1223771 - RNA, 19 nt, Artificial Sequence
  Description of Artificial Sequence: Synthetic oligonucleotide
  Antisense strand to SEQ ID NO: 1223770
ucagagaccggaaacgcgg

SEQ ID NO: 1223772 - RNA, 19 nt, Artificial Sequence
  Description of Artificial Sequence: Synthetic oligonucleotide
  Sense strand starting at position 2435 of SEQ ID NO: 917291
gcgccuucacuuguguuga

SEQ ID NO: 1223773 - RNA, 19 nt, Artificial Sequence
  Description of Artificial Sequence: Synthetic oligonucleotide
  Antisense strand to SEQ ID NO: 1223772
ucaacacaagugaaggcgc

SEQ ID NO: 1223774 - RNA, 19 nt, Artificial Sequence
  Description of Artificial Sequence: Synthetic oligonucleotide
  Sense strand starting at position 2533 of SEQ ID NO: 917291
augauaaaggugcaguuua

SEQ ID NO: 1223775 - RNA, 19 nt, Artificial Sequence
  Description of Artificial Sequence: Synthetic oligonucleotide
  Antisense strand to SEQ ID NO: 1223774
uaaacugcaccuuuaucau

SEQ ID NO: 1223776 - RNA, 19 nt, Artificial Sequence
  Description of Artificial Sequence: Synthetic oligonucleotide
  Sense strand starting at position 2557 of SEQ ID NO: 917291
ccugaucuguccuccaaga

SEQ ID NO: 1223777 - RNA, 19 nt, Artificial Sequence
  Description of Artificial Sequence: Synthetic oligonucleotide
  Antisense strand to SEQ ID NO: 1223776
ucuuggaggacagaucagg

SEQ ID NO: 1223778 - RNA, 19 nt, Artificial Sequence
  Description of Artificial Sequence: Synthetic oligonucleotide
  Sense strand starting at position 2559 of SEQ ID NO: 917291
ugaucuguccuccaagaau

SEQ ID NO: 1223779 - RNA, 19 nt, Artificial Sequence
  Description of Artificial Sequence: Synthetic oligonucleotide
  Antisense strand to SEQ ID NO: 1223778
auucuuggaggacagauca

SEQ ID NO: 1223780 - RNA, 19 nt, Artificial Sequence
  Description of Artificial Sequence: Synthetic oligonucleotide
  Sense strand starting at position 2654 of SEQ ID NO: 917291
uuccaagaguaagagaaau

SEQ ID NO: 1223781 - RNA, 19 nt, Artificial Sequence
  Description of Artificial Sequence: Synthetic oligonucleotide
  Antisense strand to SEQ ID NO: 1223780
auuucucuuacucuuggaa

SEQ ID NO: 1223782 - RNA, 19 nt, Artificial Sequence
  Description of Artificial Sequence: Synthetic oligonucleotide
  Sense strand starting at position 2724 of SEQ ID NO: 917291
cauuguugcucauuuggua

SEQ ID NO: 1223783 - RNA, 19 nt, Artificial Sequence
  Description of Artificial Sequence: Synthetic oligonucleotide
  Antisense strand to SEQ ID NO: 1223782
uaccaaaugagcaacaaug

SEQ ID NO: 1223784 - RNA, 19 nt, Artificial Sequence
  Description of Artificial Sequence: Synthetic oligonucleotide
  Sense strand starting at position 2733 of SEQ ID NO: 917291
ucauuugguaggcgcuaaa

SEQ ID NO: 1223785 - RNA, 19 nt, Artificial Sequence
  Description of Artificial Sequence: Synthetic oligonucleotide
  Antisense strand to SEQ ID NO: 1223784
uuuagcgccuaccaaauga

SEQ ID NO: 1223786 - RNA, 19 nt, Artificial Sequence
  Description of Artificial Sequence: Synthetic oligonucleotide
  Sense strand starting at position 2736 of SEQ ID NO: 917291
uuugguaggcgcuaaagaa

SEQ ID NO: 1223787 - RNA, 19 nt, Artificial Sequence
  Description of Artificial Sequence: Synthetic oligonucleotide
  Antisense strand to SEQ ID NO: 1223786
uucuuuagcgccuaccaaa

SEQ ID NO: 1223788 - RNA, 19 nt, Artificial Sequence
  Description of Artificial Sequence: Synthetic oligonucleotide
  Sense strand starting at position 2768 of SEQ ID NO: 917291
aucucagauagcugggaau

SEQ ID NO: 1223789 - RNA, 19 nt, Artificial Sequence
  Description of Artificial Sequence: Synthetic oligonucleotide
  Antisense strand to SEQ ID NO: 1223788
auucccagcuaucugagau

SEQ ID NO: 1223790 - RNA, 19 nt, Artificial Sequence
  Description of Artificial Sequence: Synthetic oligonucleotide
  Sense strand starting at position 2813 of SEQ ID NO: 917291
guucuugugcuugacuaga

SEQ ID NO: 1223791 - RNA, 19 nt, Artificial Sequence
  Description of Artificial Sequence: Synthetic oligonucleotide
  Antisense strand to SEQ ID NO: 1223790
ucuagucaagcacaagaac

SEQ ID NO: 1223792 - RNA, 19 nt, Artificial Sequence
  Description of Artificial Sequence: Synthetic oligonucleotide
  Sense strand starting at position 2815 of SEQ ID NO: 917291
ucuugugcuugacuagaga

SEQ ID NO: 1223793 - RNA, 19 nt, Artificial Sequence
  Description of Artificial Sequence: Synthetic oligonucleotide
  Antisense strand to SEQ ID NO: 1223792
ucucuagucaagcacaaga

SEQ ID NO: 1223794 - RNA, 19 nt, Artificial Sequence
  Description of Artificial Sequence: Synthetic oligonucleotide
  Sense strand starting at position 2910 of SEQ ID NO: 917291
uuggucauuuguuaaagag

SEQ ID NO: 1223795 - RNA, 19 nt, Artificial Sequence
  Description of Artificial Sequence: Synthetic oligonucleotide
  Antisense strand to SEQ ID NO: 1223794
cucuuuaacaaaugaccaa

SEQ ID NO: 1223796 - RNA, 19 nt, Artificial Sequence
  Description of Artificial Sequence: Synthetic oligonucleotide
  Sense strand starting at position 2993 of SEQ ID NO: 917291
auaucauuagauuggugca

SEQ ID NO: 1223797 - RNA, 19 nt, Artificial Sequence
  Description of Artificial Sequence: Synthetic oligonucleotide
  Antisense strand to SEQ ID NO: 1223796
ugcaccaaucuaaugauau

SEQ ID NO: 1223798 - RNA, 19 nt, Artificial Sequence
  Description of Artificial Sequence: Synthetic oligonucleotide
  Sense strand starting at position 2995 of SEQ ID NO: 917291
aucauuagauuggugcaaa

SEQ ID NO: 1223799 - RNA, 19 nt, Artificial Sequence
  Description of Artificial Sequence: Synthetic oligonucleotide
  Antisense strand to SEQ ID NO: 1223798
uuugcaccaaucuaaugau

SEQ ID NO: 1223800 - RNA, 19 nt, Artificial Sequence
  Description of Artificial Sequence: Synthetic oligonucleotide
  Sense strand starting at position 3210 of SEQ ID NO: 917291
ugaaguugucagggaagag

SEQ ID NO: 1223801 - RNA, 19 nt, Artificial Sequence
  Description of Artificial Sequence: Synthetic oligonucleotide
  Antisense strand to SEQ ID NO: 1223800
cucuucccugacaacuuca

SEQ ID NO: 1223802 - RNA, 19 nt, Artificial Sequence
  Description of Artificial Sequence: Synthetic oligonucleotide
  Sense strand starting at position 3222 of SEQ ID NO: 917291
ggaagagaguuuguuauau

SEQ ID NO: 1223803 - RNA, 19 nt, Artificial Sequence
  Description of Artificial Sequence: Synthetic oligonucleotide
  Antisense strand to SEQ ID NO: 1223802
auauaacaaacucucuucc

SEQ ID NO: 1223804 - RNA, 19 nt, Artificial Sequence
  Description of Artificial Sequence: Synthetic oligonucleotide
  Sense strand starting at position 3337 of SEQ ID NO: 917291
cagucuuggcugcaaauca

SEQ ID NO: 1223805 - RNA, 19 nt, Artificial Sequence
  Description of Artificial Sequence: Synthetic oligonucleotide
  Antisense strand to SEQ ID NO: 1223804
ugauuugcagccaagacug

SEQ ID NO: 1223806 - RNA, 19 nt, Artificial Sequence
  Description of Artificial Sequence: Synthetic oligonucleotide
  Sense strand starting at position 3422 of SEQ ID NO: 917291
ucagaaucucuaggaguua

SEQ ID NO: 1223807 - RNA, 19 nt, Artificial Sequence
  Description of Artificial Sequence: Synthetic oligonucleotide
  Antisense strand to SEQ ID NO: 1223806
uaacuccuagagauucuga

SEQ ID NO: 1223808 - RNA, 19 nt, Artificial Sequence
  Description of Artificial Sequence: Synthetic oligonucleotide
  Sense strand starting at position 3433 of SEQ ID NO: 917291
aggaguuaggccugagcau

SEQ ID NO: 1223809 - RNA, 19 nt, Artificial Sequence
  Description of Artificial Sequence: Synthetic oligonucleotide
  Antisense strand to SEQ ID NO: 1223808
augcucaggccuaacuccu

SEQ ID NO: 1223810 - RNA, 19 nt, Artificial Sequence
  Description of Artificial Sequence: Synthetic oligonucleotide
  Sense strand starting at position 3483 of SEQ ID NO: 917291
cucuauguaugaguuagau

SEQ ID NO: 1223811 - RNA, 19 nt, Artificial Sequence
  Description of Artificial Sequence: Synthetic oligonucleotide
  Antisense strand to SEQ ID NO: 1223810
aucuaacucauacauagag

SEQ ID NO: 1223812 - RNA, 19 nt, Artificial Sequence
  Description of Artificial Sequence: Synthetic oligonucleotide
  Sense strand starting at position 3489 of SEQ ID NO: 917291
guaugaguuagaugcauaa

SEQ ID NO: 1223813 - RNA, 19 nt, Artificial Sequence
  Description of Artificial Sequence: Synthetic oligonucleotide
  Antisense strand to SEQ ID NO: 1223812
uuaugcaucuaacucauac

SEQ ID NO: 1223814 - RNA, 19 nt, Artificial Sequence
  Description of Artificial Sequence: Synthetic oligonucleotide
  Sense strand starting at position 3825 of SEQ ID NO: 917291
acuuuauaaggauguacuu

SEQ ID NO: 1223815 - RNA, 19 nt, Artificial Sequence
  Description of Artificial Sequence: Synthetic oligonucleotide
  Antisense strand to SEQ ID NO: 1223814
aaguacauccuuauaaagu

SEQ ID NO: 1223816 - RNA, 19 nt, Artificial Sequence
  Description of Artificial Sequence: Synthetic oligonucleotide
  Sense strand starting at position 3832 of SEQ ID NO: 917291
aaggauguacuuuguggua

SEQ ID NO: 1223817 - RNA, 19 nt, Artificial Sequence
  Description of Artificial Sequence: Synthetic oligonucleotide
  Antisense strand to SEQ ID NO: 1223816
uaccacaaaguacauccuu

SEQ ID NO: 1223818 - RNA, 19 nt, Artificial Sequence
  Description of Artificial Sequence: Synthetic oligonucleotide
  Sense strand starting at position 3839 of SEQ ID NO: 917292
uacuuugugguauguaaau

SEQ ID NO: 1223819 - RNA, 19 nt, Artificial Sequence
  Description of Artificial Sequence: Synthetic oligonucleotide
  Antisense strand to SEQ ID NO: 1223818
auuuacauaccacaaagua

SEQ ID NO: 1223820 - RNA, 19 nt, Artificial Sequence
  Description of Artificial Sequence: Synthetic oligonucleotide
  Sense strand starting at position 32 of SEQ ID NO: 917292
gcuagauuauuugucucau

SEQ ID NO: 1223821 - RNA, 19 nt, Artificial Sequence
  Description of Artificial Sequence: Synthetic oligonucleotide
  Antisense strand to SEQ ID NO: 1223820
augagacaaauaaucuagc

SEQ ID NO: 1223822 - RNA, 19 nt, Artificial Sequence
  Description of Artificial Sequence: Synthetic oligonucleotide
  Sense strand starting at position 98 of SEQ ID NO: 917292
ggcuuuaucccuugacacc

SEQ ID NO: 1223823 - RNA, 19 nt, Artificial Sequence
  Description of Artificial Sequence: Synthetic oligonucleotide
  Antisense strand to SEQ ID NO: 1223822
ggugucaagggauaaagcc

SEQ ID NO: 1223824 - RNA, 19 nt, Artificial Sequence
  Description of Artificial Sequence: Synthetic oligonucleotide
  Sense strand starting at position 159 of SEQ ID NO: 917292
ugaugcuaaugaguaauca

SEQ ID NO: 1223825 - RNA, 19 nt, Artificial Sequence
  Description of Artificial Sequence: Synthetic oligonucleotide
  Antisense strand to SEQ ID NO: 1223824
ugauuacucauuagcauca

SEQ ID NO: 1223826 - RNA, 19 nt, Artificial Sequence
  Description of Artificial Sequence: Synthetic oligonucleotide
  Sense strand starting at position 217 of SEQ ID NO: 917292
gugaacuaccucugaagaa

SEQ ID NO: 1223827 - RNA, 19 nt, Artificial Sequence
  Description of Artificial Sequence: Synthetic oligonucleotide
  Antisense strand to SEQ ID NO: 1223826
uucuucagagguaguucac

SEQ ID NO: 1223828 - RNA, 19 nt, Artificial Sequence
  Description of Artificial Sequence: Synthetic oligonucleotide
  Sense strand starting at position 266 of SEQ ID NO: 917292
aacaguuagugguuaauau

SEQ ID NO: 1223829 - RNA, 19 nt, Artificial Sequence
  Description of Artificial Sequence: Synthetic oligonucleotide
  Antisense strand to SEQ ID NO: 1223828
auauuaaccacuaacuguu

SEQ ID NO: 1223830 - RNA, 19 nt, Artificial Sequence
  Description of Artificial Sequence: Synthetic oligonucleotide
  Sense strand starting at position 267 of SEQ ID NO: 917292
acaguuagugguuaauaua

SEQ ID NO: 1223831 - RNA, 19 nt, Artificial Sequence
  Description of Artificial Sequence: Synthetic oligonucleotide
  Antisense strand to SEQ ID NO: 1223830
uauauuaaccacuaacugu

SEQ ID NO: 1223832 - RNA, 19 nt, Artificial Sequence
  Description of Artificial Sequence: Synthetic oligonucleotide
  Sense strand starting at position 275 of SEQ ID NO: 917292
ugguuaauauaccugggau

SEQ ID NO: 1223833 - RNA, 19 nt, Artificial Sequence
  Description of Artificial Sequence: Synthetic oligonucleotide
  Antisense strand to SEQ ID NO: 1223832
aucccagguauauuaacca

SEQ ID NO: 1223834 - RNA, 19 nt, Artificial Sequence
  Description of Artificial Sequence: Synthetic oligonucleotide
  Sense strand starting at position 276 of SEQ ID NO: 917292
gguuaauauaccugggauc

SEQ ID NO: 1223835 - RNA, 19 nt, Artificial Sequence
  Description of Artificial Sequence: Synthetic oligonucleotide
  Antisense strand to SEQ ID NO: 1223834
gaucccagguauauuaacc

SEQ ID NO: 1223836 - RNA, 19 nt, Artificial Sequence
  Description of Artificial Sequence: Synthetic oligonucleotide
  Sense strand starting at position 277 of SEQ ID NO: 917292
guuaauauaccugggauca

SEQ ID NO: 1223837 - RNA, 19 nt, Artificial Sequence
  Description of Artificial Sequence: Synthetic oligonucleotide
  Antisense strand to SEQ ID NO: 1223836
ugaucccagguauauuaac

SEQ ID NO: 1223838 - RNA, 19 nt, Artificial Sequence
  Description of Artificial Sequence: Synthetic oligonucleotide
  Sense strand starting at position 936 of SEQ ID NO: 917292
aacagaaauuugugguaga

SEQ ID NO: 1223839 - RNA, 19 nt, Artificial Sequence
  Description of Artificial Sequence: Synthetic oligonucleotide
  Antisense strand to SEQ ID NO: 1223838
ucuaccacaaauuucuguu

SEQ ID NO: 1223840 - RNA, 19 nt, Artificial Sequence
  Description of Artificial Sequence: Synthetic oligonucleotide
  Sense strand starting at position 939 of SEQ ID NO: 917292
agaaauuugugguagauua

SEQ ID NO: 1223841 - RNA, 19 nt, Artificial Sequence
  Description of Artificial Sequence: Synthetic oligonucleotide
  Antisense strand to SEQ ID NO: 1223840
uaaucuaccacaaauuucu

SEQ ID NO: 1223842 - RNA, 19 nt, Artificial Sequence
  Description of Artificial Sequence: Synthetic oligonucleotide
  Sense strand starting at position 1026 of SEQ ID NO: 917292
ccagucuacucugucacaa

SEQ ID NO: 1223843 - RNA, 19 nt, Artificial Sequence
  Description of Artificial Sequence: Synthetic oligonucleotide
  Antisense strand to SEQ ID NO: 1223842
uugugacagaguagacugg

SEQ ID NO: 1223844 - RNA, 19 nt, Artificial Sequence
  Description of Artificial Sequence: Synthetic oligonucleotide
  Sense strand starting at position 1162 of SEQ ID NO: 917292
gaauuacuuguggaguuua

SEQ ID NO: 1223845 - RNA, 19 nt, Artificial Sequence
  Description of Artificial Sequence: Synthetic oligonucleotide
  Antisense strand to SEQ ID NO: 1223844
uaaacuccacaaguaauuc

SEQ ID NO: 1223846 - RNA, 19 nt, Artificial Sequence
  Description of Artificial Sequence: Synthetic oligonucleotide
  Sense strand starting at position 1220 of SEQ ID NO: 917292
gugauauaucauuaguccu

SEQ ID NO: 1223847 - RNA, 19 nt, Artificial Sequence
  Description of Artificial Sequence: Synthetic oligonucleotide
  Antisense strand to SEQ ID NO: 1223846
aggacuaaugauauaucac

SEQ ID NO: 1223848 - RNA, 19 nt, Artificial Sequence
  Description of Artificial Sequence: Synthetic oligonucleotide
  Sense strand starting at position 1235 of SEQ ID NO: 917292
uccugacaugauugucaua

SEQ ID NO: 1223849 - RNA, 19 nt, Artificial Sequence
  Description of Artificial Sequence: Synthetic oligonucleotide
  Antisense strand to SEQ ID NO: 1223848
uaugacaaucaugucagga

SEQ ID NO: 1223850 - RNA, 19 nt, Artificial Sequence
  Description of Artificial Sequence: Synthetic oligonucleotide
  Sense strand starting at position 1237 of SEQ ID NO: 917292
cugacaugauugucauauu

SEQ ID NO: 1223851 - RNA, 19 nt, Artificial Sequence
  Description of Artificial Sequence: Synthetic oligonucleotide
  Antisense strand to SEQ ID NO: 1223850
aauaugacaaucaugucag

SEQ ID NO: 1223852 - RNA, 19 nt, Artificial Sequence
  Description of Artificial Sequence: Synthetic oligonucleotide
  Sense strand starting at position 1246 of SEQ ID NO: 917292
uugucauauuaggucucau

SEQ ID NO: 1223853 - RNA, 19 nt, Artificial Sequence
  Description of Artificial Sequence: Synthetic oligonucleotide
  Antisense strand to SEQ ID NO: 1223852
augagaccuaauaugacaa

SEQ ID NO: 1223854 - RNA, 19 nt, Artificial Sequence
  Description of Artificial Sequence: Synthetic oligonucleotide
  Sense strand starting at position 1366 of SEQ ID NO: 917292
ucaggauuugcgcaguacu

SEQ ID NO: 1223855 - RNA, 19 nt, Artificial Sequence
  Description of Artificial Sequence: Synthetic oligonucleotide
  Antisense strand to SEQ ID NO: 1223854
aguacugcgcaaauccuga

SEQ ID NO: 1223856 - RNA, 19 nt, Artificial Sequence
  Description of Artificial Sequence: Synthetic oligonucleotide
  Sense strand starting at position 1411 of SEQ ID NO: 917292
uauagugauuuggaugaga

SEQ ID NO: 1223857 - RNA, 19 nt, Artificial Sequence
  Description of Artificial Sequence: Synthetic oligonucleotide
  Antisense strand to SEQ ID NO: 1223856
ucucauccaaaucacuaua

SEQ ID NO: 1223858 - RNA, 19 nt, Artificial Sequence
  Description of Artificial Sequence: Synthetic oligonucleotide
  Sense strand starting at position 1664 of SEQ ID NO: 917292
uugugaauuuccgcccaac

SEQ ID NO: 1223859 - RNA, 19 nt, Artificial Sequence
  Description of Artificial Sequence: Synthetic oligonucleotide
  Antisense strand to SEQ ID NO: 1223858
guugggcggaaauucacaa

SEQ ID NO: 1223860 - RNA, 19 nt, Artificial Sequence
  Description of Artificial Sequence: Synthetic oligonucleotide
  Sense strand starting at position 2664 of SEQ ID NO: 917292
gagcgaccucgggacuaaa

SEQ ID NO: 1223861 - RNA, 19 nt, Artificial Sequence
  Description of Artificial Sequence: Synthetic oligonucleotide
  Antisense strand to SEQ ID NO: 1223860
uuuagucccgaggucgcuc

SEQ ID NO: 1223862 - RNA, 19 nt, Artificial Sequence
  Description of Artificial Sequence: Synthetic oligonucleotide
  Sense strand starting at position 2733 of SEQ ID NO: 917292
ccgcguuuccggucucuga

SEQ ID NO: 1223863 - RNA, 19 nt, Artificial Sequence
  Description of Artificial Sequence: Synthetic oligonucleotide
  Antisense strand to SEQ ID NO: 1223862
ucagagaccggaaacgcgg

SEQ ID NO: 1223864 - RNA, 19 nt, Artificial Sequence
  Description of Artificial Sequence: Synthetic oligonucleotide
  Sense strand starting at position 2984 of SEQ ID NO: 917292
gcgccuucacuuguguuga

SEQ ID NO: 1223865 - RNA, 19 nt, Artificial Sequence
  Description of Artificial Sequence: Synthetic oligonucleotide
  Antisense strand to SEQ ID NO: 1223864
ucaacacaagugaaggcgc

SEQ ID NO: 1223866 - RNA, 19 nt, Artificial Sequence
  Description of Artificial Sequence: Synthetic oligonucleotide
  Sense strand starting at position 3082 of SEQ ID NO: 917292
augauaaaggugcaguuua

SEQ ID NO: 1223867 - RNA, 19 nt, Artificial Sequence
  Description of Artificial Sequence: Synthetic oligonucleotide
  Antisense strand to SEQ ID NO: 1223866
uaaacugcaccuuuaucau

SEQ ID NO: 1223868 - RNA, 19 nt, Artificial Sequence
  Description of Artificial Sequence: Synthetic oligonucleotide
  Sense strand starting at position 3106 of SEQ ID NO: 917292
ccugaucuguccuccaaga

SEQ ID NO: 1223869 - RNA, 19 nt, Artificial Sequence
  Description of Artificial Sequence: Synthetic oligonucleotide
  Antisense strand to SEQ ID NO: 1223868
ucuuggaggacagaucagg

SEQ ID NO: 1223870 - RNA, 19 nt, Artificial Sequence
  Description of Artificial Sequence: Synthetic oligonucleotide
  Sense strand starting at position 3108 of SEQ ID NO: 917292
ugaucuguccuccaagaau

SEQ ID NO: 1223871 - RNA, 19 nt, Artificial Sequence
  Description of Artificial Sequence: Synthetic oligonucleotide
  Antisense strand to SEQ ID NO: 1223870
auucuuggaggacagauca

SEQ ID NO: 1223872 - RNA, 19 nt, Artificial Sequence
  Description of Artificial Sequence: Synthetic oligonucleotide
  Sense strand starting at position 3273 of SEQ ID NO: 917292
cauuguugcucauuuggua

SEQ ID NO: 1223873 - RNA, 19 nt, Artificial Sequence
  Description of Artificial Sequence: Synthetic oligonucleotide
  Antisense strand to SEQ ID NO: 1223872
uaccaaaugagcaacaaug

SEQ ID NO: 1223874 - RNA, 19 nt, Artificial Sequence
  Description of Artificial Sequence: Synthetic oligonucleotide
  Sense strand starting at position 3282 of SEQ ID NO: 917292
ucauuugguaggcgcuaaa

SEQ ID NO: 1223875 - RNA, 19 nt, Artificial Sequence
  Description of Artificial Sequence: Synthetic oligonucleotide
  Antisense strand to SEQ ID NO: 1223874
uuuagcgccuaccaaauga

SEQ ID NO: 1223876 - RNA, 19 nt, Artificial Sequence
  Description of Artificial Sequence: Synthetic oligonucleotide
  Sense strand starting at position 3285 of SEQ ID NO: 917292
uuugguaggcgcuaaagaa

SEQ ID NO: 1223877 - RNA, 19 nt, Artificial Sequence
  Description of Artificial Sequence: Synthetic oligonucleotide
  Antisense strand to SEQ ID NO: 1223876
uucuuuagcgccuaccaaa

SEQ ID NO: 1223878 - RNA, 19 nt, Artificial Sequence
  Description of Artificial Sequence: Synthetic oligonucleotide
  Sense strand starting at position 3317 of SEQ ID NO: 917292
aucucagauagcugggaau

SEQ ID NO: 1223879 - RNA, 19 nt, Artificial Sequence
  Description of Artificial Sequence: Synthetic oligonucleotide
  Antisense strand to SEQ ID NO: 1223878
auucccagcuaucugagau

SEQ ID NO: 1223880 - RNA, 19 nt, Artificial Sequence
  Description of Artificial Sequence: Synthetic oligonucleotide
  Sense strand starting at position 3362 of SEQ ID NO: 917292
guucuugugcuugacuaga

SEQ ID NO: 1223881 - RNA, 19 nt, Artificial Sequence
  Description of Artificial Sequence: Synthetic oligonucleotide
  Antisense strand to SEQ ID NO: 1223880
ucuagucaagcacaagaac

SEQ ID NO: 1223882 - RNA, 19 nt, Artificial Sequence
  Description of Artificial Sequence: Synthetic oligonucleotide
  Sense strand starting at position 3364 of SEQ ID NO: 917292
ucuugugcuugacuagaga

SEQ ID NO: 1223883 - RNA, 19 nt, Artificial Sequence
  Description of Artificial Sequence: Synthetic oligonucleotide
  Antisense strand to SEQ ID NO: 1223882
ucucuagucaagcacaaga

SEQ ID NO: 1223884 - RNA, 19 nt, Artificial Sequence
  Description of Artificial Sequence: Synthetic oligonucleotide
  Sense strand starting at position 3459 of SEQ ID NO: 917292
uuggucauuuguuaaagag

SEQ ID NO: 1223885 - RNA, 19 nt, Artificial Sequence
  Description of Artificial Sequence: Synthetic oligonucleotide
  Antisense strand to SEQ ID NO: 1223884
cucuuuaacaaaugaccaa

SEQ ID NO: 1223886 - RNA, 19 nt, Artificial Sequence
  Description of Artificial Sequence: Synthetic oligonucleotide
  Sense strand starting at position 3542 of SEQ ID NO: 917292
auaucauuagauuggugca

SEQ ID NO: 1223887 - RNA, 19 nt, Artificial Sequence
  Description of Artificial Sequence: Synthetic oligonucleotide
  Antisense strand to SEQ ID NO: 1223886
ugcaccaaucuaaugauau

SEQ ID NO: 1223888 - RNA, 19 nt, Artificial Sequence
  Description of Artificial Sequence: Synthetic oligonucleotide
  Sense strand starting at position 3544 of SEQ ID NO: 917292
aucauuagauuggugcaaa

SEQ ID NO: 1223889 - RNA, 19 nt, Artificial Sequence
  Description of Artificial Sequence: Synthetic oligonucleotide
  Antisense strand to SEQ ID NO: 1223888
uuugcaccaaucuaaugau

SEQ ID NO: 1223890 - RNA, 19 nt, Artificial Sequence
  Description of Artificial Sequence: Synthetic oligonucleotide
  Sense strand starting at position 3759 of SEQ ID NO: 917292
ugaaguugucagggaagag

SEQ ID NO: 1223891 - RNA, 19 nt, Artificial Sequence
  Description of Artificial Sequence: Synthetic oligonucleotide
  Antisense strand to SEQ ID NO: 1223890
cucuucccugacaacuuca

SEQ ID NO: 1223892 - RNA, 19 nt, Artificial Sequence
  Description of Artificial Sequence: Synthetic oligonucleotide
  Sense strand starting at position 3771 of SEQ ID NO: 917292
ggaagagaguuuguuauau

SEQ ID NO: 1223893 - RNA, 19 nt, Artificial Sequence
  Description of Artificial Sequence: Synthetic oligonucleotide
  Antisense strand to SEQ ID NO: 1223892
auauaacaaacucucuucc

SEQ ID NO: 1223894 - RNA, 19 nt, Artificial Sequence
  Description of Artificial Sequence: Synthetic oligonucleotide
  Sense strand starting at position 3886 of SEQ ID NO: 917292
cagucuuggcugcaaauca

SEQ ID NO: 1223895 - RNA, 19 nt, Artificial Sequence
  Description of Artificial Sequence: Synthetic oligonucleotide
  Antisense strand to SEQ ID NO: 1223894
ugauuugcagccaagacug

SEQ ID NO: 1223896 - RNA, 19 nt, Artificial Sequence
  Description of Artificial Sequence: Synthetic oligonucleotide
  Sense strand starting at position 3971 of SEQ ID NO: 917292
ucagaaucucuaggaguua

SEQ ID NO: 1223897 - RNA, 19 nt, Artificial Sequence
  Description of Artificial Sequence: Synthetic oligonucleotide
  Antisense strand to SEQ ID NO: 1223896
uaacuccuagagauucuga

SEQ ID NO: 1223898 - RNA, 19 nt, Artificial Sequence
  Description of Artificial Sequence: Synthetic oligonucleotide
  Sense strand starting at position 3982 of SEQ ID NO: 917293
aggaguuaggccugagcau

SEQ ID NO: 1223899 - RNA, 19 nt, Artificial Sequence
  Description of Artificial Sequence: Synthetic oligonucleotide
  Antisense strand to SEQ ID NO: 1223898
augcucaggccuaacuccu

SEQ ID NO: 1223900 - RNA, 19 nt, Artificial Sequence
  Description of Artificial Sequence: Synthetic oligonucleotide
  Sense strand starting at position 342 of SEQ ID NO: 917293
uugugagcaucuguaacaa

SEQ ID NO: 1223901 - RNA, 19 nt, Artificial Sequence
  Description of Artificial Sequence: Synthetic oligonucleotide
  Antisense strand to SEQ ID NO: 1223900
uuguuacagaugcucacaa

SEQ ID NO: 1223902 - RNA, 19 nt, Artificial Sequence
  Description of Artificial Sequence: Synthetic oligonucleotide
  Sense strand starting at position 372 of SEQ ID NO: 917293
guugcugugacaugacaaa

SEQ ID NO: 1223903 - RNA, 19 nt, Artificial Sequence
  Description of Artificial Sequence: Synthetic oligonucleotide
  Antisense strand to SEQ ID NO: 1223902
uuugucaugucacagcaac

SEQ ID NO: 1223904 - RNA, 19 nt, Artificial Sequence
  Description of Artificial Sequence: Synthetic oligonucleotide
  Sense strand starting at position 603 of SEQ ID NO: 917293
uaaagaagucaaggcagau

SEQ ID NO: 1223905 - RNA, 19 nt, Artificial Sequence
  Description of Artificial Sequence: Synthetic oligonucleotide
  Antisense strand to SEQ ID NO: 1223904
aucugccuugacuucuuua

SEQ ID NO: 1223906 - RNA, 19 nt, Artificial Sequence
  Description of Artificial Sequence: Synthetic oligonucleotide
  Sense strand starting at position 615 of SEQ ID NO: 917293
ggcagauguguacaggagu

SEQ ID NO: 1223907 - RNA, 19 nt, Artificial Sequence
  Description of Artificial Sequence: Synthetic oligonucleotide
  Antisense strand to SEQ ID NO: 1223906
acuccuguacacaucugcc

SEQ ID NO: 1223908 - RNA, 19 nt, Artificial Sequence
  Description of Artificial Sequence: Synthetic oligonucleotide
  Sense strand starting at position 618 of SEQ ID NO: 917293
agauguguacaggagugua

SEQ ID NO: 1223909 - RNA, 19 nt, Artificial Sequence
  Description of Artificial Sequence: Synthetic oligonucleotide
  Antisense strand to SEQ ID NO: 1223908
uacacuccuguacacaucu

SEQ ID NO: 1223910 - RNA, 19 nt, Artificial Sequence
  Description of Artificial Sequence: Synthetic oligonucleotide
  Sense strand starting at position 621 of SEQ ID NO: 917293
uguguacaggaguguauuu

SEQ ID NO: 1223911 - RNA, 19 nt, Artificial Sequence
  Description of Artificial Sequence: Synthetic oligonucleotide
  Antisense strand to SEQ ID NO: 1223910
aaauacacuccuguacaca

SEQ ID NO: 1223912 - RNA, 19 nt, Artificial Sequence
  Description of Artificial Sequence: Synthetic oligonucleotide
  Sense strand starting at position 822 of SEQ ID NO: 917293
gacaauaaaugagaacgaa

SEQ ID NO: 1223913 - RNA, 19 nt, Artificial Sequence
  Description of Artificial Sequence: Synthetic oligonucleotide
  Antisense strand to SEQ ID NO: 1223912
uucguucucauuuauuguc

SEQ ID NO: 1223914 - RNA, 19 nt, Artificial Sequence
  Description of Artificial Sequence: Synthetic oligonucleotide
  Sense strand starting at position 878 of SEQ ID NO: 917293
aucugagcucuauaaacug

SEQ ID NO: 1223915 - RNA, 19 nt, Artificial Sequence
  Description of Artificial Sequence: Synthetic oligonucleotide
  Antisense strand to SEQ ID NO: 1223914
caguuuauagagcucagau

SEQ ID NO: 1223916 - RNA, 19 nt, Artificial Sequence
  Description of Artificial Sequence: Synthetic oligonucleotide
  Sense strand starting at position 886 of SEQ ID NO: 917293
ucuauaaacugacagaaga

SEQ ID NO: 1223917 - RNA, 19 nt, Artificial Sequence
  Description of Artificial Sequence: Synthetic oligonucleotide
  Antisense strand to SEQ ID NO: 1223916
ucuucugucaguuuauaga

SEQ ID NO: 1223918 - RNA, 19 nt, Artificial Sequence
  Description of Artificial Sequence: Synthetic oligonucleotide
  Sense strand starting at position 1186 of SEQ ID NO: 917293
cucccuguccugggugaaa

SEQ ID NO: 1223919 - RNA, 19 nt, Artificial Sequence
  Description of Artificial Sequence: Synthetic oligonucleotide
  Antisense strand to SEQ ID NO: 1223918
uuucacccaggacagggag

SEQ ID NO: 1223920 - RNA, 19 nt, Artificial Sequence
  Description of Artificial Sequence: Synthetic oligonucleotide
  Sense strand starting at position 1188 of SEQ ID NO: 917293
cccuguccugggugaaauc

SEQ ID NO: 1223921 - RNA, 19 nt, Artificial Sequence
  Description of Artificial Sequence: Synthetic oligonucleotide
  Antisense strand to SEQ ID NO: 1223920
gauuucacccaggacaggg

SEQ ID NO: 1223922 - RNA, 19 nt, Artificial Sequence
  Description of Artificial Sequence: Synthetic oligonucleotide
  Sense strand starting at position 1197 of SEQ ID NO: 917293
gggugaaauccauguuggg

SEQ ID NO: 1223923 - RNA, 19 nt, Artificial Sequence
  Description of Artificial Sequence: Synthetic oligonucleotide
  Antisense strand to SEQ ID NO: 1223922
cccaacauggauuucaccc

SEQ ID NO: 1223924 - RNA, 19 nt, Artificial Sequence
  Description of Artificial Sequence: Synthetic oligonucleotide
  Sense strand starting at position 1211 of SEQ ID NO: 917293
uugggaagagcuugaucua

SEQ ID NO: 1223925 - RNA, 19 nt, Artificial Sequence
  Description of Artificial Sequence: Synthetic oligonucleotide
  Antisense strand to SEQ ID NO: 1223924
uagaucaagcucuucccaa

SEQ ID NO: 1223926 - RNA, 19 nt, Artificial Sequence
  Description of Artificial Sequence: Synthetic oligonucleotide
  Sense strand starting at position 1214 of SEQ ID NO: 917293
ggaagagcuugaucuaggu

SEQ ID NO: 1223927 - RNA, 19 nt, Artificial Sequence
  Description of Artificial Sequence: Synthetic oligonucleotide
  Antisense strand to SEQ ID NO: 1223926
accuagaucaagcucuucc

SEQ ID NO: 1223928 - RNA, 19 nt, Artificial Sequence
  Description of Artificial Sequence: Synthetic oligonucleotide
  Sense strand starting at position 1307 of SEQ ID NO: 917293
ucaacuugccaggaaacuu

SEQ ID NO: 1223929 - RNA, 19 nt, Artificial Sequence
  Description of Artificial Sequence: Synthetic oligonucleotide
  Antisense strand to SEQ ID NO: 1223928
aaguuuccuggcaaguuga

SEQ ID NO: 1223930 - RNA, 19 nt, Artificial Sequence
  Description of Artificial Sequence: Synthetic oligonucleotide
  Sense strand starting at position 2189 of SEQ ID NO: 917293
aagaguaguggcgggagaa

SEQ ID NO: 1223931 - RNA, 19 nt, Artificial Sequence
  Description of Artificial Sequence: Synthetic oligonucleotide
  Antisense strand to SEQ ID NO: 1223930
uucucccgccacuacucuu

SEQ ID NO: 1223932 - RNA, 19 nt, Artificial Sequence
  Description of Artificial Sequence: Synthetic oligonucleotide
  Sense strand starting at position 2190 of SEQ ID NO: 917293
agaguaguggcgggagaaa

SEQ ID NO: 1223933 - RNA, 19 nt, Artificial Sequence
  Description of Artificial Sequence: Synthetic oligonucleotide
  Antisense strand to SEQ ID NO: 1223932
uuucucccgccacuacucu

SEQ ID NO: 1223934 - RNA, 19 nt, Artificial Sequence
  Description of Artificial Sequence: Synthetic oligonucleotide
  Sense strand starting at position 2430 of SEQ ID NO: 917293
gcccaaacucuugaguggu

SEQ ID NO: 1223935 - RNA, 19 nt, Artificial Sequence
  Description of Artificial Sequence: Synthetic oligonucleotide
  Antisense strand to SEQ ID NO: 1223934
accacucaagaguuugggc

SEQ ID NO: 1223936 - RNA, 19 nt, Artificial Sequence
  Description of Artificial Sequence: Synthetic oligonucleotide
  Sense strand starting at position 2432 of SEQ ID NO: 917293
ccaaacucuugagugguuu

SEQ ID NO: 1223937 - RNA, 19 nt, Artificial Sequence
  Description of Artificial Sequence: Synthetic oligonucleotide
  Antisense strand to SEQ ID NO: 1223936
aaaccacucaagaguuugg

SEQ ID NO: 1223938 - RNA, 19 nt, Artificial Sequence
  Description of Artificial Sequence: Synthetic oligonucleotide
  Sense strand starting at position 2577 of SEQ ID NO: 917293
uacagaaaguuccugucga

SEQ ID NO: 1223939 - RNA, 19 nt, Artificial Sequence
  Description of Artificial Sequence: Synthetic oligonucleotide
  Antisense strand to SEQ ID NO: 1223938
ucgacaggaacuuucugua

SEQ ID NO: 1223940 - RNA, 19 nt, Artificial Sequence
  Description of Artificial Sequence: Synthetic oligonucleotide
  Sense strand starting at position 2929 of SEQ ID NO: 917293
uuggcuugucaucauauag

SEQ ID NO: 1223941 - RNA, 19 nt, Artificial Sequence
  Description of Artificial Sequence: Synthetic oligonucleotide
  Antisense strand to SEQ ID NO: 1223940
cuauaugaugacaagccaa

SEQ ID NO: 1223942 - RNA, 19 nt, Artificial Sequence
  Description of Artificial Sequence: Synthetic oligonucleotide
  Sense strand starting at position 2936 of SEQ ID NO: 917293
gucaucauauaggauuuau

SEQ ID NO: 1223943 - RNA, 19 nt, Artificial Sequence
  Description of Artificial Sequence: Synthetic oligonucleotide
  Antisense strand to SEQ ID NO: 1223942
auaaauccuauaugaugac

SEQ ID NO: 1223944 - RNA, 19 nt, Artificial Sequence
  Description of Artificial Sequence: Synthetic oligonucleotide
  Sense strand starting at position 3309 of SEQ ID NO: 917293
augacuucugucuggauca

SEQ ID NO: 1223945 - RNA, 19 nt, Artificial Sequence
  Description of Artificial Sequence: Synthetic oligonucleotide
  Antisense strand to SEQ ID NO: 1223944
ugauccagacagaagucau

SEQ ID NO: 1223946 - RNA, 19 nt, Artificial Sequence
  Description of Artificial Sequence: Synthetic oligonucleotide
  Sense strand starting at position 3319 of SEQ ID NO: 917293
ucuggaucaggcuggaaua

SEQ ID NO: 1223947 - RNA, 19 nt, Artificial Sequence
  Description of Artificial Sequence: Synthetic oligonucleotide
  Antisense strand to SEQ ID NO: 1223946
uauuccagccugauccaga

SEQ ID NO: 1223948 - RNA, 19 nt, Artificial Sequence
  Description of Artificial Sequence: Synthetic oligonucleotide
  Sense strand starting at position 3355 of SEQ ID NO: 917293
auugcuuuccuuggauuga

SEQ ID NO: 1223949 - RNA, 19 nt, Artificial Sequence
  Description of Artificial Sequence: Synthetic oligonucleotide
  Antisense strand to SEQ ID NO: 1223948
ucaauccaaggaaagcaau

SEQ ID NO: 1223950 - RNA, 19 nt, Artificial Sequence
  Description of Artificial Sequence: Synthetic oligonucleotide
  Sense strand starting at position 3401 of SEQ ID NO: 917293
ucucuugauguccaauguu

SEQ ID NO: 1223951 - RNA, 19 nt, Artificial Sequence
  Description of Artificial Sequence: Synthetic oligonucleotide
  Antisense strand to SEQ ID NO: 1223950
aacauuggacaucaagaga

SEQ ID NO: 1223952 - RNA, 19 nt, Artificial Sequence
  Description of Artificial Sequence: Synthetic oligonucleotide
  Sense strand starting at position 3437 of SEQ ID NO: 917293
auguuuaaaccauagcguu

SEQ ID NO: 1223953 - RNA, 19 nt, Artificial Sequence
  Description of Artificial Sequence: Synthetic oligonucleotide
  Antisense strand to SEQ ID NO: 1223952
aacgcuaugguuuaaacau

SEQ ID NO: 1223954 - RNA, 19 nt, Artificial Sequence
  Description of Artificial Sequence: Synthetic oligonucleotide
  Sense strand starting at position 3444 of SEQ ID NO: 917293
aaccauagcguuuguauuu

SEQ ID NO: 1223955 - RNA, 19 nt, Artificial Sequence
  Description of Artificial Sequence: Synthetic oligonucleotide
  Antisense strand to SEQ ID NO: 1223954
aaauacaaacgcuaugguu

SEQ ID NO: 1223956 - RNA, 19 nt, Artificial Sequence
  Description of Artificial Sequence: Synthetic oligonucleotide
  Sense strand starting at position 3462 of SEQ ID NO: 917293
uuaaguacacuaugaugua

SEQ ID NO: 1223957 - RNA, 19 nt, Artificial Sequence
  Description of Artificial Sequence: Synthetic oligonucleotide
  Antisense strand to SEQ ID NO: 1223956
uacaucauaguguacuuaa

SEQ ID NO: 1223958 - RNA, 19 nt, Artificial Sequence
  Description of Artificial Sequence: Synthetic oligonucleotide
  Sense strand starting at position 3479 of SEQ ID NO: 917293
uauaguuugcaguauugac

SEQ ID NO: 1223959 - RNA, 19 nt, Artificial Sequence
  Description of Artificial Sequence: Synthetic oligonucleotide
  Antisense strand to SEQ ID NO: 1223958
gucaauacugcaaacuaua

SEQ ID NO: 1223960 - RNA, 19 nt, Artificial Sequence
  Description of Artificial Sequence: Synthetic oligonucleotide
  Sense strand starting at position 3487 of SEQ ID NO: 917293
gcaguauugacugacacgu

SEQ ID NO: 1223961 - RNA, 19 nt, Artificial Sequence
  Description of Artificial Sequence: Synthetic oligonucleotide
  Antisense strand to SEQ ID NO: 1223960
acgugucagucaauacugc

SEQ ID NO: 1223962 - RNA, 19 nt, Artificial Sequence
  Description of Artificial Sequence: Synthetic oligonucleotide
  Sense strand starting at position 3548 of SEQ ID NO: 917293
aguaguacugaagggaauu

SEQ ID NO: 1223963 - RNA, 19 nt, Artificial Sequence
  Description of Artificial Sequence: Synthetic oligonucleotide
  Antisense strand to SEQ ID NO: 1223962
aauucccuucaguacuacu

SEQ ID NO: 1223964 - RNA, 19 nt, Artificial Sequence
  Description of Artificial Sequence: Synthetic oligonucleotide
  Sense strand starting at position 3560 of SEQ ID NO: 917293
gggaauugucucgaggcaa

SEQ ID NO: 1223965 - RNA, 19 nt, Artificial Sequence
  Description of Artificial Sequence: Synthetic oligonucleotide
  Antisense strand to SEQ ID NO: 1223964
uugccucgagacaauuccc

SEQ ID NO: 1223966 - RNA, 19 nt, Artificial Sequence
  Description of Artificial Sequence: Synthetic oligonucleotide
  Sense strand starting at position 3641 of SEQ ID NO: 917293
gacauaaacguguguggac

SEQ ID NO: 1223967 - RNA, 19 nt, Artificial Sequence
  Description of Artificial Sequence: Synthetic oligonucleotide
  Antisense strand to SEQ ID NO: 1223966
guccacacacguuuauguc

SEQ ID NO: 1223968 - RNA, 19 nt, Artificial Sequence
  Description of Artificial Sequence: Synthetic oligonucleotide
  Sense strand starting at position 3797 of SEQ ID NO: 917293
ucaggagaaugucucaacu

SEQ ID NO: 1223969 - RNA, 19 nt, Artificial Sequence
  Description of Artificial Sequence: Synthetic oligonucleotide
  Antisense strand to SEQ ID NO: 1223968
aguugagacauucuccuga

SEQ ID NO: 1223970 - RNA, 19 nt, Artificial Sequence
  Description of Artificial Sequence: Synthetic oligonucleotide
  Sense strand starting at position 3866 of SEQ ID NO: 917293
agacaauuacgcgaaacuc

SEQ ID NO: 1223971 - RNA, 19 nt, Artificial Sequence
  Description of Artificial Sequence: Synthetic oligonucleotide
  Antisense strand to SEQ ID NO: 1223970
gaguuucgcguaauugucu

SEQ ID NO: 1223972 - RNA, 19 nt, Artificial Sequence
  Description of Artificial Sequence: Synthetic oligonucleotide
  Sense strand starting at position 3875 of SEQ ID NO: 917293
cgcgaaacucuggagguuu

SEQ ID NO: 1223973 - RNA, 19 nt, Artificial Sequence
  Description of Artificial Sequence: Synthetic oligonucleotide
  Antisense strand to SEQ ID NO: 1223972
aaaccuccagaguuucgcg

SEQ ID NO: 1223974 - RNA, 19 nt, Artificial Sequence
  Description of Artificial Sequence: Synthetic oligonucleotide
  Sense strand starting at position 3877 of SEQ ID NO: 917293
cgaaacucuggagguuuaa

SEQ ID NO: 1223975 - RNA, 19 nt, Artificial Sequence
  Description of Artificial Sequence: Synthetic oligonucleotide
  Antisense strand to SEQ ID NO: 1223974
uuaaaccuccagaguuucg

SEQ ID NO: 1223976 - RNA, 19 nt, Artificial Sequence
  Description of Artificial Sequence: Synthetic oligonucleotide
  Sense strand starting at position 3950 of SEQ ID NO: 917293
gaaaguaggagagguguuu

SEQ ID NO: 1223977 - RNA, 19 nt, Artificial Sequence
  Description of Artificial Sequence: Synthetic oligonucleotide
  Antisense strand to SEQ ID NO: 1223976
aaacaccucuccuacuuuc

SEQ ID NO: 1223978 - RNA, 19 nt, Artificial Sequence
  Description of Artificial Sequence: Synthetic oligonucleotide
  Sense strand starting at position 3956 of SEQ ID NO: 917294
aggagagguguuugaacaa

SEQ ID NO: 1223979 - RNA, 19 nt, Artificial Sequence
  Description of Artificial Sequence: Synthetic oligonucleotide
  Antisense strand to SEQ ID NO: 1223978
uuguucaaacaccucuccu

SEQ ID NO: 1223980 - RNA, 19 nt, Artificial Sequence
  Description of Artificial Sequence: Synthetic oligonucleotide
  Sense strand starting at position 51 of SEQ ID NO: 917294
auccuagagaagcgugaaa

SEQ ID NO: 1223981 - RNA, 19 nt, Artificial Sequence
  Description of Artificial Sequence: Synthetic oligonucleotide
  Antisense strand to SEQ ID NO: 1223980
uuucacgcuucucuaggau

SEQ ID NO: 1223982 - RNA, 19 nt, Artificial Sequence
  Description of Artificial Sequence: Synthetic oligonucleotide
  Sense strand starting at position 686 of SEQ ID NO: 917294
gaaggaugugauggcaaga

SEQ ID NO: 1223983 - RNA, 19 nt, Artificial Sequence
  Description of Artificial Sequence: Synthetic oligonucleotide
  Antisense strand to SEQ ID NO: 1223982
ucuugccaucacauccuuc

SEQ ID NO: 1223984 - RNA, 19 nt, Artificial Sequence
  Description of Artificial Sequence: Synthetic oligonucleotide
  Sense strand starting at position 691 of SEQ ID NO: 917294
augugauggcaagauguga

SEQ ID NO: 1223985 - RNA, 19 nt, Artificial Sequence
  Description of Artificial Sequence: Synthetic oligonucleotide
  Antisense strand to SEQ ID NO: 1223984
ucacaucuugccaucacau

SEQ ID NO: 1223986 - RNA, 19 nt, Artificial Sequence
  Description of Artificial Sequence: Synthetic oligonucleotide
  Sense strand starting at position 695 of SEQ ID NO: 917294
gauggcaagaugugaauga

SEQ ID NO: 1223987 - RNA, 19 nt, Artificial Sequence
  Description of Artificial Sequence: Synthetic oligonucleotide
  Antisense strand to SEQ ID NO: 1223986
ucauucacaucuugccauc

SEQ ID NO: 1223988 - RNA, 19 nt, Artificial Sequence
  Description of Artificial Sequence: Synthetic oligonucleotide
  Sense strand starting at position 699 of SEQ ID NO: 917294
gcaagaugugaaugauguc

SEQ ID NO: 1223989 - RNA, 19 nt, Artificial Sequence
  Description of Artificial Sequence: Synthetic oligonucleotide
  Antisense strand to SEQ ID NO: 1223988
gacaucauucacaucuugc

SEQ ID NO: 1223990 - RNA, 19 nt, Artificial Sequence
  Description of Artificial Sequence: Synthetic oligonucleotide
  Sense strand starting at position 762 of SEQ ID NO: 917294
gagcuuacaucagaagaga

SEQ ID NO: 1223991 - RNA, 19 nt, Artificial Sequence
  Description of Artificial Sequence: Synthetic oligonucleotide
  Antisense strand to SEQ ID NO: 1223990
ucucuucugauguaagcuc

SEQ ID NO: 1223992 - RNA, 19 nt, Artificial Sequence
  Description of Artificial Sequence: Synthetic oligonucleotide
  Sense strand starting at position 792 of SEQ ID NO: 917294
cccacacgucgcuaaacua

SEQ ID NO: 1223993 - RNA, 19 nt, Artificial Sequence
  Description of Artificial Sequence: Synthetic oligonucleotide
  Antisense strand to SEQ ID NO: 1223992
uaguuuagcgacguguggg

SEQ ID NO: 1223994 - RNA, 19 nt, Artificial Sequence
  Description of Artificial Sequence: Synthetic oligonucleotide
  Sense strand starting at position 815 of SEQ ID NO: 917294
acgggaauggcguguuaug

SEQ ID NO: 1223995 - RNA, 19 nt, Artificial Sequence
  Description of Artificial Sequence: Synthetic oligonucleotide
  Antisense strand to SEQ ID NO: 1223994
cauaacacgccauucccgu

SEQ ID NO: 1223996 - RNA, 19 nt, Artificial Sequence
  Description of Artificial Sequence: Synthetic oligonucleotide
  Sense strand starting at position 1198 of SEQ ID NO: 917294
gacugauuggcccguggga

SEQ ID NO: 1223997 - RNA, 19 nt, Artificial Sequence
  Description of Artificial Sequence: Synthetic oligonucleotide
  Antisense strand to SEQ ID NO: 1223996
ucccacgggccaaucaguc

SEQ ID NO: 1223998 - RNA, 19 nt, Artificial Sequence
  Description of Artificial Sequence: Synthetic oligonucleotide
  Sense strand starting at position 1965 of SEQ ID NO: 917294
gugggacauucgcuacauu

SEQ ID NO: 1223999 - RNA, 19 nt, Artificial Sequence
  Description of Artificial Sequence: Synthetic oligonucleotide
  Antisense strand to SEQ ID NO: 1223998
aauguagcgaaugucccac

SEQ ID NO: 1224000 - RNA, 19 nt, Artificial Sequence
  Description of Artificial Sequence: Synthetic oligonucleotide
  Sense strand starting at position 1968 of SEQ ID NO: 917294
ggacauucgcuacauuguu

SEQ ID NO: 1224001 - RNA, 19 nt, Artificial Sequence
  Description of Artificial Sequence: Synthetic oligonucleotide
  Antisense strand to SEQ ID NO: 1224000
aacaauguagcgaaugucc

SEQ ID NO: 1224002 - RNA, 19 nt, Artificial Sequence
  Description of Artificial Sequence: Synthetic oligonucleotide
  Sense strand starting at position 2236 of SEQ ID NO: 917294
ucgacugcauuuguauuaa

SEQ ID NO: 1224003 - RNA, 19 nt, Artificial Sequence
  Description of Artificial Sequence: Synthetic oligonucleotide
  Antisense strand to SEQ ID NO: 1224002
uuaauacaaaugcagucga

SEQ ID NO: 1224004 - RNA, 19 nt, Artificial Sequence
  Description of Artificial Sequence: Synthetic oligonucleotide
  Sense strand starting at position 2269 of SEQ ID NO: 917294
cguuaaagccacuauucuu

SEQ ID NO: 1224005 - RNA, 19 nt, Artificial Sequence
  Description of Artificial Sequence: Synthetic oligonucleotide
  Antisense strand to SEQ ID NO: 1224004
aagaauaguggcuuuaacg

SEQ ID NO: 1224006 - RNA, 19 nt, Artificial Sequence
  Description of Artificial Sequence: Synthetic oligonucleotide
  Sense strand starting at position 2296 of SEQ ID NO: 917294
cauaccagucuuggugaaa

SEQ ID NO: 1224007 - RNA, 19 nt, Artificial Sequence
  Description of Artificial Sequence: Synthetic oligonucleotide
  Antisense strand to SEQ ID NO: 1224006
uuucaccaagacugguaug

SEQ ID NO: 1224008 - RNA, 19 nt, Artificial Sequence
  Description of Artificial Sequence: Synthetic oligonucleotide
  Sense strand starting at position 2297 of SEQ ID NO: 917294
auaccagucuuggugaaag

SEQ ID NO: 1224009 - RNA, 19 nt, Artificial Sequence
  Description of Artificial Sequence: Synthetic oligonucleotide
  Antisense strand to SEQ ID NO: 1224008
cuuucaccaagacugguau

SEQ ID NO: 1224010 - RNA, 19 nt, Artificial Sequence
  Description of Artificial Sequence: Synthetic oligonucleotide
  Sense strand starting at position 2830 of SEQ ID NO: 917294
ugguguagggaauaguaua

SEQ ID NO: 1224011 - RNA, 19 nt, Artificial Sequence
  Description of Artificial Sequence: Synthetic oligonucleotide
  Antisense strand to SEQ ID NO: 1224010
uauacuauucccuacacca

SEQ ID NO: 1224012 - RNA, 19 nt, Artificial Sequence
  Description of Artificial Sequence: Synthetic oligonucleotide
  Sense strand starting at position 2843 of SEQ ID NO: 917294
aguauaguaccguauauac

SEQ ID NO: 1224013 - RNA, 19 nt, Artificial Sequence
  Description of Artificial Sequence: Synthetic oligonucleotide
  Antisense strand to SEQ ID NO: 1224012
guauauacgguacuauacu

SEQ ID NO: 1224014 - RNA, 19 nt, Artificial Sequence
  Description of Artificial Sequence: Synthetic oligonucleotide
  Sense strand starting at position 2853 of SEQ ID NO: 917294
cguauauaccagcaaguga

SEQ ID NO: 1224015 - RNA, 19 nt, Artificial Sequence
  Description of Artificial Sequence: Synthetic oligonucleotide
  Antisense strand to SEQ ID NO: 1224014
ucacuugcugguauauacg

SEQ ID NO: 1224016 - RNA, 19 nt, Artificial Sequence
  Description of Artificial Sequence: Synthetic oligonucleotide
  Sense strand starting at position 3027 of SEQ ID NO: 917294
ccaccuauaucuguggcaa

SEQ ID NO: 1224017 - RNA, 19 nt, Artificial Sequence
  Description of Artificial Sequence: Synthetic oligonucleotide
  Antisense strand to SEQ ID NO: 1224016
uugccacagauauaggugg

SEQ ID NO: 1224018 - RNA, 19 nt, Artificial Sequence
  Description of Artificial Sequence: Synthetic oligonucleotide
  Sense strand starting at position 3028 of SEQ ID NO: 917294
caccuauaucuguggcaag

SEQ ID NO: 1224019 - RNA, 19 nt, Artificial Sequence
  Description of Artificial Sequence: Synthetic oligonucleotide
  Antisense strand to SEQ ID NO: 1224018
cuugccacagauauaggug

SEQ ID NO: 1224020 - RNA, 19 nt, Artificial Sequence
  Description of Artificial Sequence: Synthetic oligonucleotide
  Sense strand starting at position 3045 of SEQ ID NO: 917294
agugaugcugagggucaau

SEQ ID NO: 1224021 - RNA, 19 nt, Artificial Sequence
  Description of Artificial Sequence: Synthetic oligonucleotide
  Antisense strand to SEQ ID NO: 1224020
auugacccucagcaucacu

SEQ ID NO: 1224022 - RNA, 19 nt, Artificial Sequence
  Description of Artificial Sequence: Synthetic oligonucleotide
  Sense strand starting at position 3147 of SEQ ID NO: 917294
aguaaaggucauuaucugu

SEQ ID NO: 1224023 - RNA, 19 nt, Artificial Sequence
  Description of Artificial Sequence: Synthetic oligonucleotide
  Antisense strand to SEQ ID NO: 1224022
acagauaaugaccuuuacu

SEQ ID NO: 1224024 - RNA, 19 nt, Artificial Sequence
  Description of Artificial Sequence: Synthetic oligonucleotide
  Sense strand starting at position 3152 of SEQ ID NO: 917294
aggucauuaucugugcacu

SEQ ID NO: 1224025 - RNA, 19 nt, Artificial Sequence
  Description of Artificial Sequence: Synthetic oligonucleotide
  Antisense strand to SEQ ID NO: 1224024
agugcacagauaaugaccu

SEQ ID NO: 1224026 - RNA, 19 nt, Artificial Sequence
  Description of Artificial Sequence: Synthetic oligonucleotide
  Sense strand starting at position 3153 of SEQ ID NO: 917294
ggucauuaucugugcacua

SEQ ID NO: 1224027 - RNA, 19 nt, Artificial Sequence
  Description of Artificial Sequence: Synthetic oligonucleotide
  Antisense strand to SEQ ID NO: 1224026
uagugcacagauaaugacc

SEQ ID NO: 1224028 - RNA, 19 nt, Artificial Sequence
  Description of Artificial Sequence: Synthetic oligonucleotide
  Sense strand starting at position 3154 of SEQ ID NO: 917294
gucauuaucugugcacuau

SEQ ID NO: 1224029 - RNA, 19 nt, Artificial Sequence
  Description of Artificial Sequence: Synthetic oligonucleotide
  Antisense strand to SEQ ID NO: 1224028
auagugcacagauaaugac

SEQ ID NO: 1224030 - RNA, 19 nt, Artificial Sequence
  Description of Artificial Sequence: Synthetic oligonucleotide
  Sense strand starting at position 3155 of SEQ ID NO: 917294
ucauuaucugugcacuauu

SEQ ID NO: 1224031 - RNA, 19 nt, Artificial Sequence
  Description of Artificial Sequence: Synthetic oligonucleotide
  Antisense strand to SEQ ID NO: 1224030
aauagugcacagauaauga

SEQ ID NO: 1224032 - RNA, 19 nt, Artificial Sequence
  Description of Artificial Sequence: Synthetic oligonucleotide
  Sense strand starting at position 3246 of SEQ ID NO: 917294
ucagcucuuccagggaauc

SEQ ID NO: 1224033 - RNA, 19 nt, Artificial Sequence
  Description of Artificial Sequence: Synthetic oligonucleotide
  Antisense strand to SEQ ID NO: 1224032
gauucccuggaagagcuga

SEQ ID NO: 1224034 - RNA, 19 nt, Artificial Sequence
  Description of Artificial Sequence: Synthetic oligonucleotide
  Sense strand starting at position 3257 of SEQ ID NO: 917294
agggaaucuucucagaucu

SEQ ID NO: 1224035 - RNA, 19 nt, Artificial Sequence
  Description of Artificial Sequence: Synthetic oligonucleotide
  Antisense strand to SEQ ID NO: 1224034
agaucugagaagauucccu

SEQ ID NO: 1224036 - RNA, 19 nt, Artificial Sequence
  Description of Artificial Sequence: Synthetic oligonucleotide
  Sense strand starting at position 3288 of SEQ ID NO: 917294
uucuuugggcucugauaau

SEQ ID NO: 1224037 - RNA, 19 nt, Artificial Sequence
  Description of Artificial Sequence: Synthetic oligonucleotide
  Antisense strand to SEQ ID NO: 1224036
auuaucagagcccaaagaa

SEQ ID NO: 1224038 - RNA, 19 nt, Artificial Sequence
  Description of Artificial Sequence: Synthetic oligonucleotide
  Sense strand starting at position 3364 of SEQ ID NO: 917294
caucgugcagcuuagaauu

SEQ ID NO: 1224039 - RNA, 19 nt, Artificial Sequence
  Description of Artificial Sequence: Synthetic oligonucleotide
  Antisense strand to SEQ ID NO: 1224038
aauucuaagcugcacgaug

SEQ ID NO: 1224040 - RNA, 19 nt, Artificial Sequence
  Description of Artificial Sequence: Synthetic oligonucleotide
  Sense strand starting at position 3393 of SEQ ID NO: 917294
uuucgauaguauccuguau

SEQ ID NO: 1224041 - RNA, 19 nt, Artificial Sequence
  Description of Artificial Sequence: Synthetic oligonucleotide
  Antisense strand to SEQ ID NO: 1224040
auacaggauacuaucgaaa

SEQ ID NO: 1224042 - RNA, 19 nt, Artificial Sequence
  Description of Artificial Sequence: Synthetic oligonucleotide
  Sense strand starting at position 3397 of SEQ ID NO: 917294
gauaguauccuguaugcua

SEQ ID NO: 1224043 - RNA, 19 nt, Artificial Sequence
  Description of Artificial Sequence: Synthetic oligonucleotide
  Antisense strand to SEQ ID NO: 1224042
uagcauacaggauacuauc

SEQ ID NO: 1224044 - RNA, 19 nt, Artificial Sequence
  Description of Artificial Sequence: Synthetic oligonucleotide
  Sense strand starting at position 3405 of SEQ ID NO: 917294
ccuguaugcuacccagaua

SEQ ID NO: 1224045 - RNA, 19 nt, Artificial Sequence
  Description of Artificial Sequence: Synthetic oligonucleotide
  Antisense strand to SEQ ID NO: 1224044
uaucuggguagcauacagg

SEQ ID NO: 1224046 - RNA, 19 nt, Artificial Sequence
  Description of Artificial Sequence: Synthetic oligonucleotide
  Sense strand starting at position 3408 of SEQ ID NO: 917294
guaugcuacccagauaucu

SEQ ID NO: 1224047 - RNA, 19 nt, Artificial Sequence
  Description of Artificial Sequence: Synthetic oligonucleotide
  Antisense strand to SEQ ID NO: 1224046
agauaucuggguagcauac

SEQ ID NO: 1224048 - RNA, 19 nt, Artificial Sequence
  Description of Artificial Sequence: Synthetic oligonucleotide
  Sense strand starting at position 3419 of SEQ ID NO: 917294
agauaucuugcacaguacu

SEQ ID NO: 1224049 - RNA, 19 nt, Artificial Sequence
  Description of Artificial Sequence: Synthetic oligonucleotide
  Antisense strand to SEQ ID NO: 1224048
aguacugugcaagauaucu

SEQ ID NO: 1224050 - RNA, 19 nt, Artificial Sequence
  Description of Artificial Sequence: Synthetic oligonucleotide
  Sense strand starting at position 3457 of SEQ ID NO: 917294
agccaauauucugcaauug

SEQ ID NO: 1224051 - RNA, 19 nt, Artificial Sequence
  Description of Artificial Sequence: Synthetic oligonucleotide
  Antisense strand to SEQ ID NO: 1224050
caauugcagaauauuggcu

SEQ ID NO: 1224052 - RNA, 19 nt, Artificial Sequence
  Description of Artificial Sequence: Synthetic oligonucleotide
  Sense strand starting at position 3458 of SEQ ID NO: 917294
gccaauauucugcaauuga

SEQ ID NO: 1224053 - RNA, 19 nt, Artificial Sequence
  Description of Artificial Sequence: Synthetic oligonucleotide
  Antisense strand to SEQ ID NO: 1224052
ucaauugcagaauauuggc

SEQ ID NO: 1224054 - RNA, 19 nt, Artificial Sequence
  Description of Artificial Sequence: Synthetic oligonucleotide
  Sense strand starting at position 3484 of SEQ ID NO: 917294
uggcauuaccuauguacuu

SEQ ID NO: 1224055 - RNA, 19 nt, Artificial Sequence
  Description of Artificial Sequence: Synthetic oligonucleotide
  Antisense strand to SEQ ID NO: 1224054
aaguacauagguaaugcca

SEQ ID NO: 1224056 - RNA, 19 nt, Artificial Sequence
  Description of Artificial Sequence: Synthetic oligonucleotide
  Sense strand starting at position 3485 of SEQ ID NO: 917294
ggcauuaccuauguacuuu

SEQ ID NO: 1224057 - RNA, 19 nt, Artificial Sequence
  Description of Artificial Sequence: Synthetic oligonucleotide
  Antisense strand to SEQ ID NO: 1224056
aaaguacauagguaaugcc

SEQ ID NO: 1224058 - RNA, 19 nt, Artificial Sequence
  Description of Artificial Sequence: Synthetic oligonucleotide
  Sense strand starting at position 3755 of SEQ ID NO: 917295
uuuguuguguguuuaaaga

SEQ ID NO: 1224059 - RNA, 19 nt, Artificial Sequence
  Description of Artificial Sequence: Synthetic oligonucleotide
  Antisense strand to SEQ ID NO: 1224058
ucuuuaaacacacaacaaa

SEQ ID NO: 1224060 - RNA, 19 nt, Artificial Sequence
  Description of Artificial Sequence: Synthetic oligonucleotide
  Sense strand starting at position 15 of SEQ ID NO: 917295
guuaaaugguacuuuaaca

SEQ ID NO: 1224061 - RNA, 19 nt, Artificial Sequence
  Description of Artificial Sequence: Synthetic oligonucleotide
  Antisense strand to SEQ ID NO: 1224060
uguuaaaguaccauuuaac

SEQ ID NO: 1224062 - RNA, 19 nt, Artificial Sequence
  Description of Artificial Sequence: Synthetic oligonucleotide
  Sense strand starting at position 319 of SEQ ID NO: 917295
agaggaauaucuuuguaac

SEQ ID NO: 1224063 - RNA, 19 nt, Artificial Sequence
  Description of Artificial Sequence: Synthetic oligonucleotide
  Antisense strand to SEQ ID NO: 1224062
guuacaaagauauuccucu

SEQ ID NO: 1224064 - RNA, 19 nt, Artificial Sequence
  Description of Artificial Sequence: Synthetic oligonucleotide
  Sense strand starting at position 320 of SEQ ID NO: 917295
gaggaauaucuuuguaaca

SEQ ID NO: 1224065 - RNA, 19 nt, Artificial Sequence
  Description of Artificial Sequence: Synthetic oligonucleotide
  Antisense strand to SEQ ID NO: 1224064
uguuacaaagauauuccuc

SEQ ID NO: 1224066 - RNA, 19 nt, Artificial Sequence
  Description of Artificial Sequence: Synthetic oligonucleotide
  Sense strand starting at position 596 of SEQ ID NO: 917295
aggugagaugugcaaagua

SEQ ID NO: 1224067 - RNA, 19 nt, Artificial Sequence
  Description of Artificial Sequence: Synthetic oligonucleotide
  Antisense strand to SEQ ID NO: 1224066
uacuuugcacaucucaccu

SEQ ID NO: 1224068 - RNA, 19 nt, Artificial Sequence
  Description of Artificial Sequence: Synthetic oligonucleotide
  Sense strand starting at position 871 of SEQ ID NO: 917295
cugauuaauguucgcauuu

SEQ ID NO: 1224069 - RNA, 19 nt, Artificial Sequence
  Description of Artificial Sequence: Synthetic oligonucleotide
  Antisense strand to SEQ ID NO: 1224068
aaaugcgaacauuaaucag

SEQ ID NO: 1224070 - RNA, 19 nt, Artificial Sequence
  Description of Artificial Sequence: Synthetic oligonucleotide
  Sense strand starting at position 872 of SEQ ID NO: 917295
ugauuaauguucgcauuuc

SEQ ID NO: 1224071 - RNA, 19 nt, Artificial Sequence
  Description of Artificial Sequence: Synthetic oligonucleotide
  Antisense strand to SEQ ID NO: 1224070
gaaaugcgaacauuaauca

SEQ ID NO: 1224072 - RNA, 19 nt, Artificial Sequence
  Description of Artificial Sequence: Synthetic oligonucleotide
  Sense strand starting at position 935 of SEQ ID NO: 917295
guguuaugugauaguggua

SEQ ID NO: 1224073 - RNA, 19 nt, Artificial Sequence
  Description of Artificial Sequence: Synthetic oligonucleotide
  Antisense strand to SEQ ID NO: 1224072
uaccacuaucacauaacac

SEQ ID NO: 1224074 - RNA, 19 nt, Artificial Sequence
  Description of Artificial Sequence: Synthetic oligonucleotide
  Sense strand starting at position 1065 of SEQ ID NO: 917295
cucccagaauuugagugaa

SEQ ID NO: 1224075 - RNA, 19 nt, Artificial Sequence
  Description of Artificial Sequence: Synthetic oligonucleotide
  Antisense strand to SEQ ID NO: 1224074
uucacucaaauucugggag

SEQ ID NO: 1224076 - RNA, 19 nt, Artificial Sequence
  Description of Artificial Sequence: Synthetic oligonucleotide
  Sense strand starting at position 1088 of SEQ ID NO: 917295
cauugauauggucauaagc

SEQ ID NO: 1224077 - RNA, 19 nt, Artificial Sequence
  Description of Artificial Sequence: Synthetic oligonucleotide
  Antisense strand to SEQ ID NO: 1224076
gcuuaugaccauaucaaug

SEQ ID NO: 1224078 - RNA, 19 nt, Artificial Sequence
  Description of Artificial Sequence: Synthetic oligonucleotide
  Sense strand starting at position 1206 of SEQ ID NO: 917295
auuccaugugguuauaaag

SEQ ID NO: 1224079 - RNA, 19 nt, Artificial Sequence
  Description of Artificial Sequence: Synthetic oligonucleotide
  Antisense strand to SEQ ID NO: 1224078
cuuuauaaccacauggaau

SEQ ID NO: 1224080 - RNA, 19 nt, Artificial Sequence
  Description of Artificial Sequence: Synthetic oligonucleotide
  Sense strand starting at position 1464 of SEQ ID NO: 917295
cuccgugaaauagagcaau

SEQ ID NO: 1224081 - RNA, 19 nt, Artificial Sequence
  Description of Artificial Sequence: Synthetic oligonucleotide
  Antisense strand to SEQ ID NO: 1224080
auugcucuauuucacggag

SEQ ID NO: 1224082 - RNA, 19 nt, Artificial Sequence
  Description of Artificial Sequence: Synthetic oligonucleotide
  Sense strand starting at position 1545 of SEQ ID NO: 917295
gugauaacugcagauaagu

SEQ ID NO: 1224083 - RNA, 19 nt, Artificial Sequence
  Description of Artificial Sequence: Synthetic oligonucleotide
  Antisense strand to SEQ ID NO: 1224082
acuuaucugcaguuaucac

SEQ ID NO: 1224084 - RNA, 19 nt, Artificial Sequence
  Description of Artificial Sequence: Synthetic oligonucleotide
  Sense strand starting at position 1663 of SEQ ID NO: 917295
agaggucucaggugacaug

SEQ ID NO: 1224085 - RNA, 19 nt, Artificial Sequence
  Description of Artificial Sequence: Synthetic oligonucleotide
  Antisense strand to SEQ ID NO: 1224084
caugucaccugagaccucu

SEQ ID NO: 1224086 - RNA, 19 nt, Artificial Sequence
  Description of Artificial Sequence: Synthetic oligonucleotide
  Sense strand starting at position 1672 of SEQ ID NO: 917295
aggugacaugcucagaucu

SEQ ID NO: 1224087 - RNA, 19 nt, Artificial Sequence
  Description of Artificial Sequence: Synthetic oligonucleotide
  Antisense strand to SEQ ID NO: 1224086
agaucugagcaugucaccu

SEQ ID NO: 1224088 - RNA, 19 nt, Artificial Sequence
  Description of Artificial Sequence: Synthetic oligonucleotide
  Sense strand starting at position 1816 of SEQ ID NO: 917295
acugguguaugaccaggaa

SEQ ID NO: 1224089 - RNA, 19 nt, Artificial Sequence
  Description of Artificial Sequence: Synthetic oligonucleotide
  Antisense strand to SEQ ID NO: 1224088
uuccuggucauacaccagu

SEQ ID NO: 1224090 - RNA, 19 nt, Artificial Sequence
  Description of Artificial Sequence: Synthetic oligonucleotide
  Sense strand starting at position 1841 of SEQ ID NO: 917295
cuuucugaucugcagaaca

SEQ ID NO: 1224091 - RNA, 19 nt, Artificial Sequence
  Description of Artificial Sequence: Synthetic oligonucleotide
  Antisense strand to SEQ ID NO: 1224090
uguucugcagaucagaaag

SEQ ID NO: 1224092 - RNA, 19 nt, Artificial Sequence
  Description of Artificial Sequence: Synthetic oligonucleotide
  Sense strand starting at position 2194 of SEQ ID NO: 917295
gccugauaacuugacuucu

SEQ ID NO: 1224093 - RNA, 19 nt, Artificial Sequence
  Description of Artificial Sequence: Synthetic oligonucleotide
  Antisense strand to SEQ ID NO: 1224092
agaagucaaguuaucaggc

SEQ ID NO: 1224094 - RNA, 19 nt, Artificial Sequence
  Description of Artificial Sequence: Synthetic oligonucleotide
  Sense strand starting at position 2380 of SEQ ID NO: 917295
ucuggaguccucuaacagu

SEQ ID NO: 1224095 - RNA, 19 nt, Artificial Sequence
  Description of Artificial Sequence: Synthetic oligonucleotide
  Antisense strand to SEQ ID NO: 1224094
acuguuagaggacuccaga

SEQ ID NO: 1224096 - RNA, 19 nt, Artificial Sequence
  Description of Artificial Sequence: Synthetic oligonucleotide
  Sense strand starting at position 2400 of SEQ ID NO: 917295
aucuuauuggugcaaacaa

SEQ ID NO: 1224097 - RNA, 19 nt, Artificial Sequence
  Description of Artificial Sequence: Synthetic oligonucleotide
  Antisense strand to SEQ ID NO: 1224096
uuguuugcaccaauaagau

SEQ ID NO: 1224098 - RNA, 19 nt, Artificial Sequence
  Description of Artificial Sequence: Synthetic oligonucleotide
  Sense strand starting at position 2420 of SEQ ID NO: 917295
acagaacgaucucuuuaag

SEQ ID NO: 1224099 - RNA, 19 nt, Artificial Sequence
  Description of Artificial Sequence: Synthetic oligonucleotide
  Antisense strand to SEQ ID NO: 1224098
cuuaaagagaucguucugu

SEQ ID NO: 1224100 - RNA, 19 nt, Artificial Sequence
  Description of Artificial Sequence: Synthetic oligonucleotide
  Sense strand starting at position 2423 of SEQ ID NO: 917295
gaacgaucucuuuaaguga

SEQ ID NO: 1224101 - RNA, 19 nt, Artificial Sequence
  Description of Artificial Sequence: Synthetic oligonucleotide
  Antisense strand to SEQ ID NO: 1224100
ucacuuaaagagaucguuc

SEQ ID NO: 1224102 - RNA, 19 nt, Artificial Sequence
  Description of Artificial Sequence: Synthetic oligonucleotide
  Sense strand starting at position 2542 of SEQ ID NO: 917295
auuuaagcguuuccuauaa

SEQ ID NO: 1224103 - RNA, 19 nt, Artificial Sequence
  Description of Artificial Sequence: Synthetic oligonucleotide
  Antisense strand to SEQ ID NO: 1224102
uuauaggaaacgcuuaaau

SEQ ID NO: 1224104 - RNA, 19 nt, Artificial Sequence
  Description of Artificial Sequence: Synthetic oligonucleotide
  Sense strand starting at position 2546 of SEQ ID NO: 917295
aagcguuuccuauaaagag

SEQ ID NO: 1224105 - RNA, 19 nt, Artificial Sequence
  Description of Artificial Sequence: Synthetic oligonucleotide
  Antisense strand to SEQ ID NO: 1224104
cucuuuauaggaaacgcuu

SEQ ID NO: 1224106 - RNA, 19 nt, Artificial Sequence
  Description of Artificial Sequence: Synthetic oligonucleotide
  Sense strand starting at position 2782 of SEQ ID NO: 917295
cugaguuauguugacuaaa

SEQ ID NO: 1224107 - RNA, 19 nt, Artificial Sequence
  Description of Artificial Sequence: Synthetic oligonucleotide
  Antisense strand to SEQ ID NO: 1224106
uuuagucaacauaacucag

SEQ ID NO: 1224108 - RNA, 19 nt, Artificial Sequence
  Description of Artificial Sequence: Synthetic oligonucleotide
  Sense strand starting at position 2784 of SEQ ID NO: 917295
gaguuauguugacuaaaua

SEQ ID NO: 1224109 - RNA, 19 nt, Artificial Sequence
  Description of Artificial Sequence: Synthetic oligonucleotide
  Antisense strand to SEQ ID NO: 1224108
uauuuagucaacauaacuc

SEQ ID NO: 1224110 - RNA, 19 nt, Artificial Sequence
  Description of Artificial Sequence: Synthetic oligonucleotide
  Sense strand starting at position 2803 of SEQ ID NO: 917295
uuagacaugucuccacauu

SEQ ID NO: 1224111 - RNA, 19 nt, Artificial Sequence
  Description of Artificial Sequence: Synthetic oligonucleotide
  Antisense strand to SEQ ID NO: 1224110
aauguggagacaugucuaa

SEQ ID NO: 1224112 - RNA, 19 nt, Artificial Sequence
  Description of Artificial Sequence: Synthetic oligonucleotide
  Sense strand starting at position 2846 of SEQ ID NO: 917295
guagucaaucugccguuua

SEQ ID NO: 1224113 - RNA, 19 nt, Artificial Sequence
  Description of Artificial Sequence: Synthetic oligonucleotide
  Antisense strand to SEQ ID NO: 1224112
uaaacggcagauugacuac

SEQ ID NO: 1224114 - RNA, 19 nt, Artificial Sequence
  Description of Artificial Sequence: Synthetic oligonucleotide
  Sense strand starting at position 2858 of SEQ ID NO: 917295
ccguuuaggaaugagggua

SEQ ID NO: 1224115 - RNA, 19 nt, Artificial Sequence
  Description of Artificial Sequence: Synthetic oligonucleotide
  Antisense strand to SEQ ID NO: 1224114
uacccucauuccuaaacgg

SEQ ID NO: 1224116 - RNA, 19 nt, Artificial Sequence
  Description of Artificial Sequence: Synthetic oligonucleotide
  Sense strand starting at position 2909 of SEQ ID NO: 917295
gaagauaucugcuccagag

SEQ ID NO: 1224117 - RNA, 19 nt, Artificial Sequence
  Description of Artificial Sequence: Synthetic oligonucleotide
  Antisense strand to SEQ ID NO: 1224116
cucuggagcagauaucuuc

SEQ ID NO: 1224118 - RNA, 19 nt, Artificial Sequence
  Description of Artificial Sequence: Synthetic oligonucleotide
  Sense strand starting at position 2911 of SEQ ID NO: 917295
agauaucugcuccagaguu

SEQ ID NO: 1224119 - RNA, 19 nt, Artificial Sequence
  Description of Artificial Sequence: Synthetic oligonucleotide
  Antisense strand to SEQ ID NO: 1224118
aacucuggagcagauaucu

SEQ ID NO: 1224120 - RNA, 19 nt, Artificial Sequence
  Description of Artificial Sequence: Synthetic oligonucleotide
  Sense strand starting at position 2913 of SEQ ID NO: 917295
auaucugcuccagaguuga

SEQ ID NO: 1224121 - RNA, 19 nt, Artificial Sequence
  Description of Artificial Sequence: Synthetic oligonucleotide
  Antisense strand to SEQ ID NO: 1224120
ucaacucuggagcagauau

SEQ ID NO: 1224122 - RNA, 19 nt, Artificial Sequence
  Description of Artificial Sequence: Synthetic oligonucleotide
  Sense strand starting at position 3047 of SEQ ID NO: 917295
uguuucugaccuuaaaugu

SEQ ID NO: 1224123 - RNA, 19 nt, Artificial Sequence
  Description of Artificial Sequence: Synthetic oligonucleotide
  Antisense strand to SEQ ID NO: 1224122
acauuuaaggucagaaaca

SEQ ID NO: 1224124 - RNA, 19 nt, Artificial Sequence
  Description of Artificial Sequence: Synthetic oligonucleotide
  Sense strand starting at position 3221 of SEQ ID NO: 917295
gcccucuugugauuuccca

SEQ ID NO: 1224125 - RNA, 19 nt, Artificial Sequence
  Description of Artificial Sequence: Synthetic oligonucleotide
  Antisense strand to SEQ ID NO: 1224124
ugggaaaucacaagagggc

SEQ ID NO: 1224126 - RNA, 19 nt, Artificial Sequence
  Description of Artificial Sequence: Synthetic oligonucleotide
  Sense strand starting at position 3453 of SEQ ID NO: 917295
gcugguguuacagauacaa

SEQ ID NO: 1224127 - RNA, 19 nt, Artificial Sequence
  Description of Artificial Sequence: Synthetic oligonucleotide
  Antisense strand to SEQ ID NO: 1224126
uuguaucuguaacaccagc

SEQ ID NO: 1224128 - RNA, 19 nt, Artificial Sequence
  Description of Artificial Sequence: Synthetic oligonucleotide
  Sense strand starting at position 3575 of SEQ ID NO: 917295
auuccuuuaccuuggagaa

SEQ ID NO: 1224129 - RNA, 19 nt, Artificial Sequence
  Description of Artificial Sequence: Synthetic oligonucleotide
  Antisense strand to SEQ ID NO: 1224128
uucuccaagguaaaggaau

SEQ ID NO: 1224130 - RNA, 19 nt, Artificial Sequence
  Description of Artificial Sequence: Synthetic oligonucleotide
  Sense strand starting at position 3576 of SEQ ID NO: 917295
uuccuuuaccuuggagaag

SEQ ID NO: 1224131 - RNA, 19 nt, Artificial Sequence
  Description of Artificial Sequence: Synthetic oligonucleotide
  Antisense strand to SEQ ID NO: 1224130
cuucuccaagguaaaggaa

SEQ ID NO: 1224132 - RNA, 19 nt, Artificial Sequence
  Description of Artificial Sequence: Synthetic oligonucleotide
  Sense strand starting at position 3705 of SEQ ID NO: 917295
gucugaauuggugauucag

SEQ ID NO: 1224133 - RNA, 19 nt, Artificial Sequence
  Description of Artificial Sequence: Synthetic oligonucleotide
  Antisense strand to SEQ ID NO: 1224132
cugaaucaccaauucagac

SEQ ID NO: 1224134 - RNA, 19 nt, Artificial Sequence
  Description of Artificial Sequence: Synthetic oligonucleotide
  Sense strand starting at position 3743 of SEQ ID NO: 917295
gcuguucucaaggaguaua

SEQ ID NO: 1224135 - RNA, 19 nt, Artificial Sequence
  Description of Artificial Sequence: Synthetic oligonucleotide
  Antisense strand to SEQ ID NO: 1224134
uauacuccuugagaacagc

SEQ ID NO: 1224136 - RNA, 19 nt, Artificial Sequence
  Description of Artificial Sequence: Synthetic oligonucleotide
  Sense strand starting at position 3863 of SEQ ID NO: 917295
gauguuuguuaagugaaga

SEQ ID NO: 1224137 - RNA, 19 nt, Artificial Sequence
  Description of Artificial Sequence: Synthetic oligonucleotide
  Antisense strand to SEQ ID NO: 1224136
ucuucacuuaacaaacauc

SEQ ID NO: 1224138 - RNA, 19 nt, Artificial Sequence
  Description of Artificial Sequence: Synthetic oligonucleotide
  Sense strand starting at position 3864 of SEQ ID NO: 917296
auguuuguuaagugaagaa

SEQ ID NO: 1224139 - RNA, 19 nt, Artificial Sequence
  Description of Artificial Sequence: Synthetic oligonucleotide
  Antisense strand to SEQ ID NO: 1224138
uucuucacuuaacaaacau

SEQ ID NO: 1224140 - RNA, 19 nt, Artificial Sequence
  Description of Artificial Sequence: Synthetic oligonucleotide
  Sense strand starting at position 65 of SEQ ID NO: 917296
gugcaauucugaucuuaca

SEQ ID NO: 1224141 - RNA, 19 nt, Artificial Sequence
  Description of Artificial Sequence: Synthetic oligonucleotide
  Antisense strand to SEQ ID NO: 1224140
uguaagaucagaauugcac

SEQ ID NO: 1224142 - RNA, 19 nt, Artificial Sequence
  Description of Artificial Sequence: Synthetic oligonucleotide
  Sense strand starting at position 78 of SEQ ID NO: 917296
cuuacaaaucgaugcuugu

SEQ ID NO: 1224143 - RNA, 19 nt, Artificial Sequence
  Description of Artificial Sequence: Synthetic oligonucleotide
  Antisense strand to SEQ ID NO: 1224142
acaagcaucgauuuguaag

SEQ ID NO: 1224144 - RNA, 19 nt, Artificial Sequence
  Description of Artificial Sequence: Synthetic oligonucleotide
  Sense strand starting at position 81 of SEQ ID NO: 917296
acaaaucgaugcuuguaaa

SEQ ID NO: 1224145 - RNA, 19 nt, Artificial Sequence
  Description of Artificial Sequence: Synthetic oligonucleotide
  Antisense strand to SEQ ID NO: 1224144
uuuacaagcaucgauuugu

SEQ ID NO: 1224146 - RNA, 19 nt, Artificial Sequence
  Description of Artificial Sequence: Synthetic oligonucleotide
  Sense strand starting at position 82 of SEQ ID NO: 917296
caaaucgaugcuuguaaau

SEQ ID NO: 1224147 - RNA, 19 nt, Artificial Sequence
  Description of Artificial Sequence: Synthetic oligonucleotide
  Antisense strand to SEQ ID NO: 1224146
auuuacaagcaucgauuug

SEQ ID NO: 1224148 - RNA, 19 nt, Artificial Sequence
  Description of Artificial Sequence: Synthetic oligonucleotide
  Sense strand starting at position 91 of SEQ ID NO: 917296
gcuuguaaauuugauauag

SEQ ID NO: 1224149 - RNA, 19 nt, Artificial Sequence
  Description of Artificial Sequence: Synthetic oligonucleotide
  Antisense strand to SEQ ID NO: 1224148
cuauaucaaauuuacaagc

SEQ ID NO: 1224150 - RNA, 19 nt, Artificial Sequence
  Description of Artificial Sequence: Synthetic oligonucleotide
  Sense strand starting at position 134 of SEQ ID NO: 917296
auggcaugcuuaucuacau

SEQ ID NO: 1224151 - RNA, 19 nt, Artificial Sequence
  Description of Artificial Sequence: Synthetic oligonucleotide
  Antisense strand to SEQ ID NO: 1224150
auguagauaagcaugccau

SEQ ID NO: 1224152 - RNA, 19 nt, Artificial Sequence
  Description of Artificial Sequence: Synthetic oligonucleotide
  Sense strand starting at position 135 of SEQ ID NO: 917296
uggcaugcuuaucuacauu

SEQ ID NO: 1224153 - RNA, 19 nt, Artificial Sequence
  Description of Artificial Sequence: Synthetic oligonucleotide
  Antisense strand to SEQ ID NO: 1224152
aauguagauaagcaugcca

SEQ ID NO: 1224154 - RNA, 19 nt, Artificial Sequence
  Description of Artificial Sequence: Synthetic oligonucleotide
  Sense strand starting at position 268 of SEQ ID NO: 917296
ugcauuucaugguaggaga

SEQ ID NO: 1224155 - RNA, 19 nt, Artificial Sequence
  Description of Artificial Sequence: Synthetic oligonucleotide
  Antisense strand to SEQ ID NO: 1224154
ucuccuaccaugaaaugca

SEQ ID NO: 1224156 - RNA, 19 nt, Artificial Sequence
  Description of Artificial Sequence: Synthetic oligonucleotide
  Sense strand starting at position 303 of SEQ ID NO: 917296
ucaccaauccucugaggau

SEQ ID NO: 1224157 - RNA, 19 nt, Artificial Sequence
  Description of Artificial Sequence: Synthetic oligonucleotide
  Antisense strand to SEQ ID NO: 1224156
auccucagaggauugguga

SEQ ID NO: 1224158 - RNA, 19 nt, Artificial Sequence
  Description of Artificial Sequence: Synthetic oligonucleotide
  Sense strand starting at position 319 of SEQ ID NO: 917296
gauagugauuaugaaagag

SEQ ID NO: 1224159 - RNA, 19 nt, Artificial Sequence
  Description of Artificial Sequence: Synthetic oligonucleotide
  Antisense strand to SEQ ID NO: 1224158
cucuuucauaaucacuauc

SEQ ID NO: 1224160 - RNA, 19 nt, Artificial Sequence
  Description of Artificial Sequence: Synthetic oligonucleotide
  Sense strand starting at position 474 of SEQ ID NO: 917296
uggagcucugcccagucaa

SEQ ID NO: 1224161 - RNA, 19 nt, Artificial Sequence
  Description of Artificial Sequence: Synthetic oligonucleotide
  Antisense strand to SEQ ID NO: 1224160
uugacugggcagagcucca

SEQ ID NO: 1224162 - RNA, 19 nt, Artificial Sequence
  Description of Artificial Sequence: Synthetic oligonucleotide
  Sense strand starting at position 504 of SEQ ID NO: 917296
ucuuuauacuccucgagag

SEQ ID NO: 1224163 - RNA, 19 nt, Artificial Sequence
  Description of Artificial Sequence: Synthetic oligonucleotide
  Antisense strand to SEQ ID NO: 1224162
cucucgaggaguauaaaga

SEQ ID NO: 1224164 - RNA, 19 nt, Artificial Sequence
  Description of Artificial Sequence: Synthetic oligonucleotide
  Sense strand starting at position 600 of SEQ ID NO: 917296
augugaugacuaggccaga

SEQ ID NO: 1224165 - RNA, 19 nt, Artificial Sequence
  Description of Artificial Sequence: Synthetic oligonucleotide
  Antisense strand to SEQ ID NO: 1224164
ucuggccuagucaucacau

SEQ ID NO: 1224166 - RNA, 19 nt, Artificial Sequence
  Description of Artificial Sequence: Synthetic oligonucleotide
  Sense strand starting at position 601 of SEQ ID NO: 917296
ugugaugacuaggccagaa

SEQ ID NO: 1224167 - RNA, 19 nt, Artificial Sequence
  Description of Artificial Sequence: Synthetic oligonucleotide
  Antisense strand to SEQ ID NO: 1224166
uucuggccuagucaucaca

SEQ ID NO: 1224168 - RNA, 19 nt, Artificial Sequence
  Description of Artificial Sequence: Synthetic oligonucleotide
  Sense strand starting at position 761 of SEQ ID NO: 917296
ucccaaugggucugaauau

SEQ ID NO: 1224169 - RNA, 19 nt, Artificial Sequence
  Description of Artificial Sequence: Synthetic oligonucleotide
  Antisense strand to SEQ ID NO: 1224168
auauucagacccauuggga

SEQ ID NO: 1224170 - RNA, 19 nt, Artificial Sequence
  Description of Artificial Sequence: Synthetic oligonucleotide
  Sense strand starting at position 770 of SEQ ID NO: 917296
gucugaauaugggucugaa

SEQ ID NO: 1224171 - RNA, 19 nt, Artificial Sequence
  Description of Artificial Sequence: Synthetic oligonucleotide
  Antisense strand to SEQ ID NO: 1224170
uucagacccauauucagac

SEQ ID NO: 1224172 - RNA, 19 nt, Artificial Sequence
  Description of Artificial Sequence: Synthetic oligonucleotide
  Sense strand starting at position 796 of SEQ ID NO: 917296
ccacuaucuuuguccugga

SEQ ID NO: 1224173 - RNA, 19 nt, Artificial Sequence
  Description of Artificial Sequence: Synthetic oligonucleotide
  Antisense strand to SEQ ID NO: 1224172
uccaggacaaagauagugg

SEQ ID NO: 1224174 - RNA, 19 nt, Artificial Sequence
  Description of Artificial Sequence: Synthetic oligonucleotide
  Sense strand starting at position 1826 of SEQ ID NO: 917296
ugcagaauuccacgucauc

SEQ ID NO: 1224175 - RNA, 19 nt, Artificial Sequence
  Description of Artificial Sequence: Synthetic oligonucleotide
  Antisense strand to SEQ ID NO: 1224174
gaugacguggaauucugca

SEQ ID NO: 1224176 - RNA, 19 nt, Artificial Sequence
  Description of Artificial Sequence: Synthetic oligonucleotide
  Sense strand starting at position 1861 of SEQ ID NO: 917296
augggaacuuugucggagu

SEQ ID NO: 1224177 - RNA, 19 nt, Artificial Sequence
  Description of Artificial Sequence: Synthetic oligonucleotide
  Antisense strand to SEQ ID NO: 1224176
acuccgacaaaguucccau

SEQ ID NO: 1224178 - RNA, 19 nt, Artificial Sequence
  Description of Artificial Sequence: Synthetic oligonucleotide
  Sense strand starting at position 2200 of SEQ ID NO: 917296
ugcugaauccugggaccca

SEQ ID NO: 1224179 - RNA, 19 nt, Artificial Sequence
  Description of Artificial Sequence: Synthetic oligonucleotide
  Antisense strand to SEQ ID NO: 1224178
ugggucccaggauucagca

SEQ ID NO: 1224180 - RNA, 19 nt, Artificial Sequence
  Description of Artificial Sequence: Synthetic oligonucleotide
  Sense strand starting at position 2226 of SEQ ID NO: 917296
acucaagugccagagcaau

SEQ ID NO: 1224181 - RNA, 19 nt, Artificial Sequence
  Description of Artificial Sequence: Synthetic oligonucleotide
  Antisense strand to SEQ ID NO: 1224180
auugcucuggcacuugagu

SEQ ID NO: 1224182 - RNA, 19 nt, Artificial Sequence
  Description of Artificial Sequence: Synthetic oligonucleotide
  Sense strand starting at position 2254 of SEQ ID NO: 917296
accggaggaugucuuagaa

SEQ ID NO: 1224183 - RNA, 19 nt, Artificial Sequence
  Description of Artificial Sequence: Synthetic oligonucleotide
  Antisense strand to SEQ ID NO: 1224182
uucuaagacauccuccggu

SEQ ID NO: 1224184 - RNA, 19 nt, Artificial Sequence
  Description of Artificial Sequence: Synthetic oligonucleotide
  Sense strand starting at position 2278 of SEQ ID NO: 917296
gcgggcucugcugugacaa

SEQ ID NO: 1224185 - RNA, 19 nt, Artificial Sequence
  Description of Artificial Sequence: Synthetic oligonucleotide
  Antisense strand to SEQ ID NO: 1224184
uugucacagcagagcccgc

SEQ ID NO: 1224186 - RNA, 19 nt, Artificial Sequence
  Description of Artificial Sequence: Synthetic oligonucleotide
  Sense strand starting at position 2412 of SEQ ID NO: 917296
gggacacuggccuaagagu

SEQ ID NO: 1224187 - RNA, 19 nt, Artificial Sequence
  Description of Artificial Sequence: Synthetic oligonucleotide
  Antisense strand to SEQ ID NO: 1224186
acucuuaggccaguguccc

SEQ ID NO: 1224188 - RNA, 19 nt, Artificial Sequence
  Description of Artificial Sequence: Synthetic oligonucleotide
  Sense strand starting at position 2621 of SEQ ID NO: 917296
caugcugguugguugaaua

SEQ ID NO: 1224189 - RNA, 19 nt, Artificial Sequence
  Description of Artificial Sequence: Synthetic oligonucleotide
  Antisense strand to SEQ ID NO: 1224188
uauucaaccaaccagcaug

SEQ ID NO: 1224190 - RNA, 19 nt, Artificial Sequence
  Description of Artificial Sequence: Synthetic oligonucleotide
  Sense strand starting at position 2808 of SEQ ID NO: 917296
cuuccaguuccaggauaca

SEQ ID NO: 1224191 - RNA, 19 nt, Artificial Sequence
  Description of Artificial Sequence: Synthetic oligonucleotide
  Antisense strand to SEQ ID NO: 1224190
uguauccuggaacuggaag

SEQ ID NO: 1224192 - RNA, 19 nt, Artificial Sequence
  Description of Artificial Sequence: Synthetic oligonucleotide
  Sense strand starting at position 2867 of SEQ ID NO: 917296
gauucuagcuuugugcaga

SEQ ID NO: 1224193 - RNA, 19 nt, Artificial Sequence
  Description of Artificial Sequence: Synthetic oligonucleotide
  Antisense strand to SEQ ID NO: 1224192
ucugcacaaagcuagaauc

SEQ ID NO: 1224194 - RNA, 19 nt, Artificial Sequence
  Description of Artificial Sequence: Synthetic oligonucleotide
  Sense strand starting at position 2890 of SEQ ID NO: 917296
ucuggugagguguaaguga

SEQ ID NO: 1224195 - RNA, 19 nt, Artificial Sequence
  Description of Artificial Sequence: Synthetic oligonucleotide
  Antisense strand to SEQ ID NO: 1224194
ucacuuacaccucaccaga

SEQ ID NO: 1224196 - RNA, 19 nt, Artificial Sequence
  Description of Artificial Sequence: Synthetic oligonucleotide
  Sense strand starting at position 2956 of SEQ ID NO: 917296
ggagauugcaugugcagga

SEQ ID NO: 1224197 - RNA, 19 nt, Artificial Sequence
  Description of Artificial Sequence: Synthetic oligonucleotide
  Antisense strand to SEQ ID NO: 1224196
uccugcacaugcaaucucc

SEQ ID NO: 1224198 - RNA, 19 nt, Artificial Sequence
  Description of Artificial Sequence: Synthetic oligonucleotide
  Sense strand starting at position 3096 of SEQ ID NO: 917296
aucgauaggacuuggcaau

SEQ ID NO: 1224199 - RNA, 19 nt, Artificial Sequence
  Description of Artificial Sequence: Synthetic oligonucleotide
  Antisense strand to SEQ ID NO: 1224198
auugccaaguccuaucgau

SEQ ID NO: 1224200 - RNA, 19 nt, Artificial Sequence
  Description of Artificial Sequence: Synthetic oligonucleotide
  Sense strand starting at position 3097 of SEQ ID NO: 917296
ucgauaggacuuggcaauu

SEQ ID NO: 1224201 - RNA, 19 nt, Artificial Sequence
  Description of Artificial Sequence: Synthetic oligonucleotide
  Antisense strand to SEQ ID NO: 1224200
aauugccaaguccuaucga

SEQ ID NO: 1224202 - RNA, 19 nt, Artificial Sequence
  Description of Artificial Sequence: Synthetic oligonucleotide
  Sense strand starting at position 3120 of SEQ ID NO: 917296
ggcugugggaacugaguuu

SEQ ID NO: 1224203 - RNA, 19 nt, Artificial Sequence
  Description of Artificial Sequence: Synthetic oligonucleotide
  Antisense strand to SEQ ID NO: 1224202
aaacucaguucccacagcc

SEQ ID NO: 1224204 - RNA, 19 nt, Artificial Sequence
  Description of Artificial Sequence: Synthetic oligonucleotide
  Sense strand starting at position 3207 of SEQ ID NO: 917296
uagacauguugagcuugau

SEQ ID NO: 1224205 - RNA, 19 nt, Artificial Sequence
  Description of Artificial Sequence: Synthetic oligonucleotide
  Antisense strand to SEQ ID NO: 1224204
aucaagcucaacaugucua

SEQ ID NO: 1224206 - RNA, 19 nt, Artificial Sequence
  Description of Artificial Sequence: Synthetic oligonucleotide
  Sense strand starting at position 3273 of SEQ ID NO: 917296
uggaaucagcuauggaaac

SEQ ID NO: 1224207 - RNA, 19 nt, Artificial Sequence
  Description of Artificial Sequence: Synthetic oligonucleotide
  Antisense strand to SEQ ID NO: 1224206
guuuccauagcugauucca

SEQ ID NO: 1224208 - RNA, 19 nt, Artificial Sequence
  Description of Artificial Sequence: Synthetic oligonucleotide
  Sense strand starting at position 3287 of SEQ ID NO: 917296
gaaacagcugucugcacau

SEQ ID NO: 1224209 - RNA, 19 nt, Artificial Sequence
  Description of Artificial Sequence: Synthetic oligonucleotide
  Antisense strand to SEQ ID NO: 1224208
augugcagacagcuguuuc

SEQ ID NO: 1224210 - RNA, 19 nt, Artificial Sequence
  Description of Artificial Sequence: Synthetic oligonucleotide
  Sense strand starting at position 3313 of SEQ ID NO: 917296
gacuuaaggugcuuggaaa

SEQ ID NO: 1224211 - RNA, 19 nt, Artificial Sequence
  Description of Artificial Sequence: Synthetic oligonucleotide
  Antisense strand to SEQ ID NO: 1224210
uuuccaagcaccuuaaguc

SEQ ID NO: 1224212 - RNA, 19 nt, Artificial Sequence
  Description of Artificial Sequence: Synthetic oligonucleotide
  Sense strand starting at position 3529 of SEQ ID NO: 917296
agcagugucaaaugcugaa

SEQ ID NO: 1224213 - RNA, 19 nt, Artificial Sequence
  Description of Artificial Sequence: Synthetic oligonucleotide
  Antisense strand to SEQ ID NO: 1224212
uucagcauuugacacugcu

SEQ ID NO: 1224214 - RNA, 19 nt, Artificial Sequence
  Description of Artificial Sequence: Synthetic oligonucleotide
  Sense strand starting at position 3606 of SEQ ID NO: 917296
gcgagagaguaguuccauu

SEQ ID NO: 1224215 - RNA, 19 nt, Artificial Sequence
  Description of Artificial Sequence: Synthetic oligonucleotide
  Antisense strand to SEQ ID NO: 1224214
aauggaacuacucucucgc

SEQ ID NO: 1224216 - RNA, 19 nt, Artificial Sequence
  Description of Artificial Sequence: Synthetic oligonucleotide
  Sense strand starting at position 3656 of SEQ ID NO: 917296
aggguuacagagugauuaa

SEQ ID NO: 1224217 - RNA, 19 nt, Artificial Sequence
  Description of Artificial Sequence: Synthetic oligonucleotide
  Antisense strand to SEQ ID NO: 1224216
uuaaucacucuguaacccu

SEQ ID NO: 1224218 - RNA, 19 nt, Artificial Sequence
  Description of Artificial Sequence: Synthetic oligonucleotide
  Sense strand starting at position 3785 of SEQ ID NO: 917296
cagagaguuggugaagcaa

SEQ ID NO: 1224219 - RNA, 19 nt, Artificial Sequence
  Description of Artificial Sequence: Synthetic oligonucleotide
  Antisense strand to SEQ ID NO: 1224218
uugcuucaccaacucucug

SEQ ID NO: 1224220 - RNA, 19 nt, Artificial Sequence
  Description of Artificial Sequence: Synthetic oligonucleotide
  Sense strand starting at position 3785 of SEQ ID NO: 917297
cagagaguuggugaagcaa

SEQ ID NO: 1224221 - RNA, 19 nt, Artificial Sequence
  Description of Artificial Sequence: Synthetic oligonucleotide
  Antisense strand to SEQ ID NO: 1224220
uugcuucaccaacucucug

SEQ ID NO: 1224222 - RNA, 19 nt, Artificial Sequence
  Description of Artificial Sequence: Synthetic oligonucleotide
  Sense strand starting at position 25 of SEQ ID NO: 917297
ccaaguaaguguucaggga

SEQ ID NO: 1224223 - RNA, 19 nt, Artificial Sequence
  Description of Artificial Sequence: Synthetic oligonucleotide
  Antisense strand to SEQ ID NO: 1224222
ucccugaacacuuacuugg

SEQ ID NO: 1224224 - RNA, 19 nt, Artificial Sequence
  Description of Artificial Sequence: Synthetic oligonucleotide
  Sense strand starting at position 51 of SEQ ID NO: 917297
agugaaugaaggugugaaa

SEQ ID NO: 1224225 - RNA, 19 nt, Artificial Sequence
  Description of Artificial Sequence: Synthetic oligonucleotide
  Antisense strand to SEQ ID NO: 1224224
uuucacaccuucauucacu

SEQ ID NO: 1224226 - RNA, 19 nt, Artificial Sequence
  Description of Artificial Sequence: Synthetic oligonucleotide
  Sense strand starting at position 98 of SEQ ID NO: 917297
uuccguaaugcagaaugga

SEQ ID NO: 1224227 - RNA, 19 nt, Artificial Sequence
  Description of Artificial Sequence: Synthetic oligonucleotide
  Antisense strand to SEQ ID NO: 1224226
uccauucugcauuacggaa

SEQ ID NO: 1224228 - RNA, 19 nt, Artificial Sequence
  Description of Artificial Sequence: Synthetic oligonucleotide
  Sense strand starting at position 121 of SEQ ID NO: 917297
cagucuuacugggcaucaa

SEQ ID NO: 1224229 - RNA, 19 nt, Artificial Sequence
  Description of Artificial Sequence: Synthetic oligonucleotide
  Antisense strand to SEQ ID NO: 1224228
uugaugcccaguaagacug

SEQ ID NO: 1224230 - RNA, 19 nt, Artificial Sequence
  Description of Artificial Sequence: Synthetic oligonucleotide
  Sense strand starting at position 160 of SEQ ID NO: 917297
agaugauggucccugguaa

SEQ ID NO: 1224231 - RNA, 19 nt, Artificial Sequence
  Description of Artificial Sequence: Synthetic oligonucleotide
  Antisense strand to SEQ ID NO: 1224230
uuaccagggaccaucaucu

SEQ ID NO: 1224232 - RNA, 19 nt, Artificial Sequence
  Description of Artificial Sequence: Synthetic oligonucleotide
  Sense strand starting at position 161 of SEQ ID NO: 917297
gaugauggucccugguaaa

SEQ ID NO: 1224233 - RNA, 19 nt, Artificial Sequence
  Description of Artificial Sequence: Synthetic oligonucleotide
  Antisense strand to SEQ ID NO: 1224232
uuuaccagggaccaucauc

SEQ ID NO: 1224234 - RNA, 19 nt, Artificial Sequence
  Description of Artificial Sequence: Synthetic oligonucleotide
  Sense strand starting at position 265 of SEQ ID NO: 917297
ugagacuugccucaacacu

SEQ ID NO: 1224235 - RNA, 19 nt, Artificial Sequence
  Description of Artificial Sequence: Synthetic oligonucleotide
  Antisense strand to SEQ ID NO: 1224234
aguguugaggcaagucuca

SEQ ID NO: 1224236 - RNA, 19 nt, Artificial Sequence
  Description of Artificial Sequence: Synthetic oligonucleotide
  Sense strand starting at position 655 of SEQ ID NO: 917297
acaauugcagaguaccaua

SEQ ID NO: 1224237 - RNA, 19 nt, Artificial Sequence
  Description of Artificial Sequence: Synthetic oligonucleotide
  Antisense strand to SEQ ID NO: 1224236
uaugguacucugcaauugu

SEQ ID NO: 1224238 - RNA, 19 nt, Artificial Sequence
  Description of Artificial Sequence: Synthetic oligonucleotide
  Sense strand starting at position 724 of SEQ ID NO: 917297
accagacacucuuuguacu

SEQ ID NO: 1224239 - RNA, 19 nt, Artificial Sequence
  Description of Artificial Sequence: Synthetic oligonucleotide
  Antisense strand to SEQ ID NO: 1224238
aguacaaagagugucuggu

SEQ ID NO: 1224240 - RNA, 19 nt, Artificial Sequence
  Description of Artificial Sequence: Synthetic oligonucleotide
  Sense strand starting at position 792 of SEQ ID NO: 917297
aaagaaugccuguguauga

SEQ ID NO: 1224241 - RNA, 19 nt, Artificial Sequence
  Description of Artificial Sequence: Synthetic oligonucleotide
  Antisense strand to SEQ ID NO: 1224240
ucauacacaggcauucuuu

SEQ ID NO: 1224242 - RNA, 19 nt, Artificial Sequence
  Description of Artificial Sequence: Synthetic oligonucleotide
  Sense strand starting at position 799 of SEQ ID NO: 917297
gccuguguaugacuuauuu

SEQ ID NO: 1224243 - RNA, 19 nt, Artificial Sequence
  Description of Artificial Sequence: Synthetic oligonucleotide
  Antisense strand to SEQ ID NO: 1224242
aaauaagucauacacaggc

SEQ ID NO: 1224244 - RNA, 19 nt, Artificial Sequence
  Description of Artificial Sequence: Synthetic oligonucleotide
  Sense strand starting at position 871 of SEQ ID NO: 917297
cccacugaaugauugucua

SEQ ID NO: 1224245 - RNA, 19 nt, Artificial Sequence
  Description of Artificial Sequence: Synthetic oligonucleotide
  Antisense strand to SEQ ID NO: 1224244
uagacaaucauucaguggg

SEQ ID NO: 1224246 - RNA, 19 nt, Artificial Sequence
  Description of Artificial Sequence: Synthetic oligonucleotide
  Sense strand starting at position 874 of SEQ ID NO: 917297
acugaaugauugucuaauu

SEQ ID NO: 1224247 - RNA, 19 nt, Artificial Sequence
  Description of Artificial Sequence: Synthetic oligonucleotide
  Antisense strand to SEQ ID NO: 1224246
aauuagacaaucauucagu

SEQ ID NO: 1224248 - RNA, 19 nt, Artificial Sequence
  Description of Artificial Sequence: Synthetic oligonucleotide
  Sense strand starting at position 1735 of SEQ ID NO: 917297
cgggaacauccacgggaaa

SEQ ID NO: 1224249 - RNA, 19 nt, Artificial Sequence
  Description of Artificial Sequence: Synthetic oligonucleotide
  Antisense strand to SEQ ID NO: 1224248
uuucccguggauguucccg

SEQ ID NO: 1224250 - RNA, 19 nt, Artificial Sequence
  Description of Artificial Sequence: Synthetic oligonucleotide
  Sense strand starting at position 2356 of SEQ ID NO: 917297
cggguuuaugcuccuguuu

SEQ ID NO: 1224251 - RNA, 19 nt, Artificial Sequence
  Description of Artificial Sequence: Synthetic oligonucleotide
  Antisense strand to SEQ ID NO: 1224250
aaacaggagcauaaacccg

SEQ ID NO: 1224252 - RNA, 19 nt, Artificial Sequence
  Description of Artificial Sequence: Synthetic oligonucleotide
  Sense strand starting at position 2413 of SEQ ID NO: 917297
ggccuuaaagaguggguaa

SEQ ID NO: 1224253 - RNA, 19 nt, Artificial Sequence
  Description of Artificial Sequence: Synthetic oligonucleotide
  Antisense strand to SEQ ID NO: 1224252
uuacccacucuuuaaggcc

SEQ ID NO: 1224254 - RNA, 19 nt, Artificial Sequence
  Description of Artificial Sequence: Synthetic oligonucleotide
  Sense strand starting at position 2414 of SEQ ID NO: 917297
gccuuaaagaguggguaaa

SEQ ID NO: 1224255 - RNA, 19 nt, Artificial Sequence
  Description of Artificial Sequence: Synthetic oligonucleotide
  Antisense strand to SEQ ID NO: 1224254
uuuacccacucuuuaaggc

SEQ ID NO: 1224256 - RNA, 19 nt, Artificial Sequence
  Description of Artificial Sequence: Synthetic oligonucleotide
  Sense strand starting at position 2416 of SEQ ID NO: 917297
cuuaaagaguggguaaagu

SEQ ID NO: 1224257 - RNA, 19 nt, Artificial Sequence
  Description of Artificial Sequence: Synthetic oligonucleotide
  Antisense strand to SEQ ID NO: 1224256
acuuuacccacucuuuaag

SEQ ID NO: 1224258 - RNA, 19 nt, Artificial Sequence
  Description of Artificial Sequence: Synthetic oligonucleotide
  Sense strand starting at position 2504 of SEQ ID NO: 917297
ggacgugggaauuaaagca

SEQ ID NO: 1224259 - RNA, 19 nt, Artificial Sequence
  Description of Artificial Sequence: Synthetic oligonucleotide
  Antisense strand to SEQ ID NO: 1224258
ugcuuuaauucccacgucc

SEQ ID NO: 1224260 - RNA, 19 nt, Artificial Sequence
  Description of Artificial Sequence: Synthetic oligonucleotide
  Sense strand starting at position 2874 of SEQ ID NO: 917297
aguagaugacugugggagu

SEQ ID NO: 1224261 - RNA, 19 nt, Artificial Sequence
  Description of Artificial Sequence: Synthetic oligonucleotide
  Antisense strand to SEQ ID NO: 1224260
acucccacagucaucuacu

SEQ ID NO: 1224262 - RNA, 19 nt, Artificial Sequence
  Description of Artificial Sequence: Synthetic oligonucleotide
  Sense strand starting at position 2888 of SEQ ID NO: 917297
ggagucucugcugaacaca

SEQ ID NO: 1224263 - RNA, 19 nt, Artificial Sequence
  Description of Artificial Sequence: Synthetic oligonucleotide
  Antisense strand to SEQ ID NO: 1224262
uguguucagcagagacucc

SEQ ID NO: 1224264 - RNA, 19 nt, Artificial Sequence
  Description of Artificial Sequence: Synthetic oligonucleotide
  Sense strand starting at position 2948 of SEQ ID NO: 917297
aguagacaguuucccagau

SEQ ID NO: 1224265 - RNA, 19 nt, Artificial Sequence
  Description of Artificial Sequence: Synthetic oligonucleotide
  Antisense strand to SEQ ID NO: 1224264
aucugggaaacugucuacu

SEQ ID NO: 1224266 - RNA, 19 nt, Artificial Sequence
  Description of Artificial Sequence: Synthetic oligonucleotide
  Sense strand starting at position 2949 of SEQ ID NO: 917297
guagacaguuucccagaua

SEQ ID NO: 1224267 - RNA, 19 nt, Artificial Sequence
  Description of Artificial Sequence: Synthetic oligonucleotide
  Antisense strand to SEQ ID NO: 1224266
uaucugggaaacugucuac

SEQ ID NO: 1224268 - RNA, 19 nt, Artificial Sequence
  Description of Artificial Sequence: Synthetic oligonucleotide
  Sense strand starting at position 3003 of SEQ ID NO: 917297
aguaauaaauugguaggua

SEQ ID NO: 1224269 - RNA, 19 nt, Artificial Sequence
  Description of Artificial Sequence: Synthetic oligonucleotide
  Antisense strand to SEQ ID NO: 1224268
uaccuaccaauuuauuacu

SEQ ID NO: 1224270 - RNA, 19 nt, Artificial Sequence
  Description of Artificial Sequence: Synthetic oligonucleotide
  Sense strand starting at position 3132 of SEQ ID NO: 917297
gaccuuaagugauugauuc

SEQ ID NO: 1224271 - RNA, 19 nt, Artificial Sequence
  Description of Artificial Sequence: Synthetic oligonucleotide
  Antisense strand to SEQ ID NO: 1224270
gaaucaaucacuuaagguc

SEQ ID NO: 1224272 - RNA, 19 nt, Artificial Sequence
  Description of Artificial Sequence: Synthetic oligonucleotide
  Sense strand starting at position 3136 of SEQ ID NO: 917297
uuaagugauugauuccaag

SEQ ID NO: 1224273 - RNA, 19 nt, Artificial Sequence
  Description of Artificial Sequence: Synthetic oligonucleotide
  Antisense strand to SEQ ID NO: 1224272
cuuggaaucaaucacuuaa

SEQ ID NO: 1224274 - RNA, 19 nt, Artificial Sequence
  Description of Artificial Sequence: Synthetic oligonucleotide
  Sense strand starting at position 3329 of SEQ ID NO: 917297
ggcaucuaguugguaaaga

SEQ ID NO: 1224275 - RNA, 19 nt, Artificial Sequence
  Description of Artificial Sequence: Synthetic oligonucleotide
  Antisense strand to SEQ ID NO: 1224274
ucuuuaccaacuagaugcc

SEQ ID NO: 1224276 - RNA, 19 nt, Artificial Sequence
  Description of Artificial Sequence: Synthetic oligonucleotide
  Sense strand starting at position 3338 of SEQ ID NO: 917297
uugguaaagacccgagauu

SEQ ID NO: 1224277 - RNA, 19 nt, Artificial Sequence
  Description of Artificial Sequence: Synthetic oligonucleotide
  Antisense strand to SEQ ID NO: 1224276
aaucucgggucuuuaccaa

SEQ ID NO: 1224278 - RNA, 19 nt, Artificial Sequence
  Description of Artificial Sequence: Synthetic oligonucleotide
  Sense strand starting at position 3347 of SEQ ID NO: 917297
acccgagauucugcuaaau

SEQ ID NO: 1224279 - RNA, 19 nt, Artificial Sequence
  Description of Artificial Sequence: Synthetic oligonucleotide
  Antisense strand to SEQ ID NO: 1224278
auuuagcagaaucucgggu

SEQ ID NO: 1224280 - RNA, 19 nt, Artificial Sequence
  Description of Artificial Sequence: Synthetic oligonucleotide
  Sense strand starting at position 3406 of SEQ ID NO: 917297
ugucaaucauuugaaugaa

SEQ ID NO: 1224281 - RNA, 19 nt, Artificial Sequence
  Description of Artificial Sequence: Synthetic oligonucleotide
  Antisense strand to SEQ ID NO: 1224280
uucauucaaaugauugaca

SEQ ID NO: 1224282 - RNA, 19 nt, Artificial Sequence
  Description of Artificial Sequence: Synthetic oligonucleotide
  Sense strand starting at position 3421 of SEQ ID NO: 917297
ugaaauaucaggugguuuc

SEQ ID NO: 1224283 - RNA, 19 nt, Artificial Sequence
  Description of Artificial Sequence: Synthetic oligonucleotide
  Antisense strand to SEQ ID NO: 1224282
gaaaccaccugauauuuca

SEQ ID NO: 1224284 - RNA, 19 nt, Artificial Sequence
  Description of Artificial Sequence: Synthetic oligonucleotide
  Sense strand starting at position 3576 of SEQ ID NO: 917297
gcauaagaaugauuggucu

SEQ ID NO: 1224285 - RNA, 19 nt, Artificial Sequence
  Description of Artificial Sequence: Synthetic oligonucleotide
  Antisense strand to SEQ ID NO: 1224284
agaccaaucauucuuaugc

SEQ ID NO: 1224286 - RNA, 19 nt, Artificial Sequence
  Description of Artificial Sequence: Synthetic oligonucleotide
  Sense strand starting at position 3580 of SEQ ID NO: 917297
aagaaugauuggucugacu

SEQ ID NO: 1224287 - RNA, 19 nt, Artificial Sequence
  Description of Artificial Sequence: Synthetic oligonucleotide
  Antisense strand to SEQ ID NO: 1224286
agucagaccaaucauucuu

SEQ ID NO: 1224288 - RNA, 19 nt, Artificial Sequence
  Description of Artificial Sequence: Synthetic oligonucleotide
  Sense strand starting at position 3582 of SEQ ID NO: 917297
gaaugauuggucugacuuc

SEQ ID NO: 1224289 - RNA, 19 nt, Artificial Sequence
  Description of Artificial Sequence: Synthetic oligonucleotide
  Antisense strand to SEQ ID NO: 1224288
gaagucagaccaaucauuc

SEQ ID NO: 1224290 - RNA, 19 nt, Artificial Sequence
  Description of Artificial Sequence: Synthetic oligonucleotide
  Sense strand starting at position 3608 of SEQ ID NO: 917297
guaccacacccuuaguuau

SEQ ID NO: 1224291 - RNA, 19 nt, Artificial Sequence
  Description of Artificial Sequence: Synthetic oligonucleotide
  Antisense strand to SEQ ID NO: 1224290
auaacuaagggugugguac

SEQ ID NO: 1224292 - RNA, 19 nt, Artificial Sequence
  Description of Artificial Sequence: Synthetic oligonucleotide
  Sense strand starting at position 3749 of SEQ ID NO: 917297
cuuucuuaagugugagaaa

SEQ ID NO: 1224293 - RNA, 19 nt, Artificial Sequence
  Description of Artificial Sequence: Synthetic oligonucleotide
  Antisense strand to SEQ ID NO: 1224292
uuucucacacuuaagaaag

SEQ ID NO: 1224294 - RNA, 19 nt, Artificial Sequence
  Description of Artificial Sequence: Synthetic oligonucleotide
  Sense strand starting at position 3782 of SEQ ID NO: 917297
gcuggcuggagacauauua

SEQ ID NO: 1224295 - RNA, 19 nt, Artificial Sequence
  Description of Artificial Sequence: Synthetic oligonucleotide
  Antisense strand to SEQ ID NO: 1224294
uaauaugucuccagccagc

SEQ ID NO: 1224296 - RNA, 19 nt, Artificial Sequence
  Description of Artificial Sequence: Synthetic oligonucleotide
  Sense strand starting at position 3802 of SEQ ID NO: 917297
ugauaaucaugguuacuac

SEQ ID NO: 1224297 - RNA, 19 nt, Artificial Sequence
  Description of Artificial Sequence: Synthetic oligonucleotide
  Antisense strand to SEQ ID NO: 1224296
guaguaaccaugauuauca

SEQ ID NO: 1224298 - RNA, 19 nt, Artificial Sequence
  Description of Artificial Sequence: Synthetic oligonucleotide
  Sense strand starting at position 3839 of SEQ ID NO: 917297
guguuaguacauuaagguc

SEQ ID NO: 1224299 - RNA, 19 nt, Artificial Sequence
  Description of Artificial Sequence: Synthetic oligonucleotide
  Antisense strand to SEQ ID NO: 1224298
gaccuuaauguacuaacac

SEQ ID NO: 1224300 - RNA, 19 nt, Artificial Sequence
  Description of Artificial Sequence: Synthetic oligonucleotide
  Sense strand starting at position 3863 of SEQ ID NO: 917298
auagauuacuuauccaguc

SEQ ID NO: 1224301 - RNA, 19 nt, Artificial Sequence
  Description of Artificial Sequence: Synthetic oligonucleotide
  Antisense strand to SEQ ID NO: 1224300
gacuggauaaguaaucuau

SEQ ID NO: 1224302 - RNA, 19 nt, Artificial Sequence
  Description of Artificial Sequence: Synthetic oligonucleotide
  Sense strand starting at position 146 of SEQ ID NO: 917298
cgucuagcccaagaacauu

SEQ ID NO: 1224303 - RNA, 19 nt, Artificial Sequence
  Description of Artificial Sequence: Synthetic oligonucleotide
  Antisense strand to SEQ ID NO: 1224302
aauguucuugggcuagacg

SEQ ID NO: 1224304 - RNA, 19 nt, Artificial Sequence
  Description of Artificial Sequence: Synthetic oligonucleotide
  Sense strand starting at position 164 of SEQ ID NO: 917298
ucaguuauuuacuucguau

SEQ ID NO: 1224305 - RNA, 19 nt, Artificial Sequence
  Description of Artificial Sequence: Synthetic oligonucleotide
  Antisense strand to SEQ ID NO: 1224304
auacgaaguaaauaacuga

SEQ ID NO: 1224306 - RNA, 19 nt, Artificial Sequence
  Description of Artificial Sequence: Synthetic oligonucleotide
  Sense strand starting at position 166 of SEQ ID NO: 917298
aguuauuuacuucguaugu

SEQ ID NO: 1224307 - RNA, 19 nt, Artificial Sequence
  Description of Artificial Sequence: Synthetic oligonucleotide
  Antisense strand to SEQ ID NO: 1224306
acauacgaaguaaauaacu

SEQ ID NO: 1224308 - RNA, 19 nt, Artificial Sequence
  Description of Artificial Sequence: Synthetic oligonucleotide
  Sense strand starting at position 170 of SEQ ID NO: 917298
auuuacuucguaugucuaa

SEQ ID NO: 1224309 - RNA, 19 nt, Artificial Sequence
  Description of Artificial Sequence: Synthetic oligonucleotide
  Antisense strand to SEQ ID NO: 1224308
uuagacauacgaaguaaau

SEQ ID NO: 1224310 - RNA, 19 nt, Artificial Sequence
  Description of Artificial Sequence: Synthetic oligonucleotide
  Sense strand starting at position 393 of SEQ ID NO: 917298
gagcuccuacaaugucaga

SEQ ID NO: 1224311 - RNA, 19 nt, Artificial Sequence
  Description of Artificial Sequence: Synthetic oligonucleotide
  Antisense strand to SEQ ID NO: 1224310
ucugacauuguaggagcuc

SEQ ID NO: 1224312 - RNA, 19 nt, Artificial Sequence
  Description of Artificial Sequence: Synthetic oligonucleotide
  Sense strand starting at position 423 of SEQ ID NO: 917298
guauuaguuacaugagaag

SEQ ID NO: 1224313 - RNA, 19 nt, Artificial Sequence
  Description of Artificial Sequence: Synthetic oligonucleotide
  Antisense strand to SEQ ID NO: 1224312
cuucucauguaacuaauac

SEQ ID NO: 1224314 - RNA, 19 nt, Artificial Sequence
  Description of Artificial Sequence: Synthetic oligonucleotide
  Sense strand starting at position 559 of SEQ ID NO: 917298
cuucuagaguugccaugau

SEQ ID NO: 1224315 - RNA, 19 nt, Artificial Sequence
  Description of Artificial Sequence: Synthetic oligonucleotide
  Antisense strand to SEQ ID NO: 1224314
aucauggcaacucuagaag

SEQ ID NO: 1224316 - RNA, 19 nt, Artificial Sequence
  Description of Artificial Sequence: Synthetic oligonucleotide
  Sense strand starting at position 563 of SEQ ID NO: 917298
uagaguugccaugauuauu

SEQ ID NO: 1224317 - RNA, 19 nt, Artificial Sequence
  Description of Artificial Sequence: Synthetic oligonucleotide
  Antisense strand to SEQ ID NO: 1224316
aauaaucauggcaacucua

SEQ ID NO: 1224318 - RNA, 19 nt, Artificial Sequence
  Description of Artificial Sequence: Synthetic oligonucleotide
  Sense strand starting at position 566 of SEQ ID NO: 917298
aguugccaugauuauuaau

SEQ ID NO: 1224319 - RNA, 19 nt, Artificial Sequence
  Description of Artificial Sequence: Synthetic oligonucleotide
  Antisense strand to SEQ ID NO: 1224318
auuaauaaucauggcaacu

SEQ ID NO: 1224320 - RNA, 19 nt, Artificial Sequence
  Description of Artificial Sequence: Synthetic oligonucleotide
  Sense strand starting at position 589 of SEQ ID NO: 917298
uuauguaaauggucuacuu

SEQ ID NO: 1224321 - RNA, 19 nt, Artificial Sequence
  Description of Artificial Sequence: Synthetic oligonucleotide
  Antisense strand to SEQ ID NO: 1224320
aaguagaccauuuacauaa

SEQ ID NO: 1224322 - RNA, 19 nt, Artificial Sequence
  Description of Artificial Sequence: Synthetic oligonucleotide
  Sense strand starting at position 591 of SEQ ID NO: 917298
auguaaauggucuacuuua

SEQ ID NO: 1224323 - RNA, 19 nt, Artificial Sequence
  Description of Artificial Sequence: Synthetic oligonucleotide
  Antisense strand to SEQ ID NO: 1224322
uaaaguagaccauuuacau

SEQ ID NO: 1224324 - RNA, 19 nt, Artificial Sequence
  Description of Artificial Sequence: Synthetic oligonucleotide
  Sense strand starting at position 621 of SEQ ID NO: 917298
cacuuauuccgugaucaag

SEQ ID NO: 1224325 - RNA, 19 nt, Artificial Sequence
  Description of Artificial Sequence: Synthetic oligonucleotide
  Antisense strand to SEQ ID NO: 1224324
cuugaucacggaauaagug

SEQ ID NO: 1224326 - RNA, 19 nt, Artificial Sequence
  Description of Artificial Sequence: Synthetic oligonucleotide
  Sense strand starting at position 623 of SEQ ID NO: 917298
cuuauuccgugaucaagau

SEQ ID NO: 1224327 - RNA, 19 nt, Artificial Sequence
  Description of Artificial Sequence: Synthetic oligonucleotide
  Antisense strand to SEQ ID NO: 1224326
aucuugaucacggaauaag

SEQ ID NO: 1224328 - RNA, 19 nt, Artificial Sequence
  Description of Artificial Sequence: Synthetic oligonucleotide
  Sense strand starting at position 624 of SEQ ID NO: 917298
uuauuccgugaucaagauu

SEQ ID NO: 1224329 - RNA, 19 nt, Artificial Sequence
  Description of Artificial Sequence: Synthetic oligonucleotide
  Antisense strand to SEQ ID NO: 1224328
aaucuugaucacggaauaa

SEQ ID NO: 1224330 - RNA, 19 nt, Artificial Sequence
  Description of Artificial Sequence: Synthetic oligonucleotide
  Sense strand starting at position 1423 of SEQ ID NO: 917298
ggcacacaucuguaaacaa

SEQ ID NO: 1224331 - RNA, 19 nt, Artificial Sequence
  Description of Artificial Sequence: Synthetic oligonucleotide
  Antisense strand to SEQ ID NO: 1224330
uuguuuacagaugugugcc

SEQ ID NO: 1224332 - RNA, 19 nt, Artificial Sequence
  Description of Artificial Sequence: Synthetic oligonucleotide
  Sense strand starting at position 1480 of SEQ ID NO: 917298
gcuaaugaagcccaaguuu

SEQ ID NO: 1224333 - RNA, 19 nt, Artificial Sequence
  Description of Artificial Sequence: Synthetic oligonucleotide
  Antisense strand to SEQ ID NO: 1224332
aaacuugggcuucauuagc

SEQ ID NO: 1224334 - RNA, 19 nt, Artificial Sequence
  Description of Artificial Sequence: Synthetic oligonucleotide
  Sense strand starting at position 1681 of SEQ ID NO: 917298
uccacucucguagagguaa

SEQ ID NO: 1224335 - RNA, 19 nt, Artificial Sequence
  Description of Artificial Sequence: Synthetic oligonucleotide
  Antisense strand to SEQ ID NO: 1224334
uuaccucuacgagagugga

SEQ ID NO: 1224336 - RNA, 19 nt, Artificial Sequence
  Description of Artificial Sequence: Synthetic oligonucleotide
  Sense strand starting at position 1725 of SEQ ID NO: 917298
cuuuaaaucguggaccuca

SEQ ID NO: 1224337 - RNA, 19 nt, Artificial Sequence
  Description of Artificial Sequence: Synthetic oligonucleotide
  Antisense strand to SEQ ID NO: 1224336
ugagguccacgauuuaaag

SEQ ID NO: 1224338 - RNA, 19 nt, Artificial Sequence
  Description of Artificial Sequence: Synthetic oligonucleotide
  Sense strand starting at position 1773 of SEQ ID NO: 917298
agaacaaauugcuccgcaa

SEQ ID NO: 1224339 - RNA, 19 nt, Artificial Sequence
  Description of Artificial Sequence: Synthetic oligonucleotide
  Antisense strand to SEQ ID NO: 1224338
uugcggagcaauuuguucu

SEQ ID NO: 1224340 - RNA, 19 nt, Artificial Sequence
  Description of Artificial Sequence: Synthetic oligonucleotide
  Sense strand starting at position 2664 of SEQ ID NO: 917298
uccaguaauguguacaaac

SEQ ID NO: 1224341 - RNA, 19 nt, Artificial Sequence
  Description of Artificial Sequence: Synthetic oligonucleotide
  Antisense strand to SEQ ID NO: 1224340
guuuguacacauuacugga

SEQ ID NO: 1224342 - RNA, 19 nt, Artificial Sequence
  Description of Artificial Sequence: Synthetic oligonucleotide
  Sense strand starting at position 2787 of SEQ ID NO: 917298
cgaucuaaucacgacagua

SEQ ID NO: 1224343 - RNA, 19 nt, Artificial Sequence
  Description of Artificial Sequence: Synthetic oligonucleotide
  Antisense strand to SEQ ID NO: 1224342
uacugucgugauuagaucg

SEQ ID NO: 1224344 - RNA, 19 nt, Artificial Sequence
  Description of Artificial Sequence: Synthetic oligonucleotide
  Sense strand starting at position 2809 of SEQ ID NO: 917298
gguuuagaccugugaauau

SEQ ID NO: 1224345 - RNA, 19 nt, Artificial Sequence
  Description of Artificial Sequence: Synthetic oligonucleotide
  Antisense strand to SEQ ID NO: 1224344
auauucacaggucuaaacc

SEQ ID NO: 1224346 - RNA, 19 nt, Artificial Sequence
  Description of Artificial Sequence: Synthetic oligonucleotide
  Sense strand starting at position 2821 of SEQ ID NO: 917298
ugaauaucaugacaggaag

SEQ ID NO: 1224347 - RNA, 19 nt, Artificial Sequence
  Description of Artificial Sequence: Synthetic oligonucleotide
  Antisense strand to SEQ ID NO: 1224346
cuuccugucaugauauuca

SEQ ID NO: 1224348 - RNA, 19 nt, Artificial Sequence
  Description of Artificial Sequence: Synthetic oligonucleotide
  Sense strand starting at position 2999 of SEQ ID NO: 917298
uauguuuacuaugugauag

SEQ ID NO: 1224349 - RNA, 19 nt, Artificial Sequence
  Description of Artificial Sequence: Synthetic oligonucleotide
  Antisense strand to SEQ ID NO: 1224348
cuaucacauaguaaacaua

SEQ ID NO: 1224350 - RNA, 19 nt, Artificial Sequence
  Description of Artificial Sequence: Synthetic oligonucleotide
  Sense strand starting at position 3009 of SEQ ID NO: 917298
augugauaguaacuggaua

SEQ ID NO: 1224351 - RNA, 19 nt, Artificial Sequence
  Description of Artificial Sequence: Synthetic oligonucleotide
  Antisense strand to SEQ ID NO: 1224350
uauccaguuacuaucacau

SEQ ID NO: 1224352 - RNA, 19 nt, Artificial Sequence
  Description of Artificial Sequence: Synthetic oligonucleotide
  Sense strand starting at position 3011 of SEQ ID NO: 917298
gugauaguaacuggauaga

SEQ ID NO: 1224353 - RNA, 19 nt, Artificial Sequence
  Description of Artificial Sequence: Synthetic oligonucleotide
  Antisense strand to SEQ ID NO: 1224352
ucuauccaguuacuaucac

SEQ ID NO: 1224354 - RNA, 19 nt, Artificial Sequence
  Description of Artificial Sequence: Synthetic oligonucleotide
  Sense strand starting at position 3096 of SEQ ID NO: 917298
ggguucguggaucaauacu

SEQ ID NO: 1224355 - RNA, 19 nt, Artificial Sequence
  Description of Artificial Sequence: Synthetic oligonucleotide
  Antisense strand to SEQ ID NO: 1224354
aguauugauccacgaaccc

SEQ ID NO: 1224356 - RNA, 19 nt, Artificial Sequence
  Description of Artificial Sequence: Synthetic oligonucleotide
  Sense strand starting at position 3132 of SEQ ID NO: 917298
agggaaaucacucgucuuu

SEQ ID NO: 1224357 - RNA, 19 nt, Artificial Sequence
  Description of Artificial Sequence: Synthetic oligonucleotide
  Antisense strand to SEQ ID NO: 1224356
aaagacgagugauuucccu

SEQ ID NO: 1224358 - RNA, 19 nt, Artificial Sequence
  Description of Artificial Sequence: Synthetic oligonucleotide
  Sense strand starting at position 3134 of SEQ ID NO: 917298
ggaaaucacucgucuuuga

SEQ ID NO: 1224359 - RNA, 19 nt, Artificial Sequence
  Description of Artificial Sequence: Synthetic oligonucleotide
  Antisense strand to SEQ ID NO: 1224358
ucaaagacgagugauuucc

SEQ ID NO: 1224360 - RNA, 19 nt, Artificial Sequence
  Description of Artificial Sequence: Synthetic oligonucleotide
  Sense strand starting at position 3138 of SEQ ID NO: 917298
aucacucgucuuugacuaa

SEQ ID NO: 1224361 - RNA, 19 nt, Artificial Sequence
  Description of Artificial Sequence: Synthetic oligonucleotide
  Antisense strand to SEQ ID NO: 1224360
uuagucaaagacgagugau

SEQ ID NO: 1224362 - RNA, 19 nt, Artificial Sequence
  Description of Artificial Sequence: Synthetic oligonucleotide
  Sense strand starting at position 3323 of SEQ ID NO: 917298
aggucucugucaucgagga

SEQ ID NO: 1224363 - RNA, 19 nt, Artificial Sequence
  Description of Artificial Sequence: Synthetic oligonucleotide
  Antisense strand to SEQ ID NO: 1224362
uccucgaugacagagaccu

SEQ ID NO: 1224364 - RNA, 19 nt, Artificial Sequence
  Description of Artificial Sequence: Synthetic oligonucleotide
  Sense strand starting at position 3324 of SEQ ID NO: 917298
ggucucugucaucgaggaa

SEQ ID NO: 1224365 - RNA, 19 nt, Artificial Sequence
  Description of Artificial Sequence: Synthetic oligonucleotide
  Antisense strand to SEQ ID NO: 1224364
uuccucgaugacagagacc

SEQ ID NO: 1224366 - RNA, 19 nt, Artificial Sequence
  Description of Artificial Sequence: Synthetic oligonucleotide
  Sense strand starting at position 3325 of SEQ ID NO: 917298
gucucugucaucgaggaac

SEQ ID NO: 1224367 - RNA, 19 nt, Artificial Sequence
  Description of Artificial Sequence: Synthetic oligonucleotide
  Antisense strand to SEQ ID NO: 1224366
guuccucgaugacagagac

SEQ ID NO: 1224368 - RNA, 19 nt, Artificial Sequence
  Description of Artificial Sequence: Synthetic oligonucleotide
  Sense strand starting at position 3328 of SEQ ID NO: 917298
ucugucaucgaggaacuca

SEQ ID NO: 1224369 - RNA, 19 nt, Artificial Sequence
  Description of Artificial Sequence: Synthetic oligonucleotide
  Antisense strand to SEQ ID NO: 1224368
ugaguuccucgaugacaga

SEQ ID NO: 1224370 - RNA, 19 nt, Artificial Sequence
  Description of Artificial Sequence: Synthetic oligonucleotide
  Sense strand starting at position 3364 of SEQ ID NO: 917298
uuaauuacgcuguaauagu

SEQ ID NO: 1224371 - RNA, 19 nt, Artificial Sequence
  Description of Artificial Sequence: Synthetic oligonucleotide
  Antisense strand to SEQ ID NO: 1224370
acuauuacagcguaauuaa

SEQ ID NO: 1224372 - RNA, 19 nt, Artificial Sequence
  Description of Artificial Sequence: Synthetic oligonucleotide
  Sense strand starting at position 3853 of SEQ ID NO: 917298
guuaacuuggaaugauuaa

SEQ ID NO: 1224373 - RNA, 19 nt, Artificial Sequence
  Description of Artificial Sequence: Synthetic oligonucleotide
  Antisense strand to SEQ ID NO: 1224372
uuaaucauuccaaguuaac

SEQ ID NO: 1224374 - RNA, 19 nt, Artificial Sequence
  Description of Artificial Sequence: Synthetic oligonucleotide
  Sense strand starting at position 3932 of SEQ ID NO: 917298
gaccucuuggcauguggau

SEQ ID NO: 1224375 - RNA, 19 nt, Artificial Sequence
  Description of Artificial Sequence: Synthetic oligonucleotide
  Antisense strand to SEQ ID NO: 1224374
auccacaugccaagagguc

SEQ ID NO: 1224376 - RNA, 19 nt, Artificial Sequence
  Description of Artificial Sequence: Synthetic oligonucleotide
  Sense strand starting at position 3934 of SEQ ID NO: 917298
ccucuuggcauguggauaa

SEQ ID NO: 1224377 - RNA, 19 nt, Artificial Sequence
  Description of Artificial Sequence: Synthetic oligonucleotide
  Antisense strand to SEQ ID NO: 1224376
uuauccacaugccaagagg

SEQ ID NO: 1224378 - RNA, 19 nt, Artificial Sequence
  Description of Artificial Sequence: Synthetic oligonucleotide
  Sense strand starting at position 3954 of SEQ ID NO: 917298
aggguuuacuaaccaaauu

SEQ ID NO: 1224379 - RNA, 19 nt, Artificial Sequence
  Description of Artificial Sequence: Synthetic oligonucleotide
  Antisense strand to SEQ ID NO: 1224378
aauuugguuaguaaacccu

SEQ ID NO: 1224380 - RNA, 19 nt, Artificial Sequence
  Description of Artificial Sequence: Synthetic oligonucleotide
  Sense strand starting at position 3966 of SEQ ID NO: 917299
ccaaauugcccugggcuaa

SEQ ID NO: 1224381 - RNA, 19 nt, Artificial Sequence
  Description of Artificial Sequence: Synthetic oligonucleotide
  Antisense strand to SEQ ID NO: 1224380
uuagcccagggcaauuugg

SEQ ID NO: 1224382 - RNA, 19 nt, Artificial Sequence
  Description of Artificial Sequence: Synthetic oligonucleotide
  Sense strand starting at position 18 of SEQ ID NO: 917299
gcuguaauuugugcucuag

SEQ ID NO: 1224383 - RNA, 19 nt, Artificial Sequence
  Description of Artificial Sequence: Synthetic oligonucleotide
  Antisense strand to SEQ ID NO: 1224382
cuagagcacaaauuacagc

SEQ ID NO: 1224384 - RNA, 19 nt, Artificial Sequence
  Description of Artificial Sequence: Synthetic oligonucleotide
  Sense strand starting at position 20 of SEQ ID NO: 917299
uguaauuugugcucuagug

SEQ ID NO: 1224385 - RNA, 19 nt, Artificial Sequence
  Description of Artificial Sequence: Synthetic oligonucleotide
  Antisense strand to SEQ ID NO: 1224384
cacuagagcacaaauuaca

SEQ ID NO: 1224386 - RNA, 19 nt, Artificial Sequence
  Description of Artificial Sequence: Synthetic oligonucleotide
  Sense strand starting at position 52 of SEQ ID NO: 917299
agguuugcugaaugaauua

SEQ ID NO: 1224387 - RNA, 19 nt, Artificial Sequence
  Description of Artificial Sequence: Synthetic oligonucleotide
  Antisense strand to SEQ ID NO: 1224386
uaauucauucagcaaaccu

SEQ ID NO: 1224388 - RNA, 19 nt, Artificial Sequence
  Description of Artificial Sequence: Synthetic oligonucleotide
  Sense strand starting at position 212 of SEQ ID NO: 917299
cuggcaaugguuuacaaca

SEQ ID NO: 1224389 - RNA, 19 nt, Artificial Sequence
  Description of Artificial Sequence: Synthetic oligonucleotide
  Antisense strand to SEQ ID NO: 1224388
uguuguaaaccauugccag

SEQ ID NO: 1224390 - RNA, 19 nt, Artificial Sequence
  Description of Artificial Sequence: Synthetic oligonucleotide
  Sense strand starting at position 235 of SEQ ID NO: 917299
uuugguggccuauagagaa

SEQ ID NO: 1224391 - RNA, 19 nt, Artificial Sequence
  Description of Artificial Sequence: Synthetic oligonucleotide
  Antisense strand to SEQ ID NO: 1224390
uucucuauaggccaccaaa

SEQ ID NO: 1224392 - RNA, 19 nt, Artificial Sequence
  Description of Artificial Sequence: Synthetic oligonucleotide
  Sense strand starting at position 270 of SEQ ID NO: 917299
agucuaauuucugacaaag

SEQ ID NO: 1224393 - RNA, 19 nt, Artificial Sequence
  Description of Artificial Sequence: Synthetic oligonucleotide
  Antisense strand to SEQ ID NO: 1224392
cuuugucagaaauuagacu

SEQ ID NO: 1224394 - RNA, 19 nt, Artificial Sequence
  Description of Artificial Sequence: Synthetic oligonucleotide
  Sense strand starting at position 272 of SEQ ID NO: 917299
ucuaauuucugacaaagga

SEQ ID NO: 1224395 - RNA, 19 nt, Artificial Sequence
  Description of Artificial Sequence: Synthetic oligonucleotide
  Antisense strand to SEQ ID NO: 1224394
uccuuugucagaaauuaga

SEQ ID NO: 1224396 - RNA, 19 nt, Artificial Sequence
  Description of Artificial Sequence: Synthetic oligonucleotide
  Sense strand starting at position 300 of SEQ ID NO: 917299
ucuacugaguggguuagau

SEQ ID NO: 1224397 - RNA, 19 nt, Artificial Sequence
  Description of Artificial Sequence: Synthetic oligonucleotide
  Antisense strand to SEQ ID NO: 1224396
aucuaacccacucaguaga

SEQ ID NO: 1224398 - RNA, 19 nt, Artificial Sequence
  Description of Artificial Sequence: Synthetic oligonucleotide
  Sense strand starting at position 308 of SEQ ID NO: 917299
guggguuagaucgagggau

SEQ ID NO: 1224399 - RNA, 19 nt, Artificial Sequence
  Description of Artificial Sequence: Synthetic oligonucleotide
  Antisense strand to SEQ ID NO: 1224398
aucccucgaucuaacccac

SEQ ID NO: 1224400 - RNA, 19 nt, Artificial Sequence
  Description of Artificial Sequence: Synthetic oligonucleotide
  Sense strand starting at position 310 of SEQ ID NO: 917299
ggguuagaucgagggauaa

SEQ ID NO: 1224401 - RNA, 19 nt, Artificial Sequence
  Description of Artificial Sequence: Synthetic oligonucleotide
  Antisense strand to SEQ ID NO: 1224400
uuaucccucgaucuaaccc

SEQ ID NO: 1224402 - RNA, 19 nt, Artificial Sequence
  Description of Artificial Sequence: Synthetic oligonucleotide
  Sense strand starting at position 322 of SEQ ID NO: 917299
gggauaaacgcaugacaga

SEQ ID NO: 1224403 - RNA, 19 nt, Artificial Sequence
  Description of Artificial Sequence: Synthetic oligonucleotide
  Antisense strand to SEQ ID NO: 1224402
ucugucaugcguuuauccc

SEQ ID NO: 1224404 - RNA, 19 nt, Artificial Sequence
  Description of Artificial Sequence: Synthetic oligonucleotide
  Sense strand starting at position 401 of SEQ ID NO: 917299
ugcauaacugacuguaaca

SEQ ID NO: 1224405 - RNA, 19 nt, Artificial Sequence
  Description of Artificial Sequence: Synthetic oligonucleotide
  Antisense strand to SEQ ID NO: 1224404
uguuacagucaguuaugca

SEQ ID NO: 1224406 - RNA, 19 nt, Artificial Sequence
  Description of Artificial Sequence: Synthetic oligonucleotide
  Sense strand starting at position 414 of SEQ ID NO: 917299
guaacaccugguuauguau

SEQ ID NO: 1224407 - RNA, 19 nt, Artificial Sequence
  Description of Artificial Sequence: Synthetic oligonucleotide
  Antisense strand to SEQ ID NO: 1224406
auacauaaccagguguuac

SEQ ID NO: 1224408 - RNA, 19 nt, Artificial Sequence
  Description of Artificial Sequence: Synthetic oligonucleotide
  Sense strand starting at position 478 of SEQ ID NO: 917299
caggguacacaaugcuaua

SEQ ID NO: 1224409 - RNA, 19 nt, Artificial Sequence
  Description of Artificial Sequence: Synthetic oligonucleotide
  Antisense strand to SEQ ID NO: 1224408
uauagcauuguguacccug

SEQ ID NO: 1224410 - RNA, 19 nt, Artificial Sequence
  Description of Artificial Sequence: Synthetic oligonucleotide
  Sense strand starting at position 566 of SEQ ID NO: 917299
gguauauaguuucuacaga

SEQ ID NO: 1224411 - RNA, 19 nt, Artificial Sequence
  Description of Artificial Sequence: Synthetic oligonucleotide
  Antisense strand to SEQ ID NO: 1224410
ucuguagaaacuauauacc

SEQ ID NO: 1224412 - RNA, 19 nt, Artificial Sequence
  Description of Artificial Sequence: Synthetic oligonucleotide
  Sense strand starting at position 932 of SEQ ID NO: 917299
aguucaaauguggauggua

SEQ ID NO: 1224413 - RNA, 19 nt, Artificial Sequence
  Description of Artificial Sequence: Synthetic oligonucleotide
  Antisense strand to SEQ ID NO: 1224412
uaccauccacauuugaacu

SEQ ID NO: 1224414 - RNA, 19 nt, Artificial Sequence
  Description of Artificial Sequence: Synthetic oligonucleotide
  Sense strand starting at position 935 of SEQ ID NO: 917299
ucaaauguggaugguaaca

SEQ ID NO: 1224415 - RNA, 19 nt, Artificial Sequence
  Description of Artificial Sequence: Synthetic oligonucleotide
  Antisense strand to SEQ ID NO: 1224414
uguuaccauccacauuuga

SEQ ID NO: 1224416 - RNA, 19 nt, Artificial Sequence
  Description of Artificial Sequence: Synthetic oligonucleotide
  Sense strand starting at position 1092 of SEQ ID NO: 917299
guaguaagucuugauaauu

SEQ ID NO: 1224417 - RNA, 19 nt, Artificial Sequence
  Description of Artificial Sequence: Synthetic oligonucleotide
  Antisense strand to SEQ ID NO: 1224416
aauuaucaagacuuacuac

SEQ ID NO: 1224418 - RNA, 19 nt, Artificial Sequence
  Description of Artificial Sequence: Synthetic oligonucleotide
  Sense strand starting at position 1281 of SEQ ID NO: 917299
cugacuaaauuguccugaa

SEQ ID NO: 1224419 - RNA, 19 nt, Artificial Sequence
  Description of Artificial Sequence: Synthetic oligonucleotide
  Antisense strand to SEQ ID NO: 1224418
uucaggacaauuuagucag

SEQ ID NO: 1224420 - RNA, 19 nt, Artificial Sequence
  Description of Artificial Sequence: Synthetic oligonucleotide
  Sense strand starting at position 1282 of SEQ ID NO: 917299
ugacuaaauuguccugaag

SEQ ID NO: 1224421 - RNA, 19 nt, Artificial Sequence
  Description of Artificial Sequence: Synthetic oligonucleotide
  Antisense strand to SEQ ID NO: 1224420
cuucaggacaauuuaguca

SEQ ID NO: 1224422 - RNA, 19 nt, Artificial Sequence
  Description of Artificial Sequence: Synthetic oligonucleotide
  Sense strand starting at position 1285 of SEQ ID NO: 917299
cuaaauuguccugaaguga

SEQ ID NO: 1224423 - RNA, 19 nt, Artificial Sequence
  Description of Artificial Sequence: Synthetic oligonucleotide
  Antisense strand to SEQ ID NO: 1224422
ucacuucaggacaauuuag

SEQ ID NO: 1224424 - RNA, 19 nt, Artificial Sequence
  Description of Artificial Sequence: Synthetic oligonucleotide
  Sense strand starting at position 1335 of SEQ ID NO: 917299
gugacuauggaaggugauu

SEQ ID NO: 1224425 - RNA, 19 nt, Artificial Sequence
  Description of Artificial Sequence: Synthetic oligonucleotide
  Antisense strand to SEQ ID NO: 1224424
aaucaccuuccauagucac

SEQ ID NO: 1224426 - RNA, 19 nt, Artificial Sequence
  Description of Artificial Sequence: Synthetic oligonucleotide
  Sense strand starting at position 1344 of SEQ ID NO: 917299
gaaggugauuaagugcuau

SEQ ID NO: 1224427 - RNA, 19 nt, Artificial Sequence
  Description of Artificial Sequence: Synthetic oligonucleotide
  Antisense strand to SEQ ID NO: 1224426
auagcacuuaaucaccuuc

SEQ ID NO: 1224428 - RNA, 19 nt, Artificial Sequence
  Description of Artificial Sequence: Synthetic oligonucleotide
  Sense strand starting at position 1396 of SEQ ID NO: 917299
ggaguaagugacgaaugca

SEQ ID NO: 1224429 - RNA, 19 nt, Artificial Sequence
  Description of Artificial Sequence: Synthetic oligonucleotide
  Antisense strand to SEQ ID NO: 1224428
ugcauucgucacuuacucc

SEQ ID NO: 1224430 - RNA, 19 nt, Artificial Sequence
  Description of Artificial Sequence: Synthetic oligonucleotide
  Sense strand starting at position 1448 of SEQ ID NO: 917299
uguguuucccuaggaaaca

SEQ ID NO: 1224431 - RNA, 19 nt, Artificial Sequence
  Description of Artificial Sequence: Synthetic oligonucleotide
  Antisense strand to SEQ ID NO: 1224430
uguuuccuagggaaacaca

SEQ ID NO: 1224432 - RNA, 19 nt, Artificial Sequence
  Description of Artificial Sequence: Synthetic oligonucleotide
  Sense strand starting at position 1502 of SEQ ID NO: 917299
gugacaauuugggacaauc

SEQ ID NO: 1224433 - RNA, 19 nt, Artificial Sequence
  Description of Artificial Sequence: Synthetic oligonucleotide
  Antisense strand to SEQ ID NO: 1224432
gauugucccaaauugucac

SEQ ID NO: 1224434 - RNA, 19 nt, Artificial Sequence
  Description of Artificial Sequence: Synthetic oligonucleotide
  Sense strand starting at position 1737 of SEQ ID NO: 917299
acggauucccagugaauac

SEQ ID NO: 1224435 - RNA, 19 nt, Artificial Sequence
  Description of Artificial Sequence: Synthetic oligonucleotide
  Antisense strand to SEQ ID NO: 1224434
guauucacugggaauccgu

SEQ ID NO: 1224436 - RNA, 19 nt, Artificial Sequence
  Description of Artificial Sequence: Synthetic oligonucleotide
  Sense strand starting at position 3034 of SEQ ID NO: 917299
agugauagccucuaauucu

SEQ ID NO: 1224437 - RNA, 19 nt, Artificial Sequence
  Description of Artificial Sequence: Synthetic oligonucleotide
  Antisense strand to SEQ ID NO: 1224436
agaauuagaggcuaucacu

SEQ ID NO: 1224438 - RNA, 19 nt, Artificial Sequence
  Description of Artificial Sequence: Synthetic oligonucleotide
  Sense strand starting at position 3086 of SEQ ID NO: 917299
ugauuucgcugguugugaa

SEQ ID NO: 1224439 - RNA, 19 nt, Artificial Sequence
  Description of Artificial Sequence: Synthetic oligonucleotide
  Antisense strand to SEQ ID NO: 1224438
uucacaaccagcgaaauca

SEQ ID NO: 1224440 - RNA, 19 nt, Artificial Sequence
  Description of Artificial Sequence: Synthetic oligonucleotide
  Sense strand starting at position 3087 of SEQ ID NO: 917299
gauuucgcugguugugaaa

SEQ ID NO: 1224441 - RNA, 19 nt, Artificial Sequence
  Description of Artificial Sequence: Synthetic oligonucleotide
  Antisense strand to SEQ ID NO: 1224440
uuucacaaccagcgaaauc

SEQ ID NO: 1224442 - RNA, 19 nt, Artificial Sequence
  Description of Artificial Sequence: Synthetic oligonucleotide
  Sense strand starting at position 3288 of SEQ ID NO: 917299
gaaauaaaccguugcauga

SEQ ID NO: 1224443 - RNA, 19 nt, Artificial Sequence
  Description of Artificial Sequence: Synthetic oligonucleotide
  Antisense strand to SEQ ID NO: 1224442
ucaugcaacgguuuauuuc

SEQ ID NO: 1224444 - RNA, 19 nt, Artificial Sequence
  Description of Artificial Sequence: Synthetic oligonucleotide
  Sense strand starting at position 3298 of SEQ ID NO: 917299
guugcaugaccagaaauca

SEQ ID NO: 1224445 - RNA, 19 nt, Artificial Sequence
  Description of Artificial Sequence: Synthetic oligonucleotide
  Antisense strand to SEQ ID NO: 1224444
ugauuucuggucaugcaac

SEQ ID NO: 1224446 - RNA, 19 nt, Artificial Sequence
  Description of Artificial Sequence: Synthetic oligonucleotide
  Sense strand starting at position 3330 of SEQ ID NO: 917299
cuaguaucuguuuaagguu

SEQ ID NO: 1224447 - RNA, 19 nt, Artificial Sequence
  Description of Artificial Sequence: Synthetic oligonucleotide
  Antisense strand to SEQ ID NO: 1224446
aaccuuaaacagauacuag

SEQ ID NO: 1224448 - RNA, 19 nt, Artificial Sequence
  Description of Artificial Sequence: Synthetic oligonucleotide
  Sense strand starting at position 3408 of SEQ ID NO: 917299
cuagauauucaggguggag

SEQ ID NO: 1224449 - RNA, 19 nt, Artificial Sequence
  Description of Artificial Sequence: Synthetic oligonucleotide
  Antisense strand to SEQ ID NO: 1224448
cuccacccugaauaucuag

SEQ ID NO: 1224450 - RNA, 19 nt, Artificial Sequence
  Description of Artificial Sequence: Synthetic oligonucleotide
  Sense strand starting at position 3465 of SEQ ID NO: 917299
guugguuuccaccgaauuu

SEQ ID NO: 1224451 - RNA, 19 nt, Artificial Sequence
  Description of Artificial Sequence: Synthetic oligonucleotide
  Antisense strand to SEQ ID NO: 1224450
aaauucgguggaaaccaac

SEQ ID NO: 1224452 - RNA, 19 nt, Artificial Sequence
  Description of Artificial Sequence: Synthetic oligonucleotide
  Sense strand starting at position 3732 of SEQ ID NO: 917299
cgucuagcccaagaacauu

SEQ ID NO: 1224453 - RNA, 19 nt, Artificial Sequence
  Description of Artificial Sequence: Synthetic oligonucleotide
  Antisense strand to SEQ ID NO: 1224452
aauguucuugggcuagacg

SEQ ID NO: 1224454 - RNA, 19 nt, Artificial Sequence
  Description of Artificial Sequence: Synthetic oligonucleotide
  Sense strand starting at position 3750 of SEQ ID NO: 917299
ucaguuauuuacuucguau

SEQ ID NO: 1224455 - RNA, 19 nt, Artificial Sequence
  Description of Artificial Sequence: Synthetic oligonucleotide
  Antisense strand to SEQ ID NO: 1224454
auacgaaguaaauaacuga

SEQ ID NO: 1224456 - RNA, 19 nt, Artificial Sequence
  Description of Artificial Sequence: Synthetic oligonucleotide
  Sense strand starting at position 3752 of SEQ ID NO: 917299
aguuauuuacuucguaugu

SEQ ID NO: 1224457 - RNA, 19 nt, Artificial Sequence
  Description of Artificial Sequence: Synthetic oligonucleotide
  Antisense strand to SEQ ID NO: 1224456
acauacgaaguaaauaacu

SEQ ID NO: 1224458 - RNA, 19 nt, Artificial Sequence
  Description of Artificial Sequence: Synthetic oligonucleotide
  Sense strand starting at position 3756 of SEQ ID NO: 917299
auuuacuucguaugucuaa

SEQ ID NO: 1224459 - RNA, 19 nt, Artificial Sequence
  Description of Artificial Sequence: Synthetic oligonucleotide
  Antisense strand to SEQ ID NO: 1224458
uuagacauacgaaguaaau

SEQ ID NO: 1224460 - RNA, 19 nt, Artificial Sequence
  Description of Artificial Sequence: Synthetic oligonucleotide
  Sense strand starting at position 3979 of SEQ ID NO: 917300
gagcuccuacaaugucaga

SEQ ID NO: 1224461 - RNA, 19 nt, Artificial Sequence
  Description of Artificial Sequence: Synthetic oligonucleotide
  Antisense strand to SEQ ID NO: 1224460
ucugacauuguaggagcuc

SEQ ID NO: 1224462 - RNA, 19 nt, Artificial Sequence
  Description of Artificial Sequence: Synthetic oligonucleotide
  Sense strand starting at position 180 of SEQ ID NO: 917300
aguucaaauguggauggua

SEQ ID NO: 1224463 - RNA, 19 nt, Artificial Sequence
  Description of Artificial Sequence: Synthetic oligonucleotide
  Antisense strand to SEQ ID NO: 1224462
uaccauccacauuugaacu

SEQ ID NO: 1224464 - RNA, 19 nt, Artificial Sequence
  Description of Artificial Sequence: Synthetic oligonucleotide
  Sense strand starting at position 183 of SEQ ID NO: 917300
ucaaauguggaugguaaca

SEQ ID NO: 1224465 - RNA, 19 nt, Artificial Sequence
  Description of Artificial Sequence: Synthetic oligonucleotide
  Antisense strand to SEQ ID NO: 1224464
uguuaccauccacauuuga

SEQ ID NO: 1224466 - RNA, 19 nt, Artificial Sequence
  Description of Artificial Sequence: Synthetic oligonucleotide
  Sense strand starting at position 188 of SEQ ID NO: 917300
uguggaugguaacauuuaa

SEQ ID NO: 1224467 - RNA, 19 nt, Artificial Sequence
  Description of Artificial Sequence: Synthetic oligonucleotide
  Antisense strand to SEQ ID NO: 1224466
uuaaauguuaccauccaca

SEQ ID NO: 1224468 - RNA, 19 nt, Artificial Sequence
  Description of Artificial Sequence: Synthetic oligonucleotide
  Sense strand starting at position 212 of SEQ ID NO: 917300
gugugauacugggcaauua

SEQ ID NO: 1224469 - RNA, 19 nt, Artificial Sequence
  Description of Artificial Sequence: Synthetic oligonucleotide
  Antisense strand to SEQ ID NO: 1224468
uaauugcccaguaucacac

SEQ ID NO: 1224470 - RNA, 19 nt, Artificial Sequence
  Description of Artificial Sequence: Synthetic oligonucleotide
  Sense strand starting at position 340 of SEQ ID NO: 917300
guaguaagucuugauaauu

SEQ ID NO: 1224471 - RNA, 19 nt, Artificial Sequence
  Description of Artificial Sequence: Synthetic oligonucleotide
  Antisense strand to SEQ ID NO: 1224470
aauuaucaagacuuacuac

SEQ ID NO: 1224472 - RNA, 19 nt, Artificial Sequence
  Description of Artificial Sequence: Synthetic oligonucleotide
  Sense strand starting at position 362 of SEQ ID NO: 917300
auacuauaaugcuugcuga

SEQ ID NO: 1224473 - RNA, 19 nt, Artificial Sequence
  Description of Artificial Sequence: Synthetic oligonucleotide
  Antisense strand to SEQ ID NO: 1224472
ucagcaagcauuauaguau

SEQ ID NO: 1224474 - RNA, 19 nt, Artificial Sequence
  Description of Artificial Sequence: Synthetic oligonucleotide
  Sense strand starting at position 529 of SEQ ID NO: 917300
cugacuaaauuguccugaa

SEQ ID NO: 1224475 - RNA, 19 nt, Artificial Sequence
  Description of Artificial Sequence: Synthetic oligonucleotide
  Antisense strand to SEQ ID NO: 1224474
uucaggacaauuuagucag

SEQ ID NO: 1224476 - RNA, 19 nt, Artificial Sequence
  Description of Artificial Sequence: Synthetic oligonucleotide
  Sense strand starting at position 530 of SEQ ID NO: 917300
ugacuaaauuguccugaag

SEQ ID NO: 1224477 - RNA, 19 nt, Artificial Sequence
  Description of Artificial Sequence: Synthetic oligonucleotide
  Antisense strand to SEQ ID NO: 1224476
cuucaggacaauuuaguca

SEQ ID NO: 1224478 - RNA, 19 nt, Artificial Sequence
  Description of Artificial Sequence: Synthetic oligonucleotide
  Sense strand starting at position 533 of SEQ ID NO: 917300
cuaaauuguccugaaguga

SEQ ID NO: 1224479 - RNA, 19 nt, Artificial Sequence
  Description of Artificial Sequence: Synthetic oligonucleotide
  Antisense strand to SEQ ID NO: 1224478
ucacuucaggacaauuuag

SEQ ID NO: 1224480 - RNA, 19 nt, Artificial Sequence
  Description of Artificial Sequence: Synthetic oligonucleotide
  Sense strand starting at position 583 of SEQ ID NO: 917300
gugacuauggaaggugauu

SEQ ID NO: 1224481 - RNA, 19 nt, Artificial Sequence
  Description of Artificial Sequence: Synthetic oligonucleotide
  Antisense strand to SEQ ID NO: 1224480
aaucaccuuccauagucac

SEQ ID NO: 1224482 - RNA, 19 nt, Artificial Sequence
  Description of Artificial Sequence: Synthetic oligonucleotide
  Sense strand starting at position 592 of SEQ ID NO: 917300
gaaggugauuaagugcuau

SEQ ID NO: 1224483 - RNA, 19 nt, Artificial Sequence
  Description of Artificial Sequence: Synthetic oligonucleotide
  Antisense strand to SEQ ID NO: 1224482
auagcacuuaaucaccuuc

SEQ ID NO: 1224484 - RNA, 19 nt, Artificial Sequence
  Description of Artificial Sequence: Synthetic oligonucleotide
  Sense strand starting at position 644 of SEQ ID NO: 917300
ggaguaagugacgaaugca

SEQ ID NO: 1224485 - RNA, 19 nt, Artificial Sequence
  Description of Artificial Sequence: Synthetic oligonucleotide
  Antisense strand to SEQ ID NO: 1224484
ugcauucgucacuuacucc

SEQ ID NO: 1224486 - RNA, 19 nt, Artificial Sequence
  Description of Artificial Sequence: Synthetic oligonucleotide
  Sense strand starting at position 696 of SEQ ID NO: 917300
uguguuucccuaggaaaca

SEQ ID NO: 1224487 - RNA, 19 nt, Artificial Sequence
  Description of Artificial Sequence: Synthetic oligonucleotide
  Antisense strand to SEQ ID NO: 1224486
uguuuccuagggaaacaca

SEQ ID NO: 1224488 - RNA, 19 nt, Artificial Sequence
  Description of Artificial Sequence: Synthetic oligonucleotide
  Sense strand starting at position 749 of SEQ ID NO: 917300
agugacaauuugggacaau

SEQ ID NO: 1224489 - RNA, 19 nt, Artificial Sequence
  Description of Artificial Sequence: Synthetic oligonucleotide
  Antisense strand to SEQ ID NO: 1224488
auugucccaaauugucacu

SEQ ID NO: 1224490 - RNA, 19 nt, Artificial Sequence
  Description of Artificial Sequence: Synthetic oligonucleotide
  Sense strand starting at position 750 of SEQ ID NO: 917300
gugacaauuugggacaauc

SEQ ID NO: 1224491 - RNA, 19 nt, Artificial Sequence
  Description of Artificial Sequence: Synthetic oligonucleotide
  Antisense strand to SEQ ID NO: 1224490
gauugucccaaauugucac

SEQ ID NO: 1224492 - RNA, 19 nt, Artificial Sequence
  Description of Artificial Sequence: Synthetic oligonucleotide
  Sense strand starting at position 985 of SEQ ID NO: 917300
acggauucccagugaauac

SEQ ID NO: 1224493 - RNA, 19 nt, Artificial Sequence
  Description of Artificial Sequence: Synthetic oligonucleotide
  Antisense strand to SEQ ID NO: 1224492
guauucacugggaauccgu

SEQ ID NO: 1224494 - RNA, 19 nt, Artificial Sequence
  Description of Artificial Sequence: Synthetic oligonucleotide
  Sense strand starting at position 2282 of SEQ ID NO: 917300
agugauagccucuaauucu

SEQ ID NO: 1224495 - RNA, 19 nt, Artificial Sequence
  Description of Artificial Sequence: Synthetic oligonucleotide
  Antisense strand to SEQ ID NO: 1224494
agaauuagaggcuaucacu

SEQ ID NO: 1224496 - RNA, 19 nt, Artificial Sequence
  Description of Artificial Sequence: Synthetic oligonucleotide
  Sense strand starting at position 2331 of SEQ ID NO: 917300
uacugauuucgcugguugu

SEQ ID NO: 1224497 - RNA, 19 nt, Artificial Sequence
  Description of Artificial Sequence: Synthetic oligonucleotide
  Antisense strand to SEQ ID NO: 1224496
acaaccagcgaaaucagua

SEQ ID NO: 1224498 - RNA, 19 nt, Artificial Sequence
  Description of Artificial Sequence: Synthetic oligonucleotide
  Sense strand starting at position 2334 of SEQ ID NO: 917300
ugauuucgcugguugugaa

SEQ ID NO: 1224499 - RNA, 19 nt, Artificial Sequence
  Description of Artificial Sequence: Synthetic oligonucleotide
  Antisense strand to SEQ ID NO: 1224498
uucacaaccagcgaaauca

SEQ ID NO: 1224500 - RNA, 19 nt, Artificial Sequence
  Description of Artificial Sequence: Synthetic oligonucleotide
  Sense strand starting at position 2335 of SEQ ID NO: 917300
gauuucgcugguugugaaa

SEQ ID NO: 1224501 - RNA, 19 nt, Artificial Sequence
  Description of Artificial Sequence: Synthetic oligonucleotide
  Antisense strand to SEQ ID NO: 1224500
uuucacaaccagcgaaauc

SEQ ID NO: 1224502 - RNA, 19 nt, Artificial Sequence
  Description of Artificial Sequence: Synthetic oligonucleotide
  Sense strand starting at position 2480 of SEQ ID NO: 917300
ggucucaguucucuuaaua

SEQ ID NO: 1224503 - RNA, 19 nt, Artificial Sequence
  Description of Artificial Sequence: Synthetic oligonucleotide
  Antisense strand to SEQ ID NO: 1224502
uauuaagagaacugagacc

SEQ ID NO: 1224504 - RNA, 19 nt, Artificial Sequence
  Description of Artificial Sequence: Synthetic oligonucleotide
  Sense strand starting at position 2536 of SEQ ID NO: 917300
gaaauaaaccguugcauga

SEQ ID NO: 1224505 - RNA, 19 nt, Artificial Sequence
  Description of Artificial Sequence: Synthetic oligonucleotide
  Antisense strand to SEQ ID NO: 1224504
ucaugcaacgguuuauuuc

SEQ ID NO: 1224506 - RNA, 19 nt, Artificial Sequence
  Description of Artificial Sequence: Synthetic oligonucleotide
  Sense strand starting at position 2546 of SEQ ID NO: 917300
guugcaugaccagaaauca

SEQ ID NO: 1224507 - RNA, 19 nt, Artificial Sequence
  Description of Artificial Sequence: Synthetic oligonucleotide
  Antisense strand to SEQ ID NO: 1224506
ugauuucuggucaugcaac

SEQ ID NO: 1224508 - RNA, 19 nt, Artificial Sequence
  Description of Artificial Sequence: Synthetic oligonucleotide
  Sense strand starting at position 2578 of SEQ ID NO: 917300
cuaguaucuguuuaagguu

SEQ ID NO: 1224509 - RNA, 19 nt, Artificial Sequence
  Description of Artificial Sequence: Synthetic oligonucleotide
  Antisense strand to SEQ ID NO: 1224508
aaccuuaaacagauacuag

SEQ ID NO: 1224510 - RNA, 19 nt, Artificial Sequence
  Description of Artificial Sequence: Synthetic oligonucleotide
  Sense strand starting at position 2656 of SEQ ID NO: 917300
cuagauauucaggguggag

SEQ ID NO: 1224511 - RNA, 19 nt, Artificial Sequence
  Description of Artificial Sequence: Synthetic oligonucleotide
  Antisense strand to SEQ ID NO: 1224510
cuccacccugaauaucuag

SEQ ID NO: 1224512 - RNA, 19 nt, Artificial Sequence
  Description of Artificial Sequence: Synthetic oligonucleotide
  Sense strand starting at position 2713 of SEQ ID NO: 917300
guugguuuccaccgaauuu

SEQ ID NO: 1224513 - RNA, 19 nt, Artificial Sequence
  Description of Artificial Sequence: Synthetic oligonucleotide
  Antisense strand to SEQ ID NO: 1224512
aaauucgguggaaaccaac

SEQ ID NO: 1224514 - RNA, 19 nt, Artificial Sequence
  Description of Artificial Sequence: Synthetic oligonucleotide
  Sense strand starting at position 2748 of SEQ ID NO: 917300
ucuuucgccauggagaagu

SEQ ID NO: 1224515 - RNA, 19 nt, Artificial Sequence
  Description of Artificial Sequence: Synthetic oligonucleotide
  Antisense strand to SEQ ID NO: 1224514
acuucuccauggcgaaaga

SEQ ID NO: 1224516 - RNA, 19 nt, Artificial Sequence
  Description of Artificial Sequence: Synthetic oligonucleotide
  Sense strand starting at position 2980 of SEQ ID NO: 917300
cgucuagcccaagaacauu

SEQ ID NO: 1224517 - RNA, 19 nt, Artificial Sequence
  Description of Artificial Sequence: Synthetic oligonucleotide
  Antisense strand to SEQ ID NO: 1224516
aauguucuugggcuagacg

SEQ ID NO: 1224518 - RNA, 19 nt, Artificial Sequence
  Description of Artificial Sequence: Synthetic oligonucleotide
  Sense strand starting at position 2998 of SEQ ID NO: 917300
ucaguuauuuacuucguau

SEQ ID NO: 1224519 - RNA, 19 nt, Artificial Sequence
  Description of Artificial Sequence: Synthetic oligonucleotide
  Antisense strand to SEQ ID NO: 1224518
auacgaaguaaauaacuga

SEQ ID NO: 1224520 - RNA, 19 nt, Artificial Sequence
  Description of Artificial Sequence: Synthetic oligonucleotide
  Sense strand starting at position 3000 of SEQ ID NO: 917300
aguuauuuacuucguaugu

SEQ ID NO: 1224521 - RNA, 19 nt, Artificial Sequence
  Description of Artificial Sequence: Synthetic oligonucleotide
  Antisense strand to SEQ ID NO: 1224520
acauacgaaguaaauaacu

SEQ ID NO: 1224522 - RNA, 19 nt, Artificial Sequence
  Description of Artificial Sequence: Synthetic oligonucleotide
  Sense strand starting at position 3004 of SEQ ID NO: 917300
auuuacuucguaugucuaa

SEQ ID NO: 1224523 - RNA, 19 nt, Artificial Sequence
  Description of Artificial Sequence: Synthetic oligonucleotide
  Antisense strand to SEQ ID NO: 1224522
uuagacauacgaaguaaau

SEQ ID NO: 1224524 - RNA, 19 nt, Artificial Sequence
  Description of Artificial Sequence: Synthetic oligonucleotide
  Sense strand starting at position 3227 of SEQ ID NO: 917300
gagcuccuacaaugucaga

SEQ ID NO: 1224525 - RNA, 19 nt, Artificial Sequence
  Description of Artificial Sequence: Synthetic oligonucleotide
  Antisense strand to SEQ ID NO: 1224524
ucugacauuguaggagcuc

SEQ ID NO: 1224526 - RNA, 19 nt, Artificial Sequence
  Description of Artificial Sequence: Synthetic oligonucleotide
  Sense strand starting at position 3257 of SEQ ID NO: 917300
guauuaguuacaugagaag

SEQ ID NO: 1224527 - RNA, 19 nt, Artificial Sequence
  Description of Artificial Sequence: Synthetic oligonucleotide
  Antisense strand to SEQ ID NO: 1224526
cuucucauguaacuaauac

SEQ ID NO: 1224528 - RNA, 19 nt, Artificial Sequence
  Description of Artificial Sequence: Synthetic oligonucleotide
  Sense strand starting at position 3397 of SEQ ID NO: 917300
uagaguugccaugauuauu

SEQ ID NO: 1224529 - RNA, 19 nt, Artificial Sequence
  Description of Artificial Sequence: Synthetic oligonucleotide
  Antisense strand to SEQ ID NO: 1224528
aauaaucauggcaacucua

SEQ ID NO: 1224530 - RNA, 19 nt, Artificial Sequence
  Description of Artificial Sequence: Synthetic oligonucleotide
  Sense strand starting at position 3400 of SEQ ID NO: 917300
aguugccaugauuauuaau

SEQ ID NO: 1224531 - RNA, 19 nt, Artificial Sequence
  Description of Artificial Sequence: Synthetic oligonucleotide
  Antisense strand to SEQ ID NO: 1224530
auuaauaaucauggcaacu

SEQ ID NO: 1224532 - RNA, 19 nt, Artificial Sequence
  Description of Artificial Sequence: Synthetic oligonucleotide
  Sense strand starting at position 3423 of SEQ ID NO: 917300
uuauguaaauggucuacuu

SEQ ID NO: 1224533 - RNA, 19 nt, Artificial Sequence
  Description of Artificial Sequence: Synthetic oligonucleotide
  Antisense strand to SEQ ID NO: 1224532
aaguagaccauuuacauaa

SEQ ID NO: 1224534 - RNA, 19 nt, Artificial Sequence
  Description of Artificial Sequence: Synthetic oligonucleotide
  Sense strand starting at position 3425 of SEQ ID NO: 917300
auguaaauggucuacuuua

SEQ ID NO: 1224535 - RNA, 19 nt, Artificial Sequence
  Description of Artificial Sequence: Synthetic oligonucleotide
  Antisense strand to SEQ ID NO: 1224534
uaaaguagaccauuuacau

SEQ ID NO: 1224536 - RNA, 19 nt, Artificial Sequence
  Description of Artificial Sequence: Synthetic oligonucleotide
  Sense strand starting at position 3455 of SEQ ID NO: 917300
cacuuauuccgugaucaag

SEQ ID NO: 1224537 - RNA, 19 nt, Artificial Sequence
  Description of Artificial Sequence: Synthetic oligonucleotide
  Antisense strand to SEQ ID NO: 1224536
cuugaucacggaauaagug

SEQ ID NO: 1224538 - RNA, 19 nt, Artificial Sequence
  Description of Artificial Sequence: Synthetic oligonucleotide
  Sense strand starting at position 3457 of SEQ ID NO: 917300
cuuauuccgugaucaagau

SEQ ID NO: 1224539 - RNA, 19 nt, Artificial Sequence
  Description of Artificial Sequence: Synthetic oligonucleotide
  Antisense strand to SEQ ID NO: 1224538
aucuugaucacggaauaag

SEQ ID NO: 1224540 - RNA, 19 nt, Artificial Sequence
  Description of Artificial Sequence: Synthetic oligonucleotide
  Sense strand starting at position 3458 of SEQ ID NO: 917301
uuauuccgugaucaagauu

SEQ ID NO: 1224541 - RNA, 19 nt, Artificial Sequence
  Description of Artificial Sequence: Synthetic oligonucleotide
  Antisense strand to SEQ ID NO: 1224540
aaucuugaucacggaauaa

SEQ ID NO: 1224542 - RNA, 19 nt, Artificial Sequence
  Description of Artificial Sequence: Synthetic oligonucleotide
  Sense strand starting at position 25 of SEQ ID NO: 917301
agaaccuuauuagugcaaa

SEQ ID NO: 1224543 - RNA, 19 nt, Artificial Sequence
  Description of Artificial Sequence: Synthetic oligonucleotide
  Antisense strand to SEQ ID NO: 1224542
uuugcacuaauaagguucu

SEQ ID NO: 1224544 - RNA, 19 nt, Artificial Sequence
  Description of Artificial Sequence: Synthetic oligonucleotide
  Sense strand starting at position 83 of SEQ ID NO: 917301
aucuaagggaguugaguua

SEQ ID NO: 1224545 - RNA, 19 nt, Artificial Sequence
  Description of Artificial Sequence: Synthetic oligonucleotide
  Antisense strand to SEQ ID NO: 1224544
uaacucaacucccuuagau

SEQ ID NO: 1224546 - RNA, 19 nt, Artificial Sequence
  Description of Artificial Sequence: Synthetic oligonucleotide
  Sense strand starting at position 272 of SEQ ID NO: 917301
gagcucuggcacuagacaa

SEQ ID NO: 1224547 - RNA, 19 nt, Artificial Sequence
  Description of Artificial Sequence: Synthetic oligonucleotide
  Antisense strand to SEQ ID NO: 1224546
uugucuagugccagagcuc

SEQ ID NO: 1224548 - RNA, 19 nt, Artificial Sequence
  Description of Artificial Sequence: Synthetic oligonucleotide
  Sense strand starting at position 284 of SEQ ID NO: 917301
uagacaaggugguuuauaa

SEQ ID NO: 1224549 - RNA, 19 nt, Artificial Sequence
  Description of Artificial Sequence: Synthetic oligonucleotide
  Antisense strand to SEQ ID NO: 1224548
uuauaaaccaccuugucua

SEQ ID NO: 1224550 - RNA, 19 nt, Artificial Sequence
  Description of Artificial Sequence: Synthetic oligonucleotide
  Sense strand starting at position 332 of SEQ ID NO: 917301
ucuauagacuuaguuugaa

SEQ ID NO: 1224551 - RNA, 19 nt, Artificial Sequence
  Description of Artificial Sequence: Synthetic oligonucleotide
  Antisense strand to SEQ ID NO: 1224550
uucaaacuaagucuauaga

SEQ ID NO: 1224552 - RNA, 19 nt, Artificial Sequence
  Description of Artificial Sequence: Synthetic oligonucleotide
  Sense strand starting at position 410 of SEQ ID NO: 917301
gauacccuaucugugaaga

SEQ ID NO: 1224553 - RNA, 19 nt, Artificial Sequence
  Description of Artificial Sequence: Synthetic oligonucleotide
  Antisense strand to SEQ ID NO: 1224552
ucuucacagauaggguauc

SEQ ID NO: 1224554 - RNA, 19 nt, Artificial Sequence
  Description of Artificial Sequence: Synthetic oligonucleotide
  Sense strand starting at position 434 of SEQ ID NO: 917301
uggcaacuuaaggguuaau

SEQ ID NO: 1224555 - RNA, 19 nt, Artificial Sequence
  Description of Artificial Sequence: Synthetic oligonucleotide
  Antisense strand to SEQ ID NO: 1224554
auuaacccuuaaguugcca

SEQ ID NO: 1224556 - RNA, 19 nt, Artificial Sequence
  Description of Artificial Sequence: Synthetic oligonucleotide
  Sense strand starting at position 704 of SEQ ID NO: 917301
ccuggugagucucuacaaa

SEQ ID NO: 1224557 - RNA, 19 nt, Artificial Sequence
  Description of Artificial Sequence: Synthetic oligonucleotide
  Antisense strand to SEQ ID NO: 1224556
uuuguagagacucaccagg

SEQ ID NO: 1224558 - RNA, 19 nt, Artificial Sequence
  Description of Artificial Sequence: Synthetic oligonucleotide
  Sense strand starting at position 1140 of SEQ ID NO: 917301
aguaaugcuuaucuuaaga

SEQ ID NO: 1224559 - RNA, 19 nt, Artificial Sequence
  Description of Artificial Sequence: Synthetic oligonucleotide
  Antisense strand to SEQ ID NO: 1224558
ucuuaagauaagcauuacu

SEQ ID NO: 1224560 - RNA, 19 nt, Artificial Sequence
  Description of Artificial Sequence: Synthetic oligonucleotide
  Sense strand starting at position 1292 of SEQ ID NO: 917301
ccacgucaucucuaugacu

SEQ ID NO: 1224561 - RNA, 19 nt, Artificial Sequence
  Description of Artificial Sequence: Synthetic oligonucleotide
  Antisense strand to SEQ ID NO: 1224560
agucauagagaugacgugg

SEQ ID NO: 1224562 - RNA, 19 nt, Artificial Sequence
  Description of Artificial Sequence: Synthetic oligonucleotide
  Sense strand starting at position 1294 of SEQ ID NO: 917301
acgucaucucuaugacuac

SEQ ID NO: 1224563 - RNA, 19 nt, Artificial Sequence
  Description of Artificial Sequence: Synthetic oligonucleotide
  Antisense strand to SEQ ID NO: 1224562
guagucauagagaugacgu

SEQ ID NO: 1224564 - RNA, 19 nt, Artificial Sequence
  Description of Artificial Sequence: Synthetic oligonucleotide
  Sense strand starting at position 1351 of SEQ ID NO: 917301
cuguaacagugacugauaa

SEQ ID NO: 1224565 - RNA, 19 nt, Artificial Sequence
  Description of Artificial Sequence: Synthetic oligonucleotide
  Antisense strand to SEQ ID NO: 1224564
uuaucagucacuguuacag

SEQ ID NO: 1224566 - RNA, 19 nt, Artificial Sequence
  Description of Artificial Sequence: Synthetic oligonucleotide
  Sense strand starting at position 1352 of SEQ ID NO: 917301
uguaacagugacugauaau

SEQ ID NO: 1224567 - RNA, 19 nt, Artificial Sequence
  Description of Artificial Sequence: Synthetic oligonucleotide
  Antisense strand to SEQ ID NO: 1224566
auuaucagucacuguuaca

SEQ ID NO: 1224568 - RNA, 19 nt, Artificial Sequence
  Description of Artificial Sequence: Synthetic oligonucleotide
  Sense strand starting at position 1464 of SEQ ID NO: 917301
agauauaagcucugugaga

SEQ ID NO: 1224569 - RNA, 19 nt, Artificial Sequence
  Description of Artificial Sequence: Synthetic oligonucleotide
  Antisense strand to SEQ ID NO: 1224568
ucucacagagcuuauaucu

SEQ ID NO: 1224570 - RNA, 19 nt, Artificial Sequence
  Description of Artificial Sequence: Synthetic oligonucleotide
  Sense strand starting at position 1465 of SEQ ID NO: 917301
gauauaagcucugugagac

SEQ ID NO: 1224571 - RNA, 19 nt, Artificial Sequence
  Description of Artificial Sequence: Synthetic oligonucleotide
  Antisense strand to SEQ ID NO: 1224570
gucucacagagcuuauauc

SEQ ID NO: 1224572 - RNA, 19 nt, Artificial Sequence
  Description of Artificial Sequence: Synthetic oligonucleotide
  Sense strand starting at position 1603 of SEQ ID NO: 917301
gacagaaaguaauagaaag

SEQ ID NO: 1224573 - RNA, 19 nt, Artificial Sequence
  Description of Artificial Sequence: Synthetic oligonucleotide
  Antisense strand to SEQ ID NO: 1224572
cuuucuauuacuuucuguc

SEQ ID NO: 1224574 - RNA, 19 nt, Artificial Sequence
  Description of Artificial Sequence: Synthetic oligonucleotide
  Sense strand starting at position 1745 of SEQ ID NO: 917301
uuuaaacucuuugugggaa

SEQ ID NO: 1224575 - RNA, 19 nt, Artificial Sequence
  Description of Artificial Sequence: Synthetic oligonucleotide
  Antisense strand to SEQ ID NO: 1224574
uucccacaaagaguuuaaa

SEQ ID NO: 1224576 - RNA, 19 nt, Artificial Sequence
  Description of Artificial Sequence: Synthetic oligonucleotide
  Sense strand starting at position 1821 of SEQ ID NO: 917301
agaguugauuuccauaacu

SEQ ID NO: 1224577 - RNA, 19 nt, Artificial Sequence
  Description of Artificial Sequence: Synthetic oligonucleotide
  Antisense strand to SEQ ID NO: 1224576
aguuauggaaaucaacucu

SEQ ID NO: 1224578 - RNA, 19 nt, Artificial Sequence
  Description of Artificial Sequence: Synthetic oligonucleotide
  Sense strand starting at position 2014 of SEQ ID NO: 917301
aguucuuguggugauggaa

SEQ ID NO: 1224579 - RNA, 19 nt, Artificial Sequence
  Description of Artificial Sequence: Synthetic oligonucleotide
  Antisense strand to SEQ ID NO: 1224578
uuccaucaccacaagaacu

SEQ ID NO: 1224580 - RNA, 19 nt, Artificial Sequence
  Description of Artificial Sequence: Synthetic oligonucleotide
  Sense strand starting at position 2200 of SEQ ID NO: 917301
gucaauuuauggcuaggca

SEQ ID NO: 1224581 - RNA, 19 nt, Artificial Sequence
  Description of Artificial Sequence: Synthetic oligonucleotide
  Antisense strand to SEQ ID NO: 1224580
ugccuagccauaaauugac

SEQ ID NO: 1224582 - RNA, 19 nt, Artificial Sequence
  Description of Artificial Sequence: Synthetic oligonucleotide
  Sense strand starting at position 2960 of SEQ ID NO: 917301
ccagcucagauaugguaga

SEQ ID NO: 1224583 - RNA, 19 nt, Artificial Sequence
  Description of Artificial Sequence: Synthetic oligonucleotide
  Antisense strand to SEQ ID NO: 1224582
ucuaccauaucugagcugg

SEQ ID NO: 1224584 - RNA, 19 nt, Artificial Sequence
  Description of Artificial Sequence: Synthetic oligonucleotide
  Sense strand starting at position 2973 of SEQ ID NO: 917301
gguagaaauuuaggaauua

SEQ ID NO: 1224585 - RNA, 19 nt, Artificial Sequence
  Description of Artificial Sequence: Synthetic oligonucleotide
  Antisense strand to SEQ ID NO: 1224584
uaauuccuaaauuucuacc

SEQ ID NO: 1224586 - RNA, 19 nt, Artificial Sequence
  Description of Artificial Sequence: Synthetic oligonucleotide
  Sense strand starting at position 3026 of SEQ ID NO: 917301
ugcuaagggcuuuaauaau

SEQ ID NO: 1224587 - RNA, 19 nt, Artificial Sequence
  Description of Artificial Sequence: Synthetic oligonucleotide
  Antisense strand to SEQ ID NO: 1224586
auuauuaaagcccuuagca

SEQ ID NO: 1224588 - RNA, 19 nt, Artificial Sequence
  Description of Artificial Sequence: Synthetic oligonucleotide
  Sense strand starting at position 3138 of SEQ ID NO: 917301
agaagugaagaguguguuu

SEQ ID NO: 1224589 - RNA, 19 nt, Artificial Sequence
  Description of Artificial Sequence: Synthetic oligonucleotide
  Antisense strand to SEQ ID NO: 1224588
aaacacacucuucacuucu

SEQ ID NO: 1224590 - RNA, 19 nt, Artificial Sequence
  Description of Artificial Sequence: Synthetic oligonucleotide
  Sense strand starting at position 3140 of SEQ ID NO: 917301
aagugaagaguguguuuaa

SEQ ID NO: 1224591 - RNA, 19 nt, Artificial Sequence
  Description of Artificial Sequence: Synthetic oligonucleotide
  Antisense strand to SEQ ID NO: 1224590
uuaaacacacucuucacuu

SEQ ID NO: 1224592 - RNA, 19 nt, Artificial Sequence
  Description of Artificial Sequence: Synthetic oligonucleotide
  Sense strand starting at position 3141 of SEQ ID NO: 917301
agugaagaguguguuuaau

SEQ ID NO: 1224593 - RNA, 19 nt, Artificial Sequence
  Description of Artificial Sequence: Synthetic oligonucleotide
  Antisense strand to SEQ ID NO: 1224592
auuaaacacacucuucacu

SEQ ID NO: 1224594 - RNA, 19 nt, Artificial Sequence
  Description of Artificial Sequence: Synthetic oligonucleotide
  Sense strand starting at position 3143 of SEQ ID NO: 917301
ugaagaguguguuuaaugg

SEQ ID NO: 1224595 - RNA, 19 nt, Artificial Sequence
  Description of Artificial Sequence: Synthetic oligonucleotide
  Antisense strand to SEQ ID NO: 1224594
ccauuaaacacacucuuca

SEQ ID NO: 1224596 - RNA, 19 nt, Artificial Sequence
  Description of Artificial Sequence: Synthetic oligonucleotide
  Sense strand starting at position 3164 of SEQ ID NO: 917301
ucaucagugagcugauaag

SEQ ID NO: 1224597 - RNA, 19 nt, Artificial Sequence
  Description of Artificial Sequence: Synthetic oligonucleotide
  Antisense strand to SEQ ID NO: 1224596
cuuaucagcucacugauga

SEQ ID NO: 1224598 - RNA, 19 nt, Artificial Sequence
  Description of Artificial Sequence: Synthetic oligonucleotide
  Sense strand starting at position 3184 of SEQ ID NO: 917301
aaagaaucagcccgauaug

SEQ ID NO: 1224599 - RNA, 19 nt, Artificial Sequence
  Description of Artificial Sequence: Synthetic oligonucleotide
  Antisense strand to SEQ ID NO: 1224598
cauaucgggcugauucuuu

SEQ ID NO: 1224600 - RNA, 19 nt, Artificial Sequence
  Description of Artificial Sequence: Synthetic oligonucleotide
  Sense strand starting at position 3185 of SEQ ID NO: 917301
aagaaucagcccgauaugu

SEQ ID NO: 1224601 - RNA, 19 nt, Artificial Sequence
  Description of Artificial Sequence: Synthetic oligonucleotide
  Antisense strand to SEQ ID NO: 1224600
acauaucgggcugauucuu

SEQ ID NO: 1224602 - RNA, 19 nt, Artificial Sequence
  Description of Artificial Sequence: Synthetic oligonucleotide
  Sense strand starting at position 3194 of SEQ ID NO: 917301
cccgauaugugggucaaag

SEQ ID NO: 1224603 - RNA, 19 nt, Artificial Sequence
  Description of Artificial Sequence: Synthetic oligonucleotide
  Antisense strand to SEQ ID NO: 1224602
cuuugacccacauaucggg

SEQ ID NO: 1224604 - RNA, 19 nt, Artificial Sequence
  Description of Artificial Sequence: Synthetic oligonucleotide
  Sense strand starting at position 3196 of SEQ ID NO: 917301
cgauaugugggucaaagaa

SEQ ID NO: 1224605 - RNA, 19 nt, Artificial Sequence
  Description of Artificial Sequence: Synthetic oligonucleotide
  Antisense strand to SEQ ID NO: 1224604
uucuuugacccacauaucg

SEQ ID NO: 1224606 - RNA, 19 nt, Artificial Sequence
  Description of Artificial Sequence: Synthetic oligonucleotide
  Sense strand starting at position 3545 of SEQ ID NO: 917301
uagucagacuagucaagaa

SEQ ID NO: 1224607 - RNA, 19 nt, Artificial Sequence
  Description of Artificial Sequence: Synthetic oligonucleotide
  Antisense strand to SEQ ID NO: 1224606
uucuugacuagucugacua

SEQ ID NO: 1224608 - RNA, 19 nt, Artificial Sequence
  Description of Artificial Sequence: Synthetic oligonucleotide
  Sense strand starting at position 3618 of SEQ ID NO: 917301
uauagaucccguggacauu

SEQ ID NO: 1224609 - RNA, 19 nt, Artificial Sequence
  Description of Artificial Sequence: Synthetic oligonucleotide
  Antisense strand to SEQ ID NO: 1224608
aauguccacgggaucuaua

SEQ ID NO: 1224610 - RNA, 19 nt, Artificial Sequence
  Description of Artificial Sequence: Synthetic oligonucleotide
  Sense strand starting at position 3619 of SEQ ID NO: 917301
auagaucccguggacauua

SEQ ID NO: 1224611 - RNA, 19 nt, Artificial Sequence
  Description of Artificial Sequence: Synthetic oligonucleotide
  Antisense strand to SEQ ID NO: 1224610
uaauguccacgggaucuau

SEQ ID NO: 1224612 - RNA, 19 nt, Artificial Sequence
  Description of Artificial Sequence: Synthetic oligonucleotide
  Sense strand starting at position 3675 of SEQ ID NO: 917301
ccagaaauuugauaccuag

SEQ ID NO: 1224613 - RNA, 19 nt, Artificial Sequence
  Description of Artificial Sequence: Synthetic oligonucleotide
  Antisense strand to SEQ ID NO: 1224612
cuagguaucaaauuucugg

SEQ ID NO: 1224614 - RNA, 19 nt, Artificial Sequence
  Description of Artificial Sequence: Synthetic oligonucleotide
  Sense strand starting at position 3699 of SEQ ID NO: 917301
acugacuaguuacuugaaa

SEQ ID NO: 1224615 - RNA, 19 nt, Artificial Sequence
  Description of Artificial Sequence: Synthetic oligonucleotide
  Antisense strand to SEQ ID NO: 1224614
uuucaaguaacuagucagu

SEQ ID NO: 1224616 - RNA, 19 nt, Artificial Sequence
  Description of Artificial Sequence: Synthetic oligonucleotide
  Sense strand starting at position 3700 of SEQ ID NO: 917301
cugacuaguuacuugaaag

SEQ ID NO: 1224617 - RNA, 19 nt, Artificial Sequence
  Description of Artificial Sequence: Synthetic oligonucleotide
  Antisense strand to SEQ ID NO: 1224616
cuuucaaguaacuagucag

SEQ ID NO: 1224618 - RNA, 19 nt, Artificial Sequence
  Description of Artificial Sequence: Synthetic oligonucleotide
  Sense strand starting at position 3786 of SEQ ID NO: 917301
uuggaucgauaacugauaa

SEQ ID NO: 1224619 - RNA, 19 nt, Artificial Sequence
  Description of Artificial Sequence: Synthetic oligonucleotide
  Antisense strand to SEQ ID NO: 1224618
uuaucaguuaucgauccaa

SEQ ID NO: 1224620 - RNA, 19 nt, Artificial Sequence
  Description of Artificial Sequence: Synthetic oligonucleotide
  Sense strand starting at position 3836 of SEQ ID NO: 917302
aggcuuacuggugaauucu

SEQ ID NO: 1224621 - RNA, 19 nt, Artificial Sequence
  Description of Artificial Sequence: Synthetic oligonucleotide
  Antisense strand to SEQ ID NO: 1224620
agaauucaccaguaagccu

SEQ ID NO: 1224622 - RNA, 19 nt, Artificial Sequence
  Description of Artificial Sequence: Synthetic oligonucleotide
  Sense strand starting at position 16 of SEQ ID NO: 917302
ggcuuugaguaccucaguu

SEQ ID NO: 1224623 - RNA, 19 nt, Artificial Sequence
  Description of Artificial Sequence: Synthetic oligonucleotide
  Antisense strand to SEQ ID NO: 1224622
aacugagguacucaaagcc

SEQ ID NO: 1224624 - RNA, 19 nt, Artificial Sequence
  Description of Artificial Sequence: Synthetic oligonucleotide
  Sense strand starting at position 18 of SEQ ID NO: 917302
cuuugaguaccucaguuga

SEQ ID NO: 1224625 - RNA, 19 nt, Artificial Sequence
  Description of Artificial Sequence: Synthetic oligonucleotide
  Antisense strand to SEQ ID NO: 1224624
ucaacugagguacucaaag

SEQ ID NO: 1224626 - RNA, 19 nt, Artificial Sequence
  Description of Artificial Sequence: Synthetic oligonucleotide
  Sense strand starting at position 20 of SEQ ID NO: 917302
uugaguaccucaguugaug

SEQ ID NO: 1224627 - RNA, 19 nt, Artificial Sequence
  Description of Artificial Sequence: Synthetic oligonucleotide
  Antisense strand to SEQ ID NO: 1224626
caucaacugagguacucaa

SEQ ID NO: 1224628 - RNA, 19 nt, Artificial Sequence
  Description of Artificial Sequence: Synthetic oligonucleotide
  Sense strand starting at position 134 of SEQ ID NO: 917302
auauucuaccagugcaaga

SEQ ID NO: 1224629 - RNA, 19 nt, Artificial Sequence
  Description of Artificial Sequence: Synthetic oligonucleotide
  Antisense strand to SEQ ID NO: 1224628
ucuugcacugguagaauau

SEQ ID NO: 1224630 - RNA, 19 nt, Artificial Sequence
  Description of Artificial Sequence: Synthetic oligonucleotide
  Sense strand starting at position 197 of SEQ ID NO: 917302
ccagucuugugguuacuga

SEQ ID NO: 1224631 - RNA, 19 nt, Artificial Sequence
  Description of Artificial Sequence: Synthetic oligonucleotide
  Antisense strand to SEQ ID NO: 1224630
ucaguaaccacaagacugg

SEQ ID NO: 1224632 - RNA, 19 nt, Artificial Sequence
  Description of Artificial Sequence: Synthetic oligonucleotide
  Sense strand starting at position 273 of SEQ ID NO: 917302
augugauuacuauguauuc

SEQ ID NO: 1224633 - RNA, 19 nt, Artificial Sequence
  Description of Artificial Sequence: Synthetic oligonucleotide
  Antisense strand to SEQ ID NO: 1224632
gaauacauaguaaucacau

SEQ ID NO: 1224634 - RNA, 19 nt, Artificial Sequence
  Description of Artificial Sequence: Synthetic oligonucleotide
  Sense strand starting at position 283 of SEQ ID NO: 917302
uauguauuccgugccugua

SEQ ID NO: 1224635 - RNA, 19 nt, Artificial Sequence
  Description of Artificial Sequence: Synthetic oligonucleotide
  Antisense strand to SEQ ID NO: 1224634
uacaggcacggaauacaua

SEQ ID NO: 1224636 - RNA, 19 nt, Artificial Sequence
  Description of Artificial Sequence: Synthetic oligonucleotide
  Sense strand starting at position 284 of SEQ ID NO: 917302
auguauuccgugccuguau

SEQ ID NO: 1224637 - RNA, 19 nt, Artificial Sequence
  Description of Artificial Sequence: Synthetic oligonucleotide
  Antisense strand to SEQ ID NO: 1224636
auacaggcacggaauacau

SEQ ID NO: 1224638 - RNA, 19 nt, Artificial Sequence
  Description of Artificial Sequence: Synthetic oligonucleotide
  Sense strand starting at position 299 of SEQ ID NO: 917302
guaucauaguaucucaugu

SEQ ID NO: 1224639 - RNA, 19 nt, Artificial Sequence
  Description of Artificial Sequence: Synthetic oligonucleotide
  Antisense strand to SEQ ID NO: 1224638
acaugagauacuaugauac

SEQ ID NO: 1224640 - RNA, 19 nt, Artificial Sequence
  Description of Artificial Sequence: Synthetic oligonucleotide
  Sense strand starting at position 472 of SEQ ID NO: 917302
accuacauguguuccuaaa

SEQ ID NO: 1224641 - RNA, 19 nt, Artificial Sequence
  Description of Artificial Sequence: Synthetic oligonucleotide
  Antisense strand to SEQ ID NO: 1224640
uuuaggaacacauguaggu

SEQ ID NO: 1224642 - RNA, 19 nt, Artificial Sequence
  Description of Artificial Sequence: Synthetic oligonucleotide
  Sense strand starting at position 474 of SEQ ID NO: 917302
cuacauguguuccuaaaga

SEQ ID NO: 1224643 - RNA, 19 nt, Artificial Sequence
  Description of Artificial Sequence: Synthetic oligonucleotide
  Antisense strand to SEQ ID NO: 1224642
ucuuuaggaacacauguag

SEQ ID NO: 1224644 - RNA, 19 nt, Artificial Sequence
  Description of Artificial Sequence: Synthetic oligonucleotide
  Sense strand starting at position 2184 of SEQ ID NO: 917302
aguauaguuuagucaccua

SEQ ID NO: 1224645 - RNA, 19 nt, Artificial Sequence
  Description of Artificial Sequence: Synthetic oligonucleotide
  Antisense strand to SEQ ID NO: 1224644
uaggugacuaaacuauacu

SEQ ID NO: 1224646 - RNA, 19 nt, Artificial Sequence
  Description of Artificial Sequence: Synthetic oligonucleotide
  Sense strand starting at position 2187 of SEQ ID NO: 917302
auaguuuagucaccuacca

SEQ ID NO: 1224647 - RNA, 19 nt, Artificial Sequence
  Description of Artificial Sequence: Synthetic oligonucleotide
  Antisense strand to SEQ ID NO: 1224646
ugguaggugacuaaacuau

SEQ ID NO: 1224648 - RNA, 19 nt, Artificial Sequence
  Description of Artificial Sequence: Synthetic oligonucleotide
  Sense strand starting at position 2204 of SEQ ID NO: 917302
caaauaucuggccguuucu

SEQ ID NO: 1224649 - RNA, 19 nt, Artificial Sequence
  Description of Artificial Sequence: Synthetic oligonucleotide
  Antisense strand to SEQ ID NO: 1224648
agaaacggccagauauuug

SEQ ID NO: 1224650 - RNA, 19 nt, Artificial Sequence
  Description of Artificial Sequence: Synthetic oligonucleotide
  Sense strand starting at position 2226 of SEQ ID NO: 917302
ugccaagaacuguauuaga

SEQ ID NO: 1224651 - RNA, 19 nt, Artificial Sequence
  Description of Artificial Sequence: Synthetic oligonucleotide
  Antisense strand to SEQ ID NO: 1224650
ucuaauacaguucuuggca

SEQ ID NO: 1224652 - RNA, 19 nt, Artificial Sequence
  Description of Artificial Sequence: Synthetic oligonucleotide
  Sense strand starting at position 2236 of SEQ ID NO: 917302
uguauuagacucugaggau

SEQ ID NO: 1224653 - RNA, 19 nt, Artificial Sequence
  Description of Artificial Sequence: Synthetic oligonucleotide
  Antisense strand to SEQ ID NO: 1224652
auccucagagucuaauaca

SEQ ID NO: 1224654 - RNA, 19 nt, Artificial Sequence
  Description of Artificial Sequence: Synthetic oligonucleotide
  Sense strand starting at position 2237 of SEQ ID NO: 917302
guauuagacucugaggaua

SEQ ID NO: 1224655 - RNA, 19 nt, Artificial Sequence
  Description of Artificial Sequence: Synthetic oligonucleotide
  Antisense strand to SEQ ID NO: 1224654
uauccucagagucuaauac

SEQ ID NO: 1224656 - RNA, 19 nt, Artificial Sequence
  Description of Artificial Sequence: Synthetic oligonucleotide
  Sense strand starting at position 2239 of SEQ ID NO: 917302
auuagacucugaggauaaa

SEQ ID NO: 1224657 - RNA, 19 nt, Artificial Sequence
  Description of Artificial Sequence: Synthetic oligonucleotide
  Antisense strand to SEQ ID NO: 1224656
uuuauccucagagucuaau

SEQ ID NO: 1224658 - RNA, 19 nt, Artificial Sequence
  Description of Artificial Sequence: Synthetic oligonucleotide
  Sense strand starting at position 2275 of SEQ ID NO: 917302
ugguccuuguccucaaauu

SEQ ID NO: 1224659 - RNA, 19 nt, Artificial Sequence
  Description of Artificial Sequence: Synthetic oligonucleotide
  Antisense strand to SEQ ID NO: 1224658
aauuugaggacaaggacca

SEQ ID NO: 1224660 - RNA, 19 nt, Artificial Sequence
  Description of Artificial Sequence: Synthetic oligonucleotide
  Sense strand starting at position 2276 of SEQ ID NO: 917302
gguccuuguccucaaauua

SEQ ID NO: 1224661 - RNA, 19 nt, Artificial Sequence
  Description of Artificial Sequence: Synthetic oligonucleotide
  Antisense strand to SEQ ID NO: 1224660
uaauuugaggacaaggacc

SEQ ID NO: 1224662 - RNA, 19 nt, Artificial Sequence
  Description of Artificial Sequence: Synthetic oligonucleotide
  Sense strand starting at position 2326 of SEQ ID NO: 917302
cacugaugucuugaauugu

SEQ ID NO: 1224663 - RNA, 19 nt, Artificial Sequence
  Description of Artificial Sequence: Synthetic oligonucleotide
  Antisense strand to SEQ ID NO: 1224662
acaauucaagacaucagug

SEQ ID NO: 1224664 - RNA, 19 nt, Artificial Sequence
  Description of Artificial Sequence: Synthetic oligonucleotide
  Sense strand starting at position 2332 of SEQ ID NO: 917302
ugucuugaauugucaauuc

SEQ ID NO: 1224665 - RNA, 19 nt, Artificial Sequence
  Description of Artificial Sequence: Synthetic oligonucleotide
  Antisense strand to SEQ ID NO: 1224664
gaauugacaauucaagaca

SEQ ID NO: 1224666 - RNA, 19 nt, Artificial Sequence
  Description of Artificial Sequence: Synthetic oligonucleotide
  Sense strand starting at position 2341 of SEQ ID NO: 917302
uugucaauucugggaagca

SEQ ID NO: 1224667 - RNA, 19 nt, Artificial Sequence
  Description of Artificial Sequence: Synthetic oligonucleotide
  Antisense strand to SEQ ID NO: 1224666
ugcuucccagaauugacaa

SEQ ID NO: 1224668 - RNA, 19 nt, Artificial Sequence
  Description of Artificial Sequence: Synthetic oligonucleotide
  Sense strand starting at position 2396 of SEQ ID NO: 917302
cuccuuaagccagauauug

SEQ ID NO: 1224669 - RNA, 19 nt, Artificial Sequence
  Description of Artificial Sequence: Synthetic oligonucleotide
  Antisense strand to SEQ ID NO: 1224668
caauaucuggcuuaaggag

SEQ ID NO: 1224670 - RNA, 19 nt, Artificial Sequence
  Description of Artificial Sequence: Synthetic oligonucleotide
  Sense strand starting at position 2975 of SEQ ID NO: 917302
cagguugguugcucaauga

SEQ ID NO: 1224671 - RNA, 19 nt, Artificial Sequence
  Description of Artificial Sequence: Synthetic oligonucleotide
  Antisense strand to SEQ ID NO: 1224670
ucauugagcaaccaaccug

SEQ ID NO: 1224672 - RNA, 19 nt, Artificial Sequence
  Description of Artificial Sequence: Synthetic oligonucleotide
  Sense strand starting at position 2979 of SEQ ID NO: 917302
uugguugcucaaugauaua

SEQ ID NO: 1224673 - RNA, 19 nt, Artificial Sequence
  Description of Artificial Sequence: Synthetic oligonucleotide
  Antisense strand to SEQ ID NO: 1224672
uauaucauugagcaaccaa

SEQ ID NO: 1224674 - RNA, 19 nt, Artificial Sequence
  Description of Artificial Sequence: Synthetic oligonucleotide
  Sense strand starting at position 3286 of SEQ ID NO: 917302
ccuagaagccucuaagcau

SEQ ID NO: 1224675 - RNA, 19 nt, Artificial Sequence
  Description of Artificial Sequence: Synthetic oligonucleotide
  Antisense strand to SEQ ID NO: 1224674
augcuuagaggcuucuagg

SEQ ID NO: 1224676 - RNA, 19 nt, Artificial Sequence
  Description of Artificial Sequence: Synthetic oligonucleotide
  Sense strand starting at position 3295 of SEQ ID NO: 917302
cucuaagcauugcuauaga

SEQ ID NO: 1224677 - RNA, 19 nt, Artificial Sequence
  Description of Artificial Sequence: Synthetic oligonucleotide
  Antisense strand to SEQ ID NO: 1224676
ucuauagcaaugcuuagag

SEQ ID NO: 1224678 - RNA, 19 nt, Artificial Sequence
  Description of Artificial Sequence: Synthetic oligonucleotide
  Sense strand starting at position 3305 of SEQ ID NO: 917302
ugcuauagagccugcagaa

SEQ ID NO: 1224679 - RNA, 19 nt, Artificial Sequence
  Description of Artificial Sequence: Synthetic oligonucleotide
  Antisense strand to SEQ ID NO: 1224678
uucugcaggcucuauagca

SEQ ID NO: 1224680 - RNA, 19 nt, Artificial Sequence
  Description of Artificial Sequence: Synthetic oligonucleotide
  Sense strand starting at position 3323 of SEQ ID NO: 917302
agcuguagaaucugcagaa

SEQ ID NO: 1224681 - RNA, 19 nt, Artificial Sequence
  Description of Artificial Sequence: Synthetic oligonucleotide
  Antisense strand to SEQ ID NO: 1224680
uucugcagauucuacagcu

SEQ ID NO: 1224682 - RNA, 19 nt, Artificial Sequence
  Description of Artificial Sequence: Synthetic oligonucleotide
  Sense strand starting at position 3324 of SEQ ID NO: 917302
gcuguagaaucugcagaac

SEQ ID NO: 1224683 - RNA, 19 nt, Artificial Sequence
  Description of Artificial Sequence: Synthetic oligonucleotide
  Antisense strand to SEQ ID NO: 1224682
guucugcagauucuacagc

SEQ ID NO: 1224684 - RNA, 19 nt, Artificial Sequence
  Description of Artificial Sequence: Synthetic oligonucleotide
  Sense strand starting at position 3327 of SEQ ID NO: 917302
guagaaucugcagaaccau

SEQ ID NO: 1224685 - RNA, 19 nt, Artificial Sequence
  Description of Artificial Sequence: Synthetic oligonucleotide
  Antisense strand to SEQ ID NO: 1224684
augguucugcagauucuac

SEQ ID NO: 1224686 - RNA, 19 nt, Artificial Sequence
  Description of Artificial Sequence: Synthetic oligonucleotide
  Sense strand starting at position 3480 of SEQ ID NO: 917302
augaauaaguugcucuaaa

SEQ ID NO: 1224687 - RNA, 19 nt, Artificial Sequence
  Description of Artificial Sequence: Synthetic oligonucleotide
  Antisense strand to SEQ ID NO: 1224686
uuuagagcaacuuauucau

SEQ ID NO: 1224688 - RNA, 19 nt, Artificial Sequence
  Description of Artificial Sequence: Synthetic oligonucleotide
  Sense strand starting at position 3481 of SEQ ID NO: 917302
ugaauaaguugcucuaaac

SEQ ID NO: 1224689 - RNA, 19 nt, Artificial Sequence
  Description of Artificial Sequence: Synthetic oligonucleotide
  Antisense strand to SEQ ID NO: 1224688
guuuagagcaacuuauuca

SEQ ID NO: 1224690 - RNA, 19 nt, Artificial Sequence
  Description of Artificial Sequence: Synthetic oligonucleotide
  Sense strand starting at position 3504 of SEQ ID NO: 917302
ucucucugauguuugauua

SEQ ID NO: 1224691 - RNA, 19 nt, Artificial Sequence
  Description of Artificial Sequence: Synthetic oligonucleotide
  Antisense strand to SEQ ID NO: 1224690
uaaucaaacaucagagaga

SEQ ID NO: 1224692 - RNA, 19 nt, Artificial Sequence
  Description of Artificial Sequence: Synthetic oligonucleotide
  Sense strand starting at position 3505 of SEQ ID NO: 917302
cucucugauguuugauuaa

SEQ ID NO: 1224693 - RNA, 19 nt, Artificial Sequence
  Description of Artificial Sequence: Synthetic oligonucleotide
  Antisense strand to SEQ ID NO: 1224692
uuaaucaaacaucagagag

SEQ ID NO: 1224694 - RNA, 19 nt, Artificial Sequence
  Description of Artificial Sequence: Synthetic oligonucleotide
  Sense strand starting at position 3558 of SEQ ID NO: 917302
gaaguaagauggccaaaua

SEQ ID NO: 1224695 - RNA, 19 nt, Artificial Sequence
  Description of Artificial Sequence: Synthetic oligonucleotide
  Antisense strand to SEQ ID NO: 1224694
uauuuggccaucuuacuuc

SEQ ID NO: 1224696 - RNA, 19 nt, Artificial Sequence
  Description of Artificial Sequence: Synthetic oligonucleotide
  Sense strand starting at position 3668 of SEQ ID NO: 917302
gagcaauuacaguauauug

SEQ ID NO: 1224697 - RNA, 19 nt, Artificial Sequence
  Description of Artificial Sequence: Synthetic oligonucleotide
  Antisense strand to SEQ ID NO: 1224696
caauauacuguaauugcuc

SEQ ID NO: 1224698 - RNA, 19 nt, Artificial Sequence
  Description of Artificial Sequence: Synthetic oligonucleotide
  Sense strand starting at position 3670 of SEQ ID NO: 917302
gcaauuacaguauauuguu

SEQ ID NO: 1224699 - RNA, 19 nt, Artificial Sequence
  Description of Artificial Sequence: Synthetic oligonucleotide
  Antisense strand to SEQ ID NO: 1224698
aacaauauacuguaauugc

SEQ ID NO: 1224700 - RNA, 19 nt, Artificial Sequence
  Description of Artificial Sequence: Synthetic oligonucleotide
  Sense strand starting at position 3802 of SEQ ID NO: 917303
gggagaguagagugauuau

SEQ ID NO: 1224701 - RNA, 19 nt, Artificial Sequence
  Description of Artificial Sequence: Synthetic oligonucleotide
  Antisense strand to SEQ ID NO: 1224700
auaaucacucuacucuccc

SEQ ID NO: 1224702 - RNA, 19 nt, Artificial Sequence
  Description of Artificial Sequence: Synthetic oligonucleotide
  Sense strand starting at position 94 of SEQ ID NO: 917303
gcaagaacucuuggacuug

SEQ ID NO: 1224703 - RNA, 19 nt, Artificial Sequence
  Description of Artificial Sequence: Synthetic oligonucleotide
  Antisense strand to SEQ ID NO: 1224702
caaguccaagaguucuugc

SEQ ID NO: 1224704 - RNA, 19 nt, Artificial Sequence
  Description of Artificial Sequence: Synthetic oligonucleotide
  Sense strand starting at position 131 of SEQ ID NO: 917303
ucaccuagucuuuagccua

SEQ ID NO: 1224705 - RNA, 19 nt, Artificial Sequence
  Description of Artificial Sequence: Synthetic oligonucleotide
  Antisense strand to SEQ ID NO: 1224704
uaggcuaaagacuagguga

SEQ ID NO: 1224706 - RNA, 19 nt, Artificial Sequence
  Description of Artificial Sequence: Synthetic oligonucleotide
  Sense strand starting at position 203 of SEQ ID NO: 917303
cacguuaacgcuuaacaag

SEQ ID NO: 1224707 - RNA, 19 nt, Artificial Sequence
  Description of Artificial Sequence: Synthetic oligonucleotide
  Antisense strand to SEQ ID NO: 1224706
cuuguuaagcguuaacgug

SEQ ID NO: 1224708 - RNA, 19 nt, Artificial Sequence
  Description of Artificial Sequence: Synthetic oligonucleotide
  Sense strand starting at position 258 of SEQ ID NO: 917303
aguuucuuugcccaucaga

SEQ ID NO: 1224709 - RNA, 19 nt, Artificial Sequence
  Description of Artificial Sequence: Synthetic oligonucleotide
  Antisense strand to SEQ ID NO: 1224708
ucugaugggcaaagaaacu

SEQ ID NO: 1224710 - RNA, 19 nt, Artificial Sequence
  Description of Artificial Sequence: Synthetic oligonucleotide
  Sense strand starting at position 419 of SEQ ID NO: 917303
cuaucuuucgauuagucag

SEQ ID NO: 1224711 - RNA, 19 nt, Artificial Sequence
  Description of Artificial Sequence: Synthetic oligonucleotide
  Antisense strand to SEQ ID NO: 1224710
cugacuaaucgaaagauag

SEQ ID NO: 1224712 - RNA, 19 nt, Artificial Sequence
  Description of Artificial Sequence: Synthetic oligonucleotide
  Sense strand starting at position 421 of SEQ ID NO: 917303
aucuuucgauuagucagaa

SEQ ID NO: 1224713 - RNA, 19 nt, Artificial Sequence
  Description of Artificial Sequence: Synthetic oligonucleotide
  Antisense strand to SEQ ID NO: 1224712
uucugacuaaucgaaagau

SEQ ID NO: 1224714 - RNA, 19 nt, Artificial Sequence
  Description of Artificial Sequence: Synthetic oligonucleotide
  Sense strand starting at position 422 of SEQ ID NO: 917303
ucuuucgauuagucagaaa

SEQ ID NO: 1224715 - RNA, 19 nt, Artificial Sequence
  Description of Artificial Sequence: Synthetic oligonucleotide
  Antisense strand to SEQ ID NO: 1224714
uuucugacuaaucgaaaga

SEQ ID NO: 1224716 - RNA, 19 nt, Artificial Sequence
  Description of Artificial Sequence: Synthetic oligonucleotide
  Sense strand starting at position 433 of SEQ ID NO: 917303
gucagaaaugcaggcagau

SEQ ID NO: 1224717 - RNA, 19 nt, Artificial Sequence
  Description of Artificial Sequence: Synthetic oligonucleotide
  Antisense strand to SEQ ID NO: 1224716
aucugccugcauuucugac

SEQ ID NO: 1224718 - RNA, 19 nt, Artificial Sequence
  Description of Artificial Sequence: Synthetic oligonucleotide
  Sense strand starting at position 470 of SEQ ID NO: 917303
uuuaauuaccauggaguuu

SEQ ID NO: 1224719 - RNA, 19 nt, Artificial Sequence
  Description of Artificial Sequence: Synthetic oligonucleotide
  Antisense strand to SEQ ID NO: 1224718
aaacuccaugguaauuaaa

SEQ ID NO: 1224720 - RNA, 19 nt, Artificial Sequence
  Description of Artificial Sequence: Synthetic oligonucleotide
  Sense strand starting at position 550 of SEQ ID NO: 917303
auuguuagacuuuggaaga

SEQ ID NO: 1224721 - RNA, 19 nt, Artificial Sequence
  Description of Artificial Sequence: Synthetic oligonucleotide
  Antisense strand to SEQ ID NO: 1224720
ucuuccaaagucuaacaau

SEQ ID NO: 1224722 - RNA, 19 nt, Artificial Sequence
  Description of Artificial Sequence: Synthetic oligonucleotide
  Sense strand starting at position 567 of SEQ ID NO: 917303
gacuaagucuaccuggauu

SEQ ID NO: 1224723 - RNA, 19 nt, Artificial Sequence
  Description of Artificial Sequence: Synthetic oligonucleotide
  Antisense strand to SEQ ID NO: 1224722
aauccagguagacuuaguc

SEQ ID NO: 1224724 - RNA, 19 nt, Artificial Sequence
  Description of Artificial Sequence: Synthetic oligonucleotide
  Sense strand starting at position 597 of SEQ ID NO: 917303
uguguacugcuggaagaca

SEQ ID NO: 1224725 - RNA, 19 nt, Artificial Sequence
  Description of Artificial Sequence: Synthetic oligonucleotide
  Antisense strand to SEQ ID NO: 1224724
ugucuuccagcaguacaca

SEQ ID NO: 1224726 - RNA, 19 nt, Artificial Sequence
  Description of Artificial Sequence: Synthetic oligonucleotide
  Sense strand starting at position 608 of SEQ ID NO: 917303
ggaagacaauguguacuau

SEQ ID NO: 1224727 - RNA, 19 nt, Artificial Sequence
  Description of Artificial Sequence: Synthetic oligonucleotide
  Antisense strand to SEQ ID NO: 1224726
auaguacacauugucuucc

SEQ ID NO: 1224728 - RNA, 19 nt, Artificial Sequence
  Description of Artificial Sequence: Synthetic oligonucleotide
  Sense strand starting at position 897 of SEQ ID NO: 917303
cuaguaacaugauuauuga

SEQ ID NO: 1224729 - RNA, 19 nt, Artificial Sequence
  Description of Artificial Sequence: Synthetic oligonucleotide
  Antisense strand to SEQ ID NO: 1224728
ucaauaaucauguuacuag

SEQ ID NO: 1224730 - RNA, 19 nt, Artificial Sequence
  Description of Artificial Sequence: Synthetic oligonucleotide
  Sense strand starting at position 907 of SEQ ID NO: 917303
gauuauugauugccuggaa

SEQ ID NO: 1224731 - RNA, 19 nt, Artificial Sequence
  Description of Artificial Sequence: Synthetic oligonucleotide
  Antisense strand to SEQ ID NO: 1224730
uuccaggcaaucaauaauc

SEQ ID NO: 1224732 - RNA, 19 nt, Artificial Sequence
  Description of Artificial Sequence: Synthetic oligonucleotide
  Sense strand starting at position 911 of SEQ ID NO: 917303
auugauugccuggaagcaa

SEQ ID NO: 1224733 - RNA, 19 nt, Artificial Sequence
  Description of Artificial Sequence: Synthetic oligonucleotide
  Antisense strand to SEQ ID NO: 1224732
uugcuuccaggcaaucaau

SEQ ID NO: 1224734 - RNA, 19 nt, Artificial Sequence
  Description of Artificial Sequence: Synthetic oligonucleotide
  Sense strand starting at position 922 of SEQ ID NO: 917303
ggaagcaaauuagauuuau

SEQ ID NO: 1224735 - RNA, 19 nt, Artificial Sequence
  Description of Artificial Sequence: Synthetic oligonucleotide
  Antisense strand to SEQ ID NO: 1224734
auaaaucuaauuugcuucc

SEQ ID NO: 1224736 - RNA, 19 nt, Artificial Sequence
  Description of Artificial Sequence: Synthetic oligonucleotide
  Sense strand starting at position 1129 of SEQ ID NO: 917303
cugacaagguccuuggcau

SEQ ID NO: 1224737 - RNA, 19 nt, Artificial Sequence
  Description of Artificial Sequence: Synthetic oligonucleotide
  Antisense strand to SEQ ID NO: 1224736
augccaaggaccuugucag

SEQ ID NO: 1224738 - RNA, 19 nt, Artificial Sequence
  Description of Artificial Sequence: Synthetic oligonucleotide
  Sense strand starting at position 1398 of SEQ ID NO: 917303
agagauuuauaguaagacu

SEQ ID NO: 1224739 - RNA, 19 nt, Artificial Sequence
  Description of Artificial Sequence: Synthetic oligonucleotide
  Antisense strand to SEQ ID NO: 1224738
agucuuacuauaaaucucu

SEQ ID NO: 1224740 - RNA, 19 nt, Artificial Sequence
  Description of Artificial Sequence: Synthetic oligonucleotide
  Sense strand starting at position 1401 of SEQ ID NO: 917303
gauuuauaguaagacuaug

SEQ ID NO: 1224741 - RNA, 19 nt, Artificial Sequence
  Description of Artificial Sequence: Synthetic oligonucleotide
  Antisense strand to SEQ ID NO: 1224740
cauagucuuacuauaaauc

SEQ ID NO: 1224742 - RNA, 19 nt, Artificial Sequence
  Description of Artificial Sequence: Synthetic oligonucleotide
  Sense strand starting at position 1406 of SEQ ID NO: 917303
auaguaagacuaugcuaug

SEQ ID NO: 1224743 - RNA, 19 nt, Artificial Sequence
  Description of Artificial Sequence: Synthetic oligonucleotide
  Antisense strand to SEQ ID NO: 1224742
cauagcauagucuuacuau

SEQ ID NO: 1224744 - RNA, 19 nt, Artificial Sequence
  Description of Artificial Sequence: Synthetic oligonucleotide
  Sense strand starting at position 1411 of SEQ ID NO: 917303
aagacuaugcuauguuaug

SEQ ID NO: 1224745 - RNA, 19 nt, Artificial Sequence
  Description of Artificial Sequence: Synthetic oligonucleotide
  Antisense strand to SEQ ID NO: 1224744
cauaacauagcauagucuu

SEQ ID NO: 1224746 - RNA, 19 nt, Artificial Sequence
  Description of Artificial Sequence: Synthetic oligonucleotide
  Sense strand starting at position 1412 of SEQ ID NO: 917303
agacuaugcuauguuauga

SEQ ID NO: 1224747 - RNA, 19 nt, Artificial Sequence
  Description of Artificial Sequence: Synthetic oligonucleotide
  Antisense strand to SEQ ID NO: 1224746
ucauaacauagcauagucu

SEQ ID NO: 1224748 - RNA, 19 nt, Artificial Sequence
  Description of Artificial Sequence: Synthetic oligonucleotide
  Sense strand starting at position 1611 of SEQ ID NO: 917303
uguugaaacuuacuugaca

SEQ ID NO: 1224749 - RNA, 19 nt, Artificial Sequence
  Description of Artificial Sequence: Synthetic oligonucleotide
  Antisense strand to SEQ ID NO: 1224748
ugucaaguaaguuucaaca

SEQ ID NO: 1224750 - RNA, 19 nt, Artificial Sequence
  Description of Artificial Sequence: Synthetic oligonucleotide
  Sense strand starting at position 1612 of SEQ ID NO: 917303
guugaaacuuacuugacag

SEQ ID NO: 1224751 - RNA, 19 nt, Artificial Sequence
  Description of Artificial Sequence: Synthetic oligonucleotide
  Antisense strand to SEQ ID NO: 1224750
cugucaaguaaguuucaac

SEQ ID NO: 1224752 - RNA, 19 nt, Artificial Sequence
  Description of Artificial Sequence: Synthetic oligonucleotide
  Sense strand starting at position 2018 of SEQ ID NO: 917303
gccacugagcaguaaucua

SEQ ID NO: 1224753 - RNA, 19 nt, Artificial Sequence
  Description of Artificial Sequence: Synthetic oligonucleotide
  Antisense strand to SEQ ID NO: 1224752
uagauuacugcucaguggc

SEQ ID NO: 1224754 - RNA, 19 nt, Artificial Sequence
  Description of Artificial Sequence: Synthetic oligonucleotide
  Sense strand starting at position 2151 of SEQ ID NO: 917303
aacuguuggcagggaagaa

SEQ ID NO: 1224755 - RNA, 19 nt, Artificial Sequence
  Description of Artificial Sequence: Synthetic oligonucleotide
  Antisense strand to SEQ ID NO: 1224754
uucuucccugccaacaguu

SEQ ID NO: 1224756 - RNA, 19 nt, Artificial Sequence
  Description of Artificial Sequence: Synthetic oligonucleotide
  Sense strand starting at position 2177 of SEQ ID NO: 917303
gaggaacauucuguuucua

SEQ ID NO: 1224757 - RNA, 19 nt, Artificial Sequence
  Description of Artificial Sequence: Synthetic oligonucleotide
  Antisense strand to SEQ ID NO: 1224756
uagaaacagaauguuccuc

SEQ ID NO: 1224758 - RNA, 19 nt, Artificial Sequence
  Description of Artificial Sequence: Synthetic oligonucleotide
  Sense strand starting at position 2179 of SEQ ID NO: 917303
ggaacauucuguuucuaug

SEQ ID NO: 1224759 - RNA, 19 nt, Artificial Sequence
  Description of Artificial Sequence: Synthetic oligonucleotide
  Antisense strand to SEQ ID NO: 1224758
cauagaaacagaauguucc

SEQ ID NO: 1224760 - RNA, 19 nt, Artificial Sequence
  Description of Artificial Sequence: Synthetic oligonucleotide
  Sense strand starting at position 2208 of SEQ ID NO: 917303
acagaacgacuguggaaua

SEQ ID NO: 1224761 - RNA, 19 nt, Artificial Sequence
  Description of Artificial Sequence: Synthetic oligonucleotide
  Antisense strand to SEQ ID NO: 1224760
uauuccacagucguucugu

SEQ ID NO: 1224762 - RNA, 19 nt, Artificial Sequence
  Description of Artificial Sequence: Synthetic oligonucleotide
  Sense strand starting at position 2232 of SEQ ID NO: 917303
ccuggaaucuggguuuggu

SEQ ID NO: 1224763 - RNA, 19 nt, Artificial Sequence
  Description of Artificial Sequence: Synthetic oligonucleotide
  Antisense strand to SEQ ID NO: 1224762
accaaacccagauuccagg

SEQ ID NO: 1224764 - RNA, 19 nt, Artificial Sequence
  Description of Artificial Sequence: Synthetic oligonucleotide
  Sense strand starting at position 2546 of SEQ ID NO: 917303
acauuugguuaccagaauu

SEQ ID NO: 1224765 - RNA, 19 nt, Artificial Sequence
  Description of Artificial Sequence: Synthetic oligonucleotide
  Antisense strand to SEQ ID NO: 1224764
aauucugguaaccaaaugu

SEQ ID NO: 1224766 - RNA, 19 nt, Artificial Sequence
  Description of Artificial Sequence: Synthetic oligonucleotide
  Sense strand starting at position 2717 of SEQ ID NO: 917303
acaucuguccacugaggca

SEQ ID NO: 1224767 - RNA, 19 nt, Artificial Sequence
  Description of Artificial Sequence: Synthetic oligonucleotide
  Antisense strand to SEQ ID NO: 1224766
ugccucaguggacagaugu

SEQ ID NO: 1224768 - RNA, 19 nt, Artificial Sequence
  Description of Artificial Sequence: Synthetic oligonucleotide
  Sense strand starting at position 2736 of SEQ ID NO: 917303
gcugguaaugcugccucua

SEQ ID NO: 1224769 - RNA, 19 nt, Artificial Sequence
  Description of Artificial Sequence: Synthetic oligonucleotide
  Antisense strand to SEQ ID NO: 1224768
uagaggcagcauuaccagc

SEQ ID NO: 1224770 - RNA, 19 nt, Artificial Sequence
  Description of Artificial Sequence: Synthetic oligonucleotide
  Sense strand starting at position 2812 of SEQ ID NO: 917303
agaagauagucugccacuu

SEQ ID NO: 1224771 - RNA, 19 nt, Artificial Sequence
  Description of Artificial Sequence: Synthetic oligonucleotide
  Antisense strand to SEQ ID NO: 1224770
aaguggcagacuaucuucu

SEQ ID NO: 1224772 - RNA, 19 nt, Artificial Sequence
  Description of Artificial Sequence: Synthetic oligonucleotide
  Sense strand starting at position 2878 of SEQ ID NO: 917303
cagcuuggguucuuggaga

SEQ ID NO: 1224773 - RNA, 19 nt, Artificial Sequence
  Description of Artificial Sequence: Synthetic oligonucleotide
  Antisense strand to SEQ ID NO: 1224772
ucuccaagaacccaagcug

SEQ ID NO: 1224774 - RNA, 19 nt, Artificial Sequence
  Description of Artificial Sequence: Synthetic oligonucleotide
  Sense strand starting at position 3013 of SEQ ID NO: 917303
uccaaucuacugugaguaa

SEQ ID NO: 1224775 - RNA, 19 nt, Artificial Sequence
  Description of Artificial Sequence: Synthetic oligonucleotide
  Antisense strand to SEQ ID NO: 1224774
uuacucacaguagauugga

SEQ ID NO: 1224776 - RNA, 19 nt, Artificial Sequence
  Description of Artificial Sequence: Synthetic oligonucleotide
  Sense strand starting at position 3059 of SEQ ID NO: 917303
gaugaaauccacgaaucgu

SEQ ID NO: 1224777 - RNA, 19 nt, Artificial Sequence
  Description of Artificial Sequence: Synthetic oligonucleotide
  Antisense strand to SEQ ID NO: 1224776
acgauucguggauuucauc

SEQ ID NO: 1224778 - RNA, 19 nt, Artificial Sequence
  Description of Artificial Sequence: Synthetic oligonucleotide
  Sense strand starting at position 3333 of SEQ ID NO: 917303
gaugguuggauguaccaau

SEQ ID NO: 1224779 - RNA, 19 nt, Artificial Sequence
  Description of Artificial Sequence: Synthetic oligonucleotide
  Antisense strand to SEQ ID NO: 1224778
auugguacauccaaccauc

SEQ ID NO: 1224780 - RNA, 19 nt, Artificial Sequence
  Description of Artificial Sequence: Synthetic oligonucleotide
  Sense strand starting at position 3420 of SEQ ID NO: 917304
cucacuugucaaugaagga

SEQ ID NO: 1224781 - RNA, 19 nt, Artificial Sequence
  Description of Artificial Sequence: Synthetic oligonucleotide
  Antisense strand to SEQ ID NO: 1224780
uccuucauugacaagugag

SEQ ID NO: 1224782 - RNA, 19 nt, Artificial Sequence
  Description of Artificial Sequence: Synthetic oligonucleotide
  Sense strand starting at position 19 of SEQ ID NO: 917304
aguguucagcagcaggaaa

SEQ ID NO: 1224783 - RNA, 19 nt, Artificial Sequence
  Description of Artificial Sequence: Synthetic oligonucleotide
  Antisense strand to SEQ ID NO: 1224782
uuuccugcugcugaacacu

SEQ ID NO: 1224784 - RNA, 19 nt, Artificial Sequence
  Description of Artificial Sequence: Synthetic oligonucleotide
  Sense strand starting at position 149 of SEQ ID NO: 917304
cuuagaaauguacauggca

SEQ ID NO: 1224785 - RNA, 19 nt, Artificial Sequence
  Description of Artificial Sequence: Synthetic oligonucleotide
  Antisense strand to SEQ ID NO: 1224784
ugccauguacauuucuaag

SEQ ID NO: 1224786 - RNA, 19 nt, Artificial Sequence
  Description of Artificial Sequence: Synthetic oligonucleotide
  Sense strand starting at position 152 of SEQ ID NO: 917304
agaaauguacauggcauaa

SEQ ID NO: 1224787 - RNA, 19 nt, Artificial Sequence
  Description of Artificial Sequence: Synthetic oligonucleotide
  Antisense strand to SEQ ID NO: 1224786
uuaugccauguacauuucu

SEQ ID NO: 1224788 - RNA, 19 nt, Artificial Sequence
  Description of Artificial Sequence: Synthetic oligonucleotide
  Sense strand starting at position 218 of SEQ ID NO: 917304
uggcucaacuaugcuaaga

SEQ ID NO: 1224789 - RNA, 19 nt, Artificial Sequence
  Description of Artificial Sequence: Synthetic oligonucleotide
  Antisense strand to SEQ ID NO: 1224788
ucuuagcauaguugagcca

SEQ ID NO: 1224790 - RNA, 19 nt, Artificial Sequence
  Description of Artificial Sequence: Synthetic oligonucleotide
  Sense strand starting at position 348 of SEQ ID NO: 917304
gccuuacuggacuaugcau

SEQ ID NO: 1224791 - RNA, 19 nt, Artificial Sequence
  Description of Artificial Sequence: Synthetic oligonucleotide
  Antisense strand to SEQ ID NO: 1224790
augcauaguccaguaaggc

SEQ ID NO: 1224792 - RNA, 19 nt, Artificial Sequence
  Description of Artificial Sequence: Synthetic oligonucleotide
  Sense strand starting at position 457 of SEQ ID NO: 917304
uaaagagggugacaaauuu

SEQ ID NO: 1224793 - RNA, 19 nt, Artificial Sequence
  Description of Artificial Sequence: Synthetic oligonucleotide
  Antisense strand to SEQ ID NO: 1224792
aaauuugucacccucuuua

SEQ ID NO: 1224794 - RNA, 19 nt, Artificial Sequence
  Description of Artificial Sequence: Synthetic oligonucleotide
  Sense strand starting at position 553 of SEQ ID NO: 917304
uccuucuggcuggaauauu

SEQ ID NO: 1224795 - RNA, 19 nt, Artificial Sequence
  Description of Artificial Sequence: Synthetic oligonucleotide
  Antisense strand to SEQ ID NO: 1224794
aauauuccagccagaagga

SEQ ID NO: 1224796 - RNA, 19 nt, Artificial Sequence
  Description of Artificial Sequence: Synthetic oligonucleotide
  Sense strand starting at position 620 of SEQ ID NO: 917304
cugcuaagacaucagcaua

SEQ ID NO: 1224797 - RNA, 19 nt, Artificial Sequence
  Description of Artificial Sequence: Synthetic oligonucleotide
  Antisense strand to SEQ ID NO: 1224796
uaugcugaugucuuagcag

SEQ ID NO: 1224798 - RNA, 19 nt, Artificial Sequence
  Description of Artificial Sequence: Synthetic oligonucleotide
  Sense strand starting at position 904 of SEQ ID NO: 917304
guguuuauuaauggaugac

SEQ ID NO: 1224799 - RNA, 19 nt, Artificial Sequence
  Description of Artificial Sequence: Synthetic oligonucleotide
  Antisense strand to SEQ ID NO: 1224798
gucauccauuaauaaacac

SEQ ID NO: 1224800 - RNA, 19 nt, Artificial Sequence
  Description of Artificial Sequence: Synthetic oligonucleotide
  Sense strand starting at position 1246 of SEQ ID NO: 917304
auagcuuguugcccauuua

SEQ ID NO: 1224801 - RNA, 19 nt, Artificial Sequence
  Description of Artificial Sequence: Synthetic oligonucleotide
  Antisense strand to SEQ ID NO: 1224800
uaaaugggcaacaagcuau

SEQ ID NO: 1224802 - RNA, 19 nt, Artificial Sequence
  Description of Artificial Sequence: Synthetic oligonucleotide
  Sense strand starting at position 1541 of SEQ ID NO: 917304
aauauaagcuccguaagag

SEQ ID NO: 1224803 - RNA, 19 nt, Artificial Sequence
  Description of Artificial Sequence: Synthetic oligonucleotide
  Antisense strand to SEQ ID NO: 1224802
cucuuacggagcuuauauu

SEQ ID NO: 1224804 - RNA, 19 nt, Artificial Sequence
  Description of Artificial Sequence: Synthetic oligonucleotide
  Sense strand starting at position 1591 of SEQ ID NO: 917304
aucuguguuguugagauca

SEQ ID NO: 1224805 - RNA, 19 nt, Artificial Sequence
  Description of Artificial Sequence: Synthetic oligonucleotide
  Antisense strand to SEQ ID NO: 1224804
ugaucucaacaacacagau

SEQ ID NO: 1224806 - RNA, 19 nt, Artificial Sequence
  Description of Artificial Sequence: Synthetic oligonucleotide
  Sense strand starting at position 1596 of SEQ ID NO: 917304
uguuguugagaucaguaac

SEQ ID NO: 1224807 - RNA, 19 nt, Artificial Sequence
  Description of Artificial Sequence: Synthetic oligonucleotide
  Antisense strand to SEQ ID NO: 1224806
guuacugaucucaacaaca

SEQ ID NO: 1224808 - RNA, 19 nt, Artificial Sequence
  Description of Artificial Sequence: Synthetic oligonucleotide
  Sense strand starting at position 2159 of SEQ ID NO: 917304
cgugacagccucuaucaaa

SEQ ID NO: 1224809 - RNA, 19 nt, Artificial Sequence
  Description of Artificial Sequence: Synthetic oligonucleotide
  Antisense strand to SEQ ID NO: 1224808
uuugauagaggcugucacg

SEQ ID NO: 1224810 - RNA, 19 nt, Artificial Sequence
  Description of Artificial Sequence: Synthetic oligonucleotide
  Sense strand starting at position 2181 of SEQ ID NO: 917304
gccagcucucuccaggaaa

SEQ ID NO: 1224811 - RNA, 19 nt, Artificial Sequence
  Description of Artificial Sequence: Synthetic oligonucleotide
  Antisense strand to SEQ ID NO: 1224810
uuuccuggagagagcuggc

SEQ ID NO: 1224812 - RNA, 19 nt, Artificial Sequence
  Description of Artificial Sequence: Synthetic oligonucleotide
  Sense strand starting at position 2291 of SEQ ID NO: 917304
gagaaauuaggacguaguu

SEQ ID NO: 1224813 - RNA, 19 nt, Artificial Sequence
  Description of Artificial Sequence: Synthetic oligonucleotide
  Antisense strand to SEQ ID NO: 1224812
aacuacguccuaauuucuc

SEQ ID NO: 1224814 - RNA, 19 nt, Artificial Sequence
  Description of Artificial Sequence: Synthetic oligonucleotide
  Sense strand starting at position 2343 of SEQ ID NO: 917304
cgaggcaacgaucauugaa

SEQ ID NO: 1224815 - RNA, 19 nt, Artificial Sequence
  Description of Artificial Sequence: Synthetic oligonucleotide
  Antisense strand to SEQ ID NO: 1224814
uucaaugaucguugccucg

SEQ ID NO: 1224816 - RNA, 19 nt, Artificial Sequence
  Description of Artificial Sequence: Synthetic oligonucleotide
  Sense strand starting at position 2345 of SEQ ID NO: 917304
aggcaacgaucauugaaau

SEQ ID NO: 1224817 - RNA, 19 nt, Artificial Sequence
  Description of Artificial Sequence: Synthetic oligonucleotide
  Antisense strand to SEQ ID NO: 1224816
auuucaaugaucguugccu

SEQ ID NO: 1224818 - RNA, 19 nt, Artificial Sequence
  Description of Artificial Sequence: Synthetic oligonucleotide
  Sense strand starting at position 2346 of SEQ ID NO: 917304
ggcaacgaucauugaaaug

SEQ ID NO: 1224819 - RNA, 19 nt, Artificial Sequence
  Description of Artificial Sequence: Synthetic oligonucleotide
  Antisense strand to SEQ ID NO: 1224818
cauuucaaugaucguugcc

SEQ ID NO: 1224820 - RNA, 19 nt, Artificial Sequence
  Description of Artificial Sequence: Synthetic oligonucleotide
  Sense strand starting at position 2545 of SEQ ID NO: 917304
uaguguuaugaauacgaag

SEQ ID NO: 1224821 - RNA, 19 nt, Artificial Sequence
  Description of Artificial Sequence: Synthetic oligonucleotide
  Antisense strand to SEQ ID NO: 1224820
cuucguauucauaacacua

SEQ ID NO: 1224822 - RNA, 19 nt, Artificial Sequence
  Description of Artificial Sequence: Synthetic oligonucleotide
  Sense strand starting at position 2547 of SEQ ID NO: 917304
guguuaugaauacgaagaa

SEQ ID NO: 1224823 - RNA, 19 nt, Artificial Sequence
  Description of Artificial Sequence: Synthetic oligonucleotide
  Antisense strand to SEQ ID NO: 1224822
uucuucguauucauaacac

SEQ ID NO: 1224824 - RNA, 19 nt, Artificial Sequence
  Description of Artificial Sequence: Synthetic oligonucleotide
  Sense strand starting at position 2602 of SEQ ID NO: 917304
uuaggaacauagucucauu

SEQ ID NO: 1224825 - RNA, 19 nt, Artificial Sequence
  Description of Artificial Sequence: Synthetic oligonucleotide
  Antisense strand to SEQ ID NO: 1224824
aaugagacuauguuccuaa

SEQ ID NO: 1224826 - RNA, 19 nt, Artificial Sequence
  Description of Artificial Sequence: Synthetic oligonucleotide
  Sense strand starting at position 2783 of SEQ ID NO: 917304
acgugaauuuacucaguuc

SEQ ID NO: 1224827 - RNA, 19 nt, Artificial Sequence
  Description of Artificial Sequence: Synthetic oligonucleotide
  Antisense strand to SEQ ID NO: 1224826
gaacugaguaaauucacgu

SEQ ID NO: 1224828 - RNA, 19 nt, Artificial Sequence
  Description of Artificial Sequence: Synthetic oligonucleotide
  Sense strand starting at position 2795 of SEQ ID NO: 917304
ucaguucuuggucacaaga

SEQ ID NO: 1224829 - RNA, 19 nt, Artificial Sequence
  Description of Artificial Sequence: Synthetic oligonucleotide
  Antisense strand to SEQ ID NO: 1224828
ucuugugaccaagaacuga

SEQ ID NO: 1224830 - RNA, 19 nt, Artificial Sequence
  Description of Artificial Sequence: Synthetic oligonucleotide
  Sense strand starting at position 2890 of SEQ ID NO: 917304
aaaguaaggucaucaaggu

SEQ ID NO: 1224831 - RNA, 19 nt, Artificial Sequence
  Description of Artificial Sequence: Synthetic oligonucleotide
  Antisense strand to SEQ ID NO: 1224830
accuugaugaccuuacuuu

SEQ ID NO: 1224832 - RNA, 19 nt, Artificial Sequence
  Description of Artificial Sequence: Synthetic oligonucleotide
  Sense strand starting at position 2891 of SEQ ID NO: 917304
aaguaaggucaucaagguu

SEQ ID NO: 1224833 - RNA, 19 nt, Artificial Sequence
  Description of Artificial Sequence: Synthetic oligonucleotide
  Antisense strand to SEQ ID NO: 1224832
aaccuugaugaccuuacuu

SEQ ID NO: 1224834 - RNA, 19 nt, Artificial Sequence
  Description of Artificial Sequence: Synthetic oligonucleotide
  Sense strand starting at position 2894 of SEQ ID NO: 917304
uaaggucaucaagguuaca

SEQ ID NO: 1224835 - RNA, 19 nt, Artificial Sequence
  Description of Artificial Sequence: Synthetic oligonucleotide
  Antisense strand to SEQ ID NO: 1224834
uguaaccuugaugaccuua

SEQ ID NO: 1224836 - RNA, 19 nt, Artificial Sequence
  Description of Artificial Sequence: Synthetic oligonucleotide
  Sense strand starting at position 2935 of SEQ ID NO: 917304
cagauagugucagucuuaa

SEQ ID NO: 1224837 - RNA, 19 nt, Artificial Sequence
  Description of Artificial Sequence: Synthetic oligonucleotide
  Antisense strand to SEQ ID NO: 1224836
uuaagacugacacuaucug

SEQ ID NO: 1224838 - RNA, 19 nt, Artificial Sequence
  Description of Artificial Sequence: Synthetic oligonucleotide
  Sense strand starting at position 2998 of SEQ ID NO: 917304
ugcuaauugccagaaagac

SEQ ID NO: 1224839 - RNA, 19 nt, Artificial Sequence
  Description of Artificial Sequence: Synthetic oligonucleotide
  Antisense strand to SEQ ID NO: 1224838
gucuuucuggcaauuagca

SEQ ID NO: 1224840 - RNA, 19 nt, Artificial Sequence
  Description of Artificial Sequence: Synthetic oligonucleotide
  Sense strand starting at position 3138 of SEQ ID NO: 917304
uggagauucguguauaagg

SEQ ID NO: 1224841 - RNA, 19 nt, Artificial Sequence
  Description of Artificial Sequence: Synthetic oligonucleotide
  Antisense strand to SEQ ID NO: 1224840
ccuuauacacgaaucucca

SEQ ID NO: 1224842 - RNA, 19 nt, Artificial Sequence
  Description of Artificial Sequence: Synthetic oligonucleotide
  Sense strand starting at position 3140 of SEQ ID NO: 917304
gagauucguguauaagggu

SEQ ID NO: 1224843 - RNA, 19 nt, Artificial Sequence
  Description of Artificial Sequence: Synthetic oligonucleotide
  Antisense strand to SEQ ID NO: 1224842
acccuuauacacgaaucuc

SEQ ID NO: 1224844 - RNA, 19 nt, Artificial Sequence
  Description of Artificial Sequence: Synthetic oligonucleotide
  Sense strand starting at position 3156 of SEQ ID NO: 917304
gguuuaagauucuccuaca

SEQ ID NO: 1224845 - RNA, 19 nt, Artificial Sequence
  Description of Artificial Sequence: Synthetic oligonucleotide
  Antisense strand to SEQ ID NO: 1224844
uguaggagaaucuuaaacc

SEQ ID NO: 1224846 - RNA, 19 nt, Artificial Sequence
  Description of Artificial Sequence: Synthetic oligonucleotide
  Sense strand starting at position 3157 of SEQ ID NO: 917304
guuuaagauucuccuacag

SEQ ID NO: 1224847 - RNA, 19 nt, Artificial Sequence
  Description of Artificial Sequence: Synthetic oligonucleotide
  Antisense strand to SEQ ID NO: 1224846
cuguaggagaaucuuaaac

SEQ ID NO: 1224848 - RNA, 19 nt, Artificial Sequence
  Description of Artificial Sequence: Synthetic oligonucleotide
  Sense strand starting at position 3278 of SEQ ID NO: 917304
gauacauuacaagguugua

SEQ ID NO: 1224849 - RNA, 19 nt, Artificial Sequence
  Description of Artificial Sequence: Synthetic oligonucleotide
  Antisense strand to SEQ ID NO: 1224848
uacaaccuuguaauguauc

SEQ ID NO: 1224850 - RNA, 19 nt, Artificial Sequence
  Description of Artificial Sequence: Synthetic oligonucleotide
  Sense strand starting at position 3281 of SEQ ID NO: 917304
acauuacaagguuguaaga

SEQ ID NO: 1224851 - RNA, 19 nt, Artificial Sequence
  Description of Artificial Sequence: Synthetic oligonucleotide
  Antisense strand to SEQ ID NO: 1224850
ucuuacaaccuuguaaugu

SEQ ID NO: 1224852 - RNA, 19 nt, Artificial Sequence
  Description of Artificial Sequence: Synthetic oligonucleotide
  Sense strand starting at position 3654 of SEQ ID NO: 917304
aaaguaucuugguugacca

SEQ ID NO: 1224853 - RNA, 19 nt, Artificial Sequence
  Description of Artificial Sequence: Synthetic oligonucleotide
  Antisense strand to SEQ ID NO: 1224852
uggucaaccaagauacuuu

SEQ ID NO: 1224854 - RNA, 19 nt, Artificial Sequence
  Description of Artificial Sequence: Synthetic oligonucleotide
  Sense strand starting at position 3655 of SEQ ID NO: 917304
aaguaucuugguugaccaa

SEQ ID NO: 1224855 - RNA, 19 nt, Artificial Sequence
  Description of Artificial Sequence: Synthetic oligonucleotide
  Antisense strand to SEQ ID NO: 1224854
uuggucaaccaagauacuu

SEQ ID NO: 1224856 - RNA, 19 nt, Artificial Sequence
  Description of Artificial Sequence: Synthetic oligonucleotide
  Sense strand starting at position 3658 of SEQ ID NO: 917304
uaucuugguugaccaagau

SEQ ID NO: 1224857 - RNA, 19 nt, Artificial Sequence
  Description of Artificial Sequence: Synthetic oligonucleotide
  Antisense strand to SEQ ID NO: 1224856
aucuuggucaaccaagaua

SEQ ID NO: 1224858 - RNA, 19 nt, Artificial Sequence
  Description of Artificial Sequence: Synthetic oligonucleotide
  Sense strand starting at position 3716 of SEQ ID NO: 917304
ucugcaugguuaucacaaa

SEQ ID NO: 1224859 - RNA, 19 nt, Artificial Sequence
  Description of Artificial Sequence: Synthetic oligonucleotide
  Antisense strand to SEQ ID NO: 1224858
uuugugauaaccaugcaga

SEQ ID NO: 1224860 - RNA, 19 nt, Artificial Sequence
  Description of Artificial Sequence: Synthetic oligonucleotide
  Sense strand starting at position 3799 of SEQ ID NO: 917305
cucauuacucaaugguaug

SEQ ID NO: 1224861 - RNA, 19 nt, Artificial Sequence
  Description of Artificial Sequence: Synthetic oligonucleotide
  Antisense strand to SEQ ID NO: 1224860
cauaccauugaguaaugag

SEQ ID NO: 1224862 - RNA, 19 nt, Artificial Sequence
  Description of Artificial Sequence: Synthetic oligonucleotide
  Sense strand starting at position 103 of SEQ ID NO: 917305
ggugccaaguguucugaaa

SEQ ID NO: 1224863 - RNA, 19 nt, Artificial Sequence
  Description of Artificial Sequence: Synthetic oligonucleotide
  Antisense strand to SEQ ID NO: 1224862
uuucagaacacuuggcacc

SEQ ID NO: 1224864 - RNA, 19 nt, Artificial Sequence
  Description of Artificial Sequence: Synthetic oligonucleotide
  Sense strand starting at position 128 of SEQ ID NO: 917305
auacaugucccugacuacu

SEQ ID NO: 1224865 - RNA, 19 nt, Artificial Sequence
  Description of Artificial Sequence: Synthetic oligonucleotide
  Antisense strand to SEQ ID NO: 1224864
aguagucagggacauguau

SEQ ID NO: 1224866 - RNA, 19 nt, Artificial Sequence
  Description of Artificial Sequence: Synthetic oligonucleotide
  Sense strand starting at position 165 of SEQ ID NO: 917305
ggguccuucggccagacaa

SEQ ID NO: 1224867 - RNA, 19 nt, Artificial Sequence
  Description of Artificial Sequence: Synthetic oligonucleotide
  Antisense strand to SEQ ID NO: 1224866
uugucuggccgaaggaccc

SEQ ID NO: 1224868 - RNA, 19 nt, Artificial Sequence
  Description of Artificial Sequence: Synthetic oligonucleotide
  Sense strand starting at position 188 of SEQ ID NO: 917305
auaugcaaagcucguaaua

SEQ ID NO: 1224869 - RNA, 19 nt, Artificial Sequence
  Description of Artificial Sequence: Synthetic oligonucleotide
  Antisense strand to SEQ ID NO: 1224868
uauuacgagcuuugcauau

SEQ ID NO: 1224870 - RNA, 19 nt, Artificial Sequence
  Description of Artificial Sequence: Synthetic oligonucleotide
  Sense strand starting at position 256 of SEQ ID NO: 917305
gugccuacaauguacgaaa

SEQ ID NO: 1224871 - RNA, 19 nt, Artificial Sequence
  Description of Artificial Sequence: Synthetic oligonucleotide
  Antisense strand to SEQ ID NO: 1224870
uuucguacauuguaggcac

SEQ ID NO: 1224872 - RNA, 19 nt, Artificial Sequence
  Description of Artificial Sequence: Synthetic oligonucleotide
  Sense strand starting at position 291 of SEQ ID NO: 917305
agacuaagugccuacguaa

SEQ ID NO: 1224873 - RNA, 19 nt, Artificial Sequence
  Description of Artificial Sequence: Synthetic oligonucleotide
  Antisense strand to SEQ ID NO: 1224872
uuacguaggcacuuagucu

SEQ ID NO: 1224874 - RNA, 19 nt, Artificial Sequence
  Description of Artificial Sequence: Synthetic oligonucleotide
  Sense strand starting at position 335 of SEQ ID NO: 917305
agaaaugcucccuaaguuc

SEQ ID NO: 1224875 - RNA, 19 nt, Artificial Sequence
  Description of Artificial Sequence: Synthetic oligonucleotide
  Antisense strand to SEQ ID NO: 1224874
gaacuuagggagcauuucu

SEQ ID NO: 1224876 - RNA, 19 nt, Artificial Sequence
  Description of Artificial Sequence: Synthetic oligonucleotide
  Sense strand starting at position 364 of SEQ ID NO: 917305
aggguaacuagugggauaa

SEQ ID NO: 1224877 - RNA, 19 nt, Artificial Sequence
  Description of Artificial Sequence: Synthetic oligonucleotide
  Antisense strand to SEQ ID NO: 1224876
uuaucccacuaguuacccu

SEQ ID NO: 1224878 - RNA, 19 nt, Artificial Sequence
  Description of Artificial Sequence: Synthetic oligonucleotide
  Sense strand starting at position 365 of SEQ ID NO: 917305
ggguaacuagugggauaaa

SEQ ID NO: 1224879 - RNA, 19 nt, Artificial Sequence
  Description of Artificial Sequence: Synthetic oligonucleotide
  Antisense strand to SEQ ID NO: 1224878
uuuaucccacuaguuaccc

SEQ ID NO: 1224880 - RNA, 19 nt, Artificial Sequence
  Description of Artificial Sequence: Synthetic oligonucleotide
  Sense strand starting at position 366 of SEQ ID NO: 917305
gguaacuagugggauaaag

SEQ ID NO: 1224881 - RNA, 19 nt, Artificial Sequence
  Description of Artificial Sequence: Synthetic oligonucleotide
  Antisense strand to SEQ ID NO: 1224880
cuuuaucccacuaguuacc

SEQ ID NO: 1224882 - RNA, 19 nt, Artificial Sequence
  Description of Artificial Sequence: Synthetic oligonucleotide
  Sense strand starting at position 387 of SEQ ID NO: 917305
auggaucaguuuccaaaug

SEQ ID NO: 1224883 - RNA, 19 nt, Artificial Sequence
  Description of Artificial Sequence: Synthetic oligonucleotide
  Antisense strand to SEQ ID NO: 1224882
cauuuggaaacugauccau

SEQ ID NO: 1224884 - RNA, 19 nt, Artificial Sequence
  Description of Artificial Sequence: Synthetic oligonucleotide
  Sense strand starting at position 456 of SEQ ID NO: 917305
gguacuuuaucaguggcua

SEQ ID NO: 1224885 - RNA, 19 nt, Artificial Sequence
  Description of Artificial Sequence: Synthetic oligonucleotide
  Antisense strand to SEQ ID NO: 1224884
uagccacugauaaaguacc

SEQ ID NO: 1224886 - RNA, 19 nt, Artificial Sequence
  Description of Artificial Sequence: Synthetic oligonucleotide
  Sense strand starting at position 457 of SEQ ID NO: 917305
guacuuuaucaguggcuaa

SEQ ID NO: 1224887 - RNA, 19 nt, Artificial Sequence
  Description of Artificial Sequence: Synthetic oligonucleotide
  Antisense strand to SEQ ID NO: 1224886
uuagccacugauaaaguac

SEQ ID NO: 1224888 - RNA, 19 nt, Artificial Sequence
  Description of Artificial Sequence: Synthetic oligonucleotide
  Sense strand starting at position 460 of SEQ ID NO: 917305
cuuuaucaguggcuaaaug

SEQ ID NO: 1224889 - RNA, 19 nt, Artificial Sequence
  Description of Artificial Sequence: Synthetic oligonucleotide
  Antisense strand to SEQ ID NO: 1224888
cauuuagccacugauaaag

SEQ ID NO: 1224890 - RNA, 19 nt, Artificial Sequence
  Description of Artificial Sequence: Synthetic oligonucleotide
  Sense strand starting at position 461 of SEQ ID NO: 917305
uuuaucaguggcuaaauga

SEQ ID NO: 1224891 - RNA, 19 nt, Artificial Sequence
  Description of Artificial Sequence: Synthetic oligonucleotide
  Antisense strand to SEQ ID NO: 1224890
ucauuuagccacugauaaa

SEQ ID NO: 1224892 - RNA, 19 nt, Artificial Sequence
  Description of Artificial Sequence: Synthetic oligonucleotide
  Sense strand starting at position 526 of SEQ ID NO: 917305
uggagaauguaacacacaa

SEQ ID NO: 1224893 - RNA, 19 nt, Artificial Sequence
  Description of Artificial Sequence: Synthetic oligonucleotide
  Antisense strand to SEQ ID NO: 1224892
uuguguguuacauucucca

SEQ ID NO: 1224894 - RNA, 19 nt, Artificial Sequence
  Description of Artificial Sequence: Synthetic oligonucleotide
  Sense strand starting at position 539 of SEQ ID NO: 917305
acacaagugggccgaauua

SEQ ID NO: 1224895 - RNA, 19 nt, Artificial Sequence
  Description of Artificial Sequence: Synthetic oligonucleotide
  Antisense strand to SEQ ID NO: 1224894
uaauucggcccacuugugu

SEQ ID NO: 1224896 - RNA, 19 nt, Artificial Sequence
  Description of Artificial Sequence: Synthetic oligonucleotide
  Sense strand starting at position 564 of SEQ ID NO: 917305
auguuauucuacuuugguu

SEQ ID NO: 1224897 - RNA, 19 nt, Artificial Sequence
  Description of Artificial Sequence: Synthetic oligonucleotide
  Antisense strand to SEQ ID NO: 1224896
aaccaaaguagaauaacau

SEQ ID NO: 1224898 - RNA, 19 nt, Artificial Sequence
  Description of Artificial Sequence: Synthetic oligonucleotide
  Sense strand starting at position 787 of SEQ ID NO: 917305
uugaucuacugagauccaa

SEQ ID NO: 1224899 - RNA, 19 nt, Artificial Sequence
  Description of Artificial Sequence: Synthetic oligonucleotide
  Antisense strand to SEQ ID NO: 1224898
uuggaucucaguagaucaa

SEQ ID NO: 1224900 - RNA, 19 nt, Artificial Sequence
  Description of Artificial Sequence: Synthetic oligonucleotide
  Sense strand starting at position 808 of SEQ ID NO: 917305
ucauuagugcugcaucgaa

SEQ ID NO: 1224901 - RNA, 19 nt, Artificial Sequence
  Description of Artificial Sequence: Synthetic oligonucleotide
  Antisense strand to SEQ ID NO: 1224900
uucgaugcagcacuaauga

SEQ ID NO: 1224902 - RNA, 19 nt, Artificial Sequence
  Description of Artificial Sequence: Synthetic oligonucleotide
  Sense strand starting at position 884 of SEQ ID NO: 917305
guacuauugccgcaagaau

SEQ ID NO: 1224903 - RNA, 19 nt, Artificial Sequence
  Description of Artificial Sequence: Synthetic oligonucleotide
  Antisense strand to SEQ ID NO: 1224902
auucuugcggcaauaguac

SEQ ID NO: 1224904 - RNA, 19 nt, Artificial Sequence
  Description of Artificial Sequence: Synthetic oligonucleotide
  Sense strand starting at position 892 of SEQ ID NO: 917305
gccgcaagaaugugaaauu

SEQ ID NO: 1224905 - RNA, 19 nt, Artificial Sequence
  Description of Artificial Sequence: Synthetic oligonucleotide
  Antisense strand to SEQ ID NO: 1224904
aauuucacauucuugcggc

SEQ ID NO: 1224906 - RNA, 19 nt, Artificial Sequence
  Description of Artificial Sequence: Synthetic oligonucleotide
  Sense strand starting at position 983 of SEQ ID NO: 917305
cuuuguuucugauuucugu

SEQ ID NO: 1224907 - RNA, 19 nt, Artificial Sequence
  Description of Artificial Sequence: Synthetic oligonucleotide
  Antisense strand to SEQ ID NO: 1224906
acagaaaucagaaacaaag

SEQ ID NO: 1224908 - RNA, 19 nt, Artificial Sequence
  Description of Artificial Sequence: Synthetic oligonucleotide
  Sense strand starting at position 986 of SEQ ID NO: 917305
uguuucugauuucugugau

SEQ ID NO: 1224909 - RNA, 19 nt, Artificial Sequence
  Description of Artificial Sequence: Synthetic oligonucleotide
  Antisense strand to SEQ ID NO: 1224908
aucacagaaaucagaaaca

SEQ ID NO: 1224910 - RNA, 19 nt, Artificial Sequence
  Description of Artificial Sequence: Synthetic oligonucleotide
  Sense strand starting at position 1048 of SEQ ID NO: 917305
acuuuagcuccugguacaa

SEQ ID NO: 1224911 - RNA, 19 nt, Artificial Sequence
  Description of Artificial Sequence: Synthetic oligonucleotide
  Antisense strand to SEQ ID NO: 1224910
uuguaccaggagcuaaagu

SEQ ID NO: 1224912 - RNA, 19 nt, Artificial Sequence
  Description of Artificial Sequence: Synthetic oligonucleotide
  Sense strand starting at position 1174 of SEQ ID NO: 917305
ugauguauuuccugaauga

SEQ ID NO: 1224913 - RNA, 19 nt, Artificial Sequence
  Description of Artificial Sequence: Synthetic oligonucleotide
  Antisense strand to SEQ ID NO: 1224912
ucauucaggaaauacauca

SEQ ID NO: 1224914 - RNA, 19 nt, Artificial Sequence
  Description of Artificial Sequence: Synthetic oligonucleotide
  Sense strand starting at position 1184 of SEQ ID NO: 917305
ccugaaugaugcuuugugu

SEQ ID NO: 1224915 - RNA, 19 nt, Artificial Sequence
  Description of Artificial Sequence: Synthetic oligonucleotide
  Antisense strand to SEQ ID NO: 1224914
acacaaagcaucauucagg

SEQ ID NO: 1224916 - RNA, 19 nt, Artificial Sequence
  Description of Artificial Sequence: Synthetic oligonucleotide
  Sense strand starting at position 1187 of SEQ ID NO: 917305
gaaugaugcuuugugugca

SEQ ID NO: 1224917 - RNA, 19 nt, Artificial Sequence
  Description of Artificial Sequence: Synthetic oligonucleotide
  Antisense strand to SEQ ID NO: 1224916
ugcacacaaagcaucauuc

SEQ ID NO: 1224918 - RNA, 19 nt, Artificial Sequence
  Description of Artificial Sequence: Synthetic oligonucleotide
  Sense strand starting at position 2133 of SEQ ID NO: 917305
ccgucacucccggguuaga

SEQ ID NO: 1224919 - RNA, 19 nt, Artificial Sequence
  Description of Artificial Sequence: Synthetic oligonucleotide
  Antisense strand to SEQ ID NO: 1224918
ucuaacccgggagugacgg

SEQ ID NO: 1224920 - RNA, 19 nt, Artificial Sequence
  Description of Artificial Sequence: Synthetic oligonucleotide
  Sense strand starting at position 2807 of SEQ ID NO: 917305
guauucuguggugacucau

SEQ ID NO: 1224921 - RNA, 19 nt, Artificial Sequence
  Description of Artificial Sequence: Synthetic oligonucleotide
  Antisense strand to SEQ ID NO: 1224920
augagucaccacagaauac

SEQ ID NO: 1224922 - RNA, 19 nt, Artificial Sequence
  Description of Artificial Sequence: Synthetic oligonucleotide
  Sense strand starting at position 2924 of SEQ ID NO: 917305
gggccauccugggucaaca

SEQ ID NO: 1224923 - RNA, 19 nt, Artificial Sequence
  Description of Artificial Sequence: Synthetic oligonucleotide
  Antisense strand to SEQ ID NO: 1224922
uguugacccaggauggccc

SEQ ID NO: 1224924 - RNA, 19 nt, Artificial Sequence
  Description of Artificial Sequence: Synthetic oligonucleotide
  Sense strand starting at position 3560 of SEQ ID NO: 917305
aggagacaugaauguguuu

SEQ ID NO: 1224925 - RNA, 19 nt, Artificial Sequence
  Description of Artificial Sequence: Synthetic oligonucleotide
  Antisense strand to SEQ ID NO: 1224924
aaacacauucaugucuccu

SEQ ID NO: 1224926 - RNA, 19 nt, Artificial Sequence
  Description of Artificial Sequence: Synthetic oligonucleotide
  Sense strand starting at position 3594 of SEQ ID NO: 917305
gagguacacuagcuaucaa

SEQ ID NO: 1224927 - RNA, 19 nt, Artificial Sequence
  Description of Artificial Sequence: Synthetic oligonucleotide
  Antisense strand to SEQ ID NO: 1224926
uugauagcuaguguaccuc

SEQ ID NO: 1224928 - RNA, 19 nt, Artificial Sequence
  Description of Artificial Sequence: Synthetic oligonucleotide
  Sense strand starting at position 3634 of SEQ ID NO: 917305
accagaguuaaguauccga

SEQ ID NO: 1224929 - RNA, 19 nt, Artificial Sequence
  Description of Artificial Sequence: Synthetic oligonucleotide
  Antisense strand to SEQ ID NO: 1224928
ucggauacuuaacucuggu

SEQ ID NO: 1224930 - RNA, 19 nt, Artificial Sequence
  Description of Artificial Sequence: Synthetic oligonucleotide
  Sense strand starting at position 3637 of SEQ ID NO: 917305
agaguuaaguauccgaacu

SEQ ID NO: 1224931 - RNA, 19 nt, Artificial Sequence
  Description of Artificial Sequence: Synthetic oligonucleotide
  Antisense strand to SEQ ID NO: 1224930
aguucggauacuuaacucu

SEQ ID NO: 1224932 - RNA, 19 nt, Artificial Sequence
  Description of Artificial Sequence: Synthetic oligonucleotide
  Sense strand starting at position 3753 of SEQ ID NO: 917305
ccuucuuucuaugugcaga

SEQ ID NO: 1224933 - RNA, 19 nt, Artificial Sequence
  Description of Artificial Sequence: Synthetic oligonucleotide
  Antisense strand to SEQ ID NO: 1224932
ucugcacauagaaagaagg

SEQ ID NO: 1224934 - RNA, 19 nt, Artificial Sequence
  Description of Artificial Sequence: Synthetic oligonucleotide
  Sense strand starting at position 3764 of SEQ ID NO: 917305
ugugcagacugcuccuaaa

SEQ ID NO: 1224935 - RNA, 19 nt, Artificial Sequence
  Description of Artificial Sequence: Synthetic oligonucleotide
  Antisense strand to SEQ ID NO: 1224934
uuuaggagcagucugcaca

SEQ ID NO: 1224936 - RNA, 19 nt, Artificial Sequence
  Description of Artificial Sequence: Synthetic oligonucleotide
  Sense strand starting at position 3880 of SEQ ID NO: 917305
gggccugcacauugaucau

SEQ ID NO: 1224937 - RNA, 19 nt, Artificial Sequence
  Description of Artificial Sequence: Synthetic oligonucleotide
  Antisense strand to SEQ ID NO: 1224936
augaucaaugugcaggccc

SEQ ID NO: 1224938 - RNA, 19 nt, Artificial Sequence
  Description of Artificial Sequence: Synthetic oligonucleotide
  Sense strand starting at position 3886 of SEQ ID NO: 917305
gcacauugaucaucuguau

SEQ ID NO: 1224939 - RNA, 19 nt, Artificial Sequence
  Description of Artificial Sequence: Synthetic oligonucleotide
  Antisense strand to SEQ ID NO: 1224938
auacagaugaucaaugugc

SEQ ID NO: 1224940 - RNA, 19 nt, Artificial Sequence
  Description of Artificial Sequence: Synthetic oligonucleotide
  Sense strand starting at position 3928 of SEQ ID NO: 917306
ucgggauuucuaugccuuu

SEQ ID NO: 1224941 - RNA, 19 nt, Artificial Sequence
  Description of Artificial Sequence: Synthetic oligonucleotide
  Antisense strand to SEQ ID NO: 1224940
aaaggcauagaaaucccga

SEQ ID NO: 1224942 - RNA, 19 nt, Artificial Sequence
  Description of Artificial Sequence: Synthetic oligonucleotide
  Sense strand starting at position 230 of SEQ ID NO: 917306
augagaaucuacgaauuua

SEQ ID NO: 1224943 - RNA, 19 nt, Artificial Sequence
  Description of Artificial Sequence: Synthetic oligonucleotide
  Antisense strand to SEQ ID NO: 1224942
uaaauucguagauucucau

SEQ ID NO: 1224944 - RNA, 19 nt, Artificial Sequence
  Description of Artificial Sequence: Synthetic oligonucleotide
  Sense strand starting at position 238 of SEQ ID NO: 917306
cuacgaauuuaguaaagag

SEQ ID NO: 1224945 - RNA, 19 nt, Artificial Sequence
  Description of Artificial Sequence: Synthetic oligonucleotide
  Antisense strand to SEQ ID NO: 1224944
cucuuuacuaaauucguag

SEQ ID NO: 1224946 - RNA, 19 nt, Artificial Sequence
  Description of Artificial Sequence: Synthetic oligonucleotide
  Sense strand starting at position 289 of SEQ ID NO: 917306
gccuuuacaguugaauaca

SEQ ID NO: 1224947 - RNA, 19 nt, Artificial Sequence
  Description of Artificial Sequence: Synthetic oligonucleotide
  Antisense strand to SEQ ID NO: 1224946
uguauucaacuguaaaggc

SEQ ID NO: 1224948 - RNA, 19 nt, Artificial Sequence
  Description of Artificial Sequence: Synthetic oligonucleotide
  Sense strand starting at position 319 of SEQ ID NO: 917306
ucaggucuugaaggcuaga

SEQ ID NO: 1224949 - RNA, 19 nt, Artificial Sequence
  Description of Artificial Sequence: Synthetic oligonucleotide
  Antisense strand to SEQ ID NO: 1224948
ucuagccuucaagaccuga

SEQ ID NO: 1224950 - RNA, 19 nt, Artificial Sequence
  Description of Artificial Sequence: Synthetic oligonucleotide
  Sense strand starting at position 335 of SEQ ID NO: 917306
agagccauuccugguaaua

SEQ ID NO: 1224951 - RNA, 19 nt, Artificial Sequence
  Description of Artificial Sequence: Synthetic oligonucleotide
  Antisense strand to SEQ ID NO: 1224950
uauuaccaggaauggcucu

SEQ ID NO: 1224952 - RNA, 19 nt, Artificial Sequence
  Description of Artificial Sequence: Synthetic oligonucleotide
  Sense strand starting at position 346 of SEQ ID NO: 917306
ugguaauaaugucccauua

SEQ ID NO: 1224953 - RNA, 19 nt, Artificial Sequence
  Description of Artificial Sequence: Synthetic oligonucleotide
  Antisense strand to SEQ ID NO: 1224952
uaaugggacauuauuacca

SEQ ID NO: 1224954 - RNA, 19 nt, Artificial Sequence
  Description of Artificial Sequence: Synthetic oligonucleotide
  Sense strand starting at position 461 of SEQ ID NO: 917306
cucugaauuccuggaagau

SEQ ID NO: 1224955 - RNA, 19 nt, Artificial Sequence
  Description of Artificial Sequence: Synthetic oligonucleotide
  Antisense strand to SEQ ID NO: 1224954
aucuuccaggaauucagag

SEQ ID NO: 1224956 - RNA, 19 nt, Artificial Sequence
  Description of Artificial Sequence: Synthetic oligonucleotide
  Sense strand starting at position 598 of SEQ ID NO: 917306
cgcugcaaaguguaaugaa

SEQ ID NO: 1224957 - RNA, 19 nt, Artificial Sequence
  Description of Artificial Sequence: Synthetic oligonucleotide
  Antisense strand to SEQ ID NO: 1224956
uucauuacacuuugcagcg

SEQ ID NO: 1224958 - RNA, 19 nt, Artificial Sequence
  Description of Artificial Sequence: Synthetic oligonucleotide
  Sense strand starting at position 633 of SEQ ID NO: 917306
gguguuaagugacuuggau

SEQ ID NO: 1224959 - RNA, 19 nt, Artificial Sequence
  Description of Artificial Sequence: Synthetic oligonucleotide
  Antisense strand to SEQ ID NO: 1224958
auccaagucacuuaacacc

SEQ ID NO: 1224960 - RNA, 19 nt, Artificial Sequence
  Description of Artificial Sequence: Synthetic oligonucleotide
  Sense strand starting at position 635 of SEQ ID NO: 917306
uguuaagugacuuggauuc

SEQ ID NO: 1224961 - RNA, 19 nt, Artificial Sequence
  Description of Artificial Sequence: Synthetic oligonucleotide
  Antisense strand to SEQ ID NO: 1224960
gaauccaagucacuuaaca

SEQ ID NO: 1224962 - RNA, 19 nt, Artificial Sequence
  Description of Artificial Sequence: Synthetic oligonucleotide
  Sense strand starting at position 645 of SEQ ID NO: 917306
cuuggauucuaauccaagu

SEQ ID NO: 1224963 - RNA, 19 nt, Artificial Sequence
  Description of Artificial Sequence: Synthetic oligonucleotide
  Antisense strand to SEQ ID NO: 1224962
acuuggauuagaauccaag

SEQ ID NO: 1224964 - RNA, 19 nt, Artificial Sequence
  Description of Artificial Sequence: Synthetic oligonucleotide
  Sense strand starting at position 796 of SEQ ID NO: 917306
augacaugaccuugagcaa

SEQ ID NO: 1224965 - RNA, 19 nt, Artificial Sequence
  Description of Artificial Sequence: Synthetic oligonucleotide
  Antisense strand to SEQ ID NO: 1224964
uugcucaaggucaugucau

SEQ ID NO: 1224966 - RNA, 19 nt, Artificial Sequence
  Description of Artificial Sequence: Synthetic oligonucleotide
  Sense strand starting at position 799 of SEQ ID NO: 917306
acaugaccuugagcaaaua

SEQ ID NO: 1224967 - RNA, 19 nt, Artificial Sequence
  Description of Artificial Sequence: Synthetic oligonucleotide
  Antisense strand to SEQ ID NO: 1224966
uauuugcucaaggucaugu

SEQ ID NO: 1224968 - RNA, 19 nt, Artificial Sequence
  Description of Artificial Sequence: Synthetic oligonucleotide
  Sense strand starting at position 992 of SEQ ID NO: 917306
uugugacuugcuuaggauu

SEQ ID NO: 1224969 - RNA, 19 nt, Artificial Sequence
  Description of Artificial Sequence: Synthetic oligonucleotide
  Antisense strand to SEQ ID NO: 1224968
aauccuaagcaagucacaa

SEQ ID NO: 1224970 - RNA, 19 nt, Artificial Sequence
  Description of Artificial Sequence: Synthetic oligonucleotide
  Sense strand starting at position 1014 of SEQ ID NO: 917306
aagugauuauugguggaga

SEQ ID NO: 1224971 - RNA, 19 nt, Artificial Sequence
  Description of Artificial Sequence: Synthetic oligonucleotide
  Antisense strand to SEQ ID NO: 1224970
ucuccaccaauaaucacuu

SEQ ID NO: 1224972 - RNA, 19 nt, Artificial Sequence
  Description of Artificial Sequence: Synthetic oligonucleotide
  Sense strand starting at position 1016 of SEQ ID NO: 917306
gugauuauugguggagaau

SEQ ID NO: 1224973 - RNA, 19 nt, Artificial Sequence
  Description of Artificial Sequence: Synthetic oligonucleotide
  Antisense strand to SEQ ID NO: 1224972
auucuccaccaauaaucac

SEQ ID NO: 1224974 - RNA, 19 nt, Artificial Sequence
  Description of Artificial Sequence: Synthetic oligonucleotide
  Sense strand starting at position 1087 of SEQ ID NO: 917306
ccuuauacauguuuguaua

SEQ ID NO: 1224975 - RNA, 19 nt, Artificial Sequence
  Description of Artificial Sequence: Synthetic oligonucleotide
  Antisense strand to SEQ ID NO: 1224974
uauacaaacauguauaagg

SEQ ID NO: 1224976 - RNA, 19 nt, Artificial Sequence
  Description of Artificial Sequence: Synthetic oligonucleotide
  Sense strand starting at position 1152 of SEQ ID NO: 917306
agcacugugaccuagagau

SEQ ID NO: 1224977 - RNA, 19 nt, Artificial Sequence
  Description of Artificial Sequence: Synthetic oligonucleotide
  Antisense strand to SEQ ID NO: 1224976
aucucuaggucacagugcu

SEQ ID NO: 1224978 - RNA, 19 nt, Artificial Sequence
  Description of Artificial Sequence: Synthetic oligonucleotide
  Sense strand starting at position 1195 of SEQ ID NO: 917306
ugaccuuaccuugggcaaa

SEQ ID NO: 1224979 - RNA, 19 nt, Artificial Sequence
  Description of Artificial Sequence: Synthetic oligonucleotide
  Antisense strand to SEQ ID NO: 1224978
uuugcccaagguaagguca

SEQ ID NO: 1224980 - RNA, 19 nt, Artificial Sequence
  Description of Artificial Sequence: Synthetic oligonucleotide
  Sense strand starting at position 1372 of SEQ ID NO: 917306
gguuauguugugggaaauc

SEQ ID NO: 1224981 - RNA, 19 nt, Artificial Sequence
  Description of Artificial Sequence: Synthetic oligonucleotide
  Antisense strand to SEQ ID NO: 1224980
gauuucccacaacauaacc

SEQ ID NO: 1224982 - RNA, 19 nt, Artificial Sequence
  Description of Artificial Sequence: Synthetic oligonucleotide
  Sense strand starting at position 1464 of SEQ ID NO: 917306
augugaugcauuugguaug

SEQ ID NO: 1224983 - RNA, 19 nt, Artificial Sequence
  Description of Artificial Sequence: Synthetic oligonucleotide
  Antisense strand to SEQ ID NO: 1224982
cauaccaaaugcaucacau

SEQ ID NO: 1224984 - RNA, 19 nt, Artificial Sequence
  Description of Artificial Sequence: Synthetic oligonucleotide
  Sense strand starting at position 1526 of SEQ ID NO: 917306
gacauaggcuuugcuuaua

SEQ ID NO: 1224985 - RNA, 19 nt, Artificial Sequence
  Description of Artificial Sequence: Synthetic oligonucleotide
  Antisense strand to SEQ ID NO: 1224984
uauaagcaaagccuauguc

SEQ ID NO: 1224986 - RNA, 19 nt, Artificial Sequence
  Description of Artificial Sequence: Synthetic oligonucleotide
  Sense strand starting at position 1579 of SEQ ID NO: 917306
ugguuaacacauugcauau

SEQ ID NO: 1224987 - RNA, 19 nt, Artificial Sequence
  Description of Artificial Sequence: Synthetic oligonucleotide
  Antisense strand to SEQ ID NO: 1224986
auaugcaauguguuaacca

SEQ ID NO: 1224988 - RNA, 19 nt, Artificial Sequence
  Description of Artificial Sequence: Synthetic oligonucleotide
  Sense strand starting at position 1614 of SEQ ID NO: 917306
uccucuaauguuggagcua

SEQ ID NO: 1224989 - RNA, 19 nt, Artificial Sequence
  Description of Artificial Sequence: Synthetic oligonucleotide
  Antisense strand to SEQ ID NO: 1224988
uagcuccaacauuagagga

SEQ ID NO: 1224990 - RNA, 19 nt, Artificial Sequence
  Description of Artificial Sequence: Synthetic oligonucleotide
  Sense strand starting at position 1692 of SEQ ID NO: 917306
ucaucuucuuugguauaua

SEQ ID NO: 1224991 - RNA, 19 nt, Artificial Sequence
  Description of Artificial Sequence: Synthetic oligonucleotide
  Antisense strand to SEQ ID NO: 1224990
uauauaccaaagaagauga

SEQ ID NO: 1224992 - RNA, 19 nt, Artificial Sequence
  Description of Artificial Sequence: Synthetic oligonucleotide
  Sense strand starting at position 1695 of SEQ ID NO: 917306
ucuucuuugguauauaguu

SEQ ID NO: 1224993 - RNA, 19 nt, Artificial Sequence
  Description of Artificial Sequence: Synthetic oligonucleotide
  Antisense strand to SEQ ID NO: 1224992
aacuauauaccaaagaaga

SEQ ID NO: 1224994 - RNA, 19 nt, Artificial Sequence
  Description of Artificial Sequence: Synthetic oligonucleotide
  Sense strand starting at position 1801 of SEQ ID NO: 917306
cuugacuucuagucaaaug

SEQ ID NO: 1224995 - RNA, 19 nt, Artificial Sequence
  Description of Artificial Sequence: Synthetic oligonucleotide
  Antisense strand to SEQ ID NO: 1224994
cauuugacuagaagucaag

SEQ ID NO: 1224996 - RNA, 19 nt, Artificial Sequence
  Description of Artificial Sequence: Synthetic oligonucleotide
  Sense strand starting at position 1867 of SEQ ID NO: 917306
gugcuaguucguucuugca

SEQ ID NO: 1224997 - RNA, 19 nt, Artificial Sequence
  Description of Artificial Sequence: Synthetic oligonucleotide
  Antisense strand to SEQ ID NO: 1224996
ugcaagaacgaacuagcac

SEQ ID NO: 1224998 - RNA, 19 nt, Artificial Sequence
  Description of Artificial Sequence: Synthetic oligonucleotide
  Sense strand starting at position 2003 of SEQ ID NO: 917306
gugaguccugaggaaguuu

SEQ ID NO: 1224999 - RNA, 19 nt, Artificial Sequence
  Description of Artificial Sequence: Synthetic oligonucleotide
  Antisense strand to SEQ ID NO: 1224998
aaacuuccucaggacucac

SEQ ID NO: 1225000 - RNA, 19 nt, Artificial Sequence
  Description of Artificial Sequence: Synthetic oligonucleotide
  Sense strand starting at position 2055 of SEQ ID NO: 917306
augucacguggugacaaua

SEQ ID NO: 1225001 - RNA, 19 nt, Artificial Sequence
  Description of Artificial Sequence: Synthetic oligonucleotide
  Antisense strand to SEQ ID NO: 1225000
uauugucaccacgugacau

SEQ ID NO: 1225002 - RNA, 19 nt, Artificial Sequence
  Description of Artificial Sequence: Synthetic oligonucleotide
  Sense strand starting at position 2112 of SEQ ID NO: 917306
acaagcagaucucuuguga

SEQ ID NO: 1225003 - RNA, 19 nt, Artificial Sequence
  Description of Artificial Sequence: Synthetic oligonucleotide
  Antisense strand to SEQ ID NO: 1225002
ucacaagagaucugcuugu

SEQ ID NO: 1225004 - RNA, 19 nt, Artificial Sequence
  Description of Artificial Sequence: Synthetic oligonucleotide
  Sense strand starting at position 3624 of SEQ ID NO: 917306
auaggaaacuugguccaua

SEQ ID NO: 1225005 - RNA, 19 nt, Artificial Sequence
  Description of Artificial Sequence: Synthetic oligonucleotide
  Antisense strand to SEQ ID NO: 1225004
uauggaccaaguuuccuau

SEQ ID NO: 1225006 - RNA, 19 nt, Artificial Sequence
  Description of Artificial Sequence: Synthetic oligonucleotide
  Sense strand starting at position 3625 of SEQ ID NO: 917306
uaggaaacuugguccauag

SEQ ID NO: 1225007 - RNA, 19 nt, Artificial Sequence
  Description of Artificial Sequence: Synthetic oligonucleotide
  Antisense strand to SEQ ID NO: 1225006
cuauggaccaaguuuccua

SEQ ID NO: 1225008 - RNA, 19 nt, Artificial Sequence
  Description of Artificial Sequence: Synthetic oligonucleotide
  Sense strand starting at position 3627 of SEQ ID NO: 917306
ggaaacuugguccauagcu

SEQ ID NO: 1225009 - RNA, 19 nt, Artificial Sequence
  Description of Artificial Sequence: Synthetic oligonucleotide
  Antisense strand to SEQ ID NO: 1225008
agcuauggaccaaguuucc

SEQ ID NO: 1225010 - RNA, 19 nt, Artificial Sequence
  Description of Artificial Sequence: Synthetic oligonucleotide
  Sense strand starting at position 3634 of SEQ ID NO: 917306
ugguccauagcuuagguaa

SEQ ID NO: 1225011 - RNA, 19 nt, Artificial Sequence
  Description of Artificial Sequence: Synthetic oligonucleotide
  Antisense strand to SEQ ID NO: 1225010
uuaccuaagcuauggacca

SEQ ID NO: 1225012 - RNA, 19 nt, Artificial Sequence
  Description of Artificial Sequence: Synthetic oligonucleotide
  Sense strand starting at position 3637 of SEQ ID NO: 917306
uccauagcuuagguaaaua

SEQ ID NO: 1225013 - RNA, 19 nt, Artificial Sequence
  Description of Artificial Sequence: Synthetic oligonucleotide
  Antisense strand to SEQ ID NO: 1225012
uauuuaccuaagcuaugga

SEQ ID NO: 1225014 - RNA, 19 nt, Artificial Sequence
  Description of Artificial Sequence: Synthetic oligonucleotide
  Sense strand starting at position 3659 of SEQ ID NO: 917306
agcaaagaacuuugucuuu

SEQ ID NO: 1225015 - RNA, 19 nt, Artificial Sequence
  Description of Artificial Sequence: Synthetic oligonucleotide
  Antisense strand to SEQ ID NO: 1225014
aaagacaaaguucuuugcu

SEQ ID NO: 1225016 - RNA, 19 nt, Artificial Sequence
  Description of Artificial Sequence: Synthetic oligonucleotide
  Sense strand starting at position 3664 of SEQ ID NO: 917306
agaacuuugucuuuaaaug

SEQ ID NO: 1225017 - RNA, 19 nt, Artificial Sequence
  Description of Artificial Sequence: Synthetic oligonucleotide
  Antisense strand to SEQ ID NO: 1225016
cauuuaaagacaaaguucu

SEQ ID NO: 1225018 - RNA, 19 nt, Artificial Sequence
  Description of Artificial Sequence: Synthetic oligonucleotide
  Sense strand starting at position 3680 of SEQ ID NO: 917306
augaguaagcucugcagac

SEQ ID NO: 1225019 - RNA, 19 nt, Artificial Sequence
  Description of Artificial Sequence: Synthetic oligonucleotide
  Antisense strand to SEQ ID NO: 1225018
gucugcagagcuuacucau

SEQ ID NO: 1225020 - RNA, 19 nt, Artificial Sequence
  Description of Artificial Sequence: Synthetic oligonucleotide
  Sense strand starting at position 3682 of SEQ ID NO: 917307
gaguaagcucugcagacuu

SEQ ID NO: 1225021 - RNA, 19 nt, Artificial Sequence
  Description of Artificial Sequence: Synthetic oligonucleotide
  Antisense strand to SEQ ID NO: 1225020
aagucugcagagcuuacuc

SEQ ID NO: 1225022 - RNA, 19 nt, Artificial Sequence
  Description of Artificial Sequence: Synthetic oligonucleotide
  Sense strand starting at position 20 of SEQ ID NO: 917307
uccgauguaaaguaguaaa

SEQ ID NO: 1225023 - RNA, 19 nt, Artificial Sequence
  Description of Artificial Sequence: Synthetic oligonucleotide
  Antisense strand to SEQ ID NO: 1225022
uuuacuacuuuacaucgga

SEQ ID NO: 1225024 - RNA, 19 nt, Artificial Sequence
  Description of Artificial Sequence: Synthetic oligonucleotide
  Sense strand starting at position 72 of SEQ ID NO: 917307
uacagagagugauugggua

SEQ ID NO: 1225025 - RNA, 19 nt, Artificial Sequence
  Description of Artificial Sequence: Synthetic oligonucleotide
  Antisense strand to SEQ ID NO: 1225024
uacccaaucacucucugua

SEQ ID NO: 1225026 - RNA, 19 nt, Artificial Sequence
  Description of Artificial Sequence: Synthetic oligonucleotide
  Sense strand starting at position 74 of SEQ ID NO: 917307
cagagagugauuggguaca

SEQ ID NO: 1225027 - RNA, 19 nt, Artificial Sequence
  Description of Artificial Sequence: Synthetic oligonucleotide
  Antisense strand to SEQ ID NO: 1225026
uguacccaaucacucucug

SEQ ID NO: 1225028 - RNA, 19 nt, Artificial Sequence
  Description of Artificial Sequence: Synthetic oligonucleotide
  Sense strand starting at position 76 of SEQ ID NO: 917307
gagagugauuggguacauu

SEQ ID NO: 1225029 - RNA, 19 nt, Artificial Sequence
  Description of Artificial Sequence: Synthetic oligonucleotide
  Antisense strand to SEQ ID NO: 1225028
aauguacccaaucacucuc

SEQ ID NO: 1225030 - RNA, 19 nt, Artificial Sequence
  Description of Artificial Sequence: Synthetic oligonucleotide
  Sense strand starting at position 107 of SEQ ID NO: 917307
gccacuacugagcaauuaa

SEQ ID NO: 1225031 - RNA, 19 nt, Artificial Sequence
  Description of Artificial Sequence: Synthetic oligonucleotide
  Antisense strand to SEQ ID NO: 1225030
uuaauugcucaguaguggc

SEQ ID NO: 1225032 - RNA, 19 nt, Artificial Sequence
  Description of Artificial Sequence: Synthetic oligonucleotide
  Sense strand starting at position 258 of SEQ ID NO: 917307
auguaacagguuugguuaa

SEQ ID NO: 1225033 - RNA, 19 nt, Artificial Sequence
  Description of Artificial Sequence: Synthetic oligonucleotide
  Antisense strand to SEQ ID NO: 1225032
uuaaccaaaccuguuacau

SEQ ID NO: 1225034 - RNA, 19 nt, Artificial Sequence
  Description of Artificial Sequence: Synthetic oligonucleotide
  Sense strand starting at position 260 of SEQ ID NO: 917307
guaacagguuugguuaaag

SEQ ID NO: 1225035 - RNA, 19 nt, Artificial Sequence
  Description of Artificial Sequence: Synthetic oligonucleotide
  Antisense strand to SEQ ID NO: 1225034
cuuuaaccaaaccuguuac

SEQ ID NO: 1225036 - RNA, 19 nt, Artificial Sequence
  Description of Artificial Sequence: Synthetic oligonucleotide
  Sense strand starting at position 331 of SEQ ID NO: 917307
ucccacuauuucgaugaaa

SEQ ID NO: 1225037 - RNA, 19 nt, Artificial Sequence
  Description of Artificial Sequence: Synthetic oligonucleotide
  Antisense strand to SEQ ID NO: 1225036
uuucaucgaaauaguggga

SEQ ID NO: 1225038 - RNA, 19 nt, Artificial Sequence
  Description of Artificial Sequence: Synthetic oligonucleotide
  Sense strand starting at position 417 of SEQ ID NO: 917307
cauuguuacccugagagug

SEQ ID NO: 1225039 - RNA, 19 nt, Artificial Sequence
  Description of Artificial Sequence: Synthetic oligonucleotide
  Antisense strand to SEQ ID NO: 1225038
cacucucaggguaacaaug

SEQ ID NO: 1225040 - RNA, 19 nt, Artificial Sequence
  Description of Artificial Sequence: Synthetic oligonucleotide
  Sense strand starting at position 522 of SEQ ID NO: 917307
uucuuagagucuuugacuu

SEQ ID NO: 1225041 - RNA, 19 nt, Artificial Sequence
  Description of Artificial Sequence: Synthetic oligonucleotide
  Antisense strand to SEQ ID NO: 1225040
aagucaaagacucuaagaa

SEQ ID NO: 1225042 - RNA, 19 nt, Artificial Sequence
  Description of Artificial Sequence: Synthetic oligonucleotide
  Sense strand starting at position 546 of SEQ ID NO: 917307
gguagacaauugccagaaa

SEQ ID NO: 1225043 - RNA, 19 nt, Artificial Sequence
  Description of Artificial Sequence: Synthetic oligonucleotide
  Antisense strand to SEQ ID NO: 1225042
uuucuggcaauugucuacc

SEQ ID NO: 1225044 - RNA, 19 nt, Artificial Sequence
  Description of Artificial Sequence: Synthetic oligonucleotide
  Sense strand starting at position 588 of SEQ ID NO: 917307
agaacagaaugcuuccgua

SEQ ID NO: 1225045 - RNA, 19 nt, Artificial Sequence
  Description of Artificial Sequence: Synthetic oligonucleotide
  Antisense strand to SEQ ID NO: 1225044
uacggaagcauucuguucu

SEQ ID NO: 1225046 - RNA, 19 nt, Artificial Sequence
  Description of Artificial Sequence: Synthetic oligonucleotide
  Sense strand starting at position 746 of SEQ ID NO: 917307
guuguaguuucauuucgga

SEQ ID NO: 1225047 - RNA, 19 nt, Artificial Sequence
  Description of Artificial Sequence: Synthetic oligonucleotide
  Antisense strand to SEQ ID NO: 1225046
uccgaaaugaaacuacaac

SEQ ID NO: 1225048 - RNA, 19 nt, Artificial Sequence
  Description of Artificial Sequence: Synthetic oligonucleotide
  Sense strand starting at position 762 of SEQ ID NO: 917307
ggacuuugaggacgcagau

SEQ ID NO: 1225049 - RNA, 19 nt, Artificial Sequence
  Description of Artificial Sequence: Synthetic oligonucleotide
  Antisense strand to SEQ ID NO: 1225048
aucugcguccucaaagucc

SEQ ID NO: 1225050 - RNA, 19 nt, Artificial Sequence
  Description of Artificial Sequence: Synthetic oligonucleotide
  Sense strand starting at position 786 of SEQ ID NO: 917307
uguauauggcaacacaauu

SEQ ID NO: 1225051 - RNA, 19 nt, Artificial Sequence
  Description of Artificial Sequence: Synthetic oligonucleotide
  Antisense strand to SEQ ID NO: 1225050
aauuguguugccauauaca

SEQ ID NO: 1225052 - RNA, 19 nt, Artificial Sequence
  Description of Artificial Sequence: Synthetic oligonucleotide
  Sense strand starting at position 883 of SEQ ID NO: 917307
gugggagcuguuaacgcuu

SEQ ID NO: 1225053 - RNA, 19 nt, Artificial Sequence
  Description of Artificial Sequence: Synthetic oligonucleotide
  Antisense strand to SEQ ID NO: 1225052
aagcguuaacagcucccac

SEQ ID NO: 1225054 - RNA, 19 nt, Artificial Sequence
  Description of Artificial Sequence: Synthetic oligonucleotide
  Sense strand starting at position 1004 of SEQ ID NO: 917307
gcaaauuaucuggaucuuu

SEQ ID NO: 1225055 - RNA, 19 nt, Artificial Sequence
  Description of Artificial Sequence: Synthetic oligonucleotide
  Antisense strand to SEQ ID NO: 1225054
aaagauccagauaauuugc

SEQ ID NO: 1225056 - RNA, 19 nt, Artificial Sequence
  Description of Artificial Sequence: Synthetic oligonucleotide
  Sense strand starting at position 1070 of SEQ ID NO: 917307
acaugaaauuuguugcugu

SEQ ID NO: 1225057 - RNA, 19 nt, Artificial Sequence
  Description of Artificial Sequence: Synthetic oligonucleotide
  Antisense strand to SEQ ID NO: 1225056
acagcaacaaauuucaugu

SEQ ID NO: 1225058 - RNA, 19 nt, Artificial Sequence
  Description of Artificial Sequence: Synthetic oligonucleotide
  Sense strand starting at position 1241 of SEQ ID NO: 917307
ugugaucugugaccagaau

SEQ ID NO: 1225059 - RNA, 19 nt, Artificial Sequence
  Description of Artificial Sequence: Synthetic oligonucleotide
  Antisense strand to SEQ ID NO: 1225058
auucuggucacagaucaca

SEQ ID NO: 1225060 - RNA, 19 nt, Artificial Sequence
  Description of Artificial Sequence: Synthetic oligonucleotide
  Sense strand starting at position 1242 of SEQ ID NO: 917307
gugaucugugaccagaaug

SEQ ID NO: 1225061 - RNA, 19 nt, Artificial Sequence
  Description of Artificial Sequence: Synthetic oligonucleotide
  Antisense strand to SEQ ID NO: 1225060
cauucuggucacagaucac

SEQ ID NO: 1225062 - RNA, 19 nt, Artificial Sequence
  Description of Artificial Sequence: Synthetic oligonucleotide
  Sense strand starting at position 1333 of SEQ ID NO: 917307
ucagaauguuaagcuuaag

SEQ ID NO: 1225063 - RNA, 19 nt, Artificial Sequence
  Description of Artificial Sequence: Synthetic oligonucleotide
  Antisense strand to SEQ ID NO: 1225062
cuuaagcuuaacauucuga

SEQ ID NO: 1225064 - RNA, 19 nt, Artificial Sequence
  Description of Artificial Sequence: Synthetic oligonucleotide
  Sense strand starting at position 1336 of SEQ ID NO: 917307
gaauguuaagcuuaaguua

SEQ ID NO: 1225065 - RNA, 19 nt, Artificial Sequence
  Description of Artificial Sequence: Synthetic oligonucleotide
  Antisense strand to SEQ ID NO: 1225064
uaacuuaagcuuaacauuc

SEQ ID NO: 1225066 - RNA, 19 nt, Artificial Sequence
  Description of Artificial Sequence: Synthetic oligonucleotide
  Sense strand starting at position 1528 of SEQ ID NO: 917307
gcuuguuagcucuuguuga

SEQ ID NO: 1225067 - RNA, 19 nt, Artificial Sequence
  Description of Artificial Sequence: Synthetic oligonucleotide
  Antisense strand to SEQ ID NO: 1225066
ucaacaagagcuaacaagc

SEQ ID NO: 1225068 - RNA, 19 nt, Artificial Sequence
  Description of Artificial Sequence: Synthetic oligonucleotide
  Sense strand starting at position 1618 of SEQ ID NO: 917307
cuagauuuguaauaugaca

SEQ ID NO: 1225069 - RNA, 19 nt, Artificial Sequence
  Description of Artificial Sequence: Synthetic oligonucleotide
  Antisense strand to SEQ ID NO: 1225068
ugucauauuacaaaucuag

SEQ ID NO: 1225070 - RNA, 19 nt, Artificial Sequence
  Description of Artificial Sequence: Synthetic oligonucleotide
  Sense strand starting at position 1723 of SEQ ID NO: 917307
ggaauauaccuaggaggcu

SEQ ID NO: 1225071 - RNA, 19 nt, Artificial Sequence
  Description of Artificial Sequence: Synthetic oligonucleotide
  Antisense strand to SEQ ID NO: 1225070
agccuccuagguauauucc

SEQ ID NO: 1225072 - RNA, 19 nt, Artificial Sequence
  Description of Artificial Sequence: Synthetic oligonucleotide
  Sense strand starting at position 1766 of SEQ ID NO: 917307
cugcguggucugcucauua

SEQ ID NO: 1225073 - RNA, 19 nt, Artificial Sequence
  Description of Artificial Sequence: Synthetic oligonucleotide
  Antisense strand to SEQ ID NO: 1225072
uaaugagcagaccacgcag

SEQ ID NO: 1225074 - RNA, 19 nt, Artificial Sequence
  Description of Artificial Sequence: Synthetic oligonucleotide
  Sense strand starting at position 1910 of SEQ ID NO: 917307
ucguguuugggauaugaca

SEQ ID NO: 1225075 - RNA, 19 nt, Artificial Sequence
  Description of Artificial Sequence: Synthetic oligonucleotide
  Antisense strand to SEQ ID NO: 1225074
ugucauaucccaaacacga

SEQ ID NO: 1225076 - RNA, 19 nt, Artificial Sequence
  Description of Artificial Sequence: Synthetic oligonucleotide
  Sense strand starting at position 1912 of SEQ ID NO: 917307
guguuugggauaugacaau

SEQ ID NO: 1225077 - RNA, 19 nt, Artificial Sequence
  Description of Artificial Sequence: Synthetic oligonucleotide
  Antisense strand to SEQ ID NO: 1225076
auugucauaucccaaacac

SEQ ID NO: 1225078 - RNA, 19 nt, Artificial Sequence
  Description of Artificial Sequence: Synthetic oligonucleotide
  Sense strand starting at position 2008 of SEQ ID NO: 917307
acuguuuaaugacuaugaa

SEQ ID NO: 1225079 - RNA, 19 nt, Artificial Sequence
  Description of Artificial Sequence: Synthetic oligonucleotide
  Antisense strand to SEQ ID NO: 1225078
uucauagucauuaaacagu

SEQ ID NO: 1225080 - RNA, 19 nt, Artificial Sequence
  Description of Artificial Sequence: Synthetic oligonucleotide
  Sense strand starting at position 2033 of SEQ ID NO: 917307
gccuuuaaccuuuaaggua

SEQ ID NO: 1225081 - RNA, 19 nt, Artificial Sequence
  Description of Artificial Sequence: Synthetic oligonucleotide
  Antisense strand to SEQ ID NO: 1225080
uaccuuaaagguuaaaggc

SEQ ID NO: 1225082 - RNA, 19 nt, Artificial Sequence
  Description of Artificial Sequence: Synthetic oligonucleotide
  Sense strand starting at position 2498 of SEQ ID NO: 917307
aguuucuaugaaugguuua

SEQ ID NO: 1225083 - RNA, 19 nt, Artificial Sequence
  Description of Artificial Sequence: Synthetic oligonucleotide
  Antisense strand to SEQ ID NO: 1225082
uaaaccauucauagaaacu

SEQ ID NO: 1225084 - RNA, 19 nt, Artificial Sequence
  Description of Artificial Sequence: Synthetic oligonucleotide
  Sense strand starting at position 2691 of SEQ ID NO: 917307
gcaauagugcgugccugua

SEQ ID NO: 1225085 - RNA, 19 nt, Artificial Sequence
  Description of Artificial Sequence: Synthetic oligonucleotide
  Antisense strand to SEQ ID NO: 1225084
uacaggcacgcacuauugc

SEQ ID NO: 1225086 - RNA, 19 nt, Artificial Sequence
  Description of Artificial Sequence: Synthetic oligonucleotide
  Sense strand starting at position 2893 of SEQ ID NO: 917307
aggugaggguacuuaaaug

SEQ ID NO: 1225087 - RNA, 19 nt, Artificial Sequence
  Description of Artificial Sequence: Synthetic oligonucleotide
  Antisense strand to SEQ ID NO: 1225086
cauuuaaguacccucaccu

SEQ ID NO: 1225088 - RNA, 19 nt, Artificial Sequence
  Description of Artificial Sequence: Synthetic oligonucleotide
  Sense strand starting at position 3061 of SEQ ID NO: 917307
ucuuccucuuggguauuaa

SEQ ID NO: 1225089 - RNA, 19 nt, Artificial Sequence
  Description of Artificial Sequence: Synthetic oligonucleotide
  Antisense strand to SEQ ID NO: 1225088
uuaauacccaagaggaaga

SEQ ID NO: 1225090 - RNA, 19 nt, Artificial Sequence
  Description of Artificial Sequence: Synthetic oligonucleotide
  Sense strand starting at position 3366 of SEQ ID NO: 917307
uuauuagaaggcugguaga

SEQ ID NO: 1225091 - RNA, 19 nt, Artificial Sequence
  Description of Artificial Sequence: Synthetic oligonucleotide
  Antisense strand to SEQ ID NO: 1225090
ucuaccagccuucuaauaa

SEQ ID NO: 1225092 - RNA, 19 nt, Artificial Sequence
  Description of Artificial Sequence: Synthetic oligonucleotide
  Sense strand starting at position 3383 of SEQ ID NO: 917307
gaagcugagugagcauuaa

SEQ ID NO: 1225093 - RNA, 19 nt, Artificial Sequence
  Description of Artificial Sequence: Synthetic oligonucleotide
  Antisense strand to SEQ ID NO: 1225092
uuaaugcucacucagcuuc

SEQ ID NO: 1225094 - RNA, 19 nt, Artificial Sequence
  Description of Artificial Sequence: Synthetic oligonucleotide
  Sense strand starting at position 3425 of SEQ ID NO: 917307
cuuguauucucauuggaaa

SEQ ID NO: 1225095 - RNA, 19 nt, Artificial Sequence
  Description of Artificial Sequence: Synthetic oligonucleotide
  Antisense strand to SEQ ID NO: 1225094
uuuccaaugagaauacaag

SEQ ID NO: 1225096 - RNA, 19 nt, Artificial Sequence
  Description of Artificial Sequence: Synthetic oligonucleotide
  Sense strand starting at position 3539 of SEQ ID NO: 917307
uugauagucuccucuuuag

SEQ ID NO: 1225097 - RNA, 19 nt, Artificial Sequence
  Description of Artificial Sequence: Synthetic oligonucleotide
  Antisense strand to SEQ ID NO: 1225096
cuaaagaggagacuaucaa

SEQ ID NO: 1225098 - RNA, 19 nt, Artificial Sequence
  Description of Artificial Sequence: Synthetic oligonucleotide
  Sense strand starting at position 3696 of SEQ ID NO: 917307
ugucauuacucacuugacu

SEQ ID NO: 1225099 - RNA, 19 nt, Artificial Sequence
  Description of Artificial Sequence: Synthetic oligonucleotide
  Antisense strand to SEQ ID NO: 1225098
agucaagugaguaaugaca

SEQ ID NO: 1225100 - RNA, 19 nt, Artificial Sequence
  Description of Artificial Sequence: Synthetic oligonucleotide
  Sense strand starting at position 3701 of SEQ ID NO: 917308
uuacucacuugacuuguua

SEQ ID NO: 1225101 - RNA, 19 nt, Artificial Sequence
  Description of Artificial Sequence: Synthetic oligonucleotide
  Antisense strand to SEQ ID NO: 1225100
uaacaagucaagugaguaa

SEQ ID NO: 1225102 - RNA, 19 nt, Artificial Sequence
  Description of Artificial Sequence: Synthetic oligonucleotide
  Sense strand starting at position 61 of SEQ ID NO: 917308
uuuagaaaucuuggcuaau

SEQ ID NO: 1225103 - RNA, 19 nt, Artificial Sequence
  Description of Artificial Sequence: Synthetic oligonucleotide
  Antisense strand to SEQ ID NO: 1225102
auuagccaagauuucuaaa

SEQ ID NO: 1225104 - RNA, 19 nt, Artificial Sequence
  Description of Artificial Sequence: Synthetic oligonucleotide
  Sense strand starting at position 62 of SEQ ID NO: 917308
uuagaaaucuuggcuaauu

SEQ ID NO: 1225105 - RNA, 19 nt, Artificial Sequence
  Description of Artificial Sequence: Synthetic oligonucleotide
  Antisense strand to SEQ ID NO: 1225104
aauuagccaagauuucuaa

SEQ ID NO: 1225106 - RNA, 19 nt, Artificial Sequence
  Description of Artificial Sequence: Synthetic oligonucleotide
  Sense strand starting at position 89 of SEQ ID NO: 917308
ggaaguccuuucuuuaaac

SEQ ID NO: 1225107 - RNA, 19 nt, Artificial Sequence
  Description of Artificial Sequence: Synthetic oligonucleotide
  Antisense strand to SEQ ID NO: 1225106
guuuaaagaaaggacuucc

SEQ ID NO: 1225108 - RNA, 19 nt, Artificial Sequence
  Description of Artificial Sequence: Synthetic oligonucleotide
  Sense strand starting at position 472 of SEQ ID NO: 917308
uagcgaaaggauuacuguu

SEQ ID NO: 1225109 - RNA, 19 nt, Artificial Sequence
  Description of Artificial Sequence: Synthetic oligonucleotide
  Antisense strand to SEQ ID NO: 1225108
aacaguaauccuuucgcua

SEQ ID NO: 1225110 - RNA, 19 nt, Artificial Sequence
  Description of Artificial Sequence: Synthetic oligonucleotide
  Sense strand starting at position 630 of SEQ ID NO: 917308
cuaggaagcuucucuauuc

SEQ ID NO: 1225111 - RNA, 19 nt, Artificial Sequence
  Description of Artificial Sequence: Synthetic oligonucleotide
  Antisense strand to SEQ ID NO: 1225110
gaauagagaagcuuccuag

SEQ ID NO: 1225112 - RNA, 19 nt, Artificial Sequence
  Description of Artificial Sequence: Synthetic oligonucleotide
  Sense strand starting at position 999 of SEQ ID NO: 917308
ucauacuaagauugugcaa

SEQ ID NO: 1225113 - RNA, 19 nt, Artificial Sequence
  Description of Artificial Sequence: Synthetic oligonucleotide
  Antisense strand to SEQ ID NO: 1225112
uugcacaaucuuaguauga

SEQ ID NO: 1225114 - RNA, 19 nt, Artificial Sequence
  Description of Artificial Sequence: Synthetic oligonucleotide
  Sense strand starting at position 1008 of SEQ ID NO: 917308
gauugugcaagugagagua

SEQ ID NO: 1225115 - RNA, 19 nt, Artificial Sequence
  Description of Artificial Sequence: Synthetic oligonucleotide
  Antisense strand to SEQ ID NO: 1225114
uacucucacuugcacaauc

SEQ ID NO: 1225116 - RNA, 19 nt, Artificial Sequence
  Description of Artificial Sequence: Synthetic oligonucleotide
  Sense strand starting at position 1068 of SEQ ID NO: 917308
uuuagaccuggcuauguuu

SEQ ID NO: 1225117 - RNA, 19 nt, Artificial Sequence
  Description of Artificial Sequence: Synthetic oligonucleotide
  Antisense strand to SEQ ID NO: 1225116
aaacauagccaggucuaaa

SEQ ID NO: 1225118 - RNA, 19 nt, Artificial Sequence
  Description of Artificial Sequence: Synthetic oligonucleotide
  Sense strand starting at position 1182 of SEQ ID NO: 917308
aacauagugauguguagga

SEQ ID NO: 1225119 - RNA, 19 nt, Artificial Sequence
  Description of Artificial Sequence: Synthetic oligonucleotide
  Antisense strand to SEQ ID NO: 1225118
uccuacacaucacuauguu

SEQ ID NO: 1225120 - RNA, 19 nt, Artificial Sequence
  Description of Artificial Sequence: Synthetic oligonucleotide
  Sense strand starting at position 1184 of SEQ ID NO: 917308
cauagugauguguaggaaa

SEQ ID NO: 1225121 - RNA, 19 nt, Artificial Sequence
  Description of Artificial Sequence: Synthetic oligonucleotide
  Antisense strand to SEQ ID NO: 1225120
uuuccuacacaucacuaug

SEQ ID NO: 1225122 - RNA, 19 nt, Artificial Sequence
  Description of Artificial Sequence: Synthetic oligonucleotide
  Sense strand starting at position 1350 of SEQ ID NO: 917308
uacugucuacuuggagaua

SEQ ID NO: 1225123 - RNA, 19 nt, Artificial Sequence
  Description of Artificial Sequence: Synthetic oligonucleotide
  Antisense strand to SEQ ID NO: 1225122
uaucuccaaguagacagua

SEQ ID NO: 1225124 - RNA, 19 nt, Artificial Sequence
  Description of Artificial Sequence: Synthetic oligonucleotide
  Sense strand starting at position 1844 of SEQ ID NO: 917308
cuuaccgguuuauuacaaa

SEQ ID NO: 1225125 - RNA, 19 nt, Artificial Sequence
  Description of Artificial Sequence: Synthetic oligonucleotide
  Antisense strand to SEQ ID NO: 1225124
uuuguaauaaaccgguaag

SEQ ID NO: 1225126 - RNA, 19 nt, Artificial Sequence
  Description of Artificial Sequence: Synthetic oligonucleotide
  Sense strand starting at position 2131 of SEQ ID NO: 917308
ugccuuggaacagguuaaa

SEQ ID NO: 1225127 - RNA, 19 nt, Artificial Sequence
  Description of Artificial Sequence: Synthetic oligonucleotide
  Antisense strand to SEQ ID NO: 1225126
uuuaaccuguuccaaggca

SEQ ID NO: 1225128 - RNA, 19 nt, Artificial Sequence
  Description of Artificial Sequence: Synthetic oligonucleotide
  Sense strand starting at position 2315 of SEQ ID NO: 917308
gaguuaacuccugaguuau

SEQ ID NO: 1225129 - RNA, 19 nt, Artificial Sequence
  Description of Artificial Sequence: Synthetic oligonucleotide
  Antisense strand to SEQ ID NO: 1225128
auaacucaggaguuaacuc

SEQ ID NO: 1225130 - RNA, 19 nt, Artificial Sequence
  Description of Artificial Sequence: Synthetic oligonucleotide
  Sense strand starting at position 2386 of SEQ ID NO: 917308
uggcauauucuugagacau

SEQ ID NO: 1225131 - RNA, 19 nt, Artificial Sequence
  Description of Artificial Sequence: Synthetic oligonucleotide
  Antisense strand to SEQ ID NO: 1225130
augucucaagaauaugcca

SEQ ID NO: 1225132 - RNA, 19 nt, Artificial Sequence
  Description of Artificial Sequence: Synthetic oligonucleotide
  Sense strand starting at position 2394 of SEQ ID NO: 917308
ucuugagacauuggagcua

SEQ ID NO: 1225133 - RNA, 19 nt, Artificial Sequence
  Description of Artificial Sequence: Synthetic oligonucleotide
  Antisense strand to SEQ ID NO: 1225132
uagcuccaaugucucaaga

SEQ ID NO: 1225134 - RNA, 19 nt, Artificial Sequence
  Description of Artificial Sequence: Synthetic oligonucleotide
  Sense strand starting at position 2407 of SEQ ID NO: 917308
gagcuaggaaguuggaaau

SEQ ID NO: 1225135 - RNA, 19 nt, Artificial Sequence
  Description of Artificial Sequence: Synthetic oligonucleotide
  Antisense strand to SEQ ID NO: 1225134
auuuccaacuuccuagcuc

SEQ ID NO: 1225136 - RNA, 19 nt, Artificial Sequence
  Description of Artificial Sequence: Synthetic oligonucleotide
  Sense strand starting at position 2514 of SEQ ID NO: 917308
acaggucaucauugccaaa

SEQ ID NO: 1225137 - RNA, 19 nt, Artificial Sequence
  Description of Artificial Sequence: Synthetic oligonucleotide
  Antisense strand to SEQ ID NO: 1225136
uuuggcaaugaugaccugu

SEQ ID NO: 1225138 - RNA, 19 nt, Artificial Sequence
  Description of Artificial Sequence: Synthetic oligonucleotide
  Sense strand starting at position 2516 of SEQ ID NO: 917308
aggucaucauugccaaaua

SEQ ID NO: 1225139 - RNA, 19 nt, Artificial Sequence
  Description of Artificial Sequence: Synthetic oligonucleotide
  Antisense strand to SEQ ID NO: 1225138
uauuuggcaaugaugaccu

SEQ ID NO: 1225140 - RNA, 19 nt, Artificial Sequence
  Description of Artificial Sequence: Synthetic oligonucleotide
  Sense strand starting at position 2698 of SEQ ID NO: 917308
cagauucugcgugaucaua

SEQ ID NO: 1225141 - RNA, 19 nt, Artificial Sequence
  Description of Artificial Sequence: Synthetic oligonucleotide
  Antisense strand to SEQ ID NO: 1225140
uaugaucacgcagaaucug

SEQ ID NO: 1225142 - RNA, 19 nt, Artificial Sequence
  Description of Artificial Sequence: Synthetic oligonucleotide
  Sense strand starting at position 2967 of SEQ ID NO: 917308
augagagaacccuguucuu

SEQ ID NO: 1225143 - RNA, 19 nt, Artificial Sequence
  Description of Artificial Sequence: Synthetic oligonucleotide
  Antisense strand to SEQ ID NO: 1225142
aagaacaggguucucucau

SEQ ID NO: 1225144 - RNA, 19 nt, Artificial Sequence
  Description of Artificial Sequence: Synthetic oligonucleotide
  Sense strand starting at position 3029 of SEQ ID NO: 917308
guuugugugccucuucuca

SEQ ID NO: 1225145 - RNA, 19 nt, Artificial Sequence
  Description of Artificial Sequence: Synthetic oligonucleotide
  Antisense strand to SEQ ID NO: 1225144
ugagaagaggcacacaaac

SEQ ID NO: 1225146 - RNA, 19 nt, Artificial Sequence
  Description of Artificial Sequence: Synthetic oligonucleotide
  Sense strand starting at position 3102 of SEQ ID NO: 917308
ucugaaacgguuuaucugu

SEQ ID NO: 1225147 - RNA, 19 nt, Artificial Sequence
  Description of Artificial Sequence: Synthetic oligonucleotide
  Antisense strand to SEQ ID NO: 1225146
acagauaaaccguuucaga

SEQ ID NO: 1225148 - RNA, 19 nt, Artificial Sequence
  Description of Artificial Sequence: Synthetic oligonucleotide
  Sense strand starting at position 3110 of SEQ ID NO: 917308
gguuuaucuguuuauacuu

SEQ ID NO: 1225149 - RNA, 19 nt, Artificial Sequence
  Description of Artificial Sequence: Synthetic oligonucleotide
  Antisense strand to SEQ ID NO: 1225148
aaguauaaacagauaaacc

SEQ ID NO: 1225150 - RNA, 19 nt, Artificial Sequence
  Description of Artificial Sequence: Synthetic oligonucleotide
  Sense strand starting at position 3123 of SEQ ID NO: 917308
auacuuaauggcuaaggua

SEQ ID NO: 1225151 - RNA, 19 nt, Artificial Sequence
  Description of Artificial Sequence: Synthetic oligonucleotide
  Antisense strand to SEQ ID NO: 1225150
uaccuuagccauuaaguau

SEQ ID NO: 1225152 - RNA, 19 nt, Artificial Sequence
  Description of Artificial Sequence: Synthetic oligonucleotide
  Sense strand starting at position 3138 of SEQ ID NO: 917308
gguauacauguacacguau

SEQ ID NO: 1225153 - RNA, 19 nt, Artificial Sequence
  Description of Artificial Sequence: Synthetic oligonucleotide
  Antisense strand to SEQ ID NO: 1225152
auacguguacauguauacc

SEQ ID NO: 1225154 - RNA, 19 nt, Artificial Sequence
  Description of Artificial Sequence: Synthetic oligonucleotide
  Sense strand starting at position 3163 of SEQ ID NO: 917308
ugacuaacauuugagguaa

SEQ ID NO: 1225155 - RNA, 19 nt, Artificial Sequence
  Description of Artificial Sequence: Synthetic oligonucleotide
  Antisense strand to SEQ ID NO: 1225154
uuaccucaaauguuaguca

SEQ ID NO: 1225156 - RNA, 19 nt, Artificial Sequence
  Description of Artificial Sequence: Synthetic oligonucleotide
  Sense strand starting at position 3241 of SEQ ID NO: 917308
cuaagaagguucccuuuau

SEQ ID NO: 1225157 - RNA, 19 nt, Artificial Sequence
  Description of Artificial Sequence: Synthetic oligonucleotide
  Antisense strand to SEQ ID NO: 1225156
auaaagggaaccuucuuag

SEQ ID NO: 1225158 - RNA, 19 nt, Artificial Sequence
  Description of Artificial Sequence: Synthetic oligonucleotide
  Sense strand starting at position 3572 of SEQ ID NO: 917308
ucacuuugagguggaguua

SEQ ID NO: 1225159 - RNA, 19 nt, Artificial Sequence
  Description of Artificial Sequence: Synthetic oligonucleotide
  Antisense strand to SEQ ID NO: 1225158
uaacuccaccucaaaguga

SEQ ID NO: 1225160 - RNA, 19 nt, Artificial Sequence
  Description of Artificial Sequence: Synthetic oligonucleotide
  Sense strand starting at position 3573 of SEQ ID NO: 917308
cacuuugagguggaguuaa

SEQ ID NO: 1225161 - RNA, 19 nt, Artificial Sequence
  Description of Artificial Sequence: Synthetic oligonucleotide
  Antisense strand to SEQ ID NO: 1225160
uuaacuccaccucaaagug

SEQ ID NO: 1225162 - RNA, 19 nt, Artificial Sequence
  Description of Artificial Sequence: Synthetic oligonucleotide
  Sense strand starting at position 3602 of SEQ ID NO: 917308
cuuugagauuaaguuaucu

SEQ ID NO: 1225163 - RNA, 19 nt, Artificial Sequence
  Description of Artificial Sequence: Synthetic oligonucleotide
  Antisense strand to SEQ ID NO: 1225162
agauaacuuaaucucaaag

SEQ ID NO: 1225164 - RNA, 19 nt, Artificial Sequence
  Description of Artificial Sequence: Synthetic oligonucleotide
  Sense strand starting at position 3744 of SEQ ID NO: 917308
ugcaucuugcuugcuagua

SEQ ID NO: 1225165 - RNA, 19 nt, Artificial Sequence
  Description of Artificial Sequence: Synthetic oligonucleotide
  Antisense strand to SEQ ID NO: 1225164
uacuagcaagcaagaugca

SEQ ID NO: 1225166 - RNA, 19 nt, Artificial Sequence
  Description of Artificial Sequence: Synthetic oligonucleotide
  Sense strand starting at position 3757 of SEQ ID NO: 917308
cuaguagcgagauaauaaa

SEQ ID NO: 1225167 - RNA, 19 nt, Artificial Sequence
  Description of Artificial Sequence: Synthetic oligonucleotide
  Antisense strand to SEQ ID NO: 1225166
uuuauuaucucgcuacuag

SEQ ID NO: 1225168 - RNA, 19 nt, Artificial Sequence
  Description of Artificial Sequence: Synthetic oligonucleotide
  Sense strand starting at position 3803 of SEQ ID NO: 917308
accucaaguggugaucaau

SEQ ID NO: 1225169 - RNA, 19 nt, Artificial Sequence
  Description of Artificial Sequence: Synthetic oligonucleotide
  Antisense strand to SEQ ID NO: 1225168
auugaucaccacuugaggu

SEQ ID NO: 1225170 - RNA, 19 nt, Artificial Sequence
  Description of Artificial Sequence: Synthetic oligonucleotide
  Sense strand starting at position 3806 of SEQ ID NO: 917308
ucaaguggugaucaauacu

SEQ ID NO: 1225171 - RNA, 19 nt, Artificial Sequence
  Description of Artificial Sequence: Synthetic oligonucleotide
  Antisense strand to SEQ ID NO: 1225170
aguauugaucaccacuuga

SEQ ID NO: 1225172 - RNA, 19 nt, Artificial Sequence
  Description of Artificial Sequence: Synthetic oligonucleotide
  Sense strand starting at position 3851 of SEQ ID NO: 917308
guagcaaauaaaugggaau

SEQ ID NO: 1225173 - RNA, 19 nt, Artificial Sequence
  Description of Artificial Sequence: Synthetic oligonucleotide
  Antisense strand to SEQ ID NO: 1225172
auucccauuuauuugcuac

SEQ ID NO: 1225174 - RNA, 19 nt, Artificial Sequence
  Description of Artificial Sequence: Synthetic oligonucleotide
  Sense strand starting at position 3873 of SEQ ID NO: 917308
ggcugucuuaggcaagaug

SEQ ID NO: 1225175 - RNA, 19 nt, Artificial Sequence
  Description of Artificial Sequence: Synthetic oligonucleotide
  Antisense strand to SEQ ID NO: 1225174
caucuugccuaagacagcc

SEQ ID NO: 1225176 - RNA, 19 nt, Artificial Sequence
  Description of Artificial Sequence: Synthetic oligonucleotide
  Sense strand starting at position 3881 of SEQ ID NO: 917308
uaggcaagauguuuagaca

SEQ ID NO: 1225177 - RNA, 19 nt, Artificial Sequence
  Description of Artificial Sequence: Synthetic oligonucleotide
  Antisense strand to SEQ ID NO: 1225176
ugucuaaacaucuugccua

SEQ ID NO: 1225178 - RNA, 19 nt, Artificial Sequence
  Description of Artificial Sequence: Synthetic oligonucleotide
  Sense strand starting at position 3950 of SEQ ID NO: 917308
gggugagucauaggaagca

SEQ ID NO: 1225179 - RNA, 19 nt, Artificial Sequence
  Description of Artificial Sequence: Synthetic oligonucleotide
  Antisense strand to SEQ ID NO: 1225178
ugcuuccuaugacucaccc

SEQ ID NO: 1225180 - RNA, 19 nt, Artificial Sequence
  Description of Artificial Sequence: Synthetic oligonucleotide
  Sense strand starting at position 3960 of SEQ ID NO: 917309
uaggaagcauggucaaaga

SEQ ID NO: 1225181 - RNA, 19 nt, Artificial Sequence
  Description of Artificial Sequence: Synthetic oligonucleotide
  Antisense strand to SEQ ID NO: 1225180
ucuuugaccaugcuuccua

SEQ ID NO: 1225182 - RNA, 19 nt, Artificial Sequence
  Description of Artificial Sequence: Synthetic oligonucleotide
  Sense strand starting at position 7 of SEQ ID NO: 917309
acagcucaacuuuggaaau

SEQ ID NO: 1225183 - RNA, 19 nt, Artificial Sequence
  Description of Artificial Sequence: Synthetic oligonucleotide
  Antisense strand to SEQ ID NO: 1225182
auuuccaaaguugagcugu

SEQ ID NO: 1225184 - RNA, 19 nt, Artificial Sequence
  Description of Artificial Sequence: Synthetic oligonucleotide
  Sense strand starting at position 74 of SEQ ID NO: 917309
guuuaaugacccuggagag

SEQ ID NO: 1225185 - RNA, 19 nt, Artificial Sequence
  Description of Artificial Sequence: Synthetic oligonucleotide
  Antisense strand to SEQ ID NO: 1225184
cucuccagggucauuaaac

SEQ ID NO: 1225186 - RNA, 19 nt, Artificial Sequence
  Description of Artificial Sequence: Synthetic oligonucleotide
  Sense strand starting at position 366 of SEQ ID NO: 917309
aaauguugggcgcuugcua

SEQ ID NO: 1225187 - RNA, 19 nt, Artificial Sequence
  Description of Artificial Sequence: Synthetic oligonucleotide
  Antisense strand to SEQ ID NO: 1225186
uagcaagcgcccaacauuu

SEQ ID NO: 1225188 - RNA, 19 nt, Artificial Sequence
  Description of Artificial Sequence: Synthetic oligonucleotide
  Sense strand starting at position 430 of SEQ ID NO: 917309
caagucaguucuguauaga

SEQ ID NO: 1225189 - RNA, 19 nt, Artificial Sequence
  Description of Artificial Sequence: Synthetic oligonucleotide
  Antisense strand to SEQ ID NO: 1225188
ucuauacagaacugacuug

SEQ ID NO: 1225190 - RNA, 19 nt, Artificial Sequence
  Description of Artificial Sequence: Synthetic oligonucleotide
  Sense strand starting at position 431 of SEQ ID NO: 917309
aagucaguucuguauagac

SEQ ID NO: 1225191 - RNA, 19 nt, Artificial Sequence
  Description of Artificial Sequence: Synthetic oligonucleotide
  Antisense strand to SEQ ID NO: 1225190
gucuauacagaacugacuu

SEQ ID NO: 1225192 - RNA, 19 nt, Artificial Sequence
  Description of Artificial Sequence: Synthetic oligonucleotide
  Sense strand starting at position 477 of SEQ ID NO: 917309
ccuccuuccuguuuauaga

SEQ ID NO: 1225193 - RNA, 19 nt, Artificial Sequence
  Description of Artificial Sequence: Synthetic oligonucleotide
  Antisense strand to SEQ ID NO: 1225192
ucuauaaacaggaaggagg

SEQ ID NO: 1225194 - RNA, 19 nt, Artificial Sequence
  Description of Artificial Sequence: Synthetic oligonucleotide
  Sense strand starting at position 478 of SEQ ID NO: 917309
cuccuuccuguuuauagau

SEQ ID NO: 1225195 - RNA, 19 nt, Artificial Sequence
  Description of Artificial Sequence: Synthetic oligonucleotide
  Antisense strand to SEQ ID NO: 1225194
aucuauaaacaggaaggag

SEQ ID NO: 1225196 - RNA, 19 nt, Artificial Sequence
  Description of Artificial Sequence: Synthetic oligonucleotide
  Sense strand starting at position 580 of SEQ ID NO: 917309
cugcuuauuggcgcgaguu

SEQ ID NO: 1225197 - RNA, 19 nt, Artificial Sequence
  Description of Artificial Sequence: Synthetic oligonucleotide
  Antisense strand to SEQ ID NO: 1225196
aacucgcgccaauaagcag

SEQ ID NO: 1225198 - RNA, 19 nt, Artificial Sequence
  Description of Artificial Sequence: Synthetic oligonucleotide
  Sense strand starting at position 1317 of SEQ ID NO: 917309
ucccuucuucgggagacaa

SEQ ID NO: 1225199 - RNA, 19 nt, Artificial Sequence
  Description of Artificial Sequence: Synthetic oligonucleotide
  Antisense strand to SEQ ID NO: 1225198
uugucucccgaagaaggga

SEQ ID NO: 1225200 - RNA, 19 nt, Artificial Sequence
  Description of Artificial Sequence: Synthetic oligonucleotide
  Sense strand starting at position 1365 of SEQ ID NO: 917309
agacaagaucuccgacugu

SEQ ID NO: 1225201 - RNA, 19 nt, Artificial Sequence
  Description of Artificial Sequence: Synthetic oligonucleotide
  Antisense strand to SEQ ID NO: 1225200
acagucggagaucuugucu

SEQ ID NO: 1225202 - RNA, 19 nt, Artificial Sequence
  Description of Artificial Sequence: Synthetic oligonucleotide
  Sense strand starting at position 2302 of SEQ ID NO: 917309
gucugagaacacggauaaa

SEQ ID NO: 1225203 - RNA, 19 nt, Artificial Sequence
  Description of Artificial Sequence: Synthetic oligonucleotide
  Antisense strand to SEQ ID NO: 1225202
uuuauccguguucucagac

SEQ ID NO: 1225204 - RNA, 19 nt, Artificial Sequence
  Description of Artificial Sequence: Synthetic oligonucleotide
  Sense strand starting at position 2369 of SEQ ID NO: 917309
aggagaggguucucucaau

SEQ ID NO: 1225205 - RNA, 19 nt, Artificial Sequence
  Description of Artificial Sequence: Synthetic oligonucleotide
  Antisense strand to SEQ ID NO: 1225204
auugagagaacccucuccu

SEQ ID NO: 1225206 - RNA, 19 nt, Artificial Sequence
  Description of Artificial Sequence: Synthetic oligonucleotide
  Sense strand starting at position 2379 of SEQ ID NO: 917309
ucucucaauucugcgauuu

SEQ ID NO: 1225207 - RNA, 19 nt, Artificial Sequence
  Description of Artificial Sequence: Synthetic oligonucleotide
  Antisense strand to SEQ ID NO: 1225206
aaaucgcagaauugagaga

SEQ ID NO: 1225208 - RNA, 19 nt, Artificial Sequence
  Description of Artificial Sequence: Synthetic oligonucleotide
  Sense strand starting at position 2380 of SEQ ID NO: 917309
cucucaauucugcgauuua

SEQ ID NO: 1225209 - RNA, 19 nt, Artificial Sequence
  Description of Artificial Sequence: Synthetic oligonucleotide
  Antisense strand to SEQ ID NO: 1225208
uaaaucgcagaauugagag

SEQ ID NO: 1225210 - RNA, 19 nt, Artificial Sequence
  Description of Artificial Sequence: Synthetic oligonucleotide
  Sense strand starting at position 2393 of SEQ ID NO: 917309
gauuuauucuggccguuua

SEQ ID NO: 1225211 - RNA, 19 nt, Artificial Sequence
  Description of Artificial Sequence: Synthetic oligonucleotide
  Antisense strand to SEQ ID NO: 1225210
uaaacggccagaauaaauc

SEQ ID NO: 1225212 - RNA, 19 nt, Artificial Sequence
  Description of Artificial Sequence: Synthetic oligonucleotide
  Sense strand starting at position 2394 of SEQ ID NO: 917309
auuuauucuggccguuuaa

SEQ ID NO: 1225213 - RNA, 19 nt, Artificial Sequence
  Description of Artificial Sequence: Synthetic oligonucleotide
  Antisense strand to SEQ ID NO: 1225212
uuaaacggccagaauaaau

SEQ ID NO: 1225214 - RNA, 19 nt, Artificial Sequence
  Description of Artificial Sequence: Synthetic oligonucleotide
  Sense strand starting at position 2403 of SEQ ID NO: 917309
ggccguuuaacccagagau

SEQ ID NO: 1225215 - RNA, 19 nt, Artificial Sequence
  Description of Artificial Sequence: Synthetic oligonucleotide
  Antisense strand to SEQ ID NO: 1225214
aucucuggguuaaacggcc

SEQ ID NO: 1225216 - RNA, 19 nt, Artificial Sequence
  Description of Artificial Sequence: Synthetic oligonucleotide
  Sense strand starting at position 2573 of SEQ ID NO: 917309
ugagucuacagaggaaguu

SEQ ID NO: 1225217 - RNA, 19 nt, Artificial Sequence
  Description of Artificial Sequence: Synthetic oligonucleotide
  Antisense strand to SEQ ID NO: 1225216
aacuuccucuguagacuca

SEQ ID NO: 1225218 - RNA, 19 nt, Artificial Sequence
  Description of Artificial Sequence: Synthetic oligonucleotide
  Sense strand starting at position 2712 of SEQ ID NO: 917309
gacgaauacgagugggaca

SEQ ID NO: 1225219 - RNA, 19 nt, Artificial Sequence
  Description of Artificial Sequence: Synthetic oligonucleotide
  Antisense strand to SEQ ID NO: 1225218
ugucccacucguauucguc

SEQ ID NO: 1225220 - RNA, 19 nt, Artificial Sequence
  Description of Artificial Sequence: Synthetic oligonucleotide
  Sense strand starting at position 2725 of SEQ ID NO: 917309
gggacagaguguuugcuga

SEQ ID NO: 1225221 - RNA, 19 nt, Artificial Sequence
  Description of Artificial Sequence: Synthetic oligonucleotide
  Antisense strand to SEQ ID NO: 1225220
ucagcaaacacucuguccc

SEQ ID NO: 1225222 - RNA, 19 nt, Artificial Sequence
  Description of Artificial Sequence: Synthetic oligonucleotide
  Sense strand starting at position 2784 of SEQ ID NO: 917309
aaaugagggcaguguuuau

SEQ ID NO: 1225223 - RNA, 19 nt, Artificial Sequence
  Description of Artificial Sequence: Synthetic oligonucleotide
  Antisense strand to SEQ ID NO: 1225222
auaaacacugcccucauuu

SEQ ID NO: 1225224 - RNA, 19 nt, Artificial Sequence
  Description of Artificial Sequence: Synthetic oligonucleotide
  Sense strand starting at position 2814 of SEQ ID NO: 917309
gacauugucguaggagaaa

SEQ ID NO: 1225225 - RNA, 19 nt, Artificial Sequence
  Description of Artificial Sequence: Synthetic oligonucleotide
  Antisense strand to SEQ ID NO: 1225224
uuucuccuacgacaauguc

SEQ ID NO: 1225226 - RNA, 19 nt, Artificial Sequence
  Description of Artificial Sequence: Synthetic oligonucleotide
  Sense strand starting at position 2817 of SEQ ID NO: 917309
auugucguaggagaaagau

SEQ ID NO: 1225227 - RNA, 19 nt, Artificial Sequence
  Description of Artificial Sequence: Synthetic oligonucleotide
  Antisense strand to SEQ ID NO: 1225226
aucuuucuccuacgacaau

SEQ ID NO: 1225228 - RNA, 19 nt, Artificial Sequence
  Description of Artificial Sequence: Synthetic oligonucleotide
  Sense strand starting at position 2916 of SEQ ID NO: 917309
ucgagucugagcugaaaga

SEQ ID NO: 1225229 - RNA, 19 nt, Artificial Sequence
  Description of Artificial Sequence: Synthetic oligonucleotide
  Antisense strand to SEQ ID NO: 1225228
ucuuucagcucagacucga

SEQ ID NO: 1225230 - RNA, 19 nt, Artificial Sequence
  Description of Artificial Sequence: Synthetic oligonucleotide
  Sense strand starting at position 2917 of SEQ ID NO: 917309
cgagucugagcugaaagaa

SEQ ID NO: 1225231 - RNA, 19 nt, Artificial Sequence
  Description of Artificial Sequence: Synthetic oligonucleotide
  Antisense strand to SEQ ID NO: 1225230
uucuuucagcucagacucg

SEQ ID NO: 1225232 - RNA, 19 nt, Artificial Sequence
  Description of Artificial Sequence: Synthetic oligonucleotide
  Sense strand starting at position 2986 of SEQ ID NO: 917309
cgaacauguccgcuugcaa

SEQ ID NO: 1225233 - RNA, 19 nt, Artificial Sequence
  Description of Artificial Sequence: Synthetic oligonucleotide
  Antisense strand to SEQ ID NO: 1225232
uugcaagcggacauguucg

SEQ ID NO: 1225234 - RNA, 19 nt, Artificial Sequence
  Description of Artificial Sequence: Synthetic oligonucleotide
  Sense strand starting at position 2993 of SEQ ID NO: 917309
guccgcuugcaagugaauu

SEQ ID NO: 1225235 - RNA, 19 nt, Artificial Sequence
  Description of Artificial Sequence: Synthetic oligonucleotide
  Antisense strand to SEQ ID NO: 1225234
aauucacuugcaagcggac

SEQ ID NO: 1225236 - RNA, 19 nt, Artificial Sequence
  Description of Artificial Sequence: Synthetic oligonucleotide
  Sense strand starting at position 3262 of SEQ ID NO: 917309
ggugucaagcacgaaagua

SEQ ID NO: 1225237 - RNA, 19 nt, Artificial Sequence
  Description of Artificial Sequence: Synthetic oligonucleotide
  Antisense strand to SEQ ID NO: 1225236
uacuuucgugcuugacacc

SEQ ID NO: 1225238 - RNA, 19 nt, Artificial Sequence
  Description of Artificial Sequence: Synthetic oligonucleotide
  Sense strand starting at position 3279 of SEQ ID NO: 917309
uaaugcaacccuuggagua

SEQ ID NO: 1225239 - RNA, 19 nt, Artificial Sequence
  Description of Artificial Sequence: Synthetic oligonucleotide
  Antisense strand to SEQ ID NO: 1225238
uacuccaaggguugcauua

SEQ ID NO: 1225240 - RNA, 19 nt, Artificial Sequence
  Description of Artificial Sequence: Synthetic oligonucleotide
  Sense strand starting at position 3318 of SEQ ID NO: 917309
gguaauacauaaguuugau

SEQ ID NO: 1225241 - RNA, 19 nt, Artificial Sequence
  Description of Artificial Sequence: Synthetic oligonucleotide
  Antisense strand to SEQ ID NO: 1225240
aucaaacuuauguauuacc

SEQ ID NO: 1225242 - RNA, 19 nt, Artificial Sequence
  Description of Artificial Sequence: Synthetic oligonucleotide
  Sense strand starting at position 3371 of SEQ ID NO: 917309
ggacucggcacuuaaguau

SEQ ID NO: 1225243 - RNA, 19 nt, Artificial Sequence
  Description of Artificial Sequence: Synthetic oligonucleotide
  Antisense strand to SEQ ID NO: 1225242
auacuuaagugccgagucc

SEQ ID NO: 1225244 - RNA, 19 nt, Artificial Sequence
  Description of Artificial Sequence: Synthetic oligonucleotide
  Sense strand starting at position 3394 of SEQ ID NO: 917309
ugaucugugucacuugaau

SEQ ID NO: 1225245 - RNA, 19 nt, Artificial Sequence
  Description of Artificial Sequence: Synthetic oligonucleotide
  Antisense strand to SEQ ID NO: 1225244
auucaagugacacagauca

SEQ ID NO: 1225246 - RNA, 19 nt, Artificial Sequence
  Description of Artificial Sequence: Synthetic oligonucleotide
  Sense strand starting at position 3420 of SEQ ID NO: 917309
acagauaguugcccuuaau

SEQ ID NO: 1225247 - RNA, 19 nt, Artificial Sequence
  Description of Artificial Sequence: Synthetic oligonucleotide
  Antisense strand to SEQ ID NO: 1225246
auuaagggcaacuaucugu

SEQ ID NO: 1225248 - RNA, 19 nt, Artificial Sequence
  Description of Artificial Sequence: Synthetic oligonucleotide
  Sense strand starting at position 3448 of SEQ ID NO: 917309
auucuuggcccugagcaaa

SEQ ID NO: 1225249 - RNA, 19 nt, Artificial Sequence
  Description of Artificial Sequence: Synthetic oligonucleotide
  Antisense strand to SEQ ID NO: 1225248
uuugcucagggccaagaau

SEQ ID NO: 1225250 - RNA, 19 nt, Artificial Sequence
  Description of Artificial Sequence: Synthetic oligonucleotide
  Sense strand starting at position 3470 of SEQ ID NO: 917309
uucuaaucugcccggagga

SEQ ID NO: 1225251 - RNA, 19 nt, Artificial Sequence
  Description of Artificial Sequence: Synthetic oligonucleotide
  Antisense strand to SEQ ID NO: 1225250
uccuccgggcagauuagaa

SEQ ID NO: 1225252 - RNA, 19 nt, Artificial Sequence
  Description of Artificial Sequence: Synthetic oligonucleotide
  Sense strand starting at position 3472 of SEQ ID NO: 917309
cuaaucugcccggaggaga

SEQ ID NO: 1225253 - RNA, 19 nt, Artificial Sequence
  Description of Artificial Sequence: Synthetic oligonucleotide
  Antisense strand to SEQ ID NO: 1225252
ucuccuccgggcagauuag

SEQ ID NO: 1225254 - RNA, 19 nt, Artificial Sequence
  Description of Artificial Sequence: Synthetic oligonucleotide
  Sense strand starting at position 3774 of SEQ ID NO: 917309
aggacaugauuugggacau

SEQ ID NO: 1225255 - RNA, 19 nt, Artificial Sequence
  Description of Artificial Sequence: Synthetic oligonucleotide
  Antisense strand to SEQ ID NO: 1225254
augucccaaaucauguccu

SEQ ID NO: 1225256 - RNA, 19 nt, Artificial Sequence
  Description of Artificial Sequence: Synthetic oligonucleotide
  Sense strand starting at position 3775 of SEQ ID NO: 917309
ggacaugauuugggacauc

SEQ ID NO: 1225257 - RNA, 19 nt, Artificial Sequence
  Description of Artificial Sequence: Synthetic oligonucleotide
  Antisense strand to SEQ ID NO: 1225256
gaugucccaaaucaugucc

SEQ ID NO: 1225258 - RNA, 19 nt, Artificial Sequence
  Description of Artificial Sequence: Synthetic oligonucleotide
  Sense strand starting at position 3905 of SEQ ID NO: 917309
ugcauaugagcccacgauu

SEQ ID NO: 1225259 - RNA, 19 nt, Artificial Sequence
  Description of Artificial Sequence: Synthetic oligonucleotide
  Antisense strand to SEQ ID NO: 1225258
aaucgugggcucauaugca

SEQ ID NO: 1225260 - RNA, 19 nt, Artificial Sequence
  Description of Artificial Sequence: Synthetic oligonucleotide
  Sense strand starting at position 3940 of SEQ ID NO: 917309
aucagucccucuguuagau

SEQ ID NO: 1225261 - RNA, 19 nt, Artificial Sequence
  Description of Artificial Sequence: Synthetic oligonucleotide
  Antisense strand to SEQ ID NO: 1225260
aucuaacagagggacugau

SEQ ID NO: 1225262 - RNA, 19 nt, Artificial Sequence
  Description of Artificial Sequence: Synthetic oligonucleotide
  Sense strand starting at position 3940 of SEQ ID NO: 917310
aucagucccucuguuagau

SEQ ID NO: 1225263 - RNA, 19 nt, Artificial Sequence
  Description of Artificial Sequence: Synthetic oligonucleotide
  Antisense strand to SEQ ID NO: 1225262
aucuaacagagggacugau

SEQ ID NO: 1225264 - RNA, 19 nt, Artificial Sequence
  Description of Artificial Sequence: Synthetic oligonucleotide
  Sense strand starting at position 49 of SEQ ID NO: 917310
guccuuguuauuugcagua

SEQ ID NO: 1225265 - RNA, 19 nt, Artificial Sequence
  Description of Artificial Sequence: Synthetic oligonucleotide
  Antisense strand to SEQ ID NO: 1225264
uacugcaaauaacaaggac

SEQ ID NO: 1225266 - RNA, 19 nt, Artificial Sequence
  Description of Artificial Sequence: Synthetic oligonucleotide
  Sense strand starting at position 54 of SEQ ID NO: 917310
uguuauuugcaguaguucu

SEQ ID NO: 1225267 - RNA, 19 nt, Artificial Sequence
  Description of Artificial Sequence: Synthetic oligonucleotide
  Antisense strand to SEQ ID NO: 1225266
agaacuacugcaaauaaca

SEQ ID NO: 1225268 - RNA, 19 nt, Artificial Sequence
  Description of Artificial Sequence: Synthetic oligonucleotide
  Sense strand starting at position 67 of SEQ ID NO: 917310
aguucuguucuacaaacaa

SEQ ID NO: 1225269 - RNA, 19 nt, Artificial Sequence
  Description of Artificial Sequence: Synthetic oligonucleotide
  Antisense strand to SEQ ID NO: 1225268
uuguuuguagaacagaacu

SEQ ID NO: 1225270 - RNA, 19 nt, Artificial Sequence
  Description of Artificial Sequence: Synthetic oligonucleotide
  Sense strand starting at position 450 of SEQ ID NO: 917310
acaguacccguuuacaaua

SEQ ID NO: 1225271 - RNA, 19 nt, Artificial Sequence
  Description of Artificial Sequence: Synthetic oligonucleotide
  Antisense strand to SEQ ID NO: 1225270
uauuguaaacggguacugu

SEQ ID NO: 1225272 - RNA, 19 nt, Artificial Sequence
  Description of Artificial Sequence: Synthetic oligonucleotide
  Sense strand starting at position 455 of SEQ ID NO: 917310
acccguuuacaauaugaga

SEQ ID NO: 1225273 - RNA, 19 nt, Artificial Sequence
  Description of Artificial Sequence: Synthetic oligonucleotide
  Antisense strand to SEQ ID NO: 1225272
ucucauauuguaaacgggu

SEQ ID NO: 1225274 - RNA, 19 nt, Artificial Sequence
  Description of Artificial Sequence: Synthetic oligonucleotide
  Sense strand starting at position 525 of SEQ ID NO: 917310
uguguugggugacucauuu

SEQ ID NO: 1225275 - RNA, 19 nt, Artificial Sequence
  Description of Artificial Sequence: Synthetic oligonucleotide
  Antisense strand to SEQ ID NO: 1225274
aaaugagucacccaacaca

SEQ ID NO: 1225276 - RNA, 19 nt, Artificial Sequence
  Description of Artificial Sequence: Synthetic oligonucleotide
  Sense strand starting at position 574 of SEQ ID NO: 917310
gagaaagcccuuugaguac

SEQ ID NO: 1225277 - RNA, 19 nt, Artificial Sequence
  Description of Artificial Sequence: Synthetic oligonucleotide
  Antisense strand to SEQ ID NO: 1225276
guacucaaagggcuuucuc

SEQ ID NO: 1225278 - RNA, 19 nt, Artificial Sequence
  Description of Artificial Sequence: Synthetic oligonucleotide
  Sense strand starting at position 668 of SEQ ID NO: 917310
aaugcaucuguggaauuga

SEQ ID NO: 1225279 - RNA, 19 nt, Artificial Sequence
  Description of Artificial Sequence: Synthetic oligonucleotide
  Antisense strand to SEQ ID NO: 1225278
ucaauuccacagaugcauu

SEQ ID NO: 1225280 - RNA, 19 nt, Artificial Sequence
  Description of Artificial Sequence: Synthetic oligonucleotide
  Sense strand starting at position 677 of SEQ ID NO: 917310
guggaauugaauuggaugu

SEQ ID NO: 1225281 - RNA, 19 nt, Artificial Sequence
  Description of Artificial Sequence: Synthetic oligonucleotide
  Antisense strand to SEQ ID NO: 1225280
acauccaauucaauuccac

SEQ ID NO: 1225282 - RNA, 19 nt, Artificial Sequence
  Description of Artificial Sequence: Synthetic oligonucleotide
  Sense strand starting at position 681 of SEQ ID NO: 917310
aauugaauuggauguuauc

SEQ ID NO: 1225283 - RNA, 19 nt, Artificial Sequence
  Description of Artificial Sequence: Synthetic oligonucleotide
  Antisense strand to SEQ ID NO: 1225282
gauaacauccaauucaauu

SEQ ID NO: 1225284 - RNA, 19 nt, Artificial Sequence
  Description of Artificial Sequence: Synthetic oligonucleotide
  Sense strand starting at position 722 of SEQ ID NO: 917310
guuauuagugaguguauuu

SEQ ID NO: 1225285 - RNA, 19 nt, Artificial Sequence
  Description of Artificial Sequence: Synthetic oligonucleotide
  Antisense strand to SEQ ID NO: 1225284
aaauacacucacuaauaac

SEQ ID NO: 1225286 - RNA, 19 nt, Artificial Sequence
  Description of Artificial Sequence: Synthetic oligonucleotide
  Sense strand starting at position 727 of SEQ ID NO: 917310
uagugaguguauuuauugu

SEQ ID NO: 1225287 - RNA, 19 nt, Artificial Sequence
  Description of Artificial Sequence: Synthetic oligonucleotide
  Antisense strand to SEQ ID NO: 1225286
acaauaaauacacucacua

SEQ ID NO: 1225288 - RNA, 19 nt, Artificial Sequence
  Description of Artificial Sequence: Synthetic oligonucleotide
  Sense strand starting at position 1319 of SEQ ID NO: 917310
ucgcuauaaauguagaaag

SEQ ID NO: 1225289 - RNA, 19 nt, Artificial Sequence
  Description of Artificial Sequence: Synthetic oligonucleotide
  Antisense strand to SEQ ID NO: 1225288
cuuucuacauuuauagcga

SEQ ID NO: 1225290 - RNA, 19 nt, Artificial Sequence
  Description of Artificial Sequence: Synthetic oligonucleotide
  Sense strand starting at position 1333 of SEQ ID NO: 917310
gaaagagaauuuggucaga

SEQ ID NO: 1225291 - RNA, 19 nt, Artificial Sequence
  Description of Artificial Sequence: Synthetic oligonucleotide
  Antisense strand to SEQ ID NO: 1225290
ucugaccaaauucucuuuc

SEQ ID NO: 1225292 - RNA, 19 nt, Artificial Sequence
  Description of Artificial Sequence: Synthetic oligonucleotide
  Sense strand starting at position 1338 of SEQ ID NO: 917310
agaauuuggucagaaaugu

SEQ ID NO: 1225293 - RNA, 19 nt, Artificial Sequence
  Description of Artificial Sequence: Synthetic oligonucleotide
  Antisense strand to SEQ ID NO: 1225292
acauuucugaccaaauucu

SEQ ID NO: 1225294 - RNA, 19 nt, Artificial Sequence
  Description of Artificial Sequence: Synthetic oligonucleotide
  Sense strand starting at position 1344 of SEQ ID NO: 917310
uggucagaaauguguagaa

SEQ ID NO: 1225295 - RNA, 19 nt, Artificial Sequence
  Description of Artificial Sequence: Synthetic oligonucleotide
  Antisense strand to SEQ ID NO: 1225294
uucuacacauuucugacca

SEQ ID NO: 1225296 - RNA, 19 nt, Artificial Sequence
  Description of Artificial Sequence: Synthetic oligonucleotide
  Sense strand starting at position 1548 of SEQ ID NO: 917310
uuagaaauaaugcgagaag

SEQ ID NO: 1225297 - RNA, 19 nt, Artificial Sequence
  Description of Artificial Sequence: Synthetic oligonucleotide
  Antisense strand to SEQ ID NO: 1225296
cuucucgcauuauuucuaa

SEQ ID NO: 1225298 - RNA, 19 nt, Artificial Sequence
  Description of Artificial Sequence: Synthetic oligonucleotide
  Sense strand starting at position 1630 of SEQ ID NO: 917310
uuccauugauagccuagaa

SEQ ID NO: 1225299 - RNA, 19 nt, Artificial Sequence
  Description of Artificial Sequence: Synthetic oligonucleotide
  Antisense strand to SEQ ID NO: 1225298
uucuaggcuaucaauggaa

SEQ ID NO: 1225300 - RNA, 19 nt, Artificial Sequence
  Description of Artificial Sequence: Synthetic oligonucleotide
  Sense strand starting at position 2261 of SEQ ID NO: 917310
ggcaaugaccacuauuauu

SEQ ID NO: 1225301 - RNA, 19 nt, Artificial Sequence
  Description of Artificial Sequence: Synthetic oligonucleotide
  Antisense strand to SEQ ID NO: 1225300
aauaauaguggucauugcc

SEQ ID NO: 1225302 - RNA, 19 nt, Artificial Sequence
  Description of Artificial Sequence: Synthetic oligonucleotide
  Sense strand starting at position 2292 of SEQ ID NO: 917310
ucgauuacaggaugcuuua

SEQ ID NO: 1225303 - RNA, 19 nt, Artificial Sequence
  Description of Artificial Sequence: Synthetic oligonucleotide
  Antisense strand to SEQ ID NO: 1225302
uaaagcauccuguaaucga

SEQ ID NO: 1225304 - RNA, 19 nt, Artificial Sequence
  Description of Artificial Sequence: Synthetic oligonucleotide
  Sense strand starting at position 2308 of SEQ ID NO: 917310
uuacuugggugucuagaau

SEQ ID NO: 1225305 - RNA, 19 nt, Artificial Sequence
  Description of Artificial Sequence: Synthetic oligonucleotide
  Antisense strand to SEQ ID NO: 1225304
auucuagacacccaaguaa

SEQ ID NO: 1225306 - RNA, 19 nt, Artificial Sequence
  Description of Artificial Sequence: Synthetic oligonucleotide
  Sense strand starting at position 2321 of SEQ ID NO: 917310
uagaauaugggcuggcauu

SEQ ID NO: 1225307 - RNA, 19 nt, Artificial Sequence
  Description of Artificial Sequence: Synthetic oligonucleotide
  Antisense strand to SEQ ID NO: 1225306
aaugccagcccauauucua

SEQ ID NO: 1225308 - RNA, 19 nt, Artificial Sequence
  Description of Artificial Sequence: Synthetic oligonucleotide
  Sense strand starting at position 2487 of SEQ ID NO: 917310
uguagaaauaagggcauua

SEQ ID NO: 1225309 - RNA, 19 nt, Artificial Sequence
  Description of Artificial Sequence: Synthetic oligonucleotide
  Antisense strand to SEQ ID NO: 1225308
uaaugcccuuauuucuaca

SEQ ID NO: 1225310 - RNA, 19 nt, Artificial Sequence
  Description of Artificial Sequence: Synthetic oligonucleotide
  Sense strand starting at position 2554 of SEQ ID NO: 917310
cucuguucugguuaucaua

SEQ ID NO: 1225311 - RNA, 19 nt, Artificial Sequence
  Description of Artificial Sequence: Synthetic oligonucleotide
  Antisense strand to SEQ ID NO: 1225310
uaugauaaccagaacagag

SEQ ID NO: 1225312 - RNA, 19 nt, Artificial Sequence
  Description of Artificial Sequence: Synthetic oligonucleotide
  Sense strand starting at position 2576 of SEQ ID NO: 917310
ugacgugucgccucuguca

SEQ ID NO: 1225313 - RNA, 19 nt, Artificial Sequence
  Description of Artificial Sequence: Synthetic oligonucleotide
  Antisense strand to SEQ ID NO: 1225312
ugacagaggcgacacguca

SEQ ID NO: 1225314 - RNA, 19 nt, Artificial Sequence
  Description of Artificial Sequence: Synthetic oligonucleotide
  Sense strand starting at position 2700 of SEQ ID NO: 917310
ucaucugauagaugcggaa

SEQ ID NO: 1225315 - RNA, 19 nt, Artificial Sequence
  Description of Artificial Sequence: Synthetic oligonucleotide
  Antisense strand to SEQ ID NO: 1225314
uuccgcaucuaucagauga

SEQ ID NO: 1225316 - RNA, 19 nt, Artificial Sequence
  Description of Artificial Sequence: Synthetic oligonucleotide
  Sense strand starting at position 2702 of SEQ ID NO: 917310
aucugauagaugcggaaau

SEQ ID NO: 1225317 - RNA, 19 nt, Artificial Sequence
  Description of Artificial Sequence: Synthetic oligonucleotide
  Antisense strand to SEQ ID NO: 1225316
auuuccgcaucuaucagau

SEQ ID NO: 1225318 - RNA, 19 nt, Artificial Sequence
  Description of Artificial Sequence: Synthetic oligonucleotide
  Sense strand starting at position 3143 of SEQ ID NO: 917310
cagcucuguggcuaagauu

SEQ ID NO: 1225319 - RNA, 19 nt, Artificial Sequence
  Description of Artificial Sequence: Synthetic oligonucleotide
  Antisense strand to SEQ ID NO: 1225318
aaucuuagccacagagcug

SEQ ID NO: 1225320 - RNA, 19 nt, Artificial Sequence
  Description of Artificial Sequence: Synthetic oligonucleotide
  Sense strand starting at position 3151 of SEQ ID NO: 917310
uggcuaagauuagucucaa

SEQ ID NO: 1225321 - RNA, 19 nt, Artificial Sequence
  Description of Artificial Sequence: Synthetic oligonucleotide
  Antisense strand to SEQ ID NO: 1225320
uugagacuaaucuuagcca

SEQ ID NO: 1225322 - RNA, 19 nt, Artificial Sequence
  Description of Artificial Sequence: Synthetic oligonucleotide
  Sense strand starting at position 3152 of SEQ ID NO: 917310
ggcuaagauuagucucaag

SEQ ID NO: 1225323 - RNA, 19 nt, Artificial Sequence
  Description of Artificial Sequence: Synthetic oligonucleotide
  Antisense strand to SEQ ID NO: 1225322
cuugagacuaaucuuagcc

SEQ ID NO: 1225324 - RNA, 19 nt, Artificial Sequence
  Description of Artificial Sequence: Synthetic oligonucleotide
  Sense strand starting at position 3239 of SEQ ID NO: 917310
uguaaauugagucagguac

SEQ ID NO: 1225325 - RNA, 19 nt, Artificial Sequence
  Description of Artificial Sequence: Synthetic oligonucleotide
  Antisense strand to SEQ ID NO: 1225324
guaccugacucaauuuaca

SEQ ID NO: 1225326 - RNA, 19 nt, Artificial Sequence
  Description of Artificial Sequence: Synthetic oligonucleotide
  Sense strand starting at position 3335 of SEQ ID NO: 917310
uuaugcuuagcuuugugua

SEQ ID NO: 1225327 - RNA, 19 nt, Artificial Sequence
  Description of Artificial Sequence: Synthetic oligonucleotide
  Antisense strand to SEQ ID NO: 1225326
uacacaaagcuaagcauaa

SEQ ID NO: 1225328 - RNA, 19 nt, Artificial Sequence
  Description of Artificial Sequence: Synthetic oligonucleotide
  Sense strand starting at position 3422 of SEQ ID NO: 917310
agguaucauuccuugcaga

SEQ ID NO: 1225329 - RNA, 19 nt, Artificial Sequence
  Description of Artificial Sequence: Synthetic oligonucleotide
  Antisense strand to SEQ ID NO: 1225328
ucugcaaggaaugauaccu

SEQ ID NO: 1225330 - RNA, 19 nt, Artificial Sequence
  Description of Artificial Sequence: Synthetic oligonucleotide
  Sense strand starting at position 3487 of SEQ ID NO: 917310
uaaucucaggugugaacau

SEQ ID NO: 1225331 - RNA, 19 nt, Artificial Sequence
  Description of Artificial Sequence: Synthetic oligonucleotide
  Antisense strand to SEQ ID NO: 1225330
auguucacaccugagauua

SEQ ID NO: 1225332 - RNA, 19 nt, Artificial Sequence
  Description of Artificial Sequence: Synthetic oligonucleotide
  Sense strand starting at position 3572 of SEQ ID NO: 917310
aaauccauggcuugguaua

SEQ ID NO: 1225333 - RNA, 19 nt, Artificial Sequence
  Description of Artificial Sequence: Synthetic oligonucleotide
  Antisense strand to SEQ ID NO: 1225332
uauaccaagccauggauuu

SEQ ID NO: 1225334 - RNA, 19 nt, Artificial Sequence
  Description of Artificial Sequence: Synthetic oligonucleotide
  Sense strand starting at position 3573 of SEQ ID NO: 917310
aauccauggcuugguauau

SEQ ID NO: 1225335 - RNA, 19 nt, Artificial Sequence
  Description of Artificial Sequence: Synthetic oligonucleotide
  Antisense strand to SEQ ID NO: 1225334
auauaccaagccauggauu

SEQ ID NO: 1225336 - RNA, 19 nt, Artificial Sequence
  Description of Artificial Sequence: Synthetic oligonucleotide
  Sense strand starting at position 3625 of SEQ ID NO: 917310
acucgcuuugucuauggaa

SEQ ID NO: 1225337 - RNA, 19 nt, Artificial Sequence
  Description of Artificial Sequence: Synthetic oligonucleotide
  Antisense strand to SEQ ID NO: 1225336
uuccauagacaaagcgagu

SEQ ID NO: 1225338 - RNA, 19 nt, Artificial Sequence
  Description of Artificial Sequence: Synthetic oligonucleotide
  Sense strand starting at position 3651 of SEQ ID NO: 917310
aucaguauaggaugaguuu

SEQ ID NO: 1225339 - RNA, 19 nt, Artificial Sequence
  Description of Artificial Sequence: Synthetic oligonucleotide
  Antisense strand to SEQ ID NO: 1225338
aaacucauccuauacugau

SEQ ID NO: 1225340 - RNA, 19 nt, Artificial Sequence
  Description of Artificial Sequence: Synthetic oligonucleotide
  Sense strand starting at position 3654 of SEQ ID NO: 917310
aguauaggaugaguuuaga

SEQ ID NO: 1225341 - RNA, 19 nt, Artificial Sequence
  Description of Artificial Sequence: Synthetic oligonucleotide
  Antisense strand to SEQ ID NO: 1225340
ucuaaacucauccuauacu

SEQ ID NO: 1225342 - RNA, 19 nt, Artificial Sequence
  Description of Artificial Sequence: Synthetic oligonucleotide
  Sense strand starting at position 3883 of SEQ ID NO: 917311
ugaagaagcuucccaaacu

SEQ ID NO: 1225343 - RNA, 19 nt, Artificial Sequence
  Description of Artificial Sequence: Synthetic oligonucleotide
  Antisense strand to SEQ ID NO: 1225342
aguuugggaagcuucuuca

SEQ ID NO: 1225344 - RNA, 19 nt, Artificial Sequence
  Description of Artificial Sequence: Synthetic oligonucleotide
  Sense strand starting at position 12 of SEQ ID NO: 917311
ucaccaggauugcuauaau

SEQ ID NO: 1225345 - RNA, 19 nt, Artificial Sequence
  Description of Artificial Sequence: Synthetic oligonucleotide
  Antisense strand to SEQ ID NO: 1225344
auuauagcaauccugguga

SEQ ID NO: 1225346 - RNA, 19 nt, Artificial Sequence
  Description of Artificial Sequence: Synthetic oligonucleotide
  Sense strand starting at position 15 of SEQ ID NO: 917311
ccaggauugcuauaauccu

SEQ ID NO: 1225347 - RNA, 19 nt, Artificial Sequence
  Description of Artificial Sequence: Synthetic oligonucleotide
  Antisense strand to SEQ ID NO: 1225346
aggauuauagcaauccugg

SEQ ID NO: 1225348 - RNA, 19 nt, Artificial Sequence
  Description of Artificial Sequence: Synthetic oligonucleotide
  Sense strand starting at position 79 of SEQ ID NO: 917311
ggcuguuuacggaguguua

SEQ ID NO: 1225349 - RNA, 19 nt, Artificial Sequence
  Description of Artificial Sequence: Synthetic oligonucleotide
  Antisense strand to SEQ ID NO: 1225348
uaacacuccguaaacagcc

SEQ ID NO: 1225350 - RNA, 19 nt, Artificial Sequence
  Description of Artificial Sequence: Synthetic oligonucleotide
  Sense strand starting at position 88 of SEQ ID NO: 917311
cggaguguuacgguguacu

SEQ ID NO: 1225351 - RNA, 19 nt, Artificial Sequence
  Description of Artificial Sequence: Synthetic oligonucleotide
  Antisense strand to SEQ ID NO: 1225350
aguacaccguaacacuccg

SEQ ID NO: 1225352 - RNA, 19 nt, Artificial Sequence
  Description of Artificial Sequence: Synthetic oligonucleotide
  Sense strand starting at position 119 of SEQ ID NO: 917311
uaggaaaucguguggaaag

SEQ ID NO: 1225353 - RNA, 19 nt, Artificial Sequence
  Description of Artificial Sequence: Synthetic oligonucleotide
  Antisense strand to SEQ ID NO: 1225352
cuuuccacacgauuuccua

SEQ ID NO: 1225354 - RNA, 19 nt, Artificial Sequence
  Description of Artificial Sequence: Synthetic oligonucleotide
  Sense strand starting at position 212 of SEQ ID NO: 917311
gugagaugauguuuaaaua

SEQ ID NO: 1225355 - RNA, 19 nt, Artificial Sequence
  Description of Artificial Sequence: Synthetic oligonucleotide
  Antisense strand to SEQ ID NO: 1225354
uauuuaaacaucaucucac

SEQ ID NO: 1225356 - RNA, 19 nt, Artificial Sequence
  Description of Artificial Sequence: Synthetic oligonucleotide
  Sense strand starting at position 254 of SEQ ID NO: 917311
ggaagagauuguuugcacu

SEQ ID NO: 1225357 - RNA, 19 nt, Artificial Sequence
  Description of Artificial Sequence: Synthetic oligonucleotide
  Antisense strand to SEQ ID NO: 1225356
agugcaaacaaucucuucc

SEQ ID NO: 1225358 - RNA, 19 nt, Artificial Sequence
  Description of Artificial Sequence: Synthetic oligonucleotide
  Sense strand starting at position 332 of SEQ ID NO: 917311
guaauaauuucggcucuug

SEQ ID NO: 1225359 - RNA, 19 nt, Artificial Sequence
  Description of Artificial Sequence: Synthetic oligonucleotide
  Antisense strand to SEQ ID NO: 1225358
caagagccgaaauuauuac

SEQ ID NO: 1225360 - RNA, 19 nt, Artificial Sequence
  Description of Artificial Sequence: Synthetic oligonucleotide
  Sense strand starting at position 341 of SEQ ID NO: 917311
ucggcucuugauuaaauca

SEQ ID NO: 1225361 - RNA, 19 nt, Artificial Sequence
  Description of Artificial Sequence: Synthetic oligonucleotide
  Antisense strand to SEQ ID NO: 1225360
ugauuuaaucaagagccga

SEQ ID NO: 1225362 - RNA, 19 nt, Artificial Sequence
  Description of Artificial Sequence: Synthetic oligonucleotide
  Sense strand starting at position 450 of SEQ ID NO: 917311
gagguuugccuugaaacag

SEQ ID NO: 1225363 - RNA, 19 nt, Artificial Sequence
  Description of Artificial Sequence: Synthetic oligonucleotide
  Antisense strand to SEQ ID NO: 1225362
cuguuucaaggcaaaccuc

SEQ ID NO: 1225364 - RNA, 19 nt, Artificial Sequence
  Description of Artificial Sequence: Synthetic oligonucleotide
  Sense strand starting at position 468 of SEQ ID NO: 917311
gaucuaaguucgguagaaa

SEQ ID NO: 1225365 - RNA, 19 nt, Artificial Sequence
  Description of Artificial Sequence: Synthetic oligonucleotide
  Antisense strand to SEQ ID NO: 1225364
uuucuaccgaacuuagauc

SEQ ID NO: 1225366 - RNA, 19 nt, Artificial Sequence
  Description of Artificial Sequence: Synthetic oligonucleotide
  Sense strand starting at position 469 of SEQ ID NO: 917311
aucuaaguucgguagaaag

SEQ ID NO: 1225367 - RNA, 19 nt, Artificial Sequence
  Description of Artificial Sequence: Synthetic oligonucleotide
  Antisense strand to SEQ ID NO: 1225366
cuuucuaccgaacuuagau

SEQ ID NO: 1225368 - RNA, 19 nt, Artificial Sequence
  Description of Artificial Sequence: Synthetic oligonucleotide
  Sense strand starting at position 471 of SEQ ID NO: 917311
cuaaguucgguagaaagua

SEQ ID NO: 1225369 - RNA, 19 nt, Artificial Sequence
  Description of Artificial Sequence: Synthetic oligonucleotide
  Antisense strand to SEQ ID NO: 1225368
uacuuucuaccgaacuuag

SEQ ID NO: 1225370 - RNA, 19 nt, Artificial Sequence
  Description of Artificial Sequence: Synthetic oligonucleotide
  Sense strand starting at position 930 of SEQ ID NO: 917311
gcgugaucugcaccacgua

SEQ ID NO: 1225371 - RNA, 19 nt, Artificial Sequence
  Description of Artificial Sequence: Synthetic oligonucleotide
  Antisense strand to SEQ ID NO: 1225370
uacguggugcagaucacgc

SEQ ID NO: 1225372 - RNA, 19 nt, Artificial Sequence
  Description of Artificial Sequence: Synthetic oligonucleotide
  Sense strand starting at position 1194 of SEQ ID NO: 917311
ccauuugguugagauaaag

SEQ ID NO: 1225373 - RNA, 19 nt, Artificial Sequence
  Description of Artificial Sequence: Synthetic oligonucleotide
  Antisense strand to SEQ ID NO: 1225372
cuuuaucucaaccaaaugg

SEQ ID NO: 1225374 - RNA, 19 nt, Artificial Sequence
  Description of Artificial Sequence: Synthetic oligonucleotide
  Sense strand starting at position 1257 of SEQ ID NO: 917311
agcgauuguccaucucguu

SEQ ID NO: 1225375 - RNA, 19 nt, Artificial Sequence
  Description of Artificial Sequence: Synthetic oligonucleotide
  Antisense strand to SEQ ID NO: 1225374
aacgagauggacaaucgcu

SEQ ID NO: 1225376 - RNA, 19 nt, Artificial Sequence
  Description of Artificial Sequence: Synthetic oligonucleotide
  Sense strand starting at position 1327 of SEQ ID NO: 917311
ggaaacuacuuugcagacu

SEQ ID NO: 1225377 - RNA, 19 nt, Artificial Sequence
  Description of Artificial Sequence: Synthetic oligonucleotide
  Antisense strand to SEQ ID NO: 1225376
agucugcaaaguaguuucc

SEQ ID NO: 1225378 - RNA, 19 nt, Artificial Sequence
  Description of Artificial Sequence: Synthetic oligonucleotide
  Sense strand starting at position 1449 of SEQ ID NO: 917311
ggcagagauccggauugua

SEQ ID NO: 1225379 - RNA, 19 nt, Artificial Sequence
  Description of Artificial Sequence: Synthetic oligonucleotide
  Antisense strand to SEQ ID NO: 1225378
uacaauccggaucucugcc

SEQ ID NO: 1225380 - RNA, 19 nt, Artificial Sequence
  Description of Artificial Sequence: Synthetic oligonucleotide
  Sense strand starting at position 1747 of SEQ ID NO: 917311
agaauccuugugugagaga

SEQ ID NO: 1225381 - RNA, 19 nt, Artificial Sequence
  Description of Artificial Sequence: Synthetic oligonucleotide
  Antisense strand to SEQ ID NO: 1225380
ucucucacacaaggauucu

SEQ ID NO: 1225382 - RNA, 19 nt, Artificial Sequence
  Description of Artificial Sequence: Synthetic oligonucleotide
  Sense strand starting at position 1870 of SEQ ID NO: 917311
uugcgcuuucccguaauca

SEQ ID NO: 1225383 - RNA, 19 nt, Artificial Sequence
  Description of Artificial Sequence: Synthetic oligonucleotide
  Antisense strand to SEQ ID NO: 1225382
ugauuacgggaaagcgcaa

SEQ ID NO: 1225384 - RNA, 19 nt, Artificial Sequence
  Description of Artificial Sequence: Synthetic oligonucleotide
  Sense strand starting at position 1891 of SEQ ID NO: 917311
gugugugcagcacuguuaa

SEQ ID NO: 1225385 - RNA, 19 nt, Artificial Sequence
  Description of Artificial Sequence: Synthetic oligonucleotide
  Antisense strand to SEQ ID NO: 1225384
uuaacagugcugcacacac

SEQ ID NO: 1225386 - RNA, 19 nt, Artificial Sequence
  Description of Artificial Sequence: Synthetic oligonucleotide
  Sense strand starting at position 2011 of SEQ ID NO: 917311
ucguguggaaauuauaaag

SEQ ID NO: 1225387 - RNA, 19 nt, Artificial Sequence
  Description of Artificial Sequence: Synthetic oligonucleotide
  Antisense strand to SEQ ID NO: 1225386
cuuuauaauuuccacacga

SEQ ID NO: 1225388 - RNA, 19 nt, Artificial Sequence
  Description of Artificial Sequence: Synthetic oligonucleotide
  Sense strand starting at position 2217 of SEQ ID NO: 917311
uugguauuacuugaagcau

SEQ ID NO: 1225389 - RNA, 19 nt, Artificial Sequence
  Description of Artificial Sequence: Synthetic oligonucleotide
  Antisense strand to SEQ ID NO: 1225388
augcuucaaguaauaccaa

SEQ ID NO: 1225390 - RNA, 19 nt, Artificial Sequence
  Description of Artificial Sequence: Synthetic oligonucleotide
  Sense strand starting at position 2322 of SEQ ID NO: 917311
uguauuaaugggcauccau

SEQ ID NO: 1225391 - RNA, 19 nt, Artificial Sequence
  Description of Artificial Sequence: Synthetic oligonucleotide
  Antisense strand to SEQ ID NO: 1225390
auggaugcccauuaauaca

SEQ ID NO: 1225392 - RNA, 19 nt, Artificial Sequence
  Description of Artificial Sequence: Synthetic oligonucleotide
  Sense strand starting at position 2339 of SEQ ID NO: 917311
aucaauuagugaucuugac

SEQ ID NO: 1225393 - RNA, 19 nt, Artificial Sequence
  Description of Artificial Sequence: Synthetic oligonucleotide
  Antisense strand to SEQ ID NO: 1225392
gucaagaucacuaauugau

SEQ ID NO: 1225394 - RNA, 19 nt, Artificial Sequence
  Description of Artificial Sequence: Synthetic oligonucleotide
  Sense strand starting at position 2393 of SEQ ID NO: 917311
agaguaagauaauuaacgu

SEQ ID NO: 1225395 - RNA, 19 nt, Artificial Sequence
  Description of Artificial Sequence: Synthetic oligonucleotide
  Antisense strand to SEQ ID NO: 1225394
acguuaauuaucuuacucu

SEQ ID NO: 1225396 - RNA, 19 nt, Artificial Sequence
  Description of Artificial Sequence: Synthetic oligonucleotide
  Sense strand starting at position 2478 of SEQ ID NO: 917311
uauggaaguuggcuuuaga

SEQ ID NO: 1225397 - RNA, 19 nt, Artificial Sequence
  Description of Artificial Sequence: Synthetic oligonucleotide
  Antisense strand to SEQ ID NO: 1225396
ucuaaagccaacuuccaua

SEQ ID NO: 1225398 - RNA, 19 nt, Artificial Sequence
  Description of Artificial Sequence: Synthetic oligonucleotide
  Sense strand starting at position 2487 of SEQ ID NO: 917311
uggcuuuagauggaggagu

SEQ ID NO: 1225399 - RNA, 19 nt, Artificial Sequence
  Description of Artificial Sequence: Synthetic oligonucleotide
  Antisense strand to SEQ ID NO: 1225398
acuccuccaucuaaagcca

SEQ ID NO: 1225400 - RNA, 19 nt, Artificial Sequence
  Description of Artificial Sequence: Synthetic oligonucleotide
  Sense strand starting at position 2561 of SEQ ID NO: 917311
acguuauggagguaguaug

SEQ ID NO: 1225401 - RNA, 19 nt, Artificial Sequence
  Description of Artificial Sequence: Synthetic oligonucleotide
  Antisense strand to SEQ ID NO: 1225400
cauacuaccuccauaacgu

SEQ ID NO: 1225402 - RNA, 19 nt, Artificial Sequence
  Description of Artificial Sequence: Synthetic oligonucleotide
  Sense strand starting at position 2736 of SEQ ID NO: 917311
ggacuugcccagcauuaca

SEQ ID NO: 1225403 - RNA, 19 nt, Artificial Sequence
  Description of Artificial Sequence: Synthetic oligonucleotide
  Antisense strand to SEQ ID NO: 1225402
uguaaugcugggcaagucc

SEQ ID NO: 1225404 - RNA, 19 nt, Artificial Sequence
  Description of Artificial Sequence: Synthetic oligonucleotide
  Sense strand starting at position 2758 of SEQ ID NO: 917311
aggacacaacgcuauauau

SEQ ID NO: 1225405 - RNA, 19 nt, Artificial Sequence
  Description of Artificial Sequence: Synthetic oligonucleotide
  Antisense strand to SEQ ID NO: 1225404
auauauagcguuguguccu

SEQ ID NO: 1225406 - RNA, 19 nt, Artificial Sequence
  Description of Artificial Sequence: Synthetic oligonucleotide
  Sense strand starting at position 2798 of SEQ ID NO: 917311
aaauaaauugucuguggga

SEQ ID NO: 1225407 - RNA, 19 nt, Artificial Sequence
  Description of Artificial Sequence: Synthetic oligonucleotide
  Antisense strand to SEQ ID NO: 1225406
ucccacagacaauuuauuu

SEQ ID NO: 1225408 - RNA, 19 nt, Artificial Sequence
  Description of Artificial Sequence: Synthetic oligonucleotide
  Sense strand starting at position 2799 of SEQ ID NO: 917311
aauaaauugucugugggau

SEQ ID NO: 1225409 - RNA, 19 nt, Artificial Sequence
  Description of Artificial Sequence: Synthetic oligonucleotide
  Antisense strand to SEQ ID NO: 1225408
aucccacagacaauuuauu

SEQ ID NO: 1225410 - RNA, 19 nt, Artificial Sequence
  Description of Artificial Sequence: Synthetic oligonucleotide
  Sense strand starting at position 2800 of SEQ ID NO: 917311
auaaauugucugugggaug

SEQ ID NO: 1225411 - RNA, 19 nt, Artificial Sequence
  Description of Artificial Sequence: Synthetic oligonucleotide
  Antisense strand to SEQ ID NO: 1225410
caucccacagacaauuuau

SEQ ID NO: 1225412 - RNA, 19 nt, Artificial Sequence
  Description of Artificial Sequence: Synthetic oligonucleotide
  Sense strand starting at position 3026 of SEQ ID NO: 917311
uuauacuauuucgugugau

SEQ ID NO: 1225413 - RNA, 19 nt, Artificial Sequence
  Description of Artificial Sequence: Synthetic oligonucleotide
  Antisense strand to SEQ ID NO: 1225412
aucacacgaaauaguauaa

SEQ ID NO: 1225414 - RNA, 19 nt, Artificial Sequence
  Description of Artificial Sequence: Synthetic oligonucleotide
  Sense strand starting at position 3030 of SEQ ID NO: 917311
acuauuucgugugauuuaa

SEQ ID NO: 1225415 - RNA, 19 nt, Artificial Sequence
  Description of Artificial Sequence: Synthetic oligonucleotide
  Antisense strand to SEQ ID NO: 1225414
uuaaaucacacgaaauagu

SEQ ID NO: 1225416 - RNA, 19 nt, Artificial Sequence
  Description of Artificial Sequence: Synthetic oligonucleotide
  Sense strand starting at position 3518 of SEQ ID NO: 917311
cuuauccaacagugauaga

SEQ ID NO: 1225417 - RNA, 19 nt, Artificial Sequence
  Description of Artificial Sequence: Synthetic oligonucleotide
  Antisense strand to SEQ ID NO: 1225416
ucuaucacuguuggauaag

SEQ ID NO: 1225418 - RNA, 19 nt, Artificial Sequence
  Description of Artificial Sequence: Synthetic oligonucleotide
  Sense strand starting at position 3528 of SEQ ID NO: 917311
agugauagauuccaauuua

SEQ ID NO: 1225419 - RNA, 19 nt, Artificial Sequence
  Description of Artificial Sequence: Synthetic oligonucleotide
  Antisense strand to SEQ ID NO: 1225418
uaaauuggaaucuaucacu

SEQ ID NO: 1225420 - RNA, 19 nt, Artificial Sequence
  Description of Artificial Sequence: Synthetic oligonucleotide
  Sense strand starting at position 3661 of SEQ ID NO: 917311
ccgucaucgcgggugaaug

SEQ ID NO: 1225421 - RNA, 19 nt, Artificial Sequence
  Description of Artificial Sequence: Synthetic oligonucleotide
  Antisense strand to SEQ ID NO: 1225420
cauucacccgcgaugacgg

SEQ ID NO: 1225422 - RNA, 19 nt, Artificial Sequence
  Description of Artificial Sequence: Synthetic oligonucleotide
  Sense strand starting at position 3894 of SEQ ID NO: 917312
uuauuucugcgugagcuua

SEQ ID NO: 1225423 - RNA, 19 nt, Artificial Sequence
  Description of Artificial Sequence: Synthetic oligonucleotide
  Antisense strand to SEQ ID NO: 1225422
uaagcucacgcagaaauaa

SEQ ID NO: 1225424 - RNA, 19 nt, Artificial Sequence
  Description of Artificial Sequence: Synthetic oligonucleotide
  Sense strand starting at position 2 of SEQ ID NO: 917312
agcuguucucaccaucaca

SEQ ID NO: 1225425 - RNA, 19 nt, Artificial Sequence
  Description of Artificial Sequence: Synthetic oligonucleotide
  Antisense strand to SEQ ID NO: 1225424
ugugauggugagaacagcu

SEQ ID NO: 1225426 - RNA, 19 nt, Artificial Sequence
  Description of Artificial Sequence: Synthetic oligonucleotide
  Sense strand starting at position 266 of SEQ ID NO: 917312
gggacagguuuacaauuua

SEQ ID NO: 1225427 - RNA, 19 nt, Artificial Sequence
  Description of Artificial Sequence: Synthetic oligonucleotide
  Antisense strand to SEQ ID NO: 1225426
uaaauuguaaaccuguccc

SEQ ID NO: 1225428 - RNA, 19 nt, Artificial Sequence
  Description of Artificial Sequence: Synthetic oligonucleotide
  Sense strand starting at position 375 of SEQ ID NO: 917312
cuccacaagcucgaauaaa

SEQ ID NO: 1225429 - RNA, 19 nt, Artificial Sequence
  Description of Artificial Sequence: Synthetic oligonucleotide
  Antisense strand to SEQ ID NO: 1225428
uuuauucgagcuuguggag

SEQ ID NO: 1225430 - RNA, 19 nt, Artificial Sequence
  Description of Artificial Sequence: Synthetic oligonucleotide
  Sense strand starting at position 449 of SEQ ID NO: 917312
cugcacuucuccuugaaag

SEQ ID NO: 1225431 - RNA, 19 nt, Artificial Sequence
  Description of Artificial Sequence: Synthetic oligonucleotide
  Antisense strand to SEQ ID NO: 1225430
cuuucaaggagaagugcag

SEQ ID NO: 1225432 - RNA, 19 nt, Artificial Sequence
  Description of Artificial Sequence: Synthetic oligonucleotide
  Sense strand starting at position 451 of SEQ ID NO: 917312
gcacuucuccuugaaagua

SEQ ID NO: 1225433 - RNA, 19 nt, Artificial Sequence
  Description of Artificial Sequence: Synthetic oligonucleotide
  Antisense strand to SEQ ID NO: 1225432
uacuuucaaggagaagugc

SEQ ID NO: 1225434 - RNA, 19 nt, Artificial Sequence
  Description of Artificial Sequence: Synthetic oligonucleotide
  Sense strand starting at position 484 of SEQ ID NO: 917312
agaagaaucuacguggcau

SEQ ID NO: 1225435 - RNA, 19 nt, Artificial Sequence
  Description of Artificial Sequence: Synthetic oligonucleotide
  Antisense strand to SEQ ID NO: 1225434
augccacguagauucuucu

SEQ ID NO: 1225436 - RNA, 19 nt, Artificial Sequence
  Description of Artificial Sequence: Synthetic oligonucleotide
  Sense strand starting at position 512 of SEQ ID NO: 917312
uuaaaugaguaguucuacu

SEQ ID NO: 1225437 - RNA, 19 nt, Artificial Sequence
  Description of Artificial Sequence: Synthetic oligonucleotide
  Antisense strand to SEQ ID NO: 1225436
aguagaacuacucauuuaa

SEQ ID NO: 1225438 - RNA, 19 nt, Artificial Sequence
  Description of Artificial Sequence: Synthetic oligonucleotide
  Sense strand starting at position 696 of SEQ ID NO: 917312
auguuucuuguagaacauu

SEQ ID NO: 1225439 - RNA, 19 nt, Artificial Sequence
  Description of Artificial Sequence: Synthetic oligonucleotide
  Antisense strand to SEQ ID NO: 1225438
aauguucuacaagaaacau

SEQ ID NO: 1225440 - RNA, 19 nt, Artificial Sequence
  Description of Artificial Sequence: Synthetic oligonucleotide
  Sense strand starting at position 967 of SEQ ID NO: 917312
cagcgagaaaguugauaug

SEQ ID NO: 1225441 - RNA, 19 nt, Artificial Sequence
  Description of Artificial Sequence: Synthetic oligonucleotide
  Antisense strand to SEQ ID NO: 1225440
cauaucaacuuucucgcug

SEQ ID NO: 1225442 - RNA, 19 nt, Artificial Sequence
  Description of Artificial Sequence: Synthetic oligonucleotide
  Sense strand starting at position 982 of SEQ ID NO: 917312
uaugguucggcauagugaa

SEQ ID NO: 1225443 - RNA, 19 nt, Artificial Sequence
  Description of Artificial Sequence: Synthetic oligonucleotide
  Antisense strand to SEQ ID NO: 1225442
uucacuaugccgaaccaua

SEQ ID NO: 1225444 - RNA, 19 nt, Artificial Sequence
  Description of Artificial Sequence: Synthetic oligonucleotide
  Sense strand starting at position 1080 of SEQ ID NO: 917312
agauaauugcaguaagcau

SEQ ID NO: 1225445 - RNA, 19 nt, Artificial Sequence
  Description of Artificial Sequence: Synthetic oligonucleotide
  Antisense strand to SEQ ID NO: 1225444
augcuuacugcaauuaucu

SEQ ID NO: 1225446 - RNA, 19 nt, Artificial Sequence
  Description of Artificial Sequence: Synthetic oligonucleotide
  Sense strand starting at position 1087 of SEQ ID NO: 917312
ugcaguaagcauuauuaac

SEQ ID NO: 1225447 - RNA, 19 nt, Artificial Sequence
  Description of Artificial Sequence: Synthetic oligonucleotide
  Antisense strand to SEQ ID NO: 1225446
guuaauaaugcuuacugca

SEQ ID NO: 1225448 - RNA, 19 nt, Artificial Sequence
  Description of Artificial Sequence: Synthetic oligonucleotide
  Sense strand starting at position 1119 of SEQ ID NO: 917312
ugaauauaaugguuccacu

SEQ ID NO: 1225449 - RNA, 19 nt, Artificial Sequence
  Description of Artificial Sequence: Synthetic oligonucleotide
  Antisense strand to SEQ ID NO: 1225448
aguggaaccauuauauuca

SEQ ID NO: 1225450 - RNA, 19 nt, Artificial Sequence
  Description of Artificial Sequence: Synthetic oligonucleotide
  Sense strand starting at position 1429 of SEQ ID NO: 917312
gggaacuagcuauggcaau

SEQ ID NO: 1225451 - RNA, 19 nt, Artificial Sequence
  Description of Artificial Sequence: Synthetic oligonucleotide
  Antisense strand to SEQ ID NO: 1225450
auugccauagcuaguuccc

SEQ ID NO: 1225452 - RNA, 19 nt, Artificial Sequence
  Description of Artificial Sequence: Synthetic oligonucleotide
  Sense strand starting at position 2057 of SEQ ID NO: 917312
gucugaaacuggcccuaau

SEQ ID NO: 1225453 - RNA, 19 nt, Artificial Sequence
  Description of Artificial Sequence: Synthetic oligonucleotide
  Antisense strand to SEQ ID NO: 1225452
auuagggccaguuucagac

SEQ ID NO: 1225454 - RNA, 19 nt, Artificial Sequence
  Description of Artificial Sequence: Synthetic oligonucleotide
  Sense strand starting at position 2068 of SEQ ID NO: 917312
gcccuaauaggaugacuga

SEQ ID NO: 1225455 - RNA, 19 nt, Artificial Sequence
  Description of Artificial Sequence: Synthetic oligonucleotide
  Antisense strand to SEQ ID NO: 1225454
ucagucauccuauuagggc

SEQ ID NO: 1225456 - RNA, 19 nt, Artificial Sequence
  Description of Artificial Sequence: Synthetic oligonucleotide
  Sense strand starting at position 2289 of SEQ ID NO: 917312
ugugaaacuccgcagauuc

SEQ ID NO: 1225457 - RNA, 19 nt, Artificial Sequence
  Description of Artificial Sequence: Synthetic oligonucleotide
  Antisense strand to SEQ ID NO: 1225456
gaaucugcggaguuucaca

SEQ ID NO: 1225458 - RNA, 19 nt, Artificial Sequence
  Description of Artificial Sequence: Synthetic oligonucleotide
  Sense strand starting at position 2308 of SEQ ID NO: 917312
caaagaaauccagguugua

SEQ ID NO: 1225459 - RNA, 19 nt, Artificial Sequence
  Description of Artificial Sequence: Synthetic oligonucleotide
  Antisense strand to SEQ ID NO: 1225458
uacaaccuggauuucuuug

SEQ ID NO: 1225460 - RNA, 19 nt, Artificial Sequence
  Description of Artificial Sequence: Synthetic oligonucleotide
  Sense strand starting at position 2311 of SEQ ID NO: 917312
agaaauccagguuguacau

SEQ ID NO: 1225461 - RNA, 19 nt, Artificial Sequence
  Description of Artificial Sequence: Synthetic oligonucleotide
  Antisense strand to SEQ ID NO: 1225460
auguacaaccuggauuucu

SEQ ID NO: 1225462 - RNA, 19 nt, Artificial Sequence
  Description of Artificial Sequence: Synthetic oligonucleotide
  Sense strand starting at position 2332 of SEQ ID NO: 917312
aacugaaguccuuggacua

SEQ ID NO: 1225463 - RNA, 19 nt, Artificial Sequence
  Description of Artificial Sequence: Synthetic oligonucleotide
  Antisense strand to SEQ ID NO: 1225462
uaguccaaggacuucaguu

SEQ ID NO: 1225464 - RNA, 19 nt, Artificial Sequence
  Description of Artificial Sequence: Synthetic oligonucleotide
  Sense strand starting at position 2333 of SEQ ID NO: 917312
acugaaguccuuggacuau

SEQ ID NO: 1225465 - RNA, 19 nt, Artificial Sequence
  Description of Artificial Sequence: Synthetic oligonucleotide
  Antisense strand to SEQ ID NO: 1225464
auaguccaaggacuucagu

SEQ ID NO: 1225466 - RNA, 19 nt, Artificial Sequence
  Description of Artificial Sequence: Synthetic oligonucleotide
  Sense strand starting at position 2351 of SEQ ID NO: 917312
ucugacaaagcauauguau

SEQ ID NO: 1225467 - RNA, 19 nt, Artificial Sequence
  Description of Artificial Sequence: Synthetic oligonucleotide
  Antisense strand to SEQ ID NO: 1225466
auacauaugcuuugucaga

SEQ ID NO: 1225468 - RNA, 19 nt, Artificial Sequence
  Description of Artificial Sequence: Synthetic oligonucleotide
  Sense strand starting at position 2407 of SEQ ID NO: 917312
ggcaguuaauaccuuacaa

SEQ ID NO: 1225469 - RNA, 19 nt, Artificial Sequence
  Description of Artificial Sequence: Synthetic oligonucleotide
  Antisense strand to SEQ ID NO: 1225468
uuguaagguauuaacugcc

SEQ ID NO: 1225470 - RNA, 19 nt, Artificial Sequence
  Description of Artificial Sequence: Synthetic oligonucleotide
  Sense strand starting at position 2513 of SEQ ID NO: 917312
acagguuuccuguauaaca

SEQ ID NO: 1225471 - RNA, 19 nt, Artificial Sequence
  Description of Artificial Sequence: Synthetic oligonucleotide
  Antisense strand to SEQ ID NO: 1225470
uguuauacaggaaaccugu

SEQ ID NO: 1225472 - RNA, 19 nt, Artificial Sequence
  Description of Artificial Sequence: Synthetic oligonucleotide
  Sense strand starting at position 2515 of SEQ ID NO: 917312
agguuuccuguauaacauc

SEQ ID NO: 1225473 - RNA, 19 nt, Artificial Sequence
  Description of Artificial Sequence: Synthetic oligonucleotide
  Antisense strand to SEQ ID NO: 1225472
gauguuauacaggaaaccu

SEQ ID NO: 1225474 - RNA, 19 nt, Artificial Sequence
  Description of Artificial Sequence: Synthetic oligonucleotide
  Sense strand starting at position 2523 of SEQ ID NO: 917312
uguauaacaucuguuauug

SEQ ID NO: 1225475 - RNA, 19 nt, Artificial Sequence
  Description of Artificial Sequence: Synthetic oligonucleotide
  Antisense strand to SEQ ID NO: 1225474
caauaacagauguuauaca

SEQ ID NO: 1225476 - RNA, 19 nt, Artificial Sequence
  Description of Artificial Sequence: Synthetic oligonucleotide
  Sense strand starting at position 2564 of SEQ ID NO: 917312
auuuaucuuucgucuaagu

SEQ ID NO: 1225477 - RNA, 19 nt, Artificial Sequence
  Description of Artificial Sequence: Synthetic oligonucleotide
  Antisense strand to SEQ ID NO: 1225476
acuuagacgaaagauaaau

SEQ ID NO: 1225478 - RNA, 19 nt, Artificial Sequence
  Description of Artificial Sequence: Synthetic oligonucleotide
  Sense strand starting at position 2713 of SEQ ID NO: 917312
ugauaaauacugugcauug

SEQ ID NO: 1225479 - RNA, 19 nt, Artificial Sequence
  Description of Artificial Sequence: Synthetic oligonucleotide
  Antisense strand to SEQ ID NO: 1225478
caaugcacaguauuuauca

SEQ ID NO: 1225480 - RNA, 19 nt, Artificial Sequence
  Description of Artificial Sequence: Synthetic oligonucleotide
  Sense strand starting at position 2733 of SEQ ID NO: 917312
cucacauuaucguuaauga

SEQ ID NO: 1225481 - RNA, 19 nt, Artificial Sequence
  Description of Artificial Sequence: Synthetic oligonucleotide
  Antisense strand to SEQ ID NO: 1225480
ucauuaacgauaaugugag

SEQ ID NO: 1225482 - RNA, 19 nt, Artificial Sequence
  Description of Artificial Sequence: Synthetic oligonucleotide
  Sense strand starting at position 2734 of SEQ ID NO: 917312
ucacauuaucguuaaugaa

SEQ ID NO: 1225483 - RNA, 19 nt, Artificial Sequence
  Description of Artificial Sequence: Synthetic oligonucleotide
  Antisense strand to SEQ ID NO: 1225482
uucauuaacgauaauguga

SEQ ID NO: 1225484 - RNA, 19 nt, Artificial Sequence
  Description of Artificial Sequence: Synthetic oligonucleotide
  Sense strand starting at position 2742 of SEQ ID NO: 917312
ucguuaaugaagcaaugau

SEQ ID NO: 1225485 - RNA, 19 nt, Artificial Sequence
  Description of Artificial Sequence: Synthetic oligonucleotide
  Antisense strand to SEQ ID NO: 1225484
aucauugcuucauuaacga

SEQ ID NO: 1225486 - RNA, 19 nt, Artificial Sequence
  Description of Artificial Sequence: Synthetic oligonucleotide
  Sense strand starting at position 2762 of SEQ ID NO: 917312
auaggaagauguuuacugu

SEQ ID NO: 1225487 - RNA, 19 nt, Artificial Sequence
  Description of Artificial Sequence: Synthetic oligonucleotide
  Antisense strand to SEQ ID NO: 1225486
acaguaaacaucuuccuau

SEQ ID NO: 1225488 - RNA, 19 nt, Artificial Sequence
  Description of Artificial Sequence: Synthetic oligonucleotide
  Sense strand starting at position 2763 of SEQ ID NO: 917312
uaggaagauguuuacuguu

SEQ ID NO: 1225489 - RNA, 19 nt, Artificial Sequence
  Description of Artificial Sequence: Synthetic oligonucleotide
  Antisense strand to SEQ ID NO: 1225488
aacaguaaacaucuuccua

SEQ ID NO: 1225490 - RNA, 19 nt, Artificial Sequence
  Description of Artificial Sequence: Synthetic oligonucleotide
  Sense strand starting at position 2765 of SEQ ID NO: 917312
ggaagauguuuacuguuga

SEQ ID NO: 1225491 - RNA, 19 nt, Artificial Sequence
  Description of Artificial Sequence: Synthetic oligonucleotide
  Antisense strand to SEQ ID NO: 1225490
ucaacaguaaacaucuucc

SEQ ID NO: 1225492 - RNA, 19 nt, Artificial Sequence
  Description of Artificial Sequence: Synthetic oligonucleotide
  Sense strand starting at position 2770 of SEQ ID NO: 917312
auguuuacuguugaauaca

SEQ ID NO: 1225493 - RNA, 19 nt, Artificial Sequence
  Description of Artificial Sequence: Synthetic oligonucleotide
  Antisense strand to SEQ ID NO: 1225492
uguauucaacaguaaacau

SEQ ID NO: 1225494 - RNA, 19 nt, Artificial Sequence
  Description of Artificial Sequence: Synthetic oligonucleotide
  Sense strand starting at position 2883 of SEQ ID NO: 917312
aaaguuuaggaaggguuau

SEQ ID NO: 1225495 - RNA, 19 nt, Artificial Sequence
  Description of Artificial Sequence: Synthetic oligonucleotide
  Antisense strand to SEQ ID NO: 1225494
auaacccuuccuaaacuuu

SEQ ID NO: 1225496 - RNA, 19 nt, Artificial Sequence
  Description of Artificial Sequence: Synthetic oligonucleotide
  Sense strand starting at position 3540 of SEQ ID NO: 917312
gaaacuaagccuuguugau

SEQ ID NO: 1225497 - RNA, 19 nt, Artificial Sequence
  Description of Artificial Sequence: Synthetic oligonucleotide
  Antisense strand to SEQ ID NO: 1225496
aucaacaaggcuuaguuuc

SEQ ID NO: 1225498 - RNA, 19 nt, Artificial Sequence
  Description of Artificial Sequence: Synthetic oligonucleotide
  Sense strand starting at position 3573 of SEQ ID NO: 917312
aggccagaacucugaccua

SEQ ID NO: 1225499 - RNA, 19 nt, Artificial Sequence
  Description of Artificial Sequence: Synthetic oligonucleotide
  Antisense strand to SEQ ID NO: 1225498
uaggucagaguucuggccu

SEQ ID NO: 1225500 - RNA, 19 nt, Artificial Sequence
  Description of Artificial Sequence: Synthetic oligonucleotide
  Sense strand starting at position 3820 of SEQ ID NO: 917312
uccugauggagucaugcuu

SEQ ID NO: 1225501 - RNA, 19 nt, Artificial Sequence
  Description of Artificial Sequence: Synthetic oligonucleotide
  Antisense strand to SEQ ID NO: 1225500
aagcaugacuccaucagga

SEQ ID NO: 1225502 - RNA, 19 nt, Artificial Sequence
  Description of Artificial Sequence: Synthetic oligonucleotide
  Sense strand starting at position 3935 of SEQ ID NO: 917312
gaaagcauucuguauuguu

SEQ ID NO: 1225503 - RNA, 19 nt, Artificial Sequence
  Description of Artificial Sequence: Synthetic oligonucleotide
  Antisense strand to SEQ ID NO: 1225502
aacaauacagaaugcuuuc

SEQ ID NO: 1225504 - RNA, 19 nt, Artificial Sequence
  Description of Artificial Sequence: Synthetic oligonucleotide
  Sense strand starting at position 3935 of SEQ ID NO: 917313
gaaagcauucuguauuguu

SEQ ID NO: 1225505 - RNA, 19 nt, Artificial Sequence
  Description of Artificial Sequence: Synthetic oligonucleotide
  Antisense strand to SEQ ID NO: 1225504
aacaauacagaaugcuuuc

SEQ ID NO: 1225506 - RNA, 19 nt, Artificial Sequence
  Description of Artificial Sequence: Synthetic oligonucleotide
  Sense strand starting at position 34 of SEQ ID NO: 917313
gcaucaugucaauacugca

SEQ ID NO: 1225507 - RNA, 19 nt, Artificial Sequence
  Description of Artificial Sequence: Synthetic oligonucleotide
  Antisense strand to SEQ ID NO: 1225506
ugcaguauugacaugaugc

SEQ ID NO: 1225508 - RNA, 19 nt, Artificial Sequence
  Description of Artificial Sequence: Synthetic oligonucleotide
  Sense strand starting at position 140 of SEQ ID NO: 917313
uggguuugugcugaaggaa

SEQ ID NO: 1225509 - RNA, 19 nt, Artificial Sequence
  Description of Artificial Sequence: Synthetic oligonucleotide
  Antisense strand to SEQ ID NO: 1225508
uuccuucagcacaaaccca

SEQ ID NO: 1225510 - RNA, 19 nt, Artificial Sequence
  Description of Artificial Sequence: Synthetic oligonucleotide
  Sense strand starting at position 155 of SEQ ID NO: 917313
ggaagaggccaguguuaau

SEQ ID NO: 1225511 - RNA, 19 nt, Artificial Sequence
  Description of Artificial Sequence: Synthetic oligonucleotide
  Antisense strand to SEQ ID NO: 1225510
auuaacacuggccucuucc

SEQ ID NO: 1225512 - RNA, 19 nt, Artificial Sequence
  Description of Artificial Sequence: Synthetic oligonucleotide
  Sense strand starting at position 164 of SEQ ID NO: 917313
caguguuaaugggugguaa

SEQ ID NO: 1225513 - RNA, 19 nt, Artificial Sequence
  Description of Artificial Sequence: Synthetic oligonucleotide
  Antisense strand to SEQ ID NO: 1225512
uuaccacccauuaacacug

SEQ ID NO: 1225514 - RNA, 19 nt, Artificial Sequence
  Description of Artificial Sequence: Synthetic oligonucleotide
  Sense strand starting at position 165 of SEQ ID NO: 917313
aguguuaaugggugguaag

SEQ ID NO: 1225515 - RNA, 19 nt, Artificial Sequence
  Description of Artificial Sequence: Synthetic oligonucleotide
  Antisense strand to SEQ ID NO: 1225514
cuuaccacccauuaacacu

SEQ ID NO: 1225516 - RNA, 19 nt, Artificial Sequence
  Description of Artificial Sequence: Synthetic oligonucleotide
  Sense strand starting at position 177 of SEQ ID NO: 917313
ugguaaguggaguaugaug

SEQ ID NO: 1225517 - RNA, 19 nt, Artificial Sequence
  Description of Artificial Sequence: Synthetic oligonucleotide
  Antisense strand to SEQ ID NO: 1225516
caucauacuccacuuacca

SEQ ID NO: 1225518 - RNA, 19 nt, Artificial Sequence
  Description of Artificial Sequence: Synthetic oligonucleotide
  Sense strand starting at position 185 of SEQ ID NO: 917313
ggaguaugaugcaggguca

SEQ ID NO: 1225519 - RNA, 19 nt, Artificial Sequence
  Description of Artificial Sequence: Synthetic oligonucleotide
  Antisense strand to SEQ ID NO: 1225518
ugacccugcaucauacucc

SEQ ID NO: 1225520 - RNA, 19 nt, Artificial Sequence
  Description of Artificial Sequence: Synthetic oligonucleotide
  Sense strand starting at position 228 of SEQ ID NO: 917313
gugcucauaaccgaggaua

SEQ ID NO: 1225521 - RNA, 19 nt, Artificial Sequence
  Description of Artificial Sequence: Synthetic oligonucleotide
  Antisense strand to SEQ ID NO: 1225520
uauccucgguuaugagcac

SEQ ID NO: 1225522 - RNA, 19 nt, Artificial Sequence
  Description of Artificial Sequence: Synthetic oligonucleotide
  Sense strand starting at position 230 of SEQ ID NO: 917313
gcucauaaccgaggauauc

SEQ ID NO: 1225523 - RNA, 19 nt, Artificial Sequence
  Description of Artificial Sequence: Synthetic oligonucleotide
  Antisense strand to SEQ ID NO: 1225522
gauauccucgguuaugagc

SEQ ID NO: 1225524 - RNA, 19 nt, Artificial Sequence
  Description of Artificial Sequence: Synthetic oligonucleotide
  Sense strand starting at position 236 of SEQ ID NO: 917313
aaccgaggauaucugguaa

SEQ ID NO: 1225525 - RNA, 19 nt, Artificial Sequence
  Description of Artificial Sequence: Synthetic oligonucleotide
  Antisense strand to SEQ ID NO: 1225524
uuaccagauauccucgguu

SEQ ID NO: 1225526 - RNA, 19 nt, Artificial Sequence
  Description of Artificial Sequence: Synthetic oligonucleotide
  Sense strand starting at position 251 of SEQ ID NO: 917313
guaagcuggacuugaaagu

SEQ ID NO: 1225527 - RNA, 19 nt, Artificial Sequence
  Description of Artificial Sequence: Synthetic oligonucleotide
  Antisense strand to SEQ ID NO: 1225526
acuuucaaguccagcuuac

SEQ ID NO: 1225528 - RNA, 19 nt, Artificial Sequence
  Description of Artificial Sequence: Synthetic oligonucleotide
  Sense strand starting at position 261 of SEQ ID NO: 917313
cuugaaaguccuggugaag

SEQ ID NO: 1225529 - RNA, 19 nt, Artificial Sequence
  Description of Artificial Sequence: Synthetic oligonucleotide
  Antisense strand to SEQ ID NO: 1225528
cuucaccaggacuuucaag

SEQ ID NO: 1225530 - RNA, 19 nt, Artificial Sequence
  Description of Artificial Sequence: Synthetic oligonucleotide
  Sense strand starting at position 264 of SEQ ID NO: 917313
gaaaguccuggugaagcau

SEQ ID NO: 1225531 - RNA, 19 nt, Artificial Sequence
  Description of Artificial Sequence: Synthetic oligonucleotide
  Antisense strand to SEQ ID NO: 1225530
augcuucaccaggacuuuc

SEQ ID NO: 1225532 - RNA, 19 nt, Artificial Sequence
  Description of Artificial Sequence: Synthetic oligonucleotide
  Sense strand starting at position 270 of SEQ ID NO: 917313
ccuggugaagcaugcaauu

SEQ ID NO: 1225533 - RNA, 19 nt, Artificial Sequence
  Description of Artificial Sequence: Synthetic oligonucleotide
  Antisense strand to SEQ ID NO: 1225532
aauugcaugcuucaccagg

SEQ ID NO: 1225534 - RNA, 19 nt, Artificial Sequence
  Description of Artificial Sequence: Synthetic oligonucleotide
  Sense strand starting at position 272 of SEQ ID NO: 917313
uggugaagcaugcaauuau

SEQ ID NO: 1225535 - RNA, 19 nt, Artificial Sequence
  Description of Artificial Sequence: Synthetic oligonucleotide
  Antisense strand to SEQ ID NO: 1225534
auaauugcaugcuucacca

SEQ ID NO: 1225536 - RNA, 19 nt, Artificial Sequence
  Description of Artificial Sequence: Synthetic oligonucleotide
  Sense strand starting at position 282 of SEQ ID NO: 917313
ugcaauuaucgguaaugca

SEQ ID NO: 1225537 - RNA, 19 nt, Artificial Sequence
  Description of Artificial Sequence: Synthetic oligonucleotide
  Antisense strand to SEQ ID NO: 1225536
ugcauuaccgauaauugca

SEQ ID NO: 1225538 - RNA, 19 nt, Artificial Sequence
  Description of Artificial Sequence: Synthetic oligonucleotide
  Sense strand starting at position 326 of SEQ ID NO: 917313
cugccuguuccagaugaga

SEQ ID NO: 1225539 - RNA, 19 nt, Artificial Sequence
  Description of Artificial Sequence: Synthetic oligonucleotide
  Antisense strand to SEQ ID NO: 1225538
ucucaucuggaacaggcag

SEQ ID NO: 1225540 - RNA, 19 nt, Artificial Sequence
  Description of Artificial Sequence: Synthetic oligonucleotide
  Sense strand starting at position 399 of SEQ ID NO: 917313
cacugcugcucuucugaga

SEQ ID NO: 1225541 - RNA, 19 nt, Artificial Sequence
  Description of Artificial Sequence: Synthetic oligonucleotide
  Antisense strand to SEQ ID NO: 1225540
ucucagaagagcagcagug

SEQ ID NO: 1225542 - RNA, 19 nt, Artificial Sequence
  Description of Artificial Sequence: Synthetic oligonucleotide
  Sense strand starting at position 600 of SEQ ID NO: 917313
ucggaagccucccugugaa

SEQ ID NO: 1225543 - RNA, 19 nt, Artificial Sequence
  Description of Artificial Sequence: Synthetic oligonucleotide
  Antisense strand to SEQ ID NO: 1225542
uucacagggaggcuuccga

SEQ ID NO: 1225544 - RNA, 19 nt, Artificial Sequence
  Description of Artificial Sequence: Synthetic oligonucleotide
  Sense strand starting at position 698 of SEQ ID NO: 917313
agagcugauucucuaagaa

SEQ ID NO: 1225545 - RNA, 19 nt, Artificial Sequence
  Description of Artificial Sequence: Synthetic oligonucleotide
  Antisense strand to SEQ ID NO: 1225544
uucuuagagaaucagcucu

SEQ ID NO: 1225546 - RNA, 19 nt, Artificial Sequence
  Description of Artificial Sequence: Synthetic oligonucleotide
  Sense strand starting at position 839 of SEQ ID NO: 917313
ugcuuaugcugauuuaauc

SEQ ID NO: 1225547 - RNA, 19 nt, Artificial Sequence
  Description of Artificial Sequence: Synthetic oligonucleotide
  Antisense strand to SEQ ID NO: 1225546
gauuaaaucagcauaagca

SEQ ID NO: 1225548 - RNA, 19 nt, Artificial Sequence
  Description of Artificial Sequence: Synthetic oligonucleotide
  Sense strand starting at position 929 of SEQ ID NO: 917313
uuuaaucucccaggcaagu

SEQ ID NO: 1225549 - RNA, 19 nt, Artificial Sequence
  Description of Artificial Sequence: Synthetic oligonucleotide
  Antisense strand to SEQ ID NO: 1225548
acuugccugggagauuaaa

SEQ ID NO: 1225550 - RNA, 19 nt, Artificial Sequence
  Description of Artificial Sequence: Synthetic oligonucleotide
  Sense strand starting at position 961 of SEQ ID NO: 917313
cuaguaauggcauauauga

SEQ ID NO: 1225551 - RNA, 19 nt, Artificial Sequence
  Description of Artificial Sequence: Synthetic oligonucleotide
  Antisense strand to SEQ ID NO: 1225550
ucauauaugccauuacuag

SEQ ID NO: 1225552 - RNA, 19 nt, Artificial Sequence
  Description of Artificial Sequence: Synthetic oligonucleotide
  Sense strand starting at position 1272 of SEQ ID NO: 917313
ucaaacaucugucuuaggu

SEQ ID NO: 1225553 - RNA, 19 nt, Artificial Sequence
  Description of Artificial Sequence: Synthetic oligonucleotide
  Antisense strand to SEQ ID NO: 1225552
accuaagacagauguuuga

SEQ ID NO: 1225554 - RNA, 19 nt, Artificial Sequence
  Description of Artificial Sequence: Synthetic oligonucleotide
  Sense strand starting at position 1280 of SEQ ID NO: 917313
cugucuuagguuuaaauug

SEQ ID NO: 1225555 - RNA, 19 nt, Artificial Sequence
  Description of Artificial Sequence: Synthetic oligonucleotide
  Antisense strand to SEQ ID NO: 1225554
caauuuaaaccuaagacag

SEQ ID NO: 1225556 - RNA, 19 nt, Artificial Sequence
  Description of Artificial Sequence: Synthetic oligonucleotide
  Sense strand starting at position 1320 of SEQ ID NO: 917313
accugauuaguccagguuu

SEQ ID NO: 1225557 - RNA, 19 nt, Artificial Sequence
  Description of Artificial Sequence: Synthetic oligonucleotide
  Antisense strand to SEQ ID NO: 1225556
aaaccuggacuaaucaggu

SEQ ID NO: 1225558 - RNA, 19 nt, Artificial Sequence
  Description of Artificial Sequence: Synthetic oligonucleotide
  Sense strand starting at position 1476 of SEQ ID NO: 917313
gguugaugggcagacuuca

SEQ ID NO: 1225559 - RNA, 19 nt, Artificial Sequence
  Description of Artificial Sequence: Synthetic oligonucleotide
  Antisense strand to SEQ ID NO: 1225558
ugaagucugcccaucaacc

SEQ ID NO: 1225560 - RNA, 19 nt, Artificial Sequence
  Description of Artificial Sequence: Synthetic oligonucleotide
  Sense strand starting at position 2244 of SEQ ID NO: 917313
ggaagugucaccuguguca

SEQ ID NO: 1225561 - RNA, 19 nt, Artificial Sequence
  Description of Artificial Sequence: Synthetic oligonucleotide
  Antisense strand to SEQ ID NO: 1225560
ugacacaggugacacuucc

SEQ ID NO: 1225562 - RNA, 19 nt, Artificial Sequence
  Description of Artificial Sequence: Synthetic oligonucleotide
  Sense strand starting at position 2922 of SEQ ID NO: 917313
uugguauuauagguaacau

SEQ ID NO: 1225563 - RNA, 19 nt, Artificial Sequence
  Description of Artificial Sequence: Synthetic oligonucleotide
  Antisense strand to SEQ ID NO: 1225562
auguuaccuauaauaccaa

SEQ ID NO: 1225564 - RNA, 19 nt, Artificial Sequence
  Description of Artificial Sequence: Synthetic oligonucleotide
  Sense strand starting at position 3041 of SEQ ID NO: 917313
aaguuugagccugggcaau

SEQ ID NO: 1225565 - RNA, 19 nt, Artificial Sequence
  Description of Artificial Sequence: Synthetic oligonucleotide
  Antisense strand to SEQ ID NO: 1225564
auugcccaggcucaaacuu

SEQ ID NO: 1225566 - RNA, 19 nt, Artificial Sequence
  Description of Artificial Sequence: Synthetic oligonucleotide
  Sense strand starting at position 3139 of SEQ ID NO: 917313
aguacacauuuccacgaau

SEQ ID NO: 1225567 - RNA, 19 nt, Artificial Sequence
  Description of Artificial Sequence: Synthetic oligonucleotide
  Antisense strand to SEQ ID NO: 1225566
auucguggaaauguguacu

SEQ ID NO: 1225568 - RNA, 19 nt, Artificial Sequence
  Description of Artificial Sequence: Synthetic oligonucleotide
  Sense strand starting at position 3150 of SEQ ID NO: 917313
ccacgaaugguuugggaau

SEQ ID NO: 1225569 - RNA, 19 nt, Artificial Sequence
  Description of Artificial Sequence: Synthetic oligonucleotide
  Antisense strand to SEQ ID NO: 1225568
auucccaaaccauucgugg

SEQ ID NO: 1225570 - RNA, 19 nt, Artificial Sequence
  Description of Artificial Sequence: Synthetic oligonucleotide
  Sense strand starting at position 3173 of SEQ ID NO: 917313
gcaucauauggcugagguu

SEQ ID NO: 1225571 - RNA, 19 nt, Artificial Sequence
  Description of Artificial Sequence: Synthetic oligonucleotide
  Antisense strand to SEQ ID NO: 1225570
aaccucagccauaugaugc

SEQ ID NO: 1225572 - RNA, 19 nt, Artificial Sequence
  Description of Artificial Sequence: Synthetic oligonucleotide
  Sense strand starting at position 3174 of SEQ ID NO: 917313
caucauauggcugagguuu

SEQ ID NO: 1225573 - RNA, 19 nt, Artificial Sequence
  Description of Artificial Sequence: Synthetic oligonucleotide
  Antisense strand to SEQ ID NO: 1225572
aaaccucagccauaugaug

SEQ ID NO: 1225574 - RNA, 19 nt, Artificial Sequence
  Description of Artificial Sequence: Synthetic oligonucleotide
  Sense strand starting at position 3180 of SEQ ID NO: 917313
auggcugagguuugaacua

SEQ ID NO: 1225575 - RNA, 19 nt, Artificial Sequence
  Description of Artificial Sequence: Synthetic oligonucleotide
  Antisense strand to SEQ ID NO: 1225574
uaguucaaaccucagccau

SEQ ID NO: 1225576 - RNA, 19 nt, Artificial Sequence
  Description of Artificial Sequence: Synthetic oligonucleotide
  Sense strand starting at position 3309 of SEQ ID NO: 917313
agagcauccguguaccauu

SEQ ID NO: 1225577 - RNA, 19 nt, Artificial Sequence
  Description of Artificial Sequence: Synthetic oligonucleotide
  Antisense strand to SEQ ID NO: 1225576
aaugguacacggaugcucu

SEQ ID NO: 1225578 - RNA, 19 nt, Artificial Sequence
  Description of Artificial Sequence: Synthetic oligonucleotide
  Sense strand starting at position 3638 of SEQ ID NO: 917313
gccagacagaucuggaaau

SEQ ID NO: 1225579 - RNA, 19 nt, Artificial Sequence
  Description of Artificial Sequence: Synthetic oligonucleotide
  Antisense strand to SEQ ID NO: 1225578
auuuccagaucugucuggc

SEQ ID NO: 1225580 - RNA, 19 nt, Artificial Sequence
  Description of Artificial Sequence: Synthetic oligonucleotide
  Sense strand starting at position 3729 of SEQ ID NO: 917313
guaagaaauggcugcuuug

SEQ ID NO: 1225581 - RNA, 19 nt, Artificial Sequence
  Description of Artificial Sequence: Synthetic oligonucleotide
  Antisense strand to SEQ ID NO: 1225580
caaagcagccauuucuuac

SEQ ID NO: 1225582 - RNA, 19 nt, Artificial Sequence
  Description of Artificial Sequence: Synthetic oligonucleotide
  Sense strand starting at position 3768 of SEQ ID NO: 917313
gagaaacguauugaguauc

SEQ ID NO: 1225583 - RNA, 19 nt, Artificial Sequence
  Description of Artificial Sequence: Synthetic oligonucleotide
  Antisense strand to SEQ ID NO: 1225582
gauacucaauacguuucuc

SEQ ID NO: 1225584 - RNA, 19 nt, Artificial Sequence
  Description of Artificial Sequence: Synthetic oligonucleotide
  Sense strand starting at position 3776 of SEQ ID NO: 917314
uauugaguaucagcaguuu

SEQ ID NO: 1225585 - RNA, 19 nt, Artificial Sequence
  Description of Artificial Sequence: Synthetic oligonucleotide
  Antisense strand to SEQ ID NO: 1225584
aaacugcugauacucaaua

SEQ ID NO: 1225586 - RNA, 19 nt, Artificial Sequence
  Description of Artificial Sequence: Synthetic oligonucleotide
  Sense strand starting at position 581 of SEQ ID NO: 917314
gugcaaucauaccuuauug

SEQ ID NO: 1225587 - RNA, 19 nt, Artificial Sequence
  Description of Artificial Sequence: Synthetic oligonucleotide
  Antisense strand to SEQ ID NO: 1225586
caauaagguaugauugcac

SEQ ID NO: 1225588 - RNA, 19 nt, Artificial Sequence
  Description of Artificial Sequence: Synthetic oligonucleotide
  Sense strand starting at position 807 of SEQ ID NO: 917314
gcgugaacugcuguaccca

SEQ ID NO: 1225589 - RNA, 19 nt, Artificial Sequence
  Description of Artificial Sequence: Synthetic oligonucleotide
  Antisense strand to SEQ ID NO: 1225588
uggguacagcaguucacgc

SEQ ID NO: 1225590 - RNA, 19 nt, Artificial Sequence
  Description of Artificial Sequence: Synthetic oligonucleotide
  Sense strand starting at position 868 of SEQ ID NO: 917314
cauugccguugauaguuaa

SEQ ID NO: 1225591 - RNA, 19 nt, Artificial Sequence
  Description of Artificial Sequence: Synthetic oligonucleotide
  Antisense strand to SEQ ID NO: 1225590
uuaacuaucaacggcaaug

SEQ ID NO: 1225592 - RNA, 19 nt, Artificial Sequence
  Description of Artificial Sequence: Synthetic oligonucleotide
  Sense strand starting at position 875 of SEQ ID NO: 917314
guugauaguuaaggucuga

SEQ ID NO: 1225593 - RNA, 19 nt, Artificial Sequence
  Description of Artificial Sequence: Synthetic oligonucleotide
  Antisense strand to SEQ ID NO: 1225592
ucagaccuuaacuaucaac

SEQ ID NO: 1225594 - RNA, 19 nt, Artificial Sequence
  Description of Artificial Sequence: Synthetic oligonucleotide
  Sense strand starting at position 935 of SEQ ID NO: 917314
aucaauacuuggcauaagu

SEQ ID NO: 1225595 - RNA, 19 nt, Artificial Sequence
  Description of Artificial Sequence: Synthetic oligonucleotide
  Antisense strand to SEQ ID NO: 1225594
acuuaugccaaguauugau

SEQ ID NO: 1225596 - RNA, 19 nt, Artificial Sequence
  Description of Artificial Sequence: Synthetic oligonucleotide
  Sense strand starting at position 1207 of SEQ ID NO: 917314
aguccugcuuaccuagaga

SEQ ID NO: 1225597 - RNA, 19 nt, Artificial Sequence
  Description of Artificial Sequence: Synthetic oligonucleotide
  Antisense strand to SEQ ID NO: 1225596
ucucuagguaagcaggacu

SEQ ID NO: 1225598 - RNA, 19 nt, Artificial Sequence
  Description of Artificial Sequence: Synthetic oligonucleotide
  Sense strand starting at position 1338 of SEQ ID NO: 917314
gcccucauuuguccacaua

SEQ ID NO: 1225599 - RNA, 19 nt, Artificial Sequence
  Description of Artificial Sequence: Synthetic oligonucleotide
  Antisense strand to SEQ ID NO: 1225598
uauguggacaaaugagggc

SEQ ID NO: 1225600 - RNA, 19 nt, Artificial Sequence
  Description of Artificial Sequence: Synthetic oligonucleotide
  Sense strand starting at position 1989 of SEQ ID NO: 917314
auucgaugucccugauuaa

SEQ ID NO: 1225601 - RNA, 19 nt, Artificial Sequence
  Description of Artificial Sequence: Synthetic oligonucleotide
  Antisense strand to SEQ ID NO: 1225600
uuaaucagggacaucgaau

SEQ ID NO: 1225602 - RNA, 19 nt, Artificial Sequence
  Description of Artificial Sequence: Synthetic oligonucleotide
  Sense strand starting at position 1990 of SEQ ID NO: 917314
uucgaugucccugauuaag

SEQ ID NO: 1225603 - RNA, 19 nt, Artificial Sequence
  Description of Artificial Sequence: Synthetic oligonucleotide
  Antisense strand to SEQ ID NO: 1225602
cuuaaucagggacaucgaa

SEQ ID NO: 1225604 - RNA, 19 nt, Artificial Sequence
  Description of Artificial Sequence: Synthetic oligonucleotide
  Sense strand starting at position 1992 of SEQ ID NO: 917314
cgaugucccugauuaagga

SEQ ID NO: 1225605 - RNA, 19 nt, Artificial Sequence
  Description of Artificial Sequence: Synthetic oligonucleotide
  Antisense strand to SEQ ID NO: 1225604
uccuuaaucagggacaucg

SEQ ID NO: 1225606 - RNA, 19 nt, Artificial Sequence
  Description of Artificial Sequence: Synthetic oligonucleotide
  Sense strand starting at position 2011 of SEQ ID NO: 917314
gcagcaucggcucacuuau

SEQ ID NO: 1225607 - RNA, 19 nt, Artificial Sequence
  Description of Artificial Sequence: Synthetic oligonucleotide
  Antisense strand to SEQ ID NO: 1225606
auaagugagccgaugcugc

SEQ ID NO: 1225608 - RNA, 19 nt, Artificial Sequence
  Description of Artificial Sequence: Synthetic oligonucleotide
  Sense strand starting at position 2040 of SEQ ID NO: 917314
gcagcuuaacuguugcgau

SEQ ID NO: 1225609 - RNA, 19 nt, Artificial Sequence
  Description of Artificial Sequence: Synthetic oligonucleotide
  Antisense strand to SEQ ID NO: 1225608
aucgcaacaguuaagcugc

SEQ ID NO: 1225610 - RNA, 19 nt, Artificial Sequence
  Description of Artificial Sequence: Synthetic oligonucleotide
  Sense strand starting at position 2041 of SEQ ID NO: 917314
cagcuuaacuguugcgauc

SEQ ID NO: 1225611 - RNA, 19 nt, Artificial Sequence
  Description of Artificial Sequence: Synthetic oligonucleotide
  Antisense strand to SEQ ID NO: 1225610
gaucgcaacaguuaagcug

SEQ ID NO: 1225612 - RNA, 19 nt, Artificial Sequence
  Description of Artificial Sequence: Synthetic oligonucleotide
  Sense strand starting at position 2101 of SEQ ID NO: 917314
ugguguugcuugucuagac

SEQ ID NO: 1225613 - RNA, 19 nt, Artificial Sequence
  Description of Artificial Sequence: Synthetic oligonucleotide
  Antisense strand to SEQ ID NO: 1225612
gucuagacaagcaacacca

SEQ ID NO: 1225614 - RNA, 19 nt, Artificial Sequence
  Description of Artificial Sequence: Synthetic oligonucleotide
  Sense strand starting at position 2188 of SEQ ID NO: 917314
gggccaugcuuagcagaga

SEQ ID NO: 1225615 - RNA, 19 nt, Artificial Sequence
  Description of Artificial Sequence: Synthetic oligonucleotide
  Antisense strand to SEQ ID NO: 1225614
ucucugcuaagcauggccc

SEQ ID NO: 1225616 - RNA, 19 nt, Artificial Sequence
  Description of Artificial Sequence: Synthetic oligonucleotide
  Sense strand starting at position 2189 of SEQ ID NO: 917314
ggccaugcuuagcagagau

SEQ ID NO: 1225617 - RNA, 19 nt, Artificial Sequence
  Description of Artificial Sequence: Synthetic oligonucleotide
  Antisense strand to SEQ ID NO: 1225616
aucucugcuaagcauggcc

SEQ ID NO: 1225618 - RNA, 19 nt, Artificial Sequence
  Description of Artificial Sequence: Synthetic oligonucleotide
  Sense strand starting at position 2301 of SEQ ID NO: 917314
gggaugagcuguccggaga

SEQ ID NO: 1225619 - RNA, 19 nt, Artificial Sequence
  Description of Artificial Sequence: Synthetic oligonucleotide
  Antisense strand to SEQ ID NO: 1225618
ucuccggacagcucauccc

SEQ ID NO: 1225620 - RNA, 19 nt, Artificial Sequence
  Description of Artificial Sequence: Synthetic oligonucleotide
  Sense strand starting at position 2304 of SEQ ID NO: 917314
augagcuguccggagagua

SEQ ID NO: 1225621 - RNA, 19 nt, Artificial Sequence
  Description of Artificial Sequence: Synthetic oligonucleotide
  Antisense strand to SEQ ID NO: 1225620
uacucuccggacagcucau

SEQ ID NO: 1225622 - RNA, 19 nt, Artificial Sequence
  Description of Artificial Sequence: Synthetic oligonucleotide
  Sense strand starting at position 2551 of SEQ ID NO: 917314
acuuaaauacgucacuuga

SEQ ID NO: 1225623 - RNA, 19 nt, Artificial Sequence
  Description of Artificial Sequence: Synthetic oligonucleotide
  Antisense strand to SEQ ID NO: 1225622
ucaagugacguauuuaagu

SEQ ID NO: 1225624 - RNA, 19 nt, Artificial Sequence
  Description of Artificial Sequence: Synthetic oligonucleotide
  Sense strand starting at position 2553 of SEQ ID NO: 917314
uuaaauacgucacuugaaa

SEQ ID NO: 1225625 - RNA, 19 nt, Artificial Sequence
  Description of Artificial Sequence: Synthetic oligonucleotide
  Antisense strand to SEQ ID NO: 1225624
uuucaagugacguauuuaa

SEQ ID NO: 1225626 - RNA, 19 nt, Artificial Sequence
  Description of Artificial Sequence: Synthetic oligonucleotide
  Sense strand starting at position 2693 of SEQ ID NO: 917314
cccagaguuugagccgaaa

SEQ ID NO: 1225627 - RNA, 19 nt, Artificial Sequence
  Description of Artificial Sequence: Synthetic oligonucleotide
  Antisense strand to SEQ ID NO: 1225626
uuucggcucaaacucuggg

SEQ ID NO: 1225628 - RNA, 19 nt, Artificial Sequence
  Description of Artificial Sequence: Synthetic oligonucleotide
  Sense strand starting at position 2735 of SEQ ID NO: 917314
acgcacaucuccugagaau

SEQ ID NO: 1225629 - RNA, 19 nt, Artificial Sequence
  Description of Artificial Sequence: Synthetic oligonucleotide
  Antisense strand to SEQ ID NO: 1225628
auucucaggagaugugcgu

SEQ ID NO: 1225630 - RNA, 19 nt, Artificial Sequence
  Description of Artificial Sequence: Synthetic oligonucleotide
  Sense strand starting at position 2736 of SEQ ID NO: 917314
cgcacaucuccugagaaua

SEQ ID NO: 1225631 - RNA, 19 nt, Artificial Sequence
  Description of Artificial Sequence: Synthetic oligonucleotide
  Antisense strand to SEQ ID NO: 1225630
uauucucaggagaugugcg

SEQ ID NO: 1225632 - RNA, 19 nt, Artificial Sequence
  Description of Artificial Sequence: Synthetic oligonucleotide
  Sense strand starting at position 3085 of SEQ ID NO: 917314
acgcuugcuggagaggaaa

SEQ ID NO: 1225633 - RNA, 19 nt, Artificial Sequence
  Description of Artificial Sequence: Synthetic oligonucleotide
  Antisense strand to SEQ ID NO: 1225632
uuuccucuccagcaagcgu

SEQ ID NO: 1225634 - RNA, 19 nt, Artificial Sequence
  Description of Artificial Sequence: Synthetic oligonucleotide
  Sense strand starting at position 3160 of SEQ ID NO: 917314
agccaugauugcgcugaca

SEQ ID NO: 1225635 - RNA, 19 nt, Artificial Sequence
  Description of Artificial Sequence: Synthetic oligonucleotide
  Antisense strand to SEQ ID NO: 1225634
ugucagcgcaaucauggcu

SEQ ID NO: 1225636 - RNA, 19 nt, Artificial Sequence
  Description of Artificial Sequence: Synthetic oligonucleotide
  Sense strand starting at position 3162 of SEQ ID NO: 917314
ccaugauugcgcugacaag

SEQ ID NO: 1225637 - RNA, 19 nt, Artificial Sequence
  Description of Artificial Sequence: Synthetic oligonucleotide
  Antisense strand to SEQ ID NO: 1225636
cuugucagcgcaaucaugg

SEQ ID NO: 1225638 - RNA, 19 nt, Artificial Sequence
  Description of Artificial Sequence: Synthetic oligonucleotide
  Sense strand starting at position 3289 of SEQ ID NO: 917314
acgccuggguccucugaga

SEQ ID NO: 1225639 - RNA, 19 nt, Artificial Sequence
  Description of Artificial Sequence: Synthetic oligonucleotide
  Antisense strand to SEQ ID NO: 1225638
ucucagaggacccaggcgu

SEQ ID NO: 1225640 - RNA, 19 nt, Artificial Sequence
  Description of Artificial Sequence: Synthetic oligonucleotide
  Sense strand starting at position 3378 of SEQ ID NO: 917314
ggcugugauguccauccau

SEQ ID NO: 1225641 - RNA, 19 nt, Artificial Sequence
  Description of Artificial Sequence: Synthetic oligonucleotide
  Antisense strand to SEQ ID NO: 1225640
auggauggacaucacagcc

SEQ ID NO: 1225642 - RNA, 19 nt, Artificial Sequence
  Description of Artificial Sequence: Synthetic oligonucleotide
  Sense strand starting at position 3420 of SEQ ID NO: 917314
gccauccuucccuguaagu

SEQ ID NO: 1225643 - RNA, 19 nt, Artificial Sequence
  Description of Artificial Sequence: Synthetic oligonucleotide
  Antisense strand to SEQ ID NO: 1225642
acuuacagggaaggauggc

SEQ ID NO: 1225644 - RNA, 19 nt, Artificial Sequence
  Description of Artificial Sequence: Synthetic oligonucleotide
  Sense strand starting at position 3429 of SEQ ID NO: 917314
cccuguaaguuuggaccua

SEQ ID NO: 1225645 - RNA, 19 nt, Artificial Sequence
  Description of Artificial Sequence: Synthetic oligonucleotide
  Antisense strand to SEQ ID NO: 1225644
uagguccaaacuuacaggg

SEQ ID NO: 1225646 - RNA, 19 nt, Artificial Sequence
  Description of Artificial Sequence: Synthetic oligonucleotide
  Sense strand starting at position 3531 of SEQ ID NO: 917314
cugggaucucuguguuccu

SEQ ID NO: 1225647 - RNA, 19 nt, Artificial Sequence
  Description of Artificial Sequence: Synthetic oligonucleotide
  Antisense strand to SEQ ID NO: 1225646
aggaacacagagaucccag

SEQ ID NO: 1225648 - RNA, 19 nt, Artificial Sequence
  Description of Artificial Sequence: Synthetic oligonucleotide
  Sense strand starting at position 3532 of SEQ ID NO: 917314
ugggaucucuguguuccua

SEQ ID NO: 1225649 - RNA, 19 nt, Artificial Sequence
  Description of Artificial Sequence: Synthetic oligonucleotide
  Antisense strand to SEQ ID NO: 1225648
uaggaacacagagauccca

SEQ ID NO: 1225650 - RNA, 19 nt, Artificial Sequence
  Description of Artificial Sequence: Synthetic oligonucleotide
  Sense strand starting at position 3547 of SEQ ID NO: 917314
ccuaucuucuaccgucaga

SEQ ID NO: 1225651 - RNA, 19 nt, Artificial Sequence
  Description of Artificial Sequence: Synthetic oligonucleotide
  Antisense strand to SEQ ID NO: 1225650
ucugacgguagaagauagg

SEQ ID NO: 1225652 - RNA, 19 nt, Artificial Sequence
  Description of Artificial Sequence: Synthetic oligonucleotide
  Sense strand starting at position 3577 of SEQ ID NO: 917314
augagcuaucccuggaaca

SEQ ID NO: 1225653 - RNA, 19 nt, Artificial Sequence
  Description of Artificial Sequence: Synthetic oligonucleotide
  Antisense strand to SEQ ID NO: 1225652
uguuccagggauagcucau

SEQ ID NO: 1225654 - RNA, 19 nt, Artificial Sequence
  Description of Artificial Sequence: Synthetic oligonucleotide
  Sense strand starting at position 3578 of SEQ ID NO: 917314
ugagcuaucccuggaacac

SEQ ID NO: 1225655 - RNA, 19 nt, Artificial Sequence
  Description of Artificial Sequence: Synthetic oligonucleotide
  Antisense strand to SEQ ID NO: 1225654
guguuccagggauagcuca

SEQ ID NO: 1225656 - RNA, 19 nt, Artificial Sequence
  Description of Artificial Sequence: Synthetic oligonucleotide
  Sense strand starting at position 3854 of SEQ ID NO: 917314
gacucuaauguccgaagca

SEQ ID NO: 1225657 - RNA, 19 nt, Artificial Sequence
  Description of Artificial Sequence: Synthetic oligonucleotide
  Antisense strand to SEQ ID NO: 1225656
ugcuucggacauuagaguc

SEQ ID NO: 1225658 - RNA, 19 nt, Artificial Sequence
  Description of Artificial Sequence: Synthetic oligonucleotide
  Sense strand starting at position 3855 of SEQ ID NO: 917315
acucuaauguccgaagcau

SEQ ID NO: 1225659 - RNA, 19 nt, Artificial Sequence
  Description of Artificial Sequence: Synthetic oligonucleotide
  Antisense strand to SEQ ID NO: 1225658
augcuucggacauuagagu

SEQ ID NO: 1225660 - RNA, 19 nt, Artificial Sequence
  Description of Artificial Sequence: Synthetic oligonucleotide
  Sense strand starting at position 83 of SEQ ID NO: 917315
caugguucuguggaacaau

SEQ ID NO: 1225661 - RNA, 19 nt, Artificial Sequence
  Description of Artificial Sequence: Synthetic oligonucleotide
  Antisense strand to SEQ ID NO: 1225660
auuguuccacagaaccaug

SEQ ID NO: 1225662 - RNA, 19 nt, Artificial Sequence
  Description of Artificial Sequence: Synthetic oligonucleotide
  Sense strand starting at position 107 of SEQ ID NO: 917315
uugaguuacaaauggguua

SEQ ID NO: 1225663 - RNA, 19 nt, Artificial Sequence
  Description of Artificial Sequence: Synthetic oligonucleotide
  Antisense strand to SEQ ID NO: 1225662
uaacccauuuguaacucaa

SEQ ID NO: 1225664 - RNA, 19 nt, Artificial Sequence
  Description of Artificial Sequence: Synthetic oligonucleotide
  Sense strand starting at position 108 of SEQ ID NO: 917315
ugaguuacaaauggguuaa

SEQ ID NO: 1225665 - RNA, 19 nt, Artificial Sequence
  Description of Artificial Sequence: Synthetic oligonucleotide
  Antisense strand to SEQ ID NO: 1225664
uuaacccauuuguaacuca

SEQ ID NO: 1225666 - RNA, 19 nt, Artificial Sequence
  Description of Artificial Sequence: Synthetic oligonucleotide
  Sense strand starting at position 207 of SEQ ID NO: 917315
cccgaaaggcuauauaauc

SEQ ID NO: 1225667 - RNA, 19 nt, Artificial Sequence
  Description of Artificial Sequence: Synthetic oligonucleotide
  Antisense strand to SEQ ID NO: 1225666
gauuauauagccuuucggg

SEQ ID NO: 1225668 - RNA, 19 nt, Artificial Sequence
  Description of Artificial Sequence: Synthetic oligonucleotide
  Sense strand starting at position 649 of SEQ ID NO: 917315
ccugguaacuugguagcaa

SEQ ID NO: 1225669 - RNA, 19 nt, Artificial Sequence
  Description of Artificial Sequence: Synthetic oligonucleotide
  Antisense strand to SEQ ID NO: 1225668
uugcuaccaaguuaccagg

SEQ ID NO: 1225670 - RNA, 19 nt, Artificial Sequence
  Description of Artificial Sequence: Synthetic oligonucleotide
  Sense strand starting at position 764 of SEQ ID NO: 917315
aaagaauguuggcuauaga

SEQ ID NO: 1225671 - RNA, 19 nt, Artificial Sequence
  Description of Artificial Sequence: Synthetic oligonucleotide
  Antisense strand to SEQ ID NO: 1225670
ucuauagccaacauucuuu

SEQ ID NO: 1225672 - RNA, 19 nt, Artificial Sequence
  Description of Artificial Sequence: Synthetic oligonucleotide
  Sense strand starting at position 834 of SEQ ID NO: 917315
ucgggaguagacugggaau

SEQ ID NO: 1225673 - RNA, 19 nt, Artificial Sequence
  Description of Artificial Sequence: Synthetic oligonucleotide
  Antisense strand to SEQ ID NO: 1225672
auucccagucuacucccga

SEQ ID NO: 1225674 - RNA, 19 nt, Artificial Sequence
  Description of Artificial Sequence: Synthetic oligonucleotide
  Sense strand starting at position 865 of SEQ ID NO: 917315
guggaagucugacuaaaga

SEQ ID NO: 1225675 - RNA, 19 nt, Artificial Sequence
  Description of Artificial Sequence: Synthetic oligonucleotide
  Antisense strand to SEQ ID NO: 1225674
ucuuuagucagacuuccac

SEQ ID NO: 1225676 - RNA, 19 nt, Artificial Sequence
  Description of Artificial Sequence: Synthetic oligonucleotide
  Sense strand starting at position 979 of SEQ ID NO: 917315
acugguaucggccaauaua

SEQ ID NO: 1225677 - RNA, 19 nt, Artificial Sequence
  Description of Artificial Sequence: Synthetic oligonucleotide
  Antisense strand to SEQ ID NO: 1225676
uauauuggccgauaccagu

SEQ ID NO: 1225678 - RNA, 19 nt, Artificial Sequence
  Description of Artificial Sequence: Synthetic oligonucleotide
  Sense strand starting at position 1001 of SEQ ID NO: 917315
ggauaaagugcagaagcau

SEQ ID NO: 1225679 - RNA, 19 nt, Artificial Sequence
  Description of Artificial Sequence: Synthetic oligonucleotide
  Antisense strand to SEQ ID NO: 1225678
augcuucugcacuuuaucc

SEQ ID NO: 1225680 - RNA, 19 nt, Artificial Sequence
  Description of Artificial Sequence: Synthetic oligonucleotide
  Sense strand starting at position 1187 of SEQ ID NO: 917315
caugaaaggugacagaaua

SEQ ID NO: 1225681 - RNA, 19 nt, Artificial Sequence
  Description of Artificial Sequence: Synthetic oligonucleotide
  Antisense strand to SEQ ID NO: 1225680
uauucugucaccuuucaug

SEQ ID NO: 1225682 - RNA, 19 nt, Artificial Sequence
  Description of Artificial Sequence: Synthetic oligonucleotide
  Sense strand starting at position 1322 of SEQ ID NO: 917315
gugaguuuggcgagcucau

SEQ ID NO: 1225683 - RNA, 19 nt, Artificial Sequence
  Description of Artificial Sequence: Synthetic oligonucleotide
  Antisense strand to SEQ ID NO: 1225682
augagcucgccaaacucac

SEQ ID NO: 1225684 - RNA, 19 nt, Artificial Sequence
  Description of Artificial Sequence: Synthetic oligonucleotide
  Sense strand starting at position 1425 of SEQ ID NO: 917315
agcgcagcccucuaauaaa

SEQ ID NO: 1225685 - RNA, 19 nt, Artificial Sequence
  Description of Artificial Sequence: Synthetic oligonucleotide
  Antisense strand to SEQ ID NO: 1225684
uuuauuagagggcugcgcu

SEQ ID NO: 1225686 - RNA, 19 nt, Artificial Sequence
  Description of Artificial Sequence: Synthetic oligonucleotide
  Sense strand starting at position 1538 of SEQ ID NO: 917315
aggagcguuccauaaaugu

SEQ ID NO: 1225687 - RNA, 19 nt, Artificial Sequence
  Description of Artificial Sequence: Synthetic oligonucleotide
  Antisense strand to SEQ ID NO: 1225686
acauuuauggaacgcuccu

SEQ ID NO: 1225688 - RNA, 19 nt, Artificial Sequence
  Description of Artificial Sequence: Synthetic oligonucleotide
  Sense strand starting at position 1804 of SEQ ID NO: 917315
ccgcauuaccuagacagga

SEQ ID NO: 1225689 - RNA, 19 nt, Artificial Sequence
  Description of Artificial Sequence: Synthetic oligonucleotide
  Antisense strand to SEQ ID NO: 1225688
uccugucuagguaaugcgg

SEQ ID NO: 1225690 - RNA, 19 nt, Artificial Sequence
  Description of Artificial Sequence: Synthetic oligonucleotide
  Sense strand starting at position 2116 of SEQ ID NO: 917315
agggcuuucugguccaaac

SEQ ID NO: 1225691 - RNA, 19 nt, Artificial Sequence
  Description of Artificial Sequence: Synthetic oligonucleotide
  Antisense strand to SEQ ID NO: 1225690
guuuggaccagaaagcccu

SEQ ID NO: 1225692 - RNA, 19 nt, Artificial Sequence
  Description of Artificial Sequence: Synthetic oligonucleotide
  Sense strand starting at position 2179 of SEQ ID NO: 917315
cugauucuccugggccuaa

SEQ ID NO: 1225693 - RNA, 19 nt, Artificial Sequence
  Description of Artificial Sequence: Synthetic oligonucleotide
  Antisense strand to SEQ ID NO: 1225692
uuaggcccaggagaaucag

SEQ ID NO: 1225694 - RNA, 19 nt, Artificial Sequence
  Description of Artificial Sequence: Synthetic oligonucleotide
  Sense strand starting at position 2180 of SEQ ID NO: 917315
ugauucuccugggccuaau

SEQ ID NO: 1225695 - RNA, 19 nt, Artificial Sequence
  Description of Artificial Sequence: Synthetic oligonucleotide
  Antisense strand to SEQ ID NO: 1225694
auuaggcccaggagaauca

SEQ ID NO: 1225696 - RNA, 19 nt, Artificial Sequence
  Description of Artificial Sequence: Synthetic oligonucleotide
  Sense strand starting at position 2685 of SEQ ID NO: 917315
uuuccauugcuguaaguuu

SEQ ID NO: 1225697 - RNA, 19 nt, Artificial Sequence
  Description of Artificial Sequence: Synthetic oligonucleotide
  Antisense strand to SEQ ID NO: 1225696
aaacuuacagcaauggaaa

SEQ ID NO: 1225698 - RNA, 19 nt, Artificial Sequence
  Description of Artificial Sequence: Synthetic oligonucleotide
  Sense strand starting at position 2764 of SEQ ID NO: 917315
uuaugucacucagcauuau

SEQ ID NO: 1225699 - RNA, 19 nt, Artificial Sequence
  Description of Artificial Sequence: Synthetic oligonucleotide
  Antisense strand to SEQ ID NO: 1225698
auaaugcugagugacauaa

SEQ ID NO: 1225700 - RNA, 19 nt, Artificial Sequence
  Description of Artificial Sequence: Synthetic oligonucleotide
  Sense strand starting at position 2806 of SEQ ID NO: 917315
uagcaugugcuggaauauc

SEQ ID NO: 1225701 - RNA, 19 nt, Artificial Sequence
  Description of Artificial Sequence: Synthetic oligonucleotide
  Antisense strand to SEQ ID NO: 1225700
gauauuccagcacaugcua

SEQ ID NO: 1225702 - RNA, 19 nt, Artificial Sequence
  Description of Artificial Sequence: Synthetic oligonucleotide
  Sense strand starting at position 2814 of SEQ ID NO: 917315
gcuggaauaucuuuccuuu

SEQ ID NO: 1225703 - RNA, 19 nt, Artificial Sequence
  Description of Artificial Sequence: Synthetic oligonucleotide
  Antisense strand to SEQ ID NO: 1225702
aaaggaaagauauuccagc

SEQ ID NO: 1225704 - RNA, 19 nt, Artificial Sequence
  Description of Artificial Sequence: Synthetic oligonucleotide
  Sense strand starting at position 2973 of SEQ ID NO: 917315
ucagguuaauuauugaacu

SEQ ID NO: 1225705 - RNA, 19 nt, Artificial Sequence
  Description of Artificial Sequence: Synthetic oligonucleotide
  Antisense strand to SEQ ID NO: 1225704
aguucaauaauuaaccuga

SEQ ID NO: 1225706 - RNA, 19 nt, Artificial Sequence
  Description of Artificial Sequence: Synthetic oligonucleotide
  Sense strand starting at position 3032 of SEQ ID NO: 917315
uaguuuaagucauugaugu

SEQ ID NO: 1225707 - RNA, 19 nt, Artificial Sequence
  Description of Artificial Sequence: Synthetic oligonucleotide
  Antisense strand to SEQ ID NO: 1225706
acaucaaugacuuaaacua

SEQ ID NO: 1225708 - RNA, 19 nt, Artificial Sequence
  Description of Artificial Sequence: Synthetic oligonucleotide
  Sense strand starting at position 3033 of SEQ ID NO: 917315
aguuuaagucauugaugua

SEQ ID NO: 1225709 - RNA, 19 nt, Artificial Sequence
  Description of Artificial Sequence: Synthetic oligonucleotide
  Antisense strand to SEQ ID NO: 1225708
uacaucaaugacuuaaacu

SEQ ID NO: 1225710 - RNA, 19 nt, Artificial Sequence
  Description of Artificial Sequence: Synthetic oligonucleotide
  Sense strand starting at position 3034 of SEQ ID NO: 917315
guuuaagucauugauguac

SEQ ID NO: 1225711 - RNA, 19 nt, Artificial Sequence
  Description of Artificial Sequence: Synthetic oligonucleotide
  Antisense strand to SEQ ID NO: 1225710
guacaucaaugacuuaaac

SEQ ID NO: 1225712 - RNA, 19 nt, Artificial Sequence
  Description of Artificial Sequence: Synthetic oligonucleotide
  Sense strand starting at position 3065 of SEQ ID NO: 917315
accagaacugguugucaaa

SEQ ID NO: 1225713 - RNA, 19 nt, Artificial Sequence
  Description of Artificial Sequence: Synthetic oligonucleotide
  Antisense strand to SEQ ID NO: 1225712
uuugacaaccaguucuggu

SEQ ID NO: 1225714 - RNA, 19 nt, Artificial Sequence
  Description of Artificial Sequence: Synthetic oligonucleotide
  Sense strand starting at position 3113 of SEQ ID NO: 917315
uagggauaacaauguagua

SEQ ID NO: 1225715 - RNA, 19 nt, Artificial Sequence
  Description of Artificial Sequence: Synthetic oligonucleotide
  Antisense strand to SEQ ID NO: 1225714
uacuacauuguuaucccua

SEQ ID NO: 1225716 - RNA, 19 nt, Artificial Sequence
  Description of Artificial Sequence: Synthetic oligonucleotide
  Sense strand starting at position 3168 of SEQ ID NO: 917315
gccuauugggaaugaggau

SEQ ID NO: 1225717 - RNA, 19 nt, Artificial Sequence
  Description of Artificial Sequence: Synthetic oligonucleotide
  Antisense strand to SEQ ID NO: 1225716
auccucauucccaauaggc

SEQ ID NO: 1225718 - RNA, 19 nt, Artificial Sequence
  Description of Artificial Sequence: Synthetic oligonucleotide
  Sense strand starting at position 3221 of SEQ ID NO: 917315
gccucacucccaugaggua

SEQ ID NO: 1225719 - RNA, 19 nt, Artificial Sequence
  Description of Artificial Sequence: Synthetic oligonucleotide
  Antisense strand to SEQ ID NO: 1225718
uaccucaugggagugaggc

SEQ ID NO: 1225720 - RNA, 19 nt, Artificial Sequence
  Description of Artificial Sequence: Synthetic oligonucleotide
  Sense strand starting at position 3376 of SEQ ID NO: 917315
ugcugcguaaucuagaaug

SEQ ID NO: 1225721 - RNA, 19 nt, Artificial Sequence
  Description of Artificial Sequence: Synthetic oligonucleotide
  Antisense strand to SEQ ID NO: 1225720
cauucuagauuacgcagca

SEQ ID NO: 1225722 - RNA, 19 nt, Artificial Sequence
  Description of Artificial Sequence: Synthetic oligonucleotide
  Sense strand starting at position 3378 of SEQ ID NO: 917315
cugcguaaucuagaaugcu

SEQ ID NO: 1225723 - RNA, 19 nt, Artificial Sequence
  Description of Artificial Sequence: Synthetic oligonucleotide
  Antisense strand to SEQ ID NO: 1225722
agcauucuagauuacgcag

SEQ ID NO: 1225724 - RNA, 19 nt, Artificial Sequence
  Description of Artificial Sequence: Synthetic oligonucleotide
  Sense strand starting at position 3381 of SEQ ID NO: 917315
cguaaucuagaaugcugau

SEQ ID NO: 1225725 - RNA, 19 nt, Artificial Sequence
  Description of Artificial Sequence: Synthetic oligonucleotide
  Antisense strand to SEQ ID NO: 1225724
aucagcauucuagauuacg

SEQ ID NO: 1225726 - RNA, 19 nt, Artificial Sequence
  Description of Artificial Sequence: Synthetic oligonucleotide
  Sense strand starting at position 3480 of SEQ ID NO: 917315
acaggauguugcuuguuaa

SEQ ID NO: 1225727 - RNA, 19 nt, Artificial Sequence
  Description of Artificial Sequence: Synthetic oligonucleotide
  Antisense strand to SEQ ID NO: 1225726
uuaacaagcaacauccugu

SEQ ID NO: 1225728 - RNA, 19 nt, Artificial Sequence
  Description of Artificial Sequence: Synthetic oligonucleotide
  Sense strand starting at position 3481 of SEQ ID NO: 917315
caggauguugcuuguuaaa

SEQ ID NO: 1225729 - RNA, 19 nt, Artificial Sequence
  Description of Artificial Sequence: Synthetic oligonucleotide
  Antisense strand to SEQ ID NO: 1225728
uuuaacaagcaacauccug

SEQ ID NO: 1225730 - RNA, 19 nt, Artificial Sequence
  Description of Artificial Sequence: Synthetic oligonucleotide
  Sense strand starting at position 3483 of SEQ ID NO: 917315
ggauguugcuuguuaaacu

SEQ ID NO: 1225731 - RNA, 19 nt, Artificial Sequence
  Description of Artificial Sequence: Synthetic oligonucleotide
  Antisense strand to SEQ ID NO: 1225730
aguuuaacaagcaacaucc

SEQ ID NO: 1225732 - RNA, 19 nt, Artificial Sequence
  Description of Artificial Sequence: Synthetic oligonucleotide
  Sense strand starting at position 3605 of SEQ ID NO: 917315
guguucauaggucagggua

SEQ ID NO: 1225733 - RNA, 19 nt, Artificial Sequence
  Description of Artificial Sequence: Synthetic oligonucleotide
  Antisense strand to SEQ ID NO: 1225732
uacccugaccuaugaacac

SEQ ID NO: 1225734 - RNA, 19 nt, Artificial Sequence
  Description of Artificial Sequence: Synthetic oligonucleotide
  Sense strand starting at position 3787 of SEQ ID NO: 917315
cucucaguacucuagucaa

SEQ ID NO: 1225735 - RNA, 19 nt, Artificial Sequence
  Description of Artificial Sequence: Synthetic oligonucleotide
  Antisense strand to SEQ ID NO: 1225734
uugacuagaguacugagag

SEQ ID NO: 1225736 - RNA, 19 nt, Artificial Sequence
  Description of Artificial Sequence: Synthetic oligonucleotide
  Sense strand starting at position 3790 of SEQ ID NO: 917315
ucaguacucuagucaauca

SEQ ID NO: 1225737 - RNA, 19 nt, Artificial Sequence
  Description of Artificial Sequence: Synthetic oligonucleotide
  Antisense strand to SEQ ID NO: 1225736
ugauugacuagaguacuga

SEQ ID NO: 1225738 - RNA, 19 nt, Artificial Sequence
  Description of Artificial Sequence: Synthetic oligonucleotide
  Sense strand starting at position 3879 of SEQ ID NO: 917315
gggucauauugagccauga

SEQ ID NO: 1225739 - RNA, 19 nt, Artificial Sequence
  Description of Artificial Sequence: Synthetic oligonucleotide
  Antisense strand to SEQ ID NO: 1225738
ucauggcucaauaugaccc

SEQ ID NO: 1225740 - RNA, 19 nt, Artificial Sequence
  Description of Artificial Sequence: Synthetic oligonucleotide
  Sense strand starting at position 3879 of SEQ ID NO: 917316
gggucauauugagccauga

SEQ ID NO: 1225741 - RNA, 19 nt, Artificial Sequence
  Description of Artificial Sequence: Synthetic oligonucleotide
  Antisense strand to SEQ ID NO: 1225740
ucauggcucaauaugaccc

SEQ ID NO: 1225742 - RNA, 19 nt, Artificial Sequence
  Description of Artificial Sequence: Synthetic oligonucleotide
  Sense strand starting at position 37 of SEQ ID NO: 917316
guuugcuacaauuaggaga

SEQ ID NO: 1225743 - RNA, 19 nt, Artificial Sequence
  Description of Artificial Sequence: Synthetic oligonucleotide
  Antisense strand to SEQ ID NO: 1225742
ucuccuaauuguagcaaac

SEQ ID NO: 1225744 - RNA, 19 nt, Artificial Sequence
  Description of Artificial Sequence: Synthetic oligonucleotide
  Sense strand starting at position 158 of SEQ ID NO: 917316
gcacacaucugacucaguu

SEQ ID NO: 1225745 - RNA, 19 nt, Artificial Sequence
  Description of Artificial Sequence: Synthetic oligonucleotide
  Antisense strand to SEQ ID NO: 1225744
aacugagucagaugugugc

SEQ ID NO: 1225746 - RNA, 19 nt, Artificial Sequence
  Description of Artificial Sequence: Synthetic oligonucleotide
  Sense strand starting at position 250 of SEQ ID NO: 917316
gggaaugguucuucaggca

SEQ ID NO: 1225747 - RNA, 19 nt, Artificial Sequence
  Description of Artificial Sequence: Synthetic oligonucleotide
  Antisense strand to SEQ ID NO: 1225746
ugccugaagaaccauuccc

SEQ ID NO: 1225748 - RNA, 19 nt, Artificial Sequence
  Description of Artificial Sequence: Synthetic oligonucleotide
  Sense strand starting at position 400 of SEQ ID NO: 917316
ugucuuucccaguagcaaa

SEQ ID NO: 1225749 - RNA, 19 nt, Artificial Sequence
  Description of Artificial Sequence: Synthetic oligonucleotide
  Antisense strand to SEQ ID NO: 1225748
uuugcuacugggaaagaca

SEQ ID NO: 1225750 - RNA, 19 nt, Artificial Sequence
  Description of Artificial Sequence: Synthetic oligonucleotide
  Sense strand starting at position 495 of SEQ ID NO: 917316
uuggcucucucagcacaaa

SEQ ID NO: 1225751 - RNA, 19 nt, Artificial Sequence
  Description of Artificial Sequence: Synthetic oligonucleotide
  Antisense strand to SEQ ID NO: 1225750
uuugugcugagagagccaa

SEQ ID NO: 1225752 - RNA, 19 nt, Artificial Sequence
  Description of Artificial Sequence: Synthetic oligonucleotide
  Sense strand starting at position 496 of SEQ ID NO: 917316
uggcucucucagcacaaau

SEQ ID NO: 1225753 - RNA, 19 nt, Artificial Sequence
  Description of Artificial Sequence: Synthetic oligonucleotide
  Antisense strand to SEQ ID NO: 1225752
auuugugcugagagagcca

SEQ ID NO: 1225754 - RNA, 19 nt, Artificial Sequence
  Description of Artificial Sequence: Synthetic oligonucleotide
  Sense strand starting at position 536 of SEQ ID NO: 917316
ggcccuugccaagagugaa

SEQ ID NO: 1225755 - RNA, 19 nt, Artificial Sequence
  Description of Artificial Sequence: Synthetic oligonucleotide
  Antisense strand to SEQ ID NO: 1225754
uucacucuuggcaagggcc

SEQ ID NO: 1225756 - RNA, 19 nt, Artificial Sequence
  Description of Artificial Sequence: Synthetic oligonucleotide
  Sense strand starting at position 826 of SEQ ID NO: 917316
gcgguuuauuuguuuacuu

SEQ ID NO: 1225757 - RNA, 19 nt, Artificial Sequence
  Description of Artificial Sequence: Synthetic oligonucleotide
  Antisense strand to SEQ ID NO: 1225756
aaguaaacaaauaaaccgc

SEQ ID NO: 1225758 - RNA, 19 nt, Artificial Sequence
  Description of Artificial Sequence: Synthetic oligonucleotide
  Sense strand starting at position 827 of SEQ ID NO: 917316
cgguuuauuuguuuacuuu

SEQ ID NO: 1225759 - RNA, 19 nt, Artificial Sequence
  Description of Artificial Sequence: Synthetic oligonucleotide
  Antisense strand to SEQ ID NO: 1225758
aaaguaaacaaauaaaccg

SEQ ID NO: 1225760 - RNA, 19 nt, Artificial Sequence
  Description of Artificial Sequence: Synthetic oligonucleotide
  Sense strand starting at position 1073 of SEQ ID NO: 917316
gggagaagcaucugccacu

SEQ ID NO: 1225761 - RNA, 19 nt, Artificial Sequence
  Description of Artificial Sequence: Synthetic oligonucleotide
  Antisense strand to SEQ ID NO: 1225760
aguggcagaugcuucuccc

SEQ ID NO: 1225762 - RNA, 19 nt, Artificial Sequence
  Description of Artificial Sequence: Synthetic oligonucleotide
  Sense strand starting at position 1996 of SEQ ID NO: 917316
cagaguuaucaucgucuca

SEQ ID NO: 1225763 - RNA, 19 nt, Artificial Sequence
  Description of Artificial Sequence: Synthetic oligonucleotide
  Antisense strand to SEQ ID NO: 1225762
ugagacgaugauaacucug

SEQ ID NO: 1225764 - RNA, 19 nt, Artificial Sequence
  Description of Artificial Sequence: Synthetic oligonucleotide
  Sense strand starting at position 1998 of SEQ ID NO: 917316
gaguuaucaucgucucaua

SEQ ID NO: 1225765 - RNA, 19 nt, Artificial Sequence
  Description of Artificial Sequence: Synthetic oligonucleotide
  Antisense strand to SEQ ID NO: 1225764
uaugagacgaugauaacuc

SEQ ID NO: 1225766 - RNA, 19 nt, Artificial Sequence
  Description of Artificial Sequence: Synthetic oligonucleotide
  Sense strand starting at position 2040 of SEQ ID NO: 917316
gcaggcaaggcuuagucau

SEQ ID NO: 1225767 - RNA, 19 nt, Artificial Sequence
  Description of Artificial Sequence: Synthetic oligonucleotide
  Antisense strand to SEQ ID NO: 1225766
augacuaagccuugccugc

SEQ ID NO: 1225768 - RNA, 19 nt, Artificial Sequence
  Description of Artificial Sequence: Synthetic oligonucleotide
  Sense strand starting at position 2219 of SEQ ID NO: 917316
ccugguguugauuggagaa

SEQ ID NO: 1225769 - RNA, 19 nt, Artificial Sequence
  Description of Artificial Sequence: Synthetic oligonucleotide
  Antisense strand to SEQ ID NO: 1225768
uucuccaaucaacaccagg

SEQ ID NO: 1225770 - RNA, 19 nt, Artificial Sequence
  Description of Artificial Sequence: Synthetic oligonucleotide
  Sense strand starting at position 2222 of SEQ ID NO: 917316
gguguugauuggagaagaa

SEQ ID NO: 1225771 - RNA, 19 nt, Artificial Sequence
  Description of Artificial Sequence: Synthetic oligonucleotide
  Antisense strand to SEQ ID NO: 1225770
uucuucuccaaucaacacc

SEQ ID NO: 1225772 - RNA, 19 nt, Artificial Sequence
  Description of Artificial Sequence: Synthetic oligonucleotide
  Sense strand starting at position 2501 of SEQ ID NO: 917316
ggguuucaucgcuuugcuu

SEQ ID NO: 1225773 - RNA, 19 nt, Artificial Sequence
  Description of Artificial Sequence: Synthetic oligonucleotide
  Antisense strand to SEQ ID NO: 1225772
aagcaaagcgaugaaaccc

SEQ ID NO: 1225774 - RNA, 19 nt, Artificial Sequence
  Description of Artificial Sequence: Synthetic oligonucleotide
  Sense strand starting at position 2549 of SEQ ID NO: 917316
cugcaaugugccguguagu

SEQ ID NO: 1225775 - RNA, 19 nt, Artificial Sequence
  Description of Artificial Sequence: Synthetic oligonucleotide
  Antisense strand to SEQ ID NO: 1225774
acuacacggcacauugcag

SEQ ID NO: 1225776 - RNA, 19 nt, Artificial Sequence
  Description of Artificial Sequence: Synthetic oligonucleotide
  Sense strand starting at position 2658 of SEQ ID NO: 917316
agucuauaaauaugugagu

SEQ ID NO: 1225777 - RNA, 19 nt, Artificial Sequence
  Description of Artificial Sequence: Synthetic oligonucleotide
  Antisense strand to SEQ ID NO: 1225776
acucacauauuuauagacu

SEQ ID NO: 1225778 - RNA, 19 nt, Artificial Sequence
  Description of Artificial Sequence: Synthetic oligonucleotide
  Sense strand starting at position 2679 of SEQ ID NO: 917316
uagcuaugggcucauugau

SEQ ID NO: 1225779 - RNA, 19 nt, Artificial Sequence
  Description of Artificial Sequence: Synthetic oligonucleotide
  Antisense strand to SEQ ID NO: 1225778
aucaaugagcccauagcua

SEQ ID NO: 1225780 - RNA, 19 nt, Artificial Sequence
  Description of Artificial Sequence: Synthetic oligonucleotide
  Sense strand starting at position 2691 of SEQ ID NO: 917316
cauugaucuccugagguau

SEQ ID NO: 1225781 - RNA, 19 nt, Artificial Sequence
  Description of Artificial Sequence: Synthetic oligonucleotide
  Antisense strand to SEQ ID NO: 1225780
auaccucaggagaucaaug

SEQ ID NO: 1225782 - RNA, 19 nt, Artificial Sequence
  Description of Artificial Sequence: Synthetic oligonucleotide
  Sense strand starting at position 2746 of SEQ ID NO: 917316
cuauuucugcugcggagaa

SEQ ID NO: 1225783 - RNA, 19 nt, Artificial Sequence
  Description of Artificial Sequence: Synthetic oligonucleotide
  Antisense strand to SEQ ID NO: 1225782
uucuccgcagcagaaauag

SEQ ID NO: 1225784 - RNA, 19 nt, Artificial Sequence
  Description of Artificial Sequence: Synthetic oligonucleotide
  Sense strand starting at position 2781 of SEQ ID NO: 917316
aggagaaucuagccuaguu

SEQ ID NO: 1225785 - RNA, 19 nt, Artificial Sequence
  Description of Artificial Sequence: Synthetic oligonucleotide
  Antisense strand to SEQ ID NO: 1225784
aacuaggcuagauucuccu

SEQ ID NO: 1225786 - RNA, 19 nt, Artificial Sequence
  Description of Artificial Sequence: Synthetic oligonucleotide
  Sense strand starting at position 2825 of SEQ ID NO: 917316
uuaggauucuaagcuacau

SEQ ID NO: 1225787 - RNA, 19 nt, Artificial Sequence
  Description of Artificial Sequence: Synthetic oligonucleotide
  Antisense strand to SEQ ID NO: 1225786
auguagcuuagaauccuaa

SEQ ID NO: 1225788 - RNA, 19 nt, Artificial Sequence
  Description of Artificial Sequence: Synthetic oligonucleotide
  Sense strand starting at position 2862 of SEQ ID NO: 917316
cguagagaauauccuuagu

SEQ ID NO: 1225789 - RNA, 19 nt, Artificial Sequence
  Description of Artificial Sequence: Synthetic oligonucleotide
  Antisense strand to SEQ ID NO: 1225788
acuaaggauauucucuacg

SEQ ID NO: 1225790 - RNA, 19 nt, Artificial Sequence
  Description of Artificial Sequence: Synthetic oligonucleotide
  Sense strand starting at position 2867 of SEQ ID NO: 917316
agaauauccuuaguuaguc

SEQ ID NO: 1225791 - RNA, 19 nt, Artificial Sequence
  Description of Artificial Sequence: Synthetic oligonucleotide
  Antisense strand to SEQ ID NO: 1225790
gacuaacuaaggauauucu

SEQ ID NO: 1225792 - RNA, 19 nt, Artificial Sequence
  Description of Artificial Sequence: Synthetic oligonucleotide
  Sense strand starting at position 2902 of SEQ ID NO: 917316
ugaacucuuguguagguuu

SEQ ID NO: 1225793 - RNA, 19 nt, Artificial Sequence
  Description of Artificial Sequence: Synthetic oligonucleotide
  Antisense strand to SEQ ID NO: 1225792
aaaccuacacaagaguuca

SEQ ID NO: 1225794 - RNA, 19 nt, Artificial Sequence
  Description of Artificial Sequence: Synthetic oligonucleotide
  Sense strand starting at position 2904 of SEQ ID NO: 917316
aacucuuguguagguuuaa

SEQ ID NO: 1225795 - RNA, 19 nt, Artificial Sequence
  Description of Artificial Sequence: Synthetic oligonucleotide
  Antisense strand to SEQ ID NO: 1225794
uuaaaccuacacaagaguu

SEQ ID NO: 1225796 - RNA, 19 nt, Artificial Sequence
  Description of Artificial Sequence: Synthetic oligonucleotide
  Sense strand starting at position 2916 of SEQ ID NO: 917316
gguuuaaucagaugggaug

SEQ ID NO: 1225797 - RNA, 19 nt, Artificial Sequence
  Description of Artificial Sequence: Synthetic oligonucleotide
  Antisense strand to SEQ ID NO: 1225796
caucccaucugauuaaacc

SEQ ID NO: 1225798 - RNA, 19 nt, Artificial Sequence
  Description of Artificial Sequence: Synthetic oligonucleotide
  Sense strand starting at position 3069 of SEQ ID NO: 917316
ggccucucugaacaaaucu

SEQ ID NO: 1225799 - RNA, 19 nt, Artificial Sequence
  Description of Artificial Sequence: Synthetic oligonucleotide
  Antisense strand to SEQ ID NO: 1225798
agauuuguucagagaggcc

SEQ ID NO: 1225800 - RNA, 19 nt, Artificial Sequence
  Description of Artificial Sequence: Synthetic oligonucleotide
  Sense strand starting at position 3142 of SEQ ID NO: 917316
ggaugcucuaccugugaaa

SEQ ID NO: 1225801 - RNA, 19 nt, Artificial Sequence
  Description of Artificial Sequence: Synthetic oligonucleotide
  Antisense strand to SEQ ID NO: 1225800
uuucacagguagagcaucc

SEQ ID NO: 1225802 - RNA, 19 nt, Artificial Sequence
  Description of Artificial Sequence: Synthetic oligonucleotide
  Sense strand starting at position 3167 of SEQ ID NO: 917316
uccagaagaucuucuugca

SEQ ID NO: 1225803 - RNA, 19 nt, Artificial Sequence
  Description of Artificial Sequence: Synthetic oligonucleotide
  Antisense strand to SEQ ID NO: 1225802
ugcaagaagaucuucugga

SEQ ID NO: 1225804 - RNA, 19 nt, Artificial Sequence
  Description of Artificial Sequence: Synthetic oligonucleotide
  Sense strand starting at position 3193 of SEQ ID NO: 917316
guuugaggaucccugcaaa

SEQ ID NO: 1225805 - RNA, 19 nt, Artificial Sequence
  Description of Artificial Sequence: Synthetic oligonucleotide
  Antisense strand to SEQ ID NO: 1225804
uuugcagggauccucaaac

SEQ ID NO: 1225806 - RNA, 19 nt, Artificial Sequence
  Description of Artificial Sequence: Synthetic oligonucleotide
  Sense strand starting at position 3344 of SEQ ID NO: 917316
uugacagagucaucacuau

SEQ ID NO: 1225807 - RNA, 19 nt, Artificial Sequence
  Description of Artificial Sequence: Synthetic oligonucleotide
  Antisense strand to SEQ ID NO: 1225806
auagugaugacucugucaa

SEQ ID NO: 1225808 - RNA, 19 nt, Artificial Sequence
  Description of Artificial Sequence: Synthetic oligonucleotide
  Sense strand starting at position 3427 of SEQ ID NO: 917316
accauagauguauggacua

SEQ ID NO: 1225809 - RNA, 19 nt, Artificial Sequence
  Description of Artificial Sequence: Synthetic oligonucleotide
  Antisense strand to SEQ ID NO: 1225808
uaguccauacaucuauggu

SEQ ID NO: 1225810 - RNA, 19 nt, Artificial Sequence
  Description of Artificial Sequence: Synthetic oligonucleotide
  Sense strand starting at position 3452 of SEQ ID NO: 917316
augagaaauaagugguucu

SEQ ID NO: 1225811 - RNA, 19 nt, Artificial Sequence
  Description of Artificial Sequence: Synthetic oligonucleotide
  Antisense strand to SEQ ID NO: 1225810
agaaccacuuauuucucau

SEQ ID NO: 1225812 - RNA, 19 nt, Artificial Sequence
  Description of Artificial Sequence: Synthetic oligonucleotide
  Sense strand starting at position 3496 of SEQ ID NO: 917316
gugacacauggcuagacuu

SEQ ID NO: 1225813 - RNA, 19 nt, Artificial Sequence
  Description of Artificial Sequence: Synthetic oligonucleotide
  Antisense strand to SEQ ID NO: 1225812
aagucuagccaugugucac

SEQ ID NO: 1225814 - RNA, 19 nt, Artificial Sequence
  Description of Artificial Sequence: Synthetic oligonucleotide
  Sense strand starting at position 3569 of SEQ ID NO: 917316
agagaagauucuguaccau

SEQ ID NO: 1225815 - RNA, 19 nt, Artificial Sequence
  Description of Artificial Sequence: Synthetic oligonucleotide
  Antisense strand to SEQ ID NO: 1225814
augguacagaaucuucucu

SEQ ID NO: 1225816 - RNA, 19 nt, Artificial Sequence
  Description of Artificial Sequence: Synthetic oligonucleotide
  Sense strand starting at position 3581 of SEQ ID NO: 917316
guaccauucuaugcaaaga

SEQ ID NO: 1225817 - RNA, 19 nt, Artificial Sequence
  Description of Artificial Sequence: Synthetic oligonucleotide
  Antisense strand to SEQ ID NO: 1225816
ucuuugcauagaaugguac

SEQ ID NO: 1225818 - RNA, 19 nt, Artificial Sequence
  Description of Artificial Sequence: Synthetic oligonucleotide
  Sense strand starting at position 3735 of SEQ ID NO: 917316
cccucugaguugucaggaa

SEQ ID NO: 1225819 - RNA, 19 nt, Artificial Sequence
  Description of Artificial Sequence: Synthetic oligonucleotide
  Antisense strand to SEQ ID NO: 1225818
uuccugacaacucagaggg

SEQ ID NO: 1225820 - RNA, 19 nt, Artificial Sequence
  Description of Artificial Sequence: Synthetic oligonucleotide
  Sense strand starting at position 3828 of SEQ ID NO: 917317
gauagacaccuuugguuau

SEQ ID NO: 1225821 - RNA, 19 nt, Artificial Sequence
  Description of Artificial Sequence: Synthetic oligonucleotide
  Antisense strand to SEQ ID NO: 1225820
auaaccaaaggugucuauc

SEQ ID NO: 1225822 - RNA, 19 nt, Artificial Sequence
  Description of Artificial Sequence: Synthetic oligonucleotide
  Sense strand starting at position 59 of SEQ ID NO: 917317
augugaaugaagugacuca

SEQ ID NO: 1225823 - RNA, 19 nt, Artificial Sequence
  Description of Artificial Sequence: Synthetic oligonucleotide
  Antisense strand to SEQ ID NO: 1225822
ugagucacuucauucacau

SEQ ID NO: 1225824 - RNA, 19 nt, Artificial Sequence
  Description of Artificial Sequence: Synthetic oligonucleotide
  Sense strand starting at position 81 of SEQ ID NO: 917317
guaaauuagcaucaugggu

SEQ ID NO: 1225825 - RNA, 19 nt, Artificial Sequence
  Description of Artificial Sequence: Synthetic oligonucleotide
  Antisense strand to SEQ ID NO: 1225824
acccaugaugcuaauuuac

SEQ ID NO: 1225826 - RNA, 19 nt, Artificial Sequence
  Description of Artificial Sequence: Synthetic oligonucleotide
  Sense strand starting at position 150 of SEQ ID NO: 917317
guucuaccacuuugaagga

SEQ ID NO: 1225827 - RNA, 19 nt, Artificial Sequence
  Description of Artificial Sequence: Synthetic oligonucleotide
  Antisense strand to SEQ ID NO: 1225826
uccuucaaagugguagaac

SEQ ID NO: 1225828 - RNA, 19 nt, Artificial Sequence
  Description of Artificial Sequence: Synthetic oligonucleotide
  Sense strand starting at position 165 of SEQ ID NO: 917317
aggagaauucucugcccug

SEQ ID NO: 1225829 - RNA, 19 nt, Artificial Sequence
  Description of Artificial Sequence: Synthetic oligonucleotide
  Antisense strand to SEQ ID NO: 1225828
cagggcagagaauucuccu

SEQ ID NO: 1225830 - RNA, 19 nt, Artificial Sequence
  Description of Artificial Sequence: Synthetic oligonucleotide
  Sense strand starting at position 166 of SEQ ID NO: 917317
ggagaauucucugcccuga

SEQ ID NO: 1225831 - RNA, 19 nt, Artificial Sequence
  Description of Artificial Sequence: Synthetic oligonucleotide
  Antisense strand to SEQ ID NO: 1225830
ucagggcagagaauucucc

SEQ ID NO: 1225832 - RNA, 19 nt, Artificial Sequence
  Description of Artificial Sequence: Synthetic oligonucleotide
  Sense strand starting at position 168 of SEQ ID NO: 917317
agaauucucugcccugaca

SEQ ID NO: 1225833 - RNA, 19 nt, Artificial Sequence
  Description of Artificial Sequence: Synthetic oligonucleotide
  Antisense strand to SEQ ID NO: 1225832
ugucagggcagagaauucu

SEQ ID NO: 1225834 - RNA, 19 nt, Artificial Sequence
  Description of Artificial Sequence: Synthetic oligonucleotide
  Sense strand starting at position 209 of SEQ ID NO: 917317
cugggaccucagugaacuu

SEQ ID NO: 1225835 - RNA, 19 nt, Artificial Sequence
  Description of Artificial Sequence: Synthetic oligonucleotide
  Antisense strand to SEQ ID NO: 1225834
aaguucacugaggucccag

SEQ ID NO: 1225836 - RNA, 19 nt, Artificial Sequence
  Description of Artificial Sequence: Synthetic oligonucleotide
  Sense strand starting at position 228 of SEQ ID NO: 917317
gcaagacgccucuaauaaa

SEQ ID NO: 1225837 - RNA, 19 nt, Artificial Sequence
  Description of Artificial Sequence: Synthetic oligonucleotide
  Antisense strand to SEQ ID NO: 1225836
uuuauuagaggcgucuugc

SEQ ID NO: 1225838 - RNA, 19 nt, Artificial Sequence
  Description of Artificial Sequence: Synthetic oligonucleotide
  Sense strand starting at position 327 of SEQ ID NO: 917317
gagggagcccuguagcuuu

SEQ ID NO: 1225839 - RNA, 19 nt, Artificial Sequence
  Description of Artificial Sequence: Synthetic oligonucleotide
  Antisense strand to SEQ ID NO: 1225838
aaagcuacagggcucccuc

SEQ ID NO: 1225840 - RNA, 19 nt, Artificial Sequence
  Description of Artificial Sequence: Synthetic oligonucleotide
  Sense strand starting at position 417 of SEQ ID NO: 917317
ucugaauucugguuuagag

SEQ ID NO: 1225841 - RNA, 19 nt, Artificial Sequence
  Description of Artificial Sequence: Synthetic oligonucleotide
  Antisense strand to SEQ ID NO: 1225840
cucuaaaccagaauucaga

SEQ ID NO: 1225842 - RNA, 19 nt, Artificial Sequence
  Description of Artificial Sequence: Synthetic oligonucleotide
  Sense strand starting at position 493 of SEQ ID NO: 917317
gggaagaagcggugauuga

SEQ ID NO: 1225843 - RNA, 19 nt, Artificial Sequence
  Description of Artificial Sequence: Synthetic oligonucleotide
  Antisense strand to SEQ ID NO: 1225842
ucaaucaccgcuucuuccc

SEQ ID NO: 1225844 - RNA, 19 nt, Artificial Sequence
  Description of Artificial Sequence: Synthetic oligonucleotide
  Sense strand starting at position 521 of SEQ ID NO: 917317
acgauugcucuggaguaaa

SEQ ID NO: 1225845 - RNA, 19 nt, Artificial Sequence
  Description of Artificial Sequence: Synthetic oligonucleotide
  Antisense strand to SEQ ID NO: 1225844
uuuacuccagagcaaucgu

SEQ ID NO: 1225846 - RNA, 19 nt, Artificial Sequence
  Description of Artificial Sequence: Synthetic oligonucleotide
  Sense strand starting at position 644 of SEQ ID NO: 917317
acgauuaaccucgagagca

SEQ ID NO: 1225847 - RNA, 19 nt, Artificial Sequence
  Description of Artificial Sequence: Synthetic oligonucleotide
  Antisense strand to SEQ ID NO: 1225846
ugcucucgagguuaaucgu

SEQ ID NO: 1225848 - RNA, 19 nt, Artificial Sequence
  Description of Artificial Sequence: Synthetic oligonucleotide
  Sense strand starting at position 646 of SEQ ID NO: 917317
gauuaaccucgagagcaua

SEQ ID NO: 1225849 - RNA, 19 nt, Artificial Sequence
  Description of Artificial Sequence: Synthetic oligonucleotide
  Antisense strand to SEQ ID NO: 1225848
uaugcucucgagguuaauc

SEQ ID NO: 1225850 - RNA, 19 nt, Artificial Sequence
  Description of Artificial Sequence: Synthetic oligonucleotide
  Sense strand starting at position 1003 of SEQ ID NO: 917317
aagaguaaguaggcugauu

SEQ ID NO: 1225851 - RNA, 19 nt, Artificial Sequence
  Description of Artificial Sequence: Synthetic oligonucleotide
  Antisense strand to SEQ ID NO: 1225850
aaucagccuacuuacucuu

SEQ ID NO: 1225852 - RNA, 19 nt, Artificial Sequence
  Description of Artificial Sequence: Synthetic oligonucleotide
  Sense strand starting at position 1115 of SEQ ID NO: 917317
auacacguauucucucaua

SEQ ID NO: 1225853 - RNA, 19 nt, Artificial Sequence
  Description of Artificial Sequence: Synthetic oligonucleotide
  Antisense strand to SEQ ID NO: 1225852
uaugagagaauacguguau

SEQ ID NO: 1225854 - RNA, 19 nt, Artificial Sequence
  Description of Artificial Sequence: Synthetic oligonucleotide
  Sense strand starting at position 1143 of SEQ ID NO: 917317
gagguucuacaacgauaaa

SEQ ID NO: 1225855 - RNA, 19 nt, Artificial Sequence
  Description of Artificial Sequence: Synthetic oligonucleotide
  Antisense strand to SEQ ID NO: 1225854
uuuaucguuguagaaccuc

SEQ ID NO: 1225856 - RNA, 19 nt, Artificial Sequence
  Description of Artificial Sequence: Synthetic oligonucleotide
  Sense strand starting at position 1192 of SEQ ID NO: 917317
ucauuuauucucugugcua

SEQ ID NO: 1225857 - RNA, 19 nt, Artificial Sequence
  Description of Artificial Sequence: Synthetic oligonucleotide
  Antisense strand to SEQ ID NO: 1225856
uagcacagagaauaaauga

SEQ ID NO: 1225858 - RNA, 19 nt, Artificial Sequence
  Description of Artificial Sequence: Synthetic oligonucleotide
  Sense strand starting at position 1194 of SEQ ID NO: 917317
auuuauucucugugcuauu

SEQ ID NO: 1225859 - RNA, 19 nt, Artificial Sequence
  Description of Artificial Sequence: Synthetic oligonucleotide
  Antisense strand to SEQ ID NO: 1225858
aauagcacagagaauaaau

SEQ ID NO: 1225860 - RNA, 19 nt, Artificial Sequence
  Description of Artificial Sequence: Synthetic oligonucleotide
  Sense strand starting at position 1262 of SEQ ID NO: 917317
uuacguaaacaaugcagua

SEQ ID NO: 1225861 - RNA, 19 nt, Artificial Sequence
  Description of Artificial Sequence: Synthetic oligonucleotide
  Antisense strand to SEQ ID NO: 1225860
uacugcauuguuuacguaa

SEQ ID NO: 1225862 - RNA, 19 nt, Artificial Sequence
  Description of Artificial Sequence: Synthetic oligonucleotide
  Sense strand starting at position 1407 of SEQ ID NO: 917317
cugaauccaugcccagaaa

SEQ ID NO: 1225863 - RNA, 19 nt, Artificial Sequence
  Description of Artificial Sequence: Synthetic oligonucleotide
  Antisense strand to SEQ ID NO: 1225862
uuucugggcauggauucag

SEQ ID NO: 1225864 - RNA, 19 nt, Artificial Sequence
  Description of Artificial Sequence: Synthetic oligonucleotide
  Sense strand starting at position 1757 of SEQ ID NO: 917317
uggaaauucuugucacuga

SEQ ID NO: 1225865 - RNA, 19 nt, Artificial Sequence
  Description of Artificial Sequence: Synthetic oligonucleotide
  Antisense strand to SEQ ID NO: 1225864
ucagugacaagaauuucca

SEQ ID NO: 1225866 - RNA, 19 nt, Artificial Sequence
  Description of Artificial Sequence: Synthetic oligonucleotide
  Sense strand starting at position 1787 of SEQ ID NO: 917317
agaugucaucgccaggaaa

SEQ ID NO: 1225867 - RNA, 19 nt, Artificial Sequence
  Description of Artificial Sequence: Synthetic oligonucleotide
  Antisense strand to SEQ ID NO: 1225866
uuuccuggcgaugacaucu

SEQ ID NO: 1225868 - RNA, 19 nt, Artificial Sequence
  Description of Artificial Sequence: Synthetic oligonucleotide
  Sense strand starting at position 2109 of SEQ ID NO: 917317
ggaaaugacuccuuguuag

SEQ ID NO: 1225869 - RNA, 19 nt, Artificial Sequence
  Description of Artificial Sequence: Synthetic oligonucleotide
  Antisense strand to SEQ ID NO: 1225868
cuaacaaggagucauuucc

SEQ ID NO: 1225870 - RNA, 19 nt, Artificial Sequence
  Description of Artificial Sequence: Synthetic oligonucleotide
  Sense strand starting at position 2244 of SEQ ID NO: 917317
ggauuagcauuugaugaac

SEQ ID NO: 1225871 - RNA, 19 nt, Artificial Sequence
  Description of Artificial Sequence: Synthetic oligonucleotide
  Antisense strand to SEQ ID NO: 1225870
guucaucaaaugcuaaucc

SEQ ID NO: 1225872 - RNA, 19 nt, Artificial Sequence
  Description of Artificial Sequence: Synthetic oligonucleotide
  Sense strand starting at position 2246 of SEQ ID NO: 917317
auuagcauuugaugaacaa

SEQ ID NO: 1225873 - RNA, 19 nt, Artificial Sequence
  Description of Artificial Sequence: Synthetic oligonucleotide
  Antisense strand to SEQ ID NO: 1225872
uuguucaucaaaugcuaau

SEQ ID NO: 1225874 - RNA, 19 nt, Artificial Sequence
  Description of Artificial Sequence: Synthetic oligonucleotide
  Sense strand starting at position 2305 of SEQ ID NO: 917317
aucuaccaguccucauaga

SEQ ID NO: 1225875 - RNA, 19 nt, Artificial Sequence
  Description of Artificial Sequence: Synthetic oligonucleotide
  Antisense strand to SEQ ID NO: 1225874
ucuaugaggacugguagau

SEQ ID NO: 1225876 - RNA, 19 nt, Artificial Sequence
  Description of Artificial Sequence: Synthetic oligonucleotide
  Sense strand starting at position 2543 of SEQ ID NO: 917317
caaagaaguggguguugga

SEQ ID NO: 1225877 - RNA, 19 nt, Artificial Sequence
  Description of Artificial Sequence: Synthetic oligonucleotide
  Antisense strand to SEQ ID NO: 1225876
uccaacacccacuucuuug

SEQ ID NO: 1225878 - RNA, 19 nt, Artificial Sequence
  Description of Artificial Sequence: Synthetic oligonucleotide
  Sense strand starting at position 2585 of SEQ ID NO: 917317
ugugcucauuugccaaacu

SEQ ID NO: 1225879 - RNA, 19 nt, Artificial Sequence
  Description of Artificial Sequence: Synthetic oligonucleotide
  Antisense strand to SEQ ID NO: 1225878
aguuuggcaaaugagcaca

SEQ ID NO: 1225880 - RNA, 19 nt, Artificial Sequence
  Description of Artificial Sequence: Synthetic oligonucleotide
  Sense strand starting at position 2724 of SEQ ID NO: 917317
agcaucuauccaugagaag

SEQ ID NO: 1225881 - RNA, 19 nt, Artificial Sequence
  Description of Artificial Sequence: Synthetic oligonucleotide
  Antisense strand to SEQ ID NO: 1225880
cuucucauggauagaugcu

SEQ ID NO: 1225882 - RNA, 19 nt, Artificial Sequence
  Description of Artificial Sequence: Synthetic oligonucleotide
  Sense strand starting at position 2745 of SEQ ID NO: 917317
acgggagucaaaggcuuaa

SEQ ID NO: 1225883 - RNA, 19 nt, Artificial Sequence
  Description of Artificial Sequence: Synthetic oligonucleotide
  Antisense strand to SEQ ID NO: 1225882
uuaagccuuugacucccgu

SEQ ID NO: 1225884 - RNA, 19 nt, Artificial Sequence
  Description of Artificial Sequence: Synthetic oligonucleotide
  Sense strand starting at position 2749 of SEQ ID NO: 917317
gagucaaaggcuuaacguu

SEQ ID NO: 1225885 - RNA, 19 nt, Artificial Sequence
  Description of Artificial Sequence: Synthetic oligonucleotide
  Antisense strand to SEQ ID NO: 1225884
aacguuaagccuuugacuc

SEQ ID NO: 1225886 - RNA, 19 nt, Artificial Sequence
  Description of Artificial Sequence: Synthetic oligonucleotide
  Sense strand starting at position 2755 of SEQ ID NO: 917317
aaggcuuaacguugaaucu

SEQ ID NO: 1225887 - RNA, 19 nt, Artificial Sequence
  Description of Artificial Sequence: Synthetic oligonucleotide
  Antisense strand to SEQ ID NO: 1225886
agauucaacguuaagccuu

SEQ ID NO: 1225888 - RNA, 19 nt, Artificial Sequence
  Description of Artificial Sequence: Synthetic oligonucleotide
  Sense strand starting at position 2824 of SEQ ID NO: 917317
aaaguaagccauugugauu

SEQ ID NO: 1225889 - RNA, 19 nt, Artificial Sequence
  Description of Artificial Sequence: Synthetic oligonucleotide
  Antisense strand to SEQ ID NO: 1225888
aaucacaauggcuuacuuu

SEQ ID NO: 1225890 - RNA, 19 nt, Artificial Sequence
  Description of Artificial Sequence: Synthetic oligonucleotide
  Sense strand starting at position 2951 of SEQ ID NO: 917317
ucagacaaaugggaauuaa

SEQ ID NO: 1225891 - RNA, 19 nt, Artificial Sequence
  Description of Artificial Sequence: Synthetic oligonucleotide
  Antisense strand to SEQ ID NO: 1225890
uuaauucccauuugucuga

SEQ ID NO: 1225892 - RNA, 19 nt, Artificial Sequence
  Description of Artificial Sequence: Synthetic oligonucleotide
  Sense strand starting at position 3150 of SEQ ID NO: 917317
uguggucccauguaaauca

SEQ ID NO: 1225893 - RNA, 19 nt, Artificial Sequence
  Description of Artificial Sequence: Synthetic oligonucleotide
  Antisense strand to SEQ ID NO: 1225892
ugauuuacaugggaccaca

SEQ ID NO: 1225894 - RNA, 19 nt, Artificial Sequence
  Description of Artificial Sequence: Synthetic oligonucleotide
  Sense strand starting at position 3256 of SEQ ID NO: 917317
cuaguucuaugauugcauu

SEQ ID NO: 1225895 - RNA, 19 nt, Artificial Sequence
  Description of Artificial Sequence: Synthetic oligonucleotide
  Antisense strand to SEQ ID NO: 1225894
aaugcaaucauagaacuag

SEQ ID NO: 1225896 - RNA, 19 nt, Artificial Sequence
  Description of Artificial Sequence: Synthetic oligonucleotide
  Sense strand starting at position 3290 of SEQ ID NO: 917317
uuauuucuuccagguguca

SEQ ID NO: 1225897 - RNA, 19 nt, Artificial Sequence
  Description of Artificial Sequence: Synthetic oligonucleotide
  Antisense strand to SEQ ID NO: 1225896
ugacaccuggaagaaauaa

SEQ ID NO: 1225898 - RNA, 19 nt, Artificial Sequence
  Description of Artificial Sequence: Synthetic oligonucleotide
  Sense strand starting at position 3305 of SEQ ID NO: 917317
gucaucagucccuaugaga

SEQ ID NO: 1225899 - RNA, 19 nt, Artificial Sequence
  Description of Artificial Sequence: Synthetic oligonucleotide
  Antisense strand to SEQ ID NO: 1225898
ucucauagggacugaugac

SEQ ID NO: 1225900 - RNA, 19 nt, Artificial Sequence
  Description of Artificial Sequence: Synthetic oligonucleotide
  Sense strand starting at position 3379 of SEQ ID NO: 917318
ugcaauguacgugaauaua

SEQ ID NO: 1225901 - RNA, 19 nt, Artificial Sequence
  Description of Artificial Sequence: Synthetic oligonucleotide
  Antisense strand to SEQ ID NO: 1225900
uauauucacguacauugca

SEQ ID NO: 1225902 - RNA, 19 nt, Artificial Sequence
  Description of Artificial Sequence: Synthetic oligonucleotide
  Sense strand starting at position 383 of SEQ ID NO: 917318
acugaacuccuuggcacaa

SEQ ID NO: 1225903 - RNA, 19 nt, Artificial Sequence
  Description of Artificial Sequence: Synthetic oligonucleotide
  Antisense strand to SEQ ID NO: 1225902
uugugccaaggaguucagu

SEQ ID NO: 1225904 - RNA, 19 nt, Artificial Sequence
  Description of Artificial Sequence: Synthetic oligonucleotide
  Sense strand starting at position 490 of SEQ ID NO: 917318
uaaggaauaucaguugcca

SEQ ID NO: 1225905 - RNA, 19 nt, Artificial Sequence
  Description of Artificial Sequence: Synthetic oligonucleotide
  Antisense strand to SEQ ID NO: 1225904
uggcaacugauauuccuua

SEQ ID NO: 1225906 - RNA, 19 nt, Artificial Sequence
  Description of Artificial Sequence: Synthetic oligonucleotide
  Sense strand starting at position 555 of SEQ ID NO: 917318
guaucugaauguuccuuga

SEQ ID NO: 1225907 - RNA, 19 nt, Artificial Sequence
  Description of Artificial Sequence: Synthetic oligonucleotide
  Antisense strand to SEQ ID NO: 1225906
ucaaggaacauucagauac

SEQ ID NO: 1225908 - RNA, 19 nt, Artificial Sequence
  Description of Artificial Sequence: Synthetic oligonucleotide
  Sense strand starting at position 557 of SEQ ID NO: 917318
aucugaauguuccuugagu

SEQ ID NO: 1225909 - RNA, 19 nt, Artificial Sequence
  Description of Artificial Sequence: Synthetic oligonucleotide
  Antisense strand to SEQ ID NO: 1225908
acucaaggaacauucagau

SEQ ID NO: 1225910 - RNA, 19 nt, Artificial Sequence
  Description of Artificial Sequence: Synthetic oligonucleotide
  Sense strand starting at position 558 of SEQ ID NO: 917318
ucugaauguuccuugaguu

SEQ ID NO: 1225911 - RNA, 19 nt, Artificial Sequence
  Description of Artificial Sequence: Synthetic oligonucleotide
  Antisense strand to SEQ ID NO: 1225910
aacucaaggaacauucaga

SEQ ID NO: 1225912 - RNA, 19 nt, Artificial Sequence
  Description of Artificial Sequence: Synthetic oligonucleotide
  Sense strand starting at position 581 of SEQ ID NO: 917318
gcuagaaaggcauaaugua

SEQ ID NO: 1225913 - RNA, 19 nt, Artificial Sequence
  Description of Artificial Sequence: Synthetic oligonucleotide
  Antisense strand to SEQ ID NO: 1225912
uacauuaugccuuucuagc

SEQ ID NO: 1225914 - RNA, 19 nt, Artificial Sequence
  Description of Artificial Sequence: Synthetic oligonucleotide
  Sense strand starting at position 1055 of SEQ ID NO: 917318
ggacucuugucuuuaauag

SEQ ID NO: 1225915 - RNA, 19 nt, Artificial Sequence
  Description of Artificial Sequence: Synthetic oligonucleotide
  Antisense strand to SEQ ID NO: 1225914
cuauuaaagacaagagucc

SEQ ID NO: 1225916 - RNA, 19 nt, Artificial Sequence
  Description of Artificial Sequence: Synthetic oligonucleotide
  Sense strand starting at position 1063 of SEQ ID NO: 917318
gucuuuaauagauggaggu

SEQ ID NO: 1225917 - RNA, 19 nt, Artificial Sequence
  Description of Artificial Sequence: Synthetic oligonucleotide
  Antisense strand to SEQ ID NO: 1225916
accuccaucuauuaaagac

SEQ ID NO: 1225918 - RNA, 19 nt, Artificial Sequence
  Description of Artificial Sequence: Synthetic oligonucleotide
  Sense strand starting at position 1064 of SEQ ID NO: 917318
ucuuuaauagauggagguu

SEQ ID NO: 1225919 - RNA, 19 nt, Artificial Sequence
  Description of Artificial Sequence: Synthetic oligonucleotide
  Antisense strand to SEQ ID NO: 1225918
aaccuccaucuauuaaaga

SEQ ID NO: 1225920 - RNA, 19 nt, Artificial Sequence
  Description of Artificial Sequence: Synthetic oligonucleotide
  Sense strand starting at position 1142 of SEQ ID NO: 917318
gcaauaauguuccuuaaag

SEQ ID NO: 1225921 - RNA, 19 nt, Artificial Sequence
  Description of Artificial Sequence: Synthetic oligonucleotide
  Antisense strand to SEQ ID NO: 1225920
cuuuaaggaacauuauugc

SEQ ID NO: 1225922 - RNA, 19 nt, Artificial Sequence
  Description of Artificial Sequence: Synthetic oligonucleotide
  Sense strand starting at position 1203 of SEQ ID NO: 917318
ugacacauucgugacuuaa

SEQ ID NO: 1225923 - RNA, 19 nt, Artificial Sequence
  Description of Artificial Sequence: Synthetic oligonucleotide
  Antisense strand to SEQ ID NO: 1225922
uuaagucacgaauguguca

SEQ ID NO: 1225924 - RNA, 19 nt, Artificial Sequence
  Description of Artificial Sequence: Synthetic oligonucleotide
  Sense strand starting at position 1276 of SEQ ID NO: 917318
aguugcaaagcuuaacaaa

SEQ ID NO: 1225925 - RNA, 19 nt, Artificial Sequence
  Description of Artificial Sequence: Synthetic oligonucleotide
  Antisense strand to SEQ ID NO: 1225924
uuuguuaagcuuugcaacu

SEQ ID NO: 1225926 - RNA, 19 nt, Artificial Sequence
  Description of Artificial Sequence: Synthetic oligonucleotide
  Sense strand starting at position 2522 of SEQ ID NO: 917318
gaacgauaccuccaguccu

SEQ ID NO: 1225927 - RNA, 19 nt, Artificial Sequence
  Description of Artificial Sequence: Synthetic oligonucleotide
  Antisense strand to SEQ ID NO: 1225926
aggacuggagguaucguuc

SEQ ID NO: 1225928 - RNA, 19 nt, Artificial Sequence
  Description of Artificial Sequence: Synthetic oligonucleotide
  Sense strand starting at position 2544 of SEQ ID NO: 917318
uguugcauuggugauaagu

SEQ ID NO: 1225929 - RNA, 19 nt, Artificial Sequence
  Description of Artificial Sequence: Synthetic oligonucleotide
  Antisense strand to SEQ ID NO: 1225928
acuuaucaccaaugcaaca

SEQ ID NO: 1225930 - RNA, 19 nt, Artificial Sequence
  Description of Artificial Sequence: Synthetic oligonucleotide
  Sense strand starting at position 2550 of SEQ ID NO: 917318
auuggugauaagugaugua

SEQ ID NO: 1225931 - RNA, 19 nt, Artificial Sequence
  Description of Artificial Sequence: Synthetic oligonucleotide
  Antisense strand to SEQ ID NO: 1225930
uacaucacuuaucaccaau

SEQ ID NO: 1225932 - RNA, 19 nt, Artificial Sequence
  Description of Artificial Sequence: Synthetic oligonucleotide
  Sense strand starting at position 2555 of SEQ ID NO: 917318
ugauaagugauguagcuga

SEQ ID NO: 1225933 - RNA, 19 nt, Artificial Sequence
  Description of Artificial Sequence: Synthetic oligonucleotide
  Antisense strand to SEQ ID NO: 1225932
ucagcuacaucacuuauca

SEQ ID NO: 1225934 - RNA, 19 nt, Artificial Sequence
  Description of Artificial Sequence: Synthetic oligonucleotide
  Sense strand starting at position 2572 of SEQ ID NO: 917318
gaggcagacuacuugguuu

SEQ ID NO: 1225935 - RNA, 19 nt, Artificial Sequence
  Description of Artificial Sequence: Synthetic oligonucleotide
  Antisense strand to SEQ ID NO: 1225934
aaaccaaguagucugccuc

SEQ ID NO: 1225936 - RNA, 19 nt, Artificial Sequence
  Description of Artificial Sequence: Synthetic oligonucleotide
  Sense strand starting at position 2857 of SEQ ID NO: 917318
guggaucccuuuguuauua

SEQ ID NO: 1225937 - RNA, 19 nt, Artificial Sequence
  Description of Artificial Sequence: Synthetic oligonucleotide
  Antisense strand to SEQ ID NO: 1225936
uaauaacaaagggauccac

SEQ ID NO: 1225938 - RNA, 19 nt, Artificial Sequence
  Description of Artificial Sequence: Synthetic oligonucleotide
  Sense strand starting at position 2858 of SEQ ID NO: 917318
uggaucccuuuguuauuau

SEQ ID NO: 1225939 - RNA, 19 nt, Artificial Sequence
  Description of Artificial Sequence: Synthetic oligonucleotide
  Antisense strand to SEQ ID NO: 1225938
auaauaacaaagggaucca

SEQ ID NO: 1225940 - RNA, 19 nt, Artificial Sequence
  Description of Artificial Sequence: Synthetic oligonucleotide
  Sense strand starting at position 3033 of SEQ ID NO: 917318
gccagaccucaagguuuga

SEQ ID NO: 1225941 - RNA, 19 nt, Artificial Sequence
  Description of Artificial Sequence: Synthetic oligonucleotide
  Antisense strand to SEQ ID NO: 1225940
ucaaaccuugaggucuggc

SEQ ID NO: 1225942 - RNA, 19 nt, Artificial Sequence
  Description of Artificial Sequence: Synthetic oligonucleotide
  Sense strand starting at position 3037 of SEQ ID NO: 917318
gaccucaagguuugaaucu

SEQ ID NO: 1225943 - RNA, 19 nt, Artificial Sequence
  Description of Artificial Sequence: Synthetic oligonucleotide
  Antisense strand to SEQ ID NO: 1225942
agauucaaaccuugagguc

SEQ ID NO: 1225944 - RNA, 19 nt, Artificial Sequence
  Description of Artificial Sequence: Synthetic oligonucleotide
  Sense strand starting at position 3055 of SEQ ID NO: 917318
uuagcucuaccaggaugau

SEQ ID NO: 1225945 - RNA, 19 nt, Artificial Sequence
  Description of Artificial Sequence: Synthetic oligonucleotide
  Antisense strand to SEQ ID NO: 1225944
aucauccugguagagcuaa

SEQ ID NO: 1225946 - RNA, 19 nt, Artificial Sequence
  Description of Artificial Sequence: Synthetic oligonucleotide
  Sense strand starting at position 3065 of SEQ ID NO: 917318
caggaugaucacugugguu

SEQ ID NO: 1225947 - RNA, 19 nt, Artificial Sequence
  Description of Artificial Sequence: Synthetic oligonucleotide
  Antisense strand to SEQ ID NO: 1225946
aaccacagugaucauccug

SEQ ID NO: 1225948 - RNA, 19 nt, Artificial Sequence
  Description of Artificial Sequence: Synthetic oligonucleotide
  Sense strand starting at position 3067 of SEQ ID NO: 917318
ggaugaucacugugguuug

SEQ ID NO: 1225949 - RNA, 19 nt, Artificial Sequence
  Description of Artificial Sequence: Synthetic oligonucleotide
  Antisense strand to SEQ ID NO: 1225948
caaaccacagugaucaucc

SEQ ID NO: 1225950 - RNA, 19 nt, Artificial Sequence
  Description of Artificial Sequence: Synthetic oligonucleotide
  Sense strand starting at position 3146 of SEQ ID NO: 917318
gguagaugaucacugcuau

SEQ ID NO: 1225951 - RNA, 19 nt, Artificial Sequence
  Description of Artificial Sequence: Synthetic oligonucleotide
  Antisense strand to SEQ ID NO: 1225950
auagcagugaucaucuacc

SEQ ID NO: 1225952 - RNA, 19 nt, Artificial Sequence
  Description of Artificial Sequence: Synthetic oligonucleotide
  Sense strand starting at position 3147 of SEQ ID NO: 917318
guagaugaucacugcuauu

SEQ ID NO: 1225953 - RNA, 19 nt, Artificial Sequence
  Description of Artificial Sequence: Synthetic oligonucleotide
  Antisense strand to SEQ ID NO: 1225952
aauagcagugaucaucuac

SEQ ID NO: 1225954 - RNA, 19 nt, Artificial Sequence
  Description of Artificial Sequence: Synthetic oligonucleotide
  Sense strand starting at position 3370 of SEQ ID NO: 917318
cugaauguccaugauucca

SEQ ID NO: 1225955 - RNA, 19 nt, Artificial Sequence
  Description of Artificial Sequence: Synthetic oligonucleotide
  Antisense strand to SEQ ID NO: 1225954
uggaaucauggacauucag

SEQ ID NO: 1225956 - RNA, 19 nt, Artificial Sequence
  Description of Artificial Sequence: Synthetic oligonucleotide
  Sense strand starting at position 3372 of SEQ ID NO: 917318
gaauguccaugauuccaga

SEQ ID NO: 1225957 - RNA, 19 nt, Artificial Sequence
  Description of Artificial Sequence: Synthetic oligonucleotide
  Antisense strand to SEQ ID NO: 1225956
ucuggaaucauggacauuc

SEQ ID NO: 1225958 - RNA, 19 nt, Artificial Sequence
  Description of Artificial Sequence: Synthetic oligonucleotide
  Sense strand starting at position 3396 of SEQ ID NO: 917318
agcccaucuuaaccugaga

SEQ ID NO: 1225959 - RNA, 19 nt, Artificial Sequence
  Description of Artificial Sequence: Synthetic oligonucleotide
  Antisense strand to SEQ ID NO: 1225958
ucucagguuaagaugggcu

SEQ ID NO: 1225960 - RNA, 19 nt, Artificial Sequence
  Description of Artificial Sequence: Synthetic oligonucleotide
  Sense strand starting at position 3531 of SEQ ID NO: 917318
uuguuuccuggugauaaua

SEQ ID NO: 1225961 - RNA, 19 nt, Artificial Sequence
  Description of Artificial Sequence: Synthetic oligonucleotide
  Antisense strand to SEQ ID NO: 1225960
uauuaucaccaggaaacaa

SEQ ID NO: 1225962 - RNA, 19 nt, Artificial Sequence
  Description of Artificial Sequence: Synthetic oligonucleotide
  Sense strand starting at position 3575 of SEQ ID NO: 917318
cuggaugucuuaccuugua

SEQ ID NO: 1225963 - RNA, 19 nt, Artificial Sequence
  Description of Artificial Sequence: Synthetic oligonucleotide
  Antisense strand to SEQ ID NO: 1225962
uacaagguaagacauccag

SEQ ID NO: 1225964 - RNA, 19 nt, Artificial Sequence
  Description of Artificial Sequence: Synthetic oligonucleotide
  Sense strand starting at position 3680 of SEQ ID NO: 917318
uggcaucuauuacucagua

SEQ ID NO: 1225965 - RNA, 19 nt, Artificial Sequence
  Description of Artificial Sequence: Synthetic oligonucleotide
  Antisense strand to SEQ ID NO: 1225964
uacugaguaauagaugcca

SEQ ID NO: 1225966 - RNA, 19 nt, Artificial Sequence
  Description of Artificial Sequence: Synthetic oligonucleotide
  Sense strand starting at position 3681 of SEQ ID NO: 917318
ggcaucuauuacucaguau

SEQ ID NO: 1225967 - RNA, 19 nt, Artificial Sequence
  Description of Artificial Sequence: Synthetic oligonucleotide
  Antisense strand to SEQ ID NO: 1225966
auacugaguaauagaugcc

SEQ ID NO: 1225968 - RNA, 19 nt, Artificial Sequence
  Description of Artificial Sequence: Synthetic oligonucleotide
  Sense strand starting at position 3699 of SEQ ID NO: 917318
uugccuuaagcccaagaua

SEQ ID NO: 1225969 - RNA, 19 nt, Artificial Sequence
  Description of Artificial Sequence: Synthetic oligonucleotide
  Antisense strand to SEQ ID NO: 1225968
uaucuugggcuuaaggcaa

SEQ ID NO: 1225970 - RNA, 19 nt, Artificial Sequence
  Description of Artificial Sequence: Synthetic oligonucleotide
  Sense strand starting at position 3702 of SEQ ID NO: 917318
ccuuaagcccaagauaagu

SEQ ID NO: 1225971 - RNA, 19 nt, Artificial Sequence
  Description of Artificial Sequence: Synthetic oligonucleotide
  Antisense strand to SEQ ID NO: 1225970
acuuaucuugggcuuaagg

SEQ ID NO: 1225972 - RNA, 19 nt, Artificial Sequence
  Description of Artificial Sequence: Synthetic oligonucleotide
  Sense strand starting at position 3707 of SEQ ID NO: 917318
agcccaagauaaguuuaga

SEQ ID NO: 1225973 - RNA, 19 nt, Artificial Sequence
  Description of Artificial Sequence: Synthetic oligonucleotide
  Antisense strand to SEQ ID NO: 1225972
ucuaaacuuaucuugggcu

SEQ ID NO: 1225974 - RNA, 19 nt, Artificial Sequence
  Description of Artificial Sequence: Synthetic oligonucleotide
  Sense strand starting at position 3780 of SEQ ID NO: 917318
acauccuugugggugagau

SEQ ID NO: 1225975 - RNA, 19 nt, Artificial Sequence
  Description of Artificial Sequence: Synthetic oligonucleotide
  Antisense strand to SEQ ID NO: 1225974
aucucacccacaaggaugu

SEQ ID NO: 1225976 - RNA, 19 nt, Artificial Sequence
  Description of Artificial Sequence: Synthetic oligonucleotide
  Sense strand starting at position 3781 of SEQ ID NO: 917318
cauccuugugggugagaug

SEQ ID NO: 1225977 - RNA, 19 nt, Artificial Sequence
  Description of Artificial Sequence: Synthetic oligonucleotide
  Antisense strand to SEQ ID NO: 1225976
caucucacccacaaggaug

SEQ ID NO: 1225978 - RNA, 19 nt, Artificial Sequence
  Description of Artificial Sequence: Synthetic oligonucleotide
  Sense strand starting at position 3864 of SEQ ID NO: 917318
gugaguaaauaagugaaua

SEQ ID NO: 1225979 - RNA, 19 nt, Artificial Sequence
  Description of Artificial Sequence: Synthetic oligonucleotide
  Antisense strand to SEQ ID NO: 1225978
uauucacuuauuuacucac

SEQ ID NO: 1225980 - RNA, 19 nt, Artificial Sequence
  Description of Artificial Sequence: Synthetic oligonucleotide
  Sense strand starting at position 3920 of SEQ ID NO: 917319
cuaugcuuuggccauccaa

SEQ ID NO: 1225981 - RNA, 19 nt, Artificial Sequence
  Description of Artificial Sequence: Synthetic oligonucleotide
  Antisense strand to SEQ ID NO: 1225980
uuggauggccaaagcauag

SEQ ID NO: 1225982 - RNA, 19 nt, Artificial Sequence
  Description of Artificial Sequence: Synthetic oligonucleotide
  Sense strand starting at position 263 of SEQ ID NO: 917319
aggugcuuaacgcauagau

SEQ ID NO: 1225983 - RNA, 19 nt, Artificial Sequence
  Description of Artificial Sequence: Synthetic oligonucleotide
  Antisense strand to SEQ ID NO: 1225982
aucuaugcguuaagcaccu

SEQ ID NO: 1225984 - RNA, 19 nt, Artificial Sequence
  Description of Artificial Sequence: Synthetic oligonucleotide
  Sense strand starting at position 265 of SEQ ID NO: 917319
gugcuuaacgcauagauuu

SEQ ID NO: 1225985 - RNA, 19 nt, Artificial Sequence
  Description of Artificial Sequence: Synthetic oligonucleotide
  Antisense strand to SEQ ID NO: 1225984
aaaucuaugcguuaagcac

SEQ ID NO: 1225986 - RNA, 19 nt, Artificial Sequence
  Description of Artificial Sequence: Synthetic oligonucleotide
  Sense strand starting at position 347 of SEQ ID NO: 917319
ggaugaaguuaagcuagua

SEQ ID NO: 1225987 - RNA, 19 nt, Artificial Sequence
  Description of Artificial Sequence: Synthetic oligonucleotide
  Antisense strand to SEQ ID NO: 1225986
uacuagcuuaacuucaucc

SEQ ID NO: 1225988 - RNA, 19 nt, Artificial Sequence
  Description of Artificial Sequence: Synthetic oligonucleotide
  Sense strand starting at position 519 of SEQ ID NO: 917319
cauauugcucucgggaauu

SEQ ID NO: 1225989 - RNA, 19 nt, Artificial Sequence
  Description of Artificial Sequence: Synthetic oligonucleotide
  Antisense strand to SEQ ID NO: 1225988
aauucccgagagcaauaug

SEQ ID NO: 1225990 - RNA, 19 nt, Artificial Sequence
  Description of Artificial Sequence: Synthetic oligonucleotide
  Sense strand starting at position 521 of SEQ ID NO: 917319
uauugcucucgggaauucu

SEQ ID NO: 1225991 - RNA, 19 nt, Artificial Sequence
  Description of Artificial Sequence: Synthetic oligonucleotide
  Antisense strand to SEQ ID NO: 1225990
agaauucccgagagcaaua

SEQ ID NO: 1225992 - RNA, 19 nt, Artificial Sequence
  Description of Artificial Sequence: Synthetic oligonucleotide
  Sense strand starting at position 539 of SEQ ID NO: 917319
uaacuaucggauuaccagu

SEQ ID NO: 1225993 - RNA, 19 nt, Artificial Sequence
  Description of Artificial Sequence: Synthetic oligonucleotide
  Antisense strand to SEQ ID NO: 1225992
acugguaauccgauaguua

SEQ ID NO: 1225994 - RNA, 19 nt, Artificial Sequence
  Description of Artificial Sequence: Synthetic oligonucleotide
  Sense strand starting at position 545 of SEQ ID NO: 917319
ucggauuaccagugaccau

SEQ ID NO: 1225995 - RNA, 19 nt, Artificial Sequence
  Description of Artificial Sequence: Synthetic oligonucleotide
  Antisense strand to SEQ ID NO: 1225994
auggucacugguaauccga

SEQ ID NO: 1225996 - RNA, 19 nt, Artificial Sequence
  Description of Artificial Sequence: Synthetic oligonucleotide
  Sense strand starting at position 546 of SEQ ID NO: 917319
cggauuaccagugaccaua

SEQ ID NO: 1225997 - RNA, 19 nt, Artificial Sequence
  Description of Artificial Sequence: Synthetic oligonucleotide
  Antisense strand to SEQ ID NO: 1225996
uauggucacugguaauccg

SEQ ID NO: 1225998 - RNA, 19 nt, Artificial Sequence
  Description of Artificial Sequence: Synthetic oligonucleotide
  Sense strand starting at position 641 of SEQ ID NO: 917319
gccgaauaucaugauacaa

SEQ ID NO: 1225999 - RNA, 19 nt, Artificial Sequence
  Description of Artificial Sequence: Synthetic oligonucleotide
  Antisense strand to SEQ ID NO: 1225998
uuguaucaugauauucggc

SEQ ID NO: 1226000 - RNA, 19 nt, Artificial Sequence
  Description of Artificial Sequence: Synthetic oligonucleotide
  Sense strand starting at position 898 of SEQ ID NO: 917319
acccuagacuugucuuuau

SEQ ID NO: 1226001 - RNA, 19 nt, Artificial Sequence
  Description of Artificial Sequence: Synthetic oligonucleotide
  Antisense strand to SEQ ID NO: 1226000
auaaagacaagucuagggu

SEQ ID NO: 1226002 - RNA, 19 nt, Artificial Sequence
  Description of Artificial Sequence: Synthetic oligonucleotide
  Sense strand starting at position 901 of SEQ ID NO: 917319
cuagacuugucuuuauaag

SEQ ID NO: 1226003 - RNA, 19 nt, Artificial Sequence
  Description of Artificial Sequence: Synthetic oligonucleotide
  Antisense strand to SEQ ID NO: 1226002
cuuauaaagacaagucuag

SEQ ID NO: 1226004 - RNA, 19 nt, Artificial Sequence
  Description of Artificial Sequence: Synthetic oligonucleotide
  Sense strand starting at position 1013 of SEQ ID NO: 917319
ucagguaaguccuuuccaa

SEQ ID NO: 1226005 - RNA, 19 nt, Artificial Sequence
  Description of Artificial Sequence: Synthetic oligonucleotide
  Antisense strand to SEQ ID NO: 1226004
uuggaaaggacuuaccuga

SEQ ID NO: 1226006 - RNA, 19 nt, Artificial Sequence
  Description of Artificial Sequence: Synthetic oligonucleotide
  Sense strand starting at position 1099 of SEQ ID NO: 917319
ugaccaauuccauggcacu

SEQ ID NO: 1226007 - RNA, 19 nt, Artificial Sequence
  Description of Artificial Sequence: Synthetic oligonucleotide
  Antisense strand to SEQ ID NO: 1226006
agugccauggaauugguca

SEQ ID NO: 1226008 - RNA, 19 nt, Artificial Sequence
  Description of Artificial Sequence: Synthetic oligonucleotide
  Sense strand starting at position 1121 of SEQ ID NO: 917319
ggaagugagacucgucuca

SEQ ID NO: 1226009 - RNA, 19 nt, Artificial Sequence
  Description of Artificial Sequence: Synthetic oligonucleotide
  Antisense strand to SEQ ID NO: 1226008
ugagacgagucucacuucc

SEQ ID NO: 1226010 - RNA, 19 nt, Artificial Sequence
  Description of Artificial Sequence: Synthetic oligonucleotide
  Sense strand starting at position 1123 of SEQ ID NO: 917319
aagugagacucgucucaac

SEQ ID NO: 1226011 - RNA, 19 nt, Artificial Sequence
  Description of Artificial Sequence: Synthetic oligonucleotide
  Antisense strand to SEQ ID NO: 1226010
guugagacgagucucacuu

SEQ ID NO: 1226012 - RNA, 19 nt, Artificial Sequence
  Description of Artificial Sequence: Synthetic oligonucleotide
  Sense strand starting at position 1167 of SEQ ID NO: 917319
agcccaaagcuuugaaaua

SEQ ID NO: 1226013 - RNA, 19 nt, Artificial Sequence
  Description of Artificial Sequence: Synthetic oligonucleotide
  Antisense strand to SEQ ID NO: 1226012
uauuucaaagcuuugggcu

SEQ ID NO: 1226014 - RNA, 19 nt, Artificial Sequence
  Description of Artificial Sequence: Synthetic oligonucleotide
  Sense strand starting at position 1422 of SEQ ID NO: 917319
ucagauucacguggagcaa

SEQ ID NO: 1226015 - RNA, 19 nt, Artificial Sequence
  Description of Artificial Sequence: Synthetic oligonucleotide
  Antisense strand to SEQ ID NO: 1226014
uugcuccacgugaaucuga

SEQ ID NO: 1226016 - RNA, 19 nt, Artificial Sequence
  Description of Artificial Sequence: Synthetic oligonucleotide
  Sense strand starting at position 2095 of SEQ ID NO: 917319
cuguguccagaguaagaaa

SEQ ID NO: 1226017 - RNA, 19 nt, Artificial Sequence
  Description of Artificial Sequence: Synthetic oligonucleotide
  Antisense strand to SEQ ID NO: 1226016
uuucuuacucuggacacag

SEQ ID NO: 1226018 - RNA, 19 nt, Artificial Sequence
  Description of Artificial Sequence: Synthetic oligonucleotide
  Sense strand starting at position 2177 of SEQ ID NO: 917319
uucgaauuccaguggacau

SEQ ID NO: 1226019 - RNA, 19 nt, Artificial Sequence
  Description of Artificial Sequence: Synthetic oligonucleotide
  Antisense strand to SEQ ID NO: 1226018
auguccacuggaauucgaa

SEQ ID NO: 1226020 - RNA, 19 nt, Artificial Sequence
  Description of Artificial Sequence: Synthetic oligonucleotide
  Sense strand starting at position 2178 of SEQ ID NO: 917319
ucgaauuccaguggacauu

SEQ ID NO: 1226021 - RNA, 19 nt, Artificial Sequence
  Description of Artificial Sequence: Synthetic oligonucleotide
  Antisense strand to SEQ ID NO: 1226020
aauguccacuggaauucga

SEQ ID NO: 1226022 - RNA, 19 nt, Artificial Sequence
  Description of Artificial Sequence: Synthetic oligonucleotide
  Sense strand starting at position 2179 of SEQ ID NO: 917319
cgaauuccaguggacauua

SEQ ID NO: 1226023 - RNA, 19 nt, Artificial Sequence
  Description of Artificial Sequence: Synthetic oligonucleotide
  Antisense strand to SEQ ID NO: 1226022
uaauguccacuggaauucg

SEQ ID NO: 1226024 - RNA, 19 nt, Artificial Sequence
  Description of Artificial Sequence: Synthetic oligonucleotide
  Sense strand starting at position 2216 of SEQ ID NO: 917319
gcagguacuugaguaaaca

SEQ ID NO: 1226025 - RNA, 19 nt, Artificial Sequence
  Description of Artificial Sequence: Synthetic oligonucleotide
  Antisense strand to SEQ ID NO: 1226024
uguuuacucaaguaccugc

SEQ ID NO: 1226026 - RNA, 19 nt, Artificial Sequence
  Description of Artificial Sequence: Synthetic oligonucleotide
  Sense strand starting at position 2343 of SEQ ID NO: 917319
ucuugcauagcucaguuaa

SEQ ID NO: 1226027 - RNA, 19 nt, Artificial Sequence
  Description of Artificial Sequence: Synthetic oligonucleotide
  Antisense strand to SEQ ID NO: 1226026
uuaacugagcuaugcaaga

SEQ ID NO: 1226028 - RNA, 19 nt, Artificial Sequence
  Description of Artificial Sequence: Synthetic oligonucleotide
  Sense strand starting at position 2642 of SEQ ID NO: 917319
guugaugcggaaaguguua

SEQ ID NO: 1226029 - RNA, 19 nt, Artificial Sequence
  Description of Artificial Sequence: Synthetic oligonucleotide
  Antisense strand to SEQ ID NO: 1226028
uaacacuuuccgcaucaac

SEQ ID NO: 1226030 - RNA, 19 nt, Artificial Sequence
  Description of Artificial Sequence: Synthetic oligonucleotide
  Sense strand starting at position 2736 of SEQ ID NO: 917319
ggcagauuggguugaacug

SEQ ID NO: 1226031 - RNA, 19 nt, Artificial Sequence
  Description of Artificial Sequence: Synthetic oligonucleotide
  Antisense strand to SEQ ID NO: 1226030
caguucaacccaaucugcc

SEQ ID NO: 1226032 - RNA, 19 nt, Artificial Sequence
  Description of Artificial Sequence: Synthetic oligonucleotide
  Sense strand starting at position 2817 of SEQ ID NO: 917319
aaauauggaguuugcaauu

SEQ ID NO: 1226033 - RNA, 19 nt, Artificial Sequence
  Description of Artificial Sequence: Synthetic oligonucleotide
  Antisense strand to SEQ ID NO: 1226032
aauugcaaacuccauauuu

SEQ ID NO: 1226034 - RNA, 19 nt, Artificial Sequence
  Description of Artificial Sequence: Synthetic oligonucleotide
  Sense strand starting at position 2823 of SEQ ID NO: 917319
ggaguuugcaauuaugauu

SEQ ID NO: 1226035 - RNA, 19 nt, Artificial Sequence
  Description of Artificial Sequence: Synthetic oligonucleotide
  Antisense strand to SEQ ID NO: 1226034
aaucauaauugcaaacucc

SEQ ID NO: 1226036 - RNA, 19 nt, Artificial Sequence
  Description of Artificial Sequence: Synthetic oligonucleotide
  Sense strand starting at position 2834 of SEQ ID NO: 917319
uuaugauuaagauggguca

SEQ ID NO: 1226037 - RNA, 19 nt, Artificial Sequence
  Description of Artificial Sequence: Synthetic oligonucleotide
  Antisense strand to SEQ ID NO: 1226036
ugacccaucuuaaucauaa

SEQ ID NO: 1226038 - RNA, 19 nt, Artificial Sequence
  Description of Artificial Sequence: Synthetic oligonucleotide
  Sense strand starting at position 2835 of SEQ ID NO: 917319
uaugauuaagaugggucau

SEQ ID NO: 1226039 - RNA, 19 nt, Artificial Sequence
  Description of Artificial Sequence: Synthetic oligonucleotide
  Antisense strand to SEQ ID NO: 1226038
augacccaucuuaaucaua

SEQ ID NO: 1226040 - RNA, 19 nt, Artificial Sequence
  Description of Artificial Sequence: Synthetic oligonucleotide
  Sense strand starting at position 2837 of SEQ ID NO: 917319
ugauuaagaugggucauac

SEQ ID NO: 1226041 - RNA, 19 nt, Artificial Sequence
  Description of Artificial Sequence: Synthetic oligonucleotide
  Antisense strand to SEQ ID NO: 1226040
guaugacccaucuuaauca

SEQ ID NO: 1226042 - RNA, 19 nt, Artificial Sequence
  Description of Artificial Sequence: Synthetic oligonucleotide
  Sense strand starting at position 2889 of SEQ ID NO: 917319
aaauuuggcugauacagga

SEQ ID NO: 1226043 - RNA, 19 nt, Artificial Sequence
  Description of Artificial Sequence: Synthetic oligonucleotide
  Antisense strand to SEQ ID NO: 1226042
uccuguaucagccaaauuu

SEQ ID NO: 1226044 - RNA, 19 nt, Artificial Sequence
  Description of Artificial Sequence: Synthetic oligonucleotide
  Sense strand starting at position 3076 of SEQ ID NO: 917319
guuucuguuguuuaaagac

SEQ ID NO: 1226045 - RNA, 19 nt, Artificial Sequence
  Description of Artificial Sequence: Synthetic oligonucleotide
  Antisense strand to SEQ ID NO: 1226044
gucuuuaaacaacagaaac

SEQ ID NO: 1226046 - RNA, 19 nt, Artificial Sequence
  Description of Artificial Sequence: Synthetic oligonucleotide
  Sense strand starting at position 3109 of SEQ ID NO: 917319
cuuuauuagggcgauccua

SEQ ID NO: 1226047 - RNA, 19 nt, Artificial Sequence
  Description of Artificial Sequence: Synthetic oligonucleotide
  Antisense strand to SEQ ID NO: 1226046
uaggaucgcccuaauaaag

SEQ ID NO: 1226048 - RNA, 19 nt, Artificial Sequence
  Description of Artificial Sequence: Synthetic oligonucleotide
  Sense strand starting at position 3170 of SEQ ID NO: 917319
aaugauuuguuggauagaa

SEQ ID NO: 1226049 - RNA, 19 nt, Artificial Sequence
  Description of Artificial Sequence: Synthetic oligonucleotide
  Antisense strand to SEQ ID NO: 1226048
uucuauccaacaaaucauu

SEQ ID NO: 1226050 - RNA, 19 nt, Artificial Sequence
  Description of Artificial Sequence: Synthetic oligonucleotide
  Sense strand starting at position 3178 of SEQ ID NO: 917319
guuggauagaauggugauu

SEQ ID NO: 1226051 - RNA, 19 nt, Artificial Sequence
  Description of Artificial Sequence: Synthetic oligonucleotide
  Antisense strand to SEQ ID NO: 1226050
aaucaccauucuauccaac

SEQ ID NO: 1226052 - RNA, 19 nt, Artificial Sequence
  Description of Artificial Sequence: Synthetic oligonucleotide
  Sense strand starting at position 3262 of SEQ ID NO: 917319
agggcuuaauaccugcaua

SEQ ID NO: 1226053 - RNA, 19 nt, Artificial Sequence
  Description of Artificial Sequence: Synthetic oligonucleotide
  Antisense strand to SEQ ID NO: 1226052
uaugcagguauuaagcccu

SEQ ID NO: 1226054 - RNA, 19 nt, Artificial Sequence
  Description of Artificial Sequence: Synthetic oligonucleotide
  Sense strand starting at position 3263 of SEQ ID NO: 917319
gggcuuaauaccugcauag

SEQ ID NO: 1226055 - RNA, 19 nt, Artificial Sequence
  Description of Artificial Sequence: Synthetic oligonucleotide
  Antisense strand to SEQ ID NO: 1226054
cuaugcagguauuaagccc

SEQ ID NO: 1226056 - RNA, 19 nt, Artificial Sequence
  Description of Artificial Sequence: Synthetic oligonucleotide
  Sense strand starting at position 3265 of SEQ ID NO: 917319
gcuuaauaccugcauaggu

SEQ ID NO: 1226057 - RNA, 19 nt, Artificial Sequence
  Description of Artificial Sequence: Synthetic oligonucleotide
  Antisense strand to SEQ ID NO: 1226056
accuaugcagguauuaagc

SEQ ID NO: 1226058 - RNA, 19 nt, Artificial Sequence
  Description of Artificial Sequence: Synthetic oligonucleotide
  Sense strand starting at position 3858 of SEQ ID NO: 917319
gaaggaacccugugaaagu

SEQ ID NO: 1226059 - RNA, 19 nt, Artificial Sequence
  Description of Artificial Sequence: Synthetic oligonucleotide
  Antisense strand to SEQ ID NO: 1226058
acuuucacaggguuccuuc

SEQ ID NO: 1226060 - RNA, 19 nt, Artificial Sequence
  Description of Artificial Sequence: Synthetic oligonucleotide
  Sense strand starting at position 3874 of SEQ ID NO: 917320
aguugugucaucguccuca

SEQ ID NO: 1226061 - RNA, 19 nt, Artificial Sequence
  Description of Artificial Sequence: Synthetic oligonucleotide
  Antisense strand to SEQ ID NO: 1226060
ugaggacgaugacacaacu

SEQ ID NO: 1226062 - RNA, 19 nt, Artificial Sequence
  Description of Artificial Sequence: Synthetic oligonucleotide
  Sense strand starting at position 492 of SEQ ID NO: 917320
auaguaggcucccauaugu

SEQ ID NO: 1226063 - RNA, 19 nt, Artificial Sequence
  Description of Artificial Sequence: Synthetic oligonucleotide
  Antisense strand to SEQ ID NO: 1226062
acauaugggagccuacuau

SEQ ID NO: 1226064 - RNA, 19 nt, Artificial Sequence
  Description of Artificial Sequence: Synthetic oligonucleotide
  Sense strand starting at position 499 of SEQ ID NO: 917320
gcucccauauguguuauca

SEQ ID NO: 1226065 - RNA, 19 nt, Artificial Sequence
  Description of Artificial Sequence: Synthetic oligonucleotide
  Antisense strand to SEQ ID NO: 1226064
ugauaacacauaugggagc

SEQ ID NO: 1226066 - RNA, 19 nt, Artificial Sequence
  Description of Artificial Sequence: Synthetic oligonucleotide
  Sense strand starting at position 501 of SEQ ID NO: 917320
ucccauauguguuaucaag

SEQ ID NO: 1226067 - RNA, 19 nt, Artificial Sequence
  Description of Artificial Sequence: Synthetic oligonucleotide
  Antisense strand to SEQ ID NO: 1226066
cuugauaacacauauggga

SEQ ID NO: 1226068 - RNA, 19 nt, Artificial Sequence
  Description of Artificial Sequence: Synthetic oligonucleotide
  Sense strand starting at position 507 of SEQ ID NO: 917320
auguguuaucaaggcugga

SEQ ID NO: 1226069 - RNA, 19 nt, Artificial Sequence
  Description of Artificial Sequence: Synthetic oligonucleotide
  Antisense strand to SEQ ID NO: 1226068
uccagccuugauaacacau

SEQ ID NO: 1226070 - RNA, 19 nt, Artificial Sequence
  Description of Artificial Sequence: Synthetic oligonucleotide
  Sense strand starting at position 510 of SEQ ID NO: 917320
uguuaucaaggcuggacau

SEQ ID NO: 1226071 - RNA, 19 nt, Artificial Sequence
  Description of Artificial Sequence: Synthetic oligonucleotide
  Antisense strand to SEQ ID NO: 1226070
auguccagccuugauaaca

SEQ ID NO: 1226072 - RNA, 19 nt, Artificial Sequence
  Description of Artificial Sequence: Synthetic oligonucleotide
  Sense strand starting at position 511 of SEQ ID NO: 917320
guuaucaaggcuggacaua

SEQ ID NO: 1226073 - RNA, 19 nt, Artificial Sequence
  Description of Artificial Sequence: Synthetic oligonucleotide
  Antisense strand to SEQ ID NO: 1226072
uauguccagccuugauaac

SEQ ID NO: 1226074 - RNA, 19 nt, Artificial Sequence
  Description of Artificial Sequence: Synthetic oligonucleotide
  Sense strand starting at position 587 of SEQ ID NO: 917320
ccacuucggagacaaguuu

SEQ ID NO: 1226075 - RNA, 19 nt, Artificial Sequence
  Description of Artificial Sequence: Synthetic oligonucleotide
  Antisense strand to SEQ ID NO: 1226074
aaacuugucuccgaagugg

SEQ ID NO: 1226076 - RNA, 19 nt, Artificial Sequence
  Description of Artificial Sequence: Synthetic oligonucleotide
  Sense strand starting at position 663 of SEQ ID NO: 917320
acgagcaagguuuacuuua

SEQ ID NO: 1226077 - RNA, 19 nt, Artificial Sequence
  Description of Artificial Sequence: Synthetic oligonucleotide
  Antisense strand to SEQ ID NO: 1226076
uaaaguaaaccuugcucgu

SEQ ID NO: 1226078 - RNA, 19 nt, Artificial Sequence
  Description of Artificial Sequence: Synthetic oligonucleotide
  Sense strand starting at position 736 of SEQ ID NO: 917320
ucgucuucucaagagcacu

SEQ ID NO: 1226079 - RNA, 19 nt, Artificial Sequence
  Description of Artificial Sequence: Synthetic oligonucleotide
  Antisense strand to SEQ ID NO: 1226078
agugcucuugagaagacga

SEQ ID NO: 1226080 - RNA, 19 nt, Artificial Sequence
  Description of Artificial Sequence: Synthetic oligonucleotide
  Sense strand starting at position 764 of SEQ ID NO: 917320
ccucaucuguggcaucuaa

SEQ ID NO: 1226081 - RNA, 19 nt, Artificial Sequence
  Description of Artificial Sequence: Synthetic oligonucleotide
  Antisense strand to SEQ ID NO: 1226080
uuagaugccacagaugagg

SEQ ID NO: 1226082 - RNA, 19 nt, Artificial Sequence
  Description of Artificial Sequence: Synthetic oligonucleotide
  Sense strand starting at position 958 of SEQ ID NO: 917320
ggaggcuggaaucgaaaua

SEQ ID NO: 1226083 - RNA, 19 nt, Artificial Sequence
  Description of Artificial Sequence: Synthetic oligonucleotide
  Antisense strand to SEQ ID NO: 1226082
uauuucgauuccagccucc

SEQ ID NO: 1226084 - RNA, 19 nt, Artificial Sequence
  Description of Artificial Sequence: Synthetic oligonucleotide
  Sense strand starting at position 2345 of SEQ ID NO: 917320
gagcgaugucugcacccua

SEQ ID NO: 1226085 - RNA, 19 nt, Artificial Sequence
  Description of Artificial Sequence: Synthetic oligonucleotide
  Antisense strand to SEQ ID NO: 1226084
uagggugcagacaucgcuc

SEQ ID NO: 1226086 - RNA, 19 nt, Artificial Sequence
  Description of Artificial Sequence: Synthetic oligonucleotide
  Sense strand starting at position 2361 of SEQ ID NO: 917320
cuagacagcuuugguuaca

SEQ ID NO: 1226087 - RNA, 19 nt, Artificial Sequence
  Description of Artificial Sequence: Synthetic oligonucleotide
  Antisense strand to SEQ ID NO: 1226086
uguaaccaaagcugucuag

SEQ ID NO: 1226088 - RNA, 19 nt, Artificial Sequence
  Description of Artificial Sequence: Synthetic oligonucleotide
  Sense strand starting at position 2364 of SEQ ID NO: 917320
gacagcuuugguuacagga

SEQ ID NO: 1226089 - RNA, 19 nt, Artificial Sequence
  Description of Artificial Sequence: Synthetic oligonucleotide
  Antisense strand to SEQ ID NO: 1226088
uccuguaaccaaagcuguc

SEQ ID NO: 1226090 - RNA, 19 nt, Artificial Sequence
  Description of Artificial Sequence: Synthetic oligonucleotide
  Sense strand starting at position 2556 of SEQ ID NO: 917320
cugucuaauccuggcucua

SEQ ID NO: 1226091 - RNA, 19 nt, Artificial Sequence
  Description of Artificial Sequence: Synthetic oligonucleotide
  Antisense strand to SEQ ID NO: 1226090
uagagccaggauuagacag

SEQ ID NO: 1226092 - RNA, 19 nt, Artificial Sequence
  Description of Artificial Sequence: Synthetic oligonucleotide
  Sense strand starting at position 2558 of SEQ ID NO: 917320
gucuaauccuggcucuaca

SEQ ID NO: 1226093 - RNA, 19 nt, Artificial Sequence
  Description of Artificial Sequence: Synthetic oligonucleotide
  Antisense strand to SEQ ID NO: 1226092
uguagagccaggauuagac

SEQ ID NO: 1226094 - RNA, 19 nt, Artificial Sequence
  Description of Artificial Sequence: Synthetic oligonucleotide
  Sense strand starting at position 2579 of SEQ ID NO: 917320
cgaguaacuuguguaaucu

SEQ ID NO: 1226095 - RNA, 19 nt, Artificial Sequence
  Description of Artificial Sequence: Synthetic oligonucleotide
  Antisense strand to SEQ ID NO: 1226094
agauuacacaaguuacucg

SEQ ID NO: 1226096 - RNA, 19 nt, Artificial Sequence
  Description of Artificial Sequence: Synthetic oligonucleotide
  Sense strand starting at position 2580 of SEQ ID NO: 917320
gaguaacuuguguaaucuu

SEQ ID NO: 1226097 - RNA, 19 nt, Artificial Sequence
  Description of Artificial Sequence: Synthetic oligonucleotide
  Antisense strand to SEQ ID NO: 1226096
aagauuacacaaguuacuc

SEQ ID NO: 1226098 - RNA, 19 nt, Artificial Sequence
  Description of Artificial Sequence: Synthetic oligonucleotide
  Sense strand starting at position 2587 of SEQ ID NO: 917320
uuguguaaucuugggcuag

SEQ ID NO: 1226099 - RNA, 19 nt, Artificial Sequence
  Description of Artificial Sequence: Synthetic oligonucleotide
  Antisense strand to SEQ ID NO: 1226098
cuagcccaagauuacacaa

SEQ ID NO: 1226100 - RNA, 19 nt, Artificial Sequence
  Description of Artificial Sequence: Synthetic oligonucleotide
  Sense strand starting at position 2626 of SEQ ID NO: 917320
guucuccucuucuguaaau

SEQ ID NO: 1226101 - RNA, 19 nt, Artificial Sequence
  Description of Artificial Sequence: Synthetic oligonucleotide
  Antisense strand to SEQ ID NO: 1226100
auuuacagaagaggagaac

SEQ ID NO: 1226102 - RNA, 19 nt, Artificial Sequence
  Description of Artificial Sequence: Synthetic oligonucleotide
  Sense strand starting at position 2638 of SEQ ID NO: 917320
uguaaauucgcgaguggug

SEQ ID NO: 1226103 - RNA, 19 nt, Artificial Sequence
  Description of Artificial Sequence: Synthetic oligonucleotide
  Antisense strand to SEQ ID NO: 1226102
caccacucgcgaauuuaca

SEQ ID NO: 1226104 - RNA, 19 nt, Artificial Sequence
  Description of Artificial Sequence: Synthetic oligonucleotide
  Sense strand starting at position 2640 of SEQ ID NO: 917320
uaaauucgcgaguggugga

SEQ ID NO: 1226105 - RNA, 19 nt, Artificial Sequence
  Description of Artificial Sequence: Synthetic oligonucleotide
  Antisense strand to SEQ ID NO: 1226104
uccaccacucgcgaauuua

SEQ ID NO: 1226106 - RNA, 19 nt, Artificial Sequence
  Description of Artificial Sequence: Synthetic oligonucleotide
  Sense strand starting at position 3034 of SEQ ID NO: 917320
ccgugagcauguuuacuua

SEQ ID NO: 1226107 - RNA, 19 nt, Artificial Sequence
  Description of Artificial Sequence: Synthetic oligonucleotide
  Antisense strand to SEQ ID NO: 1226106
uaaguaaacaugcucacgg

SEQ ID NO: 1226108 - RNA, 19 nt, Artificial Sequence
  Description of Artificial Sequence: Synthetic oligonucleotide
  Sense strand starting at position 3037 of SEQ ID NO: 917320
ugagcauguuuacuuauua

SEQ ID NO: 1226109 - RNA, 19 nt, Artificial Sequence
  Description of Artificial Sequence: Synthetic oligonucleotide
  Antisense strand to SEQ ID NO: 1226108
uaauaaguaaacaugcuca

SEQ ID NO: 1226110 - RNA, 19 nt, Artificial Sequence
  Description of Artificial Sequence: Synthetic oligonucleotide
  Sense strand starting at position 3075 of SEQ ID NO: 917320
uuacguggacacuagagua

SEQ ID NO: 1226111 - RNA, 19 nt, Artificial Sequence
  Description of Artificial Sequence: Synthetic oligonucleotide
  Antisense strand to SEQ ID NO: 1226110
uacucuaguguccacguaa

SEQ ID NO: 1226112 - RNA, 19 nt, Artificial Sequence
  Description of Artificial Sequence: Synthetic oligonucleotide
  Sense strand starting at position 3102 of SEQ ID NO: 917320
ugugauaugucauucuuau

SEQ ID NO: 1226113 - RNA, 19 nt, Artificial Sequence
  Description of Artificial Sequence: Synthetic oligonucleotide
  Antisense strand to SEQ ID NO: 1226112
auaagaaugacauaucaca

SEQ ID NO: 1226114 - RNA, 19 nt, Artificial Sequence
  Description of Artificial Sequence: Synthetic oligonucleotide
  Sense strand starting at position 3106 of SEQ ID NO: 917320
auaugucauucuuauguac

SEQ ID NO: 1226115 - RNA, 19 nt, Artificial Sequence
  Description of Artificial Sequence: Synthetic oligonucleotide
  Antisense strand to SEQ ID NO: 1226114
guacauaagaaugacauau

SEQ ID NO: 1226116 - RNA, 19 nt, Artificial Sequence
  Description of Artificial Sequence: Synthetic oligonucleotide
  Sense strand starting at position 3108 of SEQ ID NO: 917320
augucauucuuauguacaa

SEQ ID NO: 1226117 - RNA, 19 nt, Artificial Sequence
  Description of Artificial Sequence: Synthetic oligonucleotide
  Antisense strand to SEQ ID NO: 1226116
uuguacauaagaaugacau

SEQ ID NO: 1226118 - RNA, 19 nt, Artificial Sequence
  Description of Artificial Sequence: Synthetic oligonucleotide
  Sense strand starting at position 3109 of SEQ ID NO: 917320
ugucauucuuauguacaac

SEQ ID NO: 1226119 - RNA, 19 nt, Artificial Sequence
  Description of Artificial Sequence: Synthetic oligonucleotide
  Antisense strand to SEQ ID NO: 1226118
guuguacauaagaaugaca

SEQ ID NO: 1226120 - RNA, 19 nt, Artificial Sequence
  Description of Artificial Sequence: Synthetic oligonucleotide
  Sense strand starting at position 3240 of SEQ ID NO: 917320
agcuaacacuuacugagaa

SEQ ID NO: 1226121 - RNA, 19 nt, Artificial Sequence
  Description of Artificial Sequence: Synthetic oligonucleotide
  Antisense strand to SEQ ID NO: 1226120
uucucaguaaguguuagcu

SEQ ID NO: 1226122 - RNA, 19 nt, Artificial Sequence
  Description of Artificial Sequence: Synthetic oligonucleotide
  Sense strand starting at position 3241 of SEQ ID NO: 917320
gcuaacacuuacugagaau

SEQ ID NO: 1226123 - RNA, 19 nt, Artificial Sequence
  Description of Artificial Sequence: Synthetic oligonucleotide
  Antisense strand to SEQ ID NO: 1226122
auucucaguaaguguuagc

SEQ ID NO: 1226124 - RNA, 19 nt, Artificial Sequence
  Description of Artificial Sequence: Synthetic oligonucleotide
  Sense strand starting at position 3312 of SEQ ID NO: 917320
uccuuucgcccaugaacaa

SEQ ID NO: 1226125 - RNA, 19 nt, Artificial Sequence
  Description of Artificial Sequence: Synthetic oligonucleotide
  Antisense strand to SEQ ID NO: 1226124
uuguucaugggcgaaagga

SEQ ID NO: 1226126 - RNA, 19 nt, Artificial Sequence
  Description of Artificial Sequence: Synthetic oligonucleotide
  Sense strand starting at position 3331 of SEQ ID NO: 917320
agcggucuugcuugagauc

SEQ ID NO: 1226127 - RNA, 19 nt, Artificial Sequence
  Description of Artificial Sequence: Synthetic oligonucleotide
  Antisense strand to SEQ ID NO: 1226126
gaucucaagcaagaccgcu

SEQ ID NO: 1226128 - RNA, 19 nt, Artificial Sequence
  Description of Artificial Sequence: Synthetic oligonucleotide
  Sense strand starting at position 3332 of SEQ ID NO: 917320
gcggucuugcuugagauca

SEQ ID NO: 1226129 - RNA, 19 nt, Artificial Sequence
  Description of Artificial Sequence: Synthetic oligonucleotide
  Antisense strand to SEQ ID NO: 1226128
ugaucucaagcaagaccgc

SEQ ID NO: 1226130 - RNA, 19 nt, Artificial Sequence
  Description of Artificial Sequence: Synthetic oligonucleotide
  Sense strand starting at position 3334 of SEQ ID NO: 917320
ggucuugcuugagaucaag

SEQ ID NO: 1226131 - RNA, 19 nt, Artificial Sequence
  Description of Artificial Sequence: Synthetic oligonucleotide
  Antisense strand to SEQ ID NO: 1226130
cuugaucucaagcaagacc

SEQ ID NO: 1226132 - RNA, 19 nt, Artificial Sequence
  Description of Artificial Sequence: Synthetic oligonucleotide
  Sense strand starting at position 3381 of SEQ ID NO: 917320
gggcucuggucggccuaau

SEQ ID NO: 1226133 - RNA, 19 nt, Artificial Sequence
  Description of Artificial Sequence: Synthetic oligonucleotide
  Antisense strand to SEQ ID NO: 1226132
auuaggccgaccagagccc

SEQ ID NO: 1226134 - RNA, 19 nt, Artificial Sequence
  Description of Artificial Sequence: Synthetic oligonucleotide
  Sense strand starting at position 3392 of SEQ ID NO: 917320
ggccuaaucccagagcuug

SEQ ID NO: 1226135 - RNA, 19 nt, Artificial Sequence
  Description of Artificial Sequence: Synthetic oligonucleotide
  Antisense strand to SEQ ID NO: 1226134
caagcucugggauuaggcc

SEQ ID NO: 1226136 - RNA, 19 nt, Artificial Sequence
  Description of Artificial Sequence: Synthetic oligonucleotide
  Sense strand starting at position 3597 of SEQ ID NO: 917320
gcuguuuccagcgguccua

SEQ ID NO: 1226137 - RNA, 19 nt, Artificial Sequence
  Description of Artificial Sequence: Synthetic oligonucleotide
  Antisense strand to SEQ ID NO: 1226136
uaggaccgcuggaaacagc

SEQ ID NO: 1226138 - RNA, 19 nt, Artificial Sequence
  Description of Artificial Sequence: Synthetic oligonucleotide
  Sense strand starting at position 3631 of SEQ ID NO: 917320
gcgcuuuccuccgugguca

SEQ ID NO: 1226139 - RNA, 19 nt, Artificial Sequence
  Description of Artificial Sequence: Synthetic oligonucleotide
  Antisense strand to SEQ ID NO: 1226138
ugaccacggaggaaagcgc

SEQ ID NO: 1226140 - RNA, 19 nt, Artificial Sequence
  Description of Artificial Sequence: Synthetic oligonucleotide
  Sense strand starting at position 3649 of SEQ ID NO: 917321
acccguagucccugaggga

SEQ ID NO: 1226141 - RNA, 19 nt, Artificial Sequence
  Description of Artificial Sequence: Synthetic oligonucleotide
  Antisense strand to SEQ ID NO: 1226140
ucccucagggacuacgggu

SEQ ID NO: 1226142 - RNA, 19 nt, Artificial Sequence
  Description of Artificial Sequence: Synthetic oligonucleotide
  Sense strand starting at position 10 of SEQ ID NO: 917321
guauacagugcuuacaauu

SEQ ID NO: 1226143 - RNA, 19 nt, Artificial Sequence
  Description of Artificial Sequence: Synthetic oligonucleotide
  Antisense strand to SEQ ID NO: 1226142
aauuguaagcacuguauac

SEQ ID NO: 1226144 - RNA, 19 nt, Artificial Sequence
  Description of Artificial Sequence: Synthetic oligonucleotide
  Sense strand starting at position 20 of SEQ ID NO: 917321
cuuacaauucuuugaggcu

SEQ ID NO: 1226145 - RNA, 19 nt, Artificial Sequence
  Description of Artificial Sequence: Synthetic oligonucleotide
  Antisense strand to SEQ ID NO: 1226144
agccucaaagaauuguaag

SEQ ID NO: 1226146 - RNA, 19 nt, Artificial Sequence
  Description of Artificial Sequence: Synthetic oligonucleotide
  Sense strand starting at position 659 of SEQ ID NO: 917321
cuauauuguccggaccuaa

SEQ ID NO: 1226147 - RNA, 19 nt, Artificial Sequence
  Description of Artificial Sequence: Synthetic oligonucleotide
  Antisense strand to SEQ ID NO: 1226146
uuagguccggacaauauag

SEQ ID NO: 1226148 - RNA, 19 nt, Artificial Sequence
  Description of Artificial Sequence: Synthetic oligonucleotide
  Sense strand starting at position 688 of SEQ ID NO: 917321
ggcauacaguaguugauaa

SEQ ID NO: 1226149 - RNA, 19 nt, Artificial Sequence
  Description of Artificial Sequence: Synthetic oligonucleotide
  Antisense strand to SEQ ID NO: 1226148
uuaucaacuacuguaugcc

SEQ ID NO: 1226150 - RNA, 19 nt, Artificial Sequence
  Description of Artificial Sequence: Synthetic oligonucleotide
  Sense strand starting at position 913 of SEQ ID NO: 917321
gaacgauaauggcuuaaau

SEQ ID NO: 1226151 - RNA, 19 nt, Artificial Sequence
  Description of Artificial Sequence: Synthetic oligonucleotide
  Antisense strand to SEQ ID NO: 1226150
auuuaagccauuaucguuc

SEQ ID NO: 1226152 - RNA, 19 nt, Artificial Sequence
  Description of Artificial Sequence: Synthetic oligonucleotide
  Sense strand starting at position 972 of SEQ ID NO: 917321
augagaagcuccucacucu

SEQ ID NO: 1226153 - RNA, 19 nt, Artificial Sequence
  Description of Artificial Sequence: Synthetic oligonucleotide
  Antisense strand to SEQ ID NO: 1226152
agagugaggagcuucucau

SEQ ID NO: 1226154 - RNA, 19 nt, Artificial Sequence
  Description of Artificial Sequence: Synthetic oligonucleotide
  Sense strand starting at position 982 of SEQ ID NO: 917321
ccucacucugcagagguua

SEQ ID NO: 1226155 - RNA, 19 nt, Artificial Sequence
  Description of Artificial Sequence: Synthetic oligonucleotide
  Antisense strand to SEQ ID NO: 1226154
uaaccucugcagagugagg

SEQ ID NO: 1226156 - RNA, 19 nt, Artificial Sequence
  Description of Artificial Sequence: Synthetic oligonucleotide
  Sense strand starting at position 1116 of SEQ ID NO: 917321
caaggcauggugugaugaa

SEQ ID NO: 1226157 - RNA, 19 nt, Artificial Sequence
  Description of Artificial Sequence: Synthetic oligonucleotide
  Antisense strand to SEQ ID NO: 1226156
uucaucacaccaugccuug

SEQ ID NO: 1226158 - RNA, 19 nt, Artificial Sequence
  Description of Artificial Sequence: Synthetic oligonucleotide
  Sense strand starting at position 1138 of SEQ ID NO: 917321
caaguauuucuguguggcu

SEQ ID NO: 1226159 - RNA, 19 nt, Artificial Sequence
  Description of Artificial Sequence: Synthetic oligonucleotide
  Antisense strand to SEQ ID NO: 1226158
agccacacagaaauacuug

SEQ ID NO: 1226160 - RNA, 19 nt, Artificial Sequence
  Description of Artificial Sequence: Synthetic oligonucleotide
  Sense strand starting at position 1186 of SEQ ID NO: 917321
ggaugaugcugaucagguu

SEQ ID NO: 1226161 - RNA, 19 nt, Artificial Sequence
  Description of Artificial Sequence: Synthetic oligonucleotide
  Antisense strand to SEQ ID NO: 1226160
aaccugaucagcaucaucc

SEQ ID NO: 1226162 - RNA, 19 nt, Artificial Sequence
  Description of Artificial Sequence: Synthetic oligonucleotide
  Sense strand starting at position 1192 of SEQ ID NO: 917321
ugcugaucagguuaugaag

SEQ ID NO: 1226163 - RNA, 19 nt, Artificial Sequence
  Description of Artificial Sequence: Synthetic oligonucleotide
  Antisense strand to SEQ ID NO: 1226162
cuucauaaccugaucagca

SEQ ID NO: 1226164 - RNA, 19 nt, Artificial Sequence
  Description of Artificial Sequence: Synthetic oligonucleotide
  Sense strand starting at position 1222 of SEQ ID NO: 917321
ccacccucuggguaagauu

SEQ ID NO: 1226165 - RNA, 19 nt, Artificial Sequence
  Description of Artificial Sequence: Synthetic oligonucleotide
  Antisense strand to SEQ ID NO: 1226164
aaucuuacccagagggugg

SEQ ID NO: 1226166 - RNA, 19 nt, Artificial Sequence
  Description of Artificial Sequence: Synthetic oligonucleotide
  Sense strand starting at position 1338 of SEQ ID NO: 917321
ggacuacgacgagaagcau

SEQ ID NO: 1226167 - RNA, 19 nt, Artificial Sequence
  Description of Artificial Sequence: Synthetic oligonucleotide
  Antisense strand to SEQ ID NO: 1226166
augcuucucgucguagucc

SEQ ID NO: 1226168 - RNA, 19 nt, Artificial Sequence
  Description of Artificial Sequence: Synthetic oligonucleotide
  Sense strand starting at position 1548 of SEQ ID NO: 917321
cgauuucgcgugcuugcau

SEQ ID NO: 1226169 - RNA, 19 nt, Artificial Sequence
  Description of Artificial Sequence: Synthetic oligonucleotide
  Antisense strand to SEQ ID NO: 1226168
augcaagcacgcgaaaucg

SEQ ID NO: 1226170 - RNA, 19 nt, Artificial Sequence
  Description of Artificial Sequence: Synthetic oligonucleotide
  Sense strand starting at position 2395 of SEQ ID NO: 917321
aacggcuucccagaaguca

SEQ ID NO: 1226171 - RNA, 19 nt, Artificial Sequence
  Description of Artificial Sequence: Synthetic oligonucleotide
  Antisense strand to SEQ ID NO: 1226170
ugacuucugggaagccguu

SEQ ID NO: 1226172 - RNA, 19 nt, Artificial Sequence
  Description of Artificial Sequence: Synthetic oligonucleotide
  Sense strand starting at position 2435 of SEQ ID NO: 917321
gcacguguggaugauccaa

SEQ ID NO: 1226173 - RNA, 19 nt, Artificial Sequence
  Description of Artificial Sequence: Synthetic oligonucleotide
  Antisense strand to SEQ ID NO: 1226172
uuggaucauccacacgugc

SEQ ID NO: 1226174 - RNA, 19 nt, Artificial Sequence
  Description of Artificial Sequence: Synthetic oligonucleotide
  Sense strand starting at position 2484 of SEQ ID NO: 917321
uaaugaguguuguuuaaag

SEQ ID NO: 1226175 - RNA, 19 nt, Artificial Sequence
  Description of Artificial Sequence: Synthetic oligonucleotide
  Antisense strand to SEQ ID NO: 1226174
cuuuaaacaacacucauua

SEQ ID NO: 1226176 - RNA, 19 nt, Artificial Sequence
  Description of Artificial Sequence: Synthetic oligonucleotide
  Sense strand starting at position 2486 of SEQ ID NO: 917321
augaguguuguuuaaagac

SEQ ID NO: 1226177 - RNA, 19 nt, Artificial Sequence
  Description of Artificial Sequence: Synthetic oligonucleotide
  Antisense strand to SEQ ID NO: 1226176
gucuuuaaacaacacucau

SEQ ID NO: 1226178 - RNA, 19 nt, Artificial Sequence
  Description of Artificial Sequence: Synthetic oligonucleotide
  Sense strand starting at position 2577 of SEQ ID NO: 917321
cggagaaggacgugauuaa

SEQ ID NO: 1226179 - RNA, 19 nt, Artificial Sequence
  Description of Artificial Sequence: Synthetic oligonucleotide
  Antisense strand to SEQ ID NO: 1226178
uuaaucacguccuucuccg

SEQ ID NO: 1226180 - RNA, 19 nt, Artificial Sequence
  Description of Artificial Sequence: Synthetic oligonucleotide
  Sense strand starting at position 2606 of SEQ ID NO: 917321
ucagguugugaagaguuga

SEQ ID NO: 1226181 - RNA, 19 nt, Artificial Sequence
  Description of Artificial Sequence: Synthetic oligonucleotide
  Antisense strand to SEQ ID NO: 1226180
ucaacucuucacaaccuga

SEQ ID NO: 1226182 - RNA, 19 nt, Artificial Sequence
  Description of Artificial Sequence: Synthetic oligonucleotide
  Sense strand starting at position 2637 of SEQ ID NO: 917321
cacccaaaguuagcgaaau

SEQ ID NO: 1226183 - RNA, 19 nt, Artificial Sequence
  Description of Artificial Sequence: Synthetic oligonucleotide
  Antisense strand to SEQ ID NO: 1226182
auuucgcuaacuuugggug

SEQ ID NO: 1226184 - RNA, 19 nt, Artificial Sequence
  Description of Artificial Sequence: Synthetic oligonucleotide
  Sense strand starting at position 2716 of SEQ ID NO: 917321
aacugaagucuuuauggca

SEQ ID NO: 1226185 - RNA, 19 nt, Artificial Sequence
  Description of Artificial Sequence: Synthetic oligonucleotide
  Antisense strand to SEQ ID NO: 1226184
ugccauaaagacuucaguu

SEQ ID NO: 1226186 - RNA, 19 nt, Artificial Sequence
  Description of Artificial Sequence: Synthetic oligonucleotide
  Sense strand starting at position 2724 of SEQ ID NO: 917321
ucuuuauggcaucaagcuu

SEQ ID NO: 1226187 - RNA, 19 nt, Artificial Sequence
  Description of Artificial Sequence: Synthetic oligonucleotide
  Antisense strand to SEQ ID NO: 1226186
aagcuugaugccauaaaga

SEQ ID NO: 1226188 - RNA, 19 nt, Artificial Sequence
  Description of Artificial Sequence: Synthetic oligonucleotide
  Sense strand starting at position 2767 of SEQ ID NO: 917321
ggacuuaauuuguaagaug

SEQ ID NO: 1226189 - RNA, 19 nt, Artificial Sequence
  Description of Artificial Sequence: Synthetic oligonucleotide
  Antisense strand to SEQ ID NO: 1226188
caucuuacaaauuaagucc

SEQ ID NO: 1226190 - RNA, 19 nt, Artificial Sequence
  Description of Artificial Sequence: Synthetic oligonucleotide
  Sense strand starting at position 2785 of SEQ ID NO: 917321
gagccucaucgucaaaucu

SEQ ID NO: 1226191 - RNA, 19 nt, Artificial Sequence
  Description of Artificial Sequence: Synthetic oligonucleotide
  Antisense strand to SEQ ID NO: 1226190
agauuugacgaugaggcuc

SEQ ID NO: 1226192 - RNA, 19 nt, Artificial Sequence
  Description of Artificial Sequence: Synthetic oligonucleotide
  Sense strand starting at position 2800 of SEQ ID NO: 917321
aucucugagcuuuaacuga

SEQ ID NO: 1226193 - RNA, 19 nt, Artificial Sequence
  Description of Artificial Sequence: Synthetic oligonucleotide
  Antisense strand to SEQ ID NO: 1226192
ucaguuaaagcucagagau

SEQ ID NO: 1226194 - RNA, 19 nt, Artificial Sequence
  Description of Artificial Sequence: Synthetic oligonucleotide
  Sense strand starting at position 2856 of SEQ ID NO: 917321
aucaccagaucuuugaguu

SEQ ID NO: 1226195 - RNA, 19 nt, Artificial Sequence
  Description of Artificial Sequence: Synthetic oligonucleotide
  Antisense strand to SEQ ID NO: 1226194
aacucaaagaucuggugau

SEQ ID NO: 1226196 - RNA, 19 nt, Artificial Sequence
  Description of Artificial Sequence: Synthetic oligonucleotide
  Sense strand starting at position 2857 of SEQ ID NO: 917321
ucaccagaucuuugaguug

SEQ ID NO: 1226197 - RNA, 19 nt, Artificial Sequence
  Description of Artificial Sequence: Synthetic oligonucleotide
  Antisense strand to SEQ ID NO: 1226196
caacucaaagaucugguga

SEQ ID NO: 1226198 - RNA, 19 nt, Artificial Sequence
  Description of Artificial Sequence: Synthetic oligonucleotide
  Sense strand starting at position 2922 of SEQ ID NO: 917321
ugauauaccguugagcuua

SEQ ID NO: 1226199 - RNA, 19 nt, Artificial Sequence
  Description of Artificial Sequence: Synthetic oligonucleotide
  Antisense strand to SEQ ID NO: 1226198
uaagcucaacgguauauca

SEQ ID NO: 1226200 - RNA, 19 nt, Artificial Sequence
  Description of Artificial Sequence: Synthetic oligonucleotide
  Sense strand starting at position 2927 of SEQ ID NO: 917321
uaccguugagcuuauuaaa

SEQ ID NO: 1226201 - RNA, 19 nt, Artificial Sequence
  Description of Artificial Sequence: Synthetic oligonucleotide
  Antisense strand to SEQ ID NO: 1226200
uuuaauaagcucaacggua

SEQ ID NO: 1226202 - RNA, 19 nt, Artificial Sequence
  Description of Artificial Sequence: Synthetic oligonucleotide
  Sense strand starting at position 2954 of SEQ ID NO: 917321
auguaccaucacuauagua

SEQ ID NO: 1226203 - RNA, 19 nt, Artificial Sequence
  Description of Artificial Sequence: Synthetic oligonucleotide
  Antisense strand to SEQ ID NO: 1226202
uacuauagugaugguacau

SEQ ID NO: 1226204 - RNA, 19 nt, Artificial Sequence
  Description of Artificial Sequence: Synthetic oligonucleotide
  Sense strand starting at position 2995 of SEQ ID NO: 917321
agaucaguagaguguagua

SEQ ID NO: 1226205 - RNA, 19 nt, Artificial Sequence
  Description of Artificial Sequence: Synthetic oligonucleotide
  Antisense strand to SEQ ID NO: 1226204
uacuacacucuacugaucu

SEQ ID NO: 1226206 - RNA, 19 nt, Artificial Sequence
  Description of Artificial Sequence: Synthetic oligonucleotide
  Sense strand starting at position 3179 of SEQ ID NO: 917321
ucacaauaaugugugcaaa

SEQ ID NO: 1226207 - RNA, 19 nt, Artificial Sequence
  Description of Artificial Sequence: Synthetic oligonucleotide
  Antisense strand to SEQ ID NO: 1226206
uuugcacacauuauuguga

SEQ ID NO: 1226208 - RNA, 19 nt, Artificial Sequence
  Description of Artificial Sequence: Synthetic oligonucleotide
  Sense strand starting at position 3273 of SEQ ID NO: 917321
agaucauuuguugguugua

SEQ ID NO: 1226209 - RNA, 19 nt, Artificial Sequence
  Description of Artificial Sequence: Synthetic oligonucleotide
  Antisense strand to SEQ ID NO: 1226208
uacaaccaacaaaugaucu

SEQ ID NO: 1226210 - RNA, 19 nt, Artificial Sequence
  Description of Artificial Sequence: Synthetic oligonucleotide
  Sense strand starting at position 3312 of SEQ ID NO: 917321
uugaaagcccacugaucaa

SEQ ID NO: 1226211 - RNA, 19 nt, Artificial Sequence
  Description of Artificial Sequence: Synthetic oligonucleotide
  Antisense strand to SEQ ID NO: 1226210
uugaucagugggcuuucaa

SEQ ID NO: 1226212 - RNA, 19 nt, Artificial Sequence
  Description of Artificial Sequence: Synthetic oligonucleotide
  Sense strand starting at position 3539 of SEQ ID NO: 917321
ggaggagaagauuguugua

SEQ ID NO: 1226213 - RNA, 19 nt, Artificial Sequence
  Description of Artificial Sequence: Synthetic oligonucleotide
  Antisense strand to SEQ ID NO: 1226212
uacaacaaucuucuccucc

SEQ ID NO: 1226214 - RNA, 19 nt, Artificial Sequence
  Description of Artificial Sequence: Synthetic oligonucleotide
  Sense strand starting at position 3544 of SEQ ID NO: 917321
agaagauuguuguagauuu

SEQ ID NO: 1226215 - RNA, 19 nt, Artificial Sequence
  Description of Artificial Sequence: Synthetic oligonucleotide
  Antisense strand to SEQ ID NO: 1226214
aaaucuacaacaaucuucu

SEQ ID NO: 1226216 - RNA, 19 nt, Artificial Sequence
  Description of Artificial Sequence: Synthetic oligonucleotide
  Sense strand starting at position 3551 of SEQ ID NO: 917321
uguuguagauuuguaacga

SEQ ID NO: 1226217 - RNA, 19 nt, Artificial Sequence
  Description of Artificial Sequence: Synthetic oligonucleotide
  Antisense strand to SEQ ID NO: 1226216
ucguuacaaaucuacaaca

SEQ ID NO: 1226218 - RNA, 19 nt, Artificial Sequence
  Description of Artificial Sequence: Synthetic oligonucleotide
  Sense strand starting at position 3555 of SEQ ID NO: 917321
guagauuuguaacgauuug

SEQ ID NO: 1226219 - RNA, 19 nt, Artificial Sequence
  Description of Artificial Sequence: Synthetic oligonucleotide
  Antisense strand to SEQ ID NO: 1226218
caaaucguuacaaaucuac

SEQ ID NO: 1226220 - RNA, 19 nt, Artificial Sequence
  Description of Artificial Sequence: Synthetic oligonucleotide
  Sense strand starting at position 3561 of SEQ ID NO: 917322
uuguaacgauuugagauga

SEQ ID NO: 1226221 - RNA, 19 nt, Artificial Sequence
  Description of Artificial Sequence: Synthetic oligonucleotide
  Antisense strand to SEQ ID NO: 1226220
ucaucucaaaucguuacaa

SEQ ID NO: 1226222 - RNA, 19 nt, Artificial Sequence
  Description of Artificial Sequence: Synthetic oligonucleotide
  Sense strand starting at position 2041 of SEQ ID NO: 917322
gggccuguuuaugguuuau

SEQ ID NO: 1226223 - RNA, 19 nt, Artificial Sequence
  Description of Artificial Sequence: Synthetic oligonucleotide
  Antisense strand to SEQ ID NO: 1226222
auaaaccauaaacaggccc

SEQ ID NO: 1226224 - RNA, 19 nt, Artificial Sequence
  Description of Artificial Sequence: Synthetic oligonucleotide
  Sense strand starting at position 2050 of SEQ ID NO: 917322
uaugguuuauuccuaggaa

SEQ ID NO: 1226225 - RNA, 19 nt, Artificial Sequence
  Description of Artificial Sequence: Synthetic oligonucleotide
  Antisense strand to SEQ ID NO: 1226224
uuccuaggaauaaaccaua

SEQ ID NO: 1226226 - RNA, 19 nt, Artificial Sequence
  Description of Artificial Sequence: Synthetic oligonucleotide
  Sense strand starting at position 2051 of SEQ ID NO: 917322
augguuuauuccuaggaac

SEQ ID NO: 1226227 - RNA, 19 nt, Artificial Sequence
  Description of Artificial Sequence: Synthetic oligonucleotide
  Antisense strand to SEQ ID NO: 1226226
guuccuaggaauaaaccau

SEQ ID NO: 1226228 - RNA, 19 nt, Artificial Sequence
  Description of Artificial Sequence: Synthetic oligonucleotide
  Sense strand starting at position 2107 of SEQ ID NO: 917322
cacggcucucuugagauaa

SEQ ID NO: 1226229 - RNA, 19 nt, Artificial Sequence
  Description of Artificial Sequence: Synthetic oligonucleotide
  Antisense strand to SEQ ID NO: 1226228
uuaucucaagagagccgug

SEQ ID NO: 1226230 - RNA, 19 nt, Artificial Sequence
  Description of Artificial Sequence: Synthetic oligonucleotide
  Sense strand starting at position 2109 of SEQ ID NO: 917322
cggcucucuugagauaaug

SEQ ID NO: 1226231 - RNA, 19 nt, Artificial Sequence
  Description of Artificial Sequence: Synthetic oligonucleotide
  Antisense strand to SEQ ID NO: 1226230
cauuaucucaagagagccg

SEQ ID NO: 1226232 - RNA, 19 nt, Artificial Sequence
  Description of Artificial Sequence: Synthetic oligonucleotide
  Sense strand starting at position 2131 of SEQ ID NO: 917322
guagcacuauuacguuaua

SEQ ID NO: 1226233 - RNA, 19 nt, Artificial Sequence
  Description of Artificial Sequence: Synthetic oligonucleotide
  Antisense strand to SEQ ID NO: 1226232
uauaacguaauagugcuac

SEQ ID NO: 1226234 - RNA, 19 nt, Artificial Sequence
  Description of Artificial Sequence: Synthetic oligonucleotide
  Sense strand starting at position 2134 of SEQ ID NO: 917322
gcacuauuacguuauaaac

SEQ ID NO: 1226235 - RNA, 19 nt, Artificial Sequence
  Description of Artificial Sequence: Synthetic oligonucleotide
  Antisense strand to SEQ ID NO: 1226234
guuuauaacguaauagugc

SEQ ID NO: 1226236 - RNA, 19 nt, Artificial Sequence
  Description of Artificial Sequence: Synthetic oligonucleotide
  Sense strand starting at position 2136 of SEQ ID NO: 917322
acuauuacguuauaaacag

SEQ ID NO: 1226237 - RNA, 19 nt, Artificial Sequence
  Description of Artificial Sequence: Synthetic oligonucleotide
  Antisense strand to SEQ ID NO: 1226236
cuguuuauaacguaauagu

SEQ ID NO: 1226238 - RNA, 19 nt, Artificial Sequence
  Description of Artificial Sequence: Synthetic oligonucleotide
  Sense strand starting at position 2186 of SEQ ID NO: 917322
uuaacagauugagcucaua

SEQ ID NO: 1226239 - RNA, 19 nt, Artificial Sequence
  Description of Artificial Sequence: Synthetic oligonucleotide
  Antisense strand to SEQ ID NO: 1226238
uaugagcucaaucuguuaa

SEQ ID NO: 1226240 - RNA, 19 nt, Artificial Sequence
  Description of Artificial Sequence: Synthetic oligonucleotide
  Sense strand starting at position 2217 of SEQ ID NO: 917322
auuuauacgugauaugcuu

SEQ ID NO: 1226241 - RNA, 19 nt, Artificial Sequence
  Description of Artificial Sequence: Synthetic oligonucleotide
  Antisense strand to SEQ ID NO: 1226240
aagcauaucacguauaaau

SEQ ID NO: 1226242 - RNA, 19 nt, Artificial Sequence
  Description of Artificial Sequence: Synthetic oligonucleotide
  Sense strand starting at position 2223 of SEQ ID NO: 917322
acgugauaugcuuucguca

SEQ ID NO: 1226243 - RNA, 19 nt, Artificial Sequence
  Description of Artificial Sequence: Synthetic oligonucleotide
  Antisense strand to SEQ ID NO: 1226242
ugacgaaagcauaucacgu

SEQ ID NO: 1226244 - RNA, 19 nt, Artificial Sequence
  Description of Artificial Sequence: Synthetic oligonucleotide
  Sense strand starting at position 2224 of SEQ ID NO: 917322
cgugauaugcuuucgucac

SEQ ID NO: 1226245 - RNA, 19 nt, Artificial Sequence
  Description of Artificial Sequence: Synthetic oligonucleotide
  Antisense strand to SEQ ID NO: 1226244
gugacgaaagcauaucacg

SEQ ID NO: 1226246 - RNA, 19 nt, Artificial Sequence
  Description of Artificial Sequence: Synthetic oligonucleotide
  Sense strand starting at position 2225 of SEQ ID NO: 917322
gugauaugcuuucgucaca

SEQ ID NO: 1226247 - RNA, 19 nt, Artificial Sequence
  Description of Artificial Sequence: Synthetic oligonucleotide
  Antisense strand to SEQ ID NO: 1226246
ugugacgaaagcauaucac

SEQ ID NO: 1226248 - RNA, 19 nt, Artificial Sequence
  Description of Artificial Sequence: Synthetic oligonucleotide
  Sense strand starting at position 2226 of SEQ ID NO: 917322
ugauaugcuuucgucacau

SEQ ID NO: 1226249 - RNA, 19 nt, Artificial Sequence
  Description of Artificial Sequence: Synthetic oligonucleotide
  Antisense strand to SEQ ID NO: 1226248
augugacgaaagcauauca

SEQ ID NO: 1226250 - RNA, 19 nt, Artificial Sequence
  Description of Artificial Sequence: Synthetic oligonucleotide
  Sense strand starting at position 2230 of SEQ ID NO: 917322
augcuuucgucacauacaa

SEQ ID NO: 1226251 - RNA, 19 nt, Artificial Sequence
  Description of Artificial Sequence: Synthetic oligonucleotide
  Antisense strand to SEQ ID NO: 1226250
uuguaugugacgaaagcau

SEQ ID NO: 1226252 - RNA, 19 nt, Artificial Sequence
  Description of Artificial Sequence: Synthetic oligonucleotide
  Sense strand starting at position 2243 of SEQ ID NO: 917322
auacaauaugugugcuugu

SEQ ID NO: 1226253 - RNA, 19 nt, Artificial Sequence
  Description of Artificial Sequence: Synthetic oligonucleotide
  Antisense strand to SEQ ID NO: 1226252
acaagcacacauauuguau

SEQ ID NO: 1226254 - RNA, 19 nt, Artificial Sequence
  Description of Artificial Sequence: Synthetic oligonucleotide
  Sense strand starting at position 2250 of SEQ ID NO: 917322
augugugcuugucaguaaa

SEQ ID NO: 1226255 - RNA, 19 nt, Artificial Sequence
  Description of Artificial Sequence: Synthetic oligonucleotide
  Antisense strand to SEQ ID NO: 1226254
uuuacugacaagcacacau

SEQ ID NO: 1226256 - RNA, 19 nt, Artificial Sequence
  Description of Artificial Sequence: Synthetic oligonucleotide
  Sense strand starting at position 2377 of SEQ ID NO: 917322
gcaguaaaccucuguguuu

SEQ ID NO: 1226257 - RNA, 19 nt, Artificial Sequence
  Description of Artificial Sequence: Synthetic oligonucleotide
  Antisense strand to SEQ ID NO: 1226256
aaacacagagguuuacugc

SEQ ID NO: 1226258 - RNA, 19 nt, Artificial Sequence
  Description of Artificial Sequence: Synthetic oligonucleotide
  Sense strand starting at position 2561 of SEQ ID NO: 917322
ucauaauuguaaugugcuu

SEQ ID NO: 1226259 - RNA, 19 nt, Artificial Sequence
  Description of Artificial Sequence: Synthetic oligonucleotide
  Antisense strand to SEQ ID NO: 1226258
aagcacauuacaauuauga

SEQ ID NO: 1226260 - RNA, 19 nt, Artificial Sequence
  Description of Artificial Sequence: Synthetic oligonucleotide
  Sense strand starting at position 3089 of SEQ ID NO: 917322
caauuagcugggcauagua

SEQ ID NO: 1226261 - RNA, 19 nt, Artificial Sequence
  Description of Artificial Sequence: Synthetic oligonucleotide
  Antisense strand to SEQ ID NO: 1226260
uacuaugcccagcuaauug

SEQ ID NO: 1226262 - RNA, 19 nt, Artificial Sequence
  Description of Artificial Sequence: Synthetic oligonucleotide
  Sense strand starting at position 3261 of SEQ ID NO: 917322
ggucaucaggaaugugaaa

SEQ ID NO: 1226263 - RNA, 19 nt, Artificial Sequence
  Description of Artificial Sequence: Synthetic oligonucleotide
  Antisense strand to SEQ ID NO: 1226262
uuucacauuccugaugacc

SEQ ID NO: 1226264 - RNA, 19 nt, Artificial Sequence
  Description of Artificial Sequence: Synthetic oligonucleotide
  Sense strand starting at position 3403 of SEQ ID NO: 917322
auuaccaaguguuuggaaa

SEQ ID NO: 1226265 - RNA, 19 nt, Artificial Sequence
  Description of Artificial Sequence: Synthetic oligonucleotide
  Antisense strand to SEQ ID NO: 1226264
uuuccaaacacuugguaau

SEQ ID NO: 1226266 - RNA, 19 nt, Artificial Sequence
  Description of Artificial Sequence: Synthetic oligonucleotide
  Sense strand starting at position 3404 of SEQ ID NO: 917322
uuaccaaguguuuggaaag

SEQ ID NO: 1226267 - RNA, 19 nt, Artificial Sequence
  Description of Artificial Sequence: Synthetic oligonucleotide
  Antisense strand to SEQ ID NO: 1226266
cuuuccaaacacuugguaa

SEQ ID NO: 1226268 - RNA, 19 nt, Artificial Sequence
  Description of Artificial Sequence: Synthetic oligonucleotide
  Sense strand starting at position 3405 of SEQ ID NO: 917322
uaccaaguguuuggaaaga

SEQ ID NO: 1226269 - RNA, 19 nt, Artificial Sequence
  Description of Artificial Sequence: Synthetic oligonucleotide
  Antisense strand to SEQ ID NO: 1226268
ucuuuccaaacacuuggua

SEQ ID NO: 1226270 - RNA, 19 nt, Artificial Sequence
  Description of Artificial Sequence: Synthetic oligonucleotide
  Sense strand starting at position 3456 of SEQ ID NO: 917323
uguuguuguuggagcagua

SEQ ID NO: 1226271 - RNA, 19 nt, Artificial Sequence
  Description of Artificial Sequence: Synthetic oligonucleotide
  Antisense strand to SEQ ID NO: 1226270
uacugcuccaacaacaaca

SEQ ID NO: 1226272 - RNA, 19 nt, Artificial Sequence
  Description of Artificial Sequence: Synthetic oligonucleotide
  Sense strand starting at position 147 of SEQ ID NO: 917323
gagcaagacucuguccaua

SEQ ID NO: 1226273 - RNA, 19 nt, Artificial Sequence
  Description of Artificial Sequence: Synthetic oligonucleotide
  Antisense strand to SEQ ID NO: 1226272
uauggacagagucuugcuc

SEQ ID NO: 1226274 - RNA, 19 nt, Artificial Sequence
  Description of Artificial Sequence: Synthetic oligonucleotide
  Sense strand starting at position 149 of SEQ ID NO: 917323
gcaagacucuguccauaua

SEQ ID NO: 1226275 - RNA, 19 nt, Artificial Sequence
  Description of Artificial Sequence: Synthetic oligonucleotide
  Antisense strand to SEQ ID NO: 1226274
uauauggacagagucuugc

SEQ ID NO: 1226276 - RNA, 19 nt, Artificial Sequence
  Description of Artificial Sequence: Synthetic oligonucleotide
  Sense strand starting at position 246 of SEQ ID NO: 917323
gguuaaggauacuuacaug

SEQ ID NO: 1226277 - RNA, 19 nt, Artificial Sequence
  Description of Artificial Sequence: Synthetic oligonucleotide
  Antisense strand to SEQ ID NO: 1226276
cauguaaguauccuuaacc

SEQ ID NO: 1226278 - RNA, 19 nt, Artificial Sequence
  Description of Artificial Sequence: Synthetic oligonucleotide
  Sense strand starting at position 936 of SEQ ID NO: 917323
ccauuaucccaugacguca

SEQ ID NO: 1226279 - RNA, 19 nt, Artificial Sequence
  Description of Artificial Sequence: Synthetic oligonucleotide
  Antisense strand to SEQ ID NO: 1226278
ugacgucaugggauaaugg

SEQ ID NO: 1226280 - RNA, 19 nt, Artificial Sequence
  Description of Artificial Sequence: Synthetic oligonucleotide
  Sense strand starting at position 1056 of SEQ ID NO: 917323
gccuucugaguguuacgca

SEQ ID NO: 1226281 - RNA, 19 nt, Artificial Sequence
  Description of Artificial Sequence: Synthetic oligonucleotide
  Antisense strand to SEQ ID NO: 1226280
ugcguaacacucagaaggc

SEQ ID NO: 1226282 - RNA, 19 nt, Artificial Sequence
  Description of Artificial Sequence: Synthetic oligonucleotide
  Sense strand starting at position 1061 of SEQ ID NO: 917323
cugaguguuacgcauggaa

SEQ ID NO: 1226283 - RNA, 19 nt, Artificial Sequence
  Description of Artificial Sequence: Synthetic oligonucleotide
  Antisense strand to SEQ ID NO: 1226282
uuccaugcguaacacucag

SEQ ID NO: 1226284 - RNA, 19 nt, Artificial Sequence
  Description of Artificial Sequence: Synthetic oligonucleotide
  Sense strand starting at position 1063 of SEQ ID NO: 917323
gaguguuacgcauggaauu

SEQ ID NO: 1226285 - RNA, 19 nt, Artificial Sequence
  Description of Artificial Sequence: Synthetic oligonucleotide
  Antisense strand to SEQ ID NO: 1226284
aauuccaugcguaacacuc

SEQ ID NO: 1226286 - RNA, 19 nt, Artificial Sequence
  Description of Artificial Sequence: Synthetic oligonucleotide
  Sense strand starting at position 1064 of SEQ ID NO: 917323
aguguuacgcauggaauuu

SEQ ID NO: 1226287 - RNA, 19 nt, Artificial Sequence
  Description of Artificial Sequence: Synthetic oligonucleotide
  Antisense strand to SEQ ID NO: 1226286
aaauuccaugcguaacacu

SEQ ID NO: 1226288 - RNA, 19 nt, Artificial Sequence
  Description of Artificial Sequence: Synthetic oligonucleotide
  Sense strand starting at position 1106 of SEQ ID NO: 917323
aauaaaguucucggaggau

SEQ ID NO: 1226289 - RNA, 19 nt, Artificial Sequence
  Description of Artificial Sequence: Synthetic oligonucleotide
  Antisense strand to SEQ ID NO: 1226288
auccuccgagaacuuuauu

SEQ ID NO: 1226290 - RNA, 19 nt, Artificial Sequence
  Description of Artificial Sequence: Synthetic oligonucleotide
  Sense strand starting at position 1109 of SEQ ID NO: 917323
aaaguucucggaggauaaa

SEQ ID NO: 1226291 - RNA, 19 nt, Artificial Sequence
  Description of Artificial Sequence: Synthetic oligonucleotide
  Antisense strand to SEQ ID NO: 1226290
uuuauccuccgagaacuuu

SEQ ID NO: 1226292 - RNA, 19 nt, Artificial Sequence
  Description of Artificial Sequence: Synthetic oligonucleotide
  Sense strand starting at position 1212 of SEQ ID NO: 917323
cagaaacgauauccugagu

SEQ ID NO: 1226293 - RNA, 19 nt, Artificial Sequence
  Description of Artificial Sequence: Synthetic oligonucleotide
  Antisense strand to SEQ ID NO: 1226292
acucaggauaucguuucug

SEQ ID NO: 1226294 - RNA, 19 nt, Artificial Sequence
  Description of Artificial Sequence: Synthetic oligonucleotide
  Sense strand starting at position 1215 of SEQ ID NO: 917323
aaacgauauccugagucuc

SEQ ID NO: 1226295 - RNA, 19 nt, Artificial Sequence
  Description of Artificial Sequence: Synthetic oligonucleotide
  Antisense strand to SEQ ID NO: 1226294
gagacucaggauaucguuu

SEQ ID NO: 1226296 - RNA, 19 nt, Artificial Sequence
  Description of Artificial Sequence: Synthetic oligonucleotide
  Sense strand starting at position 1292 of SEQ ID NO: 917323
ugaauaguguacucuguuu

SEQ ID NO: 1226297 - RNA, 19 nt, Artificial Sequence
  Description of Artificial Sequence: Synthetic oligonucleotide
  Antisense strand to SEQ ID NO: 1226296
aaacagaguacacuauuca

SEQ ID NO: 1226298 - RNA, 19 nt, Artificial Sequence
  Description of Artificial Sequence: Synthetic oligonucleotide
  Sense strand starting at position 1297 of SEQ ID NO: 917323
aguguacucuguuuaccua

SEQ ID NO: 1226299 - RNA, 19 nt, Artificial Sequence
  Description of Artificial Sequence: Synthetic oligonucleotide
  Antisense strand to SEQ ID NO: 1226298
uagguaaacagaguacacu

SEQ ID NO: 1226300 - RNA, 19 nt, Artificial Sequence
  Description of Artificial Sequence: Synthetic oligonucleotide
  Sense strand starting at position 1345 of SEQ ID NO: 917323
gcacuugaauugucuacuu

SEQ ID NO: 1226301 - RNA, 19 nt, Artificial Sequence
  Description of Artificial Sequence: Synthetic oligonucleotide
  Antisense strand to SEQ ID NO: 1226300
aaguagacaauucaagugc

SEQ ID NO: 1226302 - RNA, 19 nt, Artificial Sequence
  Description of Artificial Sequence: Synthetic oligonucleotide
  Sense strand starting at position 1594 of SEQ ID NO: 917323
uuuguaaucguagcucugu

SEQ ID NO: 1226303 - RNA, 19 nt, Artificial Sequence
  Description of Artificial Sequence: Synthetic oligonucleotide
  Antisense strand to SEQ ID NO: 1226302
acagagcuacgauuacaaa

SEQ ID NO: 1226304 - RNA, 19 nt, Artificial Sequence
  Description of Artificial Sequence: Synthetic oligonucleotide
  Sense strand starting at position 1596 of SEQ ID NO: 917323
uguaaucguagcucuguuu

SEQ ID NO: 1226305 - RNA, 19 nt, Artificial Sequence
  Description of Artificial Sequence: Synthetic oligonucleotide
  Antisense strand to SEQ ID NO: 1226304
aaacagagcuacgauuaca

SEQ ID NO: 1226306 - RNA, 19 nt, Artificial Sequence
  Description of Artificial Sequence: Synthetic oligonucleotide
  Sense strand starting at position 1621 of SEQ ID NO: 917323
acacuaugaccuugggcaa

SEQ ID NO: 1226307 - RNA, 19 nt, Artificial Sequence
  Description of Artificial Sequence: Synthetic oligonucleotide
  Antisense strand to SEQ ID NO: 1226306
uugcccaaggucauagugu

SEQ ID NO: 1226308 - RNA, 19 nt, Artificial Sequence
  Description of Artificial Sequence: Synthetic oligonucleotide
  Sense strand starting at position 1815 of SEQ ID NO: 917323
ccgaacagugaguagcaua

SEQ ID NO: 1226309 - RNA, 19 nt, Artificial Sequence
  Description of Artificial Sequence: Synthetic oligonucleotide
  Antisense strand to SEQ ID NO: 1226308
uaugcuacucacuguucgg

SEQ ID NO: 1226310 - RNA, 19 nt, Artificial Sequence
  Description of Artificial Sequence: Synthetic oligonucleotide
  Sense strand starting at position 1917 of SEQ ID NO: 917323
aggaaacaucgccgagaca

SEQ ID NO: 1226311 - RNA, 19 nt, Artificial Sequence
  Description of Artificial Sequence: Synthetic oligonucleotide
  Antisense strand to SEQ ID NO: 1226310
ugucucggcgauguuuccu

SEQ ID NO: 1226312 - RNA, 19 nt, Artificial Sequence
  Description of Artificial Sequence: Synthetic oligonucleotide
  Sense strand starting at position 2156 of SEQ ID NO: 917323
gccagaguucagcaaaggu

SEQ ID NO: 1226313 - RNA, 19 nt, Artificial Sequence
  Description of Artificial Sequence: Synthetic oligonucleotide
  Antisense strand to SEQ ID NO: 1226312
accuuugcugaacucuggc

SEQ ID NO: 1226314 - RNA, 19 nt, Artificial Sequence
  Description of Artificial Sequence: Synthetic oligonucleotide
  Sense strand starting at position 2219 of SEQ ID NO: 917323
gggcgugaccaguugugca

SEQ ID NO: 1226315 - RNA, 19 nt, Artificial Sequence
  Description of Artificial Sequence: Synthetic oligonucleotide
  Antisense strand to SEQ ID NO: 1226314
ugcacaacuggucacgccc

SEQ ID NO: 1226316 - RNA, 19 nt, Artificial Sequence
  Description of Artificial Sequence: Synthetic oligonucleotide
  Sense strand starting at position 2221 of SEQ ID NO: 917323
gcgugaccaguugugcaaa

SEQ ID NO: 1226317 - RNA, 19 nt, Artificial Sequence
  Description of Artificial Sequence: Synthetic oligonucleotide
  Antisense strand to SEQ ID NO: 1226316
uuugcacaacuggucacgc

SEQ ID NO: 1226318 - RNA, 19 nt, Artificial Sequence
  Description of Artificial Sequence: Synthetic oligonucleotide
  Sense strand starting at position 2247 of SEQ ID NO: 917323
gauggugccagugagauca

SEQ ID NO: 1226319 - RNA, 19 nt, Artificial Sequence
  Description of Artificial Sequence: Synthetic oligonucleotide
  Antisense strand to SEQ ID NO: 1226318
ugaucucacuggcaccauc

SEQ ID NO: 1226320 - RNA, 19 nt, Artificial Sequence
  Description of Artificial Sequence: Synthetic oligonucleotide
  Sense strand starting at position 2258 of SEQ ID NO: 917323
ugagaucagucucuucuuu

SEQ ID NO: 1226321 - RNA, 19 nt, Artificial Sequence
  Description of Artificial Sequence: Synthetic oligonucleotide
  Antisense strand to SEQ ID NO: 1226320
aaagaagagacugaucuca

SEQ ID NO: 1226322 - RNA, 19 nt, Artificial Sequence
  Description of Artificial Sequence: Synthetic oligonucleotide
  Sense strand starting at position 2384 of SEQ ID NO: 917323
ccugcugcccuaugaauua

SEQ ID NO: 1226323 - RNA, 19 nt, Artificial Sequence
  Description of Artificial Sequence: Synthetic oligonucleotide
  Antisense strand to SEQ ID NO: 1226322
uaauucauagggcagcagg

SEQ ID NO: 1226324 - RNA, 19 nt, Artificial Sequence
  Description of Artificial Sequence: Synthetic oligonucleotide
  Sense strand starting at position 2789 of SEQ ID NO: 917323
cgagauucuuugucucaaa

SEQ ID NO: 1226325 - RNA, 19 nt, Artificial Sequence
  Description of Artificial Sequence: Synthetic oligonucleotide
  Antisense strand to SEQ ID NO: 1226324
uuugagacaaagaaucucg

SEQ ID NO: 1226326 - RNA, 19 nt, Artificial Sequence
  Description of Artificial Sequence: Synthetic oligonucleotide
  Sense strand starting at position 3437 of SEQ ID NO: 917323
gaaccuuugugacugaaug

SEQ ID NO: 1226327 - RNA, 19 nt, Artificial Sequence
  Description of Artificial Sequence: Synthetic oligonucleotide
  Antisense strand to SEQ ID NO: 1226326
cauucagucacaaagguuc

SEQ ID NO: 1226328 - RNA, 19 nt, Artificial Sequence
  Description of Artificial Sequence: Synthetic oligonucleotide
  Sense strand starting at position 3475 of SEQ ID NO: 917323
ggaugcuuacuuugucuga

SEQ ID NO: 1226329 - RNA, 19 nt, Artificial Sequence
  Description of Artificial Sequence: Synthetic oligonucleotide
  Antisense strand to SEQ ID NO: 1226328
ucagacaaaguaagcaucc

SEQ ID NO: 1226330 - RNA, 19 nt, Artificial Sequence
  Description of Artificial Sequence: Synthetic oligonucleotide
  Sense strand starting at position 3476 of SEQ ID NO: 917323
gaugcuuacuuugucugau

SEQ ID NO: 1226331 - RNA, 19 nt, Artificial Sequence
  Description of Artificial Sequence: Synthetic oligonucleotide
  Antisense strand to SEQ ID NO: 1226330
aucagacaaaguaagcauc

SEQ ID NO: 1226332 - RNA, 19 nt, Artificial Sequence
  Description of Artificial Sequence: Synthetic oligonucleotide
  Sense strand starting at position 3477 of SEQ ID NO: 917323
augcuuacuuugucugauu

SEQ ID NO: 1226333 - RNA, 19 nt, Artificial Sequence
  Description of Artificial Sequence: Synthetic oligonucleotide
  Antisense strand to SEQ ID NO: 1226332
aaucagacaaaguaagcau

SEQ ID NO: 1226334 - RNA, 19 nt, Artificial Sequence
  Description of Artificial Sequence: Synthetic oligonucleotide
  Sense strand starting at position 3478 of SEQ ID NO: 917323
ugcuuacuuugucugauuu

SEQ ID NO: 1226335 - RNA, 19 nt, Artificial Sequence
  Description of Artificial Sequence: Synthetic oligonucleotide
  Antisense strand to SEQ ID NO: 1226334
aaaucagacaaaguaagca

SEQ ID NO: 1226336 - RNA, 19 nt, Artificial Sequence
  Description of Artificial Sequence: Synthetic oligonucleotide
  Sense strand starting at position 3479 of SEQ ID NO: 917323
gcuuacuuugucugauuug

SEQ ID NO: 1226337 - RNA, 19 nt, Artificial Sequence
  Description of Artificial Sequence: Synthetic oligonucleotide
  Antisense strand to SEQ ID NO: 1226336
caaaucagacaaaguaagc

SEQ ID NO: 1226338 - RNA, 19 nt, Artificial Sequence
  Description of Artificial Sequence: Synthetic oligonucleotide
  Sense strand starting at position 3548 of SEQ ID NO: 917323
uggcaaauuuagcauaauu

SEQ ID NO: 1226339 - RNA, 19 nt, Artificial Sequence
  Description of Artificial Sequence: Synthetic oligonucleotide
  Antisense strand to SEQ ID NO: 1226338
aauuaugcuaaauuugcca

SEQ ID NO: 1226340 - RNA, 19 nt, Artificial Sequence
  Description of Artificial Sequence: Synthetic oligonucleotide
  Sense strand starting at position 3578 of SEQ ID NO: 917323
gugauucuagaauaguguu

SEQ ID NO: 1226341 - RNA, 19 nt, Artificial Sequence
  Description of Artificial Sequence: Synthetic oligonucleotide
  Antisense strand to SEQ ID NO: 1226340
aacacuauucuagaaucac

SEQ ID NO: 1226342 - RNA, 19 nt, Artificial Sequence
  Description of Artificial Sequence: Synthetic oligonucleotide
  Sense strand starting at position 3584 of SEQ ID NO: 917323
cuagaauaguguuccagug

SEQ ID NO: 1226343 - RNA, 19 nt, Artificial Sequence
  Description of Artificial Sequence: Synthetic oligonucleotide
  Antisense strand to SEQ ID NO: 1226342
cacuggaacacuauucuag

SEQ ID NO: 1226344 - RNA, 19 nt, Artificial Sequence
  Description of Artificial Sequence: Synthetic oligonucleotide
  Sense strand starting at position 3590 of SEQ ID NO: 917323
uaguguuccagugaguuga

SEQ ID NO: 1226345 - RNA, 19 nt, Artificial Sequence
  Description of Artificial Sequence: Synthetic oligonucleotide
  Antisense strand to SEQ ID NO: 1226344
ucaacucacuggaacacua

SEQ ID NO: 1226346 - RNA, 19 nt, Artificial Sequence
  Description of Artificial Sequence: Synthetic oligonucleotide
  Sense strand starting at position 3717 of SEQ ID NO: 917323
agggauuccuugucaugcu

SEQ ID NO: 1226347 - RNA, 19 nt, Artificial Sequence
  Description of Artificial Sequence: Synthetic oligonucleotide
  Antisense strand to SEQ ID NO: 1226346
agcaugacaaggaaucccu

SEQ ID NO: 1226348 - RNA, 19 nt, Artificial Sequence
  Description of Artificial Sequence: Synthetic oligonucleotide
  Sense strand starting at position 3816 of SEQ ID NO: 917323
guuugauuacuuggcacuu

SEQ ID NO: 1226349 - RNA, 19 nt, Artificial Sequence
  Description of Artificial Sequence: Synthetic oligonucleotide
  Antisense strand to SEQ ID NO: 1226348
aagugccaaguaaucaaac

SEQ ID NO: 1226350 - RNA, 19 nt, Artificial Sequence
  Description of Artificial Sequence: Synthetic oligonucleotide
  Sense strand starting at position 3838 of SEQ ID NO: 917324
acaagugacuauucugguu

SEQ ID NO: 1226351 - RNA, 19 nt, Artificial Sequence
  Description of Artificial Sequence: Synthetic oligonucleotide
  Antisense strand to SEQ ID NO: 1226350
aaccagaauagucacuugu

SEQ ID NO: 1226352 - RNA, 19 nt, Artificial Sequence
  Description of Artificial Sequence: Synthetic oligonucleotide
  Sense strand starting at position 90 of SEQ ID NO: 917324
cuguucuuuccugggagau

SEQ ID NO: 1226353 - RNA, 19 nt, Artificial Sequence
  Description of Artificial Sequence: Synthetic oligonucleotide
  Antisense strand to SEQ ID NO: 1226352
aucucccaggaaagaacag

SEQ ID NO: 1226354 - RNA, 19 nt, Artificial Sequence
  Description of Artificial Sequence: Synthetic oligonucleotide
  Sense strand starting at position 91 of SEQ ID NO: 917324
uguucuuuccugggagauu

SEQ ID NO: 1226355 - RNA, 19 nt, Artificial Sequence
  Description of Artificial Sequence: Synthetic oligonucleotide
  Antisense strand to SEQ ID NO: 1226354
aaucucccaggaaagaaca

SEQ ID NO: 1226356 - RNA, 19 nt, Artificial Sequence
  Description of Artificial Sequence: Synthetic oligonucleotide
  Sense strand starting at position 123 of SEQ ID NO: 917324
auagauucuagcggacuaa

SEQ ID NO: 1226357 - RNA, 19 nt, Artificial Sequence
  Description of Artificial Sequence: Synthetic oligonucleotide
  Antisense strand to SEQ ID NO: 1226356
uuaguccgcuagaaucuau

SEQ ID NO: 1226358 - RNA, 19 nt, Artificial Sequence
  Description of Artificial Sequence: Synthetic oligonucleotide
  Sense strand starting at position 124 of SEQ ID NO: 917324
uagauucuagcggacuaaa

SEQ ID NO: 1226359 - RNA, 19 nt, Artificial Sequence
  Description of Artificial Sequence: Synthetic oligonucleotide
  Antisense strand to SEQ ID NO: 1226358
uuuaguccgcuagaaucua

SEQ ID NO: 1226360 - RNA, 19 nt, Artificial Sequence
  Description of Artificial Sequence: Synthetic oligonucleotide
  Sense strand starting at position 127 of SEQ ID NO: 917324
auucuagcggacuaaauau

SEQ ID NO: 1226361 - RNA, 19 nt, Artificial Sequence
  Description of Artificial Sequence: Synthetic oligonucleotide
  Antisense strand to SEQ ID NO: 1226360
auauuuaguccgcuagaau

SEQ ID NO: 1226362 - RNA, 19 nt, Artificial Sequence
  Description of Artificial Sequence: Synthetic oligonucleotide
  Sense strand starting at position 365 of SEQ ID NO: 917324
guguacucuccauaaugag

SEQ ID NO: 1226363 - RNA, 19 nt, Artificial Sequence
  Description of Artificial Sequence: Synthetic oligonucleotide
  Antisense strand to SEQ ID NO: 1226362
cucauuauggagaguacac

SEQ ID NO: 1226364 - RNA, 19 nt, Artificial Sequence
  Description of Artificial Sequence: Synthetic oligonucleotide
  Sense strand starting at position 389 of SEQ ID NO: 917324
gcuguuuacgugcuagaac

SEQ ID NO: 1226365 - RNA, 19 nt, Artificial Sequence
  Description of Artificial Sequence: Synthetic oligonucleotide
  Antisense strand to SEQ ID NO: 1226364
guucuagcacguaaacagc

SEQ ID NO: 1226366 - RNA, 19 nt, Artificial Sequence
  Description of Artificial Sequence: Synthetic oligonucleotide
  Sense strand starting at position 526 of SEQ ID NO: 917324
agcuaaagacucuguauua

SEQ ID NO: 1226367 - RNA, 19 nt, Artificial Sequence
  Description of Artificial Sequence: Synthetic oligonucleotide
  Antisense strand to SEQ ID NO: 1226366
uaauacagagucuuuagcu

SEQ ID NO: 1226368 - RNA, 19 nt, Artificial Sequence
  Description of Artificial Sequence: Synthetic oligonucleotide
  Sense strand starting at position 527 of SEQ ID NO: 917324
gcuaaagacucuguauuaa

SEQ ID NO: 1226369 - RNA, 19 nt, Artificial Sequence
  Description of Artificial Sequence: Synthetic oligonucleotide
  Antisense strand to SEQ ID NO: 1226368
uuaauacagagucuuuagc

SEQ ID NO: 1226370 - RNA, 19 nt, Artificial Sequence
  Description of Artificial Sequence: Synthetic oligonucleotide
  Sense strand starting at position 893 of SEQ ID NO: 917324
auguuagucuucuuccaga

SEQ ID NO: 1226371 - RNA, 19 nt, Artificial Sequence
  Description of Artificial Sequence: Synthetic oligonucleotide
  Antisense strand to SEQ ID NO: 1226370
ucuggaagaagacuaacau

SEQ ID NO: 1226372 - RNA, 19 nt, Artificial Sequence
  Description of Artificial Sequence: Synthetic oligonucleotide
  Sense strand starting at position 904 of SEQ ID NO: 917324
cuuccagaacucuagugau

SEQ ID NO: 1226373 - RNA, 19 nt, Artificial Sequence
  Description of Artificial Sequence: Synthetic oligonucleotide
  Antisense strand to SEQ ID NO: 1226372
aucacuagaguucuggaag

SEQ ID NO: 1226374 - RNA, 19 nt, Artificial Sequence
  Description of Artificial Sequence: Synthetic oligonucleotide
  Sense strand starting at position 1317 of SEQ ID NO: 917324
ucguccuugguuuaggaaa

SEQ ID NO: 1226375 - RNA, 19 nt, Artificial Sequence
  Description of Artificial Sequence: Synthetic oligonucleotide
  Antisense strand to SEQ ID NO: 1226374
uuuccuaaaccaaggacga

SEQ ID NO: 1226376 - RNA, 19 nt, Artificial Sequence
  Description of Artificial Sequence: Synthetic oligonucleotide
  Sense strand starting at position 1498 of SEQ ID NO: 917324
gcuguucuccaucacuaga

SEQ ID NO: 1226377 - RNA, 19 nt, Artificial Sequence
  Description of Artificial Sequence: Synthetic oligonucleotide
  Antisense strand to SEQ ID NO: 1226376
ucuagugauggagaacagc

SEQ ID NO: 1226378 - RNA, 19 nt, Artificial Sequence
  Description of Artificial Sequence: Synthetic oligonucleotide
  Sense strand starting at position 1546 of SEQ ID NO: 917324
ggacuuauucguuacugug

SEQ ID NO: 1226379 - RNA, 19 nt, Artificial Sequence
  Description of Artificial Sequence: Synthetic oligonucleotide
  Antisense strand to SEQ ID NO: 1226378
cacaguaacgaauaagucc

SEQ ID NO: 1226380 - RNA, 19 nt, Artificial Sequence
  Description of Artificial Sequence: Synthetic oligonucleotide
  Sense strand starting at position 1662 of SEQ ID NO: 917324
ugagacuucucaguaagag

SEQ ID NO: 1226381 - RNA, 19 nt, Artificial Sequence
  Description of Artificial Sequence: Synthetic oligonucleotide
  Antisense strand to SEQ ID NO: 1226380
cucuuacugagaagucuca

SEQ ID NO: 1226382 - RNA, 19 nt, Artificial Sequence
  Description of Artificial Sequence: Synthetic oligonucleotide
  Sense strand starting at position 1674 of SEQ ID NO: 917324
guaagagaacuucguuuac

SEQ ID NO: 1226383 - RNA, 19 nt, Artificial Sequence
  Description of Artificial Sequence: Synthetic oligonucleotide
  Antisense strand to SEQ ID NO: 1226382
guaaacgaaguucucuuac

SEQ ID NO: 1226384 - RNA, 19 nt, Artificial Sequence
  Description of Artificial Sequence: Synthetic oligonucleotide
  Sense strand starting at position 1676 of SEQ ID NO: 917324
aagagaacuucguuuacuu

SEQ ID NO: 1226385 - RNA, 19 nt, Artificial Sequence
  Description of Artificial Sequence: Synthetic oligonucleotide
  Antisense strand to SEQ ID NO: 1226384
aaguaaacgaaguucucuu

SEQ ID NO: 1226386 - RNA, 19 nt, Artificial Sequence
  Description of Artificial Sequence: Synthetic oligonucleotide
  Sense strand starting at position 1807 of SEQ ID NO: 917324
caacgcauuuguccagcau

SEQ ID NO: 1226387 - RNA, 19 nt, Artificial Sequence
  Description of Artificial Sequence: Synthetic oligonucleotide
  Antisense strand to SEQ ID NO: 1226386
augcuggacaaaugcguug

SEQ ID NO: 1226388 - RNA, 19 nt, Artificial Sequence
  Description of Artificial Sequence: Synthetic oligonucleotide
  Sense strand starting at position 2081 of SEQ ID NO: 917324
ggucuaacaucccucggaa

SEQ ID NO: 1226389 - RNA, 19 nt, Artificial Sequence
  Description of Artificial Sequence: Synthetic oligonucleotide
  Antisense strand to SEQ ID NO: 1226388
uuccgagggauguuagacc

SEQ ID NO: 1226390 - RNA, 19 nt, Artificial Sequence
  Description of Artificial Sequence: Synthetic oligonucleotide
  Sense strand starting at position 2084 of SEQ ID NO: 917324
cuaacaucccucggaaguu

SEQ ID NO: 1226391 - RNA, 19 nt, Artificial Sequence
  Description of Artificial Sequence: Synthetic oligonucleotide
  Antisense strand to SEQ ID NO: 1226390
aacuuccgagggauguuag

SEQ ID NO: 1226392 - RNA, 19 nt, Artificial Sequence
  Description of Artificial Sequence: Synthetic oligonucleotide
  Sense strand starting at position 2412 of SEQ ID NO: 917324
cguccuuuaaaggaaaggu

SEQ ID NO: 1226393 - RNA, 19 nt, Artificial Sequence
  Description of Artificial Sequence: Synthetic oligonucleotide
  Antisense strand to SEQ ID NO: 1226392
accuuuccuuuaaaggacg

SEQ ID NO: 1226394 - RNA, 19 nt, Artificial Sequence
  Description of Artificial Sequence: Synthetic oligonucleotide
  Sense strand starting at position 2567 of SEQ ID NO: 917324
ugucgaauuucugcagcaa

SEQ ID NO: 1226395 - RNA, 19 nt, Artificial Sequence
  Description of Artificial Sequence: Synthetic oligonucleotide
  Antisense strand to SEQ ID NO: 1226394
uugcugcagaaauucgaca

SEQ ID NO: 1226396 - RNA, 19 nt, Artificial Sequence
  Description of Artificial Sequence: Synthetic oligonucleotide
  Sense strand starting at position 2568 of SEQ ID NO: 917324
gucgaauuucugcagcaau

SEQ ID NO: 1226397 - RNA, 19 nt, Artificial Sequence
  Description of Artificial Sequence: Synthetic oligonucleotide
  Antisense strand to SEQ ID NO: 1226396
auugcugcagaaauucgac

SEQ ID NO: 1226398 - RNA, 19 nt, Artificial Sequence
  Description of Artificial Sequence: Synthetic oligonucleotide
  Sense strand starting at position 2632 of SEQ ID NO: 917324
ccacuagggcuuuauaaau

SEQ ID NO: 1226399 - RNA, 19 nt, Artificial Sequence
  Description of Artificial Sequence: Synthetic oligonucleotide
  Antisense strand to SEQ ID NO: 1226398
auuuauaaagcccuagugg

SEQ ID NO: 1226400 - RNA, 19 nt, Artificial Sequence
  Description of Artificial Sequence: Synthetic oligonucleotide
  Sense strand starting at position 2711 of SEQ ID NO: 917324
uaaggaucguaagugaaag

SEQ ID NO: 1226401 - RNA, 19 nt, Artificial Sequence
  Description of Artificial Sequence: Synthetic oligonucleotide
  Antisense strand to SEQ ID NO: 1226400
cuuucacuuacgauccuua

SEQ ID NO: 1226402 - RNA, 19 nt, Artificial Sequence
  Description of Artificial Sequence: Synthetic oligonucleotide
  Sense strand starting at position 2995 of SEQ ID NO: 917324
gaaauuccucaagggcaga

SEQ ID NO: 1226403 - RNA, 19 nt, Artificial Sequence
  Description of Artificial Sequence: Synthetic oligonucleotide
  Antisense strand to SEQ ID NO: 1226402
ucugcccuugaggaauuuc

SEQ ID NO: 1226404 - RNA, 19 nt, Artificial Sequence
  Description of Artificial Sequence: Synthetic oligonucleotide
  Sense strand starting at position 3068 of SEQ ID NO: 917324
ggauuccugguacgaagaa

SEQ ID NO: 1226405 - RNA, 19 nt, Artificial Sequence
  Description of Artificial Sequence: Synthetic oligonucleotide
  Antisense strand to SEQ ID NO: 1226404
uucuucguaccaggaaucc

SEQ ID NO: 1226406 - RNA, 19 nt, Artificial Sequence
  Description of Artificial Sequence: Synthetic oligonucleotide
  Sense strand starting at position 3121 of SEQ ID NO: 917324
ggcguugucuuauuucuca

SEQ ID NO: 1226407 - RNA, 19 nt, Artificial Sequence
  Description of Artificial Sequence: Synthetic oligonucleotide
  Antisense strand to SEQ ID NO: 1226406
ugagaaauaagacaacgcc

SEQ ID NO: 1226408 - RNA, 19 nt, Artificial Sequence
  Description of Artificial Sequence: Synthetic oligonucleotide
  Sense strand starting at position 3124 of SEQ ID NO: 917324
guugucuuauuucucauua

SEQ ID NO: 1226409 - RNA, 19 nt, Artificial Sequence
  Description of Artificial Sequence: Synthetic oligonucleotide
  Antisense strand to SEQ ID NO: 1226408
uaaugagaaauaagacaac

SEQ ID NO: 1226410 - RNA, 19 nt, Artificial Sequence
  Description of Artificial Sequence: Synthetic oligonucleotide
  Sense strand starting at position 3456 of SEQ ID NO: 917324
aaguuaggugcucagcaau

SEQ ID NO: 1226411 - RNA, 19 nt, Artificial Sequence
  Description of Artificial Sequence: Synthetic oligonucleotide
  Antisense strand to SEQ ID NO: 1226410
auugcugagcaccuaacuu

SEQ ID NO: 1226412 - RNA, 19 nt, Artificial Sequence
  Description of Artificial Sequence: Synthetic oligonucleotide
  Sense strand starting at position 3459 of SEQ ID NO: 917324
uuaggugcucagcaauuau

SEQ ID NO: 1226413 - RNA, 19 nt, Artificial Sequence
  Description of Artificial Sequence: Synthetic oligonucleotide
  Antisense strand to SEQ ID NO: 1226412
auaauugcugagcaccuaa

SEQ ID NO: 1226414 - RNA, 19 nt, Artificial Sequence
  Description of Artificial Sequence: Synthetic oligonucleotide
  Sense strand starting at position 3707 of SEQ ID NO: 917324
cuugcauugcuagacugaa

SEQ ID NO: 1226415 - RNA, 19 nt, Artificial Sequence
  Description of Artificial Sequence: Synthetic oligonucleotide
  Antisense strand to SEQ ID NO: 1226414
uucagucuagcaaugcaag

SEQ ID NO: 1226416 - RNA, 19 nt, Artificial Sequence
  Description of Artificial Sequence: Synthetic oligonucleotide
  Sense strand starting at position 3745 of SEQ ID NO: 917324
acaguacgaguccaugaaa

SEQ ID NO: 1226417 - RNA, 19 nt, Artificial Sequence
  Description of Artificial Sequence: Synthetic oligonucleotide
  Antisense strand to SEQ ID NO: 1226416
uuucauggacucguacugu

SEQ ID NO: 1226418 - RNA, 19 nt, Artificial Sequence
  Description of Artificial Sequence: Synthetic oligonucleotide
  Sense strand starting at position 3773 of SEQ ID NO: 917324
ggaugugaaguauguacaa

SEQ ID NO: 1226419 - RNA, 19 nt, Artificial Sequence
  Description of Artificial Sequence: Synthetic oligonucleotide
  Antisense strand to SEQ ID NO: 1226418
uuguacauacuucacaucc

SEQ ID NO: 1226420 - RNA, 19 nt, Artificial Sequence
  Description of Artificial Sequence: Synthetic oligonucleotide
  Sense strand starting at position 3775 of SEQ ID NO: 917324
augugaaguauguacaagu

SEQ ID NO: 1226421 - RNA, 19 nt, Artificial Sequence
  Description of Artificial Sequence: Synthetic oligonucleotide
  Antisense strand to SEQ ID NO: 1226420
acuuguacauacuucacau

SEQ ID NO: 1226422 - RNA, 19 nt, Artificial Sequence
  Description of Artificial Sequence: Synthetic oligonucleotide
  Sense strand starting at position 3839 of SEQ ID NO: 917324
gguaauagcacagguagau

SEQ ID NO: 1226423 - RNA, 19 nt, Artificial Sequence
  Description of Artificial Sequence: Synthetic oligonucleotide
  Antisense strand to SEQ ID NO: 1226422
aucuaccugugcuauuacc

SEQ ID NO: 1226424 - RNA, 19 nt, Artificial Sequence
  Description of Artificial Sequence: Synthetic oligonucleotide
  Sense strand starting at position 3863 of SEQ ID NO: 917324
ccaaguaaucacugguaac

SEQ ID NO: 1226425 - RNA, 19 nt, Artificial Sequence
  Description of Artificial Sequence: Synthetic oligonucleotide
  Antisense strand to SEQ ID NO: 1226424
guuaccagugauuacuugg

SEQ ID NO: 1226426 - RNA, 19 nt, Artificial Sequence
  Description of Artificial Sequence: Synthetic oligonucleotide
  Sense strand starting at position 3948 of SEQ ID NO: 917324
uuaggaagcuuucuagacu

SEQ ID NO: 1226427 - RNA, 19 nt, Artificial Sequence
  Description of Artificial Sequence: Synthetic oligonucleotide
  Antisense strand to SEQ ID NO: 1226426
agucuagaaagcuuccuaa

SEQ ID NO: 1226428 - RNA, 19 nt, Artificial Sequence
  Description of Artificial Sequence: Synthetic oligonucleotide
  Sense strand starting at position 3960 of SEQ ID NO: 917324
cuagacuuccauugucaga

SEQ ID NO: 1226429 - RNA, 19 nt, Artificial Sequence
  Description of Artificial Sequence: Synthetic oligonucleotide
  Antisense strand to SEQ ID NO: 1226428
ucugacaauggaagucuag

SEQ ID NO: 1226430 - RNA, 19 nt, Artificial Sequence
  Description of Artificial Sequence: Synthetic oligonucleotide
  Sense strand starting at position 3962 of SEQ ID NO: 917325
agacuuccauugucagaug

SEQ ID NO: 1226431 - RNA, 19 nt, Artificial Sequence
  Description of Artificial Sequence: Synthetic oligonucleotide
  Antisense strand to SEQ ID NO: 1226430
caucugacaauggaagucu

SEQ ID NO: 1226432 - RNA, 19 nt, Artificial Sequence
  Description of Artificial Sequence: Synthetic oligonucleotide
  Sense strand starting at position 98 of SEQ ID NO: 917325
cuguucuuuccugggagau

SEQ ID NO: 1226433 - RNA, 19 nt, Artificial Sequence
  Description of Artificial Sequence: Synthetic oligonucleotide
  Antisense strand to SEQ ID NO: 1226432
aucucccaggaaagaacag

SEQ ID NO: 1226434 - RNA, 19 nt, Artificial Sequence
  Description of Artificial Sequence: Synthetic oligonucleotide
  Sense strand starting at position 99 of SEQ ID NO: 917325
uguucuuuccugggagauu

SEQ ID NO: 1226435 - RNA, 19 nt, Artificial Sequence
  Description of Artificial Sequence: Synthetic oligonucleotide
  Antisense strand to SEQ ID NO: 1226434
aaucucccaggaaagaaca

SEQ ID NO: 1226436 - RNA, 19 nt, Artificial Sequence
  Description of Artificial Sequence: Synthetic oligonucleotide
  Sense strand starting at position 131 of SEQ ID NO: 917325
auagauucuagcggacuaa

SEQ ID NO: 1226437 - RNA, 19 nt, Artificial Sequence
  Description of Artificial Sequence: Synthetic oligonucleotide
  Antisense strand to SEQ ID NO: 1226436
uuaguccgcuagaaucuau

SEQ ID NO: 1226438 - RNA, 19 nt, Artificial Sequence
  Description of Artificial Sequence: Synthetic oligonucleotide
  Sense strand starting at position 132 of SEQ ID NO: 917325
uagauucuagcggacuaaa

SEQ ID NO: 1226439 - RNA, 19 nt, Artificial Sequence
  Description of Artificial Sequence: Synthetic oligonucleotide
  Antisense strand to SEQ ID NO: 1226438
uuuaguccgcuagaaucua

SEQ ID NO: 1226440 - RNA, 19 nt, Artificial Sequence
  Description of Artificial Sequence: Synthetic oligonucleotide
  Sense strand starting at position 135 of SEQ ID NO: 917325
auucuagcggacuaaauau

SEQ ID NO: 1226441 - RNA, 19 nt, Artificial Sequence
  Description of Artificial Sequence: Synthetic oligonucleotide
  Antisense strand to SEQ ID NO: 1226440
auauuuaguccgcuagaau

SEQ ID NO: 1226442 - RNA, 19 nt, Artificial Sequence
  Description of Artificial Sequence: Synthetic oligonucleotide
  Sense strand starting at position 373 of SEQ ID NO: 917325
guguacucuccauaaugag

SEQ ID NO: 1226443 - RNA, 19 nt, Artificial Sequence
  Description of Artificial Sequence: Synthetic oligonucleotide
  Antisense strand to SEQ ID NO: 1226442
cucauuauggagaguacac

SEQ ID NO: 1226444 - RNA, 19 nt, Artificial Sequence
  Description of Artificial Sequence: Synthetic oligonucleotide
  Sense strand starting at position 397 of SEQ ID NO: 917325
gcuguuuacgugcuagaac

SEQ ID NO: 1226445 - RNA, 19 nt, Artificial Sequence
  Description of Artificial Sequence: Synthetic oligonucleotide
  Antisense strand to SEQ ID NO: 1226444
guucuagcacguaaacagc

SEQ ID NO: 1226446 - RNA, 19 nt, Artificial Sequence
  Description of Artificial Sequence: Synthetic oligonucleotide
  Sense strand starting at position 534 of SEQ ID NO: 917325
agcuaaagacucuguauua

SEQ ID NO: 1226447 - RNA, 19 nt, Artificial Sequence
  Description of Artificial Sequence: Synthetic oligonucleotide
  Antisense strand to SEQ ID NO: 1226446
uaauacagagucuuuagcu

SEQ ID NO: 1226448 - RNA, 19 nt, Artificial Sequence
  Description of Artificial Sequence: Synthetic oligonucleotide
  Sense strand starting at position 535 of SEQ ID NO: 917325
gcuaaagacucuguauuaa

SEQ ID NO: 1226449 - RNA, 19 nt, Artificial Sequence
  Description of Artificial Sequence: Synthetic oligonucleotide
  Antisense strand to SEQ ID NO: 1226448
uuaauacagagucuuuagc

SEQ ID NO: 1226450 - RNA, 19 nt, Artificial Sequence
  Description of Artificial Sequence: Synthetic oligonucleotide
  Sense strand starting at position 901 of SEQ ID NO: 917325
auguuagucuucuuccaga

SEQ ID NO: 1226451 - RNA, 19 nt, Artificial Sequence
  Description of Artificial Sequence: Synthetic oligonucleotide
  Antisense strand to SEQ ID NO: 1226450
ucuggaagaagacuaacau

SEQ ID NO: 1226452 - RNA, 19 nt, Artificial Sequence
  Description of Artificial Sequence: Synthetic oligonucleotide
  Sense strand starting at position 912 of SEQ ID NO: 917325
cuuccagaacucuagugau

SEQ ID NO: 1226453 - RNA, 19 nt, Artificial Sequence
  Description of Artificial Sequence: Synthetic oligonucleotide
  Antisense strand to SEQ ID NO: 1226452
aucacuagaguucuggaag

SEQ ID NO: 1226454 - RNA, 19 nt, Artificial Sequence
  Description of Artificial Sequence: Synthetic oligonucleotide
  Sense strand starting at position 1325 of SEQ ID NO: 917325
ucguccuugguuuaggaaa

SEQ ID NO: 1226455 - RNA, 19 nt, Artificial Sequence
  Description of Artificial Sequence: Synthetic oligonucleotide
  Antisense strand to SEQ ID NO: 1226454
uuuccuaaaccaaggacga

SEQ ID NO: 1226456 - RNA, 19 nt, Artificial Sequence
  Description of Artificial Sequence: Synthetic oligonucleotide
  Sense strand starting at position 1506 of SEQ ID NO: 917325
gcuguucuccaucacuaga

SEQ ID NO: 1226457 - RNA, 19 nt, Artificial Sequence
  Description of Artificial Sequence: Synthetic oligonucleotide
  Antisense strand to SEQ ID NO: 1226456
ucuagugauggagaacagc

SEQ ID NO: 1226458 - RNA, 19 nt, Artificial Sequence
  Description of Artificial Sequence: Synthetic oligonucleotide
  Sense strand starting at position 1554 of SEQ ID NO: 917325
ggacuuauucguuacugug

SEQ ID NO: 1226459 - RNA, 19 nt, Artificial Sequence
  Description of Artificial Sequence: Synthetic oligonucleotide
  Antisense strand to SEQ ID NO: 1226458
cacaguaacgaauaagucc

SEQ ID NO: 1226460 - RNA, 19 nt, Artificial Sequence
  Description of Artificial Sequence: Synthetic oligonucleotide
  Sense strand starting at position 1670 of SEQ ID NO: 917325
ugagacuucucaguaagag

SEQ ID NO: 1226461 - RNA, 19 nt, Artificial Sequence
  Description of Artificial Sequence: Synthetic oligonucleotide
  Antisense strand to SEQ ID NO: 1226460
cucuuacugagaagucuca

SEQ ID NO: 1226462 - RNA, 19 nt, Artificial Sequence
  Description of Artificial Sequence: Synthetic oligonucleotide
  Sense strand starting at position 1682 of SEQ ID NO: 917325
guaagagaacuucguuuac

SEQ ID NO: 1226463 - RNA, 19 nt, Artificial Sequence
  Description of Artificial Sequence: Synthetic oligonucleotide
  Antisense strand to SEQ ID NO: 1226462
guaaacgaaguucucuuac

SEQ ID NO: 1226464 - RNA, 19 nt, Artificial Sequence
  Description of Artificial Sequence: Synthetic oligonucleotide
  Sense strand starting at position 1684 of SEQ ID NO: 917325
aagagaacuucguuuacuu

SEQ ID NO: 1226465 - RNA, 19 nt, Artificial Sequence
  Description of Artificial Sequence: Synthetic oligonucleotide
  Antisense strand to SEQ ID NO: 1226464
aaguaaacgaaguucucuu

SEQ ID NO: 1226466 - RNA, 19 nt, Artificial Sequence
  Description of Artificial Sequence: Synthetic oligonucleotide
  Sense strand starting at position 1815 of SEQ ID NO: 917325
caacgcauuuguccagcau

SEQ ID NO: 1226467 - RNA, 19 nt, Artificial Sequence
  Description of Artificial Sequence: Synthetic oligonucleotide
  Antisense strand to SEQ ID NO: 1226466
augcuggacaaaugcguug

SEQ ID NO: 1226468 - RNA, 19 nt, Artificial Sequence
  Description of Artificial Sequence: Synthetic oligonucleotide
  Sense strand starting at position 2089 of SEQ ID NO: 917325
ggucuaacaucccucggaa

SEQ ID NO: 1226469 - RNA, 19 nt, Artificial Sequence
  Description of Artificial Sequence: Synthetic oligonucleotide
  Antisense strand to SEQ ID NO: 1226468
uuccgagggauguuagacc

SEQ ID NO: 1226470 - RNA, 19 nt, Artificial Sequence
  Description of Artificial Sequence: Synthetic oligonucleotide
  Sense strand starting at position 2092 of SEQ ID NO: 917325
cuaacaucccucggaaguu

SEQ ID NO: 1226471 - RNA, 19 nt, Artificial Sequence
  Description of Artificial Sequence: Synthetic oligonucleotide
  Antisense strand to SEQ ID NO: 1226470
aacuuccgagggauguuag

SEQ ID NO: 1226472 - RNA, 19 nt, Artificial Sequence
  Description of Artificial Sequence: Synthetic oligonucleotide
  Sense strand starting at position 2420 of SEQ ID NO: 917325
cguccuuuaaaggaaaggu

SEQ ID NO: 1226473 - RNA, 19 nt, Artificial Sequence
  Description of Artificial Sequence: Synthetic oligonucleotide
  Antisense strand to SEQ ID NO: 1226472
accuuuccuuuaaaggacg

SEQ ID NO: 1226474 - RNA, 19 nt, Artificial Sequence
  Description of Artificial Sequence: Synthetic oligonucleotide
  Sense strand starting at position 2575 of SEQ ID NO: 917325
ugucgaauuucugcagcaa

SEQ ID NO: 1226475 - RNA, 19 nt, Artificial Sequence
  Description of Artificial Sequence: Synthetic oligonucleotide
  Antisense strand to SEQ ID NO: 1226474
uugcugcagaaauucgaca

SEQ ID NO: 1226476 - RNA, 19 nt, Artificial Sequence
  Description of Artificial Sequence: Synthetic oligonucleotide
  Sense strand starting at position 2576 of SEQ ID NO: 917325
gucgaauuucugcagcaau

SEQ ID NO: 1226477 - RNA, 19 nt, Artificial Sequence
  Description of Artificial Sequence: Synthetic oligonucleotide
  Antisense strand to SEQ ID NO: 1226476
auugcugcagaaauucgac

SEQ ID NO: 1226478 - RNA, 19 nt, Artificial Sequence
  Description of Artificial Sequence: Synthetic oligonucleotide
  Sense strand starting at position 2640 of SEQ ID NO: 917325
ccacuagggcuuuauaaau

SEQ ID NO: 1226479 - RNA, 19 nt, Artificial Sequence
  Description of Artificial Sequence: Synthetic oligonucleotide
  Antisense strand to SEQ ID NO: 1226478
auuuauaaagcccuagugg

SEQ ID NO: 1226480 - RNA, 19 nt, Artificial Sequence
  Description of Artificial Sequence: Synthetic oligonucleotide
  Sense strand starting at position 2719 of SEQ ID NO: 917325
uaaggaucguaagugaaag

SEQ ID NO: 1226481 - RNA, 19 nt, Artificial Sequence
  Description of Artificial Sequence: Synthetic oligonucleotide
  Antisense strand to SEQ ID NO: 1226480
cuuucacuuacgauccuua

SEQ ID NO: 1226482 - RNA, 19 nt, Artificial Sequence
  Description of Artificial Sequence: Synthetic oligonucleotide
  Sense strand starting at position 3003 of SEQ ID NO: 917325
gaaauuccucaagggcaga

SEQ ID NO: 1226483 - RNA, 19 nt, Artificial Sequence
  Description of Artificial Sequence: Synthetic oligonucleotide
  Antisense strand to SEQ ID NO: 1226482
ucugcccuugaggaauuuc

SEQ ID NO: 1226484 - RNA, 19 nt, Artificial Sequence
  Description of Artificial Sequence: Synthetic oligonucleotide
  Sense strand starting at position 3076 of SEQ ID NO: 917325
ggauuccugguacgaagaa

SEQ ID NO: 1226485 - RNA, 19 nt, Artificial Sequence
  Description of Artificial Sequence: Synthetic oligonucleotide
  Antisense strand to SEQ ID NO: 1226484
uucuucguaccaggaaucc

SEQ ID NO: 1226486 - RNA, 19 nt, Artificial Sequence
  Description of Artificial Sequence: Synthetic oligonucleotide
  Sense strand starting at position 3129 of SEQ ID NO: 917325
ggcguugucuuauuucuca

SEQ ID NO: 1226487 - RNA, 19 nt, Artificial Sequence
  Description of Artificial Sequence: Synthetic oligonucleotide
  Antisense strand to SEQ ID NO: 1226486
ugagaaauaagacaacgcc

SEQ ID NO: 1226488 - RNA, 19 nt, Artificial Sequence
  Description of Artificial Sequence: Synthetic oligonucleotide
  Sense strand starting at position 3132 of SEQ ID NO: 917325
guugucuuauuucucauua

SEQ ID NO: 1226489 - RNA, 19 nt, Artificial Sequence
  Description of Artificial Sequence: Synthetic oligonucleotide
  Antisense strand to SEQ ID NO: 1226488
uaaugagaaauaagacaac

SEQ ID NO: 1226490 - RNA, 19 nt, Artificial Sequence
  Description of Artificial Sequence: Synthetic oligonucleotide
  Sense strand starting at position 3464 of SEQ ID NO: 917325
aaguuaggugcucagcaau

SEQ ID NO: 1226491 - RNA, 19 nt, Artificial Sequence
  Description of Artificial Sequence: Synthetic oligonucleotide
  Antisense strand to SEQ ID NO: 1226490
auugcugagcaccuaacuu

SEQ ID NO: 1226492 - RNA, 19 nt, Artificial Sequence
  Description of Artificial Sequence: Synthetic oligonucleotide
  Sense strand starting at position 3467 of SEQ ID NO: 917325
uuaggugcucagcaauuau

SEQ ID NO: 1226493 - RNA, 19 nt, Artificial Sequence
  Description of Artificial Sequence: Synthetic oligonucleotide
  Antisense strand to SEQ ID NO: 1226492
auaauugcugagcaccuaa

SEQ ID NO: 1226494 - RNA, 19 nt, Artificial Sequence
  Description of Artificial Sequence: Synthetic oligonucleotide
  Sense strand starting at position 3715 of SEQ ID NO: 917325
cuugcauugcuagacugaa

SEQ ID NO: 1226495 - RNA, 19 nt, Artificial Sequence
  Description of Artificial Sequence: Synthetic oligonucleotide
  Antisense strand to SEQ ID NO: 1226494
uucagucuagcaaugcaag

SEQ ID NO: 1226496 - RNA, 19 nt, Artificial Sequence
  Description of Artificial Sequence: Synthetic oligonucleotide
  Sense strand starting at position 3753 of SEQ ID NO: 917325
acaguacgaguccaugaaa

SEQ ID NO: 1226497 - RNA, 19 nt, Artificial Sequence
  Description of Artificial Sequence: Synthetic oligonucleotide
  Antisense strand to SEQ ID NO: 1226496
uuucauggacucguacugu

SEQ ID NO: 1226498 - RNA, 19 nt, Artificial Sequence
  Description of Artificial Sequence: Synthetic oligonucleotide
  Sense strand starting at position 3781 of SEQ ID NO: 917325
ggaugugaaguauguacaa

SEQ ID NO: 1226499 - RNA, 19 nt, Artificial Sequence
  Description of Artificial Sequence: Synthetic oligonucleotide
  Antisense strand to SEQ ID NO: 1226498
uuguacauacuucacaucc

SEQ ID NO: 1226500 - RNA, 19 nt, Artificial Sequence
  Description of Artificial Sequence: Synthetic oligonucleotide
  Sense strand starting at position 3783 of SEQ ID NO: 917325
augugaaguauguacaagu

SEQ ID NO: 1226501 - RNA, 19 nt, Artificial Sequence
  Description of Artificial Sequence: Synthetic oligonucleotide
  Antisense strand to SEQ ID NO: 1226500
acuuguacauacuucacau

SEQ ID NO: 1226502 - RNA, 19 nt, Artificial Sequence
  Description of Artificial Sequence: Synthetic oligonucleotide
  Sense strand starting at position 3847 of SEQ ID NO: 917325
gguaauagcacagguagau

SEQ ID NO: 1226503 - RNA, 19 nt, Artificial Sequence
  Description of Artificial Sequence: Synthetic oligonucleotide
  Antisense strand to SEQ ID NO: 1226502
aucuaccugugcuauuacc

SEQ ID NO: 1226504 - RNA, 19 nt, Artificial Sequence
  Description of Artificial Sequence: Synthetic oligonucleotide
  Sense strand starting at position 3871 of SEQ ID NO: 917325
ccaaguaaucacugguaac

SEQ ID NO: 1226505 - RNA, 19 nt, Artificial Sequence
  Description of Artificial Sequence: Synthetic oligonucleotide
  Antisense strand to SEQ ID NO: 1226504
guuaccagugauuacuugg

SEQ ID NO: 1226506 - RNA, 19 nt, Artificial Sequence
  Description of Artificial Sequence: Synthetic oligonucleotide
  Sense strand starting at position 3956 of SEQ ID NO: 917325
uuaggaagcuuucuagacu

SEQ ID NO: 1226507 - RNA, 19 nt, Artificial Sequence
  Description of Artificial Sequence: Synthetic oligonucleotide
  Antisense strand to SEQ ID NO: 1226506
agucuagaaagcuuccuaa

SEQ ID NO: 1226508 - RNA, 19 nt, Artificial Sequence
  Description of Artificial Sequence: Synthetic oligonucleotide
  Sense strand starting at position 3968 of SEQ ID NO: 917325
cuagacuuccauugucaga

SEQ ID NO: 1226509 - RNA, 19 nt, Artificial Sequence
  Description of Artificial Sequence: Synthetic oligonucleotide
  Antisense strand to SEQ ID NO: 1226508
ucugacaauggaagucuag

SEQ ID NO: 1226510 - RNA, 19 nt, Artificial Sequence
  Description of Artificial Sequence: Synthetic oligonucleotide
  Sense strand starting at position 3970 of SEQ ID NO: 917326
agacuuccauugucagaug

SEQ ID NO: 1226511 - RNA, 19 nt, Artificial Sequence
  Description of Artificial Sequence: Synthetic oligonucleotide
  Antisense strand to SEQ ID NO: 1226510
caucugacaauggaagucu

SEQ ID NO: 1226512 - RNA, 19 nt, Artificial Sequence
  Description of Artificial Sequence: Synthetic oligonucleotide
  Sense strand starting at position 121 of SEQ ID NO: 917326
agcuaaagacucuguauua

SEQ ID NO: 1226513 - RNA, 19 nt, Artificial Sequence
  Description of Artificial Sequence: Synthetic oligonucleotide
  Antisense strand to SEQ ID NO: 1226512
uaauacagagucuuuagcu

SEQ ID NO: 1226514 - RNA, 19 nt, Artificial Sequence
  Description of Artificial Sequence: Synthetic oligonucleotide
  Sense strand starting at position 122 of SEQ ID NO: 917326
gcuaaagacucuguauuaa

SEQ ID NO: 1226515 - RNA, 19 nt, Artificial Sequence
  Description of Artificial Sequence: Synthetic oligonucleotide
  Antisense strand to SEQ ID NO: 1226514
uuaauacagagucuuuagc

SEQ ID NO: 1226516 - RNA, 19 nt, Artificial Sequence
  Description of Artificial Sequence: Synthetic oligonucleotide
  Sense strand starting at position 477 of SEQ ID NO: 917326
auguuaauccuauguuagu

SEQ ID NO: 1226517 - RNA, 19 nt, Artificial Sequence
  Description of Artificial Sequence: Synthetic oligonucleotide
  Antisense strand to SEQ ID NO: 1226516
acuaacauaggauuaacau

SEQ ID NO: 1226518 - RNA, 19 nt, Artificial Sequence
  Description of Artificial Sequence: Synthetic oligonucleotide
  Sense strand starting at position 488 of SEQ ID NO: 917326
auguuagucuucuuccaga

SEQ ID NO: 1226519 - RNA, 19 nt, Artificial Sequence
  Description of Artificial Sequence: Synthetic oligonucleotide
  Antisense strand to SEQ ID NO: 1226518
ucuggaagaagacuaacau

SEQ ID NO: 1226520 - RNA, 19 nt, Artificial Sequence
  Description of Artificial Sequence: Synthetic oligonucleotide
  Sense strand starting at position 499 of SEQ ID NO: 917326
cuuccagaacucuagugau

SEQ ID NO: 1226521 - RNA, 19 nt, Artificial Sequence
  Description of Artificial Sequence: Synthetic oligonucleotide
  Antisense strand to SEQ ID NO: 1226520
aucacuagaguucuggaag

SEQ ID NO: 1226522 - RNA, 19 nt, Artificial Sequence
  Description of Artificial Sequence: Synthetic oligonucleotide
  Sense strand starting at position 661 of SEQ ID NO: 917326
ucaccaccgucaguuuaaa

SEQ ID NO: 1226523 - RNA, 19 nt, Artificial Sequence
  Description of Artificial Sequence: Synthetic oligonucleotide
  Antisense strand to SEQ ID NO: 1226522
uuuaaacugacggugguga

SEQ ID NO: 1226524 - RNA, 19 nt, Artificial Sequence
  Description of Artificial Sequence: Synthetic oligonucleotide
  Sense strand starting at position 912 of SEQ ID NO: 917326
ucguccuugguuuaggaaa

SEQ ID NO: 1226525 - RNA, 19 nt, Artificial Sequence
  Description of Artificial Sequence: Synthetic oligonucleotide
  Antisense strand to SEQ ID NO: 1226524
uuuccuaaaccaaggacga

SEQ ID NO: 1226526 - RNA, 19 nt, Artificial Sequence
  Description of Artificial Sequence: Synthetic oligonucleotide
  Sense strand starting at position 1093 of SEQ ID NO: 917326
gcuguucuccaucacuaga

SEQ ID NO: 1226527 - RNA, 19 nt, Artificial Sequence
  Description of Artificial Sequence: Synthetic oligonucleotide
  Antisense strand to SEQ ID NO: 1226526
ucuagugauggagaacagc

SEQ ID NO: 1226528 - RNA, 19 nt, Artificial Sequence
  Description of Artificial Sequence: Synthetic oligonucleotide
  Sense strand starting at position 1141 of SEQ ID NO: 917326
ggacuuauucguuacugug

SEQ ID NO: 1226529 - RNA, 19 nt, Artificial Sequence
  Description of Artificial Sequence: Synthetic oligonucleotide
  Antisense strand to SEQ ID NO: 1226528
cacaguaacgaauaagucc

SEQ ID NO: 1226530 - RNA, 19 nt, Artificial Sequence
  Description of Artificial Sequence: Synthetic oligonucleotide
  Sense strand starting at position 1156 of SEQ ID NO: 917326
uguguugugccugacagaa

SEQ ID NO: 1226531 - RNA, 19 nt, Artificial Sequence
  Description of Artificial Sequence: Synthetic oligonucleotide
  Antisense strand to SEQ ID NO: 1226530
uucugucaggcacaacaca

SEQ ID NO: 1226532 - RNA, 19 nt, Artificial Sequence
  Description of Artificial Sequence: Synthetic oligonucleotide
  Sense strand starting at position 1257 of SEQ ID NO: 917326
ugagacuucucaguaagag

SEQ ID NO: 1226533 - RNA, 19 nt, Artificial Sequence
  Description of Artificial Sequence: Synthetic oligonucleotide
  Antisense strand to SEQ ID NO: 1226532
cucuuacugagaagucuca

SEQ ID NO: 1226534 - RNA, 19 nt, Artificial Sequence
  Description of Artificial Sequence: Synthetic oligonucleotide
  Sense strand starting at position 1269 of SEQ ID NO: 917326
guaagagaacuucguuuac

SEQ ID NO: 1226535 - RNA, 19 nt, Artificial Sequence
  Description of Artificial Sequence: Synthetic oligonucleotide
  Antisense strand to SEQ ID NO: 1226534
guaaacgaaguucucuuac

SEQ ID NO: 1226536 - RNA, 19 nt, Artificial Sequence
  Description of Artificial Sequence: Synthetic oligonucleotide
  Sense strand starting at position 1271 of SEQ ID NO: 917326
aagagaacuucguuuacuu

SEQ ID NO: 1226537 - RNA, 19 nt, Artificial Sequence
  Description of Artificial Sequence: Synthetic oligonucleotide
  Antisense strand to SEQ ID NO: 1226536
aaguaaacgaaguucucuu

SEQ ID NO: 1226538 - RNA, 19 nt, Artificial Sequence
  Description of Artificial Sequence: Synthetic oligonucleotide
  Sense strand starting at position 1402 of SEQ ID NO: 917326
caacgcauuuguccagcau

SEQ ID NO: 1226539 - RNA, 19 nt, Artificial Sequence
  Description of Artificial Sequence: Synthetic oligonucleotide
  Antisense strand to SEQ ID NO: 1226538
augcuggacaaaugcguug

SEQ ID NO: 1226540 - RNA, 19 nt, Artificial Sequence
  Description of Artificial Sequence: Synthetic oligonucleotide
  Sense strand starting at position 1676 of SEQ ID NO: 917326
ggucuaacaucccucggaa

SEQ ID NO: 1226541 - RNA, 19 nt, Artificial Sequence
  Description of Artificial Sequence: Synthetic oligonucleotide
  Antisense strand to SEQ ID NO: 1226540
uuccgagggauguuagacc

SEQ ID NO: 1226542 - RNA, 19 nt, Artificial Sequence
  Description of Artificial Sequence: Synthetic oligonucleotide
  Sense strand starting at position 1679 of SEQ ID NO: 917326
cuaacaucccucggaaguu

SEQ ID NO: 1226543 - RNA, 19 nt, Artificial Sequence
  Description of Artificial Sequence: Synthetic oligonucleotide
  Antisense strand to SEQ ID NO: 1226542
aacuuccgagggauguuag

SEQ ID NO: 1226544 - RNA, 19 nt, Artificial Sequence
  Description of Artificial Sequence: Synthetic oligonucleotide
  Sense strand starting at position 2007 of SEQ ID NO: 917326
cguccuuuaaaggaaaggu

SEQ ID NO: 1226545 - RNA, 19 nt, Artificial Sequence
  Description of Artificial Sequence: Synthetic oligonucleotide
  Antisense strand to SEQ ID NO: 1226544
accuuuccuuuaaaggacg

SEQ ID NO: 1226546 - RNA, 19 nt, Artificial Sequence
  Description of Artificial Sequence: Synthetic oligonucleotide
  Sense strand starting at position 2059 of SEQ ID NO: 917326
uucaguuccgccgacagaa

SEQ ID NO: 1226547 - RNA, 19 nt, Artificial Sequence
  Description of Artificial Sequence: Synthetic oligonucleotide
  Antisense strand to SEQ ID NO: 1226546
uucugucggcggaacugaa

SEQ ID NO: 1226548 - RNA, 19 nt, Artificial Sequence
  Description of Artificial Sequence: Synthetic oligonucleotide
  Sense strand starting at position 2162 of SEQ ID NO: 917326
ugucgaauuucugcagcaa

SEQ ID NO: 1226549 - RNA, 19 nt, Artificial Sequence
  Description of Artificial Sequence: Synthetic oligonucleotide
  Antisense strand to SEQ ID NO: 1226548
uugcugcagaaauucgaca

SEQ ID NO: 1226550 - RNA, 19 nt, Artificial Sequence
  Description of Artificial Sequence: Synthetic oligonucleotide
  Sense strand starting at position 2163 of SEQ ID NO: 917326
gucgaauuucugcagcaau

SEQ ID NO: 1226551 - RNA, 19 nt, Artificial Sequence
  Description of Artificial Sequence: Synthetic oligonucleotide
  Antisense strand to SEQ ID NO: 1226550
auugcugcagaaauucgac

SEQ ID NO: 1226552 - RNA, 19 nt, Artificial Sequence
  Description of Artificial Sequence: Synthetic oligonucleotide
  Sense strand starting at position 2227 of SEQ ID NO: 917326
ccacuagggcuuuauaaau

SEQ ID NO: 1226553 - RNA, 19 nt, Artificial Sequence
  Description of Artificial Sequence: Synthetic oligonucleotide
  Antisense strand to SEQ ID NO: 1226552
auuuauaaagcccuagugg

SEQ ID NO: 1226554 - RNA, 19 nt, Artificial Sequence
  Description of Artificial Sequence: Synthetic oligonucleotide
  Sense strand starting at position 2306 of SEQ ID NO: 917326
uaaggaucguaagugaaag

SEQ ID NO: 1226555 - RNA, 19 nt, Artificial Sequence
  Description of Artificial Sequence: Synthetic oligonucleotide
  Antisense strand to SEQ ID NO: 1226554
cuuucacuuacgauccuua

SEQ ID NO: 1226556 - RNA, 19 nt, Artificial Sequence
  Description of Artificial Sequence: Synthetic oligonucleotide
  Sense strand starting at position 2590 of SEQ ID NO: 917326
gaaauuccucaagggcaga

SEQ ID NO: 1226557 - RNA, 19 nt, Artificial Sequence
  Description of Artificial Sequence: Synthetic oligonucleotide
  Antisense strand to SEQ ID NO: 1226556
ucugcccuugaggaauuuc

SEQ ID NO: 1226558 - RNA, 19 nt, Artificial Sequence
  Description of Artificial Sequence: Synthetic oligonucleotide
  Sense strand starting at position 2663 of SEQ ID NO: 917326
ggauuccugguacgaagaa

SEQ ID NO: 1226559 - RNA, 19 nt, Artificial Sequence
  Description of Artificial Sequence: Synthetic oligonucleotide
  Antisense strand to SEQ ID NO: 1226558
uucuucguaccaggaaucc

SEQ ID NO: 1226560 - RNA, 19 nt, Artificial Sequence
  Description of Artificial Sequence: Synthetic oligonucleotide
  Sense strand starting at position 2716 of SEQ ID NO: 917326
ggcguugucuuauuucuca

SEQ ID NO: 1226561 - RNA, 19 nt, Artificial Sequence
  Description of Artificial Sequence: Synthetic oligonucleotide
  Antisense strand to SEQ ID NO: 1226560
ugagaaauaagacaacgcc

SEQ ID NO: 1226562 - RNA, 19 nt, Artificial Sequence
  Description of Artificial Sequence: Synthetic oligonucleotide
  Sense strand starting at position 2719 of SEQ ID NO: 917326
guugucuuauuucucauua

SEQ ID NO: 1226563 - RNA, 19 nt, Artificial Sequence
  Description of Artificial Sequence: Synthetic oligonucleotide
  Antisense strand to SEQ ID NO: 1226562
uaaugagaaauaagacaac

SEQ ID NO: 1226564 - RNA, 19 nt, Artificial Sequence
  Description of Artificial Sequence: Synthetic oligonucleotide
  Sense strand starting at position 3050 of SEQ ID NO: 917326
aaaguuaggugcucagcaa

SEQ ID NO: 1226565 - RNA, 19 nt, Artificial Sequence
  Description of Artificial Sequence: Synthetic oligonucleotide
  Antisense strand to SEQ ID NO: 1226564
uugcugagcaccuaacuuu

SEQ ID NO: 1226566 - RNA, 19 nt, Artificial Sequence
  Description of Artificial Sequence: Synthetic oligonucleotide
  Sense strand starting at position 3051 of SEQ ID NO: 917326
aaguuaggugcucagcaau

SEQ ID NO: 1226567 - RNA, 19 nt, Artificial Sequence
  Description of Artificial Sequence: Synthetic oligonucleotide
  Antisense strand to SEQ ID NO: 1226566
auugcugagcaccuaacuu

SEQ ID NO: 1226568 - RNA, 19 nt, Artificial Sequence
  Description of Artificial Sequence: Synthetic oligonucleotide
  Sense strand starting at position 3054 of SEQ ID NO: 917326
uuaggugcucagcaauuau

SEQ ID NO: 1226569 - RNA, 19 nt, Artificial Sequence
  Description of Artificial Sequence: Synthetic oligonucleotide
  Antisense strand to SEQ ID NO: 1226568
auaauugcugagcaccuaa

SEQ ID NO: 1226570 - RNA, 19 nt, Artificial Sequence
  Description of Artificial Sequence: Synthetic oligonucleotide
  Sense strand starting at position 3292 of SEQ ID NO: 917326
uuaaauguuccuugcauug

SEQ ID NO: 1226571 - RNA, 19 nt, Artificial Sequence
  Description of Artificial Sequence: Synthetic oligonucleotide
  Antisense strand to SEQ ID NO: 1226570
caaugcaaggaacauuuaa

SEQ ID NO: 1226572 - RNA, 19 nt, Artificial Sequence
  Description of Artificial Sequence: Synthetic oligonucleotide
  Sense strand starting at position 3302 of SEQ ID NO: 917326
cuugcauugcuagacugaa

SEQ ID NO: 1226573 - RNA, 19 nt, Artificial Sequence
  Description of Artificial Sequence: Synthetic oligonucleotide
  Antisense strand to SEQ ID NO: 1226572
uucagucuagcaaugcaag

SEQ ID NO: 1226574 - RNA, 19 nt, Artificial Sequence
  Description of Artificial Sequence: Synthetic oligonucleotide
  Sense strand starting at position 3340 of SEQ ID NO: 917326
acaguacgaguccaugaaa

SEQ ID NO: 1226575 - RNA, 19 nt, Artificial Sequence
  Description of Artificial Sequence: Synthetic oligonucleotide
  Antisense strand to SEQ ID NO: 1226574
uuucauggacucguacugu

SEQ ID NO: 1226576 - RNA, 19 nt, Artificial Sequence
  Description of Artificial Sequence: Synthetic oligonucleotide
  Sense strand starting at position 3368 of SEQ ID NO: 917326
ggaugugaaguauguacaa

SEQ ID NO: 1226577 - RNA, 19 nt, Artificial Sequence
  Description of Artificial Sequence: Synthetic oligonucleotide
  Antisense strand to SEQ ID NO: 1226576
uuguacauacuucacaucc

SEQ ID NO: 1226578 - RNA, 19 nt, Artificial Sequence
  Description of Artificial Sequence: Synthetic oligonucleotide
  Sense strand starting at position 3370 of SEQ ID NO: 917326
augugaaguauguacaagu

SEQ ID NO: 1226579 - RNA, 19 nt, Artificial Sequence
  Description of Artificial Sequence: Synthetic oligonucleotide
  Antisense strand to SEQ ID NO: 1226578
acuuguacauacuucacau

SEQ ID NO: 1226580 - RNA, 19 nt, Artificial Sequence
  Description of Artificial Sequence: Synthetic oligonucleotide
  Sense strand starting at position 3434 of SEQ ID NO: 917326
gguaauagcacagguagau

SEQ ID NO: 1226581 - RNA, 19 nt, Artificial Sequence
  Description of Artificial Sequence: Synthetic oligonucleotide
  Antisense strand to SEQ ID NO: 1226580
aucuaccugugcuauuacc

SEQ ID NO: 1226582 - RNA, 19 nt, Artificial Sequence
  Description of Artificial Sequence: Synthetic oligonucleotide
  Sense strand starting at position 3458 of SEQ ID NO: 917326
ccaaguaaucacugguaac

SEQ ID NO: 1226583 - RNA, 19 nt, Artificial Sequence
  Description of Artificial Sequence: Synthetic oligonucleotide
  Antisense strand to SEQ ID NO: 1226582
guuaccagugauuacuugg

SEQ ID NO: 1226584 - RNA, 19 nt, Artificial Sequence
  Description of Artificial Sequence: Synthetic oligonucleotide
  Sense strand starting at position 3543 of SEQ ID NO: 917326
uuaggaagcuuucuagacu

SEQ ID NO: 1226585 - RNA, 19 nt, Artificial Sequence
  Description of Artificial Sequence: Synthetic oligonucleotide
  Antisense strand to SEQ ID NO: 1226584
agucuagaaagcuuccuaa

SEQ ID NO: 1226586 - RNA, 19 nt, Artificial Sequence
  Description of Artificial Sequence: Synthetic oligonucleotide
  Sense strand starting at position 3555 of SEQ ID NO: 917326
cuagacuuccauugucaga

SEQ ID NO: 1226587 - RNA, 19 nt, Artificial Sequence
  Description of Artificial Sequence: Synthetic oligonucleotide
  Antisense strand to SEQ ID NO: 1226586
ucugacaauggaagucuag

SEQ ID NO: 1226588 - RNA, 19 nt, Artificial Sequence
  Description of Artificial Sequence: Synthetic oligonucleotide
  Sense strand starting at position 3557 of SEQ ID NO: 917326
agacuuccauugucagaug

SEQ ID NO: 1226589 - RNA, 19 nt, Artificial Sequence
  Description of Artificial Sequence: Synthetic oligonucleotide
  Antisense strand to SEQ ID NO: 1226588
caucugacaauggaagucu

SEQ ID NO: 1226590 - RNA, 19 nt, Artificial Sequence
  Description of Artificial Sequence: Synthetic oligonucleotide
  Sense strand starting at position 3587 of SEQ ID NO: 917326
agaagauggugcuuuagug

SEQ ID NO: 1226591 - RNA, 19 nt, Artificial Sequence
  Description of Artificial Sequence: Synthetic oligonucleotide
  Antisense strand to SEQ ID NO: 1226590
cacuaaagcaccaucuucu

SEQ ID NO: 1226592 - RNA, 19 nt, Artificial Sequence
  Description of Artificial Sequence: Synthetic oligonucleotide
  Sense strand starting at position 3587 of SEQ ID NO: 917327
agaagauggugcuuuagug

SEQ ID NO: 1226593 - RNA, 19 nt, Artificial Sequence
  Description of Artificial Sequence: Synthetic oligonucleotide
  Antisense strand to SEQ ID NO: 1226592
cacuaaagcaccaucuucu

SEQ ID NO: 1226594 - RNA, 19 nt, Artificial Sequence
  Description of Artificial Sequence: Synthetic oligonucleotide
  Sense strand starting at position 286 of SEQ ID NO: 917327
gugugcuaugcaccguaga

SEQ ID NO: 1226595 - RNA, 19 nt, Artificial Sequence
  Description of Artificial Sequence: Synthetic oligonucleotide
  Antisense strand to SEQ ID NO: 1226594
ucuacggugcauagcacac

SEQ ID NO: 1226596 - RNA, 19 nt, Artificial Sequence
  Description of Artificial Sequence: Synthetic oligonucleotide
  Sense strand starting at position 827 of SEQ ID NO: 917327
guuauucuucucgucucga

SEQ ID NO: 1226597 - RNA, 19 nt, Artificial Sequence
  Description of Artificial Sequence: Synthetic oligonucleotide
  Antisense strand to SEQ ID NO: 1226596
ucgagacgagaagaauaac

SEQ ID NO: 1226598 - RNA, 19 nt, Artificial Sequence
  Description of Artificial Sequence: Synthetic oligonucleotide
  Sense strand starting at position 832 of SEQ ID NO: 917327
ucuucucgucucgauuuau

SEQ ID NO: 1226599 - RNA, 19 nt, Artificial Sequence
  Description of Artificial Sequence: Synthetic oligonucleotide
  Antisense strand to SEQ ID NO: 1226598
auaaaucgagacgagaaga

SEQ ID NO: 1226600 - RNA, 19 nt, Artificial Sequence
  Description of Artificial Sequence: Synthetic oligonucleotide
  Sense strand starting at position 836 of SEQ ID NO: 917327
cucgucucgauuuauguuu

SEQ ID NO: 1226601 - RNA, 19 nt, Artificial Sequence
  Description of Artificial Sequence: Synthetic oligonucleotide
  Antisense strand to SEQ ID NO: 1226600
aaacauaaaucgagacgag

SEQ ID NO: 1226602 - RNA, 19 nt, Artificial Sequence
  Description of Artificial Sequence: Synthetic oligonucleotide
  Sense strand starting at position 874 of SEQ ID NO: 917327
acuuaaaugucguuggaaa

SEQ ID NO: 1226603 - RNA, 19 nt, Artificial Sequence
  Description of Artificial Sequence: Synthetic oligonucleotide
  Antisense strand to SEQ ID NO: 1226602
uuuccaacgacauuuaagu

SEQ ID NO: 1226604 - RNA, 19 nt, Artificial Sequence
  Description of Artificial Sequence: Synthetic oligonucleotide
  Sense strand starting at position 912 of SEQ ID NO: 917327
gaugucauuuccuuccguu

SEQ ID NO: 1226605 - RNA, 19 nt, Artificial Sequence
  Description of Artificial Sequence: Synthetic oligonucleotide
  Antisense strand to SEQ ID NO: 1226604
aacggaaggaaaugacauc

SEQ ID NO: 1226606 - RNA, 19 nt, Artificial Sequence
  Description of Artificial Sequence: Synthetic oligonucleotide
  Sense strand starting at position 1008 of SEQ ID NO: 917327
gugcaauaaggucaaucga

SEQ ID NO: 1226607 - RNA, 19 nt, Artificial Sequence
  Description of Artificial Sequence: Synthetic oligonucleotide
  Antisense strand to SEQ ID NO: 1226606
ucgauugaccuuauugcac

SEQ ID NO: 1226608 - RNA, 19 nt, Artificial Sequence
  Description of Artificial Sequence: Synthetic oligonucleotide
  Sense strand starting at position 1016 of SEQ ID NO: 917327
aggucaaucgaauaaagcu

SEQ ID NO: 1226609 - RNA, 19 nt, Artificial Sequence
  Description of Artificial Sequence: Synthetic oligonucleotide
  Antisense strand to SEQ ID NO: 1226608
agcuuuauucgauugaccu

SEQ ID NO: 1226610 - RNA, 19 nt, Artificial Sequence
  Description of Artificial Sequence: Synthetic oligonucleotide
  Sense strand starting at position 1099 of SEQ ID NO: 917327
caggacaaugccugaagua

SEQ ID NO: 1226611 - RNA, 19 nt, Artificial Sequence
  Description of Artificial Sequence: Synthetic oligonucleotide
  Antisense strand to SEQ ID NO: 1226610
uacuucaggcauuguccug

SEQ ID NO: 1226612 - RNA, 19 nt, Artificial Sequence
  Description of Artificial Sequence: Synthetic oligonucleotide
  Sense strand starting at position 1224 of SEQ ID NO: 917327
aucugugacacgggacaau

SEQ ID NO: 1226613 - RNA, 19 nt, Artificial Sequence
  Description of Artificial Sequence: Synthetic oligonucleotide
  Antisense strand to SEQ ID NO: 1226612
auugucccgugucacagau

SEQ ID NO: 1226614 - RNA, 19 nt, Artificial Sequence
  Description of Artificial Sequence: Synthetic oligonucleotide
  Sense strand starting at position 1323 of SEQ ID NO: 917327
gcugaaagacuccaaaguu

SEQ ID NO: 1226615 - RNA, 19 nt, Artificial Sequence
  Description of Artificial Sequence: Synthetic oligonucleotide
  Antisense strand to SEQ ID NO: 1226614
aacuuuggagucuuucagc

SEQ ID NO: 1226616 - RNA, 19 nt, Artificial Sequence
  Description of Artificial Sequence: Synthetic oligonucleotide
  Sense strand starting at position 1719 of SEQ ID NO: 917327
guaccauacggcuacagaa

SEQ ID NO: 1226617 - RNA, 19 nt, Artificial Sequence
  Description of Artificial Sequence: Synthetic oligonucleotide
  Antisense strand to SEQ ID NO: 1226616
uucuguagccguaugguac

SEQ ID NO: 1226618 - RNA, 19 nt, Artificial Sequence
  Description of Artificial Sequence: Synthetic oligonucleotide
  Sense strand starting at position 2063 of SEQ ID NO: 917327
gaggaagacugcgugagaa

SEQ ID NO: 1226619 - RNA, 19 nt, Artificial Sequence
  Description of Artificial Sequence: Synthetic oligonucleotide
  Antisense strand to SEQ ID NO: 1226618
uucucacgcagucuuccuc

SEQ ID NO: 1226620 - RNA, 19 nt, Artificial Sequence
  Description of Artificial Sequence: Synthetic oligonucleotide
  Sense strand starting at position 2065 of SEQ ID NO: 917327
ggaagacugcgugagaaug

SEQ ID NO: 1226621 - RNA, 19 nt, Artificial Sequence
  Description of Artificial Sequence: Synthetic oligonucleotide
  Antisense strand to SEQ ID NO: 1226620
cauucucacgcagucuucc

SEQ ID NO: 1226622 - RNA, 19 nt, Artificial Sequence
  Description of Artificial Sequence: Synthetic oligonucleotide
  Sense strand starting at position 2217 of SEQ ID NO: 917327
uaaucagauuuggaguuau

SEQ ID NO: 1226623 - RNA, 19 nt, Artificial Sequence
  Description of Artificial Sequence: Synthetic oligonucleotide
  Antisense strand to SEQ ID NO: 1226622
auaacuccaaaucugauua

SEQ ID NO: 1226624 - RNA, 19 nt, Artificial Sequence
  Description of Artificial Sequence: Synthetic oligonucleotide
  Sense strand starting at position 2227 of SEQ ID NO: 917327
uggaguuauuauucuaagg

SEQ ID NO: 1226625 - RNA, 19 nt, Artificial Sequence
  Description of Artificial Sequence: Synthetic oligonucleotide
  Antisense strand to SEQ ID NO: 1226624
ccuuagaauaauaacucca

SEQ ID NO: 1226626 - RNA, 19 nt, Artificial Sequence
  Description of Artificial Sequence: Synthetic oligonucleotide
  Sense strand starting at position 2315 of SEQ ID NO: 917327
aaaguaugaugauuagcua

SEQ ID NO: 1226627 - RNA, 19 nt, Artificial Sequence
  Description of Artificial Sequence: Synthetic oligonucleotide
  Antisense strand to SEQ ID NO: 1226626
uagcuaaucaucauacuuu

SEQ ID NO: 1226628 - RNA, 19 nt, Artificial Sequence
  Description of Artificial Sequence: Synthetic oligonucleotide
  Sense strand starting at position 2323 of SEQ ID NO: 917327
augauuagcuaguccucaa

SEQ ID NO: 1226629 - RNA, 19 nt, Artificial Sequence
  Description of Artificial Sequence: Synthetic oligonucleotide
  Antisense strand to SEQ ID NO: 1226628
uugaggacuagcuaaucau

SEQ ID NO: 1226630 - RNA, 19 nt, Artificial Sequence
  Description of Artificial Sequence: Synthetic oligonucleotide
  Sense strand starting at position 2453 of SEQ ID NO: 917327
cugcauuacugagugaaga

SEQ ID NO: 1226631 - RNA, 19 nt, Artificial Sequence
  Description of Artificial Sequence: Synthetic oligonucleotide
  Antisense strand to SEQ ID NO: 1226630
ucuucacucaguaaugcag

SEQ ID NO: 1226632 - RNA, 19 nt, Artificial Sequence
  Description of Artificial Sequence: Synthetic oligonucleotide
  Sense strand starting at position 2454 of SEQ ID NO: 917327
ugcauuacugagugaagaa

SEQ ID NO: 1226633 - RNA, 19 nt, Artificial Sequence
  Description of Artificial Sequence: Synthetic oligonucleotide
  Antisense strand to SEQ ID NO: 1226632
uucuucacucaguaaugca

SEQ ID NO: 1226634 - RNA, 19 nt, Artificial Sequence
  Description of Artificial Sequence: Synthetic oligonucleotide
  Sense strand starting at position 2501 of SEQ ID NO: 917327
uguagccgugcucuguaau

SEQ ID NO: 1226635 - RNA, 19 nt, Artificial Sequence
  Description of Artificial Sequence: Synthetic oligonucleotide
  Antisense strand to SEQ ID NO: 1226634
auuacagagcacggcuaca

SEQ ID NO: 1226636 - RNA, 19 nt, Artificial Sequence
  Description of Artificial Sequence: Synthetic oligonucleotide
  Sense strand starting at position 2637 of SEQ ID NO: 917327
uuugguaacaucuggagau

SEQ ID NO: 1226637 - RNA, 19 nt, Artificial Sequence
  Description of Artificial Sequence: Synthetic oligonucleotide
  Antisense strand to SEQ ID NO: 1226636
aucuccagauguuaccaaa

SEQ ID NO: 1226638 - RNA, 19 nt, Artificial Sequence
  Description of Artificial Sequence: Synthetic oligonucleotide
  Sense strand starting at position 2779 of SEQ ID NO: 917327
cagggaauuauccggcaga

SEQ ID NO: 1226639 - RNA, 19 nt, Artificial Sequence
  Description of Artificial Sequence: Synthetic oligonucleotide
  Antisense strand to SEQ ID NO: 1226638
ucugccggauaauucccug

SEQ ID NO: 1226640 - RNA, 19 nt, Artificial Sequence
  Description of Artificial Sequence: Synthetic oligonucleotide
  Sense strand starting at position 2784 of SEQ ID NO: 917327
aauuauccggcagaugaca

SEQ ID NO: 1226641 - RNA, 19 nt, Artificial Sequence
  Description of Artificial Sequence: Synthetic oligonucleotide
  Antisense strand to SEQ ID NO: 1226640
ugucaucugccggauaauu

SEQ ID NO: 1226642 - RNA, 19 nt, Artificial Sequence
  Description of Artificial Sequence: Synthetic oligonucleotide
  Sense strand starting at position 2906 of SEQ ID NO: 917327
ggaguuagaguccgagaaa

SEQ ID NO: 1226643 - RNA, 19 nt, Artificial Sequence
  Description of Artificial Sequence: Synthetic oligonucleotide
  Antisense strand to SEQ ID NO: 1226642
uuucucggacucuaacucc

SEQ ID NO: 1226644 - RNA, 19 nt, Artificial Sequence
  Description of Artificial Sequence: Synthetic oligonucleotide
  Sense strand starting at position 2909 of SEQ ID NO: 917327
guuagaguccgagaaacuc

SEQ ID NO: 1226645 - RNA, 19 nt, Artificial Sequence
  Description of Artificial Sequence: Synthetic oligonucleotide
  Antisense strand to SEQ ID NO: 1226644
gaguuucucggacucuaac

SEQ ID NO: 1226646 - RNA, 19 nt, Artificial Sequence
  Description of Artificial Sequence: Synthetic oligonucleotide
  Sense strand starting at position 2941 of SEQ ID NO: 917327
guaaguauucuguacuaag

SEQ ID NO: 1226647 - RNA, 19 nt, Artificial Sequence
  Description of Artificial Sequence: Synthetic oligonucleotide
  Antisense strand to SEQ ID NO: 1226646
cuuaguacagaauacuuac

SEQ ID NO: 1226648 - RNA, 19 nt, Artificial Sequence
  Description of Artificial Sequence: Synthetic oligonucleotide
  Sense strand starting at position 3127 of SEQ ID NO: 917327
uugccaaagcaauggagau

SEQ ID NO: 1226649 - RNA, 19 nt, Artificial Sequence
  Description of Artificial Sequence: Synthetic oligonucleotide
  Antisense strand to SEQ ID NO: 1226648
aucuccauugcuuuggcaa

SEQ ID NO: 1226650 - RNA, 19 nt, Artificial Sequence
  Description of Artificial Sequence: Synthetic oligonucleotide
  Sense strand starting at position 3134 of SEQ ID NO: 917327
agcaauggagaugguuauu

SEQ ID NO: 1226651 - RNA, 19 nt, Artificial Sequence
  Description of Artificial Sequence: Synthetic oligonucleotide
  Antisense strand to SEQ ID NO: 1226650
aauaaccaucuccauugcu

SEQ ID NO: 1226652 - RNA, 19 nt, Artificial Sequence
  Description of Artificial Sequence: Synthetic oligonucleotide
  Sense strand starting at position 3179 of SEQ ID NO: 917327
ugcugacuccucuaagcua

SEQ ID NO: 1226653 - RNA, 19 nt, Artificial Sequence
  Description of Artificial Sequence: Synthetic oligonucleotide
  Antisense strand to SEQ ID NO: 1226652
uagcuuagaggagucagca

SEQ ID NO: 1226654 - RNA, 19 nt, Artificial Sequence
  Description of Artificial Sequence: Synthetic oligonucleotide
  Sense strand starting at position 3401 of SEQ ID NO: 917327
aaaguaauguaggucuuua

SEQ ID NO: 1226655 - RNA, 19 nt, Artificial Sequence
  Description of Artificial Sequence: Synthetic oligonucleotide
  Antisense strand to SEQ ID NO: 1226654
uaaagaccuacauuacuuu

SEQ ID NO: 1226656 - RNA, 19 nt, Artificial Sequence
  Description of Artificial Sequence: Synthetic oligonucleotide
  Sense strand starting at position 3413 of SEQ ID NO: 917327
gucuuuacugaggauugcu

SEQ ID NO: 1226657 - RNA, 19 nt, Artificial Sequence
  Description of Artificial Sequence: Synthetic oligonucleotide
  Antisense strand to SEQ ID NO: 1226656
agcaauccucaguaaagac

SEQ ID NO: 1226658 - RNA, 19 nt, Artificial Sequence
  Description of Artificial Sequence: Synthetic oligonucleotide
  Sense strand starting at position 3450 of SEQ ID NO: 917327
aggugaauuguauagcaua

SEQ ID NO: 1226659 - RNA, 19 nt, Artificial Sequence
  Description of Artificial Sequence: Synthetic oligonucleotide
  Antisense strand to SEQ ID NO: 1226658
uaugcuauacaauucaccu

SEQ ID NO: 1226660 - RNA, 19 nt, Artificial Sequence
  Description of Artificial Sequence: Synthetic oligonucleotide
  Sense strand starting at position 3758 of SEQ ID NO: 917327
agccaagauccauguuaua

SEQ ID NO: 1226661 - RNA, 19 nt, Artificial Sequence
  Description of Artificial Sequence: Synthetic oligonucleotide
  Antisense strand to SEQ ID NO: 1226660
uauaacauggaucuuggcu

SEQ ID NO: 1226662 - RNA, 19 nt, Artificial Sequence
  Description of Artificial Sequence: Synthetic oligonucleotide
  Sense strand starting at position 3867 of SEQ ID NO: 917327
guuaauaugauaggcuaga

SEQ ID NO: 1226663 - RNA, 19 nt, Artificial Sequence
  Description of Artificial Sequence: Synthetic oligonucleotide
  Antisense strand to SEQ ID NO: 1226662
ucuagccuaucauauuaac

SEQ ID NO: 1226664 - RNA, 19 nt, Artificial Sequence
  Description of Artificial Sequence: Synthetic oligonucleotide
  Sense strand starting at position 3934 of SEQ ID NO: 917327
aaaugacguuucuuugacu

SEQ ID NO: 1226665 - RNA, 19 nt, Artificial Sequence
  Description of Artificial Sequence: Synthetic oligonucleotide
  Antisense strand to SEQ ID NO: 1226664
agucaaagaaacgucauuu

SEQ ID NO: 1226666 - RNA, 19 nt, Artificial Sequence
  Description of Artificial Sequence: Synthetic oligonucleotide
  Sense strand starting at position 3946 of SEQ ID NO: 917327
uuugacucuugaguugaau

SEQ ID NO: 1226667 - RNA, 19 nt, Artificial Sequence
  Description of Artificial Sequence: Synthetic oligonucleotide
  Antisense strand to SEQ ID NO: 1226666
auucaacucaagagucaaa

SEQ ID NO: 1226668 - RNA, 19 nt, Artificial Sequence
  Description of Artificial Sequence: Synthetic oligonucleotide
  Sense strand starting at position 3952 of SEQ ID NO: 917327
ucuugaguugaauacucuu

SEQ ID NO: 1226669 - RNA, 19 nt, Artificial Sequence
  Description of Artificial Sequence: Synthetic oligonucleotide
  Antisense strand to SEQ ID NO: 1226668
aagaguauucaacucaaga

SEQ ID NO: 1226670 - RNA, 19 nt, Artificial Sequence
  Description of Artificial Sequence: Synthetic oligonucleotide
  Sense strand starting at position 3955 of SEQ ID NO: 917327
ugaguugaauacucuugca

SEQ ID NO: 1226671 - RNA, 19 nt, Artificial Sequence
  Description of Artificial Sequence: Synthetic oligonucleotide
  Antisense strand to SEQ ID NO: 1226670
ugcaagaguauucaacuca

SEQ ID NO: 1226672 - RNA, 19 nt, Artificial Sequence
  Description of Artificial Sequence: Synthetic oligonucleotide
  Sense strand starting at position 3978 of SEQ ID NO: 917328
auagaauauuccuuauggu

SEQ ID NO: 1226673 - RNA, 19 nt, Artificial Sequence
  Description of Artificial Sequence: Synthetic oligonucleotide
  Antisense strand to SEQ ID NO: 1226672
accauaaggaauauucuau

SEQ ID NO: 1226674 - RNA, 19 nt, Artificial Sequence
  Description of Artificial Sequence: Synthetic oligonucleotide
  Sense strand starting at position 88 of SEQ ID NO: 917328
cuagauauccaaggaaguc

SEQ ID NO: 1226675 - RNA, 19 nt, Artificial Sequence
  Description of Artificial Sequence: Synthetic oligonucleotide
  Antisense strand to SEQ ID NO: 1226674
gacuuccuuggauaucuag

SEQ ID NO: 1226676 - RNA, 19 nt, Artificial Sequence
  Description of Artificial Sequence: Synthetic oligonucleotide
  Sense strand starting at position 141 of SEQ ID NO: 917328
uggagacagagcugguauu

SEQ ID NO: 1226677 - RNA, 19 nt, Artificial Sequence
  Description of Artificial Sequence: Synthetic oligonucleotide
  Antisense strand to SEQ ID NO: 1226676
aauaccagcucugucucca

SEQ ID NO: 1226678 - RNA, 19 nt, Artificial Sequence
  Description of Artificial Sequence: Synthetic oligonucleotide
  Sense strand starting at position 142 of SEQ ID NO: 917328
ggagacagagcugguauua

SEQ ID NO: 1226679 - RNA, 19 nt, Artificial Sequence
  Description of Artificial Sequence: Synthetic oligonucleotide
  Antisense strand to SEQ ID NO: 1226678
uaauaccagcucugucucc

SEQ ID NO: 1226680 - RNA, 19 nt, Artificial Sequence
  Description of Artificial Sequence: Synthetic oligonucleotide
  Sense strand starting at position 152 of SEQ ID NO: 917328
cugguauuagaauguaagu

SEQ ID NO: 1226681 - RNA, 19 nt, Artificial Sequence
  Description of Artificial Sequence: Synthetic oligonucleotide
  Antisense strand to SEQ ID NO: 1226680
acuuacauucuaauaccag

SEQ ID NO: 1226682 - RNA, 19 nt, Artificial Sequence
  Description of Artificial Sequence: Synthetic oligonucleotide
  Sense strand starting at position 284 of SEQ ID NO: 917328
gaaaguagggcuggugaaa

SEQ ID NO: 1226683 - RNA, 19 nt, Artificial Sequence
  Description of Artificial Sequence: Synthetic oligonucleotide
  Antisense strand to SEQ ID NO: 1226682
uuucaccagcccuacuuuc

SEQ ID NO: 1226684 - RNA, 19 nt, Artificial Sequence
  Description of Artificial Sequence: Synthetic oligonucleotide
  Sense strand starting at position 805 of SEQ ID NO: 917328
augaucucuaguugugaga

SEQ ID NO: 1226685 - RNA, 19 nt, Artificial Sequence
  Description of Artificial Sequence: Synthetic oligonucleotide
  Antisense strand to SEQ ID NO: 1226684
ucucacaacuagagaucau

SEQ ID NO: 1226686 - RNA, 19 nt, Artificial Sequence
  Description of Artificial Sequence: Synthetic oligonucleotide
  Sense strand starting at position 881 of SEQ ID NO: 917328
gcacauguagcauggaaua

SEQ ID NO: 1226687 - RNA, 19 nt, Artificial Sequence
  Description of Artificial Sequence: Synthetic oligonucleotide
  Antisense strand to SEQ ID NO: 1226686
uauuccaugcuacaugugc

SEQ ID NO: 1226688 - RNA, 19 nt, Artificial Sequence
  Description of Artificial Sequence: Synthetic oligonucleotide
  Sense strand starting at position 934 of SEQ ID NO: 917328
auuacagguuaggugaaau

SEQ ID NO: 1226689 - RNA, 19 nt, Artificial Sequence
  Description of Artificial Sequence: Synthetic oligonucleotide
  Antisense strand to SEQ ID NO: 1226688
auuucaccuaaccuguaau

SEQ ID NO: 1226690 - RNA, 19 nt, Artificial Sequence
  Description of Artificial Sequence: Synthetic oligonucleotide
  Sense strand starting at position 951 of SEQ ID NO: 917328
auuggcuguguacaauaau

SEQ ID NO: 1226691 - RNA, 19 nt, Artificial Sequence
  Description of Artificial Sequence: Synthetic oligonucleotide
  Antisense strand to SEQ ID NO: 1226690
auuauuguacacagccaau

SEQ ID NO: 1226692 - RNA, 19 nt, Artificial Sequence
  Description of Artificial Sequence: Synthetic oligonucleotide
  Sense strand starting at position 1025 of SEQ ID NO: 917328
uggucuuacugaguaagaa

SEQ ID NO: 1226693 - RNA, 19 nt, Artificial Sequence
  Description of Artificial Sequence: Synthetic oligonucleotide
  Antisense strand to SEQ ID NO: 1226692
uucuuacucaguaagacca

SEQ ID NO: 1226694 - RNA, 19 nt, Artificial Sequence
  Description of Artificial Sequence: Synthetic oligonucleotide
  Sense strand starting at position 1250 of SEQ ID NO: 917328
acuuuacugucuccaguga

SEQ ID NO: 1226695 - RNA, 19 nt, Artificial Sequence
  Description of Artificial Sequence: Synthetic oligonucleotide
  Antisense strand to SEQ ID NO: 1226694
ucacuggagacaguaaagu

SEQ ID NO: 1226696 - RNA, 19 nt, Artificial Sequence
  Description of Artificial Sequence: Synthetic oligonucleotide
  Sense strand starting at position 1251 of SEQ ID NO: 917328
cuuuacugucuccagugau

SEQ ID NO: 1226697 - RNA, 19 nt, Artificial Sequence
  Description of Artificial Sequence: Synthetic oligonucleotide
  Antisense strand to SEQ ID NO: 1226696
aucacuggagacaguaaag

SEQ ID NO: 1226698 - RNA, 19 nt, Artificial Sequence
  Description of Artificial Sequence: Synthetic oligonucleotide
  Sense strand starting at position 1312 of SEQ ID NO: 917328
ucacuauaagucuguuaac

SEQ ID NO: 1226699 - RNA, 19 nt, Artificial Sequence
  Description of Artificial Sequence: Synthetic oligonucleotide
  Antisense strand to SEQ ID NO: 1226698
guuaacagacuuauaguga

SEQ ID NO: 1226700 - RNA, 19 nt, Artificial Sequence
  Description of Artificial Sequence: Synthetic oligonucleotide
  Sense strand starting at position 1357 of SEQ ID NO: 917328
uagucagaauggucuuuaa

SEQ ID NO: 1226701 - RNA, 19 nt, Artificial Sequence
  Description of Artificial Sequence: Synthetic oligonucleotide
  Antisense strand to SEQ ID NO: 1226700
uuaaagaccauucugacua

SEQ ID NO: 1226702 - RNA, 19 nt, Artificial Sequence
  Description of Artificial Sequence: Synthetic oligonucleotide
  Sense strand starting at position 1391 of SEQ ID NO: 917328
gaguucuacugauagauuu

SEQ ID NO: 1226703 - RNA, 19 nt, Artificial Sequence
  Description of Artificial Sequence: Synthetic oligonucleotide
  Antisense strand to SEQ ID NO: 1226702
aaaucuaucaguagaacuc

SEQ ID NO: 1226704 - RNA, 19 nt, Artificial Sequence
  Description of Artificial Sequence: Synthetic oligonucleotide
  Sense strand starting at position 1518 of SEQ ID NO: 917328
guguauccauuugcuaaca

SEQ ID NO: 1226705 - RNA, 19 nt, Artificial Sequence
  Description of Artificial Sequence: Synthetic oligonucleotide
  Antisense strand to SEQ ID NO: 1226704
uguuagcaaauggauacac

SEQ ID NO: 1226706 - RNA, 19 nt, Artificial Sequence
  Description of Artificial Sequence: Synthetic oligonucleotide
  Sense strand starting at position 1555 of SEQ ID NO: 917328
caaauauauguuuguacga

SEQ ID NO: 1226707 - RNA, 19 nt, Artificial Sequence
  Description of Artificial Sequence: Synthetic oligonucleotide
  Antisense strand to SEQ ID NO: 1226706
ucguacaaacauauauuug

SEQ ID NO: 1226708 - RNA, 19 nt, Artificial Sequence
  Description of Artificial Sequence: Synthetic oligonucleotide
  Sense strand starting at position 1604 of SEQ ID NO: 917328
acaguaguagaaugcauaa

SEQ ID NO: 1226709 - RNA, 19 nt, Artificial Sequence
  Description of Artificial Sequence: Synthetic oligonucleotide
  Antisense strand to SEQ ID NO: 1226708
uuaugcauucuacuacugu

SEQ ID NO: 1226710 - RNA, 19 nt, Artificial Sequence
  Description of Artificial Sequence: Synthetic oligonucleotide
  Sense strand starting at position 1670 of SEQ ID NO: 917328
gauguuuacucuccaaggu

SEQ ID NO: 1226711 - RNA, 19 nt, Artificial Sequence
  Description of Artificial Sequence: Synthetic oligonucleotide
  Antisense strand to SEQ ID NO: 1226710
accuuggagaguaaacauc

SEQ ID NO: 1226712 - RNA, 19 nt, Artificial Sequence
  Description of Artificial Sequence: Synthetic oligonucleotide
  Sense strand starting at position 1671 of SEQ ID NO: 917328
auguuuacucuccaagguu

SEQ ID NO: 1226713 - RNA, 19 nt, Artificial Sequence
  Description of Artificial Sequence: Synthetic oligonucleotide
  Antisense strand to SEQ ID NO: 1226712
aaccuuggagaguaaacau

SEQ ID NO: 1226714 - RNA, 19 nt, Artificial Sequence
  Description of Artificial Sequence: Synthetic oligonucleotide
  Sense strand starting at position 1733 of SEQ ID NO: 917328
guaacaguauuacucugau

SEQ ID NO: 1226715 - RNA, 19 nt, Artificial Sequence
  Description of Artificial Sequence: Synthetic oligonucleotide
  Antisense strand to SEQ ID NO: 1226714
aucagaguaauacuguuac

SEQ ID NO: 1226716 - RNA, 19 nt, Artificial Sequence
  Description of Artificial Sequence: Synthetic oligonucleotide
  Sense strand starting at position 1736 of SEQ ID NO: 917328
acaguauuacucugaugcu

SEQ ID NO: 1226717 - RNA, 19 nt, Artificial Sequence
  Description of Artificial Sequence: Synthetic oligonucleotide
  Antisense strand to SEQ ID NO: 1226716
agcaucagaguaauacugu

SEQ ID NO: 1226718 - RNA, 19 nt, Artificial Sequence
  Description of Artificial Sequence: Synthetic oligonucleotide
  Sense strand starting at position 1887 of SEQ ID NO: 917328
ucaggaaagaacugugagu

SEQ ID NO: 1226719 - RNA, 19 nt, Artificial Sequence
  Description of Artificial Sequence: Synthetic oligonucleotide
  Antisense strand to SEQ ID NO: 1226718
acucacaguucuuuccuga

SEQ ID NO: 1226720 - RNA, 19 nt, Artificial Sequence
  Description of Artificial Sequence: Synthetic oligonucleotide
  Sense strand starting at position 1892 of SEQ ID NO: 917328
aaagaacugugaguaccua

SEQ ID NO: 1226721 - RNA, 19 nt, Artificial Sequence
  Description of Artificial Sequence: Synthetic oligonucleotide
  Antisense strand to SEQ ID NO: 1226720
uagguacucacaguucuuu

SEQ ID NO: 1226722 - RNA, 19 nt, Artificial Sequence
  Description of Artificial Sequence: Synthetic oligonucleotide
  Sense strand starting at position 1896 of SEQ ID NO: 917328
aacugugaguaccuaagaa

SEQ ID NO: 1226723 - RNA, 19 nt, Artificial Sequence
  Description of Artificial Sequence: Synthetic oligonucleotide
  Antisense strand to SEQ ID NO: 1226722
uucuuagguacucacaguu

SEQ ID NO: 1226724 - RNA, 19 nt, Artificial Sequence
  Description of Artificial Sequence: Synthetic oligonucleotide
  Sense strand starting at position 2061 of SEQ ID NO: 917328
accgcucuccggaggaguu

SEQ ID NO: 1226725 - RNA, 19 nt, Artificial Sequence
  Description of Artificial Sequence: Synthetic oligonucleotide
  Antisense strand to SEQ ID NO: 1226724
aacuccuccggagagcggu

SEQ ID NO: 1226726 - RNA, 19 nt, Artificial Sequence
  Description of Artificial Sequence: Synthetic oligonucleotide
  Sense strand starting at position 2146 of SEQ ID NO: 917328
cgagaaugaaauugucauc

SEQ ID NO: 1226727 - RNA, 19 nt, Artificial Sequence
  Description of Artificial Sequence: Synthetic oligonucleotide
  Antisense strand to SEQ ID NO: 1226726
gaugacaauuucauucucg

SEQ ID NO: 1226728 - RNA, 19 nt, Artificial Sequence
  Description of Artificial Sequence: Synthetic oligonucleotide
  Sense strand starting at position 2398 of SEQ ID NO: 917328
aagagagauucuuuacgau

SEQ ID NO: 1226729 - RNA, 19 nt, Artificial Sequence
  Description of Artificial Sequence: Synthetic oligonucleotide
  Antisense strand to SEQ ID NO: 1226728
aucguaaagaaucucucuu

SEQ ID NO: 1226730 - RNA, 19 nt, Artificial Sequence
  Description of Artificial Sequence: Synthetic oligonucleotide
  Sense strand starting at position 2410 of SEQ ID NO: 917328
uuacgauucugauuaagag

SEQ ID NO: 1226731 - RNA, 19 nt, Artificial Sequence
  Description of Artificial Sequence: Synthetic oligonucleotide
  Antisense strand to SEQ ID NO: 1226730
cucuuaaucagaaucguaa

SEQ ID NO: 1226732 - RNA, 19 nt, Artificial Sequence
  Description of Artificial Sequence: Synthetic oligonucleotide
  Sense strand starting at position 2440 of SEQ ID NO: 917328
gaacacauugcaugugaaa

SEQ ID NO: 1226733 - RNA, 19 nt, Artificial Sequence
  Description of Artificial Sequence: Synthetic oligonucleotide
  Antisense strand to SEQ ID NO: 1226732
uuucacaugcaauguguuc

SEQ ID NO: 1226734 - RNA, 19 nt, Artificial Sequence
  Description of Artificial Sequence: Synthetic oligonucleotide
  Sense strand starting at position 2556 of SEQ ID NO: 917328
agauucugcguguaauuuc

SEQ ID NO: 1226735 - RNA, 19 nt, Artificial Sequence
  Description of Artificial Sequence: Synthetic oligonucleotide
  Antisense strand to SEQ ID NO: 1226734
gaaauuacacgcagaaucu

SEQ ID NO: 1226736 - RNA, 19 nt, Artificial Sequence
  Description of Artificial Sequence: Synthetic oligonucleotide
  Sense strand starting at position 2559 of SEQ ID NO: 917328
uucugcguguaauuucuau

SEQ ID NO: 1226737 - RNA, 19 nt, Artificial Sequence
  Description of Artificial Sequence: Synthetic oligonucleotide
  Antisense strand to SEQ ID NO: 1226736
auagaaauuacacgcagaa

SEQ ID NO: 1226738 - RNA, 19 nt, Artificial Sequence
  Description of Artificial Sequence: Synthetic oligonucleotide
  Sense strand starting at position 2678 of SEQ ID NO: 917328
cguguauuuccacauguua

SEQ ID NO: 1226739 - RNA, 19 nt, Artificial Sequence
  Description of Artificial Sequence: Synthetic oligonucleotide
  Antisense strand to SEQ ID NO: 1226738
uaacauguggaaauacacg

SEQ ID NO: 1226740 - RNA, 19 nt, Artificial Sequence
  Description of Artificial Sequence: Synthetic oligonucleotide
  Sense strand starting at position 2836 of SEQ ID NO: 917328
ugacuaauccagugggauc

SEQ ID NO: 1226741 - RNA, 19 nt, Artificial Sequence
  Description of Artificial Sequence: Synthetic oligonucleotide
  Antisense strand to SEQ ID NO: 1226740
gaucccacuggauuaguca

SEQ ID NO: 1226742 - RNA, 19 nt, Artificial Sequence
  Description of Artificial Sequence: Synthetic oligonucleotide
  Sense strand starting at position 2980 of SEQ ID NO: 917328
auacauagauaggagaauu

SEQ ID NO: 1226743 - RNA, 19 nt, Artificial Sequence
  Description of Artificial Sequence: Synthetic oligonucleotide
  Antisense strand to SEQ ID NO: 1226742
aauucuccuaucuauguau

SEQ ID NO: 1226744 - RNA, 19 nt, Artificial Sequence
  Description of Artificial Sequence: Synthetic oligonucleotide
  Sense strand starting at position 3223 of SEQ ID NO: 917328
aggcaauggcuuuaaugau

SEQ ID NO: 1226745 - RNA, 19 nt, Artificial Sequence
  Description of Artificial Sequence: Synthetic oligonucleotide
  Antisense strand to SEQ ID NO: 1226744
aucauuaaagccauugccu

SEQ ID NO: 1226746 - RNA, 19 nt, Artificial Sequence
  Description of Artificial Sequence: Synthetic oligonucleotide
  Sense strand starting at position 3236 of SEQ ID NO: 917328
aaugaucuguggcuccuaa

SEQ ID NO: 1226747 - RNA, 19 nt, Artificial Sequence
  Description of Artificial Sequence: Synthetic oligonucleotide
  Antisense strand to SEQ ID NO: 1226746
uuaggagccacagaucauu

SEQ ID NO: 1226748 - RNA, 19 nt, Artificial Sequence
  Description of Artificial Sequence: Synthetic oligonucleotide
  Sense strand starting at position 3508 of SEQ ID NO: 917328
gcuauauaacuugaguauu

SEQ ID NO: 1226749 - RNA, 19 nt, Artificial Sequence
  Description of Artificial Sequence: Synthetic oligonucleotide
  Antisense strand to SEQ ID NO: 1226748
aauacucaaguuauauagc

SEQ ID NO: 1226750 - RNA, 19 nt, Artificial Sequence
  Description of Artificial Sequence: Synthetic oligonucleotide
  Sense strand starting at position 3874 of SEQ ID NO: 917328
uggacugaauuguuuauau

SEQ ID NO: 1226751 - RNA, 19 nt, Artificial Sequence
  Description of Artificial Sequence: Synthetic oligonucleotide
  Antisense strand to SEQ ID NO: 1226750
auauaaacaauucagucca

SEQ ID NO: 1226752 - RNA, 19 nt, Artificial Sequence
  Description of Artificial Sequence: Synthetic oligonucleotide
  Sense strand starting at position 3965 of SEQ ID NO: 917329
ugugucuguauuggagaua

SEQ ID NO: 1226753 - RNA, 19 nt, Artificial Sequence
  Description of Artificial Sequence: Synthetic oligonucleotide
  Antisense strand to SEQ ID NO: 1226752
uaucuccaauacagacaca

SEQ ID NO: 1226754 - RNA, 19 nt, Artificial Sequence
  Description of Artificial Sequence: Synthetic oligonucleotide
  Sense strand starting at position 1993 of SEQ ID NO: 917329
agaggaaauucucaagcug

SEQ ID NO: 1226755 - RNA, 19 nt, Artificial Sequence
  Description of Artificial Sequence: Synthetic oligonucleotide
  Antisense strand to SEQ ID NO: 1226754
cagcuugagaauuuccucu

SEQ ID NO: 1226756 - RNA, 19 nt, Artificial Sequence
  Description of Artificial Sequence: Synthetic oligonucleotide
  Sense strand starting at position 2037 of SEQ ID NO: 917329
uugcgacacugcuuuaauc

SEQ ID NO: 1226757 - RNA, 19 nt, Artificial Sequence
  Description of Artificial Sequence: Synthetic oligonucleotide
  Antisense strand to SEQ ID NO: 1226756
gauuaaagcagugucgcaa

SEQ ID NO: 1226758 - RNA, 19 nt, Artificial Sequence
  Description of Artificial Sequence: Synthetic oligonucleotide
  Sense strand starting at position 2039 of SEQ ID NO: 917329
gcgacacugcuuuaaucau

SEQ ID NO: 1226759 - RNA, 19 nt, Artificial Sequence
  Description of Artificial Sequence: Synthetic oligonucleotide
  Antisense strand to SEQ ID NO: 1226758
augauuaaagcagugucgc

SEQ ID NO: 1226760 - RNA, 19 nt, Artificial Sequence
  Description of Artificial Sequence: Synthetic oligonucleotide
  Sense strand starting at position 2100 of SEQ ID NO: 917329
caggaagacuuaucuguua

SEQ ID NO: 1226761 - RNA, 19 nt, Artificial Sequence
  Description of Artificial Sequence: Synthetic oligonucleotide
  Antisense strand to SEQ ID NO: 1226760
uaacagauaagucuuccug

SEQ ID NO: 1226762 - RNA, 19 nt, Artificial Sequence
  Description of Artificial Sequence: Synthetic oligonucleotide
  Sense strand starting at position 2102 of SEQ ID NO: 917329
ggaagacuuaucuguuagg

SEQ ID NO: 1226763 - RNA, 19 nt, Artificial Sequence
  Description of Artificial Sequence: Synthetic oligonucleotide
  Antisense strand to SEQ ID NO: 1226762
ccuaacagauaagucuucc

SEQ ID NO: 1226764 - RNA, 19 nt, Artificial Sequence
  Description of Artificial Sequence: Synthetic oligonucleotide
  Sense strand starting at position 2103 of SEQ ID NO: 917329
gaagacuuaucuguuaggu

SEQ ID NO: 1226765 - RNA, 19 nt, Artificial Sequence
  Description of Artificial Sequence: Synthetic oligonucleotide
  Antisense strand to SEQ ID NO: 1226764
accuaacagauaagucuuc

SEQ ID NO: 1226766 - RNA, 19 nt, Artificial Sequence
  Description of Artificial Sequence: Synthetic oligonucleotide
  Sense strand starting at position 2136 of SEQ ID NO: 917329
agccaaucaguccaugaga

SEQ ID NO: 1226767 - RNA, 19 nt, Artificial Sequence
  Description of Artificial Sequence: Synthetic oligonucleotide
  Antisense strand to SEQ ID NO: 1226766
ucucauggacugauuggcu

SEQ ID NO: 1226768 - RNA, 19 nt, Artificial Sequence
  Description of Artificial Sequence: Synthetic oligonucleotide
  Sense strand starting at position 2180 of SEQ ID NO: 917329
acauuagauugacaaauag

SEQ ID NO: 1226769 - RNA, 19 nt, Artificial Sequence
  Description of Artificial Sequence: Synthetic oligonucleotide
  Antisense strand to SEQ ID NO: 1226768
cuauuugucaaucuaaugu

SEQ ID NO: 1226770 - RNA, 19 nt, Artificial Sequence
  Description of Artificial Sequence: Synthetic oligonucleotide
  Sense strand starting at position 2300 of SEQ ID NO: 917329
ggcuccuccuggccaaaua

SEQ ID NO: 1226771 - RNA, 19 nt, Artificial Sequence
  Description of Artificial Sequence: Synthetic oligonucleotide
  Antisense strand to SEQ ID NO: 1226770
uauuuggccaggaggagcc

SEQ ID NO: 1226772 - RNA, 19 nt, Artificial Sequence
  Description of Artificial Sequence: Synthetic oligonucleotide
  Sense strand starting at position 2357 of SEQ ID NO: 917329
auuauaaaugcaugugaga

SEQ ID NO: 1226773 - RNA, 19 nt, Artificial Sequence
  Description of Artificial Sequence: Synthetic oligonucleotide
  Antisense strand to SEQ ID NO: 1226772
ucucacaugcauuuauaau

SEQ ID NO: 1226774 - RNA, 19 nt, Artificial Sequence
  Description of Artificial Sequence: Synthetic oligonucleotide
  Sense strand starting at position 2445 of SEQ ID NO: 917329
agggcucuucuuuacagaa

SEQ ID NO: 1226775 - RNA, 19 nt, Artificial Sequence
  Description of Artificial Sequence: Synthetic oligonucleotide
  Antisense strand to SEQ ID NO: 1226774
uucuguaaagaagagcccu

SEQ ID NO: 1226776 - RNA, 19 nt, Artificial Sequence
  Description of Artificial Sequence: Synthetic oligonucleotide
  Sense strand starting at position 2458 of SEQ ID NO: 917329
acagaagaauaucaacgaa

SEQ ID NO: 1226777 - RNA, 19 nt, Artificial Sequence
  Description of Artificial Sequence: Synthetic oligonucleotide
  Antisense strand to SEQ ID NO: 1226776
uucguugauauucuucugu

SEQ ID NO: 1226778 - RNA, 19 nt, Artificial Sequence
  Description of Artificial Sequence: Synthetic oligonucleotide
  Sense strand starting at position 2461 of SEQ ID NO: 917329
gaagaauaucaacgaaugu

SEQ ID NO: 1226779 - RNA, 19 nt, Artificial Sequence
  Description of Artificial Sequence: Synthetic oligonucleotide
  Antisense strand to SEQ ID NO: 1226778
acauucguugauauucuuc

SEQ ID NO: 1226780 - RNA, 19 nt, Artificial Sequence
  Description of Artificial Sequence: Synthetic oligonucleotide
  Sense strand starting at position 2689 of SEQ ID NO: 917329
ccacauuaaccacgugauc

SEQ ID NO: 1226781 - RNA, 19 nt, Artificial Sequence
  Description of Artificial Sequence: Synthetic oligonucleotide
  Antisense strand to SEQ ID NO: 1226780
gaucacgugguuaaugugg

SEQ ID NO: 1226782 - RNA, 19 nt, Artificial Sequence
  Description of Artificial Sequence: Synthetic oligonucleotide
  Sense strand starting at position 2694 of SEQ ID NO: 917329
uuaaccacgugaucaaauu

SEQ ID NO: 1226783 - RNA, 19 nt, Artificial Sequence
  Description of Artificial Sequence: Synthetic oligonucleotide
  Antisense strand to SEQ ID NO: 1226782
aauuugaucacgugguuaa

SEQ ID NO: 1226784 - RNA, 19 nt, Artificial Sequence
  Description of Artificial Sequence: Synthetic oligonucleotide
  Sense strand starting at position 2747 of SEQ ID NO: 917329
uccugauauuaguuaguuc

SEQ ID NO: 1226785 - RNA, 19 nt, Artificial Sequence
  Description of Artificial Sequence: Synthetic oligonucleotide
  Antisense strand to SEQ ID NO: 1226784
gaacuaacuaauaucagga

SEQ ID NO: 1226786 - RNA, 19 nt, Artificial Sequence
  Description of Artificial Sequence: Synthetic oligonucleotide
  Sense strand starting at position 2750 of SEQ ID NO: 917329
ugauauuaguuaguucuca

SEQ ID NO: 1226787 - RNA, 19 nt, Artificial Sequence
  Description of Artificial Sequence: Synthetic oligonucleotide
  Antisense strand to SEQ ID NO: 1226786
ugagaacuaacuaauauca

SEQ ID NO: 1226788 - RNA, 19 nt, Artificial Sequence
  Description of Artificial Sequence: Synthetic oligonucleotide
  Sense strand starting at position 2751 of SEQ ID NO: 917329
gauauuaguuaguucucag

SEQ ID NO: 1226789 - RNA, 19 nt, Artificial Sequence
  Description of Artificial Sequence: Synthetic oligonucleotide
  Antisense strand to SEQ ID NO: 1226788
cugagaacuaacuaauauc

SEQ ID NO: 1226790 - RNA, 19 nt, Artificial Sequence
  Description of Artificial Sequence: Synthetic oligonucleotide
  Sense strand starting at position 2758 of SEQ ID NO: 917329
guuaguucucagggccaca

SEQ ID NO: 1226791 - RNA, 19 nt, Artificial Sequence
  Description of Artificial Sequence: Synthetic oligonucleotide
  Antisense strand to SEQ ID NO: 1226790
uguggcccugagaacuaac

SEQ ID NO: 1226792 - RNA, 19 nt, Artificial Sequence
  Description of Artificial Sequence: Synthetic oligonucleotide
  Sense strand starting at position 2779 of SEQ ID NO: 917329
ucaccuaugcaguaguuaa

SEQ ID NO: 1226793 - RNA, 19 nt, Artificial Sequence
  Description of Artificial Sequence: Synthetic oligonucleotide
  Antisense strand to SEQ ID NO: 1226792
uuaacuacugcauagguga

SEQ ID NO: 1226794 - RNA, 19 nt, Artificial Sequence
  Description of Artificial Sequence: Synthetic oligonucleotide
  Sense strand starting at position 2869 of SEQ ID NO: 917329
uggccuaacuggucccaaa

SEQ ID NO: 1226795 - RNA, 19 nt, Artificial Sequence
  Description of Artificial Sequence: Synthetic oligonucleotide
  Antisense strand to SEQ ID NO: 1226794
uuugggaccaguuaggcca

SEQ ID NO: 1226796 - RNA, 19 nt, Artificial Sequence
  Description of Artificial Sequence: Synthetic oligonucleotide
  Sense strand starting at position 2920 of SEQ ID NO: 917329
guuagcaaaggauauuauu

SEQ ID NO: 1226797 - RNA, 19 nt, Artificial Sequence
  Description of Artificial Sequence: Synthetic oligonucleotide
  Antisense strand to SEQ ID NO: 1226796
aauaauauccuuugcuaac

SEQ ID NO: 1226798 - RNA, 19 nt, Artificial Sequence
  Description of Artificial Sequence: Synthetic oligonucleotide
  Sense strand starting at position 2937 of SEQ ID NO: 917329
uuaggacaauuagagauuu

SEQ ID NO: 1226799 - RNA, 19 nt, Artificial Sequence
  Description of Artificial Sequence: Synthetic oligonucleotide
  Antisense strand to SEQ ID NO: 1226798
aaaucucuaauuguccuaa

SEQ ID NO: 1226800 - RNA, 19 nt, Artificial Sequence
  Description of Artificial Sequence: Synthetic oligonucleotide
  Sense strand starting at position 3004 of SEQ ID NO: 917329
ggguguguaaucgugcuau

SEQ ID NO: 1226801 - RNA, 19 nt, Artificial Sequence
  Description of Artificial Sequence: Synthetic oligonucleotide
  Antisense strand to SEQ ID NO: 1226800
auagcacgauuacacaccc

SEQ ID NO: 1226802 - RNA, 19 nt, Artificial Sequence
  Description of Artificial Sequence: Synthetic oligonucleotide
  Sense strand starting at position 3006 of SEQ ID NO: 917329
guguguaaucgugcuauaa

SEQ ID NO: 1226803 - RNA, 19 nt, Artificial Sequence
  Description of Artificial Sequence: Synthetic oligonucleotide
  Antisense strand to SEQ ID NO: 1226802
uuauagcacgauuacacac

SEQ ID NO: 1226804 - RNA, 19 nt, Artificial Sequence
  Description of Artificial Sequence: Synthetic oligonucleotide
  Sense strand starting at position 3010 of SEQ ID NO: 917329
guaaucgugcuauaauuau

SEQ ID NO: 1226805 - RNA, 19 nt, Artificial Sequence
  Description of Artificial Sequence: Synthetic oligonucleotide
  Antisense strand to SEQ ID NO: 1226804
auaauuauagcacgauuac

SEQ ID NO: 1226806 - RNA, 19 nt, Artificial Sequence
  Description of Artificial Sequence: Synthetic oligonucleotide
  Sense strand starting at position 3019 of SEQ ID NO: 917329
cuauaauuaugccagagau

SEQ ID NO: 1226807 - RNA, 19 nt, Artificial Sequence
  Description of Artificial Sequence: Synthetic oligonucleotide
  Antisense strand to SEQ ID NO: 1226806
aucucuggcauaauuauag

SEQ ID NO: 1226808 - RNA, 19 nt, Artificial Sequence
  Description of Artificial Sequence: Synthetic oligonucleotide
  Sense strand starting at position 3032 of SEQ ID NO: 917329
agagauuaauuugguucuu

SEQ ID NO: 1226809 - RNA, 19 nt, Artificial Sequence
  Description of Artificial Sequence: Synthetic oligonucleotide
  Antisense strand to SEQ ID NO: 1226808
aagaaccaaauuaaucucu

SEQ ID NO: 1226810 - RNA, 19 nt, Artificial Sequence
  Description of Artificial Sequence: Synthetic oligonucleotide
  Sense strand starting at position 3382 of SEQ ID NO: 917329
uggccucauuccucacagu

SEQ ID NO: 1226811 - RNA, 19 nt, Artificial Sequence
  Description of Artificial Sequence: Synthetic oligonucleotide
  Antisense strand to SEQ ID NO: 1226810
acugugaggaaugaggcca

SEQ ID NO: 1226812 - RNA, 19 nt, Artificial Sequence
  Description of Artificial Sequence: Synthetic oligonucleotide
  Sense strand starting at position 3383 of SEQ ID NO: 917329
ggccucauuccucacagua

SEQ ID NO: 1226813 - RNA, 19 nt, Artificial Sequence
  Description of Artificial Sequence: Synthetic oligonucleotide
  Antisense strand to SEQ ID NO: 1226812
uacugugaggaaugaggcc

SEQ ID NO: 1226814 - RNA, 19 nt, Artificial Sequence
  Description of Artificial Sequence: Synthetic oligonucleotide
  Sense strand starting at position 3534 of SEQ ID NO: 917329
caggaagcguuccucacua

SEQ ID NO: 1226815 - RNA, 19 nt, Artificial Sequence
  Description of Artificial Sequence: Synthetic oligonucleotide
  Antisense strand to SEQ ID NO: 1226814
uagugaggaacgcuuccug

SEQ ID NO: 1226816 - RNA, 19 nt, Artificial Sequence
  Description of Artificial Sequence: Synthetic oligonucleotide
  Sense strand starting at position 3546 of SEQ ID NO: 917329
cucacuaggucauccuaua

SEQ ID NO: 1226817 - RNA, 19 nt, Artificial Sequence
  Description of Artificial Sequence: Synthetic oligonucleotide
  Antisense strand to SEQ ID NO: 1226816
uauaggaugaccuagugag

SEQ ID NO: 1226818 - RNA, 19 nt, Artificial Sequence
  Description of Artificial Sequence: Synthetic oligonucleotide
  Sense strand starting at position 3557 of SEQ ID NO: 917329
auccuauaaugauggauuu

SEQ ID NO: 1226819 - RNA, 19 nt, Artificial Sequence
  Description of Artificial Sequence: Synthetic oligonucleotide
  Antisense strand to SEQ ID NO: 1226818
aaauccaucauuauaggau

SEQ ID NO: 1226820 - RNA, 19 nt, Artificial Sequence
  Description of Artificial Sequence: Synthetic oligonucleotide
  Sense strand starting at position 3666 of SEQ ID NO: 917329
acauauuaggcacguauua

SEQ ID NO: 1226821 - RNA, 19 nt, Artificial Sequence
  Description of Artificial Sequence: Synthetic oligonucleotide
  Antisense strand to SEQ ID NO: 1226820
uaauacgugccuaauaugu

SEQ ID NO: 1226822 - RNA, 19 nt, Artificial Sequence
  Description of Artificial Sequence: Synthetic oligonucleotide
  Sense strand starting at position 3668 of SEQ ID NO: 917329
auauuaggcacguauuaug

SEQ ID NO: 1226823 - RNA, 19 nt, Artificial Sequence
  Description of Artificial Sequence: Synthetic oligonucleotide
  Antisense strand to SEQ ID NO: 1226822
cauaauacgugccuaauau

SEQ ID NO: 1226824 - RNA, 19 nt, Artificial Sequence
  Description of Artificial Sequence: Synthetic oligonucleotide
  Sense strand starting at position 3717 of SEQ ID NO: 917329
ccaaaugaaugaugaggaa

SEQ ID NO: 1226825 - RNA, 19 nt, Artificial Sequence
  Description of Artificial Sequence: Synthetic oligonucleotide
  Antisense strand to SEQ ID NO: 1226824
uuccucaucauucauuugg

SEQ ID NO: 1226826 - RNA, 19 nt, Artificial Sequence
  Description of Artificial Sequence: Synthetic oligonucleotide
  Sense strand starting at position 3720 of SEQ ID NO: 917329
aaugaaugaugaggaagau

SEQ ID NO: 1226827 - RNA, 19 nt, Artificial Sequence
  Description of Artificial Sequence: Synthetic oligonucleotide
  Antisense strand to SEQ ID NO: 1226826
aucuuccucaucauucauu

SEQ ID NO: 1226828 - RNA, 19 nt, Artificial Sequence
  Description of Artificial Sequence: Synthetic oligonucleotide
  Sense strand starting at position 3729 of SEQ ID NO: 917329
ugaggaagaucagcguuau

SEQ ID NO: 1226829 - RNA, 19 nt, Artificial Sequence
  Description of Artificial Sequence: Synthetic oligonucleotide
  Antisense strand to SEQ ID NO: 1226828
auaacgcugaucuuccuca

SEQ ID NO: 1226830 - RNA, 19 nt, Artificial Sequence
  Description of Artificial Sequence: Synthetic oligonucleotide
  Sense strand starting at position 3730 of SEQ ID NO: 917329
gaggaagaucagcguuauu

SEQ ID NO: 1226831 - RNA, 19 nt, Artificial Sequence
  Description of Artificial Sequence: Synthetic oligonucleotide
  Antisense strand to SEQ ID NO: 1226830
aauaacgcugaucuuccuc

SEQ ID NO: 1226832 - RNA, 19 nt, Artificial Sequence
  Description of Artificial Sequence: Synthetic oligonucleotide
  Sense strand starting at position 3853 of SEQ ID NO: 917330
ccacuauuaugagugcauu

SEQ ID NO: 1226833 - RNA, 19 nt, Artificial Sequence
  Description of Artificial Sequence: Synthetic oligonucleotide
  Antisense strand to SEQ ID NO: 1226832
aaugcacucauaauagugg

SEQ ID NO: 1226834 - RNA, 19 nt, Artificial Sequence
  Description of Artificial Sequence: Synthetic oligonucleotide
  Sense strand starting at position 63 of SEQ ID NO: 917330
acaagaaauguagguguga

SEQ ID NO: 1226835 - RNA, 19 nt, Artificial Sequence
  Description of Artificial Sequence: Synthetic oligonucleotide
  Antisense strand to SEQ ID NO: 1226834
ucacaccuacauuucuugu

SEQ ID NO: 1226836 - RNA, 19 nt, Artificial Sequence
  Description of Artificial Sequence: Synthetic oligonucleotide
  Sense strand starting at position 64 of SEQ ID NO: 917330
caagaaauguaggugugaa

SEQ ID NO: 1226837 - RNA, 19 nt, Artificial Sequence
  Description of Artificial Sequence: Synthetic oligonucleotide
  Antisense strand to SEQ ID NO: 1226836
uucacaccuacauuucuug

SEQ ID NO: 1226838 - RNA, 19 nt, Artificial Sequence
  Description of Artificial Sequence: Synthetic oligonucleotide
  Sense strand starting at position 65 of SEQ ID NO: 917330
aagaaauguaggugugaac

SEQ ID NO: 1226839 - RNA, 19 nt, Artificial Sequence
  Description of Artificial Sequence: Synthetic oligonucleotide
  Antisense strand to SEQ ID NO: 1226838
guucacaccuacauuucuu

SEQ ID NO: 1226840 - RNA, 19 nt, Artificial Sequence
  Description of Artificial Sequence: Synthetic oligonucleotide
  Sense strand starting at position 143 of SEQ ID NO: 917330
uuuguauagaacuggaagu

SEQ ID NO: 1226841 - RNA, 19 nt, Artificial Sequence
  Description of Artificial Sequence: Synthetic oligonucleotide
  Antisense strand to SEQ ID NO: 1226840
acuuccaguucuauacaaa

SEQ ID NO: 1226842 - RNA, 19 nt, Artificial Sequence
  Description of Artificial Sequence: Synthetic oligonucleotide
  Sense strand starting at position 144 of SEQ ID NO: 917330
uuguauagaacuggaaguu

SEQ ID NO: 1226843 - RNA, 19 nt, Artificial Sequence
  Description of Artificial Sequence: Synthetic oligonucleotide
  Antisense strand to SEQ ID NO: 1226842
aacuuccaguucuauacaa

SEQ ID NO: 1226844 - RNA, 19 nt, Artificial Sequence
  Description of Artificial Sequence: Synthetic oligonucleotide
  Sense strand starting at position 201 of SEQ ID NO: 917330
cugcuaaagagaugaagua

SEQ ID NO: 1226845 - RNA, 19 nt, Artificial Sequence
  Description of Artificial Sequence: Synthetic oligonucleotide
  Antisense strand to SEQ ID NO: 1226844
uacuucaucucuuuagcag

SEQ ID NO: 1226846 - RNA, 19 nt, Artificial Sequence
  Description of Artificial Sequence: Synthetic oligonucleotide
  Sense strand starting at position 538 of SEQ ID NO: 917330
guuagaugugcagacaauu

SEQ ID NO: 1226847 - RNA, 19 nt, Artificial Sequence
  Description of Artificial Sequence: Synthetic oligonucleotide
  Antisense strand to SEQ ID NO: 1226846
aauugucugcacaucuaac

SEQ ID NO: 1226848 - RNA, 19 nt, Artificial Sequence
  Description of Artificial Sequence: Synthetic oligonucleotide
  Sense strand starting at position 559 of SEQ ID NO: 917330
gcgcaaaugcuuuauauuu

SEQ ID NO: 1226849 - RNA, 19 nt, Artificial Sequence
  Description of Artificial Sequence: Synthetic oligonucleotide
  Antisense strand to SEQ ID NO: 1226848
aaauauaaagcauuugcgc

SEQ ID NO: 1226850 - RNA, 19 nt, Artificial Sequence
  Description of Artificial Sequence: Synthetic oligonucleotide
  Sense strand starting at position 639 of SEQ ID NO: 917330
agccaaauccacugaagua

SEQ ID NO: 1226851 - RNA, 19 nt, Artificial Sequence
  Description of Artificial Sequence: Synthetic oligonucleotide
  Antisense strand to SEQ ID NO: 1226850
uacuucaguggauuuggcu

SEQ ID NO: 1226852 - RNA, 19 nt, Artificial Sequence
  Description of Artificial Sequence: Synthetic oligonucleotide
  Sense strand starting at position 731 of SEQ ID NO: 917330
ccuacuuuaggucaaaguu

SEQ ID NO: 1226853 - RNA, 19 nt, Artificial Sequence
  Description of Artificial Sequence: Synthetic oligonucleotide
  Antisense strand to SEQ ID NO: 1226852
aacuuugaccuaaaguagg

SEQ ID NO: 1226854 - RNA, 19 nt, Artificial Sequence
  Description of Artificial Sequence: Synthetic oligonucleotide
  Sense strand starting at position 755 of SEQ ID NO: 917330
gcagacugguaacuaagau

SEQ ID NO: 1226855 - RNA, 19 nt, Artificial Sequence
  Description of Artificial Sequence: Synthetic oligonucleotide
  Antisense strand to SEQ ID NO: 1226854
aucuuaguuaccagucugc

SEQ ID NO: 1226856 - RNA, 19 nt, Artificial Sequence
  Description of Artificial Sequence: Synthetic oligonucleotide
  Sense strand starting at position 834 of SEQ ID NO: 917330
ggucacauaccucaagcua

SEQ ID NO: 1226857 - RNA, 19 nt, Artificial Sequence
  Description of Artificial Sequence: Synthetic oligonucleotide
  Antisense strand to SEQ ID NO: 1226856
uagcuugagguaugugacc

SEQ ID NO: 1226858 - RNA, 19 nt, Artificial Sequence
  Description of Artificial Sequence: Synthetic oligonucleotide
  Sense strand starting at position 845 of SEQ ID NO: 917330
ucaagcuaucuagauagcu

SEQ ID NO: 1226859 - RNA, 19 nt, Artificial Sequence
  Description of Artificial Sequence: Synthetic oligonucleotide
  Antisense strand to SEQ ID NO: 1226858
agcuaucuagauagcuuga

SEQ ID NO: 1226860 - RNA, 19 nt, Artificial Sequence
  Description of Artificial Sequence: Synthetic oligonucleotide
  Sense strand starting at position 860 of SEQ ID NO: 917330
agcugauguccacaugagu

SEQ ID NO: 1226861 - RNA, 19 nt, Artificial Sequence
  Description of Artificial Sequence: Synthetic oligonucleotide
  Antisense strand to SEQ ID NO: 1226860
acucauguggacaucagcu

SEQ ID NO: 1226862 - RNA, 19 nt, Artificial Sequence
  Description of Artificial Sequence: Synthetic oligonucleotide
  Sense strand starting at position 972 of SEQ ID NO: 917330
agacaagaguucuugccaa

SEQ ID NO: 1226863 - RNA, 19 nt, Artificial Sequence
  Description of Artificial Sequence: Synthetic oligonucleotide
  Antisense strand to SEQ ID NO: 1226862
uuggcaagaacucuugucu

SEQ ID NO: 1226864 - RNA, 19 nt, Artificial Sequence
  Description of Artificial Sequence: Synthetic oligonucleotide
  Sense strand starting at position 990 of SEQ ID NO: 917330
acagauuucuaguaaugaa

SEQ ID NO: 1226865 - RNA, 19 nt, Artificial Sequence
  Description of Artificial Sequence: Synthetic oligonucleotide
  Antisense strand to SEQ ID NO: 1226864
uucauuacuagaaaucugu

SEQ ID NO: 1226866 - RNA, 19 nt, Artificial Sequence
  Description of Artificial Sequence: Synthetic oligonucleotide
  Sense strand starting at position 1045 of SEQ ID NO: 917330
agaguaggcaaaugucaaa

SEQ ID NO: 1226867 - RNA, 19 nt, Artificial Sequence
  Description of Artificial Sequence: Synthetic oligonucleotide
  Antisense strand to SEQ ID NO: 1226866
uuugacauuugccuacucu

SEQ ID NO: 1226868 - RNA, 19 nt, Artificial Sequence
  Description of Artificial Sequence: Synthetic oligonucleotide
  Sense strand starting at position 1123 of SEQ ID NO: 917330
guucccuggcugugaauuu

SEQ ID NO: 1226869 - RNA, 19 nt, Artificial Sequence
  Description of Artificial Sequence: Synthetic oligonucleotide
  Antisense strand to SEQ ID NO: 1226868
aaauucacagccagggaac

SEQ ID NO: 1226870 - RNA, 19 nt, Artificial Sequence
  Description of Artificial Sequence: Synthetic oligonucleotide
  Sense strand starting at position 1338 of SEQ ID NO: 917330
uuagcacuuggcgaagaaa

SEQ ID NO: 1226871 - RNA, 19 nt, Artificial Sequence
  Description of Artificial Sequence: Synthetic oligonucleotide
  Antisense strand to SEQ ID NO: 1226870
uuucuucgccaagugcuaa

SEQ ID NO: 1226872 - RNA, 19 nt, Artificial Sequence
  Description of Artificial Sequence: Synthetic oligonucleotide
  Sense strand starting at position 1561 of SEQ ID NO: 917330
gaccaaauguuucugugaa

SEQ ID NO: 1226873 - RNA, 19 nt, Artificial Sequence
  Description of Artificial Sequence: Synthetic oligonucleotide
  Antisense strand to SEQ ID NO: 1226872
uucacagaaacauuugguc

SEQ ID NO: 1226874 - RNA, 19 nt, Artificial Sequence
  Description of Artificial Sequence: Synthetic oligonucleotide
  Sense strand starting at position 1595 of SEQ ID NO: 917330
agcacauuggaacgaguaa

SEQ ID NO: 1226875 - RNA, 19 nt, Artificial Sequence
  Description of Artificial Sequence: Synthetic oligonucleotide
  Antisense strand to SEQ ID NO: 1226874
uuacucguuccaaugugcu

SEQ ID NO: 1226876 - RNA, 19 nt, Artificial Sequence
  Description of Artificial Sequence: Synthetic oligonucleotide
  Sense strand starting at position 1596 of SEQ ID NO: 917330
gcacauuggaacgaguaaa

SEQ ID NO: 1226877 - RNA, 19 nt, Artificial Sequence
  Description of Artificial Sequence: Synthetic oligonucleotide
  Antisense strand to SEQ ID NO: 1226876
uuuacucguuccaaugugc

SEQ ID NO: 1226878 - RNA, 19 nt, Artificial Sequence
  Description of Artificial Sequence: Synthetic oligonucleotide
  Sense strand starting at position 2464 of SEQ ID NO: 917330
uuugcaugccaugaacaau

SEQ ID NO: 1226879 - RNA, 19 nt, Artificial Sequence
  Description of Artificial Sequence: Synthetic oligonucleotide
  Antisense strand to SEQ ID NO: 1226878
auuguucauggcaugcaaa

SEQ ID NO: 1226880 - RNA, 19 nt, Artificial Sequence
  Description of Artificial Sequence: Synthetic oligonucleotide
  Sense strand starting at position 2490 of SEQ ID NO: 917330
gccuucuuugaugaaaucu

SEQ ID NO: 1226881 - RNA, 19 nt, Artificial Sequence
  Description of Artificial Sequence: Synthetic oligonucleotide
  Antisense strand to SEQ ID NO: 1226880
agauuucaucaaagaaggc

SEQ ID NO: 1226882 - RNA, 19 nt, Artificial Sequence
  Description of Artificial Sequence: Synthetic oligonucleotide
  Sense strand starting at position 2526 of SEQ ID NO: 917330
cugugaagucgcuugccua

SEQ ID NO: 1226883 - RNA, 19 nt, Artificial Sequence
  Description of Artificial Sequence: Synthetic oligonucleotide
  Antisense strand to SEQ ID NO: 1226882
uaggcaagcgacuucacag

SEQ ID NO: 1226884 - RNA, 19 nt, Artificial Sequence
  Description of Artificial Sequence: Synthetic oligonucleotide
  Sense strand starting at position 2640 of SEQ ID NO: 917330
aggacuugaucuuucuagu

SEQ ID NO: 1226885 - RNA, 19 nt, Artificial Sequence
  Description of Artificial Sequence: Synthetic oligonucleotide
  Antisense strand to SEQ ID NO: 1226884
acuagaaagaucaaguccu

SEQ ID NO: 1226886 - RNA, 19 nt, Artificial Sequence
  Description of Artificial Sequence: Synthetic oligonucleotide
  Sense strand starting at position 2752 of SEQ ID NO: 917330
uuguguaauccugaaagua

SEQ ID NO: 1226887 - RNA, 19 nt, Artificial Sequence
  Description of Artificial Sequence: Synthetic oligonucleotide
  Antisense strand to SEQ ID NO: 1226886
uacuuucaggauuacacaa

SEQ ID NO: 1226888 - RNA, 19 nt, Artificial Sequence
  Description of Artificial Sequence: Synthetic oligonucleotide
  Sense strand starting at position 2900 of SEQ ID NO: 917330
agacaauaguuguuagaac

SEQ ID NO: 1226889 - RNA, 19 nt, Artificial Sequence
  Description of Artificial Sequence: Synthetic oligonucleotide
  Antisense strand to SEQ ID NO: 1226888
guucuaacaacuauugucu

SEQ ID NO: 1226890 - RNA, 19 nt, Artificial Sequence
  Description of Artificial Sequence: Synthetic oligonucleotide
  Sense strand starting at position 2969 of SEQ ID NO: 917330
guaguauaggcucagagaa

SEQ ID NO: 1226891 - RNA, 19 nt, Artificial Sequence
  Description of Artificial Sequence: Synthetic oligonucleotide
  Antisense strand to SEQ ID NO: 1226890
uucucugagccuauacuac

SEQ ID NO: 1226892 - RNA, 19 nt, Artificial Sequence
  Description of Artificial Sequence: Synthetic oligonucleotide
  Sense strand starting at position 3052 of SEQ ID NO: 917330
acggaaaccuuucuuuaaa

SEQ ID NO: 1226893 - RNA, 19 nt, Artificial Sequence
  Description of Artificial Sequence: Synthetic oligonucleotide
  Antisense strand to SEQ ID NO: 1226892
uuuaaagaaagguuuccgu

SEQ ID NO: 1226894 - RNA, 19 nt, Artificial Sequence
  Description of Artificial Sequence: Synthetic oligonucleotide
  Sense strand starting at position 3053 of SEQ ID NO: 917330
cggaaaccuuucuuuaaag

SEQ ID NO: 1226895 - RNA, 19 nt, Artificial Sequence
  Description of Artificial Sequence: Synthetic oligonucleotide
  Antisense strand to SEQ ID NO: 1226894
cuuuaaagaaagguuuccg

SEQ ID NO: 1226896 - RNA, 19 nt, Artificial Sequence
  Description of Artificial Sequence: Synthetic oligonucleotide
  Sense strand starting at position 3075 of SEQ ID NO: 917330
acagguaaauuagcauaau

SEQ ID NO: 1226897 - RNA, 19 nt, Artificial Sequence
  Description of Artificial Sequence: Synthetic oligonucleotide
  Antisense strand to SEQ ID NO: 1226896
auuaugcuaauuuaccugu

SEQ ID NO: 1226898 - RNA, 19 nt, Artificial Sequence
  Description of Artificial Sequence: Synthetic oligonucleotide
  Sense strand starting at position 3078 of SEQ ID NO: 917330
gguaaauuagcauaauccu

SEQ ID NO: 1226899 - RNA, 19 nt, Artificial Sequence
  Description of Artificial Sequence: Synthetic oligonucleotide
  Antisense strand to SEQ ID NO: 1226898
aggauuaugcuaauuuacc

SEQ ID NO: 1226900 - RNA, 19 nt, Artificial Sequence
  Description of Artificial Sequence: Synthetic oligonucleotide
  Sense strand starting at position 3153 of SEQ ID NO: 917330
ccaacauuugcacgucuau

SEQ ID NO: 1226901 - RNA, 19 nt, Artificial Sequence
  Description of Artificial Sequence: Synthetic oligonucleotide
  Antisense strand to SEQ ID NO: 1226900
auagacgugcaaauguugg

SEQ ID NO: 1226902 - RNA, 19 nt, Artificial Sequence
  Description of Artificial Sequence: Synthetic oligonucleotide
  Sense strand starting at position 3297 of SEQ ID NO: 917330
gaugauauacauuguugac

SEQ ID NO: 1226903 - RNA, 19 nt, Artificial Sequence
  Description of Artificial Sequence: Synthetic oligonucleotide
  Antisense strand to SEQ ID NO: 1226902
gucaacaauguauaucauc

SEQ ID NO: 1226904 - RNA, 19 nt, Artificial Sequence
  Description of Artificial Sequence: Synthetic oligonucleotide
  Sense strand starting at position 3303 of SEQ ID NO: 917330
auacauuguugacugagaa

SEQ ID NO: 1226905 - RNA, 19 nt, Artificial Sequence
  Description of Artificial Sequence: Synthetic oligonucleotide
  Antisense strand to SEQ ID NO: 1226904
uucucagucaacaauguau

SEQ ID NO: 1226906 - RNA, 19 nt, Artificial Sequence
  Description of Artificial Sequence: Synthetic oligonucleotide
  Sense strand starting at position 3364 of SEQ ID NO: 917330
auauguuuggaauaaagcu

SEQ ID NO: 1226907 - RNA, 19 nt, Artificial Sequence
  Description of Artificial Sequence: Synthetic oligonucleotide
  Antisense strand to SEQ ID NO: 1226906
agcuuuauuccaaacauau

SEQ ID NO: 1226908 - RNA, 19 nt, Artificial Sequence
  Description of Artificial Sequence: Synthetic oligonucleotide
  Sense strand starting at position 3442 of SEQ ID NO: 917330
gggagugaauguccacuuu

SEQ ID NO: 1226909 - RNA, 19 nt, Artificial Sequence
  Description of Artificial Sequence: Synthetic oligonucleotide
  Antisense strand to SEQ ID NO: 1226908
aaaguggacauucacuccc

SEQ ID NO: 1226910 - RNA, 19 nt, Artificial Sequence
  Description of Artificial Sequence: Synthetic oligonucleotide
  Sense strand starting at position 3637 of SEQ ID NO: 917330
acaguaccuugagcucaaa

SEQ ID NO: 1226911 - RNA, 19 nt, Artificial Sequence
  Description of Artificial Sequence: Synthetic oligonucleotide
  Antisense strand to SEQ ID NO: 1226910
uuugagcucaagguacugu

SEQ ID NO: 1226912 - RNA, 19 nt, Artificial Sequence
  Description of Artificial Sequence: Synthetic oligonucleotide
  Sense strand starting at position 3944 of SEQ ID NO: 917331
uucgucuuaggaugaauga

SEQ ID NO: 1226913 - RNA, 19 nt, Artificial Sequence
  Description of Artificial Sequence: Synthetic oligonucleotide
  Antisense strand to SEQ ID NO: 1226912
ucauucauccuaagacgaa

SEQ ID NO: 1226914 - RNA, 19 nt, Artificial Sequence
  Description of Artificial Sequence: Synthetic oligonucleotide
  Sense strand starting at position 6 of SEQ ID NO: 917331
cguuuacauccauauggua

SEQ ID NO: 1226915 - RNA, 19 nt, Artificial Sequence
  Description of Artificial Sequence: Synthetic oligonucleotide
  Antisense strand to SEQ ID NO: 1226914
uaccauauggauguaaacg

SEQ ID NO: 1226916 - RNA, 19 nt, Artificial Sequence
  Description of Artificial Sequence: Synthetic oligonucleotide
  Sense strand starting at position 267 of SEQ ID NO: 917331
uuugacaguuuccuacuau

SEQ ID NO: 1226917 - RNA, 19 nt, Artificial Sequence
  Description of Artificial Sequence: Synthetic oligonucleotide
  Antisense strand to SEQ ID NO: 1226916
auaguaggaaacugucaaa

SEQ ID NO: 1226918 - RNA, 19 nt, Artificial Sequence
  Description of Artificial Sequence: Synthetic oligonucleotide
  Sense strand starting at position 348 of SEQ ID NO: 917331
acugucaaagcuggugaaa

SEQ ID NO: 1226919 - RNA, 19 nt, Artificial Sequence
  Description of Artificial Sequence: Synthetic oligonucleotide
  Antisense strand to SEQ ID NO: 1226918
uuucaccagcuuugacagu

SEQ ID NO: 1226920 - RNA, 19 nt, Artificial Sequence
  Description of Artificial Sequence: Synthetic oligonucleotide
  Sense strand starting at position 351 of SEQ ID NO: 917331
gucaaagcuggugaaacaa

SEQ ID NO: 1226921 - RNA, 19 nt, Artificial Sequence
  Description of Artificial Sequence: Synthetic oligonucleotide
  Antisense strand to SEQ ID NO: 1226920
uuguuucaccagcuuugac

SEQ ID NO: 1226922 - RNA, 19 nt, Artificial Sequence
  Description of Artificial Sequence: Synthetic oligonucleotide
  Sense strand starting at position 647 of SEQ ID NO: 917331
cucuaaagccuguaaguaa

SEQ ID NO: 1226923 - RNA, 19 nt, Artificial Sequence
  Description of Artificial Sequence: Synthetic oligonucleotide
  Antisense strand to SEQ ID NO: 1226922
uuacuuacaggcuuuagag

SEQ ID NO: 1226924 - RNA, 19 nt, Artificial Sequence
  Description of Artificial Sequence: Synthetic oligonucleotide
  Sense strand starting at position 912 of SEQ ID NO: 917331
augacuccucuuggugaaa

SEQ ID NO: 1226925 - RNA, 19 nt, Artificial Sequence
  Description of Artificial Sequence: Synthetic oligonucleotide
  Antisense strand to SEQ ID NO: 1226924
uuucaccaagaggagucau

SEQ ID NO: 1226926 - RNA, 19 nt, Artificial Sequence
  Description of Artificial Sequence: Synthetic oligonucleotide
  Sense strand starting at position 913 of SEQ ID NO: 917331
ugacuccucuuggugaaag

SEQ ID NO: 1226927 - RNA, 19 nt, Artificial Sequence
  Description of Artificial Sequence: Synthetic oligonucleotide
  Antisense strand to SEQ ID NO: 1226926
cuuucaccaagaggaguca

SEQ ID NO: 1226928 - RNA, 19 nt, Artificial Sequence
  Description of Artificial Sequence: Synthetic oligonucleotide
  Sense strand starting at position 1039 of SEQ ID NO: 917331
guugcaauucucuucgugu

SEQ ID NO: 1226929 - RNA, 19 nt, Artificial Sequence
  Description of Artificial Sequence: Synthetic oligonucleotide
  Antisense strand to SEQ ID NO: 1226928
acacgaagagaauugcaac

SEQ ID NO: 1226930 - RNA, 19 nt, Artificial Sequence
  Description of Artificial Sequence: Synthetic oligonucleotide
  Sense strand starting at position 1263 of SEQ ID NO: 917331
cccuccuaucucgauaagu

SEQ ID NO: 1226931 - RNA, 19 nt, Artificial Sequence
  Description of Artificial Sequence: Synthetic oligonucleotide
  Antisense strand to SEQ ID NO: 1226930
acuuaucgagauaggaggg

SEQ ID NO: 1226932 - RNA, 19 nt, Artificial Sequence
  Description of Artificial Sequence: Synthetic oligonucleotide
  Sense strand starting at position 2501 of SEQ ID NO: 917331
aggauuuacgcuuguuuaa

SEQ ID NO: 1226933 - RNA, 19 nt, Artificial Sequence
  Description of Artificial Sequence: Synthetic oligonucleotide
  Antisense strand to SEQ ID NO: 1226932
uuaaacaagcguaaauccu

SEQ ID NO: 1226934 - RNA, 19 nt, Artificial Sequence
  Description of Artificial Sequence: Synthetic oligonucleotide
  Sense strand starting at position 2503 of SEQ ID NO: 917331
gauuuacgcuuguuuaaca

SEQ ID NO: 1226935 - RNA, 19 nt, Artificial Sequence
  Description of Artificial Sequence: Synthetic oligonucleotide
  Antisense strand to SEQ ID NO: 1226934
uguuaaacaagcguaaauc

SEQ ID NO: 1226936 - RNA, 19 nt, Artificial Sequence
  Description of Artificial Sequence: Synthetic oligonucleotide
  Sense strand starting at position 2644 of SEQ ID NO: 917331
uuguucucaacggagcaau

SEQ ID NO: 1226937 - RNA, 19 nt, Artificial Sequence
  Description of Artificial Sequence: Synthetic oligonucleotide
  Antisense strand to SEQ ID NO: 1226936
auugcuccguugagaacaa

SEQ ID NO: 1226938 - RNA, 19 nt, Artificial Sequence
  Description of Artificial Sequence: Synthetic oligonucleotide
  Sense strand starting at position 2647 of SEQ ID NO: 917331
uucucaacggagcaauaau

SEQ ID NO: 1226939 - RNA, 19 nt, Artificial Sequence
  Description of Artificial Sequence: Synthetic oligonucleotide
  Antisense strand to SEQ ID NO: 1226938
auuauugcuccguugagaa

SEQ ID NO: 1226940 - RNA, 19 nt, Artificial Sequence
  Description of Artificial Sequence: Synthetic oligonucleotide
  Sense strand starting at position 2782 of SEQ ID NO: 917331
auaauucuugaaugcgauc

SEQ ID NO: 1226941 - RNA, 19 nt, Artificial Sequence
  Description of Artificial Sequence: Synthetic oligonucleotide
  Antisense strand to SEQ ID NO: 1226940
gaucgcauucaagaauuau

SEQ ID NO: 1226942 - RNA, 19 nt, Artificial Sequence
  Description of Artificial Sequence: Synthetic oligonucleotide
  Sense strand starting at position 2807 of SEQ ID NO: 917331
aauaauugugacggagacu

SEQ ID NO: 1226943 - RNA, 19 nt, Artificial Sequence
  Description of Artificial Sequence: Synthetic oligonucleotide
  Antisense strand to SEQ ID NO: 1226942
agucuccgucacaauuauu

SEQ ID NO: 1226944 - RNA, 19 nt, Artificial Sequence
  Description of Artificial Sequence: Synthetic oligonucleotide
  Sense strand starting at position 2929 of SEQ ID NO: 917331
cuaaguauaugcucuagaa

SEQ ID NO: 1226945 - RNA, 19 nt, Artificial Sequence
  Description of Artificial Sequence: Synthetic oligonucleotide
  Antisense strand to SEQ ID NO: 1226944
uucuagagcauauacuuag

SEQ ID NO: 1226946 - RNA, 19 nt, Artificial Sequence
  Description of Artificial Sequence: Synthetic oligonucleotide
  Sense strand starting at position 2933 of SEQ ID NO: 917331
guauaugcucuagaaauau

SEQ ID NO: 1226947 - RNA, 19 nt, Artificial Sequence
  Description of Artificial Sequence: Synthetic oligonucleotide
  Antisense strand to SEQ ID NO: 1226946
auauuucuagagcauauac

SEQ ID NO: 1226948 - RNA, 19 nt, Artificial Sequence
  Description of Artificial Sequence: Synthetic oligonucleotide
  Sense strand starting at position 2942 of SEQ ID NO: 917331
cuagaaauauacgugccaa

SEQ ID NO: 1226949 - RNA, 19 nt, Artificial Sequence
  Description of Artificial Sequence: Synthetic oligonucleotide
  Antisense strand to SEQ ID NO: 1226948
uuggcacguauauuucuag

SEQ ID NO: 1226950 - RNA, 19 nt, Artificial Sequence
  Description of Artificial Sequence: Synthetic oligonucleotide
  Sense strand starting at position 2993 of SEQ ID NO: 917331
gacucucaauuugaagagu

SEQ ID NO: 1226951 - RNA, 19 nt, Artificial Sequence
  Description of Artificial Sequence: Synthetic oligonucleotide
  Antisense strand to SEQ ID NO: 1226950
acucuucaaauugagaguc

SEQ ID NO: 1226952 - RNA, 19 nt, Artificial Sequence
  Description of Artificial Sequence: Synthetic oligonucleotide
  Sense strand starting at position 3002 of SEQ ID NO: 917331
uuugaagaguuuccuaauu

SEQ ID NO: 1226953 - RNA, 19 nt, Artificial Sequence
  Description of Artificial Sequence: Synthetic oligonucleotide
  Antisense strand to SEQ ID NO: 1226952
aauuaggaaacucuucaaa

SEQ ID NO: 1226954 - RNA, 19 nt, Artificial Sequence
  Description of Artificial Sequence: Synthetic oligonucleotide
  Sense strand starting at position 3004 of SEQ ID NO: 917331
ugaagaguuuccuaauuua

SEQ ID NO: 1226955 - RNA, 19 nt, Artificial Sequence
  Description of Artificial Sequence: Synthetic oligonucleotide
  Antisense strand to SEQ ID NO: 1226954
uaaauuaggaaacucuuca

SEQ ID NO: 1226956 - RNA, 19 nt, Artificial Sequence
  Description of Artificial Sequence: Synthetic oligonucleotide
  Sense strand starting at position 3050 of SEQ ID NO: 917331
cugucaucccaguacugua

SEQ ID NO: 1226957 - RNA, 19 nt, Artificial Sequence
  Description of Artificial Sequence: Synthetic oligonucleotide
  Antisense strand to SEQ ID NO: 1226956
uacaguacugggaugacag

SEQ ID NO: 1226958 - RNA, 19 nt, Artificial Sequence
  Description of Artificial Sequence: Synthetic oligonucleotide
  Sense strand starting at position 3079 of SEQ ID NO: 917331
auguacuaguucuuauauc

SEQ ID NO: 1226959 - RNA, 19 nt, Artificial Sequence
  Description of Artificial Sequence: Synthetic oligonucleotide
  Antisense strand to SEQ ID NO: 1226958
gauauaagaacuaguacau

SEQ ID NO: 1226960 - RNA, 19 nt, Artificial Sequence
  Description of Artificial Sequence: Synthetic oligonucleotide
  Sense strand starting at position 3156 of SEQ ID NO: 917331
ccuccuuaguguuugagaa

SEQ ID NO: 1226961 - RNA, 19 nt, Artificial Sequence
  Description of Artificial Sequence: Synthetic oligonucleotide
  Antisense strand to SEQ ID NO: 1226960
uucucaaacacuaaggagg

SEQ ID NO: 1226962 - RNA, 19 nt, Artificial Sequence
  Description of Artificial Sequence: Synthetic oligonucleotide
  Sense strand starting at position 3157 of SEQ ID NO: 917331
cuccuuaguguuugagaag

SEQ ID NO: 1226963 - RNA, 19 nt, Artificial Sequence
  Description of Artificial Sequence: Synthetic oligonucleotide
  Antisense strand to SEQ ID NO: 1226962
cuucucaaacacuaaggag

SEQ ID NO: 1226964 - RNA, 19 nt, Artificial Sequence
  Description of Artificial Sequence: Synthetic oligonucleotide
  Sense strand starting at position 3166 of SEQ ID NO: 917331
guuugagaagugcaaacaa

SEQ ID NO: 1226965 - RNA, 19 nt, Artificial Sequence
  Description of Artificial Sequence: Synthetic oligonucleotide
  Antisense strand to SEQ ID NO: 1226964
uuguuugcacuucucaaac

SEQ ID NO: 1226966 - RNA, 19 nt, Artificial Sequence
  Description of Artificial Sequence: Synthetic oligonucleotide
  Sense strand starting at position 3297 of SEQ ID NO: 917331
gauaauuagcagugggaua

SEQ ID NO: 1226967 - RNA, 19 nt, Artificial Sequence
  Description of Artificial Sequence: Synthetic oligonucleotide
  Antisense strand to SEQ ID NO: 1226966
uaucccacugcuaauuauc

SEQ ID NO: 1226968 - RNA, 19 nt, Artificial Sequence
  Description of Artificial Sequence: Synthetic oligonucleotide
  Sense strand starting at position 3298 of SEQ ID NO: 917331
auaauuagcagugggauaa

SEQ ID NO: 1226969 - RNA, 19 nt, Artificial Sequence
  Description of Artificial Sequence: Synthetic oligonucleotide
  Antisense strand to SEQ ID NO: 1226968
uuaucccacugcuaauuau

SEQ ID NO: 1226970 - RNA, 19 nt, Artificial Sequence
  Description of Artificial Sequence: Synthetic oligonucleotide
  Sense strand starting at position 3299 of SEQ ID NO: 917331
uaauuagcagugggauaaa

SEQ ID NO: 1226971 - RNA, 19 nt, Artificial Sequence
  Description of Artificial Sequence: Synthetic oligonucleotide
  Antisense strand to SEQ ID NO: 1226970
uuuaucccacugcuaauua

SEQ ID NO: 1226972 - RNA, 19 nt, Artificial Sequence
  Description of Artificial Sequence: Synthetic oligonucleotide
  Sense strand starting at position 3456 of SEQ ID NO: 917331
caggacuuugcauguagua

SEQ ID NO: 1226973 - RNA, 19 nt, Artificial Sequence
  Description of Artificial Sequence: Synthetic oligonucleotide
  Antisense strand to SEQ ID NO: 1226972
uacuacaugcaaaguccug

SEQ ID NO: 1226974 - RNA, 19 nt, Artificial Sequence
  Description of Artificial Sequence: Synthetic oligonucleotide
  Sense strand starting at position 3468 of SEQ ID NO: 917331
uguaguagguauccaguaa

SEQ ID NO: 1226975 - RNA, 19 nt, Artificial Sequence
  Description of Artificial Sequence: Synthetic oligonucleotide
  Antisense strand to SEQ ID NO: 1226974
uuacuggauaccuacuaca

SEQ ID NO: 1226976 - RNA, 19 nt, Artificial Sequence
  Description of Artificial Sequence: Synthetic oligonucleotide
  Sense strand starting at position 3469 of SEQ ID NO: 917331
guaguagguauccaguaag

SEQ ID NO: 1226977 - RNA, 19 nt, Artificial Sequence
  Description of Artificial Sequence: Synthetic oligonucleotide
  Antisense strand to SEQ ID NO: 1226976
cuuacuggauaccuacuac

SEQ ID NO: 1226978 - RNA, 19 nt, Artificial Sequence
  Description of Artificial Sequence: Synthetic oligonucleotide
  Sense strand starting at position 3472 of SEQ ID NO: 917331
guagguauccaguaaguau

SEQ ID NO: 1226979 - RNA, 19 nt, Artificial Sequence
  Description of Artificial Sequence: Synthetic oligonucleotide
  Antisense strand to SEQ ID NO: 1226978
auacuuacuggauaccuac

SEQ ID NO: 1226980 - RNA, 19 nt, Artificial Sequence
  Description of Artificial Sequence: Synthetic oligonucleotide
  Sense strand starting at position 3527 of SEQ ID NO: 917331
aguuaaagaccucaguguu

SEQ ID NO: 1226981 - RNA, 19 nt, Artificial Sequence
  Description of Artificial Sequence: Synthetic oligonucleotide
  Antisense strand to SEQ ID NO: 1226980
aacacugaggucuuuaacu

SEQ ID NO: 1226982 - RNA, 19 nt, Artificial Sequence
  Description of Artificial Sequence: Synthetic oligonucleotide
  Sense strand starting at position 3692 of SEQ ID NO: 917331
aucagacagcccuggaauu

SEQ ID NO: 1226983 - RNA, 19 nt, Artificial Sequence
  Description of Artificial Sequence: Synthetic oligonucleotide
  Antisense strand to SEQ ID NO: 1226982
aauuccagggcugucugau

SEQ ID NO: 1226984 - RNA, 19 nt, Artificial Sequence
  Description of Artificial Sequence: Synthetic oligonucleotide
  Sense strand starting at position 3739 of SEQ ID NO: 917331
ucuggcuuugggcaaauua

SEQ ID NO: 1226985 - RNA, 19 nt, Artificial Sequence
  Description of Artificial Sequence: Synthetic oligonucleotide
  Antisense strand to SEQ ID NO: 1226984
uaauuugcccaaagccaga

SEQ ID NO: 1226986 - RNA, 19 nt, Artificial Sequence
  Description of Artificial Sequence: Synthetic oligonucleotide
  Sense strand starting at position 3749 of SEQ ID NO: 917331
ggcaaauuaucuccucuga

SEQ ID NO: 1226987 - RNA, 19 nt, Artificial Sequence
  Description of Artificial Sequence: Synthetic oligonucleotide
  Antisense strand to SEQ ID NO: 1226986
ucagaggagauaauuugcc

SEQ ID NO: 1226988 - RNA, 19 nt, Artificial Sequence
  Description of Artificial Sequence: Synthetic oligonucleotide
  Sense strand starting at position 3829 of SEQ ID NO: 917331
uccaacuuggcacaugaau

SEQ ID NO: 1226989 - RNA, 19 nt, Artificial Sequence
  Description of Artificial Sequence: Synthetic oligonucleotide
  Antisense strand to SEQ ID NO: 1226988
auucaugugccaaguugga

SEQ ID NO: 1226990 - RNA, 19 nt, Artificial Sequence
  Description of Artificial Sequence: Synthetic oligonucleotide
  Sense strand starting at position 3961 of SEQ ID NO: 917331
gaaauagauguuggcugaa

SEQ ID NO: 1226991 - RNA, 19 nt, Artificial Sequence
  Description of Artificial Sequence: Synthetic oligonucleotide
  Antisense strand to SEQ ID NO: 1226990
uucagccaacaucuauuuc

SEQ ID NO: 1226992 - RNA, 19 nt, Artificial Sequence
  Description of Artificial Sequence: Synthetic oligonucleotide
  Sense strand starting at position 3982 of SEQ ID NO: 917332
aaugaauguugcuugcaca

SEQ ID NO: 1226993 - RNA, 19 nt, Artificial Sequence
  Description of Artificial Sequence: Synthetic oligonucleotide
  Antisense strand to SEQ ID NO: 1226992
ugugcaagcaacauucauu

SEQ ID NO: 1226994 - RNA, 19 nt, Artificial Sequence
  Description of Artificial Sequence: Synthetic oligonucleotide
  Sense strand starting at position 149 of SEQ ID NO: 917332
gcagaagacuauucucaaa

SEQ ID NO: 1226995 - RNA, 19 nt, Artificial Sequence
  Description of Artificial Sequence: Synthetic oligonucleotide
  Antisense strand to SEQ ID NO: 1226994
uuugagaauagucuucugc

SEQ ID NO: 1226996 - RNA, 19 nt, Artificial Sequence
  Description of Artificial Sequence: Synthetic oligonucleotide
  Sense strand starting at position 209 of SEQ ID NO: 917332
agagcuaaucugcaaacuu

SEQ ID NO: 1226997 - RNA, 19 nt, Artificial Sequence
  Description of Artificial Sequence: Synthetic oligonucleotide
  Antisense strand to SEQ ID NO: 1226996
aaguuugcagauuagcucu

SEQ ID NO: 1226998 - RNA, 19 nt, Artificial Sequence
  Description of Artificial Sequence: Synthetic oligonucleotide
  Sense strand starting at position 258 of SEQ ID NO: 917332
ugaaauuguucugcaacau

SEQ ID NO: 1226999 - RNA, 19 nt, Artificial Sequence
  Description of Artificial Sequence: Synthetic oligonucleotide
  Antisense strand to SEQ ID NO: 1226998
auguugcagaacaauuuca

SEQ ID NO: 1227000 - RNA, 19 nt, Artificial Sequence
  Description of Artificial Sequence: Synthetic oligonucleotide
  Sense strand starting at position 259 of SEQ ID NO: 917332
gaaauuguucugcaacaug

SEQ ID NO: 1227001 - RNA, 19 nt, Artificial Sequence
  Description of Artificial Sequence: Synthetic oligonucleotide
  Antisense strand to SEQ ID NO: 1227000
cauguugcagaacaauuuc

SEQ ID NO: 1227002 - RNA, 19 nt, Artificial Sequence
  Description of Artificial Sequence: Synthetic oligonucleotide
  Sense strand starting at position 262 of SEQ ID NO: 917332
auuguucugcaacaugaaa

SEQ ID NO: 1227003 - RNA, 19 nt, Artificial Sequence
  Description of Artificial Sequence: Synthetic oligonucleotide
  Antisense strand to SEQ ID NO: 1227002
uuucauguugcagaacaau

SEQ ID NO: 1227004 - RNA, 19 nt, Artificial Sequence
  Description of Artificial Sequence: Synthetic oligonucleotide
  Sense strand starting at position 291 of SEQ ID NO: 917332
cuuggcaaugcuuaagagu

SEQ ID NO: 1227005 - RNA, 19 nt, Artificial Sequence
  Description of Artificial Sequence: Synthetic oligonucleotide
  Antisense strand to SEQ ID NO: 1227004
acucuuaagcauugccaag

SEQ ID NO: 1227006 - RNA, 19 nt, Artificial Sequence
  Description of Artificial Sequence: Synthetic oligonucleotide
  Sense strand starting at position 427 of SEQ ID NO: 917332
uagugcaaagcucaagauu

SEQ ID NO: 1227007 - RNA, 19 nt, Artificial Sequence
  Description of Artificial Sequence: Synthetic oligonucleotide
  Antisense strand to SEQ ID NO: 1227006
aaucuugagcuuugcacua

SEQ ID NO: 1227008 - RNA, 19 nt, Artificial Sequence
  Description of Artificial Sequence: Synthetic oligonucleotide
  Sense strand starting at position 452 of SEQ ID NO: 917332
acacauguguucccuuaau

SEQ ID NO: 1227009 - RNA, 19 nt, Artificial Sequence
  Description of Artificial Sequence: Synthetic oligonucleotide
  Antisense strand to SEQ ID NO: 1227008
auuaagggaacacaugugu

SEQ ID NO: 1227010 - RNA, 19 nt, Artificial Sequence
  Description of Artificial Sequence: Synthetic oligonucleotide
  Sense strand starting at position 616 of SEQ ID NO: 917332
auguauauccagcaagcca

SEQ ID NO: 1227011 - RNA, 19 nt, Artificial Sequence
  Description of Artificial Sequence: Synthetic oligonucleotide
  Antisense strand to SEQ ID NO: 1227010
uggcuugcuggauauacau

SEQ ID NO: 1227012 - RNA, 19 nt, Artificial Sequence
  Description of Artificial Sequence: Synthetic oligonucleotide
  Sense strand starting at position 640 of SEQ ID NO: 917332
ggauaaauaugucuuccuc

SEQ ID NO: 1227013 - RNA, 19 nt, Artificial Sequence
  Description of Artificial Sequence: Synthetic oligonucleotide
  Antisense strand to SEQ ID NO: 1227012
gaggaagacauauuuaucc

SEQ ID NO: 1227014 - RNA, 19 nt, Artificial Sequence
  Description of Artificial Sequence: Synthetic oligonucleotide
  Sense strand starting at position 670 of SEQ ID NO: 917332
cauccagaauugguuuaga

SEQ ID NO: 1227015 - RNA, 19 nt, Artificial Sequence
  Description of Artificial Sequence: Synthetic oligonucleotide
  Antisense strand to SEQ ID NO: 1227014
ucuaaaccaauucuggaug

SEQ ID NO: 1227016 - RNA, 19 nt, Artificial Sequence
  Description of Artificial Sequence: Synthetic oligonucleotide
  Sense strand starting at position 678 of SEQ ID NO: 917332
auugguuuagauggaagua

SEQ ID NO: 1227017 - RNA, 19 nt, Artificial Sequence
  Description of Artificial Sequence: Synthetic oligonucleotide
  Antisense strand to SEQ ID NO: 1227016
uacuuccaucuaaaccaau

SEQ ID NO: 1227018 - RNA, 19 nt, Artificial Sequence
  Description of Artificial Sequence: Synthetic oligonucleotide
  Sense strand starting at position 679 of SEQ ID NO: 917332
uugguuuagauggaaguau

SEQ ID NO: 1227019 - RNA, 19 nt, Artificial Sequence
  Description of Artificial Sequence: Synthetic oligonucleotide
  Antisense strand to SEQ ID NO: 1227018
auacuuccaucuaaaccaa

SEQ ID NO: 1227020 - RNA, 19 nt, Artificial Sequence
  Description of Artificial Sequence: Synthetic oligonucleotide
  Sense strand starting at position 688 of SEQ ID NO: 917332
auggaaguauucucuagcu

SEQ ID NO: 1227021 - RNA, 19 nt, Artificial Sequence
  Description of Artificial Sequence: Synthetic oligonucleotide
  Antisense strand to SEQ ID NO: 1227020
agcuagagaauacuuccau

SEQ ID NO: 1227022 - RNA, 19 nt, Artificial Sequence
  Description of Artificial Sequence: Synthetic oligonucleotide
  Sense strand starting at position 690 of SEQ ID NO: 917332
ggaaguauucucuagcuca

SEQ ID NO: 1227023 - RNA, 19 nt, Artificial Sequence
  Description of Artificial Sequence: Synthetic oligonucleotide
  Antisense strand to SEQ ID NO: 1227022
ugagcuagagaauacuucc

SEQ ID NO: 1227024 - RNA, 19 nt, Artificial Sequence
  Description of Artificial Sequence: Synthetic oligonucleotide
  Sense strand starting at position 693 of SEQ ID NO: 917332
aguauucucuagcucagaa

SEQ ID NO: 1227025 - RNA, 19 nt, Artificial Sequence
  Description of Artificial Sequence: Synthetic oligonucleotide
  Antisense strand to SEQ ID NO: 1227024
uucugagcuagagaauacu

SEQ ID NO: 1227026 - RNA, 19 nt, Artificial Sequence
  Description of Artificial Sequence: Synthetic oligonucleotide
  Sense strand starting at position 843 of SEQ ID NO: 917332
ccgcaaggugaaugauaca

SEQ ID NO: 1227027 - RNA, 19 nt, Artificial Sequence
  Description of Artificial Sequence: Synthetic oligonucleotide
  Antisense strand to SEQ ID NO: 1227026
uguaucauucaccuugcgg

SEQ ID NO: 1227028 - RNA, 19 nt, Artificial Sequence
  Description of Artificial Sequence: Synthetic oligonucleotide
  Sense strand starting at position 959 of SEQ ID NO: 917332
gcuaaaugaccucagccau

SEQ ID NO: 1227029 - RNA, 19 nt, Artificial Sequence
  Description of Artificial Sequence: Synthetic oligonucleotide
  Antisense strand to SEQ ID NO: 1227028
auggcugaggucauuuagc

SEQ ID NO: 1227030 - RNA, 19 nt, Artificial Sequence
  Description of Artificial Sequence: Synthetic oligonucleotide
  Sense strand starting at position 1151 of SEQ ID NO: 917332
uuuggaucacacuggaauu

SEQ ID NO: 1227031 - RNA, 19 nt, Artificial Sequence
  Description of Artificial Sequence: Synthetic oligonucleotide
  Antisense strand to SEQ ID NO: 1227030
aauuccagugugauccaaa

SEQ ID NO: 1227032 - RNA, 19 nt, Artificial Sequence
  Description of Artificial Sequence: Synthetic oligonucleotide
  Sense strand starting at position 1219 of SEQ ID NO: 917332
cuucuaagucaccagucua

SEQ ID NO: 1227033 - RNA, 19 nt, Artificial Sequence
  Description of Artificial Sequence: Synthetic oligonucleotide
  Antisense strand to SEQ ID NO: 1227032
uagacuggugacuuagaag

SEQ ID NO: 1227034 - RNA, 19 nt, Artificial Sequence
  Description of Artificial Sequence: Synthetic oligonucleotide
  Sense strand starting at position 1241 of SEQ ID NO: 917332
cacucaucugaauguggua

SEQ ID NO: 1227035 - RNA, 19 nt, Artificial Sequence
  Description of Artificial Sequence: Synthetic oligonucleotide
  Antisense strand to SEQ ID NO: 1227034
uaccacauucagaugagug

SEQ ID NO: 1227036 - RNA, 19 nt, Artificial Sequence
  Description of Artificial Sequence: Synthetic oligonucleotide
  Sense strand starting at position 1253 of SEQ ID NO: 917332
ugugguauaccaggagaac

SEQ ID NO: 1227037 - RNA, 19 nt, Artificial Sequence
  Description of Artificial Sequence: Synthetic oligonucleotide
  Antisense strand to SEQ ID NO: 1227036
guucuccugguauaccaca

SEQ ID NO: 1227038 - RNA, 19 nt, Artificial Sequence
  Description of Artificial Sequence: Synthetic oligonucleotide
  Sense strand starting at position 1993 of SEQ ID NO: 917332
uugaucuguccuuaguaau

SEQ ID NO: 1227039 - RNA, 19 nt, Artificial Sequence
  Description of Artificial Sequence: Synthetic oligonucleotide
  Antisense strand to SEQ ID NO: 1227038
auuacuaaggacagaucaa

SEQ ID NO: 1227040 - RNA, 19 nt, Artificial Sequence
  Description of Artificial Sequence: Synthetic oligonucleotide
  Sense strand starting at position 2204 of SEQ ID NO: 917332
agaaauauauggucugcua

SEQ ID NO: 1227041 - RNA, 19 nt, Artificial Sequence
  Description of Artificial Sequence: Synthetic oligonucleotide
  Antisense strand to SEQ ID NO: 1227040
uagcagaccauauauuucu

SEQ ID NO: 1227042 - RNA, 19 nt, Artificial Sequence
  Description of Artificial Sequence: Synthetic oligonucleotide
  Sense strand starting at position 2260 of SEQ ID NO: 917332
ugaaauagccaugguagca

SEQ ID NO: 1227043 - RNA, 19 nt, Artificial Sequence
  Description of Artificial Sequence: Synthetic oligonucleotide
  Antisense strand to SEQ ID NO: 1227042
ugcuaccauggcuauuuca

SEQ ID NO: 1227044 - RNA, 19 nt, Artificial Sequence
  Description of Artificial Sequence: Synthetic oligonucleotide
  Sense strand starting at position 2375 of SEQ ID NO: 917332
guugacauagucuagaauu

SEQ ID NO: 1227045 - RNA, 19 nt, Artificial Sequence
  Description of Artificial Sequence: Synthetic oligonucleotide
  Antisense strand to SEQ ID NO: 1227044
aauucuagacuaugucaac

SEQ ID NO: 1227046 - RNA, 19 nt, Artificial Sequence
  Description of Artificial Sequence: Synthetic oligonucleotide
  Sense strand starting at position 2561 of SEQ ID NO: 917332
ggucaugacuauuacauuu

SEQ ID NO: 1227047 - RNA, 19 nt, Artificial Sequence
  Description of Artificial Sequence: Synthetic oligonucleotide
  Antisense strand to SEQ ID NO: 1227046
aaauguaauagucaugacc

SEQ ID NO: 1227048 - RNA, 19 nt, Artificial Sequence
  Description of Artificial Sequence: Synthetic oligonucleotide
  Sense strand starting at position 2733 of SEQ ID NO: 917332
cucaucuaugcaugugaaa

SEQ ID NO: 1227049 - RNA, 19 nt, Artificial Sequence
  Description of Artificial Sequence: Synthetic oligonucleotide
  Antisense strand to SEQ ID NO: 1227048
uuucacaugcauagaugag

SEQ ID NO: 1227050 - RNA, 19 nt, Artificial Sequence
  Description of Artificial Sequence: Synthetic oligonucleotide
  Sense strand starting at position 2765 of SEQ ID NO: 917332
cuuuauucugaagguuaga

SEQ ID NO: 1227051 - RNA, 19 nt, Artificial Sequence
  Description of Artificial Sequence: Synthetic oligonucleotide
  Antisense strand to SEQ ID NO: 1227050
ucuaaccuucagaauaaag

SEQ ID NO: 1227052 - RNA, 19 nt, Artificial Sequence
  Description of Artificial Sequence: Synthetic oligonucleotide
  Sense strand starting at position 2880 of SEQ ID NO: 917332
gaugauuauggacgcuuua

SEQ ID NO: 1227053 - RNA, 19 nt, Artificial Sequence
  Description of Artificial Sequence: Synthetic oligonucleotide
  Antisense strand to SEQ ID NO: 1227052
uaaagcguccauaaucauc

SEQ ID NO: 1227054 - RNA, 19 nt, Artificial Sequence
  Description of Artificial Sequence: Synthetic oligonucleotide
  Sense strand starting at position 2957 of SEQ ID NO: 917332
ccucauuuauucguugauu

SEQ ID NO: 1227055 - RNA, 19 nt, Artificial Sequence
  Description of Artificial Sequence: Synthetic oligonucleotide
  Antisense strand to SEQ ID NO: 1227054
aaucaacgaauaaaugagg

SEQ ID NO: 1227056 - RNA, 19 nt, Artificial Sequence
  Description of Artificial Sequence: Synthetic oligonucleotide
  Sense strand starting at position 2958 of SEQ ID NO: 917332
cucauuuauucguugauuc

SEQ ID NO: 1227057 - RNA, 19 nt, Artificial Sequence
  Description of Artificial Sequence: Synthetic oligonucleotide
  Antisense strand to SEQ ID NO: 1227056
gaaucaacgaauaaaugag

SEQ ID NO: 1227058 - RNA, 19 nt, Artificial Sequence
  Description of Artificial Sequence: Synthetic oligonucleotide
  Sense strand starting at position 3088 of SEQ ID NO: 917332
uuuaaaggguuucuuggau

SEQ ID NO: 1227059 - RNA, 19 nt, Artificial Sequence
  Description of Artificial Sequence: Synthetic oligonucleotide
  Antisense strand to SEQ ID NO: 1227058
auccaagaaacccuuuaaa

SEQ ID NO: 1227060 - RNA, 19 nt, Artificial Sequence
  Description of Artificial Sequence: Synthetic oligonucleotide
  Sense strand starting at position 3146 of SEQ ID NO: 917332
aucuguuuccaacacggga

SEQ ID NO: 1227061 - RNA, 19 nt, Artificial Sequence
  Description of Artificial Sequence: Synthetic oligonucleotide
  Antisense strand to SEQ ID NO: 1227060
ucccguguuggaaacagau

SEQ ID NO: 1227062 - RNA, 19 nt, Artificial Sequence
  Description of Artificial Sequence: Synthetic oligonucleotide
  Sense strand starting at position 3338 of SEQ ID NO: 917332
uccuuaaaugucugaaugu

SEQ ID NO: 1227063 - RNA, 19 nt, Artificial Sequence
  Description of Artificial Sequence: Synthetic oligonucleotide
  Antisense strand to SEQ ID NO: 1227062
acauucagacauuuaagga

SEQ ID NO: 1227064 - RNA, 19 nt, Artificial Sequence
  Description of Artificial Sequence: Synthetic oligonucleotide
  Sense strand starting at position 3345 of SEQ ID NO: 917332
augucugaaugucuuaauu

SEQ ID NO: 1227065 - RNA, 19 nt, Artificial Sequence
  Description of Artificial Sequence: Synthetic oligonucleotide
  Antisense strand to SEQ ID NO: 1227064
aauuaagacauucagacau

SEQ ID NO: 1227066 - RNA, 19 nt, Artificial Sequence
  Description of Artificial Sequence: Synthetic oligonucleotide
  Sense strand starting at position 3555 of SEQ ID NO: 917332
aggcauuucuuauaagaac

SEQ ID NO: 1227067 - RNA, 19 nt, Artificial Sequence
  Description of Artificial Sequence: Synthetic oligonucleotide
  Antisense strand to SEQ ID NO: 1227066
guucuuauaagaaaugccu

SEQ ID NO: 1227068 - RNA, 19 nt, Artificial Sequence
  Description of Artificial Sequence: Synthetic oligonucleotide
  Sense strand starting at position 3647 of SEQ ID NO: 917332
cgacucauguauuccauaa

SEQ ID NO: 1227069 - RNA, 19 nt, Artificial Sequence
  Description of Artificial Sequence: Synthetic oligonucleotide
  Antisense strand to SEQ ID NO: 1227068
uuauggaauacaugagucg

SEQ ID NO: 1227070 - RNA, 19 nt, Artificial Sequence
  Description of Artificial Sequence: Synthetic oligonucleotide
  Sense strand starting at position 3677 of SEQ ID NO: 917332
cucuuugugcuauaagaga

SEQ ID NO: 1227071 - RNA, 19 nt, Artificial Sequence
  Description of Artificial Sequence: Synthetic oligonucleotide
  Antisense strand to SEQ ID NO: 1227070
ucucuuauagcacaaagag

SEQ ID NO: 1227072 - RNA, 19 nt, Artificial Sequence
  Description of Artificial Sequence: Synthetic oligonucleotide
  Sense strand starting at position 3766 of SEQ ID NO: 917333
ugugcuagaaacuguaaga

SEQ ID NO: 1227073 - RNA, 19 nt, Artificial Sequence
  Description of Artificial Sequence: Synthetic oligonucleotide
  Antisense strand to SEQ ID NO: 1227072
ucuuacaguuucuagcaca

SEQ ID NO: 1227074 - RNA, 19 nt, Artificial Sequence
  Description of Artificial Sequence: Synthetic oligonucleotide
  Sense strand starting at position 12 of SEQ ID NO: 917333
gaaaguaacgcugauauug

SEQ ID NO: 1227075 - RNA, 19 nt, Artificial Sequence
  Description of Artificial Sequence: Synthetic oligonucleotide
  Antisense strand to SEQ ID NO: 1227074
caauaucagcguuacuuuc

SEQ ID NO: 1227076 - RNA, 19 nt, Artificial Sequence
  Description of Artificial Sequence: Synthetic oligonucleotide
  Sense strand starting at position 330 of SEQ ID NO: 917333
accuuacaaugguuaugaa

SEQ ID NO: 1227077 - RNA, 19 nt, Artificial Sequence
  Description of Artificial Sequence: Synthetic oligonucleotide
  Antisense strand to SEQ ID NO: 1227076
uucauaaccauuguaaggu

SEQ ID NO: 1227078 - RNA, 19 nt, Artificial Sequence
  Description of Artificial Sequence: Synthetic oligonucleotide
  Sense strand starting at position 372 of SEQ ID NO: 917333
ugaccaugaccgcaugaaa

SEQ ID NO: 1227079 - RNA, 19 nt, Artificial Sequence
  Description of Artificial Sequence: Synthetic oligonucleotide
  Antisense strand to SEQ ID NO: 1227078
uuucaugcggucaugguca

SEQ ID NO: 1227080 - RNA, 19 nt, Artificial Sequence
  Description of Artificial Sequence: Synthetic oligonucleotide
  Sense strand starting at position 534 of SEQ ID NO: 917333
gagaaauacugucuauagu

SEQ ID NO: 1227081 - RNA, 19 nt, Artificial Sequence
  Description of Artificial Sequence: Synthetic oligonucleotide
  Antisense strand to SEQ ID NO: 1227080
acuauagacaguauuucuc

SEQ ID NO: 1227082 - RNA, 19 nt, Artificial Sequence
  Description of Artificial Sequence: Synthetic oligonucleotide
  Sense strand starting at position 535 of SEQ ID NO: 917333
agaaauacugucuauaguu

SEQ ID NO: 1227083 - RNA, 19 nt, Artificial Sequence
  Description of Artificial Sequence: Synthetic oligonucleotide
  Antisense strand to SEQ ID NO: 1227082
aacuauagacaguauuucu

SEQ ID NO: 1227084 - RNA, 19 nt, Artificial Sequence
  Description of Artificial Sequence: Synthetic oligonucleotide
  Sense strand starting at position 542 of SEQ ID NO: 917333
cugucuauaguugauagaa

SEQ ID NO: 1227085 - RNA, 19 nt, Artificial Sequence
  Description of Artificial Sequence: Synthetic oligonucleotide
  Antisense strand to SEQ ID NO: 1227084
uucuaucaacuauagacag

SEQ ID NO: 1227086 - RNA, 19 nt, Artificial Sequence
  Description of Artificial Sequence: Synthetic oligonucleotide
  Sense strand starting at position 586 of SEQ ID NO: 917333
ugaaguuaccaaggugacu

SEQ ID NO: 1227087 - RNA, 19 nt, Artificial Sequence
  Description of Artificial Sequence: Synthetic oligonucleotide
  Antisense strand to SEQ ID NO: 1227086
agucaccuugguaacuuca

SEQ ID NO: 1227088 - RNA, 19 nt, Artificial Sequence
  Description of Artificial Sequence: Synthetic oligonucleotide
  Sense strand starting at position 903 of SEQ ID NO: 917333
guguauuuaucacuuugcu

SEQ ID NO: 1227089 - RNA, 19 nt, Artificial Sequence
  Description of Artificial Sequence: Synthetic oligonucleotide
  Antisense strand to SEQ ID NO: 1227088
agcaaagugauaaauacac

SEQ ID NO: 1227090 - RNA, 19 nt, Artificial Sequence
  Description of Artificial Sequence: Synthetic oligonucleotide
  Sense strand starting at position 953 of SEQ ID NO: 917333
ugucuaacucaugaguuug

SEQ ID NO: 1227091 - RNA, 19 nt, Artificial Sequence
  Description of Artificial Sequence: Synthetic oligonucleotide
  Antisense strand to SEQ ID NO: 1227090
caaacucaugaguuagaca

SEQ ID NO: 1227092 - RNA, 19 nt, Artificial Sequence
  Description of Artificial Sequence: Synthetic oligonucleotide
  Sense strand starting at position 984 of SEQ ID NO: 917333
agugaaauaacgcauauga

SEQ ID NO: 1227093 - RNA, 19 nt, Artificial Sequence
  Description of Artificial Sequence: Synthetic oligonucleotide
  Antisense strand to SEQ ID NO: 1227092
ucauaugcguuauuucacu

SEQ ID NO: 1227094 - RNA, 19 nt, Artificial Sequence
  Description of Artificial Sequence: Synthetic oligonucleotide
  Sense strand starting at position 1298 of SEQ ID NO: 917333
ucaaaugguagugauuguu

SEQ ID NO: 1227095 - RNA, 19 nt, Artificial Sequence
  Description of Artificial Sequence: Synthetic oligonucleotide
  Antisense strand to SEQ ID NO: 1227094
aacaaucacuaccauuuga

SEQ ID NO: 1227096 - RNA, 19 nt, Artificial Sequence
  Description of Artificial Sequence: Synthetic oligonucleotide
  Sense strand starting at position 1310 of SEQ ID NO: 917333
gauuguuucguagaaauaa

SEQ ID NO: 1227097 - RNA, 19 nt, Artificial Sequence
  Description of Artificial Sequence: Synthetic oligonucleotide
  Antisense strand to SEQ ID NO: 1227096
uuauuucuacgaaacaauc

SEQ ID NO: 1227098 - RNA, 19 nt, Artificial Sequence
  Description of Artificial Sequence: Synthetic oligonucleotide
  Sense strand starting at position 1319 of SEQ ID NO: 917333
guagaaauaaagugucaag

SEQ ID NO: 1227099 - RNA, 19 nt, Artificial Sequence
  Description of Artificial Sequence: Synthetic oligonucleotide
  Antisense strand to SEQ ID NO: 1227098
cuugacacuuuauuucuac

SEQ ID NO: 1227100 - RNA, 19 nt, Artificial Sequence
  Description of Artificial Sequence: Synthetic oligonucleotide
  Sense strand starting at position 1494 of SEQ ID NO: 917333
guaugugcucuugaauaag

SEQ ID NO: 1227101 - RNA, 19 nt, Artificial Sequence
  Description of Artificial Sequence: Synthetic oligonucleotide
  Antisense strand to SEQ ID NO: 1227100
cuuauucaagagcacauac

SEQ ID NO: 1227102 - RNA, 19 nt, Artificial Sequence
  Description of Artificial Sequence: Synthetic oligonucleotide
  Sense strand starting at position 1497 of SEQ ID NO: 917333
ugugcucuugaauaagaaa

SEQ ID NO: 1227103 - RNA, 19 nt, Artificial Sequence
  Description of Artificial Sequence: Synthetic oligonucleotide
  Antisense strand to SEQ ID NO: 1227102
uuucuuauucaagagcaca

SEQ ID NO: 1227104 - RNA, 19 nt, Artificial Sequence
  Description of Artificial Sequence: Synthetic oligonucleotide
  Sense strand starting at position 1555 of SEQ ID NO: 917333
acacaagacuuugcuaaag

SEQ ID NO: 1227105 - RNA, 19 nt, Artificial Sequence
  Description of Artificial Sequence: Synthetic oligonucleotide
  Antisense strand to SEQ ID NO: 1227104
cuuuagcaaagucuugugu

SEQ ID NO: 1227106 - RNA, 19 nt, Artificial Sequence
  Description of Artificial Sequence: Synthetic oligonucleotide
  Sense strand starting at position 1711 of SEQ ID NO: 917333
uugaauuaggcugagcuga

SEQ ID NO: 1227107 - RNA, 19 nt, Artificial Sequence
  Description of Artificial Sequence: Synthetic oligonucleotide
  Antisense strand to SEQ ID NO: 1227106
ucagcucagccuaauucaa

SEQ ID NO: 1227108 - RNA, 19 nt, Artificial Sequence
  Description of Artificial Sequence: Synthetic oligonucleotide
  Sense strand starting at position 1713 of SEQ ID NO: 917333
gaauuaggcugagcugaau

SEQ ID NO: 1227109 - RNA, 19 nt, Artificial Sequence
  Description of Artificial Sequence: Synthetic oligonucleotide
  Antisense strand to SEQ ID NO: 1227108
auucagcucagccuaauuc

SEQ ID NO: 1227110 - RNA, 19 nt, Artificial Sequence
  Description of Artificial Sequence: Synthetic oligonucleotide
  Sense strand starting at position 1846 of SEQ ID NO: 917333
gaguuaauccugcauggau

SEQ ID NO: 1227111 - RNA, 19 nt, Artificial Sequence
  Description of Artificial Sequence: Synthetic oligonucleotide
  Antisense strand to SEQ ID NO: 1227110
auccaugcaggauuaacuc

SEQ ID NO: 1227112 - RNA, 19 nt, Artificial Sequence
  Description of Artificial Sequence: Synthetic oligonucleotide
  Sense strand starting at position 2539 of SEQ ID NO: 917333
acugucuagugauuagaga

SEQ ID NO: 1227113 - RNA, 19 nt, Artificial Sequence
  Description of Artificial Sequence: Synthetic oligonucleotide
  Antisense strand to SEQ ID NO: 1227112
ucucuaaucacuagacagu

SEQ ID NO: 1227114 - RNA, 19 nt, Artificial Sequence
  Description of Artificial Sequence: Synthetic oligonucleotide
  Sense strand starting at position 2540 of SEQ ID NO: 917333
cugucuagugauuagagag

SEQ ID NO: 1227115 - RNA, 19 nt, Artificial Sequence
  Description of Artificial Sequence: Synthetic oligonucleotide
  Antisense strand to SEQ ID NO: 1227114
cucucuaaucacuagacag

SEQ ID NO: 1227116 - RNA, 19 nt, Artificial Sequence
  Description of Artificial Sequence: Synthetic oligonucleotide
  Sense strand starting at position 2936 of SEQ ID NO: 917333
ugugacuggucccugaaag

SEQ ID NO: 1227117 - RNA, 19 nt, Artificial Sequence
  Description of Artificial Sequence: Synthetic oligonucleotide
  Antisense strand to SEQ ID NO: 1227116
cuuucagggaccagucaca

SEQ ID NO: 1227118 - RNA, 19 nt, Artificial Sequence
  Description of Artificial Sequence: Synthetic oligonucleotide
  Sense strand starting at position 2937 of SEQ ID NO: 917333
gugacuggucccugaaaga

SEQ ID NO: 1227119 - RNA, 19 nt, Artificial Sequence
  Description of Artificial Sequence: Synthetic oligonucleotide
  Antisense strand to SEQ ID NO: 1227118
ucuuucagggaccagucac

SEQ ID NO: 1227120 - RNA, 19 nt, Artificial Sequence
  Description of Artificial Sequence: Synthetic oligonucleotide
  Sense strand starting at position 2983 of SEQ ID NO: 917333
gagcuaauuuaagaagaga

SEQ ID NO: 1227121 - RNA, 19 nt, Artificial Sequence
  Description of Artificial Sequence: Synthetic oligonucleotide
  Antisense strand to SEQ ID NO: 1227120
ucucuucuuaaauuagcuc

SEQ ID NO: 1227122 - RNA, 19 nt, Artificial Sequence
  Description of Artificial Sequence: Synthetic oligonucleotide
  Sense strand starting at position 3008 of SEQ ID NO: 917333
auguacucaccacagaagu

SEQ ID NO: 1227123 - RNA, 19 nt, Artificial Sequence
  Description of Artificial Sequence: Synthetic oligonucleotide
  Antisense strand to SEQ ID NO: 1227122
acuucuguggugaguacau

SEQ ID NO: 1227124 - RNA, 19 nt, Artificial Sequence
  Description of Artificial Sequence: Synthetic oligonucleotide
  Sense strand starting at position 3138 of SEQ ID NO: 917333
aucugugugagccagaauu

SEQ ID NO: 1227125 - RNA, 19 nt, Artificial Sequence
  Description of Artificial Sequence: Synthetic oligonucleotide
  Antisense strand to SEQ ID NO: 1227124
aauucuggcucacacagau

SEQ ID NO: 1227126 - RNA, 19 nt, Artificial Sequence
  Description of Artificial Sequence: Synthetic oligonucleotide
  Sense strand starting at position 3182 of SEQ ID NO: 917333
aguuauccauaacugauga

SEQ ID NO: 1227127 - RNA, 19 nt, Artificial Sequence
  Description of Artificial Sequence: Synthetic oligonucleotide
  Antisense strand to SEQ ID NO: 1227126
ucaucaguuauggauaacu

SEQ ID NO: 1227128 - RNA, 19 nt, Artificial Sequence
  Description of Artificial Sequence: Synthetic oligonucleotide
  Sense strand starting at position 3253 of SEQ ID NO: 917333
agagaaacuucuguuuaga

SEQ ID NO: 1227129 - RNA, 19 nt, Artificial Sequence
  Description of Artificial Sequence: Synthetic oligonucleotide
  Antisense strand to SEQ ID NO: 1227128
ucuaaacagaaguuucucu

SEQ ID NO: 1227130 - RNA, 19 nt, Artificial Sequence
  Description of Artificial Sequence: Synthetic oligonucleotide
  Sense strand starting at position 3255 of SEQ ID NO: 917333
agaaacuucuguuuagaag

SEQ ID NO: 1227131 - RNA, 19 nt, Artificial Sequence
  Description of Artificial Sequence: Synthetic oligonucleotide
  Antisense strand to SEQ ID NO: 1227130
cuucuaaacagaaguuucu

SEQ ID NO: 1227132 - RNA, 19 nt, Artificial Sequence
  Description of Artificial Sequence: Synthetic oligonucleotide
  Sense strand starting at position 3271 of SEQ ID NO: 917333
aagagugcugcugaagacu

SEQ ID NO: 1227133 - RNA, 19 nt, Artificial Sequence
  Description of Artificial Sequence: Synthetic oligonucleotide
  Antisense strand to SEQ ID NO: 1227132
agucuucagcagcacucuu

SEQ ID NO: 1227134 - RNA, 19 nt, Artificial Sequence
  Description of Artificial Sequence: Synthetic oligonucleotide
  Sense strand starting at position 3483 of SEQ ID NO: 917333
cuuccaggaugucugaaau

SEQ ID NO: 1227135 - RNA, 19 nt, Artificial Sequence
  Description of Artificial Sequence: Synthetic oligonucleotide
  Antisense strand to SEQ ID NO: 1227134
auuucagacauccuggaag

SEQ ID NO: 1227136 - RNA, 19 nt, Artificial Sequence
  Description of Artificial Sequence: Synthetic oligonucleotide
  Sense strand starting at position 3560 of SEQ ID NO: 917333
aggccaauccuccaguaua

SEQ ID NO: 1227137 - RNA, 19 nt, Artificial Sequence
  Description of Artificial Sequence: Synthetic oligonucleotide
  Antisense strand to SEQ ID NO: 1227136
uauacuggaggauuggccu

SEQ ID NO: 1227138 - RNA, 19 nt, Artificial Sequence
  Description of Artificial Sequence: Synthetic oligonucleotide
  Sense strand starting at position 3642 of SEQ ID NO: 917333
gcuggcaagagcuagaaua

SEQ ID NO: 1227139 - RNA, 19 nt, Artificial Sequence
  Description of Artificial Sequence: Synthetic oligonucleotide
  Antisense strand to SEQ ID NO: 1227138
uauucuagcucuugccagc

SEQ ID NO: 1227140 - RNA, 19 nt, Artificial Sequence
  Description of Artificial Sequence: Synthetic oligonucleotide
  Sense strand starting at position 3778 of SEQ ID NO: 917333
ggcuaaaccaauuaggguu

SEQ ID NO: 1227141 - RNA, 19 nt, Artificial Sequence
  Description of Artificial Sequence: Synthetic oligonucleotide
  Antisense strand to SEQ ID NO: 1227140
aacccuaauugguuuagcc

SEQ ID NO: 1227142 - RNA, 19 nt, Artificial Sequence
  Description of Artificial Sequence: Synthetic oligonucleotide
  Sense strand starting at position 3914 of SEQ ID NO: 917333
ggauauucuguggguugga

SEQ ID NO: 1227143 - RNA, 19 nt, Artificial Sequence
  Description of Artificial Sequence: Synthetic oligonucleotide
  Antisense strand to SEQ ID NO: 1227142
uccaacccacagaauaucc

SEQ ID NO: 1227144 - RNA, 19 nt, Artificial Sequence
  Description of Artificial Sequence: Synthetic oligonucleotide
  Sense strand starting at position 3934 of SEQ ID NO: 917333
gcugucaggacauggauua

SEQ ID NO: 1227145 - RNA, 19 nt, Artificial Sequence
  Description of Artificial Sequence: Synthetic oligonucleotide
  Antisense strand to SEQ ID NO: 1227144
uaauccauguccugacagc

SEQ ID NO: 1227146 - RNA, 19 nt, Artificial Sequence
  Description of Artificial Sequence: Synthetic oligonucleotide
  Sense strand starting at position 3941 of SEQ ID NO: 917333
ggacauggauuaguucuau

SEQ ID NO: 1227147 - RNA, 19 nt, Artificial Sequence
  Description of Artificial Sequence: Synthetic oligonucleotide
  Antisense strand to SEQ ID NO: 1227146
auagaacuaauccaugucc

SEQ ID NO: 1227148 - RNA, 19 nt, Artificial Sequence
  Description of Artificial Sequence: Synthetic oligonucleotide
  Sense strand starting at position 3947 of SEQ ID NO: 917333
ggauuaguucuaugauugg

SEQ ID NO: 1227149 - RNA, 19 nt, Artificial Sequence
  Description of Artificial Sequence: Synthetic oligonucleotide
  Antisense strand to SEQ ID NO: 1227148
ccaaucauagaacuaaucc

SEQ ID NO: 1227150 - RNA, 19 nt, Artificial Sequence
  Description of Artificial Sequence: Synthetic oligonucleotide
  Sense strand starting at position 3957 of SEQ ID NO: 917333
uaugauuggccucauggua

SEQ ID NO: 1227151 - RNA, 19 nt, Artificial Sequence
  Description of Artificial Sequence: Synthetic oligonucleotide
  Antisense strand to SEQ ID NO: 1227150
uaccaugaggccaaucaua

SEQ ID NO: 1227152 - RNA, 19 nt, Artificial Sequence
  Description of Artificial Sequence: Synthetic oligonucleotide
  Sense strand starting at position 3972 of SEQ ID NO: 917334
gguaaaucuuaucucuaag

SEQ ID NO: 1227153 - RNA, 19 nt, Artificial Sequence
  Description of Artificial Sequence: Synthetic oligonucleotide
  Antisense strand to SEQ ID NO: 1227152
cuuagagauaagauuuacc

SEQ ID NO: 1227154 - RNA, 19 nt, Artificial Sequence
  Description of Artificial Sequence: Synthetic oligonucleotide
  Sense strand starting at position 40 of SEQ ID NO: 917334
ggucuuauacucuaccuuu

SEQ ID NO: 1227155 - RNA, 19 nt, Artificial Sequence
  Description of Artificial Sequence: Synthetic oligonucleotide
  Antisense strand to SEQ ID NO: 1227154
aaagguagaguauaagacc

SEQ ID NO: 1227156 - RNA, 19 nt, Artificial Sequence
  Description of Artificial Sequence: Synthetic oligonucleotide
  Sense strand starting at position 146 of SEQ ID NO: 917334
cuauuaaguguugauacau

SEQ ID NO: 1227157 - RNA, 19 nt, Artificial Sequence
  Description of Artificial Sequence: Synthetic oligonucleotide
  Antisense strand to SEQ ID NO: 1227156
auguaucaacacuuaauag

SEQ ID NO: 1227158 - RNA, 19 nt, Artificial Sequence
  Description of Artificial Sequence: Synthetic oligonucleotide
  Sense strand starting at position 323 of SEQ ID NO: 917334
cugcaagugcuacauaaga

SEQ ID NO: 1227159 - RNA, 19 nt, Artificial Sequence
  Description of Artificial Sequence: Synthetic oligonucleotide
  Antisense strand to SEQ ID NO: 1227158
ucuuauguagcacuugcag

SEQ ID NO: 1227160 - RNA, 19 nt, Artificial Sequence
  Description of Artificial Sequence: Synthetic oligonucleotide
  Sense strand starting at position 781 of SEQ ID NO: 917334
ucauaauacagguggaugu

SEQ ID NO: 1227161 - RNA, 19 nt, Artificial Sequence
  Description of Artificial Sequence: Synthetic oligonucleotide
  Antisense strand to SEQ ID NO: 1227160
acauccaccuguauuauga

SEQ ID NO: 1227162 - RNA, 19 nt, Artificial Sequence
  Description of Artificial Sequence: Synthetic oligonucleotide
  Sense strand starting at position 864 of SEQ ID NO: 917334
auugaucaucuuugauaug

SEQ ID NO: 1227163 - RNA, 19 nt, Artificial Sequence
  Description of Artificial Sequence: Synthetic oligonucleotide
  Antisense strand to SEQ ID NO: 1227162
cauaucaaagaugaucaau

SEQ ID NO: 1227164 - RNA, 19 nt, Artificial Sequence
  Description of Artificial Sequence: Synthetic oligonucleotide
  Sense strand starting at position 886 of SEQ ID NO: 917334
uuacaugguugucuuauuu

SEQ ID NO: 1227165 - RNA, 19 nt, Artificial Sequence
  Description of Artificial Sequence: Synthetic oligonucleotide
  Antisense strand to SEQ ID NO: 1227164
aaauaagacaaccauguaa

SEQ ID NO: 1227166 - RNA, 19 nt, Artificial Sequence
  Description of Artificial Sequence: Synthetic oligonucleotide
  Sense strand starting at position 972 of SEQ ID NO: 917334
cucaaugauguuuaaguau

SEQ ID NO: 1227167 - RNA, 19 nt, Artificial Sequence
  Description of Artificial Sequence: Synthetic oligonucleotide
  Antisense strand to SEQ ID NO: 1227166
auacuuaaacaucauugag

SEQ ID NO: 1227168 - RNA, 19 nt, Artificial Sequence
  Description of Artificial Sequence: Synthetic oligonucleotide
  Sense strand starting at position 1063 of SEQ ID NO: 917334
gacacaaauuucguguucu

SEQ ID NO: 1227169 - RNA, 19 nt, Artificial Sequence
  Description of Artificial Sequence: Synthetic oligonucleotide
  Antisense strand to SEQ ID NO: 1227168
agaacacgaaauuuguguc

SEQ ID NO: 1227170 - RNA, 19 nt, Artificial Sequence
  Description of Artificial Sequence: Synthetic oligonucleotide
  Sense strand starting at position 1067 of SEQ ID NO: 917334
caaauuucguguucugcaa

SEQ ID NO: 1227171 - RNA, 19 nt, Artificial Sequence
  Description of Artificial Sequence: Synthetic oligonucleotide
  Antisense strand to SEQ ID NO: 1227170
uugcagaacacgaaauuug

SEQ ID NO: 1227172 - RNA, 19 nt, Artificial Sequence
  Description of Artificial Sequence: Synthetic oligonucleotide
  Sense strand starting at position 1224 of SEQ ID NO: 917334
auuaaaggugccuacuuaa

SEQ ID NO: 1227173 - RNA, 19 nt, Artificial Sequence
  Description of Artificial Sequence: Synthetic oligonucleotide
  Antisense strand to SEQ ID NO: 1227172
uuaaguaggcaccuuuaau

SEQ ID NO: 1227174 - RNA, 19 nt, Artificial Sequence
  Description of Artificial Sequence: Synthetic oligonucleotide
  Sense strand starting at position 1396 of SEQ ID NO: 917334
cgcugucaccgcaggagau

SEQ ID NO: 1227175 - RNA, 19 nt, Artificial Sequence
  Description of Artificial Sequence: Synthetic oligonucleotide
  Antisense strand to SEQ ID NO: 1227174
aucuccugcggugacagcg

SEQ ID NO: 1227176 - RNA, 19 nt, Artificial Sequence
  Description of Artificial Sequence: Synthetic oligonucleotide
  Sense strand starting at position 2531 of SEQ ID NO: 917334
ggaggucuuggcgaaagga

SEQ ID NO: 1227177 - RNA, 19 nt, Artificial Sequence
  Description of Artificial Sequence: Synthetic oligonucleotide
  Antisense strand to SEQ ID NO: 1227176
uccuuucgccaagaccucc

SEQ ID NO: 1227178 - RNA, 19 nt, Artificial Sequence
  Description of Artificial Sequence: Synthetic oligonucleotide
  Sense strand starting at position 2617 of SEQ ID NO: 917334
cuaggacucaugugcaaga

SEQ ID NO: 1227179 - RNA, 19 nt, Artificial Sequence
  Description of Artificial Sequence: Synthetic oligonucleotide
  Antisense strand to SEQ ID NO: 1227178
ucuugcacaugaguccuag

SEQ ID NO: 1227180 - RNA, 19 nt, Artificial Sequence
  Description of Artificial Sequence: Synthetic oligonucleotide
  Sense strand starting at position 2618 of SEQ ID NO: 917334
uaggacucaugugcaagaa

SEQ ID NO: 1227181 - RNA, 19 nt, Artificial Sequence
  Description of Artificial Sequence: Synthetic oligonucleotide
  Antisense strand to SEQ ID NO: 1227180
uucuugcacaugaguccua

SEQ ID NO: 1227182 - RNA, 19 nt, Artificial Sequence
  Description of Artificial Sequence: Synthetic oligonucleotide
  Sense strand starting at position 2705 of SEQ ID NO: 917334
aggguauccgaagaauguu

SEQ ID NO: 1227183 - RNA, 19 nt, Artificial Sequence
  Description of Artificial Sequence: Synthetic oligonucleotide
  Antisense strand to SEQ ID NO: 1227182
aacauucuucggauacccu

SEQ ID NO: 1227184 - RNA, 19 nt, Artificial Sequence
  Description of Artificial Sequence: Synthetic oligonucleotide
  Sense strand starting at position 2727 of SEQ ID NO: 917334
aguguugagacaugagaug

SEQ ID NO: 1227185 - RNA, 19 nt, Artificial Sequence
  Description of Artificial Sequence: Synthetic oligonucleotide
  Antisense strand to SEQ ID NO: 1227184
caucucaugucucaacacu

SEQ ID NO: 1227186 - RNA, 19 nt, Artificial Sequence
  Description of Artificial Sequence: Synthetic oligonucleotide
  Sense strand starting at position 2768 of SEQ ID NO: 917334
cuauaaguccuuuaguuga

SEQ ID NO: 1227187 - RNA, 19 nt, Artificial Sequence
  Description of Artificial Sequence: Synthetic oligonucleotide
  Antisense strand to SEQ ID NO: 1227186
ucaacuaaaggacuuauag

SEQ ID NO: 1227188 - RNA, 19 nt, Artificial Sequence
  Description of Artificial Sequence: Synthetic oligonucleotide
  Sense strand starting at position 2770 of SEQ ID NO: 917334
auaaguccuuuaguugaga

SEQ ID NO: 1227189 - RNA, 19 nt, Artificial Sequence
  Description of Artificial Sequence: Synthetic oligonucleotide
  Antisense strand to SEQ ID NO: 1227188
ucucaacuaaaggacuuau

SEQ ID NO: 1227190 - RNA, 19 nt, Artificial Sequence
  Description of Artificial Sequence: Synthetic oligonucleotide
  Sense strand starting at position 2771 of SEQ ID NO: 917334
uaaguccuuuaguugagaa

SEQ ID NO: 1227191 - RNA, 19 nt, Artificial Sequence
  Description of Artificial Sequence: Synthetic oligonucleotide
  Antisense strand to SEQ ID NO: 1227190
uucucaacuaaaggacuua

SEQ ID NO: 1227192 - RNA, 19 nt, Artificial Sequence
  Description of Artificial Sequence: Synthetic oligonucleotide
  Sense strand starting at position 2848 of SEQ ID NO: 917334
auuugauugcugcguauaa

SEQ ID NO: 1227193 - RNA, 19 nt, Artificial Sequence
  Description of Artificial Sequence: Synthetic oligonucleotide
  Antisense strand to SEQ ID NO: 1227192
uuauacgcagcaaucaaau

SEQ ID NO: 1227194 - RNA, 19 nt, Artificial Sequence
  Description of Artificial Sequence: Synthetic oligonucleotide
  Sense strand starting at position 2944 of SEQ ID NO: 917334
uuucgaggaucaguugaga

SEQ ID NO: 1227195 - RNA, 19 nt, Artificial Sequence
  Description of Artificial Sequence: Synthetic oligonucleotide
  Antisense strand to SEQ ID NO: 1227194
ucucaacugauccucgaaa

SEQ ID NO: 1227196 - RNA, 19 nt, Artificial Sequence
  Description of Artificial Sequence: Synthetic oligonucleotide
  Sense strand starting at position 2958 of SEQ ID NO: 917334
ugagaacauuuauauguga

SEQ ID NO: 1227197 - RNA, 19 nt, Artificial Sequence
  Description of Artificial Sequence: Synthetic oligonucleotide
  Antisense strand to SEQ ID NO: 1227196
ucacauauaaauguucuca

SEQ ID NO: 1227198 - RNA, 19 nt, Artificial Sequence
  Description of Artificial Sequence: Synthetic oligonucleotide
  Sense strand starting at position 3035 of SEQ ID NO: 917334
gugacacauuugucgagua

SEQ ID NO: 1227199 - RNA, 19 nt, Artificial Sequence
  Description of Artificial Sequence: Synthetic oligonucleotide
  Antisense strand to SEQ ID NO: 1227198
uacucgacaaaugugucac

SEQ ID NO: 1227200 - RNA, 19 nt, Artificial Sequence
  Description of Artificial Sequence: Synthetic oligonucleotide
  Sense strand starting at position 3290 of SEQ ID NO: 917334
accaguaaguuauuccuga

SEQ ID NO: 1227201 - RNA, 19 nt, Artificial Sequence
  Description of Artificial Sequence: Synthetic oligonucleotide
  Antisense strand to SEQ ID NO: 1227200
ucaggaauaacuuacuggu

SEQ ID NO: 1227202 - RNA, 19 nt, Artificial Sequence
  Description of Artificial Sequence: Synthetic oligonucleotide
  Sense strand starting at position 3305 of SEQ ID NO: 917334
cugacuaguguuuacaacu

SEQ ID NO: 1227203 - RNA, 19 nt, Artificial Sequence
  Description of Artificial Sequence: Synthetic oligonucleotide
  Antisense strand to SEQ ID NO: 1227202
aguuguaaacacuagucag

SEQ ID NO: 1227204 - RNA, 19 nt, Artificial Sequence
  Description of Artificial Sequence: Synthetic oligonucleotide
  Sense strand starting at position 3449 of SEQ ID NO: 917334
uaaucuagugguuagguua

SEQ ID NO: 1227205 - RNA, 19 nt, Artificial Sequence
  Description of Artificial Sequence: Synthetic oligonucleotide
  Antisense strand to SEQ ID NO: 1227204
uaaccuaaccacuagauua

SEQ ID NO: 1227206 - RNA, 19 nt, Artificial Sequence
  Description of Artificial Sequence: Synthetic oligonucleotide
  Sense strand starting at position 3464 of SEQ ID NO: 917334
guuaauaaguuagcuagaa

SEQ ID NO: 1227207 - RNA, 19 nt, Artificial Sequence
  Description of Artificial Sequence: Synthetic oligonucleotide
  Antisense strand to SEQ ID NO: 1227206
uucuagcuaacuuauuaac

SEQ ID NO: 1227208 - RNA, 19 nt, Artificial Sequence
  Description of Artificial Sequence: Synthetic oligonucleotide
  Sense strand starting at position 3465 of SEQ ID NO: 917334
uuaauaaguuagcuagaag

SEQ ID NO: 1227209 - RNA, 19 nt, Artificial Sequence
  Description of Artificial Sequence: Synthetic oligonucleotide
  Antisense strand to SEQ ID NO: 1227208
cuucuagcuaacuuauuaa

SEQ ID NO: 1227210 - RNA, 19 nt, Artificial Sequence
  Description of Artificial Sequence: Synthetic oligonucleotide
  Sense strand starting at position 3525 of SEQ ID NO: 917334
gcaguuguggguguagcua

SEQ ID NO: 1227211 - RNA, 19 nt, Artificial Sequence
  Description of Artificial Sequence: Synthetic oligonucleotide
  Antisense strand to SEQ ID NO: 1227210
uagcuacacccacaacugc

SEQ ID NO: 1227212 - RNA, 19 nt, Artificial Sequence
  Description of Artificial Sequence: Synthetic oligonucleotide
  Sense strand starting at position 3544 of SEQ ID NO: 917334
cauucugugguugacgaua

SEQ ID NO: 1227213 - RNA, 19 nt, Artificial Sequence
  Description of Artificial Sequence: Synthetic oligonucleotide
  Antisense strand to SEQ ID NO: 1227212
uaucgucaaccacagaaug

SEQ ID NO: 1227214 - RNA, 19 nt, Artificial Sequence
  Description of Artificial Sequence: Synthetic oligonucleotide
  Sense strand starting at position 3608 of SEQ ID NO: 917334
guucucacuuauuuggcaa

SEQ ID NO: 1227215 - RNA, 19 nt, Artificial Sequence
  Description of Artificial Sequence: Synthetic oligonucleotide
  Antisense strand to SEQ ID NO: 1227214
uugccaaauaagugagaac

SEQ ID NO: 1227216 - RNA, 19 nt, Artificial Sequence
  Description of Artificial Sequence: Synthetic oligonucleotide
  Sense strand starting at position 3627 of SEQ ID NO: 917334
acauuauuugaguguugcu

SEQ ID NO: 1227217 - RNA, 19 nt, Artificial Sequence
  Description of Artificial Sequence: Synthetic oligonucleotide
  Antisense strand to SEQ ID NO: 1227216
agcaacacucaaauaaugu

SEQ ID NO: 1227218 - RNA, 19 nt, Artificial Sequence
  Description of Artificial Sequence: Synthetic oligonucleotide
  Sense strand starting at position 3660 of SEQ ID NO: 917334
gugcuaagcagggauuaca

SEQ ID NO: 1227219 - RNA, 19 nt, Artificial Sequence
  Description of Artificial Sequence: Synthetic oligonucleotide
  Antisense strand to SEQ ID NO: 1227218
uguaaucccugcuuagcac

SEQ ID NO: 1227220 - RNA, 19 nt, Artificial Sequence
  Description of Artificial Sequence: Synthetic oligonucleotide
  Sense strand starting at position 3668 of SEQ ID NO: 917334
cagggauuacacugugaac

SEQ ID NO: 1227221 - RNA, 19 nt, Artificial Sequence
  Description of Artificial Sequence: Synthetic oligonucleotide
  Antisense strand to SEQ ID NO: 1227220
guucacaguguaaucccug

SEQ ID NO: 1227222 - RNA, 19 nt, Artificial Sequence
  Description of Artificial Sequence: Synthetic oligonucleotide
  Sense strand starting at position 3674 of SEQ ID NO: 917334
uuacacugugaacaaguua

SEQ ID NO: 1227223 - RNA, 19 nt, Artificial Sequence
  Description of Artificial Sequence: Synthetic oligonucleotide
  Antisense strand to SEQ ID NO: 1227222
uaacuuguucacaguguaa

SEQ ID NO: 1227224 - RNA, 19 nt, Artificial Sequence
  Description of Artificial Sequence: Synthetic oligonucleotide
  Sense strand starting at position 3687 of SEQ ID NO: 917334
aaguuaggaucauuaggca

SEQ ID NO: 1227225 - RNA, 19 nt, Artificial Sequence
  Description of Artificial Sequence: Synthetic oligonucleotide
  Antisense strand to SEQ ID NO: 1227224
ugccuaaugauccuaacuu

SEQ ID NO: 1227226 - RNA, 19 nt, Artificial Sequence
  Description of Artificial Sequence: Synthetic oligonucleotide
  Sense strand starting at position 3708 of SEQ ID NO: 917334
aauccuuaaggagguuaua

SEQ ID NO: 1227227 - RNA, 19 nt, Artificial Sequence
  Description of Artificial Sequence: Synthetic oligonucleotide
  Antisense strand to SEQ ID NO: 1227226
uauaaccuccuuaaggauu

SEQ ID NO: 1227228 - RNA, 19 nt, Artificial Sequence
  Description of Artificial Sequence: Synthetic oligonucleotide
  Sense strand starting at position 3730 of SEQ ID NO: 917334
cgauguaugggucacaaac

SEQ ID NO: 1227229 - RNA, 19 nt, Artificial Sequence
  Description of Artificial Sequence: Synthetic oligonucleotide
  Antisense strand to SEQ ID NO: 1227228
guuugugacccauacaucg

SEQ ID NO: 1227230 - RNA, 19 nt, Artificial Sequence
  Description of Artificial Sequence: Synthetic oligonucleotide
  Sense strand starting at position 3791 of SEQ ID NO: 917334
ucauuuggucucugucaca

SEQ ID NO: 1227231 - RNA, 19 nt, Artificial Sequence
  Description of Artificial Sequence: Synthetic oligonucleotide
  Antisense strand to SEQ ID NO: 1227230
ugugacagagaccaaauga

SEQ ID NO: 1227232 - RNA, 19 nt, Artificial Sequence
  Description of Artificial Sequence: Synthetic oligonucleotide
  Sense strand starting at position 3862 of SEQ ID NO: 917335
agauaaauguuacucuguu

SEQ ID NO: 1227233 - RNA, 19 nt, Artificial Sequence
  Description of Artificial Sequence: Synthetic oligonucleotide
  Antisense strand to SEQ ID NO: 1227232
aacagaguaacauuuaucu

SEQ ID NO: 1227234 - RNA, 19 nt, Artificial Sequence
  Description of Artificial Sequence: Synthetic oligonucleotide
  Sense strand starting at position 137 of SEQ ID NO: 917335
agaagauacuugguuggua

SEQ ID NO: 1227235 - RNA, 19 nt, Artificial Sequence
  Description of Artificial Sequence: Synthetic oligonucleotide
  Antisense strand to SEQ ID NO: 1227234
uaccaaccaaguaucuucu

SEQ ID NO: 1227236 - RNA, 19 nt, Artificial Sequence
  Description of Artificial Sequence: Synthetic oligonucleotide
  Sense strand starting at position 138 of SEQ ID NO: 917335
gaagauacuugguugguaa

SEQ ID NO: 1227237 - RNA, 19 nt, Artificial Sequence
  Description of Artificial Sequence: Synthetic oligonucleotide
  Antisense strand to SEQ ID NO: 1227236
uuaccaaccaaguaucuuc

SEQ ID NO: 1227238 - RNA, 19 nt, Artificial Sequence
  Description of Artificial Sequence: Synthetic oligonucleotide
  Sense strand starting at position 139 of SEQ ID NO: 917335
aagauacuugguugguaac

SEQ ID NO: 1227239 - RNA, 19 nt, Artificial Sequence
  Description of Artificial Sequence: Synthetic oligonucleotide
  Antisense strand to SEQ ID NO: 1227238
guuaccaaccaaguaucuu

SEQ ID NO: 1227240 - RNA, 19 nt, Artificial Sequence
  Description of Artificial Sequence: Synthetic oligonucleotide
  Sense strand starting at position 140 of SEQ ID NO: 917335
agauacuugguugguaaca

SEQ ID NO: 1227241 - RNA, 19 nt, Artificial Sequence
  Description of Artificial Sequence: Synthetic oligonucleotide
  Antisense strand to SEQ ID NO: 1227240
uguuaccaaccaaguaucu

SEQ ID NO: 1227242 - RNA, 19 nt, Artificial Sequence
  Description of Artificial Sequence: Synthetic oligonucleotide
  Sense strand starting at position 279 of SEQ ID NO: 917335
gugucccugguuuaggaaa

SEQ ID NO: 1227243 - RNA, 19 nt, Artificial Sequence
  Description of Artificial Sequence: Synthetic oligonucleotide
  Antisense strand to SEQ ID NO: 1227242
uuuccuaaaccagggacac

SEQ ID NO: 1227244 - RNA, 19 nt, Artificial Sequence
  Description of Artificial Sequence: Synthetic oligonucleotide
  Sense strand starting at position 461 of SEQ ID NO: 917335
uguccaucaccuugauucu

SEQ ID NO: 1227245 - RNA, 19 nt, Artificial Sequence
  Description of Artificial Sequence: Synthetic oligonucleotide
  Antisense strand to SEQ ID NO: 1227244
agaaucaaggugauggaca

SEQ ID NO: 1227246 - RNA, 19 nt, Artificial Sequence
  Description of Artificial Sequence: Synthetic oligonucleotide
  Sense strand starting at position 506 of SEQ ID NO: 917335
gccuuaucucuccagugag

SEQ ID NO: 1227247 - RNA, 19 nt, Artificial Sequence
  Description of Artificial Sequence: Synthetic oligonucleotide
  Antisense strand to SEQ ID NO: 1227246
cucacuggagagauaaggc

SEQ ID NO: 1227248 - RNA, 19 nt, Artificial Sequence
  Description of Artificial Sequence: Synthetic oligonucleotide
  Sense strand starting at position 668 of SEQ ID NO: 917335
agcacagucacguagguau

SEQ ID NO: 1227249 - RNA, 19 nt, Artificial Sequence
  Description of Artificial Sequence: Synthetic oligonucleotide
  Antisense strand to SEQ ID NO: 1227248
auaccuacgugacugugcu

SEQ ID NO: 1227250 - RNA, 19 nt, Artificial Sequence
  Description of Artificial Sequence: Synthetic oligonucleotide
  Sense strand starting at position 670 of SEQ ID NO: 917335
cacagucacguagguauaa

SEQ ID NO: 1227251 - RNA, 19 nt, Artificial Sequence
  Description of Artificial Sequence: Synthetic oligonucleotide
  Antisense strand to SEQ ID NO: 1227250
uuauaccuacgugacugug

SEQ ID NO: 1227252 - RNA, 19 nt, Artificial Sequence
  Description of Artificial Sequence: Synthetic oligonucleotide
  Sense strand starting at position 671 of SEQ ID NO: 917335
acagucacguagguauaaa

SEQ ID NO: 1227253 - RNA, 19 nt, Artificial Sequence
  Description of Artificial Sequence: Synthetic oligonucleotide
  Antisense strand to SEQ ID NO: 1227252
uuuauaccuacgugacugu

SEQ ID NO: 1227254 - RNA, 19 nt, Artificial Sequence
  Description of Artificial Sequence: Synthetic oligonucleotide
  Sense strand starting at position 841 of SEQ ID NO: 917335
uucgaaguugcuggaacau

SEQ ID NO: 1227255 - RNA, 19 nt, Artificial Sequence
  Description of Artificial Sequence: Synthetic oligonucleotide
  Antisense strand to SEQ ID NO: 1227254
auguuccagcaacuucgaa

SEQ ID NO: 1227256 - RNA, 19 nt, Artificial Sequence
  Description of Artificial Sequence: Synthetic oligonucleotide
  Sense strand starting at position 936 of SEQ ID NO: 917335
gcguaauucccagagguug

SEQ ID NO: 1227257 - RNA, 19 nt, Artificial Sequence
  Description of Artificial Sequence: Synthetic oligonucleotide
  Antisense strand to SEQ ID NO: 1227256
caaccucugggaauuacgc

SEQ ID NO: 1227258 - RNA, 19 nt, Artificial Sequence
  Description of Artificial Sequence: Synthetic oligonucleotide
  Sense strand starting at position 979 of SEQ ID NO: 917335
uucgcaagugaacgaauuu

SEQ ID NO: 1227259 - RNA, 19 nt, Artificial Sequence
  Description of Artificial Sequence: Synthetic oligonucleotide
  Antisense strand to SEQ ID NO: 1227258
aaauucguucacuugcgaa

SEQ ID NO: 1227260 - RNA, 19 nt, Artificial Sequence
  Description of Artificial Sequence: Synthetic oligonucleotide
  Sense strand starting at position 1190 of SEQ ID NO: 917335
cucguuuaugcgcucggau

SEQ ID NO: 1227261 - RNA, 19 nt, Artificial Sequence
  Description of Artificial Sequence: Synthetic oligonucleotide
  Antisense strand to SEQ ID NO: 1227260
auccgagcgcauaaacgag

SEQ ID NO: 1227262 - RNA, 19 nt, Artificial Sequence
  Description of Artificial Sequence: Synthetic oligonucleotide
  Sense strand starting at position 1191 of SEQ ID NO: 917335
ucguuuaugcgcucggauu

SEQ ID NO: 1227263 - RNA, 19 nt, Artificial Sequence
  Description of Artificial Sequence: Synthetic oligonucleotide
  Antisense strand to SEQ ID NO: 1227262
aauccgagcgcauaaacga

SEQ ID NO: 1227264 - RNA, 19 nt, Artificial Sequence
  Description of Artificial Sequence: Synthetic oligonucleotide
  Sense strand starting at position 1931 of SEQ ID NO: 917335
ccggguucccuuuacugaa

SEQ ID NO: 1227265 - RNA, 19 nt, Artificial Sequence
  Description of Artificial Sequence: Synthetic oligonucleotide
  Antisense strand to SEQ ID NO: 1227264
uucaguaaagggaacccgg

SEQ ID NO: 1227266 - RNA, 19 nt, Artificial Sequence
  Description of Artificial Sequence: Synthetic oligonucleotide
  Sense strand starting at position 1989 of SEQ ID NO: 917335
cggccaugugauggauaga

SEQ ID NO: 1227267 - RNA, 19 nt, Artificial Sequence
  Description of Artificial Sequence: Synthetic oligonucleotide
  Antisense strand to SEQ ID NO: 1227266
ucuauccaucacauggccg

SEQ ID NO: 1227268 - RNA, 19 nt, Artificial Sequence
  Description of Artificial Sequence: Synthetic oligonucleotide
  Sense strand starting at position 2209 of SEQ ID NO: 917335
cuaguaggucucugggaca

SEQ ID NO: 1227269 - RNA, 19 nt, Artificial Sequence
  Description of Artificial Sequence: Synthetic oligonucleotide
  Antisense strand to SEQ ID NO: 1227268
ugucccagagaccuacuag

SEQ ID NO: 1227270 - RNA, 19 nt, Artificial Sequence
  Description of Artificial Sequence: Synthetic oligonucleotide
  Sense strand starting at position 2286 of SEQ ID NO: 917335
cugccuagacccugaaagu

SEQ ID NO: 1227271 - RNA, 19 nt, Artificial Sequence
  Description of Artificial Sequence: Synthetic oligonucleotide
  Antisense strand to SEQ ID NO: 1227270
acuuucagggucuaggcag

SEQ ID NO: 1227272 - RNA, 19 nt, Artificial Sequence
  Description of Artificial Sequence: Synthetic oligonucleotide
  Sense strand starting at position 2313 of SEQ ID NO: 917335
uuuagcugaugauuaauga

SEQ ID NO: 1227273 - RNA, 19 nt, Artificial Sequence
  Description of Artificial Sequence: Synthetic oligonucleotide
  Antisense strand to SEQ ID NO: 1227272
ucauuaaucaucagcuaaa

SEQ ID NO: 1227274 - RNA, 19 nt, Artificial Sequence
  Description of Artificial Sequence: Synthetic oligonucleotide
  Sense strand starting at position 2344 of SEQ ID NO: 917335
uguaaauggcaacaguaaa

SEQ ID NO: 1227275 - RNA, 19 nt, Artificial Sequence
  Description of Artificial Sequence: Synthetic oligonucleotide
  Antisense strand to SEQ ID NO: 1227274
uuuacuguugccauuuaca

SEQ ID NO: 1227276 - RNA, 19 nt, Artificial Sequence
  Description of Artificial Sequence: Synthetic oligonucleotide
  Sense strand starting at position 2376 of SEQ ID NO: 917335
cccgauuugugagcaccaa

SEQ ID NO: 1227277 - RNA, 19 nt, Artificial Sequence
  Description of Artificial Sequence: Synthetic oligonucleotide
  Antisense strand to SEQ ID NO: 1227276
uuggugcucacaaaucggg

SEQ ID NO: 1227278 - RNA, 19 nt, Artificial Sequence
  Description of Artificial Sequence: Synthetic oligonucleotide
  Sense strand starting at position 2491 of SEQ ID NO: 917335
gaaagcuuuguugccgcua

SEQ ID NO: 1227279 - RNA, 19 nt, Artificial Sequence
  Description of Artificial Sequence: Synthetic oligonucleotide
  Antisense strand to SEQ ID NO: 1227278
uagcggcaacaaagcuuuc

SEQ ID NO: 1227280 - RNA, 19 nt, Artificial Sequence
  Description of Artificial Sequence: Synthetic oligonucleotide
  Sense strand starting at position 2494 of SEQ ID NO: 917335
agcuuuguugccgcuacau

SEQ ID NO: 1227281 - RNA, 19 nt, Artificial Sequence
  Description of Artificial Sequence: Synthetic oligonucleotide
  Antisense strand to SEQ ID NO: 1227280
auguagcggcaacaaagcu

SEQ ID NO: 1227282 - RNA, 19 nt, Artificial Sequence
  Description of Artificial Sequence: Synthetic oligonucleotide
  Sense strand starting at position 2627 of SEQ ID NO: 917335
gggcuucuuggagaacucu

SEQ ID NO: 1227283 - RNA, 19 nt, Artificial Sequence
  Description of Artificial Sequence: Synthetic oligonucleotide
  Antisense strand to SEQ ID NO: 1227282
agaguucuccaagaagccc

SEQ ID NO: 1227284 - RNA, 19 nt, Artificial Sequence
  Description of Artificial Sequence: Synthetic oligonucleotide
  Sense strand starting at position 2678 of SEQ ID NO: 917335
cgaaaccauuuauagagaa

SEQ ID NO: 1227285 - RNA, 19 nt, Artificial Sequence
  Description of Artificial Sequence: Synthetic oligonucleotide
  Antisense strand to SEQ ID NO: 1227284
uucucuauaaaugguuucg

SEQ ID NO: 1227286 - RNA, 19 nt, Artificial Sequence
  Description of Artificial Sequence: Synthetic oligonucleotide
  Sense strand starting at position 2695 of SEQ ID NO: 917335
aaguauccagacugaaguu

SEQ ID NO: 1227287 - RNA, 19 nt, Artificial Sequence
  Description of Artificial Sequence: Synthetic oligonucleotide
  Antisense strand to SEQ ID NO: 1227286
aacuucagucuggauacuu

SEQ ID NO: 1227288 - RNA, 19 nt, Artificial Sequence
  Description of Artificial Sequence: Synthetic oligonucleotide
  Sense strand starting at position 2712 of SEQ ID NO: 917335
uucucaguuccaggaacua

SEQ ID NO: 1227289 - RNA, 19 nt, Artificial Sequence
  Description of Artificial Sequence: Synthetic oligonucleotide
  Antisense strand to SEQ ID NO: 1227288
uaguuccuggaacugagaa

SEQ ID NO: 1227290 - RNA, 19 nt, Artificial Sequence
  Description of Artificial Sequence: Synthetic oligonucleotide
  Sense strand starting at position 2731 of SEQ ID NO: 917335
gggaguacccauugguuga

SEQ ID NO: 1227291 - RNA, 19 nt, Artificial Sequence
  Description of Artificial Sequence: Synthetic oligonucleotide
  Antisense strand to SEQ ID NO: 1227290
ucaaccaauggguacuccc

SEQ ID NO: 1227292 - RNA, 19 nt, Artificial Sequence
  Description of Artificial Sequence: Synthetic oligonucleotide
  Sense strand starting at position 2732 of SEQ ID NO: 917335
ggaguacccauugguugau

SEQ ID NO: 1227293 - RNA, 19 nt, Artificial Sequence
  Description of Artificial Sequence: Synthetic oligonucleotide
  Antisense strand to SEQ ID NO: 1227292
aucaaccaauggguacucc

SEQ ID NO: 1227294 - RNA, 19 nt, Artificial Sequence
  Description of Artificial Sequence: Synthetic oligonucleotide
  Sense strand starting at position 2741 of SEQ ID NO: 917335
auugguugaucaccacagu

SEQ ID NO: 1227295 - RNA, 19 nt, Artificial Sequence
  Description of Artificial Sequence: Synthetic oligonucleotide
  Antisense strand to SEQ ID NO: 1227294
acuguggugaucaaccaau

SEQ ID NO: 1227296 - RNA, 19 nt, Artificial Sequence
  Description of Artificial Sequence: Synthetic oligonucleotide
  Sense strand starting at position 2824 of SEQ ID NO: 917335
ccaugccugccugaaagaa

SEQ ID NO: 1227297 - RNA, 19 nt, Artificial Sequence
  Description of Artificial Sequence: Synthetic oligonucleotide
  Antisense strand to SEQ ID NO: 1227296
uucuuucaggcaggcaugg

SEQ ID NO: 1227298 - RNA, 19 nt, Artificial Sequence
  Description of Artificial Sequence: Synthetic oligonucleotide
  Sense strand starting at position 2887 of SEQ ID NO: 917335
gguggcuuuggcuauaaua

SEQ ID NO: 1227299 - RNA, 19 nt, Artificial Sequence
  Description of Artificial Sequence: Synthetic oligonucleotide
  Antisense strand to SEQ ID NO: 1227298
uauuauagccaaagccacc

SEQ ID NO: 1227300 - RNA, 19 nt, Artificial Sequence
  Description of Artificial Sequence: Synthetic oligonucleotide
  Sense strand starting at position 2889 of SEQ ID NO: 917335
uggcuuuggcuauaauaau

SEQ ID NO: 1227301 - RNA, 19 nt, Artificial Sequence
  Description of Artificial Sequence: Synthetic oligonucleotide
  Antisense strand to SEQ ID NO: 1227300
auuauuauagccaaagcca

SEQ ID NO: 1227302 - RNA, 19 nt, Artificial Sequence
  Description of Artificial Sequence: Synthetic oligonucleotide
  Sense strand starting at position 3050 of SEQ ID NO: 917335
gggcucugugcugagaacu

SEQ ID NO: 1227303 - RNA, 19 nt, Artificial Sequence
  Description of Artificial Sequence: Synthetic oligonucleotide
  Antisense strand to SEQ ID NO: 1227302
aguucucagcacagagccc

SEQ ID NO: 1227304 - RNA, 19 nt, Artificial Sequence
  Description of Artificial Sequence: Synthetic oligonucleotide
  Sense strand starting at position 3220 of SEQ ID NO: 917335
ucuaaauauuaggagggaa

SEQ ID NO: 1227305 - RNA, 19 nt, Artificial Sequence
  Description of Artificial Sequence: Synthetic oligonucleotide
  Antisense strand to SEQ ID NO: 1227304
uucccuccuaauauuuaga

SEQ ID NO: 1227306 - RNA, 19 nt, Artificial Sequence
  Description of Artificial Sequence: Synthetic oligonucleotide
  Sense strand starting at position 3819 of SEQ ID NO: 917335
uggguauauuggguuaaua

SEQ ID NO: 1227307 - RNA, 19 nt, Artificial Sequence
  Description of Artificial Sequence: Synthetic oligonucleotide
  Antisense strand to SEQ ID NO: 1227306
uauuaacccaauauaccca

SEQ ID NO: 1227308 - RNA, 19 nt, Artificial Sequence
  Description of Artificial Sequence: Synthetic oligonucleotide
  Sense strand starting at position 3877 of SEQ ID NO: 917335
guggcuccuagagaguuua

SEQ ID NO: 1227309 - RNA, 19 nt, Artificial Sequence
  Description of Artificial Sequence: Synthetic oligonucleotide
  Antisense strand to SEQ ID NO: 1227308
uaaacucucuaggagccac

SEQ ID NO: 1227310 - RNA, 19 nt, Artificial Sequence
  Description of Artificial Sequence: Synthetic oligonucleotide
  Sense strand starting at position 3885 of SEQ ID NO: 917335
uagagaguuuaaguuacau

SEQ ID NO: 1227311 - RNA, 19 nt, Artificial Sequence
  Description of Artificial Sequence: Synthetic oligonucleotide
  Antisense strand to SEQ ID NO: 1227310
auguaacuuaaacucucua

SEQ ID NO: 1227312 - RNA, 19 nt, Artificial Sequence
  Description of Artificial Sequence: Synthetic oligonucleotide
  Sense strand starting at position 3891 of SEQ ID NO: 917335
guuuaaguuacauacguag

SEQ ID NO: 1227313 - RNA, 19 nt, Artificial Sequence
  Description of Artificial Sequence: Synthetic oligonucleotide
  Antisense strand to SEQ ID NO: 1227312
cuacguauguaacuuaaac

SEQ ID NO: 1227314 - RNA, 19 nt, Artificial Sequence
  Description of Artificial Sequence: Synthetic oligonucleotide
  Sense strand starting at position 3891 of SEQ ID NO: 917336
guuuaaguuacauacguag

SEQ ID NO: 1227315 - RNA, 19 nt, Artificial Sequence
  Description of Artificial Sequence: Synthetic oligonucleotide
  Antisense strand to SEQ ID NO: 1227314
cuacguauguaacuuaaac

SEQ ID NO: 1227316 - RNA, 19 nt, Artificial Sequence
  Description of Artificial Sequence: Synthetic oligonucleotide
  Sense strand starting at position 18 of SEQ ID NO: 917336
ucagcauuacuaugauugu

SEQ ID NO: 1227317 - RNA, 19 nt, Artificial Sequence
  Description of Artificial Sequence: Synthetic oligonucleotide
  Antisense strand to SEQ ID NO: 1227316
acaaucauaguaaugcuga

SEQ ID NO: 1227318 - RNA, 19 nt, Artificial Sequence
  Description of Artificial Sequence: Synthetic oligonucleotide
  Sense strand starting at position 21 of SEQ ID NO: 917336
gcauuacuaugauugugaa

SEQ ID NO: 1227319 - RNA, 19 nt, Artificial Sequence
  Description of Artificial Sequence: Synthetic oligonucleotide
  Antisense strand to SEQ ID NO: 1227318
uucacaaucauaguaaugc

SEQ ID NO: 1227320 - RNA, 19 nt, Artificial Sequence
  Description of Artificial Sequence: Synthetic oligonucleotide
  Sense strand starting at position 324 of SEQ ID NO: 917336
ugguuuaugggagggaucu

SEQ ID NO: 1227321 - RNA, 19 nt, Artificial Sequence
  Description of Artificial Sequence: Synthetic oligonucleotide
  Antisense strand to SEQ ID NO: 1227320
agaucccucccauaaacca

SEQ ID NO: 1227322 - RNA, 19 nt, Artificial Sequence
  Description of Artificial Sequence: Synthetic oligonucleotide
  Sense strand starting at position 334 of SEQ ID NO: 917336
gagggaucucguugaauau

SEQ ID NO: 1227323 - RNA, 19 nt, Artificial Sequence
  Description of Artificial Sequence: Synthetic oligonucleotide
  Antisense strand to SEQ ID NO: 1227322
auauucaacgagaucccuc

SEQ ID NO: 1227324 - RNA, 19 nt, Artificial Sequence
  Description of Artificial Sequence: Synthetic oligonucleotide
  Sense strand starting at position 335 of SEQ ID NO: 917336
agggaucucguugaauauc

SEQ ID NO: 1227325 - RNA, 19 nt, Artificial Sequence
  Description of Artificial Sequence: Synthetic oligonucleotide
  Antisense strand to SEQ ID NO: 1227324
gauauucaacgagaucccu

SEQ ID NO: 1227326 - RNA, 19 nt, Artificial Sequence
  Description of Artificial Sequence: Synthetic oligonucleotide
  Sense strand starting at position 410 of SEQ ID NO: 917336
acgauccauuucugaauuu

SEQ ID NO: 1227327 - RNA, 19 nt, Artificial Sequence
  Description of Artificial Sequence: Synthetic oligonucleotide
  Antisense strand to SEQ ID NO: 1227326
aaauucagaaauggaucgu

SEQ ID NO: 1227328 - RNA, 19 nt, Artificial Sequence
  Description of Artificial Sequence: Synthetic oligonucleotide
  Sense strand starting at position 446 of SEQ ID NO: 917336
uaaguaugucuguaaaguu

SEQ ID NO: 1227329 - RNA, 19 nt, Artificial Sequence
  Description of Artificial Sequence: Synthetic oligonucleotide
  Antisense strand to SEQ ID NO: 1227328
aacuuuacagacauacuua

SEQ ID NO: 1227330 - RNA, 19 nt, Artificial Sequence
  Description of Artificial Sequence: Synthetic oligonucleotide
  Sense strand starting at position 563 of SEQ ID NO: 917336
ugugauacacugcauccua

SEQ ID NO: 1227331 - RNA, 19 nt, Artificial Sequence
  Description of Artificial Sequence: Synthetic oligonucleotide
  Antisense strand to SEQ ID NO: 1227330
uaggaugcaguguaucaca

SEQ ID NO: 1227332 - RNA, 19 nt, Artificial Sequence
  Description of Artificial Sequence: Synthetic oligonucleotide
  Sense strand starting at position 613 of SEQ ID NO: 917336
gagaguaaauagcuccaau

SEQ ID NO: 1227333 - RNA, 19 nt, Artificial Sequence
  Description of Artificial Sequence: Synthetic oligonucleotide
  Antisense strand to SEQ ID NO: 1227332
auuggagcuauuuacucuc

SEQ ID NO: 1227334 - RNA, 19 nt, Artificial Sequence
  Description of Artificial Sequence: Synthetic oligonucleotide
  Sense strand starting at position 673 of SEQ ID NO: 917336
auguuagauuaacugaagu

SEQ ID NO: 1227335 - RNA, 19 nt, Artificial Sequence
  Description of Artificial Sequence: Synthetic oligonucleotide
  Antisense strand to SEQ ID NO: 1227334
acuucaguuaaucuaacau

SEQ ID NO: 1227336 - RNA, 19 nt, Artificial Sequence
  Description of Artificial Sequence: Synthetic oligonucleotide
  Sense strand starting at position 688 of SEQ ID NO: 917336
aagugccagucuuuggaga

SEQ ID NO: 1227337 - RNA, 19 nt, Artificial Sequence
  Description of Artificial Sequence: Synthetic oligonucleotide
  Antisense strand to SEQ ID NO: 1227336
ucuccaaagacuggcacuu

SEQ ID NO: 1227338 - RNA, 19 nt, Artificial Sequence
  Description of Artificial Sequence: Synthetic oligonucleotide
  Sense strand starting at position 705 of SEQ ID NO: 917336
gacccuuaacugugaguag

SEQ ID NO: 1227339 - RNA, 19 nt, Artificial Sequence
  Description of Artificial Sequence: Synthetic oligonucleotide
  Antisense strand to SEQ ID NO: 1227338
cuacucacaguuaaggguc

SEQ ID NO: 1227340 - RNA, 19 nt, Artificial Sequence
  Description of Artificial Sequence: Synthetic oligonucleotide
  Sense strand starting at position 708 of SEQ ID NO: 917336
ccuuaacugugaguaguua

SEQ ID NO: 1227341 - RNA, 19 nt, Artificial Sequence
  Description of Artificial Sequence: Synthetic oligonucleotide
  Antisense strand to SEQ ID NO: 1227340
uaacuacucacaguuaagg

SEQ ID NO: 1227342 - RNA, 19 nt, Artificial Sequence
  Description of Artificial Sequence: Synthetic oligonucleotide
  Sense strand starting at position 735 of SEQ ID NO: 917336
gagguuccuaaauggguau

SEQ ID NO: 1227343 - RNA, 19 nt, Artificial Sequence
  Description of Artificial Sequence: Synthetic oligonucleotide
  Antisense strand to SEQ ID NO: 1227342
auacccauuuaggaaccuc

SEQ ID NO: 1227344 - RNA, 19 nt, Artificial Sequence
  Description of Artificial Sequence: Synthetic oligonucleotide
  Sense strand starting at position 738 of SEQ ID NO: 917336
guuccuaaauggguauagu

SEQ ID NO: 1227345 - RNA, 19 nt, Artificial Sequence
  Description of Artificial Sequence: Synthetic oligonucleotide
  Antisense strand to SEQ ID NO: 1227344
acuauacccauuuaggaac

SEQ ID NO: 1227346 - RNA, 19 nt, Artificial Sequence
  Description of Artificial Sequence: Synthetic oligonucleotide
  Sense strand starting at position 749 of SEQ ID NO: 917336
gguauaguguguucauuua

SEQ ID NO: 1227347 - RNA, 19 nt, Artificial Sequence
  Description of Artificial Sequence: Synthetic oligonucleotide
  Antisense strand to SEQ ID NO: 1227346
uaaaugaacacacuauacc

SEQ ID NO: 1227348 - RNA, 19 nt, Artificial Sequence
  Description of Artificial Sequence: Synthetic oligonucleotide
  Sense strand starting at position 779 of SEQ ID NO: 917336
gagauaacuuaaguuguaa

SEQ ID NO: 1227349 - RNA, 19 nt, Artificial Sequence
  Description of Artificial Sequence: Synthetic oligonucleotide
  Antisense strand to SEQ ID NO: 1227348
uuacaacuuaaguuaucuc

SEQ ID NO: 1227350 - RNA, 19 nt, Artificial Sequence
  Description of Artificial Sequence: Synthetic oligonucleotide
  Sense strand starting at position 1413 of SEQ ID NO: 917336
ucauucgaaaugugucaga

SEQ ID NO: 1227351 - RNA, 19 nt, Artificial Sequence
  Description of Artificial Sequence: Synthetic oligonucleotide
  Antisense strand to SEQ ID NO: 1227350
ucugacacauuucgaauga

SEQ ID NO: 1227352 - RNA, 19 nt, Artificial Sequence
  Description of Artificial Sequence: Synthetic oligonucleotide
  Sense strand starting at position 1460 of SEQ ID NO: 917336
cguuaauaaaccgcgugau

SEQ ID NO: 1227353 - RNA, 19 nt, Artificial Sequence
  Description of Artificial Sequence: Synthetic oligonucleotide
  Antisense strand to SEQ ID NO: 1227352
aucacgcgguuuauuaacg

SEQ ID NO: 1227354 - RNA, 19 nt, Artificial Sequence
  Description of Artificial Sequence: Synthetic oligonucleotide
  Sense strand starting at position 1464 of SEQ ID NO: 917336
aauaaaccgcgugaucuau

SEQ ID NO: 1227355 - RNA, 19 nt, Artificial Sequence
  Description of Artificial Sequence: Synthetic oligonucleotide
  Antisense strand to SEQ ID NO: 1227354
auagaucacgcgguuuauu

SEQ ID NO: 1227356 - RNA, 19 nt, Artificial Sequence
  Description of Artificial Sequence: Synthetic oligonucleotide
  Sense strand starting at position 1575 of SEQ ID NO: 917336
ucagguccuguccaggaau

SEQ ID NO: 1227357 - RNA, 19 nt, Artificial Sequence
  Description of Artificial Sequence: Synthetic oligonucleotide
  Antisense strand to SEQ ID NO: 1227356
auuccuggacaggaccuga

SEQ ID NO: 1227358 - RNA, 19 nt, Artificial Sequence
  Description of Artificial Sequence: Synthetic oligonucleotide
  Sense strand starting at position 1578 of SEQ ID NO: 917336
gguccuguccaggaauucu

SEQ ID NO: 1227359 - RNA, 19 nt, Artificial Sequence
  Description of Artificial Sequence: Synthetic oligonucleotide
  Antisense strand to SEQ ID NO: 1227358
agaauuccuggacaggacc

SEQ ID NO: 1227360 - RNA, 19 nt, Artificial Sequence
  Description of Artificial Sequence: Synthetic oligonucleotide
  Sense strand starting at position 1795 of SEQ ID NO: 917336
aaccucugugaaggugaaa

SEQ ID NO: 1227361 - RNA, 19 nt, Artificial Sequence
  Description of Artificial Sequence: Synthetic oligonucleotide
  Antisense strand to SEQ ID NO: 1227360
uuucaccuucacagagguu

SEQ ID NO: 1227362 - RNA, 19 nt, Artificial Sequence
  Description of Artificial Sequence: Synthetic oligonucleotide
  Sense strand starting at position 1868 of SEQ ID NO: 917336
ucagaaucgcgguaacaaa

SEQ ID NO: 1227363 - RNA, 19 nt, Artificial Sequence
  Description of Artificial Sequence: Synthetic oligonucleotide
  Antisense strand to SEQ ID NO: 1227362
uuuguuaccgcgauucuga

SEQ ID NO: 1227364 - RNA, 19 nt, Artificial Sequence
  Description of Artificial Sequence: Synthetic oligonucleotide
  Sense strand starting at position 1908 of SEQ ID NO: 917336
ggcggucaccucucgguua

SEQ ID NO: 1227365 - RNA, 19 nt, Artificial Sequence
  Description of Artificial Sequence: Synthetic oligonucleotide
  Antisense strand to SEQ ID NO: 1227364
uaaccgagaggugaccgcc

SEQ ID NO: 1227366 - RNA, 19 nt, Artificial Sequence
  Description of Artificial Sequence: Synthetic oligonucleotide
  Sense strand starting at position 2012 of SEQ ID NO: 917336
gagacuaggucucccagaa

SEQ ID NO: 1227367 - RNA, 19 nt, Artificial Sequence
  Description of Artificial Sequence: Synthetic oligonucleotide
  Antisense strand to SEQ ID NO: 1227366
uucugggagaccuagucuc

SEQ ID NO: 1227368 - RNA, 19 nt, Artificial Sequence
  Description of Artificial Sequence: Synthetic oligonucleotide
  Sense strand starting at position 2016 of SEQ ID NO: 917336
cuaggucucccagaaucca

SEQ ID NO: 1227369 - RNA, 19 nt, Artificial Sequence
  Description of Artificial Sequence: Synthetic oligonucleotide
  Antisense strand to SEQ ID NO: 1227368
uggauucugggagaccuag

SEQ ID NO: 1227370 - RNA, 19 nt, Artificial Sequence
  Description of Artificial Sequence: Synthetic oligonucleotide
  Sense strand starting at position 2024 of SEQ ID NO: 917336
cccagaauccauggcguga

SEQ ID NO: 1227371 - RNA, 19 nt, Artificial Sequence
  Description of Artificial Sequence: Synthetic oligonucleotide
  Antisense strand to SEQ ID NO: 1227370
ucacgccauggauucuggg

SEQ ID NO: 1227372 - RNA, 19 nt, Artificial Sequence
  Description of Artificial Sequence: Synthetic oligonucleotide
  Sense strand starting at position 2028 of SEQ ID NO: 917336
gaauccauggcgugacaaa

SEQ ID NO: 1227373 - RNA, 19 nt, Artificial Sequence
  Description of Artificial Sequence: Synthetic oligonucleotide
  Antisense strand to SEQ ID NO: 1227372
uuugucacgccauggauuc

SEQ ID NO: 1227374 - RNA, 19 nt, Artificial Sequence
  Description of Artificial Sequence: Synthetic oligonucleotide
  Sense strand starting at position 2047 of SEQ ID NO: 917336
cgcaguaauuuggcaacaa

SEQ ID NO: 1227375 - RNA, 19 nt, Artificial Sequence
  Description of Artificial Sequence: Synthetic oligonucleotide
  Antisense strand to SEQ ID NO: 1227374
uuguugccaaauuacugcg

SEQ ID NO: 1227376 - RNA, 19 nt, Artificial Sequence
  Description of Artificial Sequence: Synthetic oligonucleotide
  Sense strand starting at position 2074 of SEQ ID NO: 917336
cggaauuaguuccuagauc

SEQ ID NO: 1227377 - RNA, 19 nt, Artificial Sequence
  Description of Artificial Sequence: Synthetic oligonucleotide
  Antisense strand to SEQ ID NO: 1227376
gaucuaggaacuaauuccg

SEQ ID NO: 1227378 - RNA, 19 nt, Artificial Sequence
  Description of Artificial Sequence: Synthetic oligonucleotide
  Sense strand starting at position 2496 of SEQ ID NO: 917336
aagagucaauacgugcaaa

SEQ ID NO: 1227379 - RNA, 19 nt, Artificial Sequence
  Description of Artificial Sequence: Synthetic oligonucleotide
  Antisense strand to SEQ ID NO: 1227378
uuugcacguauugacucuu

SEQ ID NO: 1227380 - RNA, 19 nt, Artificial Sequence
  Description of Artificial Sequence: Synthetic oligonucleotide
  Sense strand starting at position 2499 of SEQ ID NO: 917336
agucaauacgugcaaagca

SEQ ID NO: 1227381 - RNA, 19 nt, Artificial Sequence
  Description of Artificial Sequence: Synthetic oligonucleotide
  Antisense strand to SEQ ID NO: 1227380
ugcuuugcacguauugacu

SEQ ID NO: 1227382 - RNA, 19 nt, Artificial Sequence
  Description of Artificial Sequence: Synthetic oligonucleotide
  Sense strand starting at position 2540 of SEQ ID NO: 917336
aagaauaagcgcuauguaa

SEQ ID NO: 1227383 - RNA, 19 nt, Artificial Sequence
  Description of Artificial Sequence: Synthetic oligonucleotide
  Antisense strand to SEQ ID NO: 1227382
uuacauagcgcuuauucuu

SEQ ID NO: 1227384 - RNA, 19 nt, Artificial Sequence
  Description of Artificial Sequence: Synthetic oligonucleotide
  Sense strand starting at position 2549 of SEQ ID NO: 917336
cgcuauguaaguguuuguu

SEQ ID NO: 1227385 - RNA, 19 nt, Artificial Sequence
  Description of Artificial Sequence: Synthetic oligonucleotide
  Antisense strand to SEQ ID NO: 1227384
aacaaacacuuacauagcg

SEQ ID NO: 1227386 - RNA, 19 nt, Artificial Sequence
  Description of Artificial Sequence: Synthetic oligonucleotide
  Sense strand starting at position 2791 of SEQ ID NO: 917336
aaaguuacagucuggaaua

SEQ ID NO: 1227387 - RNA, 19 nt, Artificial Sequence
  Description of Artificial Sequence: Synthetic oligonucleotide
  Antisense strand to SEQ ID NO: 1227386
uauuccagacuguaacuuu

SEQ ID NO: 1227388 - RNA, 19 nt, Artificial Sequence
  Description of Artificial Sequence: Synthetic oligonucleotide
  Sense strand starting at position 2833 of SEQ ID NO: 917336
cagccuugugaucaagagu

SEQ ID NO: 1227389 - RNA, 19 nt, Artificial Sequence
  Description of Artificial Sequence: Synthetic oligonucleotide
  Antisense strand to SEQ ID NO: 1227388
acucuugaucacaaggcug

SEQ ID NO: 1227390 - RNA, 19 nt, Artificial Sequence
  Description of Artificial Sequence: Synthetic oligonucleotide
  Sense strand starting at position 2836 of SEQ ID NO: 917336
ccuugugaucaagaguguu

SEQ ID NO: 1227391 - RNA, 19 nt, Artificial Sequence
  Description of Artificial Sequence: Synthetic oligonucleotide
  Antisense strand to SEQ ID NO: 1227390
aacacucuugaucacaagg

SEQ ID NO: 1227392 - RNA, 19 nt, Artificial Sequence
  Description of Artificial Sequence: Synthetic oligonucleotide
  Sense strand starting at position 3433 of SEQ ID NO: 917336
auaagcaaucugugagguu

SEQ ID NO: 1227393 - RNA, 19 nt, Artificial Sequence
  Description of Artificial Sequence: Synthetic oligonucleotide
  Antisense strand to SEQ ID NO: 1227392
aaccucacagauugcuuau

SEQ ID NO: 1227394 - RNA, 19 nt, Artificial Sequence
  Description of Artificial Sequence: Synthetic oligonucleotide
  Sense strand starting at position 3735 of SEQ ID NO: 917337
augguagaguucccaugua

SEQ ID NO: 1227395 - RNA, 19 nt, Artificial Sequence
  Description of Artificial Sequence: Synthetic oligonucleotide
  Antisense strand to SEQ ID NO: 1227394
uacaugggaacucuaccau

SEQ ID NO: 1227396 - RNA, 19 nt, Artificial Sequence
  Description of Artificial Sequence: Synthetic oligonucleotide
  Sense strand starting at position 40 of SEQ ID NO: 917337
guccucugacaucaaugau

SEQ ID NO: 1227397 - RNA, 19 nt, Artificial Sequence
  Description of Artificial Sequence: Synthetic oligonucleotide
  Antisense strand to SEQ ID NO: 1227396
aucauugaugucagaggac

SEQ ID NO: 1227398 - RNA, 19 nt, Artificial Sequence
  Description of Artificial Sequence: Synthetic oligonucleotide
  Sense strand starting at position 43 of SEQ ID NO: 917337
cucugacaucaaugauggu

SEQ ID NO: 1227399 - RNA, 19 nt, Artificial Sequence
  Description of Artificial Sequence: Synthetic oligonucleotide
  Antisense strand to SEQ ID NO: 1227398
accaucauugaugucagag

SEQ ID NO: 1227400 - RNA, 19 nt, Artificial Sequence
  Description of Artificial Sequence: Synthetic oligonucleotide
  Sense strand starting at position 108 of SEQ ID NO: 917337
ucagcauuacuaugauugu

SEQ ID NO: 1227401 - RNA, 19 nt, Artificial Sequence
  Description of Artificial Sequence: Synthetic oligonucleotide
  Antisense strand to SEQ ID NO: 1227400
acaaucauaguaaugcuga

SEQ ID NO: 1227402 - RNA, 19 nt, Artificial Sequence
  Description of Artificial Sequence: Synthetic oligonucleotide
  Sense strand starting at position 111 of SEQ ID NO: 917337
gcauuacuaugauugugaa

SEQ ID NO: 1227403 - RNA, 19 nt, Artificial Sequence
  Description of Artificial Sequence: Synthetic oligonucleotide
  Antisense strand to SEQ ID NO: 1227402
uucacaaucauaguaaugc

SEQ ID NO: 1227404 - RNA, 19 nt, Artificial Sequence
  Description of Artificial Sequence: Synthetic oligonucleotide
  Sense strand starting at position 414 of SEQ ID NO: 917337
ugguuuaugggagggaucu

SEQ ID NO: 1227405 - RNA, 19 nt, Artificial Sequence
  Description of Artificial Sequence: Synthetic oligonucleotide
  Antisense strand to SEQ ID NO: 1227404
agaucccucccauaaacca

SEQ ID NO: 1227406 - RNA, 19 nt, Artificial Sequence
  Description of Artificial Sequence: Synthetic oligonucleotide
  Sense strand starting at position 424 of SEQ ID NO: 917337
gagggaucucguugaauau

SEQ ID NO: 1227407 - RNA, 19 nt, Artificial Sequence
  Description of Artificial Sequence: Synthetic oligonucleotide
  Antisense strand to SEQ ID NO: 1227406
auauucaacgagaucccuc

SEQ ID NO: 1227408 - RNA, 19 nt, Artificial Sequence
  Description of Artificial Sequence: Synthetic oligonucleotide
  Sense strand starting at position 425 of SEQ ID NO: 917337
agggaucucguugaauauc

SEQ ID NO: 1227409 - RNA, 19 nt, Artificial Sequence
  Description of Artificial Sequence: Synthetic oligonucleotide
  Antisense strand to SEQ ID NO: 1227408
gauauucaacgagaucccu

SEQ ID NO: 1227410 - RNA, 19 nt, Artificial Sequence
  Description of Artificial Sequence: Synthetic oligonucleotide
  Sense strand starting at position 500 of SEQ ID NO: 917337
acgauccauuucugaauuu

SEQ ID NO: 1227411 - RNA, 19 nt, Artificial Sequence
  Description of Artificial Sequence: Synthetic oligonucleotide
  Antisense strand to SEQ ID NO: 1227410
aaauucagaaauggaucgu

SEQ ID NO: 1227412 - RNA, 19 nt, Artificial Sequence
  Description of Artificial Sequence: Synthetic oligonucleotide
  Sense strand starting at position 536 of SEQ ID NO: 917337
uaaguaugucuguaaaguu

SEQ ID NO: 1227413 - RNA, 19 nt, Artificial Sequence
  Description of Artificial Sequence: Synthetic oligonucleotide
  Antisense strand to SEQ ID NO: 1227412
aacuuuacagacauacuua

SEQ ID NO: 1227414 - RNA, 19 nt, Artificial Sequence
  Description of Artificial Sequence: Synthetic oligonucleotide
  Sense strand starting at position 653 of SEQ ID NO: 917337
ugugauacacugcauccua

SEQ ID NO: 1227415 - RNA, 19 nt, Artificial Sequence
  Description of Artificial Sequence: Synthetic oligonucleotide
  Antisense strand to SEQ ID NO: 1227414
uaggaugcaguguaucaca

SEQ ID NO: 1227416 - RNA, 19 nt, Artificial Sequence
  Description of Artificial Sequence: Synthetic oligonucleotide
  Sense strand starting at position 703 of SEQ ID NO: 917337
gagaguaaauagcuccaau

SEQ ID NO: 1227417 - RNA, 19 nt, Artificial Sequence
  Description of Artificial Sequence: Synthetic oligonucleotide
  Antisense strand to SEQ ID NO: 1227416
auuggagcuauuuacucuc

SEQ ID NO: 1227418 - RNA, 19 nt, Artificial Sequence
  Description of Artificial Sequence: Synthetic oligonucleotide
  Sense strand starting at position 763 of SEQ ID NO: 917337
auguuagauuaacugaagu

SEQ ID NO: 1227419 - RNA, 19 nt, Artificial Sequence
  Description of Artificial Sequence: Synthetic oligonucleotide
  Antisense strand to SEQ ID NO: 1227418
acuucaguuaaucuaacau

SEQ ID NO: 1227420 - RNA, 19 nt, Artificial Sequence
  Description of Artificial Sequence: Synthetic oligonucleotide
  Sense strand starting at position 778 of SEQ ID NO: 917337
aagugccagucuuuggaga

SEQ ID NO: 1227421 - RNA, 19 nt, Artificial Sequence
  Description of Artificial Sequence: Synthetic oligonucleotide
  Antisense strand to SEQ ID NO: 1227420
ucuccaaagacuggcacuu

SEQ ID NO: 1227422 - RNA, 19 nt, Artificial Sequence
  Description of Artificial Sequence: Synthetic oligonucleotide
  Sense strand starting at position 795 of SEQ ID NO: 917337
gacccuuaacugugaguag

SEQ ID NO: 1227423 - RNA, 19 nt, Artificial Sequence
  Description of Artificial Sequence: Synthetic oligonucleotide
  Antisense strand to SEQ ID NO: 1227422
cuacucacaguuaaggguc

SEQ ID NO: 1227424 - RNA, 19 nt, Artificial Sequence
  Description of Artificial Sequence: Synthetic oligonucleotide
  Sense strand starting at position 798 of SEQ ID NO: 917337
ccuuaacugugaguaguua

SEQ ID NO: 1227425 - RNA, 19 nt, Artificial Sequence
  Description of Artificial Sequence: Synthetic oligonucleotide
  Antisense strand to SEQ ID NO: 1227424
uaacuacucacaguuaagg

SEQ ID NO: 1227426 - RNA, 19 nt, Artificial Sequence
  Description of Artificial Sequence: Synthetic oligonucleotide
  Sense strand starting at position 825 of SEQ ID NO: 917337
gagguuccuaaauggguau

SEQ ID NO: 1227427 - RNA, 19 nt, Artificial Sequence
  Description of Artificial Sequence: Synthetic oligonucleotide
  Antisense strand to SEQ ID NO: 1227426
auacccauuuaggaaccuc

SEQ ID NO: 1227428 - RNA, 19 nt, Artificial Sequence
  Description of Artificial Sequence: Synthetic oligonucleotide
  Sense strand starting at position 828 of SEQ ID NO: 917337
guuccuaaauggguauagu

SEQ ID NO: 1227429 - RNA, 19 nt, Artificial Sequence
  Description of Artificial Sequence: Synthetic oligonucleotide
  Antisense strand to SEQ ID NO: 1227428
acuauacccauuuaggaac

SEQ ID NO: 1227430 - RNA, 19 nt, Artificial Sequence
  Description of Artificial Sequence: Synthetic oligonucleotide
  Sense strand starting at position 839 of SEQ ID NO: 917337
gguauaguguguucauuua

SEQ ID NO: 1227431 - RNA, 19 nt, Artificial Sequence
  Description of Artificial Sequence: Synthetic oligonucleotide
  Antisense strand to SEQ ID NO: 1227430
uaaaugaacacacuauacc

SEQ ID NO: 1227432 - RNA, 19 nt, Artificial Sequence
  Description of Artificial Sequence: Synthetic oligonucleotide
  Sense strand starting at position 869 of SEQ ID NO: 917337
gagauaacuuaaguuguaa

SEQ ID NO: 1227433 - RNA, 19 nt, Artificial Sequence
  Description of Artificial Sequence: Synthetic oligonucleotide
  Antisense strand to SEQ ID NO: 1227432
uuacaacuuaaguuaucuc

SEQ ID NO: 1227434 - RNA, 19 nt, Artificial Sequence
  Description of Artificial Sequence: Synthetic oligonucleotide
  Sense strand starting at position 1503 of SEQ ID NO: 917337
ucauucgaaaugugucaga

SEQ ID NO: 1227435 - RNA, 19 nt, Artificial Sequence
  Description of Artificial Sequence: Synthetic oligonucleotide
  Antisense strand to SEQ ID NO: 1227434
ucugacacauuucgaauga

SEQ ID NO: 1227436 - RNA, 19 nt, Artificial Sequence
  Description of Artificial Sequence: Synthetic oligonucleotide
  Sense strand starting at position 1550 of SEQ ID NO: 917337
cguuaauaaaccgcgugau

SEQ ID NO: 1227437 - RNA, 19 nt, Artificial Sequence
  Description of Artificial Sequence: Synthetic oligonucleotide
  Antisense strand to SEQ ID NO: 1227436
aucacgcgguuuauuaacg

SEQ ID NO: 1227438 - RNA, 19 nt, Artificial Sequence
  Description of Artificial Sequence: Synthetic oligonucleotide
  Sense strand starting at position 1554 of SEQ ID NO: 917337
aauaaaccgcgugaucuau

SEQ ID NO: 1227439 - RNA, 19 nt, Artificial Sequence
  Description of Artificial Sequence: Synthetic oligonucleotide
  Antisense strand to SEQ ID NO: 1227438
auagaucacgcgguuuauu

SEQ ID NO: 1227440 - RNA, 19 nt, Artificial Sequence
  Description of Artificial Sequence: Synthetic oligonucleotide
  Sense strand starting at position 1665 of SEQ ID NO: 917337
ucagguccuguccaggaau

SEQ ID NO: 1227441 - RNA, 19 nt, Artificial Sequence
  Description of Artificial Sequence: Synthetic oligonucleotide
  Antisense strand to SEQ ID NO: 1227440
auuccuggacaggaccuga

SEQ ID NO: 1227442 - RNA, 19 nt, Artificial Sequence
  Description of Artificial Sequence: Synthetic oligonucleotide
  Sense strand starting at position 1668 of SEQ ID NO: 917337
gguccuguccaggaauucu

SEQ ID NO: 1227443 - RNA, 19 nt, Artificial Sequence
  Description of Artificial Sequence: Synthetic oligonucleotide
  Antisense strand to SEQ ID NO: 1227442
agaauuccuggacaggacc

SEQ ID NO: 1227444 - RNA, 19 nt, Artificial Sequence
  Description of Artificial Sequence: Synthetic oligonucleotide
  Sense strand starting at position 1885 of SEQ ID NO: 917337
aaccucugugaaggugaaa

SEQ ID NO: 1227445 - RNA, 19 nt, Artificial Sequence
  Description of Artificial Sequence: Synthetic oligonucleotide
  Antisense strand to SEQ ID NO: 1227444
uuucaccuucacagagguu

SEQ ID NO: 1227446 - RNA, 19 nt, Artificial Sequence
  Description of Artificial Sequence: Synthetic oligonucleotide
  Sense strand starting at position 1958 of SEQ ID NO: 917337
ucagaaucgcgguaacaaa

SEQ ID NO: 1227447 - RNA, 19 nt, Artificial Sequence
  Description of Artificial Sequence: Synthetic oligonucleotide
  Antisense strand to SEQ ID NO: 1227446
uuuguuaccgcgauucuga

SEQ ID NO: 1227448 - RNA, 19 nt, Artificial Sequence
  Description of Artificial Sequence: Synthetic oligonucleotide
  Sense strand starting at position 1998 of SEQ ID NO: 917337
ggcggucaccucucgguua

SEQ ID NO: 1227449 - RNA, 19 nt, Artificial Sequence
  Description of Artificial Sequence: Synthetic oligonucleotide
  Antisense strand to SEQ ID NO: 1227448
uaaccgagaggugaccgcc

SEQ ID NO: 1227450 - RNA, 19 nt, Artificial Sequence
  Description of Artificial Sequence: Synthetic oligonucleotide
  Sense strand starting at position 2102 of SEQ ID NO: 917337
gagacuaggucucccagaa

SEQ ID NO: 1227451 - RNA, 19 nt, Artificial Sequence
  Description of Artificial Sequence: Synthetic oligonucleotide
  Antisense strand to SEQ ID NO: 1227450
uucugggagaccuagucuc

SEQ ID NO: 1227452 - RNA, 19 nt, Artificial Sequence
  Description of Artificial Sequence: Synthetic oligonucleotide
  Sense strand starting at position 2106 of SEQ ID NO: 917337
cuaggucucccagaaucca

SEQ ID NO: 1227453 - RNA, 19 nt, Artificial Sequence
  Description of Artificial Sequence: Synthetic oligonucleotide
  Antisense strand to SEQ ID NO: 1227452
uggauucugggagaccuag

SEQ ID NO: 1227454 - RNA, 19 nt, Artificial Sequence
  Description of Artificial Sequence: Synthetic oligonucleotide
  Sense strand starting at position 2118 of SEQ ID NO: 917337
gaauccauggcgugacaaa

SEQ ID NO: 1227455 - RNA, 19 nt, Artificial Sequence
  Description of Artificial Sequence: Synthetic oligonucleotide
  Antisense strand to SEQ ID NO: 1227454
uuugucacgccauggauuc

SEQ ID NO: 1227456 - RNA, 19 nt, Artificial Sequence
  Description of Artificial Sequence: Synthetic oligonucleotide
  Sense strand starting at position 2137 of SEQ ID NO: 917337
cgcaguaauuuggcaacaa

SEQ ID NO: 1227457 - RNA, 19 nt, Artificial Sequence
  Description of Artificial Sequence: Synthetic oligonucleotide
  Antisense strand to SEQ ID NO: 1227456
uuguugccaaauuacugcg

SEQ ID NO: 1227458 - RNA, 19 nt, Artificial Sequence
  Description of Artificial Sequence: Synthetic oligonucleotide
  Sense strand starting at position 2164 of SEQ ID NO: 917337
cggaauuaguuccuagauc

SEQ ID NO: 1227459 - RNA, 19 nt, Artificial Sequence
  Description of Artificial Sequence: Synthetic oligonucleotide
  Antisense strand to SEQ ID NO: 1227458
gaucuaggaacuaauuccg

SEQ ID NO: 1227460 - RNA, 19 nt, Artificial Sequence
  Description of Artificial Sequence: Synthetic oligonucleotide
  Sense strand starting at position 2586 of SEQ ID NO: 917337
aagagucaauacgugcaaa

SEQ ID NO: 1227461 - RNA, 19 nt, Artificial Sequence
  Description of Artificial Sequence: Synthetic oligonucleotide
  Antisense strand to SEQ ID NO: 1227460
uuugcacguauugacucuu

SEQ ID NO: 1227462 - RNA, 19 nt, Artificial Sequence
  Description of Artificial Sequence: Synthetic oligonucleotide
  Sense strand starting at position 2630 of SEQ ID NO: 917337
aagaauaagcgcuauguaa

SEQ ID NO: 1227463 - RNA, 19 nt, Artificial Sequence
  Description of Artificial Sequence: Synthetic oligonucleotide
  Antisense strand to SEQ ID NO: 1227462
uuacauagcgcuuauucuu

SEQ ID NO: 1227464 - RNA, 19 nt, Artificial Sequence
  Description of Artificial Sequence: Synthetic oligonucleotide
  Sense strand starting at position 2639 of SEQ ID NO: 917337
cgcuauguaaguguuuguu

SEQ ID NO: 1227465 - RNA, 19 nt, Artificial Sequence
  Description of Artificial Sequence: Synthetic oligonucleotide
  Antisense strand to SEQ ID NO: 1227464
aacaaacacuuacauagcg

SEQ ID NO: 1227466 - RNA, 19 nt, Artificial Sequence
  Description of Artificial Sequence: Synthetic oligonucleotide
  Sense strand starting at position 2881 of SEQ ID NO: 917337
aaaguuacagucuggaaua

SEQ ID NO: 1227467 - RNA, 19 nt, Artificial Sequence
  Description of Artificial Sequence: Synthetic oligonucleotide
  Antisense strand to SEQ ID NO: 1227466
uauuccagacuguaacuuu

SEQ ID NO: 1227468 - RNA, 19 nt, Artificial Sequence
  Description of Artificial Sequence: Synthetic oligonucleotide
  Sense strand starting at position 2923 of SEQ ID NO: 917337
cagccuugugaucaagagu

SEQ ID NO: 1227469 - RNA, 19 nt, Artificial Sequence
  Description of Artificial Sequence: Synthetic oligonucleotide
  Antisense strand to SEQ ID NO: 1227468
acucuugaucacaaggcug

SEQ ID NO: 1227470 - RNA, 19 nt, Artificial Sequence
  Description of Artificial Sequence: Synthetic oligonucleotide
  Sense strand starting at position 2926 of SEQ ID NO: 917337
ccuugugaucaagaguguu

SEQ ID NO: 1227471 - RNA, 19 nt, Artificial Sequence
  Description of Artificial Sequence: Synthetic oligonucleotide
  Antisense strand to SEQ ID NO: 1227470
aacacucuugaucacaagg

SEQ ID NO: 1227472 - RNA, 19 nt, Artificial Sequence
  Description of Artificial Sequence: Synthetic oligonucleotide
  Sense strand starting at position 3523 of SEQ ID NO: 917337
auaagcaaucugugagguu

SEQ ID NO: 1227473 - RNA, 19 nt, Artificial Sequence
  Description of Artificial Sequence: Synthetic oligonucleotide
  Antisense strand to SEQ ID NO: 1227472
aaccucacagauugcuuau

SEQ ID NO: 1227474 - RNA, 19 nt, Artificial Sequence
  Description of Artificial Sequence: Synthetic oligonucleotide
  Sense strand starting at position 3825 of SEQ ID NO: 917336
augguagaguucccaugua

SEQ ID NO: 1227475 - RNA, 19 nt, Artificial Sequence
  Description of Artificial Sequence: Synthetic oligonucleotide
  Antisense strand to SEQ ID NO: 1227474
uacaugggaacucuaccau

SEQ ID NO: 1227476 - RNA, 19 nt, Artificial Sequence
  Description of Artificial Sequence: Synthetic oligonucleotide
  Sense strand starting at position 3735 of SEQ ID NO: 917338
augguagaguucccaugua

SEQ ID NO: 1227477 - RNA, 19 nt, Artificial Sequence
  Description of Artificial Sequence: Synthetic oligonucleotide
  Antisense strand to SEQ ID NO: 1227476
uacaugggaacucuaccau

SEQ ID NO: 1227478 - RNA, 19 nt, Artificial Sequence
  Description of Artificial Sequence: Synthetic oligonucleotide
  Sense strand starting at position 64 of SEQ ID NO: 917338
gccugaaugacaggaguga

SEQ ID NO: 1227479 - RNA, 19 nt, Artificial Sequence
  Description of Artificial Sequence: Synthetic oligonucleotide
  Antisense strand to SEQ ID NO: 1227478
ucacuccugucauucaggc

SEQ ID NO: 1227480 - RNA, 19 nt, Artificial Sequence
  Description of Artificial Sequence: Synthetic oligonucleotide
  Sense strand starting at position 218 of SEQ ID NO: 917338
ugggaaguacuguguuaua

SEQ ID NO: 1227481 - RNA, 19 nt, Artificial Sequence
  Description of Artificial Sequence: Synthetic oligonucleotide
  Antisense strand to SEQ ID NO: 1227480
uauaacacaguacuuccca

SEQ ID NO: 1227482 - RNA, 19 nt, Artificial Sequence
  Description of Artificial Sequence: Synthetic oligonucleotide
  Sense strand starting at position 402 of SEQ ID NO: 917338
uggcucagacucuaaauca

SEQ ID NO: 1227483 - RNA, 19 nt, Artificial Sequence
  Description of Artificial Sequence: Synthetic oligonucleotide
  Antisense strand to SEQ ID NO: 1227482
ugauuuagagucugagcca

SEQ ID NO: 1227484 - RNA, 19 nt, Artificial Sequence
  Description of Artificial Sequence: Synthetic oligonucleotide
  Sense strand starting at position 421 of SEQ ID NO: 917338
gcaguucucacagaaugag

SEQ ID NO: 1227485 - RNA, 19 nt, Artificial Sequence
  Description of Artificial Sequence: Synthetic oligonucleotide
  Antisense strand to SEQ ID NO: 1227484
cucauucugugagaacugc

SEQ ID NO: 1227486 - RNA, 19 nt, Artificial Sequence
  Description of Artificial Sequence: Synthetic oligonucleotide
  Sense strand starting at position 597 of SEQ ID NO: 917338
acaagcugcaguugagaaa

SEQ ID NO: 1227487 - RNA, 19 nt, Artificial Sequence
  Description of Artificial Sequence: Synthetic oligonucleotide
  Antisense strand to SEQ ID NO: 1227486
uuucucaacugcagcuugu

SEQ ID NO: 1227488 - RNA, 19 nt, Artificial Sequence
  Description of Artificial Sequence: Synthetic oligonucleotide
  Sense strand starting at position 598 of SEQ ID NO: 917338
caagcugcaguugagaaau

SEQ ID NO: 1227489 - RNA, 19 nt, Artificial Sequence
  Description of Artificial Sequence: Synthetic oligonucleotide
  Antisense strand to SEQ ID NO: 1227488
auuucucaacugcagcuug

SEQ ID NO: 1227490 - RNA, 19 nt, Artificial Sequence
  Description of Artificial Sequence: Synthetic oligonucleotide
  Sense strand starting at position 610 of SEQ ID NO: 917338
gagaaauucuagguuaggc

SEQ ID NO: 1227491 - RNA, 19 nt, Artificial Sequence
  Description of Artificial Sequence: Synthetic oligonucleotide
  Antisense strand to SEQ ID NO: 1227490
gccuaaccuagaauuucuc

SEQ ID NO: 1227492 - RNA, 19 nt, Artificial Sequence
  Description of Artificial Sequence: Synthetic oligonucleotide
  Sense strand starting at position 618 of SEQ ID NO: 917338
cuagguuaggcagacacau

SEQ ID NO: 1227493 - RNA, 19 nt, Artificial Sequence
  Description of Artificial Sequence: Synthetic oligonucleotide
  Antisense strand to SEQ ID NO: 1227492
augugucugccuaaccuag

SEQ ID NO: 1227494 - RNA, 19 nt, Artificial Sequence
  Description of Artificial Sequence: Synthetic oligonucleotide
  Sense strand starting at position 836 of SEQ ID NO: 917338
gcagcauaagcagggauua

SEQ ID NO: 1227495 - RNA, 19 nt, Artificial Sequence
  Description of Artificial Sequence: Synthetic oligonucleotide
  Antisense strand to SEQ ID NO: 1227494
uaaucccugcuuaugcugc

SEQ ID NO: 1227496 - RNA, 19 nt, Artificial Sequence
  Description of Artificial Sequence: Synthetic oligonucleotide
  Sense strand starting at position 969 of SEQ ID NO: 917338
gugugaaauuagguuaaga

SEQ ID NO: 1227497 - RNA, 19 nt, Artificial Sequence
  Description of Artificial Sequence: Synthetic oligonucleotide
  Antisense strand to SEQ ID NO: 1227496
ucuuaaccuaauuucacac

SEQ ID NO: 1227498 - RNA, 19 nt, Artificial Sequence
  Description of Artificial Sequence: Synthetic oligonucleotide
  Sense strand starting at position 1061 of SEQ ID NO: 917338
ucccucuaugaauggguaa

SEQ ID NO: 1227499 - RNA, 19 nt, Artificial Sequence
  Description of Artificial Sequence: Synthetic oligonucleotide
  Antisense strand to SEQ ID NO: 1227498
uuacccauucauagaggga

SEQ ID NO: 1227500 - RNA, 19 nt, Artificial Sequence
  Description of Artificial Sequence: Synthetic oligonucleotide
  Sense strand starting at position 1074 of SEQ ID NO: 917338
ggguaaggccuagauauuc

SEQ ID NO: 1227501 - RNA, 19 nt, Artificial Sequence
  Description of Artificial Sequence: Synthetic oligonucleotide
  Antisense strand to SEQ ID NO: 1227500
gaauaucuaggccuuaccc

SEQ ID NO: 1227502 - RNA, 19 nt, Artificial Sequence
  Description of Artificial Sequence: Synthetic oligonucleotide
  Sense strand starting at position 1079 of SEQ ID NO: 917338
aggccuagauauucuccaa

SEQ ID NO: 1227503 - RNA, 19 nt, Artificial Sequence
  Description of Artificial Sequence: Synthetic oligonucleotide
  Antisense strand to SEQ ID NO: 1227502
uuggagaauaucuaggccu

SEQ ID NO: 1227504 - RNA, 19 nt, Artificial Sequence
  Description of Artificial Sequence: Synthetic oligonucleotide
  Sense strand starting at position 1105 of SEQ ID NO: 917338
uuauaaauugcuggaugau

SEQ ID NO: 1227505 - RNA, 19 nt, Artificial Sequence
  Description of Artificial Sequence: Synthetic oligonucleotide
  Antisense strand to SEQ ID NO: 1227504
aucauccagcaauuuauaa

SEQ ID NO: 1227506 - RNA, 19 nt, Artificial Sequence
  Description of Artificial Sequence: Synthetic oligonucleotide
  Sense strand starting at position 1642 of SEQ ID NO: 917338
cuguuucuacucggaggga

SEQ ID NO: 1227507 - RNA, 19 nt, Artificial Sequence
  Description of Artificial Sequence: Synthetic oligonucleotide
  Antisense strand to SEQ ID NO: 1227506
ucccuccgaguagaaacag

SEQ ID NO: 1227508 - RNA, 19 nt, Artificial Sequence
  Description of Artificial Sequence: Synthetic oligonucleotide
  Sense strand starting at position 2126 of SEQ ID NO: 917338
cgucucaaucccgcguuua

SEQ ID NO: 1227509 - RNA, 19 nt, Artificial Sequence
  Description of Artificial Sequence: Synthetic oligonucleotide
  Antisense strand to SEQ ID NO: 1227508
uaaacgcgggauugagacg

SEQ ID NO: 1227510 - RNA, 19 nt, Artificial Sequence
  Description of Artificial Sequence: Synthetic oligonucleotide
  Sense strand starting at position 2650 of SEQ ID NO: 917338
ucaaaucguugacuuuaaa

SEQ ID NO: 1227511 - RNA, 19 nt, Artificial Sequence
  Description of Artificial Sequence: Synthetic oligonucleotide
  Antisense strand to SEQ ID NO: 1227510
uuuaaagucaacgauuuga

SEQ ID NO: 1227512 - RNA, 19 nt, Artificial Sequence
  Description of Artificial Sequence: Synthetic oligonucleotide
  Sense strand starting at position 2653 of SEQ ID NO: 917338
aaucguugacuuuaaaugu

SEQ ID NO: 1227513 - RNA, 19 nt, Artificial Sequence
  Description of Artificial Sequence: Synthetic oligonucleotide
  Antisense strand to SEQ ID NO: 1227512
acauuuaaagucaacgauu

SEQ ID NO: 1227514 - RNA, 19 nt, Artificial Sequence
  Description of Artificial Sequence: Synthetic oligonucleotide
  Sense strand starting at position 2763 of SEQ ID NO: 917338
uuugaaugaguuggucaau

SEQ ID NO: 1227515 - RNA, 19 nt, Artificial Sequence
  Description of Artificial Sequence: Synthetic oligonucleotide
  Antisense strand to SEQ ID NO: 1227514
auugaccaacucauucaaa

SEQ ID NO: 1227516 - RNA, 19 nt, Artificial Sequence
  Description of Artificial Sequence: Synthetic oligonucleotide
  Sense strand starting at position 2764 of SEQ ID NO: 917338
uugaaugaguuggucaaua

SEQ ID NO: 1227517 - RNA, 19 nt, Artificial Sequence
  Description of Artificial Sequence: Synthetic oligonucleotide
  Antisense strand to SEQ ID NO: 1227516
uauugaccaacucauucaa

SEQ ID NO: 1227518 - RNA, 19 nt, Artificial Sequence
  Description of Artificial Sequence: Synthetic oligonucleotide
  Sense strand starting at position 2769 of SEQ ID NO: 917338
ugaguuggucaauauaugu

SEQ ID NO: 1227519 - RNA, 19 nt, Artificial Sequence
  Description of Artificial Sequence: Synthetic oligonucleotide
  Antisense strand to SEQ ID NO: 1227518
acauauauugaccaacuca

SEQ ID NO: 1227520 - RNA, 19 nt, Artificial Sequence
  Description of Artificial Sequence: Synthetic oligonucleotide
  Sense strand starting at position 3017 of SEQ ID NO: 917338
auauauucugcugagcaau

SEQ ID NO: 1227521 - RNA, 19 nt, Artificial Sequence
  Description of Artificial Sequence: Synthetic oligonucleotide
  Antisense strand to SEQ ID NO: 1227520
auugcucagcagaauauau

SEQ ID NO: 1227522 - RNA, 19 nt, Artificial Sequence
  Description of Artificial Sequence: Synthetic oligonucleotide
  Sense strand starting at position 3023 of SEQ ID NO: 917338
ucugcugagcaaugugaaa

SEQ ID NO: 1227523 - RNA, 19 nt, Artificial Sequence
  Description of Artificial Sequence: Synthetic oligonucleotide
  Antisense strand to SEQ ID NO: 1227522
uuucacauugcucagcaga

SEQ ID NO: 1227524 - RNA, 19 nt, Artificial Sequence
  Description of Artificial Sequence: Synthetic oligonucleotide
  Sense strand starting at position 3043 of SEQ ID NO: 917338
uccuuucugguauaaggua

SEQ ID NO: 1227525 - RNA, 19 nt, Artificial Sequence
  Description of Artificial Sequence: Synthetic oligonucleotide
  Antisense strand to SEQ ID NO: 1227524
uaccuuauaccagaaagga

SEQ ID NO: 1227526 - RNA, 19 nt, Artificial Sequence
  Description of Artificial Sequence: Synthetic oligonucleotide
  Sense strand starting at position 3119 of SEQ ID NO: 917338
gguuuauaacauugggugu

SEQ ID NO: 1227527 - RNA, 19 nt, Artificial Sequence
  Description of Artificial Sequence: Synthetic oligonucleotide
  Antisense strand to SEQ ID NO: 1227526
acacccaauguuauaaacc

SEQ ID NO: 1227528 - RNA, 19 nt, Artificial Sequence
  Description of Artificial Sequence: Synthetic oligonucleotide
  Sense strand starting at position 3120 of SEQ ID NO: 917338
guuuauaacauugggugua

SEQ ID NO: 1227529 - RNA, 19 nt, Artificial Sequence
  Description of Artificial Sequence: Synthetic oligonucleotide
  Antisense strand to SEQ ID NO: 1227528
uacacccaauguuauaaac

SEQ ID NO: 1227530 - RNA, 19 nt, Artificial Sequence
  Description of Artificial Sequence: Synthetic oligonucleotide
  Sense strand starting at position 3123 of SEQ ID NO: 917338
uauaacauuggguguacua

SEQ ID NO: 1227531 - RNA, 19 nt, Artificial Sequence
  Description of Artificial Sequence: Synthetic oligonucleotide
  Antisense strand to SEQ ID NO: 1227530
uaguacacccaauguuaua

SEQ ID NO: 1227532 - RNA, 19 nt, Artificial Sequence
  Description of Artificial Sequence: Synthetic oligonucleotide
  Sense strand starting at position 3125 of SEQ ID NO: 917338
uaacauuggguguacuaua

SEQ ID NO: 1227533 - RNA, 19 nt, Artificial Sequence
  Description of Artificial Sequence: Synthetic oligonucleotide
  Antisense strand to SEQ ID NO: 1227532
uauaguacacccaauguua

SEQ ID NO: 1227534 - RNA, 19 nt, Artificial Sequence
  Description of Artificial Sequence: Synthetic oligonucleotide
  Sense strand starting at position 3351 of SEQ ID NO: 917338
ggaggugguguucaguaaa

SEQ ID NO: 1227535 - RNA, 19 nt, Artificial Sequence
  Description of Artificial Sequence: Synthetic oligonucleotide
  Antisense strand to SEQ ID NO: 1227534
uuuacugaacaccaccucc

SEQ ID NO: 1227536 - RNA, 19 nt, Artificial Sequence
  Description of Artificial Sequence: Synthetic oligonucleotide
  Sense strand starting at position 3354 of SEQ ID NO: 917338
ggugguguucaguaaauaa

SEQ ID NO: 1227537 - RNA, 19 nt, Artificial Sequence
  Description of Artificial Sequence: Synthetic oligonucleotide
  Antisense strand to SEQ ID NO: 1227536
uuauuuacugaacaccacc

SEQ ID NO: 1227538 - RNA, 19 nt, Artificial Sequence
  Description of Artificial Sequence: Synthetic oligonucleotide
  Sense strand starting at position 3369 of SEQ ID NO: 917338
auaagacugcccuagcuua

SEQ ID NO: 1227539 - RNA, 19 nt, Artificial Sequence
  Description of Artificial Sequence: Synthetic oligonucleotide
  Antisense strand to SEQ ID NO: 1227538
uaagcuagggcagucuuau

SEQ ID NO: 1227540 - RNA, 19 nt, Artificial Sequence
  Description of Artificial Sequence: Synthetic oligonucleotide
  Sense strand starting at position 3414 of SEQ ID NO: 917338
cagucaaauugagucugaa

SEQ ID NO: 1227541 - RNA, 19 nt, Artificial Sequence
  Description of Artificial Sequence: Synthetic oligonucleotide
  Antisense strand to SEQ ID NO: 1227540
uucagacucaauuugacug

SEQ ID NO: 1227542 - RNA, 19 nt, Artificial Sequence
  Description of Artificial Sequence: Synthetic oligonucleotide
  Sense strand starting at position 3455 of SEQ ID NO: 917338
agcugacauugcuuuaaua

SEQ ID NO: 1227543 - RNA, 19 nt, Artificial Sequence
  Description of Artificial Sequence: Synthetic oligonucleotide
  Antisense strand to SEQ ID NO: 1227542
uauuaaagcaaugucagcu

SEQ ID NO: 1227544 - RNA, 19 nt, Artificial Sequence
  Description of Artificial Sequence: Synthetic oligonucleotide
  Sense strand starting at position 3457 of SEQ ID NO: 917338
cugacauugcuuuaauagc

SEQ ID NO: 1227545 - RNA, 19 nt, Artificial Sequence
  Description of Artificial Sequence: Synthetic oligonucleotide
  Antisense strand to SEQ ID NO: 1227544
gcuauuaaagcaaugucag

SEQ ID NO: 1227546 - RNA, 19 nt, Artificial Sequence
  Description of Artificial Sequence: Synthetic oligonucleotide
  Sense strand starting at position 3465 of SEQ ID NO: 917338
gcuuuaauagcauguaaga

SEQ ID NO: 1227547 - RNA, 19 nt, Artificial Sequence
  Description of Artificial Sequence: Synthetic oligonucleotide
  Antisense strand to SEQ ID NO: 1227546
ucuuacaugcuauuaaagc

SEQ ID NO: 1227548 - RNA, 19 nt, Artificial Sequence
  Description of Artificial Sequence: Synthetic oligonucleotide
  Sense strand starting at position 3566 of SEQ ID NO: 917338
agaccugauugcucagaca

SEQ ID NO: 1227549 - RNA, 19 nt, Artificial Sequence
  Description of Artificial Sequence: Synthetic oligonucleotide
  Antisense strand to SEQ ID NO: 1227548
ugucugagcaaucaggucu

SEQ ID NO: 1227550 - RNA, 19 nt, Artificial Sequence
  Description of Artificial Sequence: Synthetic oligonucleotide
  Sense strand starting at position 3620 of SEQ ID NO: 917338
ggugaaaccuaugcacugu

SEQ ID NO: 1227551 - RNA, 19 nt, Artificial Sequence
  Description of Artificial Sequence: Synthetic oligonucleotide
  Antisense strand to SEQ ID NO: 1227550
acagugcauagguuucacc

SEQ ID NO: 1227552 - RNA, 19 nt, Artificial Sequence
  Description of Artificial Sequence: Synthetic oligonucleotide
  Sense strand starting at position 3681 of SEQ ID NO: 917338
aggaguacuuauucucauu

SEQ ID NO: 1227553 - RNA, 19 nt, Artificial Sequence
  Description of Artificial Sequence: Synthetic oligonucleotide
  Antisense strand to SEQ ID NO: 1227552
aaugagaauaaguacuccu

SEQ ID NO: 1227554 - RNA, 19 nt, Artificial Sequence
  Description of Artificial Sequence: Synthetic oligonucleotide
  Sense strand starting at position 3705 of SEQ ID NO: 917338
ggaaauuacuuguccaguu

SEQ ID NO: 1227555 - RNA, 19 nt, Artificial Sequence
  Description of Artificial Sequence: Synthetic oligonucleotide
  Antisense strand to SEQ ID NO: 1227554
aacuggacaaguaauuucc

SEQ ID NO: 1227556 - RNA, 19 nt, Artificial Sequence
  Description of Artificial Sequence: Synthetic oligonucleotide
  Sense strand starting at position 3723 of SEQ ID NO: 917339
uaaauuggauaugaaggau

SEQ ID NO: 1227557 - RNA, 19 nt, Artificial Sequence
  Description of Artificial Sequence: Synthetic oligonucleotide
  Antisense strand to SEQ ID NO: 1227556
auccuucauauccaauuua

SEQ ID NO: 1227558 - RNA, 19 nt, Artificial Sequence
  Description of Artificial Sequence: Synthetic oligonucleotide
  Sense strand starting at position 119 of SEQ ID NO: 917339
ugcugucaucuuuaaagua

SEQ ID NO: 1227559 - RNA, 19 nt, Artificial Sequence
  Description of Artificial Sequence: Synthetic oligonucleotide
  Antisense strand to SEQ ID NO: 1227558
uacuuuaaagaugacagca

SEQ ID NO: 1227560 - RNA, 19 nt, Artificial Sequence
  Description of Artificial Sequence: Synthetic oligonucleotide
  Sense strand starting at position 139 of SEQ ID NO: 917339
gaugccaaauguccugaaa

SEQ ID NO: 1227561 - RNA, 19 nt, Artificial Sequence
  Description of Artificial Sequence: Synthetic oligonucleotide
  Antisense strand to SEQ ID NO: 1227560
uuucaggacauuuggcauc

SEQ ID NO: 1227562 - RNA, 19 nt, Artificial Sequence
  Description of Artificial Sequence: Synthetic oligonucleotide
  Sense strand starting at position 162 of SEQ ID NO: 917339
acuagcgauuuauaaauga

SEQ ID NO: 1227563 - RNA, 19 nt, Artificial Sequence
  Description of Artificial Sequence: Synthetic oligonucleotide
  Antisense strand to SEQ ID NO: 1227562
ucauuuauaaaucgcuagu

SEQ ID NO: 1227564 - RNA, 19 nt, Artificial Sequence
  Description of Artificial Sequence: Synthetic oligonucleotide
  Sense strand starting at position 441 of SEQ ID NO: 917339
ucugaagacuaagugugaa

SEQ ID NO: 1227565 - RNA, 19 nt, Artificial Sequence
  Description of Artificial Sequence: Synthetic oligonucleotide
  Antisense strand to SEQ ID NO: 1227564
uucacacuuagucuucaga

SEQ ID NO: 1227566 - RNA, 19 nt, Artificial Sequence
  Description of Artificial Sequence: Synthetic oligonucleotide
  Sense strand starting at position 444 of SEQ ID NO: 917339
gaagacuaagugugaaguu

SEQ ID NO: 1227567 - RNA, 19 nt, Artificial Sequence
  Description of Artificial Sequence: Synthetic oligonucleotide
  Antisense strand to SEQ ID NO: 1227566
aacuucacacuuagucuuc

SEQ ID NO: 1227568 - RNA, 19 nt, Artificial Sequence
  Description of Artificial Sequence: Synthetic oligonucleotide
  Sense strand starting at position 493 of SEQ ID NO: 917339
gaauuaucugccgcuguuc

SEQ ID NO: 1227569 - RNA, 19 nt, Artificial Sequence
  Description of Artificial Sequence: Synthetic oligonucleotide
  Antisense strand to SEQ ID NO: 1227568
gaacagcggcagauaauuc

SEQ ID NO: 1227570 - RNA, 19 nt, Artificial Sequence
  Description of Artificial Sequence: Synthetic oligonucleotide
  Sense strand starting at position 615 of SEQ ID NO: 917339
cuaaaugcauguuuagcaa

SEQ ID NO: 1227571 - RNA, 19 nt, Artificial Sequence
  Description of Artificial Sequence: Synthetic oligonucleotide
  Antisense strand to SEQ ID NO: 1227570
uugcuaaacaugcauuuag

SEQ ID NO: 1227572 - RNA, 19 nt, Artificial Sequence
  Description of Artificial Sequence: Synthetic oligonucleotide
  Sense strand starting at position 747 of SEQ ID NO: 917339
gccucuucuccuuggaaga

SEQ ID NO: 1227573 - RNA, 19 nt, Artificial Sequence
  Description of Artificial Sequence: Synthetic oligonucleotide
  Antisense strand to SEQ ID NO: 1227572
ucuuccaaggagaagaggc

SEQ ID NO: 1227574 - RNA, 19 nt, Artificial Sequence
  Description of Artificial Sequence: Synthetic oligonucleotide
  Sense strand starting at position 748 of SEQ ID NO: 917339
ccucuucuccuuggaagaa

SEQ ID NO: 1227575 - RNA, 19 nt, Artificial Sequence
  Description of Artificial Sequence: Synthetic oligonucleotide
  Antisense strand to SEQ ID NO: 1227574
uucuuccaaggagaagagg

SEQ ID NO: 1227576 - RNA, 19 nt, Artificial Sequence
  Description of Artificial Sequence: Synthetic oligonucleotide
  Sense strand starting at position 915 of SEQ ID NO: 917339
aguccacgcggcuuuaauu

SEQ ID NO: 1227577 - RNA, 19 nt, Artificial Sequence
  Description of Artificial Sequence: Synthetic oligonucleotide
  Antisense strand to SEQ ID NO: 1227576
aauuaaagccgcguggacu

SEQ ID NO: 1227578 - RNA, 19 nt, Artificial Sequence
  Description of Artificial Sequence: Synthetic oligonucleotide
  Sense strand starting at position 916 of SEQ ID NO: 917339
guccacgcggcuuuaauua

SEQ ID NO: 1227579 - RNA, 19 nt, Artificial Sequence
  Description of Artificial Sequence: Synthetic oligonucleotide
  Antisense strand to SEQ ID NO: 1227578
uaauuaaagccgcguggac

SEQ ID NO: 1227580 - RNA, 19 nt, Artificial Sequence
  Description of Artificial Sequence: Synthetic oligonucleotide
  Sense strand starting at position 924 of SEQ ID NO: 917339
ggcuuuaauuacucaagca

SEQ ID NO: 1227581 - RNA, 19 nt, Artificial Sequence
  Description of Artificial Sequence: Synthetic oligonucleotide
  Antisense strand to SEQ ID NO: 1227580
ugcuugaguaauuaaagcc

SEQ ID NO: 1227582 - RNA, 19 nt, Artificial Sequence
  Description of Artificial Sequence: Synthetic oligonucleotide
  Sense strand starting at position 1146 of SEQ ID NO: 917339
cgcaucgaucccgcuuuaa

SEQ ID NO: 1227583 - RNA, 19 nt, Artificial Sequence
  Description of Artificial Sequence: Synthetic oligonucleotide
  Antisense strand to SEQ ID NO: 1227582
uuaaagcgggaucgaugcg

SEQ ID NO: 1227584 - RNA, 19 nt, Artificial Sequence
  Description of Artificial Sequence: Synthetic oligonucleotide
  Sense strand starting at position 1485 of SEQ ID NO: 917339
ccgcgaccuccgagguaaa

SEQ ID NO: 1227585 - RNA, 19 nt, Artificial Sequence
  Description of Artificial Sequence: Synthetic oligonucleotide
  Antisense strand to SEQ ID NO: 1227584
uuuaccucggaggucgcgg

SEQ ID NO: 1227586 - RNA, 19 nt, Artificial Sequence
  Description of Artificial Sequence: Synthetic oligonucleotide
  Sense strand starting at position 1488 of SEQ ID NO: 917339
cgaccuccgagguaaacaa

SEQ ID NO: 1227587 - RNA, 19 nt, Artificial Sequence
  Description of Artificial Sequence: Synthetic oligonucleotide
  Antisense strand to SEQ ID NO: 1227586
uuguuuaccucggaggucg

SEQ ID NO: 1227588 - RNA, 19 nt, Artificial Sequence
  Description of Artificial Sequence: Synthetic oligonucleotide
  Sense strand starting at position 1620 of SEQ ID NO: 917339
ucaccaagaugcguuugaa

SEQ ID NO: 1227589 - RNA, 19 nt, Artificial Sequence
  Description of Artificial Sequence: Synthetic oligonucleotide
  Antisense strand to SEQ ID NO: 1227588
uucaaacgcaucuugguga

SEQ ID NO: 1227590 - RNA, 19 nt, Artificial Sequence
  Description of Artificial Sequence: Synthetic oligonucleotide
  Sense strand starting at position 2038 of SEQ ID NO: 917339
ggaccaaccgcguggauuu

SEQ ID NO: 1227591 - RNA, 19 nt, Artificial Sequence
  Description of Artificial Sequence: Synthetic oligonucleotide
  Antisense strand to SEQ ID NO: 1227590
aaauccacgcgguuggucc

SEQ ID NO: 1227592 - RNA, 19 nt, Artificial Sequence
  Description of Artificial Sequence: Synthetic oligonucleotide
  Sense strand starting at position 2182 of SEQ ID NO: 917339
aucagaacgccucauaaga

SEQ ID NO: 1227593 - RNA, 19 nt, Artificial Sequence
  Description of Artificial Sequence: Synthetic oligonucleotide
  Antisense strand to SEQ ID NO: 1227592
ucuuaugaggcguucugau

SEQ ID NO: 1227594 - RNA, 19 nt, Artificial Sequence
  Description of Artificial Sequence: Synthetic oligonucleotide
  Sense strand starting at position 2275 of SEQ ID NO: 917339
agaagacacugacuuguau

SEQ ID NO: 1227595 - RNA, 19 nt, Artificial Sequence
  Description of Artificial Sequence: Synthetic oligonucleotide
  Antisense strand to SEQ ID NO: 1227594
auacaagucagugucuucu

SEQ ID NO: 1227596 - RNA, 19 nt, Artificial Sequence
  Description of Artificial Sequence: Synthetic oligonucleotide
  Sense strand starting at position 2320 of SEQ ID NO: 917339
agauaauguuaguuaugac

SEQ ID NO: 1227597 - RNA, 19 nt, Artificial Sequence
  Description of Artificial Sequence: Synthetic oligonucleotide
  Antisense strand to SEQ ID NO: 1227596
gucauaacuaacauuaucu

SEQ ID NO: 1227598 - RNA, 19 nt, Artificial Sequence
  Description of Artificial Sequence: Synthetic oligonucleotide
  Sense strand starting at position 2329 of SEQ ID NO: 917339
uaguuaugacucugaagag

SEQ ID NO: 1227599 - RNA, 19 nt, Artificial Sequence
  Description of Artificial Sequence: Synthetic oligonucleotide
  Antisense strand to SEQ ID NO: 1227598
cucuucagagucauaacua

SEQ ID NO: 1227600 - RNA, 19 nt, Artificial Sequence
  Description of Artificial Sequence: Synthetic oligonucleotide
  Sense strand starting at position 2379 of SEQ ID NO: 917339
aauuuaaguguccgaugca

SEQ ID NO: 1227601 - RNA, 19 nt, Artificial Sequence
  Description of Artificial Sequence: Synthetic oligonucleotide
  Antisense strand to SEQ ID NO: 1227600
ugcaucggacacuuaaauu

SEQ ID NO: 1227602 - RNA, 19 nt, Artificial Sequence
  Description of Artificial Sequence: Synthetic oligonucleotide
  Sense strand starting at position 2384 of SEQ ID NO: 917339
aaguguccgaugcaaagua

SEQ ID NO: 1227603 - RNA, 19 nt, Artificial Sequence
  Description of Artificial Sequence: Synthetic oligonucleotide
  Antisense strand to SEQ ID NO: 1227602
uacuuugcaucggacacuu

SEQ ID NO: 1227604 - RNA, 19 nt, Artificial Sequence
  Description of Artificial Sequence: Synthetic oligonucleotide
  Sense strand starting at position 2470 of SEQ ID NO: 917339
cuucucuuuccagggcaaa

SEQ ID NO: 1227605 - RNA, 19 nt, Artificial Sequence
  Description of Artificial Sequence: Synthetic oligonucleotide
  Antisense strand to SEQ ID NO: 1227604
uuugcccuggaaagagaag

SEQ ID NO: 1227606 - RNA, 19 nt, Artificial Sequence
  Description of Artificial Sequence: Synthetic oligonucleotide
  Sense strand starting at position 2898 of SEQ ID NO: 917339
auauaauaaugggagaaac

SEQ ID NO: 1227607 - RNA, 19 nt, Artificial Sequence
  Description of Artificial Sequence: Synthetic oligonucleotide
  Antisense strand to SEQ ID NO: 1227606
guuucucccauuauuauau

SEQ ID NO: 1227608 - RNA, 19 nt, Artificial Sequence
  Description of Artificial Sequence: Synthetic oligonucleotide
  Sense strand starting at position 2933 of SEQ ID NO: 917339
aucuuccaacucugggaua

SEQ ID NO: 1227609 - RNA, 19 nt, Artificial Sequence
  Description of Artificial Sequence: Synthetic oligonucleotide
  Antisense strand to SEQ ID NO: 1227608
uaucccagaguuggaagau

SEQ ID NO: 1227610 - RNA, 19 nt, Artificial Sequence
  Description of Artificial Sequence: Synthetic oligonucleotide
  Sense strand starting at position 2935 of SEQ ID NO: 917339
cuuccaacucugggauacu

SEQ ID NO: 1227611 - RNA, 19 nt, Artificial Sequence
  Description of Artificial Sequence: Synthetic oligonucleotide
  Antisense strand to SEQ ID NO: 1227610
aguaucccagaguuggaag

SEQ ID NO: 1227612 - RNA, 19 nt, Artificial Sequence
  Description of Artificial Sequence: Synthetic oligonucleotide
  Sense strand starting at position 2944 of SEQ ID NO: 917339
cugggauacucucuacaac

SEQ ID NO: 1227613 - RNA, 19 nt, Artificial Sequence
  Description of Artificial Sequence: Synthetic oligonucleotide
  Antisense strand to SEQ ID NO: 1227612
guuguagagaguaucccag

SEQ ID NO: 1227614 - RNA, 19 nt, Artificial Sequence
  Description of Artificial Sequence: Synthetic oligonucleotide
  Sense strand starting at position 2973 of SEQ ID NO: 917339
cagcauauugaugguaaug

SEQ ID NO: 1227615 - RNA, 19 nt, Artificial Sequence
  Description of Artificial Sequence: Synthetic oligonucleotide
  Antisense strand to SEQ ID NO: 1227614
cauuaccaucaauaugcug

SEQ ID NO: 1227616 - RNA, 19 nt, Artificial Sequence
  Description of Artificial Sequence: Synthetic oligonucleotide
  Sense strand starting at position 2985 of SEQ ID NO: 917339
gguaaugugugagucuaga

SEQ ID NO: 1227617 - RNA, 19 nt, Artificial Sequence
  Description of Artificial Sequence: Synthetic oligonucleotide
  Antisense strand to SEQ ID NO: 1227616
ucuagacucacacauuacc

SEQ ID NO: 1227618 - RNA, 19 nt, Artificial Sequence
  Description of Artificial Sequence: Synthetic oligonucleotide
  Sense strand starting at position 3064 of SEQ ID NO: 917339
uguaaacauuagguacaua

SEQ ID NO: 1227619 - RNA, 19 nt, Artificial Sequence
  Description of Artificial Sequence: Synthetic oligonucleotide
  Antisense strand to SEQ ID NO: 1227618
uauguaccuaauguuuaca

SEQ ID NO: 1227620 - RNA, 19 nt, Artificial Sequence
  Description of Artificial Sequence: Synthetic oligonucleotide
  Sense strand starting at position 3103 of SEQ ID NO: 917339
gaaucuuaaugggugcaua

SEQ ID NO: 1227621 - RNA, 19 nt, Artificial Sequence
  Description of Artificial Sequence: Synthetic oligonucleotide
  Antisense strand to SEQ ID NO: 1227620
uaugcacccauuaagauuc

SEQ ID NO: 1227622 - RNA, 19 nt, Artificial Sequence
  Description of Artificial Sequence: Synthetic oligonucleotide
  Sense strand starting at position 3104 of SEQ ID NO: 917339
aaucuuaaugggugcauau

SEQ ID NO: 1227623 - RNA, 19 nt, Artificial Sequence
  Description of Artificial Sequence: Synthetic oligonucleotide
  Antisense strand to SEQ ID NO: 1227622
auaugcacccauuaagauu

SEQ ID NO: 1227624 - RNA, 19 nt, Artificial Sequence
  Description of Artificial Sequence: Synthetic oligonucleotide
  Sense strand starting at position 3117 of SEQ ID NO: 917339
gcauauuucugagacuaua

SEQ ID NO: 1227625 - RNA, 19 nt, Artificial Sequence
  Description of Artificial Sequence: Synthetic oligonucleotide
  Antisense strand to SEQ ID NO: 1227624
uauagucucagaaauaugc

SEQ ID NO: 1227626 - RNA, 19 nt, Artificial Sequence
  Description of Artificial Sequence: Synthetic oligonucleotide
  Sense strand starting at position 3141 of SEQ ID NO: 917339
auugaugaguaacugcauu

SEQ ID NO: 1227627 - RNA, 19 nt, Artificial Sequence
  Description of Artificial Sequence: Synthetic oligonucleotide
  Antisense strand to SEQ ID NO: 1227626
aaugcaguuacucaucaau

SEQ ID NO: 1227628 - RNA, 19 nt, Artificial Sequence
  Description of Artificial Sequence: Synthetic oligonucleotide
  Sense strand starting at position 3154 of SEQ ID NO: 917339
ugcauuuagucggcuguaa

SEQ ID NO: 1227629 - RNA, 19 nt, Artificial Sequence
  Description of Artificial Sequence: Synthetic oligonucleotide
  Antisense strand to SEQ ID NO: 1227628
uuacagccgacuaaaugca

SEQ ID NO: 1227630 - RNA, 19 nt, Artificial Sequence
  Description of Artificial Sequence: Synthetic oligonucleotide
  Sense strand starting at position 3156 of SEQ ID NO: 917339
cauuuagucggcuguaauc

SEQ ID NO: 1227631 - RNA, 19 nt, Artificial Sequence
  Description of Artificial Sequence: Synthetic oligonucleotide
  Antisense strand to SEQ ID NO: 1227630
gauuacagccgacuaaaug

SEQ ID NO: 1227632 - RNA, 19 nt, Artificial Sequence
  Description of Artificial Sequence: Synthetic oligonucleotide
  Sense strand starting at position 3162 of SEQ ID NO: 917339
gucggcuguaaucagaacu

SEQ ID NO: 1227633 - RNA, 19 nt, Artificial Sequence
  Description of Artificial Sequence: Synthetic oligonucleotide
  Antisense strand to SEQ ID NO: 1227632
aguucugauuacagccgac

SEQ ID NO: 1227634 - RNA, 19 nt, Artificial Sequence
  Description of Artificial Sequence: Synthetic oligonucleotide
  Sense strand starting at position 3519 of SEQ ID NO: 917339
guugguuggacaugaaaga

SEQ ID NO: 1227635 - RNA, 19 nt, Artificial Sequence
  Description of Artificial Sequence: Synthetic oligonucleotide
  Antisense strand to SEQ ID NO: 1227634
ucuuucauguccaaccaac

SEQ ID NO: 1227636 - RNA, 19 nt, Artificial Sequence
  Description of Artificial Sequence: Synthetic oligonucleotide
  Sense strand starting at position 3530 of SEQ ID NO: 917339
augaaagaaucauaggagu

SEQ ID NO: 1227637 - RNA, 19 nt, Artificial Sequence
  Description of Artificial Sequence: Synthetic oligonucleotide
  Antisense strand to SEQ ID NO: 1227636
acuccuaugauucuuucau

SEQ ID NO: 1227638 - RNA, 19 nt, Artificial Sequence
  Description of Artificial Sequence: Synthetic oligonucleotide
  Sense strand starting at position 3530 of SEQ ID NO: 917340
augaaagaaucauaggagu

SEQ ID NO: 1227639 - RNA, 19 nt, Artificial Sequence
  Description of Artificial Sequence: Synthetic oligonucleotide
  Antisense strand to SEQ ID NO: 1227638
acuccuaugauucuuucau

SEQ ID NO: 1227640 - RNA, 19 nt, Artificial Sequence
  Description of Artificial Sequence: Synthetic oligonucleotide
  Sense strand starting at position 10 of SEQ ID NO: 917340
aucugaacaucaucgauaa

SEQ ID NO: 1227641 - RNA, 19 nt, Artificial Sequence
  Description of Artificial Sequence: Synthetic oligonucleotide
  Antisense strand to SEQ ID NO: 1227640
uuaucgaugauguucagau

SEQ ID NO: 1227642 - RNA, 19 nt, Artificial Sequence
  Description of Artificial Sequence: Synthetic oligonucleotide
  Sense strand starting at position 11 of SEQ ID NO: 917340
ucugaacaucaucgauaaa

SEQ ID NO: 1227643 - RNA, 19 nt, Artificial Sequence
  Description of Artificial Sequence: Synthetic oligonucleotide
  Antisense strand to SEQ ID NO: 1227642
uuuaucgaugauguucaga

SEQ ID NO: 1227644 - RNA, 19 nt, Artificial Sequence
  Description of Artificial Sequence: Synthetic oligonucleotide
  Sense strand starting at position 76 of SEQ ID NO: 917340
caaagcaugccggaaugau

SEQ ID NO: 1227645 - RNA, 19 nt, Artificial Sequence
  Description of Artificial Sequence: Synthetic oligonucleotide
  Antisense strand to SEQ ID NO: 1227644
aucauuccggcaugcuuug

SEQ ID NO: 1227646 - RNA, 19 nt, Artificial Sequence
  Description of Artificial Sequence: Synthetic oligonucleotide
  Sense strand starting at position 295 of SEQ ID NO: 917340
agacaugcuuucuccuaga

SEQ ID NO: 1227647 - RNA, 19 nt, Artificial Sequence
  Description of Artificial Sequence: Synthetic oligonucleotide
  Antisense strand to SEQ ID NO: 1227646
ucuaggagaaagcaugucu

SEQ ID NO: 1227648 - RNA, 19 nt, Artificial Sequence
  Description of Artificial Sequence: Synthetic oligonucleotide
  Sense strand starting at position 308 of SEQ ID NO: 917340
ccuagaguucuguagagau

SEQ ID NO: 1227649 - RNA, 19 nt, Artificial Sequence
  Description of Artificial Sequence: Synthetic oligonucleotide
  Antisense strand to SEQ ID NO: 1227648
aucucuacagaacucuagg

SEQ ID NO: 1227650 - RNA, 19 nt, Artificial Sequence
  Description of Artificial Sequence: Synthetic oligonucleotide
  Sense strand starting at position 328 of SEQ ID NO: 917340
uuagcauaguccuuaucag

SEQ ID NO: 1227651 - RNA, 19 nt, Artificial Sequence
  Description of Artificial Sequence: Synthetic oligonucleotide
  Antisense strand to SEQ ID NO: 1227650
cugauaaggacuaugcuaa

SEQ ID NO: 1227652 - RNA, 19 nt, Artificial Sequence
  Description of Artificial Sequence: Synthetic oligonucleotide
  Sense strand starting at position 350 of SEQ ID NO: 917340
cggcacauuuauucugcaa

SEQ ID NO: 1227653 - RNA, 19 nt, Artificial Sequence
  Description of Artificial Sequence: Synthetic oligonucleotide
  Antisense strand to SEQ ID NO: 1227652
uugcagaauaaaugugccg

SEQ ID NO: 1227654 - RNA, 19 nt, Artificial Sequence
  Description of Artificial Sequence: Synthetic oligonucleotide
  Sense strand starting at position 547 of SEQ ID NO: 917340
ccaguuagggaguaaaugu

SEQ ID NO: 1227655 - RNA, 19 nt, Artificial Sequence
  Description of Artificial Sequence: Synthetic oligonucleotide
  Antisense strand to SEQ ID NO: 1227654
acauuuacucccuaacugg

SEQ ID NO: 1227656 - RNA, 19 nt, Artificial Sequence
  Description of Artificial Sequence: Synthetic oligonucleotide
  Sense strand starting at position 611 of SEQ ID NO: 917340
guggaaaccuuaucuuuga

SEQ ID NO: 1227657 - RNA, 19 nt, Artificial Sequence
  Description of Artificial Sequence: Synthetic oligonucleotide
  Antisense strand to SEQ ID NO: 1227656
ucaaagauaagguuuccac

SEQ ID NO: 1227658 - RNA, 19 nt, Artificial Sequence
  Description of Artificial Sequence: Synthetic oligonucleotide
  Sense strand starting at position 817 of SEQ ID NO: 917340
gguguuauccaccaacuac

SEQ ID NO: 1227659 - RNA, 19 nt, Artificial Sequence
  Description of Artificial Sequence: Synthetic oligonucleotide
  Antisense strand to SEQ ID NO: 1227658
guaguugguggauaacacc

SEQ ID NO: 1227660 - RNA, 19 nt, Artificial Sequence
  Description of Artificial Sequence: Synthetic oligonucleotide
  Sense strand starting at position 842 of SEQ ID NO: 917340
gaaggucacugguccucaa

SEQ ID NO: 1227661 - RNA, 19 nt, Artificial Sequence
  Description of Artificial Sequence: Synthetic oligonucleotide
  Antisense strand to SEQ ID NO: 1227660
uugaggaccagugaccuuc

SEQ ID NO: 1227662 - RNA, 19 nt, Artificial Sequence
  Description of Artificial Sequence: Synthetic oligonucleotide
  Sense strand starting at position 929 of SEQ ID NO: 917340
ccuucugaggccugaaagu

SEQ ID NO: 1227663 - RNA, 19 nt, Artificial Sequence
  Description of Artificial Sequence: Synthetic oligonucleotide
  Antisense strand to SEQ ID NO: 1227662
acuuucaggccucagaagg

SEQ ID NO: 1227664 - RNA, 19 nt, Artificial Sequence
  Description of Artificial Sequence: Synthetic oligonucleotide
  Sense strand starting at position 968 of SEQ ID NO: 917340
uuaauaauacagugucuga

SEQ ID NO: 1227665 - RNA, 19 nt, Artificial Sequence
  Description of Artificial Sequence: Synthetic oligonucleotide
  Antisense strand to SEQ ID NO: 1227664
ucagacacuguauuauuaa

SEQ ID NO: 1227666 - RNA, 19 nt, Artificial Sequence
  Description of Artificial Sequence: Synthetic oligonucleotide
  Sense strand starting at position 1037 of SEQ ID NO: 917340
agggucugaguucagcauu

SEQ ID NO: 1227667 - RNA, 19 nt, Artificial Sequence
  Description of Artificial Sequence: Synthetic oligonucleotide
  Antisense strand to SEQ ID NO: 1227666
aaugcugaacucagacccu

SEQ ID NO: 1227668 - RNA, 19 nt, Artificial Sequence
  Description of Artificial Sequence: Synthetic oligonucleotide
  Sense strand starting at position 1863 of SEQ ID NO: 917340
cgcucagagcugucauggu

SEQ ID NO: 1227669 - RNA, 19 nt, Artificial Sequence
  Description of Artificial Sequence: Synthetic oligonucleotide
  Antisense strand to SEQ ID NO: 1227668
accaugacagcucugagcg

SEQ ID NO: 1227670 - RNA, 19 nt, Artificial Sequence
  Description of Artificial Sequence: Synthetic oligonucleotide
  Sense strand starting at position 2454 of SEQ ID NO: 917340
uuccauuccugaguaugaa

SEQ ID NO: 1227671 - RNA, 19 nt, Artificial Sequence
  Description of Artificial Sequence: Synthetic oligonucleotide
  Antisense strand to SEQ ID NO: 1227670
uucauacucaggaauggaa

SEQ ID NO: 1227672 - RNA, 19 nt, Artificial Sequence
  Description of Artificial Sequence: Synthetic oligonucleotide
  Sense strand starting at position 2462 of SEQ ID NO: 917340
cugaguaugaaagggugaa

SEQ ID NO: 1227673 - RNA, 19 nt, Artificial Sequence
  Description of Artificial Sequence: Synthetic oligonucleotide
  Antisense strand to SEQ ID NO: 1227672
uucacccuuucauacucag

SEQ ID NO: 1227674 - RNA, 19 nt, Artificial Sequence
  Description of Artificial Sequence: Synthetic oligonucleotide
  Sense strand starting at position 2556 of SEQ ID NO: 917340
guugacguucgccuuuaaa

SEQ ID NO: 1227675 - RNA, 19 nt, Artificial Sequence
  Description of Artificial Sequence: Synthetic oligonucleotide
  Antisense strand to SEQ ID NO: 1227674
uuuaaaggcgaacgucaac

SEQ ID NO: 1227676 - RNA, 19 nt, Artificial Sequence
  Description of Artificial Sequence: Synthetic oligonucleotide
  Sense strand starting at position 2587 of SEQ ID NO: 917340
ugucguguggaugagacaa

SEQ ID NO: 1227677 - RNA, 19 nt, Artificial Sequence
  Description of Artificial Sequence: Synthetic oligonucleotide
  Antisense strand to SEQ ID NO: 1227676
uugucucauccacacgaca

SEQ ID NO: 1227678 - RNA, 19 nt, Artificial Sequence
  Description of Artificial Sequence: Synthetic oligonucleotide
  Sense strand starting at position 2643 of SEQ ID NO: 917340
cugugaguauaccuggaca

SEQ ID NO: 1227679 - RNA, 19 nt, Artificial Sequence
  Description of Artificial Sequence: Synthetic oligonucleotide
  Antisense strand to SEQ ID NO: 1227678
uguccagguauacucacag

SEQ ID NO: 1227680 - RNA, 19 nt, Artificial Sequence
  Description of Artificial Sequence: Synthetic oligonucleotide
  Sense strand starting at position 2646 of SEQ ID NO: 917340
ugaguauaccuggacagca

SEQ ID NO: 1227681 - RNA, 19 nt, Artificial Sequence
  Description of Artificial Sequence: Synthetic oligonucleotide
  Antisense strand to SEQ ID NO: 1227680
ugcuguccagguauacuca

SEQ ID NO: 1227682 - RNA, 19 nt, Artificial Sequence
  Description of Artificial Sequence: Synthetic oligonucleotide
  Sense strand starting at position 2708 of SEQ ID NO: 917340
agggaaaucuggccuccua

SEQ ID NO: 1227683 - RNA, 19 nt, Artificial Sequence
  Description of Artificial Sequence: Synthetic oligonucleotide
  Antisense strand to SEQ ID NO: 1227682
uaggaggccagauuucccu

SEQ ID NO: 1227684 - RNA, 19 nt, Artificial Sequence
  Description of Artificial Sequence: Synthetic oligonucleotide
  Sense strand starting at position 2828 of SEQ ID NO: 917340
gggaacuccugaccaguga

SEQ ID NO: 1227685 - RNA, 19 nt, Artificial Sequence
  Description of Artificial Sequence: Synthetic oligonucleotide
  Antisense strand to SEQ ID NO: 1227684
ucacuggucaggaguuccc

SEQ ID NO: 1227686 - RNA, 19 nt, Artificial Sequence
  Description of Artificial Sequence: Synthetic oligonucleotide
  Sense strand starting at position 2839 of SEQ ID NO: 917340
accagugauuuagacauca

SEQ ID NO: 1227687 - RNA, 19 nt, Artificial Sequence
  Description of Artificial Sequence: Synthetic oligonucleotide
  Antisense strand to SEQ ID NO: 1227686
ugaugucuaaaucacuggu

SEQ ID NO: 1227688 - RNA, 19 nt, Artificial Sequence
  Description of Artificial Sequence: Synthetic oligonucleotide
  Sense strand starting at position 2858 of SEQ ID NO: 917340
ugcacacaggcauauaaau

SEQ ID NO: 1227689 - RNA, 19 nt, Artificial Sequence
  Description of Artificial Sequence: Synthetic oligonucleotide
  Antisense strand to SEQ ID NO: 1227688
auuuauaugccugugugca

SEQ ID NO: 1227690 - RNA, 19 nt, Artificial Sequence
  Description of Artificial Sequence: Synthetic oligonucleotide
  Sense strand starting at position 2898 of SEQ ID NO: 917340
ugaagcuuucucuacaaga

SEQ ID NO: 1227691 - RNA, 19 nt, Artificial Sequence
  Description of Artificial Sequence: Synthetic oligonucleotide
  Antisense strand to SEQ ID NO: 1227690
ucuuguagagaaagcuuca

SEQ ID NO: 1227692 - RNA, 19 nt, Artificial Sequence
  Description of Artificial Sequence: Synthetic oligonucleotide
  Sense strand starting at position 3143 of SEQ ID NO: 917340
agagucaugcgagauaauu

SEQ ID NO: 1227693 - RNA, 19 nt, Artificial Sequence
  Description of Artificial Sequence: Synthetic oligonucleotide
  Antisense strand to SEQ ID NO: 1227692
aauuaucucgcaugacucu

SEQ ID NO: 1227694 - RNA, 19 nt, Artificial Sequence
  Description of Artificial Sequence: Synthetic oligonucleotide
  Sense strand starting at position 3275 of SEQ ID NO: 917340
acaaccaguuugcuuagaa

SEQ ID NO: 1227695 - RNA, 19 nt, Artificial Sequence
  Description of Artificial Sequence: Synthetic oligonucleotide
  Antisense strand to SEQ ID NO: 1227694
uucuaagcaaacugguugu

SEQ ID NO: 1227696 - RNA, 19 nt, Artificial Sequence
  Description of Artificial Sequence: Synthetic oligonucleotide
  Sense strand starting at position 3392 of SEQ ID NO: 917340
auauaugguagcugaauga

SEQ ID NO: 1227697 - RNA, 19 nt, Artificial Sequence
  Description of Artificial Sequence: Synthetic oligonucleotide
  Antisense strand to SEQ ID NO: 1227696
ucauucagcuaccauauau

SEQ ID NO: 1227698 - RNA, 19 nt, Artificial Sequence
  Description of Artificial Sequence: Synthetic oligonucleotide
  Sense strand starting at position 3396 of SEQ ID NO: 917340
augguagcugaaugauagu

SEQ ID NO: 1227699 - RNA, 19 nt, Artificial Sequence
  Description of Artificial Sequence: Synthetic oligonucleotide
  Antisense strand to SEQ ID NO: 1227698
acuaucauucagcuaccau

SEQ ID NO: 1227700 - RNA, 19 nt, Artificial Sequence
  Description of Artificial Sequence: Synthetic oligonucleotide
  Sense strand starting at position 3405 of SEQ ID NO: 917340
gaaugauaguguguuauuc

SEQ ID NO: 1227701 - RNA, 19 nt, Artificial Sequence
  Description of Artificial Sequence: Synthetic oligonucleotide
  Antisense strand to SEQ ID NO: 1227700
gaauaacacacuaucauuc

SEQ ID NO: 1227702 - RNA, 19 nt, Artificial Sequence
  Description of Artificial Sequence: Synthetic oligonucleotide
  Sense strand starting at position 3415 of SEQ ID NO: 917340
guguuauuccuugacauuc

SEQ ID NO: 1227703 - RNA, 19 nt, Artificial Sequence
  Description of Artificial Sequence: Synthetic oligonucleotide
  Antisense strand to SEQ ID NO: 1227702
gaaugucaaggaauaacac

SEQ ID NO: 1227704 - RNA, 19 nt, Artificial Sequence
  Description of Artificial Sequence: Synthetic oligonucleotide
  Sense strand starting at position 3580 of SEQ ID NO: 917340
uugaacuaccucuguuaag

SEQ ID NO: 1227705 - RNA, 19 nt, Artificial Sequence
  Description of Artificial Sequence: Synthetic oligonucleotide
  Antisense strand to SEQ ID NO: 1227704
cuuaacagagguaguucaa

SEQ ID NO: 1227706 - RNA, 19 nt, Artificial Sequence
  Description of Artificial Sequence: Synthetic oligonucleotide
  Sense strand starting at position 3581 of SEQ ID NO: 917340
ugaacuaccucuguuaagu

SEQ ID NO: 1227707 - RNA, 19 nt, Artificial Sequence
  Description of Artificial Sequence: Synthetic oligonucleotide
  Antisense strand to SEQ ID NO: 1227706
acuuaacagagguaguuca

SEQ ID NO: 1227708 - RNA, 19 nt, Artificial Sequence
  Description of Artificial Sequence: Synthetic oligonucleotide
  Sense strand starting at position 3590 of SEQ ID NO: 917340
ucuguuaagucucuauaau

SEQ ID NO: 1227709 - RNA, 19 nt, Artificial Sequence
  Description of Artificial Sequence: Synthetic oligonucleotide
  Antisense strand to SEQ ID NO: 1227708
auuauagagacuuaacaga

SEQ ID NO: 1227710 - RNA, 19 nt, Artificial Sequence
  Description of Artificial Sequence: Synthetic oligonucleotide
  Sense strand starting at position 3591 of SEQ ID NO: 917340
cuguuaagucucuauaauu

SEQ ID NO: 1227711 - RNA, 19 nt, Artificial Sequence
  Description of Artificial Sequence: Synthetic oligonucleotide
  Antisense strand to SEQ ID NO: 1227710
aauuauagagacuuaacag

SEQ ID NO: 1227712 - RNA, 19 nt, Artificial Sequence
  Description of Artificial Sequence: Synthetic oligonucleotide
  Sense strand starting at position 3714 of SEQ ID NO: 917340
agggauucacuguguauug

SEQ ID NO: 1227713 - RNA, 19 nt, Artificial Sequence
  Description of Artificial Sequence: Synthetic oligonucleotide
  Antisense strand to SEQ ID NO: 1227712
caauacacagugaaucccu

SEQ ID NO: 1227714 - RNA, 19 nt, Artificial Sequence
  Description of Artificial Sequence: Synthetic oligonucleotide
  Sense strand starting at position 3716 of SEQ ID NO: 917340
ggauucacuguguauugga

SEQ ID NO: 1227715 - RNA, 19 nt, Artificial Sequence
  Description of Artificial Sequence: Synthetic oligonucleotide
  Antisense strand to SEQ ID NO: 1227714
uccaauacacagugaaucc

SEQ ID NO: 1227716 - RNA, 19 nt, Artificial Sequence
  Description of Artificial Sequence: Synthetic oligonucleotide
  Sense strand starting at position 3724 of SEQ ID NO: 917340
uguguauuggaguagacaa

SEQ ID NO: 1227717 - RNA, 19 nt, Artificial Sequence
  Description of Artificial Sequence: Synthetic oligonucleotide
  Antisense strand to SEQ ID NO: 1227716
uugucuacuccaauacaca

SEQ ID NO: 1227718 - RNA, 19 nt, Artificial Sequence
  Description of Artificial Sequence: Synthetic oligonucleotide
  Sense strand starting at position 3840 of SEQ ID NO: 917341
ggccuaucuccguugccua

SEQ ID NO: 1227719 - RNA, 19 nt, Artificial Sequence
  Description of Artificial Sequence: Synthetic oligonucleotide
  Antisense strand to SEQ ID NO: 1227718
uaggcaacggagauaggcc

SEQ ID NO: 1227720 - RNA, 19 nt, Artificial Sequence
  Description of Artificial Sequence: Synthetic oligonucleotide
  Sense strand starting at position 154 of SEQ ID NO: 917341
agaaauaaagcguagcgau

SEQ ID NO: 1227721 - RNA, 19 nt, Artificial Sequence
  Description of Artificial Sequence: Synthetic oligonucleotide
  Antisense strand to SEQ ID NO: 1227720
aucgcuacgcuuuauuucu

SEQ ID NO: 1227722 - RNA, 19 nt, Artificial Sequence
  Description of Artificial Sequence: Synthetic oligonucleotide
  Sense strand starting at position 373 of SEQ ID NO: 917341
gugcauucacccgcgauga

SEQ ID NO: 1227723 - RNA, 19 nt, Artificial Sequence
  Description of Artificial Sequence: Synthetic oligonucleotide
  Antisense strand to SEQ ID NO: 1227722
ucaucgcgggugaaugcac

SEQ ID NO: 1227724 - RNA, 19 nt, Artificial Sequence
  Description of Artificial Sequence: Synthetic oligonucleotide
  Sense strand starting at position 515 of SEQ ID NO: 917341
ggaaucuaucacuguugga

SEQ ID NO: 1227725 - RNA, 19 nt, Artificial Sequence
  Description of Artificial Sequence: Synthetic oligonucleotide
  Antisense strand to SEQ ID NO: 1227724
uccaacagugauagauucc

SEQ ID NO: 1227726 - RNA, 19 nt, Artificial Sequence
  Description of Artificial Sequence: Synthetic oligonucleotide
  Sense strand starting at position 565 of SEQ ID NO: 917341
gaugcugugccugugcaaa

SEQ ID NO: 1227727 - RNA, 19 nt, Artificial Sequence
  Description of Artificial Sequence: Synthetic oligonucleotide
  Antisense strand to SEQ ID NO: 1227726
uuugcacaggcacagcauc

SEQ ID NO: 1227728 - RNA, 19 nt, Artificial Sequence
  Description of Artificial Sequence: Synthetic oligonucleotide
  Sense strand starting at position 631 of SEQ ID NO: 917341
ccugaagaauaucuuguua

SEQ ID NO: 1227729 - RNA, 19 nt, Artificial Sequence
  Description of Artificial Sequence: Synthetic oligonucleotide
  Antisense strand to SEQ ID NO: 1227728
uaacaagauauucuucagg

SEQ ID NO: 1227730 - RNA, 19 nt, Artificial Sequence
  Description of Artificial Sequence: Synthetic oligonucleotide
  Sense strand starting at position 657 of SEQ ID NO: 917341
cucugaaagugucuacaaa

SEQ ID NO: 1227731 - RNA, 19 nt, Artificial Sequence
  Description of Artificial Sequence: Synthetic oligonucleotide
  Antisense strand to SEQ ID NO: 1227730
uuuguagacacuuucagag

SEQ ID NO: 1227732 - RNA, 19 nt, Artificial Sequence
  Description of Artificial Sequence: Synthetic oligonucleotide
  Sense strand starting at position 658 of SEQ ID NO: 917341
ucugaaagugucuacaaac

SEQ ID NO: 1227733 - RNA, 19 nt, Artificial Sequence
  Description of Artificial Sequence: Synthetic oligonucleotide
  Antisense strand to SEQ ID NO: 1227732
guuuguagacacuuucaga

SEQ ID NO: 1227734 - RNA, 19 nt, Artificial Sequence
  Description of Artificial Sequence: Synthetic oligonucleotide
  Sense strand starting at position 673 of SEQ ID NO: 917341
aaacauguuaccgggaguu

SEQ ID NO: 1227735 - RNA, 19 nt, Artificial Sequence
  Description of Artificial Sequence: Synthetic oligonucleotide
  Antisense strand to SEQ ID NO: 1227734
aacucccgguaacauguuu

SEQ ID NO: 1227736 - RNA, 19 nt, Artificial Sequence
  Description of Artificial Sequence: Synthetic oligonucleotide
  Sense strand starting at position 675 of SEQ ID NO: 917341
acauguuaccgggaguuau

SEQ ID NO: 1227737 - RNA, 19 nt, Artificial Sequence
  Description of Artificial Sequence: Synthetic oligonucleotide
  Antisense strand to SEQ ID NO: 1227736
auaacucccgguaacaugu

SEQ ID NO: 1227738 - RNA, 19 nt, Artificial Sequence
  Description of Artificial Sequence: Synthetic oligonucleotide
  Sense strand starting at position 703 of SEQ ID NO: 917341
cgggaaauauucuuaauug

SEQ ID NO: 1227739 - RNA, 19 nt, Artificial Sequence
  Description of Artificial Sequence: Synthetic oligonucleotide
  Antisense strand to SEQ ID NO: 1227738
caauuaagaauauuucccg

SEQ ID NO: 1227740 - RNA, 19 nt, Artificial Sequence
  Description of Artificial Sequence: Synthetic oligonucleotide
  Sense strand starting at position 725 of SEQ ID NO: 917341
agacguggcaucuaaauua

SEQ ID NO: 1227741 - RNA, 19 nt, Artificial Sequence
  Description of Artificial Sequence: Synthetic oligonucleotide
  Antisense strand to SEQ ID NO: 1227740
uaauuuagaugccacgucu

SEQ ID NO: 1227742 - RNA, 19 nt, Artificial Sequence
  Description of Artificial Sequence: Synthetic oligonucleotide
  Sense strand starting at position 954 of SEQ ID NO: 917341
cccagauaacugcaaguua

SEQ ID NO: 1227743 - RNA, 19 nt, Artificial Sequence
  Description of Artificial Sequence: Synthetic oligonucleotide
  Antisense strand to SEQ ID NO: 1227742
uaacuugcaguuaucuggg

SEQ ID NO: 1227744 - RNA, 19 nt, Artificial Sequence
  Description of Artificial Sequence: Synthetic oligonucleotide
  Sense strand starting at position 1136 of SEQ ID NO: 917341
ucgggauaguuaucuguga

SEQ ID NO: 1227745 - RNA, 19 nt, Artificial Sequence
  Description of Artificial Sequence: Synthetic oligonucleotide
  Antisense strand to SEQ ID NO: 1227744
ucacagauaacuaucccga

SEQ ID NO: 1227746 - RNA, 19 nt, Artificial Sequence
  Description of Artificial Sequence: Synthetic oligonucleotide
  Sense strand starting at position 1138 of SEQ ID NO: 917341
gggauaguuaucugugagg

SEQ ID NO: 1227747 - RNA, 19 nt, Artificial Sequence
  Description of Artificial Sequence: Synthetic oligonucleotide
  Antisense strand to SEQ ID NO: 1227746
ccucacagauaacuauccc

SEQ ID NO: 1227748 - RNA, 19 nt, Artificial Sequence
  Description of Artificial Sequence: Synthetic oligonucleotide
  Sense strand starting at position 1140 of SEQ ID NO: 917341
gauaguuaucugugaggaa

SEQ ID NO: 1227749 - RNA, 19 nt, Artificial Sequence
  Description of Artificial Sequence: Synthetic oligonucleotide
  Antisense strand to SEQ ID NO: 1227748
uuccucacagauaacuauc

SEQ ID NO: 1227750 - RNA, 19 nt, Artificial Sequence
  Description of Artificial Sequence: Synthetic oligonucleotide
  Sense strand starting at position 1144 of SEQ ID NO: 917341
guuaucugugaggaagcuu

SEQ ID NO: 1227751 - RNA, 19 nt, Artificial Sequence
  Description of Artificial Sequence: Synthetic oligonucleotide
  Antisense strand to SEQ ID NO: 1227750
aagcuuccucacagauaac

SEQ ID NO: 1227752 - RNA, 19 nt, Artificial Sequence
  Description of Artificial Sequence: Synthetic oligonucleotide
  Sense strand starting at position 1153 of SEQ ID NO: 917341
gaggaagcuugaucucuau

SEQ ID NO: 1227753 - RNA, 19 nt, Artificial Sequence
  Description of Artificial Sequence: Synthetic oligonucleotide
  Antisense strand to SEQ ID NO: 1227752
auagagaucaagcuuccuc

SEQ ID NO: 1227754 - RNA, 19 nt, Artificial Sequence
  Description of Artificial Sequence: Synthetic oligonucleotide
  Sense strand starting at position 1159 of SEQ ID NO: 917341
gcuugaucucuaugaucuc

SEQ ID NO: 1227755 - RNA, 19 nt, Artificial Sequence
  Description of Artificial Sequence: Synthetic oligonucleotide
  Antisense strand to SEQ ID NO: 1227754
gagaucauagagaucaagc

SEQ ID NO: 1227756 - RNA, 19 nt, Artificial Sequence
  Description of Artificial Sequence: Synthetic oligonucleotide
  Sense strand starting at position 1268 of SEQ ID NO: 917341
ucuauaagugcauauauag

SEQ ID NO: 1227757 - RNA, 19 nt, Artificial Sequence
  Description of Artificial Sequence: Synthetic oligonucleotide
  Antisense strand to SEQ ID NO: 1227756
cuauauaugcacuuauaga

SEQ ID NO: 1227758 - RNA, 19 nt, Artificial Sequence
  Description of Artificial Sequence: Synthetic oligonucleotide
  Sense strand starting at position 1287 of SEQ ID NO: 917341
cguuguguccugcuuguaa

SEQ ID NO: 1227759 - RNA, 19 nt, Artificial Sequence
  Description of Artificial Sequence: Synthetic oligonucleotide
  Antisense strand to SEQ ID NO: 1227758
uuacaagcaggacacaacg

SEQ ID NO: 1227760 - RNA, 19 nt, Artificial Sequence
  Description of Artificial Sequence: Synthetic oligonucleotide
  Sense strand starting at position 1579 of SEQ ID NO: 917341
gccaguagucugcaugaaa

SEQ ID NO: 1227761 - RNA, 19 nt, Artificial Sequence
  Description of Artificial Sequence: Synthetic oligonucleotide
  Antisense strand to SEQ ID NO: 1227760
uuucaugcagacuacuggc

SEQ ID NO: 1227762 - RNA, 19 nt, Artificial Sequence
  Description of Artificial Sequence: Synthetic oligonucleotide
  Sense strand starting at position 1582 of SEQ ID NO: 917341
aguagucugcaugaaagaa

SEQ ID NO: 1227763 - RNA, 19 nt, Artificial Sequence
  Description of Artificial Sequence: Synthetic oligonucleotide
  Antisense strand to SEQ ID NO: 1227762
uucuuucaugcagacuacu

SEQ ID NO: 1227764 - RNA, 19 nt, Artificial Sequence
  Description of Artificial Sequence: Synthetic oligonucleotide
  Sense strand starting at position 1633 of SEQ ID NO: 917341
aggauuaacagacguuaau

SEQ ID NO: 1227765 - RNA, 19 nt, Artificial Sequence
  Description of Artificial Sequence: Synthetic oligonucleotide
  Antisense strand to SEQ ID NO: 1227764
auuaacgucuguuaauccu

SEQ ID NO: 1227766 - RNA, 19 nt, Artificial Sequence
  Description of Artificial Sequence: Synthetic oligonucleotide
  Sense strand starting at position 1642 of SEQ ID NO: 917341
agacguuaauuaucuuacu

SEQ ID NO: 1227767 - RNA, 19 nt, Artificial Sequence
  Description of Artificial Sequence: Synthetic oligonucleotide
  Antisense strand to SEQ ID NO: 1227766
aguaagauaauuaacgucu

SEQ ID NO: 1227768 - RNA, 19 nt, Artificial Sequence
  Description of Artificial Sequence: Synthetic oligonucleotide
  Sense strand starting at position 1696 of SEQ ID NO: 917341
ccgucaagaucacuaauug

SEQ ID NO: 1227769 - RNA, 19 nt, Artificial Sequence
  Description of Artificial Sequence: Synthetic oligonucleotide
  Antisense strand to SEQ ID NO: 1227768
caauuagugaucuugacgg

SEQ ID NO: 1227770 - RNA, 19 nt, Artificial Sequence
  Description of Artificial Sequence: Synthetic oligonucleotide
  Sense strand starting at position 1697 of SEQ ID NO: 917341
cgucaagaucacuaauuga

SEQ ID NO: 1227771 - RNA, 19 nt, Artificial Sequence
  Description of Artificial Sequence: Synthetic oligonucleotide
  Antisense strand to SEQ ID NO: 1227770
ucaauuagugaucuugacg

SEQ ID NO: 1227772 - RNA, 19 nt, Artificial Sequence
  Description of Artificial Sequence: Synthetic oligonucleotide
  Sense strand starting at position 1711 of SEQ ID NO: 917341
auugauggaugcccauuaa

SEQ ID NO: 1227773 - RNA, 19 nt, Artificial Sequence
  Description of Artificial Sequence: Synthetic oligonucleotide
  Antisense strand to SEQ ID NO: 1227772
uuaaugggcauccaucaau

SEQ ID NO: 1227774 - RNA, 19 nt, Artificial Sequence
  Description of Artificial Sequence: Synthetic oligonucleotide
  Sense strand starting at position 1841 of SEQ ID NO: 917341
cugagagauuccucuugau

SEQ ID NO: 1227775 - RNA, 19 nt, Artificial Sequence
  Description of Artificial Sequence: Synthetic oligonucleotide
  Antisense strand to SEQ ID NO: 1227774
aucaagaggaaucucucag

SEQ ID NO: 1227776 - RNA, 19 nt, Artificial Sequence
  Description of Artificial Sequence: Synthetic oligonucleotide
  Sense strand starting at position 2362 of SEQ ID NO: 917341
aacggcugggcucaaagau

SEQ ID NO: 1227777 - RNA, 19 nt, Artificial Sequence
  Description of Artificial Sequence: Synthetic oligonucleotide
  Antisense strand to SEQ ID NO: 1227776
aucuuugagcccagccguu

SEQ ID NO: 1227778 - RNA, 19 nt, Artificial Sequence
  Description of Artificial Sequence: Synthetic oligonucleotide
  Sense strand starting at position 2470 of SEQ ID NO: 917341
gcacuuccgaaaggcauuu

SEQ ID NO: 1227779 - RNA, 19 nt, Artificial Sequence
  Description of Artificial Sequence: Synthetic oligonucleotide
  Antisense strand to SEQ ID NO: 1227778
aaaugccuuucggaagugc

SEQ ID NO: 1227780 - RNA, 19 nt, Artificial Sequence
  Description of Artificial Sequence: Synthetic oligonucleotide
  Sense strand starting at position 2585 of SEQ ID NO: 917341
guguacaauccggaucucu

SEQ ID NO: 1227781 - RNA, 19 nt, Artificial Sequence
  Description of Artificial Sequence: Synthetic oligonucleotide
  Antisense strand to SEQ ID NO: 1227780
agagauccggauuguacac

SEQ ID NO: 1227782 - RNA, 19 nt, Artificial Sequence
  Description of Artificial Sequence: Synthetic oligonucleotide
  Sense strand starting at position 2704 of SEQ ID NO: 917341
ccgggaagucugcaaagua

SEQ ID NO: 1227783 - RNA, 19 nt, Artificial Sequence
  Description of Artificial Sequence: Synthetic oligonucleotide
  Antisense strand to SEQ ID NO: 1227782
uacuuugcagacuucccgg

SEQ ID NO: 1227784 - RNA, 19 nt, Artificial Sequence
  Description of Artificial Sequence: Synthetic oligonucleotide
  Sense strand starting at position 2721 of SEQ ID NO: 917341
uaguuuccgacguacugaa

SEQ ID NO: 1227785 - RNA, 19 nt, Artificial Sequence
  Description of Artificial Sequence: Synthetic oligonucleotide
  Antisense strand to SEQ ID NO: 1227784
uucaguacgucggaaacua

SEQ ID NO: 1227786 - RNA, 19 nt, Artificial Sequence
  Description of Artificial Sequence: Synthetic oligonucleotide
  Sense strand starting at position 3020 of SEQ ID NO: 917341
gcucaagcgguagacaaau

SEQ ID NO: 1227787 - RNA, 19 nt, Artificial Sequence
  Description of Artificial Sequence: Synthetic oligonucleotide
  Antisense strand to SEQ ID NO: 1227786
auuugucuaccgcuugagc

SEQ ID NO: 1227788 - RNA, 19 nt, Artificial Sequence
  Description of Artificial Sequence: Synthetic oligonucleotide
  Sense strand starting at position 3234 of SEQ ID NO: 917341
ucaaucucuuguccaagga

SEQ ID NO: 1227789 - RNA, 19 nt, Artificial Sequence
  Description of Artificial Sequence: Synthetic oligonucleotide
  Antisense strand to SEQ ID NO: 1227788
uccuuggacaagagauuga

SEQ ID NO: 1227790 - RNA, 19 nt, Artificial Sequence
  Description of Artificial Sequence: Synthetic oligonucleotide
  Sense strand starting at position 3382 of SEQ ID NO: 917341
aagggaucgucaccuugaa

SEQ ID NO: 1227791 - RNA, 19 nt, Artificial Sequence
  Description of Artificial Sequence: Synthetic oligonucleotide
  Antisense strand to SEQ ID NO: 1227790
uucaaggugacgaucccuu

SEQ ID NO: 1227792 - RNA, 19 nt, Artificial Sequence
  Description of Artificial Sequence: Synthetic oligonucleotide
  Sense strand starting at position 3406 of SEQ ID NO: 917341
gggccagcccuugaacaau

SEQ ID NO: 1227793 - RNA, 19 nt, Artificial Sequence
  Description of Artificial Sequence: Synthetic oligonucleotide
  Antisense strand to SEQ ID NO: 1227792
auuguucaagggcuggccc

SEQ ID NO: 1227794 - RNA, 19 nt, Artificial Sequence
  Description of Artificial Sequence: Synthetic oligonucleotide
  Sense strand starting at position 3429 of SEQ ID NO: 917341
auaugaagacucugguuuc

SEQ ID NO: 1227795 - RNA, 19 nt, Artificial Sequence
  Description of Artificial Sequence: Synthetic oligonucleotide
  Antisense strand to SEQ ID NO: 1227794
gaaaccagagucuucauau

SEQ ID NO: 1227796 - RNA, 19 nt, Artificial Sequence
  Description of Artificial Sequence: Synthetic oligonucleotide
  Sense strand starting at position 3432 of SEQ ID NO: 917341
ugaagacucugguuuccua

SEQ ID NO: 1227797 - RNA, 19 nt, Artificial Sequence
  Description of Artificial Sequence: Synthetic oligonucleotide
  Antisense strand to SEQ ID NO: 1227796
uaggaaaccagagucuuca

SEQ ID NO: 1227798 - RNA, 19 nt, Artificial Sequence
  Description of Artificial Sequence: Synthetic oligonucleotide
  Sense strand starting at position 3736 of SEQ ID NO: 917342
ccuuauuaaguguaaacuu

SEQ ID NO: 1227799 - RNA, 19 nt, Artificial Sequence
  Description of Artificial Sequence: Synthetic oligonucleotide
  Antisense strand to SEQ ID NO: 1227798
aaguuuacacuuaauaagg

SEQ ID NO: 1227800 - RNA, 19 nt, Artificial Sequence
  Description of Artificial Sequence: Synthetic oligonucleotide
  Sense strand starting at position 259 of SEQ ID NO: 917342
guuaauuauccucaaugua

SEQ ID NO: 1227801 - RNA, 19 nt, Artificial Sequence
  Description of Artificial Sequence: Synthetic oligonucleotide
  Antisense strand to SEQ ID NO: 1227800
uacauugaggauaauuaac

SEQ ID NO: 1227802 - RNA, 19 nt, Artificial Sequence
  Description of Artificial Sequence: Synthetic oligonucleotide
  Sense strand starting at position 479 of SEQ ID NO: 917342
gaaaucaaccugugugauu

SEQ ID NO: 1227803 - RNA, 19 nt, Artificial Sequence
  Description of Artificial Sequence: Synthetic oligonucleotide
  Antisense strand to SEQ ID NO: 1227802
aaucacacagguugauuuc

SEQ ID NO: 1227804 - RNA, 19 nt, Artificial Sequence
  Description of Artificial Sequence: Synthetic oligonucleotide
  Sense strand starting at position 492 of SEQ ID NO: 917342
gugauuugguguccucaca

SEQ ID NO: 1227805 - RNA, 19 nt, Artificial Sequence
  Description of Artificial Sequence: Synthetic oligonucleotide
  Antisense strand to SEQ ID NO: 1227804
ugugaggacaccaaaucac

SEQ ID NO: 1227806 - RNA, 19 nt, Artificial Sequence
  Description of Artificial Sequence: Synthetic oligonucleotide
  Sense strand starting at position 622 of SEQ ID NO: 917342
ccaucauggccuuggaaua

SEQ ID NO: 1227807 - RNA, 19 nt, Artificial Sequence
  Description of Artificial Sequence: Synthetic oligonucleotide
  Antisense strand to SEQ ID NO: 1227806
uauuccaaggccaugaugg

SEQ ID NO: 1227808 - RNA, 19 nt, Artificial Sequence
  Description of Artificial Sequence: Synthetic oligonucleotide
  Sense strand starting at position 716 of SEQ ID NO: 917342
gcuaaugcgcuucucacau

SEQ ID NO: 1227809 - RNA, 19 nt, Artificial Sequence
  Description of Artificial Sequence: Synthetic oligonucleotide
  Antisense strand to SEQ ID NO: 1227808
augugagaagcgcauuagc

SEQ ID NO: 1227810 - RNA, 19 nt, Artificial Sequence
  Description of Artificial Sequence: Synthetic oligonucleotide
  Sense strand starting at position 2325 of SEQ ID NO: 917342
ggaggagguuccucaucuc

SEQ ID NO: 1227811 - RNA, 19 nt, Artificial Sequence
  Description of Artificial Sequence: Synthetic oligonucleotide
  Antisense strand to SEQ ID NO: 1227810
gagaugaggaaccuccucc

SEQ ID NO: 1227812 - RNA, 19 nt, Artificial Sequence
  Description of Artificial Sequence: Synthetic oligonucleotide
  Sense strand starting at position 2577 of SEQ ID NO: 917342
uuucuacagccaugaaaga

SEQ ID NO: 1227813 - RNA, 19 nt, Artificial Sequence
  Description of Artificial Sequence: Synthetic oligonucleotide
  Antisense strand to SEQ ID NO: 1227812
ucuuucauggcuguagaaa

SEQ ID NO: 1227814 - RNA, 19 nt, Artificial Sequence
  Description of Artificial Sequence: Synthetic oligonucleotide
  Sense strand starting at position 2644 of SEQ ID NO: 917342
cagugauccucucuggauc

SEQ ID NO: 1227815 - RNA, 19 nt, Artificial Sequence
  Description of Artificial Sequence: Synthetic oligonucleotide
  Antisense strand to SEQ ID NO: 1227814
gauccagagaggaucacug

SEQ ID NO: 1227816 - RNA, 19 nt, Artificial Sequence
  Description of Artificial Sequence: Synthetic oligonucleotide
  Sense strand starting at position 2645 of SEQ ID NO: 917342
agugauccucucuggauca

SEQ ID NO: 1227817 - RNA, 19 nt, Artificial Sequence
  Description of Artificial Sequence: Synthetic oligonucleotide
  Antisense strand to SEQ ID NO: 1227816
ugauccagagaggaucacu

SEQ ID NO: 1227818 - RNA, 19 nt, Artificial Sequence
  Description of Artificial Sequence: Synthetic oligonucleotide
  Sense strand starting at position 2773 of SEQ ID NO: 917342
uccugacaauccucaggua

SEQ ID NO: 1227819 - RNA, 19 nt, Artificial Sequence
  Description of Artificial Sequence: Synthetic oligonucleotide
  Antisense strand to SEQ ID NO: 1227818
uaccugaggauugucagga

SEQ ID NO: 1227820 - RNA, 19 nt, Artificial Sequence
  Description of Artificial Sequence: Synthetic oligonucleotide
  Sense strand starting at position 2774 of SEQ ID NO: 917342
ccugacaauccucagguau

SEQ ID NO: 1227821 - RNA, 19 nt, Artificial Sequence
  Description of Artificial Sequence: Synthetic oligonucleotide
  Antisense strand to SEQ ID NO: 1227820
auaccugaggauugucagg

SEQ ID NO: 1227822 - RNA, 19 nt, Artificial Sequence
  Description of Artificial Sequence: Synthetic oligonucleotide
  Sense strand starting at position 2908 of SEQ ID NO: 917342
auaucuaugucugcacaga

SEQ ID NO: 1227823 - RNA, 19 nt, Artificial Sequence
  Description of Artificial Sequence: Synthetic oligonucleotide
  Antisense strand to SEQ ID NO: 1227822
ucugugcagacauagauau

SEQ ID NO: 1227824 - RNA, 19 nt, Artificial Sequence
  Description of Artificial Sequence: Synthetic oligonucleotide
  Sense strand starting at position 3004 of SEQ ID NO: 917342
acuaaauaggcaugacugu

SEQ ID NO: 1227825 - RNA, 19 nt, Artificial Sequence
  Description of Artificial Sequence: Synthetic oligonucleotide
  Antisense strand to SEQ ID NO: 1227824
acagucaugccuauuuagu

SEQ ID NO: 1227826 - RNA, 19 nt, Artificial Sequence
  Description of Artificial Sequence: Synthetic oligonucleotide
  Sense strand starting at position 3014 of SEQ ID NO: 917342
caugacuguuccuugaaag

SEQ ID NO: 1227827 - RNA, 19 nt, Artificial Sequence
  Description of Artificial Sequence: Synthetic oligonucleotide
  Antisense strand to SEQ ID NO: 1227826
cuuucaaggaacagucaug

SEQ ID NO: 1227828 - RNA, 19 nt, Artificial Sequence
  Description of Artificial Sequence: Synthetic oligonucleotide
  Sense strand starting at position 3015 of SEQ ID NO: 917342
augacuguuccuugaaagg

SEQ ID NO: 1227829 - RNA, 19 nt, Artificial Sequence
  Description of Artificial Sequence: Synthetic oligonucleotide
  Antisense strand to SEQ ID NO: 1227828
ccuuucaaggaacagucau

SEQ ID NO: 1227830 - RNA, 19 nt, Artificial Sequence
  Description of Artificial Sequence: Synthetic oligonucleotide
  Sense strand starting at position 3020 of SEQ ID NO: 917342
uguuccuugaaaggaauga

SEQ ID NO: 1227831 - RNA, 19 nt, Artificial Sequence
  Description of Artificial Sequence: Synthetic oligonucleotide
  Antisense strand to SEQ ID NO: 1227830
ucauuccuuucaaggaaca

SEQ ID NO: 1227832 - RNA, 19 nt, Artificial Sequence
  Description of Artificial Sequence: Synthetic oligonucleotide
  Sense strand starting at position 3088 of SEQ ID NO: 917342
auugcaagucaccagaaau

SEQ ID NO: 1227833 - RNA, 19 nt, Artificial Sequence
  Description of Artificial Sequence: Synthetic oligonucleotide
  Antisense strand to SEQ ID NO: 1227832
auuucuggugacuugcaau

SEQ ID NO: 1227834 - RNA, 19 nt, Artificial Sequence
  Description of Artificial Sequence: Synthetic oligonucleotide
  Sense strand starting at position 3111 of SEQ ID NO: 917342
gguaucuugagguauauuc

SEQ ID NO: 1227835 - RNA, 19 nt, Artificial Sequence
  Description of Artificial Sequence: Synthetic oligonucleotide
  Antisense strand to SEQ ID NO: 1227834
gaauauaccucaagauacc

SEQ ID NO: 1227836 - RNA, 19 nt, Artificial Sequence
  Description of Artificial Sequence: Synthetic oligonucleotide
  Sense strand starting at position 3214 of SEQ ID NO: 917342
ggaccugccagucaaguua

SEQ ID NO: 1227837 - RNA, 19 nt, Artificial Sequence
  Description of Artificial Sequence: Synthetic oligonucleotide
  Antisense strand to SEQ ID NO: 1227836
uaacuugacuggcaggucc

SEQ ID NO: 1227838 - RNA, 19 nt, Artificial Sequence
  Description of Artificial Sequence: Synthetic oligonucleotide
  Sense strand starting at position 3228 of SEQ ID NO: 917342
aguuaacucccaggauaug

SEQ ID NO: 1227839 - RNA, 19 nt, Artificial Sequence
  Description of Artificial Sequence: Synthetic oligonucleotide
  Antisense strand to SEQ ID NO: 1227838
cauauccugggaguuaacu

SEQ ID NO: 1227840 - RNA, 19 nt, Artificial Sequence
  Description of Artificial Sequence: Synthetic oligonucleotide
  Sense strand starting at position 3308 of SEQ ID NO: 917342
ggaugaauucuugguugca

SEQ ID NO: 1227841 - RNA, 19 nt, Artificial Sequence
  Description of Artificial Sequence: Synthetic oligonucleotide
  Antisense strand to SEQ ID NO: 1227840
ugcaaccaagaauucaucc

SEQ ID NO: 1227842 - RNA, 19 nt, Artificial Sequence
  Description of Artificial Sequence: Synthetic oligonucleotide
  Sense strand starting at position 3321 of SEQ ID NO: 917342
guugcaugucuguuuguuu

SEQ ID NO: 1227843 - RNA, 19 nt, Artificial Sequence
  Description of Artificial Sequence: Synthetic oligonucleotide
  Antisense strand to SEQ ID NO: 1227842
aaacaaacagacaugcaac

SEQ ID NO: 1227844 - RNA, 19 nt, Artificial Sequence
  Description of Artificial Sequence: Synthetic oligonucleotide
  Sense strand starting at position 3346 of SEQ ID NO: 917342
gcaccaaagugauugaauu

SEQ ID NO: 1227845 - RNA, 19 nt, Artificial Sequence
  Description of Artificial Sequence: Synthetic oligonucleotide
  Antisense strand to SEQ ID NO: 1227844
aauucaaucacuuuggugc

SEQ ID NO: 1227846 - RNA, 19 nt, Artificial Sequence
  Description of Artificial Sequence: Synthetic oligonucleotide
  Sense strand starting at position 3347 of SEQ ID NO: 917342
caccaaagugauugaauug

SEQ ID NO: 1227847 - RNA, 19 nt, Artificial Sequence
  Description of Artificial Sequence: Synthetic oligonucleotide
  Antisense strand to SEQ ID NO: 1227846
caauucaaucacuuuggug

SEQ ID NO: 1227848 - RNA, 19 nt, Artificial Sequence
  Description of Artificial Sequence: Synthetic oligonucleotide
  Sense strand starting at position 3354 of SEQ ID NO: 917342
gugauugaauuguuaaagu

SEQ ID NO: 1227849 - RNA, 19 nt, Artificial Sequence
  Description of Artificial Sequence: Synthetic oligonucleotide
  Antisense strand to SEQ ID NO: 1227848
acuuuaacaauucaaucac

SEQ ID NO: 1227850 - RNA, 19 nt, Artificial Sequence
  Description of Artificial Sequence: Synthetic oligonucleotide
  Sense strand starting at position 3446 of SEQ ID NO: 917342
augcuagaaugcuugaaac

SEQ ID NO: 1227851 - RNA, 19 nt, Artificial Sequence
  Description of Artificial Sequence: Synthetic oligonucleotide
  Antisense strand to SEQ ID NO: 1227850
guuucaagcauucuagcau

SEQ ID NO: 1227852 - RNA, 19 nt, Artificial Sequence
  Description of Artificial Sequence: Synthetic oligonucleotide
  Sense strand starting at position 3448 of SEQ ID NO: 917342
gcuagaaugcuugaaacug

SEQ ID NO: 1227853 - RNA, 19 nt, Artificial Sequence
  Description of Artificial Sequence: Synthetic oligonucleotide
  Antisense strand to SEQ ID NO: 1227852
caguuucaagcauucuagc

SEQ ID NO: 1227854 - RNA, 19 nt, Artificial Sequence
  Description of Artificial Sequence: Synthetic oligonucleotide
  Sense strand starting at position 3457 of SEQ ID NO: 917342
cuugaaacuguacgggaaa

SEQ ID NO: 1227855 - RNA, 19 nt, Artificial Sequence
  Description of Artificial Sequence: Synthetic oligonucleotide
  Antisense strand to SEQ ID NO: 1227854
uuucccguacaguuucaag

SEQ ID NO: 1227856 - RNA, 19 nt, Artificial Sequence
  Description of Artificial Sequence: Synthetic oligonucleotide
  Sense strand starting at position 3459 of SEQ ID NO: 917342
ugaaacuguacgggaaauu

SEQ ID NO: 1227857 - RNA, 19 nt, Artificial Sequence
  Description of Artificial Sequence: Synthetic oligonucleotide
  Antisense strand to SEQ ID NO: 1227856
aauuucccguacaguuuca

SEQ ID NO: 1227858 - RNA, 19 nt, Artificial Sequence
  Description of Artificial Sequence: Synthetic oligonucleotide
  Sense strand starting at position 3492 of SEQ ID NO: 917342
gucauaauaguaugacuug

SEQ ID NO: 1227859 - RNA, 19 nt, Artificial Sequence
  Description of Artificial Sequence: Synthetic oligonucleotide
  Antisense strand to SEQ ID NO: 1227858
caagucauacuauuaugac

SEQ ID NO: 1227860 - RNA, 19 nt, Artificial Sequence
  Description of Artificial Sequence: Synthetic oligonucleotide
  Sense strand starting at position 3657 of SEQ ID NO: 917342
acugaaagguugucacacu

SEQ ID NO: 1227861 - RNA, 19 nt, Artificial Sequence
  Description of Artificial Sequence: Synthetic oligonucleotide
  Antisense strand to SEQ ID NO: 1227860
agugugacaaccuuucagu

SEQ ID NO: 1227862 - RNA, 19 nt, Artificial Sequence
  Description of Artificial Sequence: Synthetic oligonucleotide
  Sense strand starting at position 3694 of SEQ ID NO: 917342
ugcauauaucuauauggca

SEQ ID NO: 1227863 - RNA, 19 nt, Artificial Sequence
  Description of Artificial Sequence: Synthetic oligonucleotide
  Antisense strand to SEQ ID NO: 1227862
ugccauauagauauaugca

SEQ ID NO: 1227864 - RNA, 19 nt, Artificial Sequence
  Description of Artificial Sequence: Synthetic oligonucleotide
  Sense strand starting at position 3739 of SEQ ID NO: 917342
gacuucuugcaugaguacu

SEQ ID NO: 1227865 - RNA, 19 nt, Artificial Sequence
  Description of Artificial Sequence: Synthetic oligonucleotide
  Antisense strand to SEQ ID NO: 1227864
aguacucaugcaagaaguc

SEQ ID NO: 1227866 - RNA, 19 nt, Artificial Sequence
  Description of Artificial Sequence: Synthetic oligonucleotide
  Sense strand starting at position 3745 of SEQ ID NO: 917342
uugcaugaguacuuugaga

SEQ ID NO: 1227867 - RNA, 19 nt, Artificial Sequence
  Description of Artificial Sequence: Synthetic oligonucleotide
  Antisense strand to SEQ ID NO: 1227866
ucucaaaguacucaugcaa

SEQ ID NO: 1227868 - RNA, 19 nt, Artificial Sequence
  Description of Artificial Sequence: Synthetic oligonucleotide
  Sense strand starting at position 3747 of SEQ ID NO: 917342
gcaugaguacuuugagaga

SEQ ID NO: 1227869 - RNA, 19 nt, Artificial Sequence
  Description of Artificial Sequence: Synthetic oligonucleotide
  Antisense strand to SEQ ID NO: 1227868
ucucucaaaguacucaugc

SEQ ID NO: 1227870 - RNA, 19 nt, Artificial Sequence
  Description of Artificial Sequence: Synthetic oligonucleotide
  Sense strand starting at position 3789 of SEQ ID NO: 917342
uuccuuucugaaugaauag

SEQ ID NO: 1227871 - RNA, 19 nt, Artificial Sequence
  Description of Artificial Sequence: Synthetic oligonucleotide
  Antisense strand to SEQ ID NO: 1227870
cuauucauucagaaaggaa

SEQ ID NO: 1227872 - RNA, 19 nt, Artificial Sequence
  Description of Artificial Sequence: Synthetic oligonucleotide
  Sense strand starting at position 3796 of SEQ ID NO: 917342
cugaaugaauagcuuaaca

SEQ ID NO: 1227873 - RNA, 19 nt, Artificial Sequence
  Description of Artificial Sequence: Synthetic oligonucleotide
  Antisense strand to SEQ ID NO: 1227872
uguuaagcuauucauucag

SEQ ID NO: 1227874 - RNA, 19 nt, Artificial Sequence
  Description of Artificial Sequence: Synthetic oligonucleotide
  Sense strand starting at position 3910 of SEQ ID NO: 917342
gaagauagugaguggguaa

SEQ ID NO: 1227875 - RNA, 19 nt, Artificial Sequence
  Description of Artificial Sequence: Synthetic oligonucleotide
  Antisense strand to SEQ ID NO: 1227874
uuacccacucacuaucuuc

SEQ ID NO: 1227876 - RNA, 19 nt, Artificial Sequence
  Description of Artificial Sequence: Synthetic oligonucleotide
  Sense strand starting at position 3911 of SEQ ID NO: 917342
aagauagugaguggguaaa

SEQ ID NO: 1227877 - RNA, 19 nt, Artificial Sequence
  Description of Artificial Sequence: Synthetic oligonucleotide
  Antisense strand to SEQ ID NO: 1227876
uuuacccacucacuaucuu

SEQ ID NO: 1227878 - RNA, 19 nt, Artificial Sequence
  Description of Artificial Sequence: Synthetic oligonucleotide
  Sense strand starting at position 3913 of SEQ ID NO: 917343
gauagugaguggguaaaga

SEQ ID NO: 1227879 - RNA, 19 nt, Artificial Sequence
  Description of Artificial Sequence: Synthetic oligonucleotide
  Antisense strand to SEQ ID NO: 1227878
ucuuuacccacucacuauc

SEQ ID NO: 1227880 - RNA, 19 nt, Artificial Sequence
  Description of Artificial Sequence: Synthetic oligonucleotide
  Sense strand starting at position 113 of SEQ ID NO: 917343
gguagugacgucuguagga

SEQ ID NO: 1227881 - RNA, 19 nt, Artificial Sequence
  Description of Artificial Sequence: Synthetic oligonucleotide
  Antisense strand to SEQ ID NO: 1227880
uccuacagacgucacuacc

SEQ ID NO: 1227882 - RNA, 19 nt, Artificial Sequence
  Description of Artificial Sequence: Synthetic oligonucleotide
  Sense strand starting at position 115 of SEQ ID NO: 917343
uagugacgucuguaggaaa

SEQ ID NO: 1227883 - RNA, 19 nt, Artificial Sequence
  Description of Artificial Sequence: Synthetic oligonucleotide
  Antisense strand to SEQ ID NO: 1227882
uuuccuacagacgucacua

SEQ ID NO: 1227884 - RNA, 19 nt, Artificial Sequence
  Description of Artificial Sequence: Synthetic oligonucleotide
  Sense strand starting at position 257 of SEQ ID NO: 917343
gcuuuccauacugggagaa

SEQ ID NO: 1227885 - RNA, 19 nt, Artificial Sequence
  Description of Artificial Sequence: Synthetic oligonucleotide
  Antisense strand to SEQ ID NO: 1227884
uucucccaguauggaaagc

SEQ ID NO: 1227886 - RNA, 19 nt, Artificial Sequence
  Description of Artificial Sequence: Synthetic oligonucleotide
  Sense strand starting at position 282 of SEQ ID NO: 917343
uuucccaaguuguugagaa

SEQ ID NO: 1227887 - RNA, 19 nt, Artificial Sequence
  Description of Artificial Sequence: Synthetic oligonucleotide
  Antisense strand to SEQ ID NO: 1227886
uucucaacaacuugggaaa

SEQ ID NO: 1227888 - RNA, 19 nt, Artificial Sequence
  Description of Artificial Sequence: Synthetic oligonucleotide
  Sense strand starting at position 472 of SEQ ID NO: 917343
auagaaagucuuggcuuau

SEQ ID NO: 1227889 - RNA, 19 nt, Artificial Sequence
  Description of Artificial Sequence: Synthetic oligonucleotide
  Antisense strand to SEQ ID NO: 1227888
auaagccaagacuuucuau

SEQ ID NO: 1227890 - RNA, 19 nt, Artificial Sequence
  Description of Artificial Sequence: Synthetic oligonucleotide
  Sense strand starting at position 473 of SEQ ID NO: 917343
uagaaagucuuggcuuaua

SEQ ID NO: 1227891 - RNA, 19 nt, Artificial Sequence
  Description of Artificial Sequence: Synthetic oligonucleotide
  Antisense strand to SEQ ID NO: 1227890
uauaagccaagacuuucua

SEQ ID NO: 1227892 - RNA, 19 nt, Artificial Sequence
  Description of Artificial Sequence: Synthetic oligonucleotide
  Sense strand starting at position 495 of SEQ ID NO: 917343
ugucuuacaugugcaaaua

SEQ ID NO: 1227893 - RNA, 19 nt, Artificial Sequence
  Description of Artificial Sequence: Synthetic oligonucleotide
  Antisense strand to SEQ ID NO: 1227892
uauuugcacauguaagaca

SEQ ID NO: 1227894 - RNA, 19 nt, Artificial Sequence
  Description of Artificial Sequence: Synthetic oligonucleotide
  Sense strand starting at position 496 of SEQ ID NO: 917343
gucuuacaugugcaaauag

SEQ ID NO: 1227895 - RNA, 19 nt, Artificial Sequence
  Description of Artificial Sequence: Synthetic oligonucleotide
  Antisense strand to SEQ ID NO: 1227894
cuauuugcacauguaagac

SEQ ID NO: 1227896 - RNA, 19 nt, Artificial Sequence
  Description of Artificial Sequence: Synthetic oligonucleotide
  Sense strand starting at position 507 of SEQ ID NO: 917343
gcaaauagauuugaaaguu

SEQ ID NO: 1227897 - RNA, 19 nt, Artificial Sequence
  Description of Artificial Sequence: Synthetic oligonucleotide
  Antisense strand to SEQ ID NO: 1227896
aacuuucaaaucuauuugc

SEQ ID NO: 1227898 - RNA, 19 nt, Artificial Sequence
  Description of Artificial Sequence: Synthetic oligonucleotide
  Sense strand starting at position 614 of SEQ ID NO: 917343
cucaguaaaugggcugaaa

SEQ ID NO: 1227899 - RNA, 19 nt, Artificial Sequence
  Description of Artificial Sequence: Synthetic oligonucleotide
  Antisense strand to SEQ ID NO: 1227898
uuucagcccauuuacugag

SEQ ID NO: 1227900 - RNA, 19 nt, Artificial Sequence
  Description of Artificial Sequence: Synthetic oligonucleotide
  Sense strand starting at position 616 of SEQ ID NO: 917343
caguaaaugggcugaaagu

SEQ ID NO: 1227901 - RNA, 19 nt, Artificial Sequence
  Description of Artificial Sequence: Synthetic oligonucleotide
  Antisense strand to SEQ ID NO: 1227900
acuuucagcccauuuacug

SEQ ID NO: 1227902 - RNA, 19 nt, Artificial Sequence
  Description of Artificial Sequence: Synthetic oligonucleotide
  Sense strand starting at position 617 of SEQ ID NO: 917343
aguaaaugggcugaaaguu

SEQ ID NO: 1227903 - RNA, 19 nt, Artificial Sequence
  Description of Artificial Sequence: Synthetic oligonucleotide
  Antisense strand to SEQ ID NO: 1227902
aacuuucagcccauuuacu

SEQ ID NO: 1227904 - RNA, 19 nt, Artificial Sequence
  Description of Artificial Sequence: Synthetic oligonucleotide
  Sense strand starting at position 625 of SEQ ID NO: 917343
ggcugaaaguuuguagaau

SEQ ID NO: 1227905 - RNA, 19 nt, Artificial Sequence
  Description of Artificial Sequence: Synthetic oligonucleotide
  Antisense strand to SEQ ID NO: 1227904
auucuacaaacuuucagcc

SEQ ID NO: 1227906 - RNA, 19 nt, Artificial Sequence
  Description of Artificial Sequence: Synthetic oligonucleotide
  Sense strand starting at position 810 of SEQ ID NO: 917343
ucaacauaguuaccaaagu

SEQ ID NO: 1227907 - RNA, 19 nt, Artificial Sequence
  Description of Artificial Sequence: Synthetic oligonucleotide
  Antisense strand to SEQ ID NO: 1227906
acuuugguaacuauguuga

SEQ ID NO: 1227908 - RNA, 19 nt, Artificial Sequence
  Description of Artificial Sequence: Synthetic oligonucleotide
  Sense strand starting at position 1067 of SEQ ID NO: 917343
cagcauuauggcuagucuu

SEQ ID NO: 1227909 - RNA, 19 nt, Artificial Sequence
  Description of Artificial Sequence: Synthetic oligonucleotide
  Antisense strand to SEQ ID NO: 1227908
aagacuagccauaaugcug

SEQ ID NO: 1227910 - RNA, 19 nt, Artificial Sequence
  Description of Artificial Sequence: Synthetic oligonucleotide
  Sense strand starting at position 1075 of SEQ ID NO: 917343
uggcuagucuuucucuaca

SEQ ID NO: 1227911 - RNA, 19 nt, Artificial Sequence
  Description of Artificial Sequence: Synthetic oligonucleotide
  Antisense strand to SEQ ID NO: 1227910
uguagagaaagacuagcca

SEQ ID NO: 1227912 - RNA, 19 nt, Artificial Sequence
  Description of Artificial Sequence: Synthetic oligonucleotide
  Sense strand starting at position 1078 of SEQ ID NO: 917343
cuagucuuucucuacaguu

SEQ ID NO: 1227913 - RNA, 19 nt, Artificial Sequence
  Description of Artificial Sequence: Synthetic oligonucleotide
  Antisense strand to SEQ ID NO: 1227912
aacuguagagaaagacuag

SEQ ID NO: 1227914 - RNA, 19 nt, Artificial Sequence
  Description of Artificial Sequence: Synthetic oligonucleotide
  Sense strand starting at position 2270 of SEQ ID NO: 917343
uucguaagauaagcgauuu

SEQ ID NO: 1227915 - RNA, 19 nt, Artificial Sequence
  Description of Artificial Sequence: Synthetic oligonucleotide
  Antisense strand to SEQ ID NO: 1227914
aaaucgcuuaucuuacgaa

SEQ ID NO: 1227916 - RNA, 19 nt, Artificial Sequence
  Description of Artificial Sequence: Synthetic oligonucleotide
  Sense strand starting at position 2299 of SEQ ID NO: 917343
aauauagaguaguuagagu

SEQ ID NO: 1227917 - RNA, 19 nt, Artificial Sequence
  Description of Artificial Sequence: Synthetic oligonucleotide
  Antisense strand to SEQ ID NO: 1227916
acucuaacuacucuauauu

SEQ ID NO: 1227918 - RNA, 19 nt, Artificial Sequence
  Description of Artificial Sequence: Synthetic oligonucleotide
  Sense strand starting at position 2307 of SEQ ID NO: 917343
guaguuagaguuuacagaa

SEQ ID NO: 1227919 - RNA, 19 nt, Artificial Sequence
  Description of Artificial Sequence: Synthetic oligonucleotide
  Antisense strand to SEQ ID NO: 1227918
uucuguaaacucuaacuac

SEQ ID NO: 1227920 - RNA, 19 nt, Artificial Sequence
  Description of Artificial Sequence: Synthetic oligonucleotide
  Sense strand starting at position 2419 of SEQ ID NO: 917343
auguguuacgacugaugaa

SEQ ID NO: 1227921 - RNA, 19 nt, Artificial Sequence
  Description of Artificial Sequence: Synthetic oligonucleotide
  Antisense strand to SEQ ID NO: 1227920
uucaucagucguaacacau

SEQ ID NO: 1227922 - RNA, 19 nt, Artificial Sequence
  Description of Artificial Sequence: Synthetic oligonucleotide
  Sense strand starting at position 2420 of SEQ ID NO: 917343
uguguuacgacugaugaac

SEQ ID NO: 1227923 - RNA, 19 nt, Artificial Sequence
  Description of Artificial Sequence: Synthetic oligonucleotide
  Antisense strand to SEQ ID NO: 1227922
guucaucagucguaacaca

SEQ ID NO: 1227924 - RNA, 19 nt, Artificial Sequence
  Description of Artificial Sequence: Synthetic oligonucleotide
  Sense strand starting at position 2487 of SEQ ID NO: 917343
ucacucagguuguuguaua

SEQ ID NO: 1227925 - RNA, 19 nt, Artificial Sequence
  Description of Artificial Sequence: Synthetic oligonucleotide
  Antisense strand to SEQ ID NO: 1227924
uauacaacaaccugaguga

SEQ ID NO: 1227926 - RNA, 19 nt, Artificial Sequence
  Description of Artificial Sequence: Synthetic oligonucleotide
  Sense strand starting at position 2499 of SEQ ID NO: 917343
uuguauacuccucgaguua

SEQ ID NO: 1227927 - RNA, 19 nt, Artificial Sequence
  Description of Artificial Sequence: Synthetic oligonucleotide
  Antisense strand to SEQ ID NO: 1227926
uaacucgaggaguauacaa

SEQ ID NO: 1227928 - RNA, 19 nt, Artificial Sequence
  Description of Artificial Sequence: Synthetic oligonucleotide
  Sense strand starting at position 2500 of SEQ ID NO: 917343
uguauacuccucgaguuag

SEQ ID NO: 1227929 - RNA, 19 nt, Artificial Sequence
  Description of Artificial Sequence: Synthetic oligonucleotide
  Antisense strand to SEQ ID NO: 1227928
cuaacucgaggaguauaca

SEQ ID NO: 1227930 - RNA, 19 nt, Artificial Sequence
  Description of Artificial Sequence: Synthetic oligonucleotide
  Sense strand starting at position 2527 of SEQ ID NO: 917343
uguaauggcagguauccau

SEQ ID NO: 1227931 - RNA, 19 nt, Artificial Sequence
  Description of Artificial Sequence: Synthetic oligonucleotide
  Antisense strand to SEQ ID NO: 1227930
auggauaccugccauuaca

SEQ ID NO: 1227932 - RNA, 19 nt, Artificial Sequence
  Description of Artificial Sequence: Synthetic oligonucleotide
  Sense strand starting at position 2868 of SEQ ID NO: 917343
ucuagaguucuagguuacu

SEQ ID NO: 1227933 - RNA, 19 nt, Artificial Sequence
  Description of Artificial Sequence: Synthetic oligonucleotide
  Antisense strand to SEQ ID NO: 1227932
aguaaccuagaacucuaga

SEQ ID NO: 1227934 - RNA, 19 nt, Artificial Sequence
  Description of Artificial Sequence: Synthetic oligonucleotide
  Sense strand starting at position 2871 of SEQ ID NO: 917343
agaguucuagguuacugga

SEQ ID NO: 1227935 - RNA, 19 nt, Artificial Sequence
  Description of Artificial Sequence: Synthetic oligonucleotide
  Antisense strand to SEQ ID NO: 1227934
uccaguaaccuagaacucu

SEQ ID NO: 1227936 - RNA, 19 nt, Artificial Sequence
  Description of Artificial Sequence: Synthetic oligonucleotide
  Sense strand starting at position 2981 of SEQ ID NO: 917343
ggagcacuguuaguaguau

SEQ ID NO: 1227937 - RNA, 19 nt, Artificial Sequence
  Description of Artificial Sequence: Synthetic oligonucleotide
  Antisense strand to SEQ ID NO: 1227936
auacuacuaacagugcucc

SEQ ID NO: 1227938 - RNA, 19 nt, Artificial Sequence
  Description of Artificial Sequence: Synthetic oligonucleotide
  Sense strand starting at position 2996 of SEQ ID NO: 917343
guaucucacugucugguua

SEQ ID NO: 1227939 - RNA, 19 nt, Artificial Sequence
  Description of Artificial Sequence: Synthetic oligonucleotide
  Antisense strand to SEQ ID NO: 1227938
uaaccagacagugagauac

SEQ ID NO: 1227940 - RNA, 19 nt, Artificial Sequence
  Description of Artificial Sequence: Synthetic oligonucleotide
  Sense strand starting at position 3000 of SEQ ID NO: 917343
cucacugucugguuaacca

SEQ ID NO: 1227941 - RNA, 19 nt, Artificial Sequence
  Description of Artificial Sequence: Synthetic oligonucleotide
  Antisense strand to SEQ ID NO: 1227940
ugguuaaccagacagugag

SEQ ID NO: 1227942 - RNA, 19 nt, Artificial Sequence
  Description of Artificial Sequence: Synthetic oligonucleotide
  Sense strand starting at position 3039 of SEQ ID NO: 917343
auauuucucuagcaaguag

SEQ ID NO: 1227943 - RNA, 19 nt, Artificial Sequence
  Description of Artificial Sequence: Synthetic oligonucleotide
  Antisense strand to SEQ ID NO: 1227942
cuacuugcuagagaaauau

SEQ ID NO: 1227944 - RNA, 19 nt, Artificial Sequence
  Description of Artificial Sequence: Synthetic oligonucleotide
  Sense strand starting at position 3134 of SEQ ID NO: 917343
cuugauguggcccagcuau

SEQ ID NO: 1227945 - RNA, 19 nt, Artificial Sequence
  Description of Artificial Sequence: Synthetic oligonucleotide
  Antisense strand to SEQ ID NO: 1227944
auagcugggccacaucaag

SEQ ID NO: 1227946 - RNA, 19 nt, Artificial Sequence
  Description of Artificial Sequence: Synthetic oligonucleotide
  Sense strand starting at position 3288 of SEQ ID NO: 917343
gggugagccuaaucaacug

SEQ ID NO: 1227947 - RNA, 19 nt, Artificial Sequence
  Description of Artificial Sequence: Synthetic oligonucleotide
  Antisense strand to SEQ ID NO: 1227946
caguugauuaggcucaccc

SEQ ID NO: 1227948 - RNA, 19 nt, Artificial Sequence
  Description of Artificial Sequence: Synthetic oligonucleotide
  Sense strand starting at position 3335 of SEQ ID NO: 917343
gaaacucuuugagagauug

SEQ ID NO: 1227949 - RNA, 19 nt, Artificial Sequence
  Description of Artificial Sequence: Synthetic oligonucleotide
  Antisense strand to SEQ ID NO: 1227948
caaucucucaaagaguuuc

SEQ ID NO: 1227950 - RNA, 19 nt, Artificial Sequence
  Description of Artificial Sequence: Synthetic oligonucleotide
  Sense strand starting at position 3343 of SEQ ID NO: 917343
uugagagauugacaacuaa

SEQ ID NO: 1227951 - RNA, 19 nt, Artificial Sequence
  Description of Artificial Sequence: Synthetic oligonucleotide
  Antisense strand to SEQ ID NO: 1227950
uuaguugucaaucucucaa

SEQ ID NO: 1227952 - RNA, 19 nt, Artificial Sequence
  Description of Artificial Sequence: Synthetic oligonucleotide
  Sense strand starting at position 3367 of SEQ ID NO: 917343
guaagccuuccucauaguu

SEQ ID NO: 1227953 - RNA, 19 nt, Artificial Sequence
  Description of Artificial Sequence: Synthetic oligonucleotide
  Antisense strand to SEQ ID NO: 1227952
aacuaugaggaaggcuuac

SEQ ID NO: 1227954 - RNA, 19 nt, Artificial Sequence
  Description of Artificial Sequence: Synthetic oligonucleotide
  Sense strand starting at position 3432 of SEQ ID NO: 917343
ugucuaauagcauaaagca

SEQ ID NO: 1227955 - RNA, 19 nt, Artificial Sequence
  Description of Artificial Sequence: Synthetic oligonucleotide
  Antisense strand to SEQ ID NO: 1227954
ugcuuuaugcuauuagaca

SEQ ID NO: 1227956 - RNA, 19 nt, Artificial Sequence
  Description of Artificial Sequence: Synthetic oligonucleotide
  Sense strand starting at position 3850 of SEQ ID NO: 917343
agcagacaucuugaauccu

SEQ ID NO: 1227957 - RNA, 19 nt, Artificial Sequence
  Description of Artificial Sequence: Synthetic oligonucleotide
  Antisense strand to SEQ ID NO: 1227956
aggauucaagaugucugcu

SEQ ID NO: 1227958 - RNA, 19 nt, Artificial Sequence
  Description of Artificial Sequence: Synthetic oligonucleotide
  Sense strand starting at position 3924 of SEQ ID NO: 917343
ugcuaaucuaguggaguaa

SEQ ID NO: 1227959 - RNA, 19 nt, Artificial Sequence
  Description of Artificial Sequence: Synthetic oligonucleotide
  Antisense strand to SEQ ID NO: 1227958
uuacuccacuagauuagca

SEQ ID NO: 1227960 - RNA, 19 nt, Artificial Sequence
  Description of Artificial Sequence: Synthetic oligonucleotide
  Sense strand starting at position 3924 of SEQ ID NO: 917344
ugcuaaucuaguggaguaa

SEQ ID NO: 1227961 - RNA, 19 nt, Artificial Sequence
  Description of Artificial Sequence: Synthetic oligonucleotide
  Antisense strand to SEQ ID NO: 1227960
uuacuccacuagauuagca

SEQ ID NO: 1227962 - RNA, 19 nt, Artificial Sequence
  Description of Artificial Sequence: Synthetic oligonucleotide
  Sense strand starting at position 400 of SEQ ID NO: 917344
cuacuauagugaccuguaa

SEQ ID NO: 1227963 - RNA, 19 nt, Artificial Sequence
  Description of Artificial Sequence: Synthetic oligonucleotide
  Antisense strand to SEQ ID NO: 1227962
uuacaggucacuauaguag

SEQ ID NO: 1227964 - RNA, 19 nt, Artificial Sequence
  Description of Artificial Sequence: Synthetic oligonucleotide
  Sense strand starting at position 429 of SEQ ID NO: 917344
uuguauuacuguuuaucac

SEQ ID NO: 1227965 - RNA, 19 nt, Artificial Sequence
  Description of Artificial Sequence: Synthetic oligonucleotide
  Antisense strand to SEQ ID NO: 1227964
gugauaaacaguaauacaa

SEQ ID NO: 1227966 - RNA, 19 nt, Artificial Sequence
  Description of Artificial Sequence: Synthetic oligonucleotide
  Sense strand starting at position 501 of SEQ ID NO: 917344
acacauugucuucgaaaca

SEQ ID NO: 1227967 - RNA, 19 nt, Artificial Sequence
  Description of Artificial Sequence: Synthetic oligonucleotide
  Antisense strand to SEQ ID NO: 1227966
uguuucgaagacaaugugu

SEQ ID NO: 1227968 - RNA, 19 nt, Artificial Sequence
  Description of Artificial Sequence: Synthetic oligonucleotide
  Sense strand starting at position 550 of SEQ ID NO: 917344
aguguauauagaugugaaa

SEQ ID NO: 1227969 - RNA, 19 nt, Artificial Sequence
  Description of Artificial Sequence: Synthetic oligonucleotide
  Antisense strand to SEQ ID NO: 1227968
uuucacaucuauauacacu

SEQ ID NO: 1227970 - RNA, 19 nt, Artificial Sequence
  Description of Artificial Sequence: Synthetic oligonucleotide
  Sense strand starting at position 552 of SEQ ID NO: 917344
uguauauagaugugaaaga

SEQ ID NO: 1227971 - RNA, 19 nt, Artificial Sequence
  Description of Artificial Sequence: Synthetic oligonucleotide
  Antisense strand to SEQ ID NO: 1227970
ucuuucacaucuauauaca

SEQ ID NO: 1227972 - RNA, 19 nt, Artificial Sequence
  Description of Artificial Sequence: Synthetic oligonucleotide
  Sense strand starting at position 598 of SEQ ID NO: 917344
ccugguauuacacgguuua

SEQ ID NO: 1227973 - RNA, 19 nt, Artificial Sequence
  Description of Artificial Sequence: Synthetic oligonucleotide
  Antisense strand to SEQ ID NO: 1227972
uaaaccguguaauaccagg

SEQ ID NO: 1227974 - RNA, 19 nt, Artificial Sequence
  Description of Artificial Sequence: Synthetic oligonucleotide
  Sense strand starting at position 599 of SEQ ID NO: 917344
cugguauuacacgguuuaa

SEQ ID NO: 1227975 - RNA, 19 nt, Artificial Sequence
  Description of Artificial Sequence: Synthetic oligonucleotide
  Antisense strand to SEQ ID NO: 1227974
uuaaaccguguaauaccag

SEQ ID NO: 1227976 - RNA, 19 nt, Artificial Sequence
  Description of Artificial Sequence: Synthetic oligonucleotide
  Sense strand starting at position 636 of SEQ ID NO: 917344
ccaugaucuuauucuucgu

SEQ ID NO: 1227977 - RNA, 19 nt, Artificial Sequence
  Description of Artificial Sequence: Synthetic oligonucleotide
  Antisense strand to SEQ ID NO: 1227976
acgaagaauaagaucaugg

SEQ ID NO: 1227978 - RNA, 19 nt, Artificial Sequence
  Description of Artificial Sequence: Synthetic oligonucleotide
  Sense strand starting at position 663 of SEQ ID NO: 917344
ggcuuuauucuaugcaaug

SEQ ID NO: 1227979 - RNA, 19 nt, Artificial Sequence
  Description of Artificial Sequence: Synthetic oligonucleotide
  Antisense strand to SEQ ID NO: 1227978
cauugcauagaauaaagcc

SEQ ID NO: 1227980 - RNA, 19 nt, Artificial Sequence
  Description of Artificial Sequence: Synthetic oligonucleotide
  Sense strand starting at position 669 of SEQ ID NO: 917344
auucuaugcaauggagagu

SEQ ID NO: 1227981 - RNA, 19 nt, Artificial Sequence
  Description of Artificial Sequence: Synthetic oligonucleotide
  Antisense strand to SEQ ID NO: 1227980
acucuccauugcauagaau

SEQ ID NO: 1227982 - RNA, 19 nt, Artificial Sequence
  Description of Artificial Sequence: Synthetic oligonucleotide
  Sense strand starting at position 707 of SEQ ID NO: 917344
ccagacuucuuagcugaaa

SEQ ID NO: 1227983 - RNA, 19 nt, Artificial Sequence
  Description of Artificial Sequence: Synthetic oligonucleotide
  Antisense strand to SEQ ID NO: 1227982
uuucagcuaagaagucugg

SEQ ID NO: 1227984 - RNA, 19 nt, Artificial Sequence
  Description of Artificial Sequence: Synthetic oligonucleotide
  Sense strand starting at position 746 of SEQ ID NO: 917344
cccacauuugccuguuacu

SEQ ID NO: 1227985 - RNA, 19 nt, Artificial Sequence
  Description of Artificial Sequence: Synthetic oligonucleotide
  Antisense strand to SEQ ID NO: 1227984
aguaacaggcaaauguggg

SEQ ID NO: 1227986 - RNA, 19 nt, Artificial Sequence
  Description of Artificial Sequence: Synthetic oligonucleotide
  Sense strand starting at position 796 of SEQ ID NO: 917344
cugaauacacucuggacau

SEQ ID NO: 1227987 - RNA, 19 nt, Artificial Sequence
  Description of Artificial Sequence: Synthetic oligonucleotide
  Antisense strand to SEQ ID NO: 1227986
auguccagaguguauucag

SEQ ID NO: 1227988 - RNA, 19 nt, Artificial Sequence
  Description of Artificial Sequence: Synthetic oligonucleotide
  Sense strand starting at position 925 of SEQ ID NO: 917344
ucagaaaggucccugaaac

SEQ ID NO: 1227989 - RNA, 19 nt, Artificial Sequence
  Description of Artificial Sequence: Synthetic oligonucleotide
  Antisense strand to SEQ ID NO: 1227988
guuucagggaccuuucuga

SEQ ID NO: 1227990 - RNA, 19 nt, Artificial Sequence
  Description of Artificial Sequence: Synthetic oligonucleotide
  Sense strand starting at position 926 of SEQ ID NO: 917344
cagaaaggucccugaaacc

SEQ ID NO: 1227991 - RNA, 19 nt, Artificial Sequence
  Description of Artificial Sequence: Synthetic oligonucleotide
  Antisense strand to SEQ ID NO: 1227990
gguuucagggaccuuucug

SEQ ID NO: 1227992 - RNA, 19 nt, Artificial Sequence
  Description of Artificial Sequence: Synthetic oligonucleotide
  Sense strand starting at position 957 of SEQ ID NO: 917344
guauaaguaaugcgagaaa

SEQ ID NO: 1227993 - RNA, 19 nt, Artificial Sequence
  Description of Artificial Sequence: Synthetic oligonucleotide
  Antisense strand to SEQ ID NO: 1227992
uuucucgcauuacuuauac

SEQ ID NO: 1227994 - RNA, 19 nt, Artificial Sequence
  Description of Artificial Sequence: Synthetic oligonucleotide
  Sense strand starting at position 960 of SEQ ID NO: 917344
uaaguaaugcgagaaaucu

SEQ ID NO: 1227995 - RNA, 19 nt, Artificial Sequence
  Description of Artificial Sequence: Synthetic oligonucleotide
  Antisense strand to SEQ ID NO: 1227994
agauuucucgcauuacuua

SEQ ID NO: 1227996 - RNA, 19 nt, Artificial Sequence
  Description of Artificial Sequence: Synthetic oligonucleotide
  Sense strand starting at position 1338 of SEQ ID NO: 917344
gguucuuuccgggcagcga

SEQ ID NO: 1227997 - RNA, 19 nt, Artificial Sequence
  Description of Artificial Sequence: Synthetic oligonucleotide
  Antisense strand to SEQ ID NO: 1227996
ucgcugcccggaaagaacc

SEQ ID NO: 1227998 - RNA, 19 nt, Artificial Sequence
  Description of Artificial Sequence: Synthetic oligonucleotide
  Sense strand starting at position 1799 of SEQ ID NO: 917344
gaggcacuguucuuggagu

SEQ ID NO: 1227999 - RNA, 19 nt, Artificial Sequence
  Description of Artificial Sequence: Synthetic oligonucleotide
  Antisense strand to SEQ ID NO: 1227998
acuccaagaacagugccuc

SEQ ID NO: 1228000 - RNA, 19 nt, Artificial Sequence
  Description of Artificial Sequence: Synthetic oligonucleotide
  Sense strand starting at position 1875 of SEQ ID NO: 917344
ugcuguuaacauugaggga

SEQ ID NO: 1228001 - RNA, 19 nt, Artificial Sequence
  Description of Artificial Sequence: Synthetic oligonucleotide
  Antisense strand to SEQ ID NO: 1228000
ucccucaauguuaacagca

SEQ ID NO: 1228002 - RNA, 19 nt, Artificial Sequence
  Description of Artificial Sequence: Synthetic oligonucleotide
  Sense strand starting at position 1902 of SEQ ID NO: 917344
ccgacuaacugaguucugu

SEQ ID NO: 1228003 - RNA, 19 nt, Artificial Sequence
  Description of Artificial Sequence: Synthetic oligonucleotide
  Antisense strand to SEQ ID NO: 1228002
acagaacucaguuagucgg

SEQ ID NO: 1228004 - RNA, 19 nt, Artificial Sequence
  Description of Artificial Sequence: Synthetic oligonucleotide
  Sense strand starting at position 1912 of SEQ ID NO: 917344
gaguucugucugcagguua

SEQ ID NO: 1228005 - RNA, 19 nt, Artificial Sequence
  Description of Artificial Sequence: Synthetic oligonucleotide
  Antisense strand to SEQ ID NO: 1228004
uaaccugcagacagaacuc

SEQ ID NO: 1228006 - RNA, 19 nt, Artificial Sequence
  Description of Artificial Sequence: Synthetic oligonucleotide
  Sense strand starting at position 1931 of SEQ ID NO: 917344
agugaaagccuauguagau

SEQ ID NO: 1228007 - RNA, 19 nt, Artificial Sequence
  Description of Artificial Sequence: Synthetic oligonucleotide
  Antisense strand to SEQ ID NO: 1228006
aucuacauaggcuuucacu

SEQ ID NO: 1228008 - RNA, 19 nt, Artificial Sequence
  Description of Artificial Sequence: Synthetic oligonucleotide
  Sense strand starting at position 1932 of SEQ ID NO: 917344
gugaaagccuauguagaua

SEQ ID NO: 1228009 - RNA, 19 nt, Artificial Sequence
  Description of Artificial Sequence: Synthetic oligonucleotide
  Antisense strand to SEQ ID NO: 1228008
uaucuacauaggcuuucac

SEQ ID NO: 1228010 - RNA, 19 nt, Artificial Sequence
  Description of Artificial Sequence: Synthetic oligonucleotide
  Sense strand starting at position 1971 of SEQ ID NO: 917344
cagugcuagcuagaacuua

SEQ ID NO: 1228011 - RNA, 19 nt, Artificial Sequence
  Description of Artificial Sequence: Synthetic oligonucleotide
  Antisense strand to SEQ ID NO: 1228010
uaaguucuagcuagcacug

SEQ ID NO: 1228012 - RNA, 19 nt, Artificial Sequence
  Description of Artificial Sequence: Synthetic oligonucleotide
  Sense strand starting at position 2040 of SEQ ID NO: 917344
ucaggauguccacauccua

SEQ ID NO: 1228013 - RNA, 19 nt, Artificial Sequence
  Description of Artificial Sequence: Synthetic oligonucleotide
  Antisense strand to SEQ ID NO: 1228012
uaggauguggacauccuga

SEQ ID NO: 1228014 - RNA, 19 nt, Artificial Sequence
  Description of Artificial Sequence: Synthetic oligonucleotide
  Sense strand starting at position 2128 of SEQ ID NO: 917344
ugcuuaucagcggacuuua

SEQ ID NO: 1228015 - RNA, 19 nt, Artificial Sequence
  Description of Artificial Sequence: Synthetic oligonucleotide
  Antisense strand to SEQ ID NO: 1228014
uaaaguccgcugauaagca

SEQ ID NO: 1228016 - RNA, 19 nt, Artificial Sequence
  Description of Artificial Sequence: Synthetic oligonucleotide
  Sense strand starting at position 2172 of SEQ ID NO: 917344
gugcuuggguaauuacaaa

SEQ ID NO: 1228017 - RNA, 19 nt, Artificial Sequence
  Description of Artificial Sequence: Synthetic oligonucleotide
  Antisense strand to SEQ ID NO: 1228016
uuuguaauuacccaagcac

SEQ ID NO: 1228018 - RNA, 19 nt, Artificial Sequence
  Description of Artificial Sequence: Synthetic oligonucleotide
  Sense strand starting at position 2195 of SEQ ID NO: 917344
uuacaaggguucucuaaag

SEQ ID NO: 1228019 - RNA, 19 nt, Artificial Sequence
  Description of Artificial Sequence: Synthetic oligonucleotide
  Antisense strand to SEQ ID NO: 1228018
cuuuagagaacccuuguaa

SEQ ID NO: 1228020 - RNA, 19 nt, Artificial Sequence
  Description of Artificial Sequence: Synthetic oligonucleotide
  Sense strand starting at position 2421 of SEQ ID NO: 917344
agacacucgucucuacgaa

SEQ ID NO: 1228021 - RNA, 19 nt, Artificial Sequence
  Description of Artificial Sequence: Synthetic oligonucleotide
  Antisense strand to SEQ ID NO: 1228020
uucguagagacgagugucu

SEQ ID NO: 1228022 - RNA, 19 nt, Artificial Sequence
  Description of Artificial Sequence: Synthetic oligonucleotide
  Sense strand starting at position 2422 of SEQ ID NO: 917344
gacacucgucucuacgaaa

SEQ ID NO: 1228023 - RNA, 19 nt, Artificial Sequence
  Description of Artificial Sequence: Synthetic oligonucleotide
  Antisense strand to SEQ ID NO: 1228022
uuucguagagacgaguguc

SEQ ID NO: 1228024 - RNA, 19 nt, Artificial Sequence
  Description of Artificial Sequence: Synthetic oligonucleotide
  Sense strand starting at position 2941 of SEQ ID NO: 917344
ccacuuagguugucacagu

SEQ ID NO: 1228025 - RNA, 19 nt, Artificial Sequence
  Description of Artificial Sequence: Synthetic oligonucleotide
  Antisense strand to SEQ ID NO: 1228024
acugugacaaccuaagugg

SEQ ID NO: 1228026 - RNA, 19 nt, Artificial Sequence
  Description of Artificial Sequence: Synthetic oligonucleotide
  Sense strand starting at position 2951 of SEQ ID NO: 917344
ugucacaguuuguuacaga

SEQ ID NO: 1228027 - RNA, 19 nt, Artificial Sequence
  Description of Artificial Sequence: Synthetic oligonucleotide
  Antisense strand to SEQ ID NO: 1228026
ucuguaacaaacugugaca

SEQ ID NO: 1228028 - RNA, 19 nt, Artificial Sequence
  Description of Artificial Sequence: Synthetic oligonucleotide
  Sense strand starting at position 2995 of SEQ ID NO: 917344
guaacuaaaucccucugua

SEQ ID NO: 1228029 - RNA, 19 nt, Artificial Sequence
  Description of Artificial Sequence: Synthetic oligonucleotide
  Antisense strand to SEQ ID NO: 1228028
uacagagggauuuaguuac

SEQ ID NO: 1228030 - RNA, 19 nt, Artificial Sequence
  Description of Artificial Sequence: Synthetic oligonucleotide
  Sense strand starting at position 3077 of SEQ ID NO: 917344
agcgcugaacguguucauu

SEQ ID NO: 1228031 - RNA, 19 nt, Artificial Sequence
  Description of Artificial Sequence: Synthetic oligonucleotide
  Antisense strand to SEQ ID NO: 1228030
aaugaacacguucagcgcu

SEQ ID NO: 1228032 - RNA, 19 nt, Artificial Sequence
  Description of Artificial Sequence: Synthetic oligonucleotide
  Sense strand starting at position 3301 of SEQ ID NO: 917344
aagauaaagcguuaucaug

SEQ ID NO: 1228033 - RNA, 19 nt, Artificial Sequence
  Description of Artificial Sequence: Synthetic oligonucleotide
  Antisense strand to SEQ ID NO: 1228032
caugauaacgcuuuaucuu

SEQ ID NO: 1228034 - RNA, 19 nt, Artificial Sequence
  Description of Artificial Sequence: Synthetic oligonucleotide
  Sense strand starting at position 3303 of SEQ ID NO: 917344
gauaaagcguuaucaugac

SEQ ID NO: 1228035 - RNA, 19 nt, Artificial Sequence
  Description of Artificial Sequence: Synthetic oligonucleotide
  Antisense strand to SEQ ID NO: 1228034
gucaugauaacgcuuuauc

SEQ ID NO: 1228036 - RNA, 19 nt, Artificial Sequence
  Description of Artificial Sequence: Synthetic oligonucleotide
  Sense strand starting at position 3307 of SEQ ID NO: 917344
aagcguuaucaugacaguu

SEQ ID NO: 1228037 - RNA, 19 nt, Artificial Sequence
  Description of Artificial Sequence: Synthetic oligonucleotide
  Antisense strand to SEQ ID NO: 1228036
aacugucaugauaacgcuu

SEQ ID NO: 1228038 - RNA, 19 nt, Artificial Sequence
  Description of Artificial Sequence: Synthetic oligonucleotide
  Sense strand starting at position 3960 of SEQ ID NO: 917344
ccaugccuguacucagaau

SEQ ID NO: 1228039 - RNA, 19 nt, Artificial Sequence
  Description of Artificial Sequence: Synthetic oligonucleotide
  Antisense strand to SEQ ID NO: 1228038
auucugaguacaggcaugg

SEQ ID NO: 1228040 - RNA, 19 nt, Artificial Sequence
  Description of Artificial Sequence: Synthetic oligonucleotide
  Sense strand starting at position 3972 of SEQ ID NO: 917344
ucagaaugcugcucuugag

SEQ ID NO: 1228041 - RNA, 19 nt, Artificial Sequence
  Description of Artificial Sequence: Synthetic oligonucleotide
  Antisense strand to SEQ ID NO: 1228040
cucaagagcagcauucuga

SEQ ID NO: 1228042 - RNA, 19 nt, Artificial Sequence
  Description of Artificial Sequence: Synthetic oligonucleotide
  Sense strand starting at position 3972 of SEQ ID NO: 917345
ucagaaugcugcucuugag

SEQ ID NO: 1228043 - RNA, 19 nt, Artificial Sequence
  Description of Artificial Sequence: Synthetic oligonucleotide
  Antisense strand to SEQ ID NO: 1228042
cucaagagcagcauucuga

SEQ ID NO: 1228044 - RNA, 19 nt, Artificial Sequence
  Description of Artificial Sequence: Synthetic oligonucleotide
  Sense strand starting at position 29 of SEQ ID NO: 917345
agaagacagacauguguuu

SEQ ID NO: 1228045 - RNA, 19 nt, Artificial Sequence
  Description of Artificial Sequence: Synthetic oligonucleotide
  Antisense strand to SEQ ID NO: 1228044
aaacacaugucugucuucu

SEQ ID NO: 1228046 - RNA, 19 nt, Artificial Sequence
  Description of Artificial Sequence: Synthetic oligonucleotide
  Sense strand starting at position 160 of SEQ ID NO: 917345
cgggacugcuuagcacaua

SEQ ID NO: 1228047 - RNA, 19 nt, Artificial Sequence
  Description of Artificial Sequence: Synthetic oligonucleotide
  Antisense strand to SEQ ID NO: 1228046
uaugugcuaagcagucccg

SEQ ID NO: 1228048 - RNA, 19 nt, Artificial Sequence
  Description of Artificial Sequence: Synthetic oligonucleotide
  Sense strand starting at position 726 of SEQ ID NO: 917345
cuacuauagugaccuguaa

SEQ ID NO: 1228049 - RNA, 19 nt, Artificial Sequence
  Description of Artificial Sequence: Synthetic oligonucleotide
  Antisense strand to SEQ ID NO: 1228048
uuacaggucacuauaguag

SEQ ID NO: 1228050 - RNA, 19 nt, Artificial Sequence
  Description of Artificial Sequence: Synthetic oligonucleotide
  Sense strand starting at position 755 of SEQ ID NO: 917345
uuguauuacuguuuaucac

SEQ ID NO: 1228051 - RNA, 19 nt, Artificial Sequence
  Description of Artificial Sequence: Synthetic oligonucleotide
  Antisense strand to SEQ ID NO: 1228050
gugauaaacaguaauacaa

SEQ ID NO: 1228052 - RNA, 19 nt, Artificial Sequence
  Description of Artificial Sequence: Synthetic oligonucleotide
  Sense strand starting at position 827 of SEQ ID NO: 917345
acacauugucuucgaaaca

SEQ ID NO: 1228053 - RNA, 19 nt, Artificial Sequence
  Description of Artificial Sequence: Synthetic oligonucleotide
  Antisense strand to SEQ ID NO: 1228052
uguuucgaagacaaugugu

SEQ ID NO: 1228054 - RNA, 19 nt, Artificial Sequence
  Description of Artificial Sequence: Synthetic oligonucleotide
  Sense strand starting at position 876 of SEQ ID NO: 917345
aguguauauagaugugaaa

SEQ ID NO: 1228055 - RNA, 19 nt, Artificial Sequence
  Description of Artificial Sequence: Synthetic oligonucleotide
  Antisense strand to SEQ ID NO: 1228054
uuucacaucuauauacacu

SEQ ID NO: 1228056 - RNA, 19 nt, Artificial Sequence
  Description of Artificial Sequence: Synthetic oligonucleotide
  Sense strand starting at position 878 of SEQ ID NO: 917345
uguauauagaugugaaaga

SEQ ID NO: 1228057 - RNA, 19 nt, Artificial Sequence
  Description of Artificial Sequence: Synthetic oligonucleotide
  Antisense strand to SEQ ID NO: 1228056
ucuuucacaucuauauaca

SEQ ID NO: 1228058 - RNA, 19 nt, Artificial Sequence
  Description of Artificial Sequence: Synthetic oligonucleotide
  Sense strand starting at position 924 of SEQ ID NO: 917345
ccugguauuacacgguuua

SEQ ID NO: 1228059 - RNA, 19 nt, Artificial Sequence
  Description of Artificial Sequence: Synthetic oligonucleotide
  Antisense strand to SEQ ID NO: 1228058
uaaaccguguaauaccagg

SEQ ID NO: 1228060 - RNA, 19 nt, Artificial Sequence
  Description of Artificial Sequence: Synthetic oligonucleotide
  Sense strand starting at position 925 of SEQ ID NO: 917345
cugguauuacacgguuuaa

SEQ ID NO: 1228061 - RNA, 19 nt, Artificial Sequence
  Description of Artificial Sequence: Synthetic oligonucleotide
  Antisense strand to SEQ ID NO: 1228060
uuaaaccguguaauaccag

SEQ ID NO: 1228062 - RNA, 19 nt, Artificial Sequence
  Description of Artificial Sequence: Synthetic oligonucleotide
  Sense strand starting at position 962 of SEQ ID NO: 917345
ccaugaucuuauucuucgu

SEQ ID NO: 1228063 - RNA, 19 nt, Artificial Sequence
  Description of Artificial Sequence: Synthetic oligonucleotide
  Antisense strand to SEQ ID NO: 1228062
acgaagaauaagaucaugg

SEQ ID NO: 1228064 - RNA, 19 nt, Artificial Sequence
  Description of Artificial Sequence: Synthetic oligonucleotide
  Sense strand starting at position 989 of SEQ ID NO: 917345
ggcuuuauucuaugcaaug

SEQ ID NO: 1228065 - RNA, 19 nt, Artificial Sequence
  Description of Artificial Sequence: Synthetic oligonucleotide
  Antisense strand to SEQ ID NO: 1228064
cauugcauagaauaaagcc

SEQ ID NO: 1228066 - RNA, 19 nt, Artificial Sequence
  Description of Artificial Sequence: Synthetic oligonucleotide
  Sense strand starting at position 995 of SEQ ID NO: 917345
auucuaugcaauggagagu

SEQ ID NO: 1228067 - RNA, 19 nt, Artificial Sequence
  Description of Artificial Sequence: Synthetic oligonucleotide
  Antisense strand to SEQ ID NO: 1228066
acucuccauugcauagaau

SEQ ID NO: 1228068 - RNA, 19 nt, Artificial Sequence
  Description of Artificial Sequence: Synthetic oligonucleotide
  Sense strand starting at position 1033 of SEQ ID NO: 917345
ccagacuucuuagcugaaa

SEQ ID NO: 1228069 - RNA, 19 nt, Artificial Sequence
  Description of Artificial Sequence: Synthetic oligonucleotide
  Antisense strand to SEQ ID NO: 1228068
uuucagcuaagaagucugg

SEQ ID NO: 1228070 - RNA, 19 nt, Artificial Sequence
  Description of Artificial Sequence: Synthetic oligonucleotide
  Sense strand starting at position 1072 of SEQ ID NO: 917345
cccacauuugccuguuacu

SEQ ID NO: 1228071 - RNA, 19 nt, Artificial Sequence
  Description of Artificial Sequence: Synthetic oligonucleotide
  Antisense strand to SEQ ID NO: 1228070
aguaacaggcaaauguggg

SEQ ID NO: 1228072 - RNA, 19 nt, Artificial Sequence
  Description of Artificial Sequence: Synthetic oligonucleotide
  Sense strand starting at position 1122 of SEQ ID NO: 917345
cugaauacacucuggacau

SEQ ID NO: 1228073 - RNA, 19 nt, Artificial Sequence
  Description of Artificial Sequence: Synthetic oligonucleotide
  Antisense strand to SEQ ID NO: 1228072
auguccagaguguauucag

SEQ ID NO: 1228074 - RNA, 19 nt, Artificial Sequence
  Description of Artificial Sequence: Synthetic oligonucleotide
  Sense strand starting at position 1251 of SEQ ID NO: 917345
ucagaaaggucccugaaac

SEQ ID NO: 1228075 - RNA, 19 nt, Artificial Sequence
  Description of Artificial Sequence: Synthetic oligonucleotide
  Antisense strand to SEQ ID NO: 1228074
guuucagggaccuuucuga

SEQ ID NO: 1228076 - RNA, 19 nt, Artificial Sequence
  Description of Artificial Sequence: Synthetic oligonucleotide
  Sense strand starting at position 1252 of SEQ ID NO: 917345
cagaaaggucccugaaacc

SEQ ID NO: 1228077 - RNA, 19 nt, Artificial Sequence
  Description of Artificial Sequence: Synthetic oligonucleotide
  Antisense strand to SEQ ID NO: 1228076
gguuucagggaccuuucug

SEQ ID NO: 1228078 - RNA, 19 nt, Artificial Sequence
  Description of Artificial Sequence: Synthetic oligonucleotide
  Sense strand starting at position 1283 of SEQ ID NO: 917345
guauaaguaaugcgagaaa

SEQ ID NO: 1228079 - RNA, 19 nt, Artificial Sequence
  Description of Artificial Sequence: Synthetic oligonucleotide
  Antisense strand to SEQ ID NO: 1228078
uuucucgcauuacuuauac

SEQ ID NO: 1228080 - RNA, 19 nt, Artificial Sequence
  Description of Artificial Sequence: Synthetic oligonucleotide
  Sense strand starting at position 1286 of SEQ ID NO: 917345
uaaguaaugcgagaaaucu

SEQ ID NO: 1228081 - RNA, 19 nt, Artificial Sequence
  Description of Artificial Sequence: Synthetic oligonucleotide
  Antisense strand to SEQ ID NO: 1228080
agauuucucgcauuacuua

SEQ ID NO: 1228082 - RNA, 19 nt, Artificial Sequence
  Description of Artificial Sequence: Synthetic oligonucleotide
  Sense strand starting at position 1664 of SEQ ID NO: 917345
gguucuuuccgggcagcga

SEQ ID NO: 1228083 - RNA, 19 nt, Artificial Sequence
  Description of Artificial Sequence: Synthetic oligonucleotide
  Antisense strand to SEQ ID NO: 1228082
ucgcugcccggaaagaacc

SEQ ID NO: 1228084 - RNA, 19 nt, Artificial Sequence
  Description of Artificial Sequence: Synthetic oligonucleotide
  Sense strand starting at position 2125 of SEQ ID NO: 917345
gaggcacuguucuuggagu

SEQ ID NO: 1228085 - RNA, 19 nt, Artificial Sequence
  Description of Artificial Sequence: Synthetic oligonucleotide
  Antisense strand to SEQ ID NO: 1228084
acuccaagaacagugccuc

SEQ ID NO: 1228086 - RNA, 19 nt, Artificial Sequence
  Description of Artificial Sequence: Synthetic oligonucleotide
  Sense strand starting at position 2201 of SEQ ID NO: 917345
ugcuguuaacauugaggga

SEQ ID NO: 1228087 - RNA, 19 nt, Artificial Sequence
  Description of Artificial Sequence: Synthetic oligonucleotide
  Antisense strand to SEQ ID NO: 1228086
ucccucaauguuaacagca

SEQ ID NO: 1228088 - RNA, 19 nt, Artificial Sequence
  Description of Artificial Sequence: Synthetic oligonucleotide
  Sense strand starting at position 2228 of SEQ ID NO: 917345
ccgacuaacugaguucugu

SEQ ID NO: 1228089 - RNA, 19 nt, Artificial Sequence
  Description of Artificial Sequence: Synthetic oligonucleotide
  Antisense strand to SEQ ID NO: 1228088
acagaacucaguuagucgg

SEQ ID NO: 1228090 - RNA, 19 nt, Artificial Sequence
  Description of Artificial Sequence: Synthetic oligonucleotide
  Sense strand starting at position 2238 of SEQ ID NO: 917345
gaguucugucugcagguua

SEQ ID NO: 1228091 - RNA, 19 nt, Artificial Sequence
  Description of Artificial Sequence: Synthetic oligonucleotide
  Antisense strand to SEQ ID NO: 1228090
uaaccugcagacagaacuc

SEQ ID NO: 1228092 - RNA, 19 nt, Artificial Sequence
  Description of Artificial Sequence: Synthetic oligonucleotide
  Sense strand starting at position 2257 of SEQ ID NO: 917345
agugaaagccuauguagau

SEQ ID NO: 1228093 - RNA, 19 nt, Artificial Sequence
  Description of Artificial Sequence: Synthetic oligonucleotide
  Antisense strand to SEQ ID NO: 1228092
aucuacauaggcuuucacu

SEQ ID NO: 1228094 - RNA, 19 nt, Artificial Sequence
  Description of Artificial Sequence: Synthetic oligonucleotide
  Sense strand starting at position 2258 of SEQ ID NO: 917345
gugaaagccuauguagaua

SEQ ID NO: 1228095 - RNA, 19 nt, Artificial Sequence
  Description of Artificial Sequence: Synthetic oligonucleotide
  Antisense strand to SEQ ID NO: 1228094
uaucuacauaggcuuucac

SEQ ID NO: 1228096 - RNA, 19 nt, Artificial Sequence
  Description of Artificial Sequence: Synthetic oligonucleotide
  Sense strand starting at position 2297 of SEQ ID NO: 917345
cagugcuagcuagaacuua

SEQ ID NO: 1228097 - RNA, 19 nt, Artificial Sequence
  Description of Artificial Sequence: Synthetic oligonucleotide
  Antisense strand to SEQ ID NO: 1228096
uaaguucuagcuagcacug

SEQ ID NO: 1228098 - RNA, 19 nt, Artificial Sequence
  Description of Artificial Sequence: Synthetic oligonucleotide
  Sense strand starting at position 2366 of SEQ ID NO: 917345
ucaggauguccacauccua

SEQ ID NO: 1228099 - RNA, 19 nt, Artificial Sequence
  Description of Artificial Sequence: Synthetic oligonucleotide
  Antisense strand to SEQ ID NO: 1228098
uaggauguggacauccuga

SEQ ID NO: 1228100 - RNA, 19 nt, Artificial Sequence
  Description of Artificial Sequence: Synthetic oligonucleotide
  Sense strand starting at position 2454 of SEQ ID NO: 917345
ugcuuaucagcggacuuua

SEQ ID NO: 1228101 - RNA, 19 nt, Artificial Sequence
  Description of Artificial Sequence: Synthetic oligonucleotide
  Antisense strand to SEQ ID NO: 1228100
uaaaguccgcugauaagca

SEQ ID NO: 1228102 - RNA, 19 nt, Artificial Sequence
  Description of Artificial Sequence: Synthetic oligonucleotide
  Sense strand starting at position 2498 of SEQ ID NO: 917345
gugcuuggguaauuacaaa

SEQ ID NO: 1228103 - RNA, 19 nt, Artificial Sequence
  Description of Artificial Sequence: Synthetic oligonucleotide
  Antisense strand to SEQ ID NO: 1228102
uuuguaauuacccaagcac

SEQ ID NO: 1228104 - RNA, 19 nt, Artificial Sequence
  Description of Artificial Sequence: Synthetic oligonucleotide
  Sense strand starting at position 2521 of SEQ ID NO: 917345
uuacaaggguucucuaaag

SEQ ID NO: 1228105 - RNA, 19 nt, Artificial Sequence
  Description of Artificial Sequence: Synthetic oligonucleotide
  Antisense strand to SEQ ID NO: 1228104
cuuuagagaacccuuguaa

SEQ ID NO: 1228106 - RNA, 19 nt, Artificial Sequence
  Description of Artificial Sequence: Synthetic oligonucleotide
  Sense strand starting at position 2747 of SEQ ID NO: 917345
agacacucgucucuacgaa

SEQ ID NO: 1228107 - RNA, 19 nt, Artificial Sequence
  Description of Artificial Sequence: Synthetic oligonucleotide
  Antisense strand to SEQ ID NO: 1228106
uucguagagacgagugucu

SEQ ID NO: 1228108 - RNA, 19 nt, Artificial Sequence
  Description of Artificial Sequence: Synthetic oligonucleotide
  Sense strand starting at position 2748 of SEQ ID NO: 917345
gacacucgucucuacgaaa

SEQ ID NO: 1228109 - RNA, 19 nt, Artificial Sequence
  Description of Artificial Sequence: Synthetic oligonucleotide
  Antisense strand to SEQ ID NO: 1228108
uuucguagagacgaguguc

SEQ ID NO: 1228110 - RNA, 19 nt, Artificial Sequence
  Description of Artificial Sequence: Synthetic oligonucleotide
  Sense strand starting at position 3267 of SEQ ID NO: 917345
ccacuuagguugucacagu

SEQ ID NO: 1228111 - RNA, 19 nt, Artificial Sequence
  Description of Artificial Sequence: Synthetic oligonucleotide
  Antisense strand to SEQ ID NO: 1228110
acugugacaaccuaagugg

SEQ ID NO: 1228112 - RNA, 19 nt, Artificial Sequence
  Description of Artificial Sequence: Synthetic oligonucleotide
  Sense strand starting at position 3277 of SEQ ID NO: 917345
ugucacaguuuguuacaga

SEQ ID NO: 1228113 - RNA, 19 nt, Artificial Sequence
  Description of Artificial Sequence: Synthetic oligonucleotide
  Antisense strand to SEQ ID NO: 1228112
ucuguaacaaacugugaca

SEQ ID NO: 1228114 - RNA, 19 nt, Artificial Sequence
  Description of Artificial Sequence: Synthetic oligonucleotide
  Sense strand starting at position 3321 of SEQ ID NO: 917345
guaacuaaaucccucugua

SEQ ID NO: 1228115 - RNA, 19 nt, Artificial Sequence
  Description of Artificial Sequence: Synthetic oligonucleotide
  Antisense strand to SEQ ID NO: 1228114
uacagagggauuuaguuac

SEQ ID NO: 1228116 - RNA, 19 nt, Artificial Sequence
  Description of Artificial Sequence: Synthetic oligonucleotide
  Sense strand starting at position 3403 of SEQ ID NO: 917345
agcgcugaacguguucauu

SEQ ID NO: 1228117 - RNA, 19 nt, Artificial Sequence
  Description of Artificial Sequence: Synthetic oligonucleotide
  Antisense strand to SEQ ID NO: 1228116
aaugaacacguucagcgcu

SEQ ID NO: 1228118 - RNA, 19 nt, Artificial Sequence
  Description of Artificial Sequence: Synthetic oligonucleotide
  Sense strand starting at position 3627 of SEQ ID NO: 917345
aagauaaagcguuaucaug

SEQ ID NO: 1228119 - RNA, 19 nt, Artificial Sequence
  Description of Artificial Sequence: Synthetic oligonucleotide
  Antisense strand to SEQ ID NO: 1228118
caugauaacgcuuuaucuu

SEQ ID NO: 1228120 - RNA, 19 nt, Artificial Sequence
  Description of Artificial Sequence: Synthetic oligonucleotide
  Sense strand starting at position 3629 of SEQ ID NO: 917345
gauaaagcguuaucaugac

SEQ ID NO: 1228121 - RNA, 19 nt, Artificial Sequence
  Description of Artificial Sequence: Synthetic oligonucleotide
  Antisense strand to SEQ ID NO: 1228120
gucaugauaacgcuuuauc

SEQ ID NO: 1228122 - RNA, 19 nt, Artificial Sequence
  Description of Artificial Sequence: Synthetic oligonucleotide
  Sense strand starting at position 3633 of SEQ ID NO: 917346
aagcguuaucaugacaguu

SEQ ID NO: 1228123 - RNA, 19 nt, Artificial Sequence
  Description of Artificial Sequence: Synthetic oligonucleotide
  Antisense strand to SEQ ID NO: 1228122
aacugucaugauaacgcuu

SEQ ID NO: 1228124 - RNA, 19 nt, Artificial Sequence
  Description of Artificial Sequence: Synthetic oligonucleotide
  Sense strand starting at position 119 of SEQ ID NO: 917346
gagaucauugguugcuguu

SEQ ID NO: 1228125 - RNA, 19 nt, Artificial Sequence
  Description of Artificial Sequence: Synthetic oligonucleotide
  Antisense strand to SEQ ID NO: 1228124
aacagcaaccaaugaucuc

SEQ ID NO: 1228126 - RNA, 19 nt, Artificial Sequence
  Description of Artificial Sequence: Synthetic oligonucleotide
  Sense strand starting at position 125 of SEQ ID NO: 917346
auugguugcuguuuggaca

SEQ ID NO: 1228127 - RNA, 19 nt, Artificial Sequence
  Description of Artificial Sequence: Synthetic oligonucleotide
  Antisense strand to SEQ ID NO: 1228126
uguccaaacagcaaccaau

SEQ ID NO: 1228128 - RNA, 19 nt, Artificial Sequence
  Description of Artificial Sequence: Synthetic oligonucleotide
  Sense strand starting at position 126 of SEQ ID NO: 917346
uugguugcuguuuggacaa

SEQ ID NO: 1228129 - RNA, 19 nt, Artificial Sequence
  Description of Artificial Sequence: Synthetic oligonucleotide
  Antisense strand to SEQ ID NO: 1228128
uuguccaaacagcaaccaa

SEQ ID NO: 1228130 - RNA, 19 nt, Artificial Sequence
  Description of Artificial Sequence: Synthetic oligonucleotide
  Sense strand starting at position 240 of SEQ ID NO: 917346
agcugaauaucccacugaa

SEQ ID NO: 1228131 - RNA, 19 nt, Artificial Sequence
  Description of Artificial Sequence: Synthetic oligonucleotide
  Antisense strand to SEQ ID NO: 1228130
uucagugggauauucagcu

SEQ ID NO: 1228132 - RNA, 19 nt, Artificial Sequence
  Description of Artificial Sequence: Synthetic oligonucleotide
  Sense strand starting at position 317 of SEQ ID NO: 917346
agugcuugcuaucugauuu

SEQ ID NO: 1228133 - RNA, 19 nt, Artificial Sequence
  Description of Artificial Sequence: Synthetic oligonucleotide
  Antisense strand to SEQ ID NO: 1228132
aaaucagauagcaagcacu

SEQ ID NO: 1228134 - RNA, 19 nt, Artificial Sequence
  Description of Artificial Sequence: Synthetic oligonucleotide
  Sense strand starting at position 345 of SEQ ID NO: 917346
uaaguaugcuuucccgaag

SEQ ID NO: 1228135 - RNA, 19 nt, Artificial Sequence
  Description of Artificial Sequence: Synthetic oligonucleotide
  Antisense strand to SEQ ID NO: 1228134
cuucgggaaagcauacuua

SEQ ID NO: 1228136 - RNA, 19 nt, Artificial Sequence
  Description of Artificial Sequence: Synthetic oligonucleotide
  Sense strand starting at position 348 of SEQ ID NO: 917346
guaugcuuucccgaaggca

SEQ ID NO: 1228137 - RNA, 19 nt, Artificial Sequence
  Description of Artificial Sequence: Synthetic oligonucleotide
  Antisense strand to SEQ ID NO: 1228136
ugccuucgggaaagcauac

SEQ ID NO: 1228138 - RNA, 19 nt, Artificial Sequence
  Description of Artificial Sequence: Synthetic oligonucleotide
  Sense strand starting at position 371 of SEQ ID NO: 917346
gcccgauggccuuaaucac

SEQ ID NO: 1228139 - RNA, 19 nt, Artificial Sequence
  Description of Artificial Sequence: Synthetic oligonucleotide
  Antisense strand to SEQ ID NO: 1228138
gugauuaaggccaucgggc

SEQ ID NO: 1228140 - RNA, 19 nt, Artificial Sequence
  Description of Artificial Sequence: Synthetic oligonucleotide
  Sense strand starting at position 407 of SEQ ID NO: 917346
ucuccaaugggcugaguuu

SEQ ID NO: 1228141 - RNA, 19 nt, Artificial Sequence
  Description of Artificial Sequence: Synthetic oligonucleotide
  Antisense strand to SEQ ID NO: 1228140
aaacucagcccauuggaga

SEQ ID NO: 1228142 - RNA, 19 nt, Artificial Sequence
  Description of Artificial Sequence: Synthetic oligonucleotide
  Sense strand starting at position 422 of SEQ ID NO: 917346
guuuccuggaauuagagua

SEQ ID NO: 1228143 - RNA, 19 nt, Artificial Sequence
  Description of Artificial Sequence: Synthetic oligonucleotide
  Antisense strand to SEQ ID NO: 1228142
uacucuaauuccaggaaac

SEQ ID NO: 1228144 - RNA, 19 nt, Artificial Sequence
  Description of Artificial Sequence: Synthetic oligonucleotide
  Sense strand starting at position 443 of SEQ ID NO: 917346
guaaauuuaucacacacgu

SEQ ID NO: 1228145 - RNA, 19 nt, Artificial Sequence
  Description of Artificial Sequence: Synthetic oligonucleotide
  Antisense strand to SEQ ID NO: 1228144
acgugugugauaaauuuac

SEQ ID NO: 1228146 - RNA, 19 nt, Artificial Sequence
  Description of Artificial Sequence: Synthetic oligonucleotide
  Sense strand starting at position 563 of SEQ ID NO: 917346
cuuucuuuguggccacaga

SEQ ID NO: 1228147 - RNA, 19 nt, Artificial Sequence
  Description of Artificial Sequence: Synthetic oligonucleotide
  Antisense strand to SEQ ID NO: 1228146
ucuguggccacaaagaaag

SEQ ID NO: 1228148 - RNA, 19 nt, Artificial Sequence
  Description of Artificial Sequence: Synthetic oligonucleotide
  Sense strand starting at position 564 of SEQ ID NO: 917346
uuucuuuguggccacagau

SEQ ID NO: 1228149 - RNA, 19 nt, Artificial Sequence
  Description of Artificial Sequence: Synthetic oligonucleotide
  Antisense strand to SEQ ID NO: 1228148
aucuguggccacaaagaaa

SEQ ID NO: 1228150 - RNA, 19 nt, Artificial Sequence
  Description of Artificial Sequence: Synthetic oligonucleotide
  Sense strand starting at position 596 of SEQ ID NO: 917346
cagaguuucuuggucagac

SEQ ID NO: 1228151 - RNA, 19 nt, Artificial Sequence
  Description of Artificial Sequence: Synthetic oligonucleotide
  Antisense strand to SEQ ID NO: 1228150
gucugaccaagaaacucug

SEQ ID NO: 1228152 - RNA, 19 nt, Artificial Sequence
  Description of Artificial Sequence: Synthetic oligonucleotide
  Sense strand starting at position 597 of SEQ ID NO: 917346
agaguuucuuggucagaca

SEQ ID NO: 1228153 - RNA, 19 nt, Artificial Sequence
  Description of Artificial Sequence: Synthetic oligonucleotide
  Antisense strand to SEQ ID NO: 1228152
ugucugaccaagaaacucu

SEQ ID NO: 1228154 - RNA, 19 nt, Artificial Sequence
  Description of Artificial Sequence: Synthetic oligonucleotide
  Sense strand starting at position 598 of SEQ ID NO: 917346
gaguuucuuggucagacac

SEQ ID NO: 1228155 - RNA, 19 nt, Artificial Sequence
  Description of Artificial Sequence: Synthetic oligonucleotide
  Antisense strand to SEQ ID NO: 1228154
gugucugaccaagaaacuc

SEQ ID NO: 1228156 - RNA, 19 nt, Artificial Sequence
  Description of Artificial Sequence: Synthetic oligonucleotide
  Sense strand starting at position 606 of SEQ ID NO: 917346
uggucagacacgggucaua

SEQ ID NO: 1228157 - RNA, 19 nt, Artificial Sequence
  Description of Artificial Sequence: Synthetic oligonucleotide
  Antisense strand to SEQ ID NO: 1228156
uaugacccgugucugacca

SEQ ID NO: 1228158 - RNA, 19 nt, Artificial Sequence
  Description of Artificial Sequence: Synthetic oligonucleotide
  Sense strand starting at position 616 of SEQ ID NO: 917346
cgggucauagcucagcuuu

SEQ ID NO: 1228159 - RNA, 19 nt, Artificial Sequence
  Description of Artificial Sequence: Synthetic oligonucleotide
  Antisense strand to SEQ ID NO: 1228158
aaagcugagcuaugacccg

SEQ ID NO: 1228160 - RNA, 19 nt, Artificial Sequence
  Description of Artificial Sequence: Synthetic oligonucleotide
  Sense strand starting at position 618 of SEQ ID NO: 917346
ggucauagcucagcuuuga

SEQ ID NO: 1228161 - RNA, 19 nt, Artificial Sequence
  Description of Artificial Sequence: Synthetic oligonucleotide
  Antisense strand to SEQ ID NO: 1228160
ucaaagcugagcuaugacc

SEQ ID NO: 1228162 - RNA, 19 nt, Artificial Sequence
  Description of Artificial Sequence: Synthetic oligonucleotide
  Sense strand starting at position 622 of SEQ ID NO: 917346
auagcucagcuuugauaca

SEQ ID NO: 1228163 - RNA, 19 nt, Artificial Sequence
  Description of Artificial Sequence: Synthetic oligonucleotide
  Antisense strand to SEQ ID NO: 1228162
uguaucaaagcugagcuau

SEQ ID NO: 1228164 - RNA, 19 nt, Artificial Sequence
  Description of Artificial Sequence: Synthetic oligonucleotide
  Sense strand starting at position 647 of SEQ ID NO: 917346
cccuguauucucggguaag

SEQ ID NO: 1228165 - RNA, 19 nt, Artificial Sequence
  Description of Artificial Sequence: Synthetic oligonucleotide
  Antisense strand to SEQ ID NO: 1228164
cuuacccgagaauacaggg

SEQ ID NO: 1228166 - RNA, 19 nt, Artificial Sequence
  Description of Artificial Sequence: Synthetic oligonucleotide
  Sense strand starting at position 650 of SEQ ID NO: 917346
uguauucucggguaaguca

SEQ ID NO: 1228167 - RNA, 19 nt, Artificial Sequence
  Description of Artificial Sequence: Synthetic oligonucleotide
  Antisense strand to SEQ ID NO: 1228166
ugacuuacccgagaauaca

SEQ ID NO: 1228168 - RNA, 19 nt, Artificial Sequence
  Description of Artificial Sequence: Synthetic oligonucleotide
  Sense strand starting at position 726 of SEQ ID NO: 917346
uugcaaguuuguucugaga

SEQ ID NO: 1228169 - RNA, 19 nt, Artificial Sequence
  Description of Artificial Sequence: Synthetic oligonucleotide
  Antisense strand to SEQ ID NO: 1228168
ucucagaacaaacuugcaa

SEQ ID NO: 1228170 - RNA, 19 nt, Artificial Sequence
  Description of Artificial Sequence: Synthetic oligonucleotide
  Sense strand starting at position 729 of SEQ ID NO: 917346
caaguuuguucugagaaug

SEQ ID NO: 1228171 - RNA, 19 nt, Artificial Sequence
  Description of Artificial Sequence: Synthetic oligonucleotide
  Antisense strand to SEQ ID NO: 1228170
cauucucagaacaaacuug

SEQ ID NO: 1228172 - RNA, 19 nt, Artificial Sequence
  Description of Artificial Sequence: Synthetic oligonucleotide
  Sense strand starting at position 762 of SEQ ID NO: 917346
cgguguuucgcaccuuuau

SEQ ID NO: 1228173 - RNA, 19 nt, Artificial Sequence
  Description of Artificial Sequence: Synthetic oligonucleotide
  Antisense strand to SEQ ID NO: 1228172
auaaaggugcgaaacaccg

SEQ ID NO: 1228174 - RNA, 19 nt, Artificial Sequence
  Description of Artificial Sequence: Synthetic oligonucleotide
  Sense strand starting at position 784 of SEQ ID NO: 917346
gcaggaauguccuuaggcu

SEQ ID NO: 1228175 - RNA, 19 nt, Artificial Sequence
  Description of Artificial Sequence: Synthetic oligonucleotide
  Antisense strand to SEQ ID NO: 1228174
agccuaaggacauuccugc

SEQ ID NO: 1228176 - RNA, 19 nt, Artificial Sequence
  Description of Artificial Sequence: Synthetic oligonucleotide
  Sense strand starting at position 785 of SEQ ID NO: 917346
caggaauguccuuaggcuu

SEQ ID NO: 1228177 - RNA, 19 nt, Artificial Sequence
  Description of Artificial Sequence: Synthetic oligonucleotide
  Antisense strand to SEQ ID NO: 1228176
aagccuaaggacauuccug

SEQ ID NO: 1228178 - RNA, 19 nt, Artificial Sequence
  Description of Artificial Sequence: Synthetic oligonucleotide
  Sense strand starting at position 946 of SEQ ID NO: 917346
gauucugcgauucgagaga

SEQ ID NO: 1228179 - RNA, 19 nt, Artificial Sequence
  Description of Artificial Sequence: Synthetic oligonucleotide
  Antisense strand to SEQ ID NO: 1228178
ucucucgaaucgcagaauc

SEQ ID NO: 1228180 - RNA, 19 nt, Artificial Sequence
  Description of Artificial Sequence: Synthetic oligonucleotide
  Sense strand starting at position 961 of SEQ ID NO: 917346
gagacagucccgcacaaua

SEQ ID NO: 1228181 - RNA, 19 nt, Artificial Sequence
  Description of Artificial Sequence: Synthetic oligonucleotide
  Antisense strand to SEQ ID NO: 1228180
uauugugcgggacugucuc

SEQ ID NO: 1228182 - RNA, 19 nt, Artificial Sequence
  Description of Artificial Sequence: Synthetic oligonucleotide
  Sense strand starting at position 963 of SEQ ID NO: 917346
gacagucccgcacaauaaa

SEQ ID NO: 1228183 - RNA, 19 nt, Artificial Sequence
  Description of Artificial Sequence: Synthetic oligonucleotide
  Antisense strand to SEQ ID NO: 1228182
uuuauugugcgggacuguc

SEQ ID NO: 1228184 - RNA, 19 nt, Artificial Sequence
  Description of Artificial Sequence: Synthetic oligonucleotide
  Sense strand starting at position 996 of SEQ ID NO: 917346
cccuacaaucuuggagagu

SEQ ID NO: 1228185 - RNA, 19 nt, Artificial Sequence
  Description of Artificial Sequence: Synthetic oligonucleotide
  Antisense strand to SEQ ID NO: 1228184
acucuccaagauuguaggg

SEQ ID NO: 1228186 - RNA, 19 nt, Artificial Sequence
  Description of Artificial Sequence: Synthetic oligonucleotide
  Sense strand starting at position 997 of SEQ ID NO: 917346
ccuacaaucuuggagaguc

SEQ ID NO: 1228187 - RNA, 19 nt, Artificial Sequence
  Description of Artificial Sequence: Synthetic oligonucleotide
  Antisense strand to SEQ ID NO: 1228186
gacucuccaagauuguagg

SEQ ID NO: 1228188 - RNA, 19 nt, Artificial Sequence
  Description of Artificial Sequence: Synthetic oligonucleotide
  Sense strand starting at position 1005 of SEQ ID NO: 917346
cuuggagagucuuccuaua

SEQ ID NO: 1228189 - RNA, 19 nt, Artificial Sequence
  Description of Artificial Sequence: Synthetic oligonucleotide
  Antisense strand to SEQ ID NO: 1228188
uauaggaagacucuccaag

SEQ ID NO: 1228190 - RNA, 19 nt, Artificial Sequence
  Description of Artificial Sequence: Synthetic oligonucleotide
  Sense strand starting at position 1007 of SEQ ID NO: 917346
uggagagucuuccuauaca

SEQ ID NO: 1228191 - RNA, 19 nt, Artificial Sequence
  Description of Artificial Sequence: Synthetic oligonucleotide
  Antisense strand to SEQ ID NO: 1228190
uguauaggaagacucucca

SEQ ID NO: 1228192 - RNA, 19 nt, Artificial Sequence
  Description of Artificial Sequence: Synthetic oligonucleotide
  Sense strand starting at position 1010 of SEQ ID NO: 917346
agagucuuccuauacauuc

SEQ ID NO: 1228193 - RNA, 19 nt, Artificial Sequence
  Description of Artificial Sequence: Synthetic oligonucleotide
  Antisense strand to SEQ ID NO: 1228192
gaauguauaggaagacucu

SEQ ID NO: 1228194 - RNA, 19 nt, Artificial Sequence
  Description of Artificial Sequence: Synthetic oligonucleotide
  Sense strand starting at position 1023 of SEQ ID NO: 917346
acauuccugugcguggaaa

SEQ ID NO: 1228195 - RNA, 19 nt, Artificial Sequence
  Description of Artificial Sequence: Synthetic oligonucleotide
  Antisense strand to SEQ ID NO: 1228194
uuuccacgcacaggaaugu

SEQ ID NO: 1228196 - RNA, 19 nt, Artificial Sequence
  Description of Artificial Sequence: Synthetic oligonucleotide
  Sense strand starting at position 1043 of SEQ ID NO: 917346
auccguuuguggcuagaac

SEQ ID NO: 1228197 - RNA, 19 nt, Artificial Sequence
  Description of Artificial Sequence: Synthetic oligonucleotide
  Antisense strand to SEQ ID NO: 1228196
guucuagccacaaacggau

SEQ ID NO: 1228198 - RNA, 19 nt, Artificial Sequence
  Description of Artificial Sequence: Synthetic oligonucleotide
  Sense strand starting at position 1143 of SEQ ID NO: 917346
cauguaaaucaaggcuuga

SEQ ID NO: 1228199 - RNA, 19 nt, Artificial Sequence
  Description of Artificial Sequence: Synthetic oligonucleotide
  Antisense strand to SEQ ID NO: 1228198
ucaagccuugauuuacaug

SEQ ID NO: 1228200 - RNA, 19 nt, Artificial Sequence
  Description of Artificial Sequence: Synthetic oligonucleotide
  Sense strand starting at position 1156 of SEQ ID NO: 917346
gcuugauugcacuucgguu

SEQ ID NO: 1228201 - RNA, 19 nt, Artificial Sequence
  Description of Artificial Sequence: Synthetic oligonucleotide
  Antisense strand to SEQ ID NO: 1228200
aaccgaagugcaaucaagc

SEQ ID NO: 1228202 - RNA, 19 nt, Artificial Sequence
  Description of Artificial Sequence: Synthetic oligonucleotide
  Sense strand starting at position 1173 of SEQ ID NO: 917347
uuuggagguuuaccaagaa

SEQ ID NO: 1228203 - RNA, 19 nt, Artificial Sequence
  Description of Artificial Sequence: Synthetic oligonucleotide
  Antisense strand to SEQ ID NO: 1228202
uucuugguaaaccuccaaa

SEQ ID NO: 1228204 - RNA, 19 nt, Artificial Sequence
  Description of Artificial Sequence: Synthetic oligonucleotide
  Sense strand starting at position 6 of SEQ ID NO: 917347
guuauuuaaucugagaaga

SEQ ID NO: 1228205 - RNA, 19 nt, Artificial Sequence
  Description of Artificial Sequence: Synthetic oligonucleotide
  Antisense strand to SEQ ID NO: 1228204
ucuucucagauuaaauaac

SEQ ID NO: 1228206 - RNA, 19 nt, Artificial Sequence
  Description of Artificial Sequence: Synthetic oligonucleotide
  Sense strand starting at position 771 of SEQ ID NO: 917347
uucuuaggaucagcuuaaa

SEQ ID NO: 1228207 - RNA, 19 nt, Artificial Sequence
  Description of Artificial Sequence: Synthetic oligonucleotide
  Antisense strand to SEQ ID NO: 1228206
uuuaagcugauccuaagaa

SEQ ID NO: 1228208 - RNA, 19 nt, Artificial Sequence
  Description of Artificial Sequence: Synthetic oligonucleotide
  Sense strand starting at position 788 of SEQ ID NO: 917347
aaggaaagguaaucuguau

SEQ ID NO: 1228209 - RNA, 19 nt, Artificial Sequence
  Description of Artificial Sequence: Synthetic oligonucleotide
  Antisense strand to SEQ ID NO: 1228208
auacagauuaccuuuccuu

SEQ ID NO: 1228210 - RNA, 19 nt, Artificial Sequence
  Description of Artificial Sequence: Synthetic oligonucleotide
  Sense strand starting at position 792 of SEQ ID NO: 917347
aaagguaaucuguaucuug

SEQ ID NO: 1228211 - RNA, 19 nt, Artificial Sequence
  Description of Artificial Sequence: Synthetic oligonucleotide
  Antisense strand to SEQ ID NO: 1228210
caagauacagauuaccuuu

SEQ ID NO: 1228212 - RNA, 19 nt, Artificial Sequence
  Description of Artificial Sequence: Synthetic oligonucleotide
  Sense strand starting at position 801 of SEQ ID NO: 917347
cuguaucuuggcgaagaaa

SEQ ID NO: 1228213 - RNA, 19 nt, Artificial Sequence
  Description of Artificial Sequence: Synthetic oligonucleotide
  Antisense strand to SEQ ID NO: 1228212
uuucuucgccaagauacag

SEQ ID NO: 1228214 - RNA, 19 nt, Artificial Sequence
  Description of Artificial Sequence: Synthetic oligonucleotide
  Sense strand starting at position 919 of SEQ ID NO: 917347
gcacaauuagcaugauaua

SEQ ID NO: 1228215 - RNA, 19 nt, Artificial Sequence
  Description of Artificial Sequence: Synthetic oligonucleotide
  Antisense strand to SEQ ID NO: 1228214
uauaucaugcuaauugugc

SEQ ID NO: 1228216 - RNA, 19 nt, Artificial Sequence
  Description of Artificial Sequence: Synthetic oligonucleotide
  Sense strand starting at position 1199 of SEQ ID NO: 917347
agauuuaguuuaccgucua

SEQ ID NO: 1228217 - RNA, 19 nt, Artificial Sequence
  Description of Artificial Sequence: Synthetic oligonucleotide
  Antisense strand to SEQ ID NO: 1228216
uagacgguaaacuaaaucu

SEQ ID NO: 1228218 - RNA, 19 nt, Artificial Sequence
  Description of Artificial Sequence: Synthetic oligonucleotide
  Sense strand starting at position 1282 of SEQ ID NO: 917347
acuagaaguuugcuggacu

SEQ ID NO: 1228219 - RNA, 19 nt, Artificial Sequence
  Description of Artificial Sequence: Synthetic oligonucleotide
  Antisense strand to SEQ ID NO: 1228218
aguccagcaaacuucuagu

SEQ ID NO: 1228220 - RNA, 19 nt, Artificial Sequence
  Description of Artificial Sequence: Synthetic oligonucleotide
  Sense strand starting at position 1289 of SEQ ID NO: 917347
guuugcuggacugaaauaa

SEQ ID NO: 1228221 - RNA, 19 nt, Artificial Sequence
  Description of Artificial Sequence: Synthetic oligonucleotide
  Antisense strand to SEQ ID NO: 1228220
uuauuucaguccagcaaac

SEQ ID NO: 1228222 - RNA, 19 nt, Artificial Sequence
  Description of Artificial Sequence: Synthetic oligonucleotide
  Sense strand starting at position 1320 of SEQ ID NO: 917347
gagcuuagaugccuaaaga

SEQ ID NO: 1228223 - RNA, 19 nt, Artificial Sequence
  Description of Artificial Sequence: Synthetic oligonucleotide
  Antisense strand to SEQ ID NO: 1228222
ucuuuaggcaucuaagcuc

SEQ ID NO: 1228224 - RNA, 19 nt, Artificial Sequence
  Description of Artificial Sequence: Synthetic oligonucleotide
  Sense strand starting at position 1321 of SEQ ID NO: 917347
agcuuagaugccuaaagac

SEQ ID NO: 1228225 - RNA, 19 nt, Artificial Sequence
  Description of Artificial Sequence: Synthetic oligonucleotide
  Antisense strand to SEQ ID NO: 1228224
gucuuuaggcaucuaagcu

SEQ ID NO: 1228226 - RNA, 19 nt, Artificial Sequence
  Description of Artificial Sequence: Synthetic oligonucleotide
  Sense strand starting at position 1379 of SEQ ID NO: 917347
uguaguaagaguugggaaa

SEQ ID NO: 1228227 - RNA, 19 nt, Artificial Sequence
  Description of Artificial Sequence: Synthetic oligonucleotide
  Antisense strand to SEQ ID NO: 1228226
uuucccaacucuuacuaca

SEQ ID NO: 1228228 - RNA, 19 nt, Artificial Sequence
  Description of Artificial Sequence: Synthetic oligonucleotide
  Sense strand starting at position 1380 of SEQ ID NO: 917347
guaguaagaguugggaaag

SEQ ID NO: 1228229 - RNA, 19 nt, Artificial Sequence
  Description of Artificial Sequence: Synthetic oligonucleotide
  Antisense strand to SEQ ID NO: 1228228
cuuucccaacucuuacuac

SEQ ID NO: 1228230 - RNA, 19 nt, Artificial Sequence
  Description of Artificial Sequence: Synthetic oligonucleotide
  Sense strand starting at position 1998 of SEQ ID NO: 917347
guaugggcgcccguagaua

SEQ ID NO: 1228231 - RNA, 19 nt, Artificial Sequence
  Description of Artificial Sequence: Synthetic oligonucleotide
  Antisense strand to SEQ ID NO: 1228230
uaucuacgggcgcccauac

SEQ ID NO: 1228232 - RNA, 19 nt, Artificial Sequence
  Description of Artificial Sequence: Synthetic oligonucleotide
  Sense strand starting at position 2017 of SEQ ID NO: 917347
ugccuuaaucgcucgccau

SEQ ID NO: 1228233 - RNA, 19 nt, Artificial Sequence
  Description of Artificial Sequence: Synthetic oligonucleotide
  Antisense strand to SEQ ID NO: 1228232
auggcgagcgauuaaggca

SEQ ID NO: 1228234 - RNA, 19 nt, Artificial Sequence
  Description of Artificial Sequence: Synthetic oligonucleotide
  Sense strand starting at position 2021 of SEQ ID NO: 917347
uuaaucgcucgccauuuau

SEQ ID NO: 1228235 - RNA, 19 nt, Artificial Sequence
  Description of Artificial Sequence: Synthetic oligonucleotide
  Antisense strand to SEQ ID NO: 1228234
auaaauggcgagcgauuaa

SEQ ID NO: 1228236 - RNA, 19 nt, Artificial Sequence
  Description of Artificial Sequence: Synthetic oligonucleotide
  Sense strand starting at position 2248 of SEQ ID NO: 917347
cgcaguguugaguuuacuu

SEQ ID NO: 1228237 - RNA, 19 nt, Artificial Sequence
  Description of Artificial Sequence: Synthetic oligonucleotide
  Antisense strand to SEQ ID NO: 1228236
aaguaaacucaacacugcg

SEQ ID NO: 1228238 - RNA, 19 nt, Artificial Sequence
  Description of Artificial Sequence: Synthetic oligonucleotide
  Sense strand starting at position 2807 of SEQ ID NO: 917347
cugaaccauugugugaaua

SEQ ID NO: 1228239 - RNA, 19 nt, Artificial Sequence
  Description of Artificial Sequence: Synthetic oligonucleotide
  Antisense strand to SEQ ID NO: 1228238
uauucacacaaugguucag

SEQ ID NO: 1228240 - RNA, 19 nt, Artificial Sequence
  Description of Artificial Sequence: Synthetic oligonucleotide
  Sense strand starting at position 2808 of SEQ ID NO: 917347
ugaaccauugugugaauaa

SEQ ID NO: 1228241 - RNA, 19 nt, Artificial Sequence
  Description of Artificial Sequence: Synthetic oligonucleotide
  Antisense strand to SEQ ID NO: 1228240
uuauucacacaaugguuca

SEQ ID NO: 1228242 - RNA, 19 nt, Artificial Sequence
  Description of Artificial Sequence: Synthetic oligonucleotide
  Sense strand starting at position 3053 of SEQ ID NO: 917347
ucgggauaguagucaagau

SEQ ID NO: 1228243 - RNA, 19 nt, Artificial Sequence
  Description of Artificial Sequence: Synthetic oligonucleotide
  Antisense strand to SEQ ID NO: 1228242
aucuugacuacuaucccga

SEQ ID NO: 1228244 - RNA, 19 nt, Artificial Sequence
  Description of Artificial Sequence: Synthetic oligonucleotide
  Sense strand starting at position 3054 of SEQ ID NO: 917347
cgggauaguagucaagaug

SEQ ID NO: 1228245 - RNA, 19 nt, Artificial Sequence
  Description of Artificial Sequence: Synthetic oligonucleotide
  Antisense strand to SEQ ID NO: 1228244
caucuugacuacuaucccg

SEQ ID NO: 1228246 - RNA, 19 nt, Artificial Sequence
  Description of Artificial Sequence: Synthetic oligonucleotide
  Sense strand starting at position 3087 of SEQ ID NO: 917347
ugaaauggugcuggaugaa

SEQ ID NO: 1228247 - RNA, 19 nt, Artificial Sequence
  Description of Artificial Sequence: Synthetic oligonucleotide
  Antisense strand to SEQ ID NO: 1228246
uucauccagcaccauuuca

SEQ ID NO: 1228248 - RNA, 19 nt, Artificial Sequence
  Description of Artificial Sequence: Synthetic oligonucleotide
  Sense strand starting at position 3090 of SEQ ID NO: 917347
aauggugcuggaugaaauu

SEQ ID NO: 1228249 - RNA, 19 nt, Artificial Sequence
  Description of Artificial Sequence: Synthetic oligonucleotide
  Antisense strand to SEQ ID NO: 1228248
aauuucauccagcaccauu

SEQ ID NO: 1228250 - RNA, 19 nt, Artificial Sequence
  Description of Artificial Sequence: Synthetic oligonucleotide
  Sense strand starting at position 3114 of SEQ ID NO: 917347
gguaauuagaccgauucca

SEQ ID NO: 1228251 - RNA, 19 nt, Artificial Sequence
  Description of Artificial Sequence: Synthetic oligonucleotide
  Antisense strand to SEQ ID NO: 1228250
uggaaucggucuaauuacc

SEQ ID NO: 1228252 - RNA, 19 nt, Artificial Sequence
  Description of Artificial Sequence: Synthetic oligonucleotide
  Sense strand starting at position 3163 of SEQ ID NO: 917347
uuuagacucucuuugaggu

SEQ ID NO: 1228253 - RNA, 19 nt, Artificial Sequence
  Description of Artificial Sequence: Synthetic oligonucleotide
  Antisense strand to SEQ ID NO: 1228252
accucaaagagagucuaaa

SEQ ID NO: 1228254 - RNA, 19 nt, Artificial Sequence
  Description of Artificial Sequence: Synthetic oligonucleotide
  Sense strand starting at position 3164 of SEQ ID NO: 917347
uuagacucucuuugaggua

SEQ ID NO: 1228255 - RNA, 19 nt, Artificial Sequence
  Description of Artificial Sequence: Synthetic oligonucleotide
  Antisense strand to SEQ ID NO: 1228254
uaccucaaagagagucuaa

SEQ ID NO: 1228256 - RNA, 19 nt, Artificial Sequence
  Description of Artificial Sequence: Synthetic oligonucleotide
  Sense strand starting at position 3176 of SEQ ID NO: 917347
ugagguacuguauggagau

SEQ ID NO: 1228257 - RNA, 19 nt, Artificial Sequence
  Description of Artificial Sequence: Synthetic oligonucleotide
  Antisense strand to SEQ ID NO: 1228256
aucuccauacaguaccuca

SEQ ID NO: 1228258 - RNA, 19 nt, Artificial Sequence
  Description of Artificial Sequence: Synthetic oligonucleotide
  Sense strand starting at position 3186 of SEQ ID NO: 917347
uauggagauugugcagaau

SEQ ID NO: 1228259 - RNA, 19 nt, Artificial Sequence
  Description of Artificial Sequence: Synthetic oligonucleotide
  Antisense strand to SEQ ID NO: 1228258
auucugcacaaucuccaua

SEQ ID NO: 1228260 - RNA, 19 nt, Artificial Sequence
  Description of Artificial Sequence: Synthetic oligonucleotide
  Sense strand starting at position 3207 of SEQ ID NO: 917347
ggguccuaggauugccaaa

SEQ ID NO: 1228261 - RNA, 19 nt, Artificial Sequence
  Description of Artificial Sequence: Synthetic oligonucleotide
  Antisense strand to SEQ ID NO: 1228260
uuuggcaauccuaggaccc

SEQ ID NO: 1228262 - RNA, 19 nt, Artificial Sequence
  Description of Artificial Sequence: Synthetic oligonucleotide
  Sense strand starting at position 3242 of SEQ ID NO: 917347
cguguaauggaggaguuua

SEQ ID NO: 1228263 - RNA, 19 nt, Artificial Sequence
  Description of Artificial Sequence: Synthetic oligonucleotide
  Antisense strand to SEQ ID NO: 1228262
uaaacuccuccauuacacg

SEQ ID NO: 1228264 - RNA, 19 nt, Artificial Sequence
  Description of Artificial Sequence: Synthetic oligonucleotide
  Sense strand starting at position 3252 of SEQ ID NO: 917347
aggaguuuauaucuugaua

SEQ ID NO: 1228265 - RNA, 19 nt, Artificial Sequence
  Description of Artificial Sequence: Synthetic oligonucleotide
  Antisense strand to SEQ ID NO: 1228264
uaucaagauauaaacuccu

SEQ ID NO: 1228266 - RNA, 19 nt, Artificial Sequence
  Description of Artificial Sequence: Synthetic oligonucleotide
  Sense strand starting at position 3255 of SEQ ID NO: 917347
aguuuauaucuugauacgu

SEQ ID NO: 1228267 - RNA, 19 nt, Artificial Sequence
  Description of Artificial Sequence: Synthetic oligonucleotide
  Antisense strand to SEQ ID NO: 1228266
acguaucaagauauaaacu

SEQ ID NO: 1228268 - RNA, 19 nt, Artificial Sequence
  Description of Artificial Sequence: Synthetic oligonucleotide
  Sense strand starting at position 3268 of SEQ ID NO: 917347
auacguuuccaguacaaau

SEQ ID NO: 1228269 - RNA, 19 nt, Artificial Sequence
  Description of Artificial Sequence: Synthetic oligonucleotide
  Antisense strand to SEQ ID NO: 1228268
auuuguacuggaaacguau

SEQ ID NO: 1228270 - RNA, 19 nt, Artificial Sequence
  Description of Artificial Sequence: Synthetic oligonucleotide
  Sense strand starting at position 3297 of SEQ ID NO: 917347
uuacguuaacgccaaauuu

SEQ ID NO: 1228271 - RNA, 19 nt, Artificial Sequence
  Description of Artificial Sequence: Synthetic oligonucleotide
  Antisense strand to SEQ ID NO: 1228270
aaauuuggcguuaacguaa

SEQ ID NO: 1228272 - RNA, 19 nt, Artificial Sequence
  Description of Artificial Sequence: Synthetic oligonucleotide
  Sense strand starting at position 3476 of SEQ ID NO: 917347
agguaauacgcagaaaguu

SEQ ID NO: 1228273 - RNA, 19 nt, Artificial Sequence
  Description of Artificial Sequence: Synthetic oligonucleotide
  Antisense strand to SEQ ID NO: 1228272
aacuuucugcguauuaccu

SEQ ID NO: 1228274 - RNA, 19 nt, Artificial Sequence
  Description of Artificial Sequence: Synthetic oligonucleotide
  Sense strand starting at position 3609 of SEQ ID NO: 917347
aaagucacguucuuaggaa

SEQ ID NO: 1228275 - RNA, 19 nt, Artificial Sequence
  Description of Artificial Sequence: Synthetic oligonucleotide
  Antisense strand to SEQ ID NO: 1228274
uuccuaagaacgugacuuu

SEQ ID NO: 1228276 - RNA, 19 nt, Artificial Sequence
  Description of Artificial Sequence: Synthetic oligonucleotide
  Sense strand starting at position 3624 of SEQ ID NO: 917347
ggaauuggccgucaauaac

SEQ ID NO: 1228277 - RNA, 19 nt, Artificial Sequence
  Description of Artificial Sequence: Synthetic oligonucleotide
  Antisense strand to SEQ ID NO: 1228276
guuauugacggccaauucc

SEQ ID NO: 1228278 - RNA, 19 nt, Artificial Sequence
  Description of Artificial Sequence: Synthetic oligonucleotide
  Sense strand starting at position 3747 of SEQ ID NO: 917347
gaagguagucuugagccua

SEQ ID NO: 1228279 - RNA, 19 nt, Artificial Sequence
  Description of Artificial Sequence: Synthetic oligonucleotide
  Antisense strand to SEQ ID NO: 1228278
uaggcucaagacuaccuuc

SEQ ID NO: 1228280 - RNA, 19 nt, Artificial Sequence
  Description of Artificial Sequence: Synthetic oligonucleotide
  Sense strand starting at position 3879 of SEQ ID NO: 917347
uucuuucgucagcugcaua

SEQ ID NO: 1228281 - RNA, 19 nt, Artificial Sequence
  Description of Artificial Sequence: Synthetic oligonucleotide
  Antisense strand to SEQ ID NO: 1228280
uaugcagcugacgaaagaa

SEQ ID NO: 1228282 - RNA, 19 nt, Artificial Sequence
  Description of Artificial Sequence: Synthetic oligonucleotide
  Sense strand starting at position 3935 of SEQ ID NO: 917347
ccaugugcucuggugcuua

SEQ ID NO: 1228283 - RNA, 19 nt, Artificial Sequence
  Description of Artificial Sequence: Synthetic oligonucleotide
  Antisense strand to SEQ ID NO: 1228282
uaagcaccagagcacaugg

SEQ ID NO: 1228284 - RNA, 19 nt, Artificial Sequence
  Description of Artificial Sequence: Synthetic oligonucleotide
  Sense strand starting at position 3935 of SEQ ID NO: 917348
ccaugugcucuggugcuua

SEQ ID NO: 1228285 - RNA, 19 nt, Artificial Sequence
  Description of Artificial Sequence: Synthetic oligonucleotide
  Antisense strand to SEQ ID NO: 1228284
uaagcaccagagcacaugg

SEQ ID NO: 1228286 - RNA, 19 nt, Artificial Sequence
  Description of Artificial Sequence: Synthetic oligonucleotide
  Sense strand starting at position 42 of SEQ ID NO: 917348
ugaggaacauuccaagaga

SEQ ID NO: 1228287 - RNA, 19 nt, Artificial Sequence
  Description of Artificial Sequence: Synthetic oligonucleotide
  Antisense strand to SEQ ID NO: 1228286
ucucuuggaauguuccuca

SEQ ID NO: 1228288 - RNA, 19 nt, Artificial Sequence
  Description of Artificial Sequence: Synthetic oligonucleotide
  Sense strand starting at position 92 of SEQ ID NO: 917348
ggagauacucaguguguca

SEQ ID NO: 1228289 - RNA, 19 nt, Artificial Sequence
  Description of Artificial Sequence: Synthetic oligonucleotide
  Antisense strand to SEQ ID NO: 1228288
ugacacacugaguaucucc

SEQ ID NO: 1228290 - RNA, 19 nt, Artificial Sequence
  Description of Artificial Sequence: Synthetic oligonucleotide
  Sense strand starting at position 175 of SEQ ID NO: 917348
gugugcuacaagggugaaa

SEQ ID NO: 1228291 - RNA, 19 nt, Artificial Sequence
  Description of Artificial Sequence: Synthetic oligonucleotide
  Antisense strand to SEQ ID NO: 1228290
uuucacccuuguagcacac

SEQ ID NO: 1228292 - RNA, 19 nt, Artificial Sequence
  Description of Artificial Sequence: Synthetic oligonucleotide
  Sense strand starting at position 188 of SEQ ID NO: 917348
gugaaagcucuuggguaaa

SEQ ID NO: 1228293 - RNA, 19 nt, Artificial Sequence
  Description of Artificial Sequence: Synthetic oligonucleotide
  Antisense strand to SEQ ID NO: 1228292
uuuacccaagagcuuucac

SEQ ID NO: 1228294 - RNA, 19 nt, Artificial Sequence
  Description of Artificial Sequence: Synthetic oligonucleotide
  Sense strand starting at position 190 of SEQ ID NO: 917348
gaaagcucuuggguaaauc

SEQ ID NO: 1228295 - RNA, 19 nt, Artificial Sequence
  Description of Artificial Sequence: Synthetic oligonucleotide
  Antisense strand to SEQ ID NO: 1228294
gauuuacccaagagcuuuc

SEQ ID NO: 1228296 - RNA, 19 nt, Artificial Sequence
  Description of Artificial Sequence: Synthetic oligonucleotide
  Sense strand starting at position 191 of SEQ ID NO: 917348
aaagcucuuggguaaaucu

SEQ ID NO: 1228297 - RNA, 19 nt, Artificial Sequence
  Description of Artificial Sequence: Synthetic oligonucleotide
  Antisense strand to SEQ ID NO: 1228296
agauuuacccaagagcuuu

SEQ ID NO: 1228298 - RNA, 19 nt, Artificial Sequence
  Description of Artificial Sequence: Synthetic oligonucleotide
  Sense strand starting at position 277 of SEQ ID NO: 917348
guggaaauaucauucccau

SEQ ID NO: 1228299 - RNA, 19 nt, Artificial Sequence
  Description of Artificial Sequence: Synthetic oligonucleotide
  Antisense strand to SEQ ID NO: 1228298
augggaaugauauuuccac

SEQ ID NO: 1228300 - RNA, 19 nt, Artificial Sequence
  Description of Artificial Sequence: Synthetic oligonucleotide
  Sense strand starting at position 328 of SEQ ID NO: 917348
aagagacugcuggguaauc

SEQ ID NO: 1228301 - RNA, 19 nt, Artificial Sequence
  Description of Artificial Sequence: Synthetic oligonucleotide
  Antisense strand to SEQ ID NO: 1228300
gauuacccagcagucucuu

SEQ ID NO: 1228302 - RNA, 19 nt, Artificial Sequence
  Description of Artificial Sequence: Synthetic oligonucleotide
  Sense strand starting at position 329 of SEQ ID NO: 917348
agagacugcuggguaauca

SEQ ID NO: 1228303 - RNA, 19 nt, Artificial Sequence
  Description of Artificial Sequence: Synthetic oligonucleotide
  Antisense strand to SEQ ID NO: 1228302
ugauuacccagcagucucu

SEQ ID NO: 1228304 - RNA, 19 nt, Artificial Sequence
  Description of Artificial Sequence: Synthetic oligonucleotide
  Sense strand starting at position 333 of SEQ ID NO: 917348
acugcuggguaaucaaaua

SEQ ID NO: 1228305 - RNA, 19 nt, Artificial Sequence
  Description of Artificial Sequence: Synthetic oligonucleotide
  Antisense strand to SEQ ID NO: 1228304
uauuugauuacccagcagu

SEQ ID NO: 1228306 - RNA, 19 nt, Artificial Sequence
  Description of Artificial Sequence: Synthetic oligonucleotide
  Sense strand starting at position 422 of SEQ ID NO: 917348
cagaaagcccgucaccuau

SEQ ID NO: 1228307 - RNA, 19 nt, Artificial Sequence
  Description of Artificial Sequence: Synthetic oligonucleotide
  Antisense strand to SEQ ID NO: 1228306
auaggugacgggcuuucug

SEQ ID NO: 1228308 - RNA, 19 nt, Artificial Sequence
  Description of Artificial Sequence: Synthetic oligonucleotide
  Sense strand starting at position 744 of SEQ ID NO: 917348
augcuuggaagugaaucau

SEQ ID NO: 1228309 - RNA, 19 nt, Artificial Sequence
  Description of Artificial Sequence: Synthetic oligonucleotide
  Antisense strand to SEQ ID NO: 1228308
augauucacuuccaagcau

SEQ ID NO: 1228310 - RNA, 19 nt, Artificial Sequence
  Description of Artificial Sequence: Synthetic oligonucleotide
  Sense strand starting at position 765 of SEQ ID NO: 917348
ugacccaaaugugauuuau

SEQ ID NO: 1228311 - RNA, 19 nt, Artificial Sequence
  Description of Artificial Sequence: Synthetic oligonucleotide
  Antisense strand to SEQ ID NO: 1228310
auaaaucacauuuggguca

SEQ ID NO: 1228312 - RNA, 19 nt, Artificial Sequence
  Description of Artificial Sequence: Synthetic oligonucleotide
  Sense strand starting at position 820 of SEQ ID NO: 917348
caggaaacgucacugaaga

SEQ ID NO: 1228313 - RNA, 19 nt, Artificial Sequence
  Description of Artificial Sequence: Synthetic oligonucleotide
  Antisense strand to SEQ ID NO: 1228312
ucuucagugacguuuccug

SEQ ID NO: 1228314 - RNA, 19 nt, Artificial Sequence
  Description of Artificial Sequence: Synthetic oligonucleotide
  Sense strand starting at position 927 of SEQ ID NO: 917348
uaugccaguuauguaaaga

SEQ ID NO: 1228315 - RNA, 19 nt, Artificial Sequence
  Description of Artificial Sequence: Synthetic oligonucleotide
  Antisense strand to SEQ ID NO: 1228314
ucuuuacauaacuggcaua

SEQ ID NO: 1228316 - RNA, 19 nt, Artificial Sequence
  Description of Artificial Sequence: Synthetic oligonucleotide
  Sense strand starting at position 1003 of SEQ ID NO: 917348
cccauuagagcucaauguu

SEQ ID NO: 1228317 - RNA, 19 nt, Artificial Sequence
  Description of Artificial Sequence: Synthetic oligonucleotide
  Antisense strand to SEQ ID NO: 1228316
aacauugagcucuaauggg

SEQ ID NO: 1228318 - RNA, 19 nt, Artificial Sequence
  Description of Artificial Sequence: Synthetic oligonucleotide
  Sense strand starting at position 1207 of SEQ ID NO: 917348
guugcagugacuggagaua

SEQ ID NO: 1228319 - RNA, 19 nt, Artificial Sequence
  Description of Artificial Sequence: Synthetic oligonucleotide
  Antisense strand to SEQ ID NO: 1228318
uaucuccagucacugcaac

SEQ ID NO: 1228320 - RNA, 19 nt, Artificial Sequence
  Description of Artificial Sequence: Synthetic oligonucleotide
  Sense strand starting at position 2034 of SEQ ID NO: 917348
agaguuucgcuguaacuaa

SEQ ID NO: 1228321 - RNA, 19 nt, Artificial Sequence
  Description of Artificial Sequence: Synthetic oligonucleotide
  Antisense strand to SEQ ID NO: 1228320
uuaguuacagcgaaacucu

SEQ ID NO: 1228322 - RNA, 19 nt, Artificial Sequence
  Description of Artificial Sequence: Synthetic oligonucleotide
  Sense strand starting at position 2048 of SEQ ID NO: 917348
acuaaagucgcuuacaguu

SEQ ID NO: 1228323 - RNA, 19 nt, Artificial Sequence
  Description of Artificial Sequence: Synthetic oligonucleotide
  Antisense strand to SEQ ID NO: 1228322
aacuguaagcgacuuuagu

SEQ ID NO: 1228324 - RNA, 19 nt, Artificial Sequence
  Description of Artificial Sequence: Synthetic oligonucleotide
  Sense strand starting at position 2250 of SEQ ID NO: 917348
ggauaaggauaggucguuu

SEQ ID NO: 1228325 - RNA, 19 nt, Artificial Sequence
  Description of Artificial Sequence: Synthetic oligonucleotide
  Antisense strand to SEQ ID NO: 1228324
aaacgaccuauccuuaucc

SEQ ID NO: 1228326 - RNA, 19 nt, Artificial Sequence
  Description of Artificial Sequence: Synthetic oligonucleotide
  Sense strand starting at position 2254 of SEQ ID NO: 917348
aaggauaggucguuuagaa

SEQ ID NO: 1228327 - RNA, 19 nt, Artificial Sequence
  Description of Artificial Sequence: Synthetic oligonucleotide
  Antisense strand to SEQ ID NO: 1228326
uucuaaacgaccuauccuu

SEQ ID NO: 1228328 - RNA, 19 nt, Artificial Sequence
  Description of Artificial Sequence: Synthetic oligonucleotide
  Sense strand starting at position 2352 of SEQ ID NO: 917348
ugggaagaguuaguuacaa

SEQ ID NO: 1228329 - RNA, 19 nt, Artificial Sequence
  Description of Artificial Sequence: Synthetic oligonucleotide
  Antisense strand to SEQ ID NO: 1228328
uuguaacuaacucuuccca

SEQ ID NO: 1228330 - RNA, 19 nt, Artificial Sequence
  Description of Artificial Sequence: Synthetic oligonucleotide
  Sense strand starting at position 2661 of SEQ ID NO: 917348
accagagugcugggauaac

SEQ ID NO: 1228331 - RNA, 19 nt, Artificial Sequence
  Description of Artificial Sequence: Synthetic oligonucleotide
  Antisense strand to SEQ ID NO: 1228330
guuaucccagcacucuggu

SEQ ID NO: 1228332 - RNA, 19 nt, Artificial Sequence
  Description of Artificial Sequence: Synthetic oligonucleotide
  Sense strand starting at position 2839 of SEQ ID NO: 917348
augcuuacucuccauguua

SEQ ID NO: 1228333 - RNA, 19 nt, Artificial Sequence
  Description of Artificial Sequence: Synthetic oligonucleotide
  Antisense strand to SEQ ID NO: 1228332
uaacauggagaguaagcau

SEQ ID NO: 1228334 - RNA, 19 nt, Artificial Sequence
  Description of Artificial Sequence: Synthetic oligonucleotide
  Sense strand starting at position 2998 of SEQ ID NO: 917348
gaaauacuagguuggcuua

SEQ ID NO: 1228335 - RNA, 19 nt, Artificial Sequence
  Description of Artificial Sequence: Synthetic oligonucleotide
  Antisense strand to SEQ ID NO: 1228334
uaagccaaccuaguauuuc

SEQ ID NO: 1228336 - RNA, 19 nt, Artificial Sequence
  Description of Artificial Sequence: Synthetic oligonucleotide
  Sense strand starting at position 3334 of SEQ ID NO: 917348
uaggguaggcccuauucua

SEQ ID NO: 1228337 - RNA, 19 nt, Artificial Sequence
  Description of Artificial Sequence: Synthetic oligonucleotide
  Antisense strand to SEQ ID NO: 1228336
uagaauagggccuacccua

SEQ ID NO: 1228338 - RNA, 19 nt, Artificial Sequence
  Description of Artificial Sequence: Synthetic oligonucleotide
  Sense strand starting at position 3371 of SEQ ID NO: 917348
ucgcaagaaguagagauua

SEQ ID NO: 1228339 - RNA, 19 nt, Artificial Sequence
  Description of Artificial Sequence: Synthetic oligonucleotide
  Antisense strand to SEQ ID NO: 1228338
uaaucucuacuucuugcga

SEQ ID NO: 1228340 - RNA, 19 nt, Artificial Sequence
  Description of Artificial Sequence: Synthetic oligonucleotide
  Sense strand starting at position 3390 of SEQ ID NO: 917348
gaacccagacuguguucua

SEQ ID NO: 1228341 - RNA, 19 nt, Artificial Sequence
  Description of Artificial Sequence: Synthetic oligonucleotide
  Antisense strand to SEQ ID NO: 1228340
uagaacacagucuggguuc

SEQ ID NO: 1228342 - RNA, 19 nt, Artificial Sequence
  Description of Artificial Sequence: Synthetic oligonucleotide
  Sense strand starting at position 3399 of SEQ ID NO: 917348
cuguguucuauuggaagac

SEQ ID NO: 1228343 - RNA, 19 nt, Artificial Sequence
  Description of Artificial Sequence: Synthetic oligonucleotide
  Antisense strand to SEQ ID NO: 1228342
gucuuccaauagaacacag

SEQ ID NO: 1228344 - RNA, 19 nt, Artificial Sequence
  Description of Artificial Sequence: Synthetic oligonucleotide
  Sense strand starting at position 3403 of SEQ ID NO: 917348
guucuauuggaagacugua

SEQ ID NO: 1228345 - RNA, 19 nt, Artificial Sequence
  Description of Artificial Sequence: Synthetic oligonucleotide
  Antisense strand to SEQ ID NO: 1228344
uacagucuuccaauagaac

SEQ ID NO: 1228346 - RNA, 19 nt, Artificial Sequence
  Description of Artificial Sequence: Synthetic oligonucleotide
  Sense strand starting at position 3573 of SEQ ID NO: 917348
uuguuauggcuugauacuu

SEQ ID NO: 1228347 - RNA, 19 nt, Artificial Sequence
  Description of Artificial Sequence: Synthetic oligonucleotide
  Antisense strand to SEQ ID NO: 1228346
aaguaucaagccauaacaa

SEQ ID NO: 1228348 - RNA, 19 nt, Artificial Sequence
  Description of Artificial Sequence: Synthetic oligonucleotide
  Sense strand starting at position 3617 of SEQ ID NO: 917348
uagccuuaucuuggugaaa

SEQ ID NO: 1228349 - RNA, 19 nt, Artificial Sequence
  Description of Artificial Sequence: Synthetic oligonucleotide
  Antisense strand to SEQ ID NO: 1228348
uuucaccaagauaaggcua

SEQ ID NO: 1228350 - RNA, 19 nt, Artificial Sequence
  Description of Artificial Sequence: Synthetic oligonucleotide
  Sense strand starting at position 3618 of SEQ ID NO: 917348
agccuuaucuuggugaaag

SEQ ID NO: 1228351 - RNA, 19 nt, Artificial Sequence
  Description of Artificial Sequence: Synthetic oligonucleotide
  Antisense strand to SEQ ID NO: 1228350
cuuucaccaagauaaggcu

SEQ ID NO: 1228352 - RNA, 19 nt, Artificial Sequence
  Description of Artificial Sequence: Synthetic oligonucleotide
  Sense strand starting at position 3683 of SEQ ID NO: 917348
caucauguugcuggagauu

SEQ ID NO: 1228353 - RNA, 19 nt, Artificial Sequence
  Description of Artificial Sequence: Synthetic oligonucleotide
  Antisense strand to SEQ ID NO: 1228352
aaucuccagcaacaugaug

SEQ ID NO: 1228354 - RNA, 19 nt, Artificial Sequence
  Description of Artificial Sequence: Synthetic oligonucleotide
  Sense strand starting at position 3686 of SEQ ID NO: 917348
cauguugcuggagauucua

SEQ ID NO: 1228355 - RNA, 19 nt, Artificial Sequence
  Description of Artificial Sequence: Synthetic oligonucleotide
  Antisense strand to SEQ ID NO: 1228354
uagaaucuccagcaacaug

SEQ ID NO: 1228356 - RNA, 19 nt, Artificial Sequence
  Description of Artificial Sequence: Synthetic oligonucleotide
  Sense strand starting at position 3694 of SEQ ID NO: 917348
uggagauucuaguuagcac

SEQ ID NO: 1228357 - RNA, 19 nt, Artificial Sequence
  Description of Artificial Sequence: Synthetic oligonucleotide
  Antisense strand to SEQ ID NO: 1228356
gugcuaacuagaaucucca

SEQ ID NO: 1228358 - RNA, 19 nt, Artificial Sequence
  Description of Artificial Sequence: Synthetic oligonucleotide
  Sense strand starting at position 3695 of SEQ ID NO: 917348
ggagauucuaguuagcaca

SEQ ID NO: 1228359 - RNA, 19 nt, Artificial Sequence
  Description of Artificial Sequence: Synthetic oligonucleotide
  Antisense strand to SEQ ID NO: 1228358
ugugcuaacuagaaucucc

SEQ ID NO: 1228360 - RNA, 19 nt, Artificial Sequence
  Description of Artificial Sequence: Synthetic oligonucleotide
  Sense strand starting at position 3758 of SEQ ID NO: 917348
ggaauaaguaaccgucuuu

SEQ ID NO: 1228361 - RNA, 19 nt, Artificial Sequence
  Description of Artificial Sequence: Synthetic oligonucleotide
  Antisense strand to SEQ ID NO: 1228360
aaagacgguuacuuauucc

SEQ ID NO: 1228362 - RNA, 19 nt, Artificial Sequence
  Description of Artificial Sequence: Synthetic oligonucleotide
  Sense strand starting at position 3822 of SEQ ID NO: 917348
gaaauaaguuuagcaaggu

SEQ ID NO: 1228363 - RNA, 19 nt, Artificial Sequence
  Description of Artificial Sequence: Synthetic oligonucleotide
  Antisense strand to SEQ ID NO: 1228362
accuugcuaaacuuauuuc

SEQ ID NO: 1228364 - RNA, 19 nt, Artificial Sequence
  Description of Artificial Sequence: Synthetic oligonucleotide
  Sense strand starting at position 3838 of SEQ ID NO: 917349
ggucguaggauucaagguu

SEQ ID NO: 1228365 - RNA, 19 nt, Artificial Sequence
  Description of Artificial Sequence: Synthetic oligonucleotide
  Antisense strand to SEQ ID NO: 1228364
aaccuugaauccuacgacc

SEQ ID NO: 1228366 - RNA, 19 nt, Artificial Sequence
  Description of Artificial Sequence: Synthetic oligonucleotide
  Sense strand starting at position 19 of SEQ ID NO: 917349
cuuacuagacuaugguaua

SEQ ID NO: 1228367 - RNA, 19 nt, Artificial Sequence
  Description of Artificial Sequence: Synthetic oligonucleotide
  Antisense strand to SEQ ID NO: 1228366
uauaccauagucuaguaag

SEQ ID NO: 1228368 - RNA, 19 nt, Artificial Sequence
  Description of Artificial Sequence: Synthetic oligonucleotide
  Sense strand starting at position 22 of SEQ ID NO: 917349
acuagacuaugguauaaug

SEQ ID NO: 1228369 - RNA, 19 nt, Artificial Sequence
  Description of Artificial Sequence: Synthetic oligonucleotide
  Antisense strand to SEQ ID NO: 1228368
cauuauaccauagucuagu

SEQ ID NO: 1228370 - RNA, 19 nt, Artificial Sequence
  Description of Artificial Sequence: Synthetic oligonucleotide
  Sense strand starting at position 115 of SEQ ID NO: 917349
auaauugugugacuugcuu

SEQ ID NO: 1228371 - RNA, 19 nt, Artificial Sequence
  Description of Artificial Sequence: Synthetic oligonucleotide
  Antisense strand to SEQ ID NO: 1228370
aagcaagucacacaauuau

SEQ ID NO: 1228372 - RNA, 19 nt, Artificial Sequence
  Description of Artificial Sequence: Synthetic oligonucleotide
  Sense strand starting at position 158 of SEQ ID NO: 917349
ccacaagagcuccaaggua

SEQ ID NO: 1228373 - RNA, 19 nt, Artificial Sequence
  Description of Artificial Sequence: Synthetic oligonucleotide
  Antisense strand to SEQ ID NO: 1228372
uaccuuggagcucuugugg

SEQ ID NO: 1228374 - RNA, 19 nt, Artificial Sequence
  Description of Artificial Sequence: Synthetic oligonucleotide
  Sense strand starting at position 227 of SEQ ID NO: 917349
ugguccaagucuccaauau

SEQ ID NO: 1228375 - RNA, 19 nt, Artificial Sequence
  Description of Artificial Sequence: Synthetic oligonucleotide
  Antisense strand to SEQ ID NO: 1228374
auauuggagacuuggacca

SEQ ID NO: 1228376 - RNA, 19 nt, Artificial Sequence
  Description of Artificial Sequence: Synthetic oligonucleotide
  Sense strand starting at position 228 of SEQ ID NO: 917349
gguccaagucuccaauauc

SEQ ID NO: 1228377 - RNA, 19 nt, Artificial Sequence
  Description of Artificial Sequence: Synthetic oligonucleotide
  Antisense strand to SEQ ID NO: 1228376
gauauuggagacuuggacc

SEQ ID NO: 1228378 - RNA, 19 nt, Artificial Sequence
  Description of Artificial Sequence: Synthetic oligonucleotide
  Sense strand starting at position 297 of SEQ ID NO: 917349
gucaguucucaccaacaga

SEQ ID NO: 1228379 - RNA, 19 nt, Artificial Sequence
  Description of Artificial Sequence: Synthetic oligonucleotide
  Antisense strand to SEQ ID NO: 1228378
ucuguuggugagaacugac

SEQ ID NO: 1228380 - RNA, 19 nt, Artificial Sequence
  Description of Artificial Sequence: Synthetic oligonucleotide
  Sense strand starting at position 387 of SEQ ID NO: 917349
gucaaagucccacgaucua

SEQ ID NO: 1228381 - RNA, 19 nt, Artificial Sequence
  Description of Artificial Sequence: Synthetic oligonucleotide
  Antisense strand to SEQ ID NO: 1228380
uagaucgugggacuuugac

SEQ ID NO: 1228382 - RNA, 19 nt, Artificial Sequence
  Description of Artificial Sequence: Synthetic oligonucleotide
  Sense strand starting at position 492 of SEQ ID NO: 917349
ucugauguauagcuucuaa

SEQ ID NO: 1228383 - RNA, 19 nt, Artificial Sequence
  Description of Artificial Sequence: Synthetic oligonucleotide
  Antisense strand to SEQ ID NO: 1228382
uuagaagcuauacaucaga

SEQ ID NO: 1228384 - RNA, 19 nt, Artificial Sequence
  Description of Artificial Sequence: Synthetic oligonucleotide
  Sense strand starting at position 594 of SEQ ID NO: 917349
ccuaaagucuucgcucaua

SEQ ID NO: 1228385 - RNA, 19 nt, Artificial Sequence
  Description of Artificial Sequence: Synthetic oligonucleotide
  Antisense strand to SEQ ID NO: 1228384
uaugagcgaagacuuuagg

SEQ ID NO: 1228386 - RNA, 19 nt, Artificial Sequence
  Description of Artificial Sequence: Synthetic oligonucleotide
  Sense strand starting at position 597 of SEQ ID NO: 917349
aaagucuucgcucauaugu

SEQ ID NO: 1228387 - RNA, 19 nt, Artificial Sequence
  Description of Artificial Sequence: Synthetic oligonucleotide
  Antisense strand to SEQ ID NO: 1228386
acauaugagcgaagacuuu

SEQ ID NO: 1228388 - RNA, 19 nt, Artificial Sequence
  Description of Artificial Sequence: Synthetic oligonucleotide
  Sense strand starting at position 1078 of SEQ ID NO: 917349
cuuauugucugucuuccua

SEQ ID NO: 1228389 - RNA, 19 nt, Artificial Sequence
  Description of Artificial Sequence: Synthetic oligonucleotide
  Antisense strand to SEQ ID NO: 1228388
uaggaagacagacaauaag

SEQ ID NO: 1228390 - RNA, 19 nt, Artificial Sequence
  Description of Artificial Sequence: Synthetic oligonucleotide
  Sense strand starting at position 1082 of SEQ ID NO: 917349
uugucugucuuccuacaca

SEQ ID NO: 1228391 - RNA, 19 nt, Artificial Sequence
  Description of Artificial Sequence: Synthetic oligonucleotide
  Antisense strand to SEQ ID NO: 1228390
uguguaggaagacagacaa

SEQ ID NO: 1228392 - RNA, 19 nt, Artificial Sequence
  Description of Artificial Sequence: Synthetic oligonucleotide
  Sense strand starting at position 1150 of SEQ ID NO: 917349
gcuauauacccagauucug

SEQ ID NO: 1228393 - RNA, 19 nt, Artificial Sequence
  Description of Artificial Sequence: Synthetic oligonucleotide
  Antisense strand to SEQ ID NO: 1228392
cagaaucuggguauauagc

SEQ ID NO: 1228394 - RNA, 19 nt, Artificial Sequence
  Description of Artificial Sequence: Synthetic oligonucleotide
  Sense strand starting at position 1166 of SEQ ID NO: 917349
cugguacauagucggaauu

SEQ ID NO: 1228395 - RNA, 19 nt, Artificial Sequence
  Description of Artificial Sequence: Synthetic oligonucleotide
  Antisense strand to SEQ ID NO: 1228394
aauuccgacuauguaccag

SEQ ID NO: 1228396 - RNA, 19 nt, Artificial Sequence
  Description of Artificial Sequence: Synthetic oligonucleotide
  Sense strand starting at position 1404 of SEQ ID NO: 917349
gucucacuuugcuuugaga

SEQ ID NO: 1228397 - RNA, 19 nt, Artificial Sequence
  Description of Artificial Sequence: Synthetic oligonucleotide
  Antisense strand to SEQ ID NO: 1228396
ucucaaagcaaagugagac

SEQ ID NO: 1228398 - RNA, 19 nt, Artificial Sequence
  Description of Artificial Sequence: Synthetic oligonucleotide
  Sense strand starting at position 1406 of SEQ ID NO: 917349
cucacuuugcuuugagaug

SEQ ID NO: 1228399 - RNA, 19 nt, Artificial Sequence
  Description of Artificial Sequence: Synthetic oligonucleotide
  Antisense strand to SEQ ID NO: 1228398
caucucaaagcaaagugag

SEQ ID NO: 1228400 - RNA, 19 nt, Artificial Sequence
  Description of Artificial Sequence: Synthetic oligonucleotide
  Sense strand starting at position 1699 of SEQ ID NO: 917349
ggaagaaucugggcgucga

SEQ ID NO: 1228401 - RNA, 19 nt, Artificial Sequence
  Description of Artificial Sequence: Synthetic oligonucleotide
  Antisense strand to SEQ ID NO: 1228400
ucgacgcccagauucuucc

SEQ ID NO: 1228402 - RNA, 19 nt, Artificial Sequence
  Description of Artificial Sequence: Synthetic oligonucleotide
  Sense strand starting at position 1700 of SEQ ID NO: 917349
gaagaaucugggcgucgaa

SEQ ID NO: 1228403 - RNA, 19 nt, Artificial Sequence
  Description of Artificial Sequence: Synthetic oligonucleotide
  Antisense strand to SEQ ID NO: 1228402
uucgacgcccagauucuuc

SEQ ID NO: 1228404 - RNA, 19 nt, Artificial Sequence
  Description of Artificial Sequence: Synthetic oligonucleotide
  Sense strand starting at position 1828 of SEQ ID NO: 917349
ggcagcauugcccagaaca

SEQ ID NO: 1228405 - RNA, 19 nt, Artificial Sequence
  Description of Artificial Sequence: Synthetic oligonucleotide
  Antisense strand to SEQ ID NO: 1228404
uguucugggcaaugcugcc

SEQ ID NO: 1228406 - RNA, 19 nt, Artificial Sequence
  Description of Artificial Sequence: Synthetic oligonucleotide
  Sense strand starting at position 2014 of SEQ ID NO: 917349
cuuccuuuaccgugaacua

SEQ ID NO: 1228407 - RNA, 19 nt, Artificial Sequence
  Description of Artificial Sequence: Synthetic oligonucleotide
  Antisense strand to SEQ ID NO: 1228406
uaguucacgguaaaggaag

SEQ ID NO: 1228408 - RNA, 19 nt, Artificial Sequence
  Description of Artificial Sequence: Synthetic oligonucleotide
  Sense strand starting at position 2461 of SEQ ID NO: 917349
gcgugguuuggcuucguga

SEQ ID NO: 1228409 - RNA, 19 nt, Artificial Sequence
  Description of Artificial Sequence: Synthetic oligonucleotide
  Antisense strand to SEQ ID NO: 1228408
ucacgaagccaaaccacgc

SEQ ID NO: 1228410 - RNA, 19 nt, Artificial Sequence
  Description of Artificial Sequence: Synthetic oligonucleotide
  Sense strand starting at position 2462 of SEQ ID NO: 917349
cgugguuuggcuucgugau

SEQ ID NO: 1228411 - RNA, 19 nt, Artificial Sequence
  Description of Artificial Sequence: Synthetic oligonucleotide
  Antisense strand to SEQ ID NO: 1228410
aucacgaagccaaaccacg

SEQ ID NO: 1228412 - RNA, 19 nt, Artificial Sequence
  Description of Artificial Sequence: Synthetic oligonucleotide
  Sense strand starting at position 2469 of SEQ ID NO: 917349
uggcuucgugaugauaaua

SEQ ID NO: 1228413 - RNA, 19 nt, Artificial Sequence
  Description of Artificial Sequence: Synthetic oligonucleotide
  Antisense strand to SEQ ID NO: 1228412
uauuaucaucacgaagcca

SEQ ID NO: 1228414 - RNA, 19 nt, Artificial Sequence
  Description of Artificial Sequence: Synthetic oligonucleotide
  Sense strand starting at position 2544 of SEQ ID NO: 917349
ucagucauuuaagccguau

SEQ ID NO: 1228415 - RNA, 19 nt, Artificial Sequence
  Description of Artificial Sequence: Synthetic oligonucleotide
  Antisense strand to SEQ ID NO: 1228414
auacggcuuaaaugacuga

SEQ ID NO: 1228416 - RNA, 19 nt, Artificial Sequence
  Description of Artificial Sequence: Synthetic oligonucleotide
  Sense strand starting at position 2691 of SEQ ID NO: 917349
uugccuucugauuacaaga

SEQ ID NO: 1228417 - RNA, 19 nt, Artificial Sequence
  Description of Artificial Sequence: Synthetic oligonucleotide
  Antisense strand to SEQ ID NO: 1228416
ucuuguaaucagaaggcaa

SEQ ID NO: 1228418 - RNA, 19 nt, Artificial Sequence
  Description of Artificial Sequence: Synthetic oligonucleotide
  Sense strand starting at position 2702 of SEQ ID NO: 917349
uuacaagaaccuugcagau

SEQ ID NO: 1228419 - RNA, 19 nt, Artificial Sequence
  Description of Artificial Sequence: Synthetic oligonucleotide
  Antisense strand to SEQ ID NO: 1228418
aucugcaagguucuuguaa

SEQ ID NO: 1228420 - RNA, 19 nt, Artificial Sequence
  Description of Artificial Sequence: Synthetic oligonucleotide
  Sense strand starting at position 2805 of SEQ ID NO: 917349
gucugaguugcugcgcaau

SEQ ID NO: 1228421 - RNA, 19 nt, Artificial Sequence
  Description of Artificial Sequence: Synthetic oligonucleotide
  Antisense strand to SEQ ID NO: 1228420
auugcgcagcaacucagac

SEQ ID NO: 1228422 - RNA, 19 nt, Artificial Sequence
  Description of Artificial Sequence: Synthetic oligonucleotide
  Sense strand starting at position 2854 of SEQ ID NO: 917349
cugguugcauuccuaaaca

SEQ ID NO: 1228423 - RNA, 19 nt, Artificial Sequence
  Description of Artificial Sequence: Synthetic oligonucleotide
  Antisense strand to SEQ ID NO: 1228422
uguuuaggaaugcaaccag

SEQ ID NO: 1228424 - RNA, 19 nt, Artificial Sequence
  Description of Artificial Sequence: Synthetic oligonucleotide
  Sense strand starting at position 3020 of SEQ ID NO: 917349
ugaauaauuugucgacaua

SEQ ID NO: 1228425 - RNA, 19 nt, Artificial Sequence
  Description of Artificial Sequence: Synthetic oligonucleotide
  Antisense strand to SEQ ID NO: 1228424
uaugucgacaaauuauuca

SEQ ID NO: 1228426 - RNA, 19 nt, Artificial Sequence
  Description of Artificial Sequence: Synthetic oligonucleotide
  Sense strand starting at position 3031 of SEQ ID NO: 917349
ucgacauaaucugucucca

SEQ ID NO: 1228427 - RNA, 19 nt, Artificial Sequence
  Description of Artificial Sequence: Synthetic oligonucleotide
  Antisense strand to SEQ ID NO: 1228426
uggagacagauuaugucga

SEQ ID NO: 1228428 - RNA, 19 nt, Artificial Sequence
  Description of Artificial Sequence: Synthetic oligonucleotide
  Sense strand starting at position 3055 of SEQ ID NO: 917349
gcacuauggucuucuaccu

SEQ ID NO: 1228429 - RNA, 19 nt, Artificial Sequence
  Description of Artificial Sequence: Synthetic oligonucleotide
  Antisense strand to SEQ ID NO: 1228428
agguagaagaccauagugc

SEQ ID NO: 1228430 - RNA, 19 nt, Artificial Sequence
  Description of Artificial Sequence: Synthetic oligonucleotide
  Sense strand starting at position 3060 of SEQ ID NO: 917349
auggucuucuaccugaaca

SEQ ID NO: 1228431 - RNA, 19 nt, Artificial Sequence
  Description of Artificial Sequence: Synthetic oligonucleotide
  Antisense strand to SEQ ID NO: 1228430
uguucagguagaagaccau

SEQ ID NO: 1228432 - RNA, 19 nt, Artificial Sequence
  Description of Artificial Sequence: Synthetic oligonucleotide
  Sense strand starting at position 3080 of SEQ ID NO: 917349
gcaacaggcacuugguaua

SEQ ID NO: 1228433 - RNA, 19 nt, Artificial Sequence
  Description of Artificial Sequence: Synthetic oligonucleotide
  Antisense strand to SEQ ID NO: 1228432
uauaccaagugccuguugc

SEQ ID NO: 1228434 - RNA, 19 nt, Artificial Sequence
  Description of Artificial Sequence: Synthetic oligonucleotide
  Sense strand starting at position 3087 of SEQ ID NO: 917349
gcacuugguauauacgaaa

SEQ ID NO: 1228435 - RNA, 19 nt, Artificial Sequence
  Description of Artificial Sequence: Synthetic oligonucleotide
  Antisense strand to SEQ ID NO: 1228434
uuucguauauaccaagugc

SEQ ID NO: 1228436 - RNA, 19 nt, Artificial Sequence
  Description of Artificial Sequence: Synthetic oligonucleotide
  Sense strand starting at position 3104 of SEQ ID NO: 917349
aacgaaugcuucucggauu

SEQ ID NO: 1228437 - RNA, 19 nt, Artificial Sequence
  Description of Artificial Sequence: Synthetic oligonucleotide
  Antisense strand to SEQ ID NO: 1228436
aauccgagaagcauucguu

SEQ ID NO: 1228438 - RNA, 19 nt, Artificial Sequence
  Description of Artificial Sequence: Synthetic oligonucleotide
  Sense strand starting at position 3115 of SEQ ID NO: 917349
cucggauuccggcaugcau

SEQ ID NO: 1228439 - RNA, 19 nt, Artificial Sequence
  Description of Artificial Sequence: Synthetic oligonucleotide
  Antisense strand to SEQ ID NO: 1228438
augcaugccggaauccgag

SEQ ID NO: 1228440 - RNA, 19 nt, Artificial Sequence
  Description of Artificial Sequence: Synthetic oligonucleotide
  Sense strand starting at position 3252 of SEQ ID NO: 917349
cccggaggcuauguuucua

SEQ ID NO: 1228441 - RNA, 19 nt, Artificial Sequence
  Description of Artificial Sequence: Synthetic oligonucleotide
  Antisense strand to SEQ ID NO: 1228440
uagaaacauagccuccggg

SEQ ID NO: 1228442 - RNA, 19 nt, Artificial Sequence
  Description of Artificial Sequence: Synthetic oligonucleotide
  Sense strand starting at position 3595 of SEQ ID NO: 917349
acgagaguuugucucaaua

SEQ ID NO: 1228443 - RNA, 19 nt, Artificial Sequence
  Description of Artificial Sequence: Synthetic oligonucleotide
  Antisense strand to SEQ ID NO: 1228442
uauugagacaaacucucgu

SEQ ID NO: 1228444 - RNA, 19 nt, Artificial Sequence
  Description of Artificial Sequence: Synthetic oligonucleotide
  Sense strand starting at position 3648 of SEQ ID NO: 917350
cuuuccuuccuguaggaga

SEQ ID NO: 1228445 - RNA, 19 nt, Artificial Sequence
  Description of Artificial Sequence: Synthetic oligonucleotide
  Antisense strand to SEQ ID NO: 1228444
ucuccuacaggaaggaaag

SEQ ID NO: 1228446 - RNA, 19 nt, Artificial Sequence
  Description of Artificial Sequence: Synthetic oligonucleotide
  Sense strand starting at position 3 of SEQ ID NO: 917350
aggacaggcuuucuaagau

SEQ ID NO: 1228447 - RNA, 19 nt, Artificial Sequence
  Description of Artificial Sequence: Synthetic oligonucleotide
  Antisense strand to SEQ ID NO: 1228446
aucuuagaaagccuguccu

SEQ ID NO: 1228448 - RNA, 19 nt, Artificial Sequence
  Description of Artificial Sequence: Synthetic oligonucleotide
  Sense strand starting at position 102 of SEQ ID NO: 917350
agugcaucccaugaaguaa

SEQ ID NO: 1228449 - RNA, 19 nt, Artificial Sequence
  Description of Artificial Sequence: Synthetic oligonucleotide
  Antisense strand to SEQ ID NO: 1228448
uuacuucaugggaugcacu

SEQ ID NO: 1228450 - RNA, 19 nt, Artificial Sequence
  Description of Artificial Sequence: Synthetic oligonucleotide
  Sense strand starting at position 119 of SEQ ID NO: 917350
aaggguaucuuucucugaa

SEQ ID NO: 1228451 - RNA, 19 nt, Artificial Sequence
  Description of Artificial Sequence: Synthetic oligonucleotide
  Antisense strand to SEQ ID NO: 1228450
uucagagaaagauacccuu

SEQ ID NO: 1228452 - RNA, 19 nt, Artificial Sequence
  Description of Artificial Sequence: Synthetic oligonucleotide
  Sense strand starting at position 120 of SEQ ID NO: 917350
aggguaucuuucucugaaa

SEQ ID NO: 1228453 - RNA, 19 nt, Artificial Sequence
  Description of Artificial Sequence: Synthetic oligonucleotide
  Antisense strand to SEQ ID NO: 1228452
uuucagagaaagauacccu

SEQ ID NO: 1228454 - RNA, 19 nt, Artificial Sequence
  Description of Artificial Sequence: Synthetic oligonucleotide
  Sense strand starting at position 121 of SEQ ID NO: 917350
ggguaucuuucucugaaac

SEQ ID NO: 1228455 - RNA, 19 nt, Artificial Sequence
  Description of Artificial Sequence: Synthetic oligonucleotide
  Antisense strand to SEQ ID NO: 1228454
guuucagagaaagauaccc

SEQ ID NO: 1228456 - RNA, 19 nt, Artificial Sequence
  Description of Artificial Sequence: Synthetic oligonucleotide
  Sense strand starting at position 122 of SEQ ID NO: 917350
gguaucuuucucugaaacu

SEQ ID NO: 1228457 - RNA, 19 nt, Artificial Sequence
  Description of Artificial Sequence: Synthetic oligonucleotide
  Antisense strand to SEQ ID NO: 1228456
aguuucagagaaagauacc

SEQ ID NO: 1228458 - RNA, 19 nt, Artificial Sequence
  Description of Artificial Sequence: Synthetic oligonucleotide
  Sense strand starting at position 148 of SEQ ID NO: 917350
aguuauuuagggugguagu

SEQ ID NO: 1228459 - RNA, 19 nt, Artificial Sequence
  Description of Artificial Sequence: Synthetic oligonucleotide
  Antisense strand to SEQ ID NO: 1228458
acuaccacccuaaauaacu

SEQ ID NO: 1228460 - RNA, 19 nt, Artificial Sequence
  Description of Artificial Sequence: Synthetic oligonucleotide
  Sense strand starting at position 149 of SEQ ID NO: 917350
guuauuuagggugguaguu

SEQ ID NO: 1228461 - RNA, 19 nt, Artificial Sequence
  Description of Artificial Sequence: Synthetic oligonucleotide
  Antisense strand to SEQ ID NO: 1228460
aacuaccacccuaaauaac

SEQ ID NO: 1228462 - RNA, 19 nt, Artificial Sequence
  Description of Artificial Sequence: Synthetic oligonucleotide
  Sense strand starting at position 161 of SEQ ID NO: 917350
gguaguuguguguuuguuu

SEQ ID NO: 1228463 - RNA, 19 nt, Artificial Sequence
  Description of Artificial Sequence: Synthetic oligonucleotide
  Antisense strand to SEQ ID NO: 1228462
aaacaaacacacaacuacc

SEQ ID NO: 1228464 - RNA, 19 nt, Artificial Sequence
  Description of Artificial Sequence: Synthetic oligonucleotide
  Sense strand starting at position 318 of SEQ ID NO: 917350
aacgauggcggguaaugau

SEQ ID NO: 1228465 - RNA, 19 nt, Artificial Sequence
  Description of Artificial Sequence: Synthetic oligonucleotide
  Antisense strand to SEQ ID NO: 1228464
aucauuacccgccaucguu

SEQ ID NO: 1228466 - RNA, 19 nt, Artificial Sequence
  Description of Artificial Sequence: Synthetic oligonucleotide
  Sense strand starting at position 325 of SEQ ID NO: 917350
gcggguaaugauuaaagag

SEQ ID NO: 1228467 - RNA, 19 nt, Artificial Sequence
  Description of Artificial Sequence: Synthetic oligonucleotide
  Antisense strand to SEQ ID NO: 1228466
cucuuuaaucauuacccgc

SEQ ID NO: 1228468 - RNA, 19 nt, Artificial Sequence
  Description of Artificial Sequence: Synthetic oligonucleotide
  Sense strand starting at position 400 of SEQ ID NO: 917350
ugaagaaguugauuggagu

SEQ ID NO: 1228469 - RNA, 19 nt, Artificial Sequence
  Description of Artificial Sequence: Synthetic oligonucleotide
  Antisense strand to SEQ ID NO: 1228468
acuccaaucaacuucuuca

SEQ ID NO: 1228470 - RNA, 19 nt, Artificial Sequence
  Description of Artificial Sequence: Synthetic oligonucleotide
  Sense strand starting at position 401 of SEQ ID NO: 917350
gaagaaguugauuggagua

SEQ ID NO: 1228471 - RNA, 19 nt, Artificial Sequence
  Description of Artificial Sequence: Synthetic oligonucleotide
  Antisense strand to SEQ ID NO: 1228470
uacuccaaucaacuucuuc

SEQ ID NO: 1228472 - RNA, 19 nt, Artificial Sequence
  Description of Artificial Sequence: Synthetic oligonucleotide
  Sense strand starting at position 540 of SEQ ID NO: 917350
augggaaucuguccaauaa

SEQ ID NO: 1228473 - RNA, 19 nt, Artificial Sequence
  Description of Artificial Sequence: Synthetic oligonucleotide
  Antisense strand to SEQ ID NO: 1228472
uuauuggacagauucccau

SEQ ID NO: 1228474 - RNA, 19 nt, Artificial Sequence
  Description of Artificial Sequence: Synthetic oligonucleotide
  Sense strand starting at position 563 of SEQ ID NO: 917350
uuguuccacgaaugacaau

SEQ ID NO: 1228475 - RNA, 19 nt, Artificial Sequence
  Description of Artificial Sequence: Synthetic oligonucleotide
  Antisense strand to SEQ ID NO: 1228474
auugucauucguggaacaa

SEQ ID NO: 1228476 - RNA, 19 nt, Artificial Sequence
  Description of Artificial Sequence: Synthetic oligonucleotide
  Sense strand starting at position 593 of SEQ ID NO: 917350
gguuguggaacuggaaaua

SEQ ID NO: 1228477 - RNA, 19 nt, Artificial Sequence
  Description of Artificial Sequence: Synthetic oligonucleotide
  Antisense strand to SEQ ID NO: 1228476
uauuuccaguuccacaacc

SEQ ID NO: 1228478 - RNA, 19 nt, Artificial Sequence
  Description of Artificial Sequence: Synthetic oligonucleotide
  Sense strand starting at position 651 of SEQ ID NO: 917350
uguuguugagcgaguagag

SEQ ID NO: 1228479 - RNA, 19 nt, Artificial Sequence
  Description of Artificial Sequence: Synthetic oligonucleotide
  Antisense strand to SEQ ID NO: 1228478
cucuacucgcucaacaaca

SEQ ID NO: 1228480 - RNA, 19 nt, Artificial Sequence
  Description of Artificial Sequence: Synthetic oligonucleotide
  Sense strand starting at position 658 of SEQ ID NO: 917350
gagcgaguagaguaagaau

SEQ ID NO: 1228481 - RNA, 19 nt, Artificial Sequence
  Description of Artificial Sequence: Synthetic oligonucleotide
  Antisense strand to SEQ ID NO: 1228480
auucuuacucuacucgcuc

SEQ ID NO: 1228482 - RNA, 19 nt, Artificial Sequence
  Description of Artificial Sequence: Synthetic oligonucleotide
  Sense strand starting at position 812 of SEQ ID NO: 917350
ggaaguaucuuguugacag

SEQ ID NO: 1228483 - RNA, 19 nt, Artificial Sequence
  Description of Artificial Sequence: Synthetic oligonucleotide
  Antisense strand to SEQ ID NO: 1228482
cugucaacaagauacuucc

SEQ ID NO: 1228484 - RNA, 19 nt, Artificial Sequence
  Description of Artificial Sequence: Synthetic oligonucleotide
  Sense strand starting at position 929 of SEQ ID NO: 917350
uuucuuucuggauaguuau

SEQ ID NO: 1228485 - RNA, 19 nt, Artificial Sequence
  Description of Artificial Sequence: Synthetic oligonucleotide
  Antisense strand to SEQ ID NO: 1228484
auaacuauccagaaagaaa

SEQ ID NO: 1228486 - RNA, 19 nt, Artificial Sequence
  Description of Artificial Sequence: Synthetic oligonucleotide
  Sense strand starting at position 964 of SEQ ID NO: 917350
gaacuaauggguugcacaa

SEQ ID NO: 1228487 - RNA, 19 nt, Artificial Sequence
  Description of Artificial Sequence: Synthetic oligonucleotide
  Antisense strand to SEQ ID NO: 1228486
uugugcaacccauuaguuc

SEQ ID NO: 1228488 - RNA, 19 nt, Artificial Sequence
  Description of Artificial Sequence: Synthetic oligonucleotide
  Sense strand starting at position 1049 of SEQ ID NO: 917350
acauucucgcaucagauau

SEQ ID NO: 1228489 - RNA, 19 nt, Artificial Sequence
  Description of Artificial Sequence: Synthetic oligonucleotide
  Antisense strand to SEQ ID NO: 1228488
auaucugaugcgagaaugu

SEQ ID NO: 1228490 - RNA, 19 nt, Artificial Sequence
  Description of Artificial Sequence: Synthetic oligonucleotide
  Sense strand starting at position 1399 of SEQ ID NO: 917350
ccugaacuauacguggauu

SEQ ID NO: 1228491 - RNA, 19 nt, Artificial Sequence
  Description of Artificial Sequence: Synthetic oligonucleotide
  Antisense strand to SEQ ID NO: 1228490
aauccacguauaguucagg

SEQ ID NO: 1228492 - RNA, 19 nt, Artificial Sequence
  Description of Artificial Sequence: Synthetic oligonucleotide
  Sense strand starting at position 2151 of SEQ ID NO: 917350
ugacauaauccgcacuuua

SEQ ID NO: 1228493 - RNA, 19 nt, Artificial Sequence
  Description of Artificial Sequence: Synthetic oligonucleotide
  Antisense strand to SEQ ID NO: 1228492
uaaagugcggauuauguca

SEQ ID NO: 1228494 - RNA, 19 nt, Artificial Sequence
  Description of Artificial Sequence: Synthetic oligonucleotide
  Sense strand starting at position 2162 of SEQ ID NO: 917350
gcacuuuagggugaugaau

SEQ ID NO: 1228495 - RNA, 19 nt, Artificial Sequence
  Description of Artificial Sequence: Synthetic oligonucleotide
  Antisense strand to SEQ ID NO: 1228494
auucaucacccuaaagugc

SEQ ID NO: 1228496 - RNA, 19 nt, Artificial Sequence
  Description of Artificial Sequence: Synthetic oligonucleotide
  Sense strand starting at position 2168 of SEQ ID NO: 917350
uagggugaugaaugucaau

SEQ ID NO: 1228497 - RNA, 19 nt, Artificial Sequence
  Description of Artificial Sequence: Synthetic oligonucleotide
  Antisense strand to SEQ ID NO: 1228496
auugacauucaucacccua

SEQ ID NO: 1228498 - RNA, 19 nt, Artificial Sequence
  Description of Artificial Sequence: Synthetic oligonucleotide
  Sense strand starting at position 2338 of SEQ ID NO: 917350
gcgugucugcuuccugaag

SEQ ID NO: 1228499 - RNA, 19 nt, Artificial Sequence
  Description of Artificial Sequence: Synthetic oligonucleotide
  Antisense strand to SEQ ID NO: 1228498
cuucaggaagcagacacgc

SEQ ID NO: 1228500 - RNA, 19 nt, Artificial Sequence
  Description of Artificial Sequence: Synthetic oligonucleotide
  Sense strand starting at position 2737 of SEQ ID NO: 917350
aaaugugagguguaacuua

SEQ ID NO: 1228501 - RNA, 19 nt, Artificial Sequence
  Description of Artificial Sequence: Synthetic oligonucleotide
  Antisense strand to SEQ ID NO: 1228500
uaaguuacaccucacauuu

SEQ ID NO: 1228502 - RNA, 19 nt, Artificial Sequence
  Description of Artificial Sequence: Synthetic oligonucleotide
  Sense strand starting at position 2792 of SEQ ID NO: 917350
agagaaccucucuggcgaa

SEQ ID NO: 1228503 - RNA, 19 nt, Artificial Sequence
  Description of Artificial Sequence: Synthetic oligonucleotide
  Antisense strand to SEQ ID NO: 1228502
uucgccagagagguucucu

SEQ ID NO: 1228504 - RNA, 19 nt, Artificial Sequence
  Description of Artificial Sequence: Synthetic oligonucleotide
  Sense strand starting at position 2845 of SEQ ID NO: 917350
gaggguugucaucauagug

SEQ ID NO: 1228505 - RNA, 19 nt, Artificial Sequence
  Description of Artificial Sequence: Synthetic oligonucleotide
  Antisense strand to SEQ ID NO: 1228504
cacuaugaugacaacccuc

SEQ ID NO: 1228506 - RNA, 19 nt, Artificial Sequence
  Description of Artificial Sequence: Synthetic oligonucleotide
  Sense strand starting at position 2878 of SEQ ID NO: 917350
ucccucagggauuguuaca

SEQ ID NO: 1228507 - RNA, 19 nt, Artificial Sequence
  Description of Artificial Sequence: Synthetic oligonucleotide
  Antisense strand to SEQ ID NO: 1228506
uguaacaaucccugaggga

SEQ ID NO: 1228508 - RNA, 19 nt, Artificial Sequence
  Description of Artificial Sequence: Synthetic oligonucleotide
  Sense strand starting at position 2920 of SEQ ID NO: 917350
acucgugaucucuaacaaa

SEQ ID NO: 1228509 - RNA, 19 nt, Artificial Sequence
  Description of Artificial Sequence: Synthetic oligonucleotide
  Antisense strand to SEQ ID NO: 1228508
uuuguuagagaucacgagu

SEQ ID NO: 1228510 - RNA, 19 nt, Artificial Sequence
  Description of Artificial Sequence: Synthetic oligonucleotide
  Sense strand starting at position 3005 of SEQ ID NO: 917350
ugaugaccuccguaugauu

SEQ ID NO: 1228511 - RNA, 19 nt, Artificial Sequence
  Description of Artificial Sequence: Synthetic oligonucleotide
  Antisense strand to SEQ ID NO: 1228510
aaucauacggaggucauca

SEQ ID NO: 1228512 - RNA, 19 nt, Artificial Sequence
  Description of Artificial Sequence: Synthetic oligonucleotide
  Sense strand starting at position 3357 of SEQ ID NO: 917350
ggacuuagccuccagaauu

SEQ ID NO: 1228513 - RNA, 19 nt, Artificial Sequence
  Description of Artificial Sequence: Synthetic oligonucleotide
  Antisense strand to SEQ ID NO: 1228512
aauucuggaggcuaagucc

SEQ ID NO: 1228514 - RNA, 19 nt, Artificial Sequence
  Description of Artificial Sequence: Synthetic oligonucleotide
  Sense strand starting at position 3376 of SEQ ID NO: 917350
gagagaaguaaaugucugu

SEQ ID NO: 1228515 - RNA, 19 nt, Artificial Sequence
  Description of Artificial Sequence: Synthetic oligonucleotide
  Antisense strand to SEQ ID NO: 1228514
acagacauuuacuucucuc

SEQ ID NO: 1228516 - RNA, 19 nt, Artificial Sequence
  Description of Artificial Sequence: Synthetic oligonucleotide
  Sense strand starting at position 3829 of SEQ ID NO: 917350
cgucauagaagucauaaug

SEQ ID NO: 1228517 - RNA, 19 nt, Artificial Sequence
  Description of Artificial Sequence: Synthetic oligonucleotide
  Antisense strand to SEQ ID NO: 1228516
cauuaugacuucuaugacg

SEQ ID NO: 1228518 - RNA, 19 nt, Artificial Sequence
  Description of Artificial Sequence: Synthetic oligonucleotide
  Sense strand starting at position 3868 of SEQ ID NO: 917350
agggauauauuuggauuaa

SEQ ID NO: 1228519 - RNA, 19 nt, Artificial Sequence
  Description of Artificial Sequence: Synthetic oligonucleotide
  Antisense strand to SEQ ID NO: 1228518
uuaauccaaauauaucccu

SEQ ID NO: 1228520 - RNA, 19 nt, Artificial Sequence
  Description of Artificial Sequence: Synthetic oligonucleotide
  Sense strand starting at position 3869 of SEQ ID NO: 917350
gggauauauuuggauuaag

SEQ ID NO: 1228521 - RNA, 19 nt, Artificial Sequence
  Description of Artificial Sequence: Synthetic oligonucleotide
  Antisense strand to SEQ ID NO: 1228520
cuuaauccaaauauauccc

SEQ ID NO: 1228522 - RNA, 19 nt, Artificial Sequence
  Description of Artificial Sequence: Synthetic oligonucleotide
  Sense strand starting at position 3950 of SEQ ID NO: 917350
uaaagcuucggugauauag

SEQ ID NO: 1228523 - RNA, 19 nt, Artificial Sequence
  Description of Artificial Sequence: Synthetic oligonucleotide
  Antisense strand to SEQ ID NO: 1228522
cuauaucaccgaagcuuua

SEQ ID NO: 1228524 - RNA, 19 nt, Artificial Sequence
  Description of Artificial Sequence: Synthetic oligonucleotide
  Sense strand starting at position 3958 of SEQ ID NO: 917350
cggugauauagagaaagcu

SEQ ID NO: 1228525 - RNA, 19 nt, Artificial Sequence
  Description of Artificial Sequence: Synthetic oligonucleotide
  Antisense strand to SEQ ID NO: 1228524
agcuuucucuauaucaccg

SEQ ID NO: 1228526 - RNA, 19 nt, Artificial Sequence
  Description of Artificial Sequence: Synthetic oligonucleotide
  Sense strand starting at position 3958 of SEQ ID NO: 917351
cggugauauagagaaagcu

SEQ ID NO: 1228527 - RNA, 19 nt, Artificial Sequence
  Description of Artificial Sequence: Synthetic oligonucleotide
  Antisense strand to SEQ ID NO: 1228526
agcuuucucuauaucaccg

SEQ ID NO: 1228528 - RNA, 19 nt, Artificial Sequence
  Description of Artificial Sequence: Synthetic oligonucleotide
  Sense strand starting at position 14 of SEQ ID NO: 917351
ugagcuauauaacuugcua

SEQ ID NO: 1228529 - RNA, 19 nt, Artificial Sequence
  Description of Artificial Sequence: Synthetic oligonucleotide
  Antisense strand to SEQ ID NO: 1228528
uagcaaguuauauagcuca

SEQ ID NO: 1228530 - RNA, 19 nt, Artificial Sequence
  Description of Artificial Sequence: Synthetic oligonucleotide
  Sense strand starting at position 508 of SEQ ID NO: 917351
guuauugcugcuguuucua

SEQ ID NO: 1228531 - RNA, 19 nt, Artificial Sequence
  Description of Artificial Sequence: Synthetic oligonucleotide
  Antisense strand to SEQ ID NO: 1228530
uagaaacagcagcaauaac

SEQ ID NO: 1228532 - RNA, 19 nt, Artificial Sequence
  Description of Artificial Sequence: Synthetic oligonucleotide
  Sense strand starting at position 667 of SEQ ID NO: 917351
cuaccugaccugugaggaa

SEQ ID NO: 1228533 - RNA, 19 nt, Artificial Sequence
  Description of Artificial Sequence: Synthetic oligonucleotide
  Antisense strand to SEQ ID NO: 1228532
uuccucacaggucagguag

SEQ ID NO: 1228534 - RNA, 19 nt, Artificial Sequence
  Description of Artificial Sequence: Synthetic oligonucleotide
  Sense strand starting at position 708 of SEQ ID NO: 917351
gaagcuuuggcccagauaa

SEQ ID NO: 1228535 - RNA, 19 nt, Artificial Sequence
  Description of Artificial Sequence: Synthetic oligonucleotide
  Antisense strand to SEQ ID NO: 1228534
uuaucugggccaaagcuuc

SEQ ID NO: 1228536 - RNA, 19 nt, Artificial Sequence
  Description of Artificial Sequence: Synthetic oligonucleotide
  Sense strand starting at position 710 of SEQ ID NO: 917351
agcuuuggcccagauaaga

SEQ ID NO: 1228537 - RNA, 19 nt, Artificial Sequence
  Description of Artificial Sequence: Synthetic oligonucleotide
  Antisense strand to SEQ ID NO: 1228536
ucuuaucugggccaaagcu

SEQ ID NO: 1228538 - RNA, 19 nt, Artificial Sequence
  Description of Artificial Sequence: Synthetic oligonucleotide
  Sense strand starting at position 996 of SEQ ID NO: 917351
guuguuuggagcuggaaau

SEQ ID NO: 1228539 - RNA, 19 nt, Artificial Sequence
  Description of Artificial Sequence: Synthetic oligonucleotide
  Antisense strand to SEQ ID NO: 1228538
auuuccagcuccaaacaac

SEQ ID NO: 1228540 - RNA, 19 nt, Artificial Sequence
  Description of Artificial Sequence: Synthetic oligonucleotide
  Sense strand starting at position 1017 of SEQ ID NO: 917351
uccugaagauucccuguaa

SEQ ID NO: 1228541 - RNA, 19 nt, Artificial Sequence
  Description of Artificial Sequence: Synthetic oligonucleotide
  Antisense strand to SEQ ID NO: 1228540
uuacagggaaucuucagga

SEQ ID NO: 1228542 - RNA, 19 nt, Artificial Sequence
  Description of Artificial Sequence: Synthetic oligonucleotide
  Sense strand starting at position 1018 of SEQ ID NO: 917351
ccugaagauucccuguaaa

SEQ ID NO: 1228543 - RNA, 19 nt, Artificial Sequence
  Description of Artificial Sequence: Synthetic oligonucleotide
  Antisense strand to SEQ ID NO: 1228542
uuuacagggaaucuucagg

SEQ ID NO: 1228544 - RNA, 19 nt, Artificial Sequence
  Description of Artificial Sequence: Synthetic oligonucleotide
  Sense strand starting at position 1275 of SEQ ID NO: 917351
cucacagagucuuucccua

SEQ ID NO: 1228545 - RNA, 19 nt, Artificial Sequence
  Description of Artificial Sequence: Synthetic oligonucleotide
  Antisense strand to SEQ ID NO: 1228544
uagggaaagacucugugag

SEQ ID NO: 1228546 - RNA, 19 nt, Artificial Sequence
  Description of Artificial Sequence: Synthetic oligonucleotide
  Sense strand starting at position 1280 of SEQ ID NO: 917351
agagucuuucccuaacagu

SEQ ID NO: 1228547 - RNA, 19 nt, Artificial Sequence
  Description of Artificial Sequence: Synthetic oligonucleotide
  Antisense strand to SEQ ID NO: 1228546
acuguuagggaaagacucu

SEQ ID NO: 1228548 - RNA, 19 nt, Artificial Sequence
  Description of Artificial Sequence: Synthetic oligonucleotide
  Sense strand starting at position 1359 of SEQ ID NO: 917351
guauacaucuauguaggau

SEQ ID NO: 1228549 - RNA, 19 nt, Artificial Sequence
  Description of Artificial Sequence: Synthetic oligonucleotide
  Antisense strand to SEQ ID NO: 1228548
auccuacauagauguauac

SEQ ID NO: 1228550 - RNA, 19 nt, Artificial Sequence
  Description of Artificial Sequence: Synthetic oligonucleotide
  Sense strand starting at position 1442 of SEQ ID NO: 917351
gcagccagauuugagaauu

SEQ ID NO: 1228551 - RNA, 19 nt, Artificial Sequence
  Description of Artificial Sequence: Synthetic oligonucleotide
  Antisense strand to SEQ ID NO: 1228550
aauucucaaaucuggcugc

SEQ ID NO: 1228552 - RNA, 19 nt, Artificial Sequence
  Description of Artificial Sequence: Synthetic oligonucleotide
  Sense strand starting at position 1493 of SEQ ID NO: 917351
gcuggagaacugcgauauc

SEQ ID NO: 1228553 - RNA, 19 nt, Artificial Sequence
  Description of Artificial Sequence: Synthetic oligonucleotide
  Antisense strand to SEQ ID NO: 1228552
gauaucgcaguucuccagc

SEQ ID NO: 1228554 - RNA, 19 nt, Artificial Sequence
  Description of Artificial Sequence: Synthetic oligonucleotide
  Sense strand starting at position 1496 of SEQ ID NO: 917351
ggagaacugcgauaucguc

SEQ ID NO: 1228555 - RNA, 19 nt, Artificial Sequence
  Description of Artificial Sequence: Synthetic oligonucleotide
  Antisense strand to SEQ ID NO: 1228554
gacgauaucgcaguucucc

SEQ ID NO: 1228556 - RNA, 19 nt, Artificial Sequence
  Description of Artificial Sequence: Synthetic oligonucleotide
  Sense strand starting at position 1502 of SEQ ID NO: 917351
cugcgauaucgucucucuu

SEQ ID NO: 1228557 - RNA, 19 nt, Artificial Sequence
  Description of Artificial Sequence: Synthetic oligonucleotide
  Antisense strand to SEQ ID NO: 1228556
aagagagacgauaucgcag

SEQ ID NO: 1228558 - RNA, 19 nt, Artificial Sequence
  Description of Artificial Sequence: Synthetic oligonucleotide
  Sense strand starting at position 2141 of SEQ ID NO: 917351
ucaaaugugcuuuguaaag

SEQ ID NO: 1228559 - RNA, 19 nt, Artificial Sequence
  Description of Artificial Sequence: Synthetic oligonucleotide
  Antisense strand to SEQ ID NO: 1228558
cuuuacaaagcacauuuga

SEQ ID NO: 1228560 - RNA, 19 nt, Artificial Sequence
  Description of Artificial Sequence: Synthetic oligonucleotide
  Sense strand starting at position 2179 of SEQ ID NO: 917351
cuugguacuuccuugaaag

SEQ ID NO: 1228561 - RNA, 19 nt, Artificial Sequence
  Description of Artificial Sequence: Synthetic oligonucleotide
  Antisense strand to SEQ ID NO: 1228560
cuuucaaggaaguaccaag

SEQ ID NO: 1228562 - RNA, 19 nt, Artificial Sequence
  Description of Artificial Sequence: Synthetic oligonucleotide
  Sense strand starting at position 2207 of SEQ ID NO: 917351
caaaguagucuuuguggau

SEQ ID NO: 1228563 - RNA, 19 nt, Artificial Sequence
  Description of Artificial Sequence: Synthetic oligonucleotide
  Antisense strand to SEQ ID NO: 1228562
auccacaaagacuacuuug

SEQ ID NO: 1228564 - RNA, 19 nt, Artificial Sequence
  Description of Artificial Sequence: Synthetic oligonucleotide
  Sense strand starting at position 2208 of SEQ ID NO: 917351
aaaguagucuuuguggaug

SEQ ID NO: 1228565 - RNA, 19 nt, Artificial Sequence
  Description of Artificial Sequence: Synthetic oligonucleotide
  Antisense strand to SEQ ID NO: 1228564
cauccacaaagacuacuuu

SEQ ID NO: 1228566 - RNA, 19 nt, Artificial Sequence
  Description of Artificial Sequence: Synthetic oligonucleotide
  Sense strand starting at position 2430 of SEQ ID NO: 917351
uacagugacuguuucuaga

SEQ ID NO: 1228567 - RNA, 19 nt, Artificial Sequence
  Description of Artificial Sequence: Synthetic oligonucleotide
  Antisense strand to SEQ ID NO: 1228566
ucuagaaacagucacugua

SEQ ID NO: 1228568 - RNA, 19 nt, Artificial Sequence
  Description of Artificial Sequence: Synthetic oligonucleotide
  Sense strand starting at position 2432 of SEQ ID NO: 917351
cagugacuguuucuagaca

SEQ ID NO: 1228569 - RNA, 19 nt, Artificial Sequence
  Description of Artificial Sequence: Synthetic oligonucleotide
  Antisense strand to SEQ ID NO: 1228568
ugucuagaaacagucacug

SEQ ID NO: 1228570 - RNA, 19 nt, Artificial Sequence
  Description of Artificial Sequence: Synthetic oligonucleotide
  Sense strand starting at position 2446 of SEQ ID NO: 917351
agacaaaguugucuaacaa

SEQ ID NO: 1228571 - RNA, 19 nt, Artificial Sequence
  Description of Artificial Sequence: Synthetic oligonucleotide
  Antisense strand to SEQ ID NO: 1228570
uuguuagacaacuuugucu

SEQ ID NO: 1228572 - RNA, 19 nt, Artificial Sequence
  Description of Artificial Sequence: Synthetic oligonucleotide
  Sense strand starting at position 2514 of SEQ ID NO: 917351
guaggacucugcccuauca

SEQ ID NO: 1228573 - RNA, 19 nt, Artificial Sequence
  Description of Artificial Sequence: Synthetic oligonucleotide
  Antisense strand to SEQ ID NO: 1228572
ugauagggcagaguccuac

SEQ ID NO: 1228574 - RNA, 19 nt, Artificial Sequence
  Description of Artificial Sequence: Synthetic oligonucleotide
  Sense strand starting at position 2530 of SEQ ID NO: 917351
ucaaguacucaccacugua

SEQ ID NO: 1228575 - RNA, 19 nt, Artificial Sequence
  Description of Artificial Sequence: Synthetic oligonucleotide
  Antisense strand to SEQ ID NO: 1228574
uacaguggugaguacuuga

SEQ ID NO: 1228576 - RNA, 19 nt, Artificial Sequence
  Description of Artificial Sequence: Synthetic oligonucleotide
  Sense strand starting at position 2856 of SEQ ID NO: 917351
cugccuucuucccuggaga

SEQ ID NO: 1228577 - RNA, 19 nt, Artificial Sequence
  Description of Artificial Sequence: Synthetic oligonucleotide
  Antisense strand to SEQ ID NO: 1228576
ucuccagggaagaaggcag

SEQ ID NO: 1228578 - RNA, 19 nt, Artificial Sequence
  Description of Artificial Sequence: Synthetic oligonucleotide
  Sense strand starting at position 3315 of SEQ ID NO: 917351
ugggaaguugcuuaugacu

SEQ ID NO: 1228579 - RNA, 19 nt, Artificial Sequence
  Description of Artificial Sequence: Synthetic oligonucleotide
  Antisense strand to SEQ ID NO: 1228578
agucauaagcaacuuccca

SEQ ID NO: 1228580 - RNA, 19 nt, Artificial Sequence
  Description of Artificial Sequence: Synthetic oligonucleotide
  Sense strand starting at position 3398 of SEQ ID NO: 917351
uauguaagauugcuggguu

SEQ ID NO: 1228581 - RNA, 19 nt, Artificial Sequence
  Description of Artificial Sequence: Synthetic oligonucleotide
  Antisense strand to SEQ ID NO: 1228580
aacccagcaaucuuacaua

SEQ ID NO: 1228582 - RNA, 19 nt, Artificial Sequence
  Description of Artificial Sequence: Synthetic oligonucleotide
  Sense strand starting at position 3401 of SEQ ID NO: 917351
guaagauugcuggguucaa

SEQ ID NO: 1228583 - RNA, 19 nt, Artificial Sequence
  Description of Artificial Sequence: Synthetic oligonucleotide
  Antisense strand to SEQ ID NO: 1228582
uugaacccagcaaucuuac

SEQ ID NO: 1228584 - RNA, 19 nt, Artificial Sequence
  Description of Artificial Sequence: Synthetic oligonucleotide
  Sense strand starting at position 3618 of SEQ ID NO: 917351
gggagaaaugugggcugua

SEQ ID NO: 1228585 - RNA, 19 nt, Artificial Sequence
  Description of Artificial Sequence: Synthetic oligonucleotide
  Antisense strand to SEQ ID NO: 1228584
uacagcccacauuucuccc

SEQ ID NO: 1228586 - RNA, 19 nt, Artificial Sequence
  Description of Artificial Sequence: Synthetic oligonucleotide
  Sense strand starting at position 3619 of SEQ ID NO: 917351
ggagaaaugugggcuguaa

SEQ ID NO: 1228587 - RNA, 19 nt, Artificial Sequence
  Description of Artificial Sequence: Synthetic oligonucleotide
  Antisense strand to SEQ ID NO: 1228586
uuacagcccacauuucucc

SEQ ID NO: 1228588 - RNA, 19 nt, Artificial Sequence
  Description of Artificial Sequence: Synthetic oligonucleotide
  Sense strand starting at position 3621 of SEQ ID NO: 917351
agaaaugugggcuguaaag

SEQ ID NO: 1228589 - RNA, 19 nt, Artificial Sequence
  Description of Artificial Sequence: Synthetic oligonucleotide
  Antisense strand to SEQ ID NO: 1228588
cuuuacagcccacauuucu

SEQ ID NO: 1228590 - RNA, 19 nt, Artificial Sequence
  Description of Artificial Sequence: Synthetic oligonucleotide
  Sense strand starting at position 3623 of SEQ ID NO: 917351
aaaugugggcuguaaaguu

SEQ ID NO: 1228591 - RNA, 19 nt, Artificial Sequence
  Description of Artificial Sequence: Synthetic oligonucleotide
  Antisense strand to SEQ ID NO: 1228590
aacuuuacagcccacauuu

SEQ ID NO: 1228592 - RNA, 19 nt, Artificial Sequence
  Description of Artificial Sequence: Synthetic oligonucleotide
  Sense strand starting at position 3672 of SEQ ID NO: 917351
uggccucuuuggucaaaug

SEQ ID NO: 1228593 - RNA, 19 nt, Artificial Sequence
  Description of Artificial Sequence: Synthetic oligonucleotide
  Antisense strand to SEQ ID NO: 1228592
cauuugaccaaagaggcca

SEQ ID NO: 1228594 - RNA, 19 nt, Artificial Sequence
  Description of Artificial Sequence: Synthetic oligonucleotide
  Sense strand starting at position 3728 of SEQ ID NO: 917351
gcauacagaaugugugaga

SEQ ID NO: 1228595 - RNA, 19 nt, Artificial Sequence
  Description of Artificial Sequence: Synthetic oligonucleotide
  Antisense strand to SEQ ID NO: 1228594
ucucacacauucuguaugc

SEQ ID NO: 1228596 - RNA, 19 nt, Artificial Sequence
  Description of Artificial Sequence: Synthetic oligonucleotide
  Sense strand starting at position 3729 of SEQ ID NO: 917351
cauacagaaugugugagaa

SEQ ID NO: 1228597 - RNA, 19 nt, Artificial Sequence
  Description of Artificial Sequence: Synthetic oligonucleotide
  Antisense strand to SEQ ID NO: 1228596
uucucacacauucuguaug

SEQ ID NO: 1228598 - RNA, 19 nt, Artificial Sequence
  Description of Artificial Sequence: Synthetic oligonucleotide
  Sense strand starting at position 3806 of SEQ ID NO: 917351
aggagaagaaugugucucu

SEQ ID NO: 1228599 - RNA, 19 nt, Artificial Sequence
  Description of Artificial Sequence: Synthetic oligonucleotide
  Antisense strand to SEQ ID NO: 1228598
agagacacauucuucuccu

SEQ ID NO: 1228600 - RNA, 19 nt, Artificial Sequence
  Description of Artificial Sequence: Synthetic oligonucleotide
  Sense strand starting at position 3807 of SEQ ID NO: 917351
ggagaagaaugugucucua

SEQ ID NO: 1228601 - RNA, 19 nt, Artificial Sequence
  Description of Artificial Sequence: Synthetic oligonucleotide
  Antisense strand to SEQ ID NO: 1228600
uagagacacauucuucucc

SEQ ID NO: 1228602 - RNA, 19 nt, Artificial Sequence
  Description of Artificial Sequence: Synthetic oligonucleotide
  Sense strand starting at position 3875 of SEQ ID NO: 917351
gcaaaucuguucucauuug

SEQ ID NO: 1228603 - RNA, 19 nt, Artificial Sequence
  Description of Artificial Sequence: Synthetic oligonucleotide
  Antisense strand to SEQ ID NO: 1228602
caaaugagaacagauuugc

SEQ ID NO: 1228604 - RNA, 19 nt, Artificial Sequence
  Description of Artificial Sequence: Synthetic oligonucleotide
  Sense strand starting at position 3881 of SEQ ID NO: 917351
cuguucucauuugcuagua

SEQ ID NO: 1228605 - RNA, 19 nt, Artificial Sequence
  Description of Artificial Sequence: Synthetic oligonucleotide
  Antisense strand to SEQ ID NO: 1228604
uacuagcaaaugagaacag

SEQ ID NO: 1228606 - RNA, 19 nt, Artificial Sequence
  Description of Artificial Sequence: Synthetic oligonucleotide
  Sense strand starting at position 3977 of SEQ ID NO: 917352
ucucauuaacagugguaua

SEQ ID NO: 1228607 - RNA, 19 nt, Artificial Sequence
  Description of Artificial Sequence: Synthetic oligonucleotide
  Antisense strand to SEQ ID NO: 1228606
uauaccacuguuaaugaga

SEQ ID NO: 1228608 - RNA, 19 nt, Artificial Sequence
  Description of Artificial Sequence: Synthetic oligonucleotide
  Sense strand starting at position 213 of SEQ ID NO: 917352
uuccaagauucugugggua

SEQ ID NO: 1228609 - RNA, 19 nt, Artificial Sequence
  Description of Artificial Sequence: Synthetic oligonucleotide
  Antisense strand to SEQ ID NO: 1228608
uacccacagaaucuuggaa

SEQ ID NO: 1228610 - RNA, 19 nt, Artificial Sequence
  Description of Artificial Sequence: Synthetic oligonucleotide
  Sense strand starting at position 216 of SEQ ID NO: 917352
caagauucuguggguaaag

SEQ ID NO: 1228611 - RNA, 19 nt, Artificial Sequence
  Description of Artificial Sequence: Synthetic oligonucleotide
  Antisense strand to SEQ ID NO: 1228610
cuuuacccacagaaucuug

SEQ ID NO: 1228612 - RNA, 19 nt, Artificial Sequence
  Description of Artificial Sequence: Synthetic oligonucleotide
  Sense strand starting at position 217 of SEQ ID NO: 917352
aagauucuguggguaaaga

SEQ ID NO: 1228613 - RNA, 19 nt, Artificial Sequence
  Description of Artificial Sequence: Synthetic oligonucleotide
  Antisense strand to SEQ ID NO: 1228612
ucuuuacccacagaaucuu

SEQ ID NO: 1228614 - RNA, 19 nt, Artificial Sequence
  Description of Artificial Sequence: Synthetic oligonucleotide
  Sense strand starting at position 293 of SEQ ID NO: 917352
agaguacucuugccuauuu

SEQ ID NO: 1228615 - RNA, 19 nt, Artificial Sequence
  Description of Artificial Sequence: Synthetic oligonucleotide
  Antisense strand to SEQ ID NO: 1228614
aaauaggcaagaguacucu

SEQ ID NO: 1228616 - RNA, 19 nt, Artificial Sequence
  Description of Artificial Sequence: Synthetic oligonucleotide
  Sense strand starting at position 302 of SEQ ID NO: 917352
uugccuauuugggaacaaa

SEQ ID NO: 1228617 - RNA, 19 nt, Artificial Sequence
  Description of Artificial Sequence: Synthetic oligonucleotide
  Antisense strand to SEQ ID NO: 1228616
uuuguucccaaauaggcaa

SEQ ID NO: 1228618 - RNA, 19 nt, Artificial Sequence
  Description of Artificial Sequence: Synthetic oligonucleotide
  Sense strand starting at position 375 of SEQ ID NO: 917352
agaucagcuuuguuggaua

SEQ ID NO: 1228619 - RNA, 19 nt, Artificial Sequence
  Description of Artificial Sequence: Synthetic oligonucleotide
  Antisense strand to SEQ ID NO: 1228618
uauccaacaaagcugaucu

SEQ ID NO: 1228620 - RNA, 19 nt, Artificial Sequence
  Description of Artificial Sequence: Synthetic oligonucleotide
  Sense strand starting at position 380 of SEQ ID NO: 917352
agcuuuguuggauaaguua

SEQ ID NO: 1228621 - RNA, 19 nt, Artificial Sequence
  Description of Artificial Sequence: Synthetic oligonucleotide
  Antisense strand to SEQ ID NO: 1228620
uaacuuauccaacaaagcu

SEQ ID NO: 1228622 - RNA, 19 nt, Artificial Sequence
  Description of Artificial Sequence: Synthetic oligonucleotide
  Sense strand starting at position 551 of SEQ ID NO: 917352
uggaacacuuaaucuguua

SEQ ID NO: 1228623 - RNA, 19 nt, Artificial Sequence
  Description of Artificial Sequence: Synthetic oligonucleotide
  Antisense strand to SEQ ID NO: 1228622
uaacagauuaaguguucca

SEQ ID NO: 1228624 - RNA, 19 nt, Artificial Sequence
  Description of Artificial Sequence: Synthetic oligonucleotide
  Sense strand starting at position 575 of SEQ ID NO: 917352
ucuccagaguccuuggaag

SEQ ID NO: 1228625 - RNA, 19 nt, Artificial Sequence
  Description of Artificial Sequence: Synthetic oligonucleotide
  Antisense strand to SEQ ID NO: 1228624
cuuccaaggacucuggaga

SEQ ID NO: 1228626 - RNA, 19 nt, Artificial Sequence
  Description of Artificial Sequence: Synthetic oligonucleotide
  Sense strand starting at position 1202 of SEQ ID NO: 917352
cucaguuucccugaagacu

SEQ ID NO: 1228627 - RNA, 19 nt, Artificial Sequence
  Description of Artificial Sequence: Synthetic oligonucleotide
  Antisense strand to SEQ ID NO: 1228626
agucuucagggaaacugag

SEQ ID NO: 1228628 - RNA, 19 nt, Artificial Sequence
  Description of Artificial Sequence: Synthetic oligonucleotide
  Sense strand starting at position 1205 of SEQ ID NO: 917352
aguuucccugaagacuauu

SEQ ID NO: 1228629 - RNA, 19 nt, Artificial Sequence
  Description of Artificial Sequence: Synthetic oligonucleotide
  Antisense strand to SEQ ID NO: 1228628
aauagucuucagggaaacu

SEQ ID NO: 1228630 - RNA, 19 nt, Artificial Sequence
  Description of Artificial Sequence: Synthetic oligonucleotide
  Sense strand starting at position 1219 of SEQ ID NO: 917352
cuauuaagaggucauguug

SEQ ID NO: 1228631 - RNA, 19 nt, Artificial Sequence
  Description of Artificial Sequence: Synthetic oligonucleotide
  Antisense strand to SEQ ID NO: 1228630
caacaugaccucuuaauag

SEQ ID NO: 1228632 - RNA, 19 nt, Artificial Sequence
  Description of Artificial Sequence: Synthetic oligonucleotide
  Sense strand starting at position 1234 of SEQ ID NO: 917352
guugaugcagcccaaagau

SEQ ID NO: 1228633 - RNA, 19 nt, Artificial Sequence
  Description of Artificial Sequence: Synthetic oligonucleotide
  Antisense strand to SEQ ID NO: 1228632
aucuuugggcugcaucaac

SEQ ID NO: 1228634 - RNA, 19 nt, Artificial Sequence
  Description of Artificial Sequence: Synthetic oligonucleotide
  Sense strand starting at position 1261 of SEQ ID NO: 917352
gccuauuuauucuucggga

SEQ ID NO: 1228635 - RNA, 19 nt, Artificial Sequence
  Description of Artificial Sequence: Synthetic oligonucleotide
  Antisense strand to SEQ ID NO: 1228634
ucccgaagaauaaauaggc

SEQ ID NO: 1228636 - RNA, 19 nt, Artificial Sequence
  Description of Artificial Sequence: Synthetic oligonucleotide
  Sense strand starting at position 1487 of SEQ ID NO: 917352
ggucguuuccaacaccaca

SEQ ID NO: 1228637 - RNA, 19 nt, Artificial Sequence
  Description of Artificial Sequence: Synthetic oligonucleotide
  Antisense strand to SEQ ID NO: 1228636
ugugguguuggaaacgacc

SEQ ID NO: 1228638 - RNA, 19 nt, Artificial Sequence
  Description of Artificial Sequence: Synthetic oligonucleotide
  Sense strand starting at position 1568 of SEQ ID NO: 917352
agggauuaacucuguuugu

SEQ ID NO: 1228639 - RNA, 19 nt, Artificial Sequence
  Description of Artificial Sequence: Synthetic oligonucleotide
  Antisense strand to SEQ ID NO: 1228638
acaaacagaguuaaucccu

SEQ ID NO: 1228640 - RNA, 19 nt, Artificial Sequence
  Description of Artificial Sequence: Synthetic oligonucleotide
  Sense strand starting at position 1620 of SEQ ID NO: 917352
cccucacuugggugugaaa

SEQ ID NO: 1228641 - RNA, 19 nt, Artificial Sequence
  Description of Artificial Sequence: Synthetic oligonucleotide
  Antisense strand to SEQ ID NO: 1228640
uuucacacccaagugaggg

SEQ ID NO: 1228642 - RNA, 19 nt, Artificial Sequence
  Description of Artificial Sequence: Synthetic oligonucleotide
  Sense strand starting at position 2221 of SEQ ID NO: 917352
aggagaaaguguuugcaga

SEQ ID NO: 1228643 - RNA, 19 nt, Artificial Sequence
  Description of Artificial Sequence: Synthetic oligonucleotide
  Antisense strand to SEQ ID NO: 1228642
ucugcaaacacuuucuccu

SEQ ID NO: 1228644 - RNA, 19 nt, Artificial Sequence
  Description of Artificial Sequence: Synthetic oligonucleotide
  Sense strand starting at position 2296 of SEQ ID NO: 917352
cuugucuugguccagaaau

SEQ ID NO: 1228645 - RNA, 19 nt, Artificial Sequence
  Description of Artificial Sequence: Synthetic oligonucleotide
  Antisense strand to SEQ ID NO: 1228644
auuucuggaccaagacaag

SEQ ID NO: 1228646 - RNA, 19 nt, Artificial Sequence
  Description of Artificial Sequence: Synthetic oligonucleotide
  Sense strand starting at position 2390 of SEQ ID NO: 917352
gcguccagugccucuuauu

SEQ ID NO: 1228647 - RNA, 19 nt, Artificial Sequence
  Description of Artificial Sequence: Synthetic oligonucleotide
  Antisense strand to SEQ ID NO: 1228646
aauaagaggcacuggacgc

SEQ ID NO: 1228648 - RNA, 19 nt, Artificial Sequence
  Description of Artificial Sequence: Synthetic oligonucleotide
  Sense strand starting at position 2402 of SEQ ID NO: 917352
ucuuauuuagcgugggaug

SEQ ID NO: 1228649 - RNA, 19 nt, Artificial Sequence
  Description of Artificial Sequence: Synthetic oligonucleotide
  Antisense strand to SEQ ID NO: 1228648
caucccacgcuaaauaaga

SEQ ID NO: 1228650 - RNA, 19 nt, Artificial Sequence
  Description of Artificial Sequence: Synthetic oligonucleotide
  Sense strand starting at position 2506 of SEQ ID NO: 917352
uuucuaucccugcaaagag

SEQ ID NO: 1228651 - RNA, 19 nt, Artificial Sequence
  Description of Artificial Sequence: Synthetic oligonucleotide
  Antisense strand to SEQ ID NO: 1228650
cucuuugcagggauagaaa

SEQ ID NO: 1228652 - RNA, 19 nt, Artificial Sequence
  Description of Artificial Sequence: Synthetic oligonucleotide
  Sense strand starting at position 2531 of SEQ ID NO: 917352
ucuguaucuccagaucuag

SEQ ID NO: 1228653 - RNA, 19 nt, Artificial Sequence
  Description of Artificial Sequence: Synthetic oligonucleotide
  Antisense strand to SEQ ID NO: 1228652
cuagaucuggagauacaga

SEQ ID NO: 1228654 - RNA, 19 nt, Artificial Sequence
  Description of Artificial Sequence: Synthetic oligonucleotide
  Sense strand starting at position 2537 of SEQ ID NO: 917352
ucuccagaucuagggagua

SEQ ID NO: 1228655 - RNA, 19 nt, Artificial Sequence
  Description of Artificial Sequence: Synthetic oligonucleotide
  Antisense strand to SEQ ID NO: 1228654
uacucccuagaucuggaga

SEQ ID NO: 1228656 - RNA, 19 nt, Artificial Sequence
  Description of Artificial Sequence: Synthetic oligonucleotide
  Sense strand starting at position 2553 of SEQ ID NO: 917352
guagguugccuucuugcua

SEQ ID NO: 1228657 - RNA, 19 nt, Artificial Sequence
  Description of Artificial Sequence: Synthetic oligonucleotide
  Antisense strand to SEQ ID NO: 1228656
uagcaagaaggcaaccuac

SEQ ID NO: 1228658 - RNA, 19 nt, Artificial Sequence
  Description of Artificial Sequence: Synthetic oligonucleotide
  Sense strand starting at position 2765 of SEQ ID NO: 917352
ccauguugaugggcaucaa

SEQ ID NO: 1228659 - RNA, 19 nt, Artificial Sequence
  Description of Artificial Sequence: Synthetic oligonucleotide
  Antisense strand to SEQ ID NO: 1228658
uugaugcccaucaacaugg

SEQ ID NO: 1228660 - RNA, 19 nt, Artificial Sequence
  Description of Artificial Sequence: Synthetic oligonucleotide
  Sense strand starting at position 2766 of SEQ ID NO: 917352
cauguugaugggcaucaaa

SEQ ID NO: 1228661 - RNA, 19 nt, Artificial Sequence
  Description of Artificial Sequence: Synthetic oligonucleotide
  Antisense strand to SEQ ID NO: 1228660
uuugaugcccaucaacaug

SEQ ID NO: 1228662 - RNA, 19 nt, Artificial Sequence
  Description of Artificial Sequence: Synthetic oligonucleotide
  Sense strand starting at position 2828 of SEQ ID NO: 917352
caagaauguuagguuaggu

SEQ ID NO: 1228663 - RNA, 19 nt, Artificial Sequence
  Description of Artificial Sequence: Synthetic oligonucleotide
  Antisense strand to SEQ ID NO: 1228662
accuaaccuaacauucuug

SEQ ID NO: 1228664 - RNA, 19 nt, Artificial Sequence
  Description of Artificial Sequence: Synthetic oligonucleotide
  Sense strand starting at position 2880 of SEQ ID NO: 917352
cuggcugaugguugggaua

SEQ ID NO: 1228665 - RNA, 19 nt, Artificial Sequence
  Description of Artificial Sequence: Synthetic oligonucleotide
  Antisense strand to SEQ ID NO: 1228664
uaucccaaccaucagccag

SEQ ID NO: 1228666 - RNA, 19 nt, Artificial Sequence
  Description of Artificial Sequence: Synthetic oligonucleotide
  Sense strand starting at position 2891 of SEQ ID NO: 917352
uugggauagcccuaguuag

SEQ ID NO: 1228667 - RNA, 19 nt, Artificial Sequence
  Description of Artificial Sequence: Synthetic oligonucleotide
  Antisense strand to SEQ ID NO: 1228666
cuaacuagggcuaucccaa

SEQ ID NO: 1228668 - RNA, 19 nt, Artificial Sequence
  Description of Artificial Sequence: Synthetic oligonucleotide
  Sense strand starting at position 3038 of SEQ ID NO: 917352
ggaaauaguugacccuguu

SEQ ID NO: 1228669 - RNA, 19 nt, Artificial Sequence
  Description of Artificial Sequence: Synthetic oligonucleotide
  Antisense strand to SEQ ID NO: 1228668
aacagggucaacuauuucc

SEQ ID NO: 1228670 - RNA, 19 nt, Artificial Sequence
  Description of Artificial Sequence: Synthetic oligonucleotide
  Sense strand starting at position 3067 of SEQ ID NO: 917352
cuaugcauugaucagacau

SEQ ID NO: 1228671 - RNA, 19 nt, Artificial Sequence
  Description of Artificial Sequence: Synthetic oligonucleotide
  Antisense strand to SEQ ID NO: 1228670
augucugaucaaugcauag

SEQ ID NO: 1228672 - RNA, 19 nt, Artificial Sequence
  Description of Artificial Sequence: Synthetic oligonucleotide
  Sense strand starting at position 3082 of SEQ ID NO: 917352
acauuugcuguuugauuau

SEQ ID NO: 1228673 - RNA, 19 nt, Artificial Sequence
  Description of Artificial Sequence: Synthetic oligonucleotide
  Antisense strand to SEQ ID NO: 1228672
auaaucaaacagcaaaugu

SEQ ID NO: 1228674 - RNA, 19 nt, Artificial Sequence
  Description of Artificial Sequence: Synthetic oligonucleotide
  Sense strand starting at position 3107 of SEQ ID NO: 917352
ucaagcaccguggagauau

SEQ ID NO: 1228675 - RNA, 19 nt, Artificial Sequence
  Description of Artificial Sequence: Synthetic oligonucleotide
  Antisense strand to SEQ ID NO: 1228674
auaucuccacggugcuuga

SEQ ID NO: 1228676 - RNA, 19 nt, Artificial Sequence
  Description of Artificial Sequence: Synthetic oligonucleotide
  Sense strand starting at position 3445 of SEQ ID NO: 917352
guauaaugguuccucuaaa

SEQ ID NO: 1228677 - RNA, 19 nt, Artificial Sequence
  Description of Artificial Sequence: Synthetic oligonucleotide
  Antisense strand to SEQ ID NO: 1228676
uuuagaggaaccauuauac

SEQ ID NO: 1228678 - RNA, 19 nt, Artificial Sequence
  Description of Artificial Sequence: Synthetic oligonucleotide
  Sense strand starting at position 3605 of SEQ ID NO: 917352
agcccaagugccuaucaau

SEQ ID NO: 1228679 - RNA, 19 nt, Artificial Sequence
  Description of Artificial Sequence: Synthetic oligonucleotide
  Antisense strand to SEQ ID NO: 1228678
auugauaggcacuugggcu

SEQ ID NO: 1228680 - RNA, 19 nt, Artificial Sequence
  Description of Artificial Sequence: Synthetic oligonucleotide
  Sense strand starting at position 3757 of SEQ ID NO: 917352
gcacaaauacuguacgauu

SEQ ID NO: 1228681 - RNA, 19 nt, Artificial Sequence
  Description of Artificial Sequence: Synthetic oligonucleotide
  Antisense strand to SEQ ID NO: 1228680
aaucguacaguauuugugc

SEQ ID NO: 1228682 - RNA, 19 nt, Artificial Sequence
  Description of Artificial Sequence: Synthetic oligonucleotide
  Sense strand starting at position 3769 of SEQ ID NO: 917352
uacgauucugcuuauauga

SEQ ID NO: 1228683 - RNA, 19 nt, Artificial Sequence
  Description of Artificial Sequence: Synthetic oligonucleotide
  Antisense strand to SEQ ID NO: 1228682
ucauauaagcagaaucgua

SEQ ID NO: 1228684 - RNA, 19 nt, Artificial Sequence
  Description of Artificial Sequence: Synthetic oligonucleotide
  Sense strand starting at position 3862 of SEQ ID NO: 917352
aggagcuauuguuuaauga

SEQ ID NO: 1228685 - RNA, 19 nt, Artificial Sequence
  Description of Artificial Sequence: Synthetic oligonucleotide
  Antisense strand to SEQ ID NO: 1228684
ucauuaaacaauagcuccu

SEQ ID NO: 1228686 - RNA, 19 nt, Artificial Sequence
  Description of Artificial Sequence: Synthetic oligonucleotide
  Sense strand starting at position 3936 of SEQ ID NO: 917353
guugcauaacaauauuguu

SEQ ID NO: 1228687 - RNA, 19 nt, Artificial Sequence
  Description of Artificial Sequence: Synthetic oligonucleotide
  Antisense strand to SEQ ID NO: 1228686
aacaauauuguuaugcaac

SEQ ID NO: 1228688 - RNA, 19 nt, Artificial Sequence
  Description of Artificial Sequence: Synthetic oligonucleotide
  Sense strand starting at position 2177 of SEQ ID NO: 917353
aggccuuggucucuuaguu

SEQ ID NO: 1228689 - RNA, 19 nt, Artificial Sequence
  Description of Artificial Sequence: Synthetic oligonucleotide
  Antisense strand to SEQ ID NO: 1228688
aacuaagagaccaaggccu

SEQ ID NO: 1228690 - RNA, 19 nt, Artificial Sequence
  Description of Artificial Sequence: Synthetic oligonucleotide
  Sense strand starting at position 2465 of SEQ ID NO: 917353
gcuugaugugcucaccugu

SEQ ID NO: 1228691 - RNA, 19 nt, Artificial Sequence
  Description of Artificial Sequence: Synthetic oligonucleotide
  Antisense strand to SEQ ID NO: 1228690
acaggugagcacaucaagc

SEQ ID NO: 1228692 - RNA, 19 nt, Artificial Sequence
  Description of Artificial Sequence: Synthetic oligonucleotide
  Sense strand starting at position 2832 of SEQ ID NO: 917353
uucuaaaguagcugggauu

SEQ ID NO: 1228693 - RNA, 19 nt, Artificial Sequence
  Description of Artificial Sequence: Synthetic oligonucleotide
  Antisense strand to SEQ ID NO: 1228692
aaucccagcuacuuuagaa

SEQ ID NO: 1228694 - RNA, 19 nt, Artificial Sequence
  Description of Artificial Sequence: Synthetic oligonucleotide
  Sense strand starting at position 3001 of SEQ ID NO: 917353
gugcccgaccaauaaauau

SEQ ID NO: 1228695 - RNA, 19 nt, Artificial Sequence
  Description of Artificial Sequence: Synthetic oligonucleotide
  Antisense strand to SEQ ID NO: 1228694
auauuuauuggucgggcac

SEQ ID NO: 1228696 - RNA, 19 nt, Artificial Sequence
  Description of Artificial Sequence: Synthetic oligonucleotide
  Sense strand starting at position 3057 of SEQ ID NO: 917353
aggucagguugggauucau

SEQ ID NO: 1228697 - RNA, 19 nt, Artificial Sequence
  Description of Artificial Sequence: Synthetic oligonucleotide
  Antisense strand to SEQ ID NO: 1228696
augaaucccaaccugaccu

SEQ ID NO: 1228698 - RNA, 19 nt, Artificial Sequence
  Description of Artificial Sequence: Synthetic oligonucleotide
  Sense strand starting at position 3133 of SEQ ID NO: 917353
acaucuaaguaagugauga

SEQ ID NO: 1228699 - RNA, 19 nt, Artificial Sequence
  Description of Artificial Sequence: Synthetic oligonucleotide
  Antisense strand to SEQ ID NO: 1228698
ucaucacuuacuuagaugu

SEQ ID NO: 1228700 - RNA, 19 nt, Artificial Sequence
  Description of Artificial Sequence: Synthetic oligonucleotide
  Sense strand starting at position 3220 of SEQ ID NO: 917353
ggaggaucuguucauucug

SEQ ID NO: 1228701 - RNA, 19 nt, Artificial Sequence
  Description of Artificial Sequence: Synthetic oligonucleotide
  Antisense strand to SEQ ID NO: 1228700
cagaaugaacagauccucc

SEQ ID NO: 1228702 - RNA, 19 nt, Artificial Sequence
  Description of Artificial Sequence: Synthetic oligonucleotide
  Sense strand starting at position 3576 of SEQ ID NO: 917353
aguagaggguuucuuuaaa

SEQ ID NO: 1228703 - RNA, 19 nt, Artificial Sequence
  Description of Artificial Sequence: Synthetic oligonucleotide
  Antisense strand to SEQ ID NO: 1228702
uuuaaagaaacccucuacu

SEQ ID NO: 1228704 - RNA, 19 nt, Artificial Sequence
  Description of Artificial Sequence: Synthetic oligonucleotide
  Sense strand starting at position 3583 of SEQ ID NO: 917353
gguuucuuuaaauaguggu

SEQ ID NO: 1228705 - RNA, 19 nt, Artificial Sequence
  Description of Artificial Sequence: Synthetic oligonucleotide
  Antisense strand to SEQ ID NO: 1228704
accacuauuuaaagaaacc

SEQ ID NO: 1228706 - RNA, 19 nt, Artificial Sequence
  Description of Artificial Sequence: Synthetic oligonucleotide
  Sense strand starting at position 3593 of SEQ ID NO: 917353
aauagugguugccacuaau

SEQ ID NO: 1228707 - RNA, 19 nt, Artificial Sequence
  Description of Artificial Sequence: Synthetic oligonucleotide
  Antisense strand to SEQ ID NO: 1228706
auuaguggcaaccacuauu

SEQ ID NO: 1228708 - RNA, 19 nt, Artificial Sequence
  Description of Artificial Sequence: Synthetic oligonucleotide
  Sense strand starting at position 3596 of SEQ ID NO: 917353
agugguugccacuaauaua

SEQ ID NO: 1228709 - RNA, 19 nt, Artificial Sequence
  Description of Artificial Sequence: Synthetic oligonucleotide
  Antisense strand to SEQ ID NO: 1228708
uauauuaguggcaaccacu

SEQ ID NO: 1228710 - RNA, 19 nt, Artificial Sequence
  Description of Artificial Sequence: Synthetic oligonucleotide
  Sense strand starting at position 3678 of SEQ ID NO: 917353
ucaacaauguggucuugua

SEQ ID NO: 1228711 - RNA, 19 nt, Artificial Sequence
  Description of Artificial Sequence: Synthetic oligonucleotide
  Antisense strand to SEQ ID NO: 1228710
uacaagaccacauuguuga

SEQ ID NO: 1228712 - RNA, 19 nt, Artificial Sequence
  Description of Artificial Sequence: Synthetic oligonucleotide
  Sense strand starting at position 3715 of SEQ ID NO: 917353
gggugugguuacucaacaa

SEQ ID NO: 1228713 - RNA, 19 nt, Artificial Sequence
  Description of Artificial Sequence: Synthetic oligonucleotide
  Antisense strand to SEQ ID NO: 1228712
uuguugaguaaccacaccc

SEQ ID NO: 1228714 - RNA, 19 nt, Artificial Sequence
  Description of Artificial Sequence: Synthetic oligonucleotide
  Sense strand starting at position 3719 of SEQ ID NO: 917353
gugguuacucaacaauaug

SEQ ID NO: 1228715 - RNA, 19 nt, Artificial Sequence
  Description of Artificial Sequence: Synthetic oligonucleotide
  Antisense strand to SEQ ID NO: 1228714
cauauuguugaguaaccac

SEQ ID NO: 1228716 - RNA, 19 nt, Artificial Sequence
  Description of Artificial Sequence: Synthetic oligonucleotide
  Sense strand starting at position 3727 of SEQ ID NO: 917353
ucaacaauaugagaucgau

SEQ ID NO: 1228717 - RNA, 19 nt, Artificial Sequence
  Description of Artificial Sequence: Synthetic oligonucleotide
  Antisense strand to SEQ ID NO: 1228716
aucgaucucauauuguuga

SEQ ID NO: 1228718 - RNA, 19 nt, Artificial Sequence
  Description of Artificial Sequence: Synthetic oligonucleotide
  Sense strand starting at position 3788 of SEQ ID NO: 917353
ggcaucuucgcagaaccau

SEQ ID NO: 1228719 - RNA, 19 nt, Artificial Sequence
  Description of Artificial Sequence: Synthetic oligonucleotide
  Antisense strand to SEQ ID NO: 1228718
augguucugcgaagaugcc

SEQ ID NO: 1228720 - RNA, 19 nt, Artificial Sequence
  Description of Artificial Sequence: Synthetic oligonucleotide
  Sense strand starting at position 3799 of SEQ ID NO: 917353
agaaccauuucgguguguu

SEQ ID NO: 1228721 - RNA, 19 nt, Artificial Sequence
  Description of Artificial Sequence: Synthetic oligonucleotide
  Antisense strand to SEQ ID NO: 1228720
aacacaccgaaaugguucu

SEQ ID NO: 1228722 - RNA, 19 nt, Artificial Sequence
  Description of Artificial Sequence: Synthetic oligonucleotide
  Sense strand starting at position 3800 of SEQ ID NO: 917353
gaaccauuucgguguguuc

SEQ ID NO: 1228723 - RNA, 19 nt, Artificial Sequence
  Description of Artificial Sequence: Synthetic oligonucleotide
  Antisense strand to SEQ ID NO: 1228722
gaacacaccgaaaugguuc

SEQ ID NO: 1228724 - RNA, 19 nt, Artificial Sequence
  Description of Artificial Sequence: Synthetic oligonucleotide
  Sense strand starting at position 3802 of SEQ ID NO: 917353
accauuucgguguguucau

SEQ ID NO: 1228725 - RNA, 19 nt, Artificial Sequence
  Description of Artificial Sequence: Synthetic oligonucleotide
  Antisense strand to SEQ ID NO: 1228724
augaacacaccgaaauggu

SEQ ID NO: 1228726 - RNA, 19 nt, Artificial Sequence
  Description of Artificial Sequence: Synthetic oligonucleotide
  Sense strand starting at position 3811 of SEQ ID NO: 917353
guguguucaugggcaggaa

SEQ ID NO: 1228727 - RNA, 19 nt, Artificial Sequence
  Description of Artificial Sequence: Synthetic oligonucleotide
  Antisense strand to SEQ ID NO: 1228726
uuccugcccaugaacacac

SEQ ID NO: 1228728 - RNA, 19 nt, Artificial Sequence
  Description of Artificial Sequence: Synthetic oligonucleotide
  Sense strand starting at position 3812 of SEQ ID NO: 917353
uguguucaugggcaggaaa

SEQ ID NO: 1228729 - RNA, 19 nt, Artificial Sequence
  Description of Artificial Sequence: Synthetic oligonucleotide
  Antisense strand to SEQ ID NO: 1228728
uuuccugcccaugaacaca

SEQ ID NO: 1228730 - RNA, 19 nt, Artificial Sequence
  Description of Artificial Sequence: Synthetic oligonucleotide
  Sense strand starting at position 3907 of SEQ ID NO: 917354
aggcuucuuggagaccuau

SEQ ID NO: 1228731 - RNA, 19 nt, Artificial Sequence
  Description of Artificial Sequence: Synthetic oligonucleotide
  Antisense strand to SEQ ID NO: 1228730
auaggucuccaagaagccu

SEQ ID NO: 1228732 - RNA, 19 nt, Artificial Sequence
  Description of Artificial Sequence: Synthetic oligonucleotide
  Sense strand starting at position 99 of SEQ ID NO: 917354
agaucuaguucuccagaau

SEQ ID NO: 1228733 - RNA, 19 nt, Artificial Sequence
  Description of Artificial Sequence: Synthetic oligonucleotide
  Antisense strand to SEQ ID NO: 1228732
auucuggagaacuagaucu

SEQ ID NO: 1228734 - RNA, 19 nt, Artificial Sequence
  Description of Artificial Sequence: Synthetic oligonucleotide
  Sense strand starting at position 141 of SEQ ID NO: 917354
uugguuuagaaacgcucaa

SEQ ID NO: 1228735 - RNA, 19 nt, Artificial Sequence
  Description of Artificial Sequence: Synthetic oligonucleotide
  Antisense strand to SEQ ID NO: 1228734
uugagcguuucuaaaccaa

SEQ ID NO: 1228736 - RNA, 19 nt, Artificial Sequence
  Description of Artificial Sequence: Synthetic oligonucleotide
  Sense strand starting at position 145 of SEQ ID NO: 917354
uuuagaaacgcucaauaua

SEQ ID NO: 1228737 - RNA, 19 nt, Artificial Sequence
  Description of Artificial Sequence: Synthetic oligonucleotide
  Antisense strand to SEQ ID NO: 1228736
uauauugagcguuucuaaa

SEQ ID NO: 1228738 - RNA, 19 nt, Artificial Sequence
  Description of Artificial Sequence: Synthetic oligonucleotide
  Sense strand starting at position 360 of SEQ ID NO: 917354
cgagacuacuaucucaacu

SEQ ID NO: 1228739 - RNA, 19 nt, Artificial Sequence
  Description of Artificial Sequence: Synthetic oligonucleotide
  Antisense strand to SEQ ID NO: 1228738
aguugagauaguagucucg

SEQ ID NO: 1228740 - RNA, 19 nt, Artificial Sequence
  Description of Artificial Sequence: Synthetic oligonucleotide
  Sense strand starting at position 525 of SEQ ID NO: 917354
gggcgagacucucuccaaa

SEQ ID NO: 1228741 - RNA, 19 nt, Artificial Sequence
  Description of Artificial Sequence: Synthetic oligonucleotide
  Antisense strand to SEQ ID NO: 1228740
uuuggagagagucucgccc

SEQ ID NO: 1228742 - RNA, 19 nt, Artificial Sequence
  Description of Artificial Sequence: Synthetic oligonucleotide
  Sense strand starting at position 669 of SEQ ID NO: 917354
cugaguuugcuugauacaa

SEQ ID NO: 1228743 - RNA, 19 nt, Artificial Sequence
  Description of Artificial Sequence: Synthetic oligonucleotide
  Antisense strand to SEQ ID NO: 1228742
uuguaucaagcaaacucag

SEQ ID NO: 1228744 - RNA, 19 nt, Artificial Sequence
  Description of Artificial Sequence: Synthetic oligonucleotide
  Sense strand starting at position 739 of SEQ ID NO: 917354
cagggaaacucagaugaaa

SEQ ID NO: 1228745 - RNA, 19 nt, Artificial Sequence
  Description of Artificial Sequence: Synthetic oligonucleotide
  Antisense strand to SEQ ID NO: 1228744
uuucaucugaguuucccug

SEQ ID NO: 1228746 - RNA, 19 nt, Artificial Sequence
  Description of Artificial Sequence: Synthetic oligonucleotide
  Sense strand starting at position 748 of SEQ ID NO: 917354
ucagaugaaaugcgucuuu

SEQ ID NO: 1228747 - RNA, 19 nt, Artificial Sequence
  Description of Artificial Sequence: Synthetic oligonucleotide
  Antisense strand to SEQ ID NO: 1228746
aaagacgcauuucaucuga

SEQ ID NO: 1228748 - RNA, 19 nt, Artificial Sequence
  Description of Artificial Sequence: Synthetic oligonucleotide
  Sense strand starting at position 789 of SEQ ID NO: 917354
ucgauuaaaccugagcaca

SEQ ID NO: 1228749 - RNA, 19 nt, Artificial Sequence
  Description of Artificial Sequence: Synthetic oligonucleotide
  Antisense strand to SEQ ID NO: 1228748
ugugcucagguuuaaucga

SEQ ID NO: 1228750 - RNA, 19 nt, Artificial Sequence
  Description of Artificial Sequence: Synthetic oligonucleotide
  Sense strand starting at position 847 of SEQ ID NO: 917354
agcauuuccugccugcaaa

SEQ ID NO: 1228751 - RNA, 19 nt, Artificial Sequence
  Description of Artificial Sequence: Synthetic oligonucleotide
  Antisense strand to SEQ ID NO: 1228750
uuugcaggcaggaaaugcu

SEQ ID NO: 1228752 - RNA, 19 nt, Artificial Sequence
  Description of Artificial Sequence: Synthetic oligonucleotide
  Sense strand starting at position 2261 of SEQ ID NO: 917354
cuccgaguuguuuauucca

SEQ ID NO: 1228753 - RNA, 19 nt, Artificial Sequence
  Description of Artificial Sequence: Synthetic oligonucleotide
  Antisense strand to SEQ ID NO: 1228752
uggaauaaacaacucggag

SEQ ID NO: 1228754 - RNA, 19 nt, Artificial Sequence
  Description of Artificial Sequence: Synthetic oligonucleotide
  Sense strand starting at position 2264 of SEQ ID NO: 917354
cgaguuguuuauuccauuu

SEQ ID NO: 1228755 - RNA, 19 nt, Artificial Sequence
  Description of Artificial Sequence: Synthetic oligonucleotide
  Antisense strand to SEQ ID NO: 1228754
aaauggaauaaacaacucg

SEQ ID NO: 1228756 - RNA, 19 nt, Artificial Sequence
  Description of Artificial Sequence: Synthetic oligonucleotide
  Sense strand starting at position 2443 of SEQ ID NO: 917354
gcggaucuggcgccgaauu

SEQ ID NO: 1228757 - RNA, 19 nt, Artificial Sequence
  Description of Artificial Sequence: Synthetic oligonucleotide
  Antisense strand to SEQ ID NO: 1228756
aauucggcgccagauccgc

SEQ ID NO: 1228758 - RNA, 19 nt, Artificial Sequence
  Description of Artificial Sequence: Synthetic oligonucleotide
  Sense strand starting at position 2455 of SEQ ID NO: 917354
ccgaauucucacgagaccu

SEQ ID NO: 1228759 - RNA, 19 nt, Artificial Sequence
  Description of Artificial Sequence: Synthetic oligonucleotide
  Antisense strand to SEQ ID NO: 1228758
aggucucgugagaauucgg

SEQ ID NO: 1228760 - RNA, 19 nt, Artificial Sequence
  Description of Artificial Sequence: Synthetic oligonucleotide
  Sense strand starting at position 2604 of SEQ ID NO: 917354
cuggcucuaccugaagaau

SEQ ID NO: 1228761 - RNA, 19 nt, Artificial Sequence
  Description of Artificial Sequence: Synthetic oligonucleotide
  Antisense strand to SEQ ID NO: 1228760
auucuucagguagagccag

SEQ ID NO: 1228762 - RNA, 19 nt, Artificial Sequence
  Description of Artificial Sequence: Synthetic oligonucleotide
  Sense strand starting at position 2607 of SEQ ID NO: 917354
gcucuaccugaagaauauc

SEQ ID NO: 1228763 - RNA, 19 nt, Artificial Sequence
  Description of Artificial Sequence: Synthetic oligonucleotide
  Antisense strand to SEQ ID NO: 1228762
gauauucuucagguagagc

SEQ ID NO: 1228764 - RNA, 19 nt, Artificial Sequence
  Description of Artificial Sequence: Synthetic oligonucleotide
  Sense strand starting at position 2797 of SEQ ID NO: 917354
ccuguuauucucuguauuu

SEQ ID NO: 1228765 - RNA, 19 nt, Artificial Sequence
  Description of Artificial Sequence: Synthetic oligonucleotide
  Antisense strand to SEQ ID NO: 1228764
aaauacagagaauaacagg

SEQ ID NO: 1228766 - RNA, 19 nt, Artificial Sequence
  Description of Artificial Sequence: Synthetic oligonucleotide
  Sense strand starting at position 2798 of SEQ ID NO: 917354
cuguuauucucuguauuua

SEQ ID NO: 1228767 - RNA, 19 nt, Artificial Sequence
  Description of Artificial Sequence: Synthetic oligonucleotide
  Antisense strand to SEQ ID NO: 1228766
uaaauacagagaauaacag

SEQ ID NO: 1228768 - RNA, 19 nt, Artificial Sequence
  Description of Artificial Sequence: Synthetic oligonucleotide
  Sense strand starting at position 2824 of SEQ ID NO: 917354
aagggccuucgguaaauua

SEQ ID NO: 1228769 - RNA, 19 nt, Artificial Sequence
  Description of Artificial Sequence: Synthetic oligonucleotide
  Antisense strand to SEQ ID NO: 1228768
uaauuuaccgaaggcccuu

SEQ ID NO: 1228770 - RNA, 19 nt, Artificial Sequence
  Description of Artificial Sequence: Synthetic oligonucleotide
  Sense strand starting at position 2864 of SEQ ID NO: 917354
ggacaacacugcuuagaca

SEQ ID NO: 1228771 - RNA, 19 nt, Artificial Sequence
  Description of Artificial Sequence: Synthetic oligonucleotide
  Antisense strand to SEQ ID NO: 1228770
ugucuaagcaguguugucc

SEQ ID NO: 1228772 - RNA, 19 nt, Artificial Sequence
  Description of Artificial Sequence: Synthetic oligonucleotide
  Sense strand starting at position 3151 of SEQ ID NO: 917354
ggaaguauuuaaggaauug

SEQ ID NO: 1228773 - RNA, 19 nt, Artificial Sequence
  Description of Artificial Sequence: Synthetic oligonucleotide
  Antisense strand to SEQ ID NO: 1228772
caauuccuuaaauacuucc

SEQ ID NO: 1228774 - RNA, 19 nt, Artificial Sequence
  Description of Artificial Sequence: Synthetic oligonucleotide
  Sense strand starting at position 3265 of SEQ ID NO: 917354
ggugauguucucuagccaa

SEQ ID NO: 1228775 - RNA, 19 nt, Artificial Sequence
  Description of Artificial Sequence: Synthetic oligonucleotide
  Antisense strand to SEQ ID NO: 1228774
uuggcuagagaacaucacc

SEQ ID NO: 1228776 - RNA, 19 nt, Artificial Sequence
  Description of Artificial Sequence: Synthetic oligonucleotide
  Sense strand starting at position 3279 of SEQ ID NO: 917354
gccaaauucgaagguaaua

SEQ ID NO: 1228777 - RNA, 19 nt, Artificial Sequence
  Description of Artificial Sequence: Synthetic oligonucleotide
  Antisense strand to SEQ ID NO: 1228776
uauuaccuucgaauuuggc

SEQ ID NO: 1228778 - RNA, 19 nt, Artificial Sequence
  Description of Artificial Sequence: Synthetic oligonucleotide
  Sense strand starting at position 3323 of SEQ ID NO: 917354
aaagcaguuucgcuuauuu

SEQ ID NO: 1228779 - RNA, 19 nt, Artificial Sequence
  Description of Artificial Sequence: Synthetic oligonucleotide
  Antisense strand to SEQ ID NO: 1228778
aaauaagcgaaacugcuuu

SEQ ID NO: 1228780 - RNA, 19 nt, Artificial Sequence
  Description of Artificial Sequence: Synthetic oligonucleotide
  Sense strand starting at position 3325 of SEQ ID NO: 917354
agcaguuucgcuuauuuga

SEQ ID NO: 1228781 - RNA, 19 nt, Artificial Sequence
  Description of Artificial Sequence: Synthetic oligonucleotide
  Antisense strand to SEQ ID NO: 1228780
ucaaauaagcgaaacugcu

SEQ ID NO: 1228782 - RNA, 19 nt, Artificial Sequence
  Description of Artificial Sequence: Synthetic oligonucleotide
  Sense strand starting at position 3327 of SEQ ID NO: 917354
caguuucgcuuauuugauu

SEQ ID NO: 1228783 - RNA, 19 nt, Artificial Sequence
  Description of Artificial Sequence: Synthetic oligonucleotide
  Antisense strand to SEQ ID NO: 1228782
aaucaaauaagcgaaacug

SEQ ID NO: 1228784 - RNA, 19 nt, Artificial Sequence
  Description of Artificial Sequence: Synthetic oligonucleotide
  Sense strand starting at position 3328 of SEQ ID NO: 917354
aguuucgcuuauuugauua

SEQ ID NO: 1228785 - RNA, 19 nt, Artificial Sequence
  Description of Artificial Sequence: Synthetic oligonucleotide
  Antisense strand to SEQ ID NO: 1228784
uaaucaaauaagcgaaacu

SEQ ID NO: 1228786 - RNA, 19 nt, Artificial Sequence
  Description of Artificial Sequence: Synthetic oligonucleotide
  Sense strand starting at position 3367 of SEQ ID NO: 917354
acgcauuacguguaccaga

SEQ ID NO: 1228787 - RNA, 19 nt, Artificial Sequence
  Description of Artificial Sequence: Synthetic oligonucleotide
  Antisense strand to SEQ ID NO: 1228786
ucugguacacguaaugcgu

SEQ ID NO: 1228788 - RNA, 19 nt, Artificial Sequence
  Description of Artificial Sequence: Synthetic oligonucleotide
  Sense strand starting at position 3443 of SEQ ID NO: 917354
gugaguucagauggcuuau

SEQ ID NO: 1228789 - RNA, 19 nt, Artificial Sequence
  Description of Artificial Sequence: Synthetic oligonucleotide
  Antisense strand to SEQ ID NO: 1228788
auaagccaucugaacucac

SEQ ID NO: 1228790 - RNA, 19 nt, Artificial Sequence
  Description of Artificial Sequence: Synthetic oligonucleotide
  Sense strand starting at position 3499 of SEQ ID NO: 917354
guaaaccagugucuuaagu

SEQ ID NO: 1228791 - RNA, 19 nt, Artificial Sequence
  Description of Artificial Sequence: Synthetic oligonucleotide
  Antisense strand to SEQ ID NO: 1228790
acuuaagacacugguuuac

SEQ ID NO: 1228792 - RNA, 19 nt, Artificial Sequence
  Description of Artificial Sequence: Synthetic oligonucleotide
  Sense strand starting at position 3529 of SEQ ID NO: 917354
cacauuugcuauuagagga

SEQ ID NO: 1228793 - RNA, 19 nt, Artificial Sequence
  Description of Artificial Sequence: Synthetic oligonucleotide
  Antisense strand to SEQ ID NO: 1228792
uccucuaauagcaaaugug

SEQ ID NO: 1228794 - RNA, 19 nt, Artificial Sequence
  Description of Artificial Sequence: Synthetic oligonucleotide
  Sense strand starting at position 3558 of SEQ ID NO: 917354
gucagacuucuuggagaaa

SEQ ID NO: 1228795 - RNA, 19 nt, Artificial Sequence
  Description of Artificial Sequence: Synthetic oligonucleotide
  Antisense strand to SEQ ID NO: 1228794
uuucuccaagaagucugac

SEQ ID NO: 1228796 - RNA, 19 nt, Artificial Sequence
  Description of Artificial Sequence: Synthetic oligonucleotide
  Sense strand starting at position 3567 of SEQ ID NO: 917354
cuuggagaaaguugauauu

SEQ ID NO: 1228797 - RNA, 19 nt, Artificial Sequence
  Description of Artificial Sequence: Synthetic oligonucleotide
  Antisense strand to SEQ ID NO: 1228796
aauaucaacuuucuccaag

SEQ ID NO: 1228798 - RNA, 19 nt, Artificial Sequence
  Description of Artificial Sequence: Synthetic oligonucleotide
  Sense strand starting at position 3640 of SEQ ID NO: 917354
agauuaaagugccuacacu

SEQ ID NO: 1228799 - RNA, 19 nt, Artificial Sequence
  Description of Artificial Sequence: Synthetic oligonucleotide
  Antisense strand to SEQ ID NO: 1228798
aguguaggcacuuuaaucu

SEQ ID NO: 1228800 - RNA, 19 nt, Artificial Sequence
  Description of Artificial Sequence: Synthetic oligonucleotide
  Sense strand starting at position 3664 of SEQ ID NO: 917354
agcuguguuccucucaguu

SEQ ID NO: 1228801 - RNA, 19 nt, Artificial Sequence
  Description of Artificial Sequence: Synthetic oligonucleotide
  Antisense strand to SEQ ID NO: 1228800
aacugagaggaacacagcu

SEQ ID NO: 1228802 - RNA, 19 nt, Artificial Sequence
  Description of Artificial Sequence: Synthetic oligonucleotide
  Sense strand starting at position 3707 of SEQ ID NO: 917354
gucuguacaccuggauuaa

SEQ ID NO: 1228803 - RNA, 19 nt, Artificial Sequence
  Description of Artificial Sequence: Synthetic oligonucleotide
  Antisense strand to SEQ ID NO: 1228802
uuaauccagguguacagac

SEQ ID NO: 1228804 - RNA, 19 nt, Artificial Sequence
  Description of Artificial Sequence: Synthetic oligonucleotide
  Sense strand starting at position 3784 of SEQ ID NO: 917354
auaagaauucgguagguug

SEQ ID NO: 1228805 - RNA, 19 nt, Artificial Sequence
  Description of Artificial Sequence: Synthetic oligonucleotide
  Antisense strand to SEQ ID NO: 1228804
caaccuaccgaauucuuau

SEQ ID NO: 1228806 - RNA, 19 nt, Artificial Sequence
  Description of Artificial Sequence: Synthetic oligonucleotide
  Sense strand starting at position 3786 of SEQ ID NO: 917354
aagaauucgguagguugua

SEQ ID NO: 1228807 - RNA, 19 nt, Artificial Sequence
  Description of Artificial Sequence: Synthetic oligonucleotide
  Antisense strand to SEQ ID NO: 1228806
uacaaccuaccgaauucuu

SEQ ID NO: 1228808 - RNA, 19 nt, Artificial Sequence
  Description of Artificial Sequence: Synthetic oligonucleotide
  Sense strand starting at position 3787 of SEQ ID NO: 917354
agaauucgguagguuguaa

SEQ ID NO: 1228809 - RNA, 19 nt, Artificial Sequence
  Description of Artificial Sequence: Synthetic oligonucleotide
  Antisense strand to SEQ ID NO: 1228808
uuacaaccuaccgaauucu

SEQ ID NO: 1228810 - RNA, 19 nt, Artificial Sequence
  Description of Artificial Sequence: Synthetic oligonucleotide
  Sense strand starting at position 3795 of SEQ ID NO: 917355
guagguuguaacuauuauu

SEQ ID NO: 1228811 - RNA, 19 nt, Artificial Sequence
  Description of Artificial Sequence: Synthetic oligonucleotide
  Antisense strand to SEQ ID NO: 1228810
aauaauaguuacaaccuac

SEQ ID NO: 1228812 - RNA, 19 nt, Artificial Sequence
  Description of Artificial Sequence: Synthetic oligonucleotide
  Sense strand starting at position 538 of SEQ ID NO: 917355
gcugauuacguacauauga

SEQ ID NO: 1228813 - RNA, 19 nt, Artificial Sequence
  Description of Artificial Sequence: Synthetic oligonucleotide
  Antisense strand to SEQ ID NO: 1228812
ucauauguacguaaucagc

SEQ ID NO: 1228814 - RNA, 19 nt, Artificial Sequence
  Description of Artificial Sequence: Synthetic oligonucleotide
  Sense strand starting at position 553 of SEQ ID NO: 917355
augagauguggcggacacu

SEQ ID NO: 1228815 - RNA, 19 nt, Artificial Sequence
  Description of Artificial Sequence: Synthetic oligonucleotide
  Antisense strand to SEQ ID NO: 1228814
aguguccgccacaucucau

SEQ ID NO: 1228816 - RNA, 19 nt, Artificial Sequence
  Description of Artificial Sequence: Synthetic oligonucleotide
  Sense strand starting at position 582 of SEQ ID NO: 917355
cugguuauucucuaaggca

SEQ ID NO: 1228817 - RNA, 19 nt, Artificial Sequence
  Description of Artificial Sequence: Synthetic oligonucleotide
  Antisense strand to SEQ ID NO: 1228816
ugccuuagagaauaaccag

SEQ ID NO: 1228818 - RNA, 19 nt, Artificial Sequence
  Description of Artificial Sequence: Synthetic oligonucleotide
  Sense strand starting at position 746 of SEQ ID NO: 917355
uccauaaaccauuggugua

SEQ ID NO: 1228819 - RNA, 19 nt, Artificial Sequence
  Description of Artificial Sequence: Synthetic oligonucleotide
  Antisense strand to SEQ ID NO: 1228818
uacaccaaugguuuaugga

SEQ ID NO: 1228820 - RNA, 19 nt, Artificial Sequence
  Description of Artificial Sequence: Synthetic oligonucleotide
  Sense strand starting at position 813 of SEQ ID NO: 917355
ggcauuuccuccucucgga

SEQ ID NO: 1228821 - RNA, 19 nt, Artificial Sequence
  Description of Artificial Sequence: Synthetic oligonucleotide
  Antisense strand to SEQ ID NO: 1228820
uccgagaggaggaaaugcc

SEQ ID NO: 1228822 - RNA, 19 nt, Artificial Sequence
  Description of Artificial Sequence: Synthetic oligonucleotide
  Sense strand starting at position 852 of SEQ ID NO: 917355
cugggcagucuugauucua

SEQ ID NO: 1228823 - RNA, 19 nt, Artificial Sequence
  Description of Artificial Sequence: Synthetic oligonucleotide
  Antisense strand to SEQ ID NO: 1228822
uagaaucaagacugcccag

SEQ ID NO: 1228824 - RNA, 19 nt, Artificial Sequence
  Description of Artificial Sequence: Synthetic oligonucleotide
  Sense strand starting at position 920 of SEQ ID NO: 917355
uugauauacagugggcauu

SEQ ID NO: 1228825 - RNA, 19 nt, Artificial Sequence
  Description of Artificial Sequence: Synthetic oligonucleotide
  Antisense strand to SEQ ID NO: 1228824
aaugcccacuguauaucaa

SEQ ID NO: 1228826 - RNA, 19 nt, Artificial Sequence
  Description of Artificial Sequence: Synthetic oligonucleotide
  Sense strand starting at position 973 of SEQ ID NO: 917355
uccauuaaagcccaggauu

SEQ ID NO: 1228827 - RNA, 19 nt, Artificial Sequence
  Description of Artificial Sequence: Synthetic oligonucleotide
  Antisense strand to SEQ ID NO: 1228826
aauccugggcuuuaaugga

SEQ ID NO: 1228828 - RNA, 19 nt, Artificial Sequence
  Description of Artificial Sequence: Synthetic oligonucleotide
  Sense strand starting at position 1027 of SEQ ID NO: 917355
cucaaauggcaucaguaau

SEQ ID NO: 1228829 - RNA, 19 nt, Artificial Sequence
  Description of Artificial Sequence: Synthetic oligonucleotide
  Antisense strand to SEQ ID NO: 1228828
auuacugaugccauuugag

SEQ ID NO: 1228830 - RNA, 19 nt, Artificial Sequence
  Description of Artificial Sequence: Synthetic oligonucleotide
  Sense strand starting at position 1177 of SEQ ID NO: 917355
auguaaugagucugcaaca

SEQ ID NO: 1228831 - RNA, 19 nt, Artificial Sequence
  Description of Artificial Sequence: Synthetic oligonucleotide
  Antisense strand to SEQ ID NO: 1228830
uguugcagacucauuacau

SEQ ID NO: 1228832 - RNA, 19 nt, Artificial Sequence
  Description of Artificial Sequence: Synthetic oligonucleotide
  Sense strand starting at position 1227 of SEQ ID NO: 917355
auagcacuaugcuuggaua

SEQ ID NO: 1228833 - RNA, 19 nt, Artificial Sequence
  Description of Artificial Sequence: Synthetic oligonucleotide
  Antisense strand to SEQ ID NO: 1228832
uauccaagcauagugcuau

SEQ ID NO: 1228834 - RNA, 19 nt, Artificial Sequence
  Description of Artificial Sequence: Synthetic oligonucleotide
  Sense strand starting at position 1251 of SEQ ID NO: 917355
auauaauuguugucaucca

SEQ ID NO: 1228835 - RNA, 19 nt, Artificial Sequence
  Description of Artificial Sequence: Synthetic oligonucleotide
  Antisense strand to SEQ ID NO: 1228834
uggaugacaacaauuauau

SEQ ID NO: 1228836 - RNA, 19 nt, Artificial Sequence
  Description of Artificial Sequence: Synthetic oligonucleotide
  Sense strand starting at position 1266 of SEQ ID NO: 917355
uccagcaguccagaauuga

SEQ ID NO: 1228837 - RNA, 19 nt, Artificial Sequence
  Description of Artificial Sequence: Synthetic oligonucleotide
  Antisense strand to SEQ ID NO: 1228836
ucaauucuggacugcugga

SEQ ID NO: 1228838 - RNA, 19 nt, Artificial Sequence
  Description of Artificial Sequence: Synthetic oligonucleotide
  Sense strand starting at position 1270 of SEQ ID NO: 917355
gcaguccagaauugaaagu

SEQ ID NO: 1228839 - RNA, 19 nt, Artificial Sequence
  Description of Artificial Sequence: Synthetic oligonucleotide
  Antisense strand to SEQ ID NO: 1228838
acuuucaauucuggacugc

SEQ ID NO: 1228840 - RNA, 19 nt, Artificial Sequence
  Description of Artificial Sequence: Synthetic oligonucleotide
  Sense strand starting at position 1283 of SEQ ID NO: 917355
gaaagugcuugggcuugaa

SEQ ID NO: 1228841 - RNA, 19 nt, Artificial Sequence
  Description of Artificial Sequence: Synthetic oligonucleotide
  Antisense strand to SEQ ID NO: 1228840
uucaagcccaagcacuuuc

SEQ ID NO: 1228842 - RNA, 19 nt, Artificial Sequence
  Description of Artificial Sequence: Synthetic oligonucleotide
  Sense strand starting at position 1344 of SEQ ID NO: 917355
acucgaucccugggugaac

SEQ ID NO: 1228843 - RNA, 19 nt, Artificial Sequence
  Description of Artificial Sequence: Synthetic oligonucleotide
  Antisense strand to SEQ ID NO: 1228842
guucacccagggaucgagu

SEQ ID NO: 1228844 - RNA, 19 nt, Artificial Sequence
  Description of Artificial Sequence: Synthetic oligonucleotide
  Sense strand starting at position 1381 of SEQ ID NO: 917355
ggaauuacuuaacugaguu

SEQ ID NO: 1228845 - RNA, 19 nt, Artificial Sequence
  Description of Artificial Sequence: Synthetic oligonucleotide
  Antisense strand to SEQ ID NO: 1228844
aacucaguuaaguaauucc

SEQ ID NO: 1228846 - RNA, 19 nt, Artificial Sequence
  Description of Artificial Sequence: Synthetic oligonucleotide
  Sense strand starting at position 1385 of SEQ ID NO: 917355
uuacuuaacugaguuagag

SEQ ID NO: 1228847 - RNA, 19 nt, Artificial Sequence
  Description of Artificial Sequence: Synthetic oligonucleotide
  Antisense strand to SEQ ID NO: 1228846
cucuaacucaguuaaguaa

SEQ ID NO: 1228848 - RNA, 19 nt, Artificial Sequence
  Description of Artificial Sequence: Synthetic oligonucleotide
  Sense strand starting at position 1468 of SEQ ID NO: 917355
gucagauaguacuuccuga

SEQ ID NO: 1228849 - RNA, 19 nt, Artificial Sequence
  Description of Artificial Sequence: Synthetic oligonucleotide
  Antisense strand to SEQ ID NO: 1228848
ucaggaaguacuaucugac

SEQ ID NO: 1228850 - RNA, 19 nt, Artificial Sequence
  Description of Artificial Sequence: Synthetic oligonucleotide
  Sense strand starting at position 1473 of SEQ ID NO: 917355
auaguacuuccugauuacu

SEQ ID NO: 1228851 - RNA, 19 nt, Artificial Sequence
  Description of Artificial Sequence: Synthetic oligonucleotide
  Antisense strand to SEQ ID NO: 1228850
aguaaucaggaaguacuau

SEQ ID NO: 1228852 - RNA, 19 nt, Artificial Sequence
  Description of Artificial Sequence: Synthetic oligonucleotide
  Sense strand starting at position 1475 of SEQ ID NO: 917355
aguacuuccugauuacuca

SEQ ID NO: 1228853 - RNA, 19 nt, Artificial Sequence
  Description of Artificial Sequence: Synthetic oligonucleotide
  Antisense strand to SEQ ID NO: 1228852
ugaguaaucaggaaguacu

SEQ ID NO: 1228854 - RNA, 19 nt, Artificial Sequence
  Description of Artificial Sequence: Synthetic oligonucleotide
  Sense strand starting at position 1609 of SEQ ID NO: 917355
ggagacuuggugugacugu

SEQ ID NO: 1228855 - RNA, 19 nt, Artificial Sequence
  Description of Artificial Sequence: Synthetic oligonucleotide
  Antisense strand to SEQ ID NO: 1228854
acagucacaccaagucucc

SEQ ID NO: 1228856 - RNA, 19 nt, Artificial Sequence
  Description of Artificial Sequence: Synthetic oligonucleotide
  Sense strand starting at position 2342 of SEQ ID NO: 917355
gccuuccugcguuugaaau

SEQ ID NO: 1228857 - RNA, 19 nt, Artificial Sequence
  Description of Artificial Sequence: Synthetic oligonucleotide
  Antisense strand to SEQ ID NO: 1228856
auuucaaacgcaggaaggc

SEQ ID NO: 1228858 - RNA, 19 nt, Artificial Sequence
  Description of Artificial Sequence: Synthetic oligonucleotide
  Sense strand starting at position 2367 of SEQ ID NO: 917355
caguguaacuaguuggaaa

SEQ ID NO: 1228859 - RNA, 19 nt, Artificial Sequence
  Description of Artificial Sequence: Synthetic oligonucleotide
  Antisense strand to SEQ ID NO: 1228858
uuuccaacuaguuacacug

SEQ ID NO: 1228860 - RNA, 19 nt, Artificial Sequence
  Description of Artificial Sequence: Synthetic oligonucleotide
  Sense strand starting at position 2368 of SEQ ID NO: 917355
aguguaacuaguuggaaau

SEQ ID NO: 1228861 - RNA, 19 nt, Artificial Sequence
  Description of Artificial Sequence: Synthetic oligonucleotide
  Antisense strand to SEQ ID NO: 1228860
auuuccaacuaguuacacu

SEQ ID NO: 1228862 - RNA, 19 nt, Artificial Sequence
  Description of Artificial Sequence: Synthetic oligonucleotide
  Sense strand starting at position 2369 of SEQ ID NO: 917355
guguaacuaguuggaaaua

SEQ ID NO: 1228863 - RNA, 19 nt, Artificial Sequence
  Description of Artificial Sequence: Synthetic oligonucleotide
  Antisense strand to SEQ ID NO: 1228862
uauuuccaacuaguuacac

SEQ ID NO: 1228864 - RNA, 19 nt, Artificial Sequence
  Description of Artificial Sequence: Synthetic oligonucleotide
  Sense strand starting at position 2670 of SEQ ID NO: 917355
agagacugauuccuagagu

SEQ ID NO: 1228865 - RNA, 19 nt, Artificial Sequence
  Description of Artificial Sequence: Synthetic oligonucleotide
  Antisense strand to SEQ ID NO: 1228864
acucuaggaaucagucucu

SEQ ID NO: 1228866 - RNA, 19 nt, Artificial Sequence
  Description of Artificial Sequence: Synthetic oligonucleotide
  Sense strand starting at position 2685 of SEQ ID NO: 917355
gaguuaccacaucguaaug

SEQ ID NO: 1228867 - RNA, 19 nt, Artificial Sequence
  Description of Artificial Sequence: Synthetic oligonucleotide
  Antisense strand to SEQ ID NO: 1228866
cauuacgaugugguaacuc

SEQ ID NO: 1228868 - RNA, 19 nt, Artificial Sequence
  Description of Artificial Sequence: Synthetic oligonucleotide
  Sense strand starting at position 2793 of SEQ ID NO: 917355
cagaaauugucccugagcu

SEQ ID NO: 1228869 - RNA, 19 nt, Artificial Sequence
  Description of Artificial Sequence: Synthetic oligonucleotide
  Antisense strand to SEQ ID NO: 1228868
agcucagggacaauuucug

SEQ ID NO: 1228870 - RNA, 19 nt, Artificial Sequence
  Description of Artificial Sequence: Synthetic oligonucleotide
  Sense strand starting at position 2794 of SEQ ID NO: 917355
agaaauugucccugagcug

SEQ ID NO: 1228871 - RNA, 19 nt, Artificial Sequence
  Description of Artificial Sequence: Synthetic oligonucleotide
  Antisense strand to SEQ ID NO: 1228870
cagcucagggacaauuucu

SEQ ID NO: 1228872 - RNA, 19 nt, Artificial Sequence
  Description of Artificial Sequence: Synthetic oligonucleotide
  Sense strand starting at position 2795 of SEQ ID NO: 917355
gaaauugucccugagcuga

SEQ ID NO: 1228873 - RNA, 19 nt, Artificial Sequence
  Description of Artificial Sequence: Synthetic oligonucleotide
  Antisense strand to SEQ ID NO: 1228872
ucagcucagggacaauuuc

SEQ ID NO: 1228874 - RNA, 19 nt, Artificial Sequence
  Description of Artificial Sequence: Synthetic oligonucleotide
  Sense strand starting at position 2965 of SEQ ID NO: 917355
gcaaauggucaacaagcau

SEQ ID NO: 1228875 - RNA, 19 nt, Artificial Sequence
  Description of Artificial Sequence: Synthetic oligonucleotide
  Antisense strand to SEQ ID NO: 1228874
augcuuguugaccauuugc

SEQ ID NO: 1228876 - RNA, 19 nt, Artificial Sequence
  Description of Artificial Sequence: Synthetic oligonucleotide
  Sense strand starting at position 3098 of SEQ ID NO: 917355
cuggcaaggcuuuauugaa

SEQ ID NO: 1228877 - RNA, 19 nt, Artificial Sequence
  Description of Artificial Sequence: Synthetic oligonucleotide
  Antisense strand to SEQ ID NO: 1228876
uucaauaaagccuugccag

SEQ ID NO: 1228878 - RNA, 19 nt, Artificial Sequence
  Description of Artificial Sequence: Synthetic oligonucleotide
  Sense strand starting at position 3343 of SEQ ID NO: 917355
ggugcucaucgacaaugga

SEQ ID NO: 1228879 - RNA, 19 nt, Artificial Sequence
  Description of Artificial Sequence: Synthetic oligonucleotide
  Antisense strand to SEQ ID NO: 1228878
uccauugucgaugagcacc

SEQ ID NO: 1228880 - RNA, 19 nt, Artificial Sequence
  Description of Artificial Sequence: Synthetic oligonucleotide
  Sense strand starting at position 3468 of SEQ ID NO: 917355
auugucguaagugaauuaa

SEQ ID NO: 1228881 - RNA, 19 nt, Artificial Sequence
  Description of Artificial Sequence: Synthetic oligonucleotide
  Antisense strand to SEQ ID NO: 1228880
uuaauucacuuacgacaau

SEQ ID NO: 1228882 - RNA, 19 nt, Artificial Sequence
  Description of Artificial Sequence: Synthetic oligonucleotide
  Sense strand starting at position 3472 of SEQ ID NO: 917355
ucguaagugaauuaaugaa

SEQ ID NO: 1228883 - RNA, 19 nt, Artificial Sequence
  Description of Artificial Sequence: Synthetic oligonucleotide
  Antisense strand to SEQ ID NO: 1228882
uucauuaauucacuuacga

SEQ ID NO: 1228884 - RNA, 19 nt, Artificial Sequence
  Description of Artificial Sequence: Synthetic oligonucleotide
  Sense strand starting at position 3690 of SEQ ID NO: 917355
ccacgaauuauauguaggu

SEQ ID NO: 1228885 - RNA, 19 nt, Artificial Sequence
  Description of Artificial Sequence: Synthetic oligonucleotide
  Antisense strand to SEQ ID NO: 1228884
accuacauauaauucgugg

SEQ ID NO: 1228886 - RNA, 19 nt, Artificial Sequence
  Description of Artificial Sequence: Synthetic oligonucleotide
  Sense strand starting at position 3691 of SEQ ID NO: 917355
cacgaauuauauguaggua

SEQ ID NO: 1228887 - RNA, 19 nt, Artificial Sequence
  Description of Artificial Sequence: Synthetic oligonucleotide
  Antisense strand to SEQ ID NO: 1228886
uaccuacauauaauucgug

SEQ ID NO: 1228888 - RNA, 19 nt, Artificial Sequence
  Description of Artificial Sequence: Synthetic oligonucleotide
  Sense strand starting at position 3692 of SEQ ID NO: 917355
acgaauuauauguagguaa

SEQ ID NO: 1228889 - RNA, 19 nt, Artificial Sequence
  Description of Artificial Sequence: Synthetic oligonucleotide
  Antisense strand to SEQ ID NO: 1228888
uuaccuacauauaauucgu

SEQ ID NO: 1228890 - RNA, 19 nt, Artificial Sequence
  Description of Artificial Sequence: Synthetic oligonucleotide
  Sense strand starting at position 3694 of SEQ ID NO: 917356
gaauuauauguagguaaca

SEQ ID NO: 1228891 - RNA, 19 nt, Artificial Sequence
  Description of Artificial Sequence: Synthetic oligonucleotide
  Antisense strand to SEQ ID NO: 1228890
uguuaccuacauauaauuc

SEQ ID NO: 1228892 - RNA, 19 nt, Artificial Sequence
  Description of Artificial Sequence: Synthetic oligonucleotide
  Sense strand starting at position 17 of SEQ ID NO: 917356
ucaucucuguuuguuagaa

SEQ ID NO: 1228893 - RNA, 19 nt, Artificial Sequence
  Description of Artificial Sequence: Synthetic oligonucleotide
  Antisense strand to SEQ ID NO: 1228892
uucuaacaaacagagauga

SEQ ID NO: 1228894 - RNA, 19 nt, Artificial Sequence
  Description of Artificial Sequence: Synthetic oligonucleotide
  Sense strand starting at position 103 of SEQ ID NO: 917356
gauagcauaguaugauuaa

SEQ ID NO: 1228895 - RNA, 19 nt, Artificial Sequence
  Description of Artificial Sequence: Synthetic oligonucleotide
  Antisense strand to SEQ ID NO: 1228894
uuaaucauacuaugcuauc

SEQ ID NO: 1228896 - RNA, 19 nt, Artificial Sequence
  Description of Artificial Sequence: Synthetic oligonucleotide
  Sense strand starting at position 106 of SEQ ID NO: 917356
agcauaguaugauuaagag

SEQ ID NO: 1228897 - RNA, 19 nt, Artificial Sequence
  Description of Artificial Sequence: Synthetic oligonucleotide
  Antisense strand to SEQ ID NO: 1228896
cucuuaaucauacuaugcu

SEQ ID NO: 1228898 - RNA, 19 nt, Artificial Sequence
  Description of Artificial Sequence: Synthetic oligonucleotide
  Sense strand starting at position 169 of SEQ ID NO: 917356
uauagcuucgagcaaguca

SEQ ID NO: 1228899 - RNA, 19 nt, Artificial Sequence
  Description of Artificial Sequence: Synthetic oligonucleotide
  Antisense strand to SEQ ID NO: 1228898
ugacuugcucgaagcuaua

SEQ ID NO: 1228900 - RNA, 19 nt, Artificial Sequence
  Description of Artificial Sequence: Synthetic oligonucleotide
  Sense strand starting at position 305 of SEQ ID NO: 917356
aaaucuuggcuuggucaaa

SEQ ID NO: 1228901 - RNA, 19 nt, Artificial Sequence
  Description of Artificial Sequence: Synthetic oligonucleotide
  Antisense strand to SEQ ID NO: 1228900
uuugaccaagccaagauuu

SEQ ID NO: 1228902 - RNA, 19 nt, Artificial Sequence
  Description of Artificial Sequence: Synthetic oligonucleotide
  Sense strand starting at position 306 of SEQ ID NO: 917356
aaucuuggcuuggucaaau

SEQ ID NO: 1228903 - RNA, 19 nt, Artificial Sequence
  Description of Artificial Sequence: Synthetic oligonucleotide
  Antisense strand to SEQ ID NO: 1228902
auuugaccaagccaagauu

SEQ ID NO: 1228904 - RNA, 19 nt, Artificial Sequence
  Description of Artificial Sequence: Synthetic oligonucleotide
  Sense strand starting at position 389 of SEQ ID NO: 917356
gucucccuacuagaguaaa

SEQ ID NO: 1228905 - RNA, 19 nt, Artificial Sequence
  Description of Artificial Sequence: Synthetic oligonucleotide
  Antisense strand to SEQ ID NO: 1228904
uuuacucuaguagggagac

SEQ ID NO: 1228906 - RNA, 19 nt, Artificial Sequence
  Description of Artificial Sequence: Synthetic oligonucleotide
  Sense strand starting at position 610 of SEQ ID NO: 917356
gucuuacagcugcaauuga

SEQ ID NO: 1228907 - RNA, 19 nt, Artificial Sequence
  Description of Artificial Sequence: Synthetic oligonucleotide
  Antisense strand to SEQ ID NO: 1228906
ucaauugcagcuguaagac

SEQ ID NO: 1228908 - RNA, 19 nt, Artificial Sequence
  Description of Artificial Sequence: Synthetic oligonucleotide
  Sense strand starting at position 644 of SEQ ID NO: 917356
ugaacagaaugauaaagau

SEQ ID NO: 1228909 - RNA, 19 nt, Artificial Sequence
  Description of Artificial Sequence: Synthetic oligonucleotide
  Antisense strand to SEQ ID NO: 1228908
aucuuuaucauucuguuca

SEQ ID NO: 1228910 - RNA, 19 nt, Artificial Sequence
  Description of Artificial Sequence: Synthetic oligonucleotide
  Sense strand starting at position 874 of SEQ ID NO: 917356
aaaucaaguuauguggcaa

SEQ ID NO: 1228911 - RNA, 19 nt, Artificial Sequence
  Description of Artificial Sequence: Synthetic oligonucleotide
  Antisense strand to SEQ ID NO: 1228910
uugccacauaacuugauuu

SEQ ID NO: 1228912 - RNA, 19 nt, Artificial Sequence
  Description of Artificial Sequence: Synthetic oligonucleotide
  Sense strand starting at position 1052 of SEQ ID NO: 917356
ucgacauugacuggagaca

SEQ ID NO: 1228913 - RNA, 19 nt, Artificial Sequence
  Description of Artificial Sequence: Synthetic oligonucleotide
  Antisense strand to SEQ ID NO: 1228912
ugucuccagucaaugucga

SEQ ID NO: 1228914 - RNA, 19 nt, Artificial Sequence
  Description of Artificial Sequence: Synthetic oligonucleotide
  Sense strand starting at position 1093 of SEQ ID NO: 917356
acuccaaccuguuugucaa

SEQ ID NO: 1228915 - RNA, 19 nt, Artificial Sequence
  Description of Artificial Sequence: Synthetic oligonucleotide
  Antisense strand to SEQ ID NO: 1228914
uugacaaacagguuggagu

SEQ ID NO: 1228916 - RNA, 19 nt, Artificial Sequence
  Description of Artificial Sequence: Synthetic oligonucleotide
  Sense strand starting at position 1142 of SEQ ID NO: 917356
acagucaugaaauguguuu

SEQ ID NO: 1228917 - RNA, 19 nt, Artificial Sequence
  Description of Artificial Sequence: Synthetic oligonucleotide
  Antisense strand to SEQ ID NO: 1228916
aaacacauuucaugacugu

SEQ ID NO: 1228918 - RNA, 19 nt, Artificial Sequence
  Description of Artificial Sequence: Synthetic oligonucleotide
  Sense strand starting at position 1144 of SEQ ID NO: 917356
agucaugaaauguguuuag

SEQ ID NO: 1228919 - RNA, 19 nt, Artificial Sequence
  Description of Artificial Sequence: Synthetic oligonucleotide
  Antisense strand to SEQ ID NO: 1228918
cuaaacacauuucaugacu

SEQ ID NO: 1228920 - RNA, 19 nt, Artificial Sequence
  Description of Artificial Sequence: Synthetic oligonucleotide
  Sense strand starting at position 1147 of SEQ ID NO: 917356
caugaaauguguuuagaac

SEQ ID NO: 1228921 - RNA, 19 nt, Artificial Sequence
  Description of Artificial Sequence: Synthetic oligonucleotide
  Antisense strand to SEQ ID NO: 1228920
guucuaaacacauuucaug

SEQ ID NO: 1228922 - RNA, 19 nt, Artificial Sequence
  Description of Artificial Sequence: Synthetic oligonucleotide
  Sense strand starting at position 1156 of SEQ ID NO: 917356
uguuuagaacagugccaaa

SEQ ID NO: 1228923 - RNA, 19 nt, Artificial Sequence
  Description of Artificial Sequence: Synthetic oligonucleotide
  Antisense strand to SEQ ID NO: 1228922
uuuggcacuguucuaaaca

SEQ ID NO: 1228924 - RNA, 19 nt, Artificial Sequence
  Description of Artificial Sequence: Synthetic oligonucleotide
  Sense strand starting at position 1205 of SEQ ID NO: 917356
guaaguucacgggaugcau

SEQ ID NO: 1228925 - RNA, 19 nt, Artificial Sequence
  Description of Artificial Sequence: Synthetic oligonucleotide
  Antisense strand to SEQ ID NO: 1228924
augcaucccgugaacuuac

SEQ ID NO: 1228926 - RNA, 19 nt, Artificial Sequence
  Description of Artificial Sequence: Synthetic oligonucleotide
  Sense strand starting at position 1292 of SEQ ID NO: 917356
gcaguccugacaugguaua

SEQ ID NO: 1228927 - RNA, 19 nt, Artificial Sequence
  Description of Artificial Sequence: Synthetic oligonucleotide
  Antisense strand to SEQ ID NO: 1228926
uauaccaugucaggacugc

SEQ ID NO: 1228928 - RNA, 19 nt, Artificial Sequence
  Description of Artificial Sequence: Synthetic oligonucleotide
  Sense strand starting at position 1293 of SEQ ID NO: 917356
caguccugacaugguauaa

SEQ ID NO: 1228929 - RNA, 19 nt, Artificial Sequence
  Description of Artificial Sequence: Synthetic oligonucleotide
  Antisense strand to SEQ ID NO: 1228928
uuauaccaugucaggacug

SEQ ID NO: 1228930 - RNA, 19 nt, Artificial Sequence
  Description of Artificial Sequence: Synthetic oligonucleotide
  Sense strand starting at position 1477 of SEQ ID NO: 917356
gaagcagaccucgagcaau

SEQ ID NO: 1228931 - RNA, 19 nt, Artificial Sequence
  Description of Artificial Sequence: Synthetic oligonucleotide
  Antisense strand to SEQ ID NO: 1228930
auugcucgaggucugcuuc

SEQ ID NO: 1228932 - RNA, 19 nt, Artificial Sequence
  Description of Artificial Sequence: Synthetic oligonucleotide
  Sense strand starting at position 2257 of SEQ ID NO: 917356
ggucaaugucauugaguca

SEQ ID NO: 1228933 - RNA, 19 nt, Artificial Sequence
  Description of Artificial Sequence: Synthetic oligonucleotide
  Antisense strand to SEQ ID NO: 1228932
ugacucaaugacauugacc

SEQ ID NO: 1228934 - RNA, 19 nt, Artificial Sequence
  Description of Artificial Sequence: Synthetic oligonucleotide
  Sense strand starting at position 2310 of SEQ ID NO: 917356
uccgaaguuccagacaaau

SEQ ID NO: 1228935 - RNA, 19 nt, Artificial Sequence
  Description of Artificial Sequence: Synthetic oligonucleotide
  Antisense strand to SEQ ID NO: 1228934
auuugucuggaacuucgga

SEQ ID NO: 1228936 - RNA, 19 nt, Artificial Sequence
  Description of Artificial Sequence: Synthetic oligonucleotide
  Sense strand starting at position 2417 of SEQ ID NO: 917356
aaguucuaggucuggaaau

SEQ ID NO: 1228937 - RNA, 19 nt, Artificial Sequence
  Description of Artificial Sequence: Synthetic oligonucleotide
  Antisense strand to SEQ ID NO: 1228936
auuuccagaccuagaacuu

SEQ ID NO: 1228938 - RNA, 19 nt, Artificial Sequence
  Description of Artificial Sequence: Synthetic oligonucleotide
  Sense strand starting at position 2419 of SEQ ID NO: 917356
guucuaggucuggaaauca

SEQ ID NO: 1228939 - RNA, 19 nt, Artificial Sequence
  Description of Artificial Sequence: Synthetic oligonucleotide
  Antisense strand to SEQ ID NO: 1228938
ugauuuccagaccuagaac

SEQ ID NO: 1228940 - RNA, 19 nt, Artificial Sequence
  Description of Artificial Sequence: Synthetic oligonucleotide
  Sense strand starting at position 2527 of SEQ ID NO: 917356
agcagaaacccuuguuagu

SEQ ID NO: 1228941 - RNA, 19 nt, Artificial Sequence
  Description of Artificial Sequence: Synthetic oligonucleotide
  Antisense strand to SEQ ID NO: 1228940
acuaacaaggguuucugcu

SEQ ID NO: 1228942 - RNA, 19 nt, Artificial Sequence
  Description of Artificial Sequence: Synthetic oligonucleotide
  Sense strand starting at position 2884 of SEQ ID NO: 917356
gugcuagagccucagauuc

SEQ ID NO: 1228943 - RNA, 19 nt, Artificial Sequence
  Description of Artificial Sequence: Synthetic oligonucleotide
  Antisense strand to SEQ ID NO: 1228942
gaaucugaggcucuagcac

SEQ ID NO: 1228944 - RNA, 19 nt, Artificial Sequence
  Description of Artificial Sequence: Synthetic oligonucleotide
  Sense strand starting at position 2901 of SEQ ID NO: 917356
ucccucuuacuugagaguu

SEQ ID NO: 1228945 - RNA, 19 nt, Artificial Sequence
  Description of Artificial Sequence: Synthetic oligonucleotide
  Antisense strand to SEQ ID NO: 1228944
aacucucaaguaagaggga

SEQ ID NO: 1228946 - RNA, 19 nt, Artificial Sequence
  Description of Artificial Sequence: Synthetic oligonucleotide
  Sense strand starting at position 2966 of SEQ ID NO: 917356
gaagcuguagcaggguaaa

SEQ ID NO: 1228947 - RNA, 19 nt, Artificial Sequence
  Description of Artificial Sequence: Synthetic oligonucleotide
  Antisense strand to SEQ ID NO: 1228946
uuuacccugcuacagcuuc

SEQ ID NO: 1228948 - RNA, 19 nt, Artificial Sequence
  Description of Artificial Sequence: Synthetic oligonucleotide
  Sense strand starting at position 2982 of SEQ ID NO: 917356
aaagucacucagcgaguaa

SEQ ID NO: 1228949 - RNA, 19 nt, Artificial Sequence
  Description of Artificial Sequence: Synthetic oligonucleotide
  Antisense strand to SEQ ID NO: 1228948
uuacucgcugagugacuuu

SEQ ID NO: 1228950 - RNA, 19 nt, Artificial Sequence
  Description of Artificial Sequence: Synthetic oligonucleotide
  Sense strand starting at position 3106 of SEQ ID NO: 917356
guacuaugaucacccagau

SEQ ID NO: 1228951 - RNA, 19 nt, Artificial Sequence
  Description of Artificial Sequence: Synthetic oligonucleotide
  Antisense strand to SEQ ID NO: 1228950
aucugggugaucauaguac

SEQ ID NO: 1228952 - RNA, 19 nt, Artificial Sequence
  Description of Artificial Sequence: Synthetic oligonucleotide
  Sense strand starting at position 3337 of SEQ ID NO: 917356
acacuacagcaugguaaau

SEQ ID NO: 1228953 - RNA, 19 nt, Artificial Sequence
  Description of Artificial Sequence: Synthetic oligonucleotide
  Antisense strand to SEQ ID NO: 1228952
auuuaccaugcuguagugu

SEQ ID NO: 1228954 - RNA, 19 nt, Artificial Sequence
  Description of Artificial Sequence: Synthetic oligonucleotide
  Sense strand starting at position 3346 of SEQ ID NO: 917356
caugguaaaugcccaaaga

SEQ ID NO: 1228955 - RNA, 19 nt, Artificial Sequence
  Description of Artificial Sequence: Synthetic oligonucleotide
  Antisense strand to SEQ ID NO: 1228954
ucuuugggcauuuaccaug

SEQ ID NO: 1228956 - RNA, 19 nt, Artificial Sequence
  Description of Artificial Sequence: Synthetic oligonucleotide
  Sense strand starting at position 3386 of SEQ ID NO: 917356
ucagaaaggugacauuuaa

SEQ ID NO: 1228957 - RNA, 19 nt, Artificial Sequence
  Description of Artificial Sequence: Synthetic oligonucleotide
  Antisense strand to SEQ ID NO: 1228956
uuaaaugucaccuuucuga

SEQ ID NO: 1228958 - RNA, 19 nt, Artificial Sequence
  Description of Artificial Sequence: Synthetic oligonucleotide
  Sense strand starting at position 3393 of SEQ ID NO: 917356
ggugacauuuaauggaauu

SEQ ID NO: 1228959 - RNA, 19 nt, Artificial Sequence
  Description of Artificial Sequence: Synthetic oligonucleotide
  Antisense strand to SEQ ID NO: 1228958
aauuccauuaaaugucacc

SEQ ID NO: 1228960 - RNA, 19 nt, Artificial Sequence
  Description of Artificial Sequence: Synthetic oligonucleotide
  Sense strand starting at position 3635 of SEQ ID NO: 917356
agcagaaacugcuucucau

SEQ ID NO: 1228961 - RNA, 19 nt, Artificial Sequence
  Description of Artificial Sequence: Synthetic oligonucleotide
  Antisense strand to SEQ ID NO: 1228960
augagaagcaguuucugcu

SEQ ID NO: 1228962 - RNA, 19 nt, Artificial Sequence
  Description of Artificial Sequence: Synthetic oligonucleotide
  Sense strand starting at position 3669 of SEQ ID NO: 917356
ugcauuacuuuaguaagag

SEQ ID NO: 1228963 - RNA, 19 nt, Artificial Sequence
  Description of Artificial Sequence: Synthetic oligonucleotide
  Antisense strand to SEQ ID NO: 1228962
cucuuacuaaaguaaugca

SEQ ID NO: 1228964 - RNA, 19 nt, Artificial Sequence
  Description of Artificial Sequence: Synthetic oligonucleotide
  Sense strand starting at position 3693 of SEQ ID NO: 917356
cugagaucuagcuggguac

SEQ ID NO: 1228965 - RNA, 19 nt, Artificial Sequence
  Description of Artificial Sequence: Synthetic oligonucleotide
  Antisense strand to SEQ ID NO: 1228964
guacccagcuagaucucag

SEQ ID NO: 1228966 - RNA, 19 nt, Artificial Sequence
  Description of Artificial Sequence: Synthetic oligonucleotide
  Sense strand starting at position 3694 of SEQ ID NO: 917356
ugagaucuagcuggguaca

SEQ ID NO: 1228967 - RNA, 19 nt, Artificial Sequence
  Description of Artificial Sequence: Synthetic oligonucleotide
  Antisense strand to SEQ ID NO: 1228966
uguacccagcuagaucuca

SEQ ID NO: 1228968 - RNA, 19 nt, Artificial Sequence
  Description of Artificial Sequence: Synthetic oligonucleotide
  Sense strand starting at position 3695 of SEQ ID NO: 917356
gagaucuagcuggguacau

SEQ ID NO: 1228969 - RNA, 19 nt, Artificial Sequence
  Description of Artificial Sequence: Synthetic oligonucleotide
  Antisense strand to SEQ ID NO: 1228968
auguacccagcuagaucuc

SEQ ID NO: 1228970 - RNA, 19 nt, Artificial Sequence
  Description of Artificial Sequence: Synthetic oligonucleotide
  Sense strand starting at position 3953 of SEQ ID NO: 917356
gggaaaggcuugcuuucca

SEQ ID NO: 1228971 - RNA, 19 nt, Artificial Sequence
  Description of Artificial Sequence: Synthetic oligonucleotide
  Antisense strand to SEQ ID NO: 1228970
uggaaagcaagccuuuccc

SEQ ID NO: 1228972 - RNA, 19 nt, Artificial Sequence
  Description of Artificial Sequence: Synthetic oligonucleotide
  Sense strand starting at position 3953 of SEQ ID NO: 917357
gggaaaggcuugcuuucca

SEQ ID NO: 1228973 - RNA, 19 nt, Artificial Sequence
  Description of Artificial Sequence: Synthetic oligonucleotide
  Antisense strand to SEQ ID NO: 1228972
uggaaagcaagccuuuccc

SEQ ID NO: 1228974 - RNA, 19 nt, Artificial Sequence
  Description of Artificial Sequence: Synthetic oligonucleotide
  Sense strand starting at position 2019 of SEQ ID NO: 917357
aucagcauuugcuguguga

SEQ ID NO: 1228975 - RNA, 19 nt, Artificial Sequence
  Description of Artificial Sequence: Synthetic oligonucleotide
  Antisense strand to SEQ ID NO: 1228974
ucacacagcaaaugcugau

SEQ ID NO: 1228976 - RNA, 19 nt, Artificial Sequence
  Description of Artificial Sequence: Synthetic oligonucleotide
  Sense strand starting at position 2021 of SEQ ID NO: 917357
cagcauuugcugugugagu

SEQ ID NO: 1228977 - RNA, 19 nt, Artificial Sequence
  Description of Artificial Sequence: Synthetic oligonucleotide
  Antisense strand to SEQ ID NO: 1228976
acucacacagcaaaugcug

SEQ ID NO: 1228978 - RNA, 19 nt, Artificial Sequence
  Description of Artificial Sequence: Synthetic oligonucleotide
  Sense strand starting at position 2026 of SEQ ID NO: 917357
uuugcugugugagucuauu

SEQ ID NO: 1228979 - RNA, 19 nt, Artificial Sequence
  Description of Artificial Sequence: Synthetic oligonucleotide
  Antisense strand to SEQ ID NO: 1228978
aauagacucacacagcaaa

SEQ ID NO: 1228980 - RNA, 19 nt, Artificial Sequence
  Description of Artificial Sequence: Synthetic oligonucleotide
  Sense strand starting at position 2064 of SEQ ID NO: 917357
gauaaaucuucgccucugu

SEQ ID NO: 1228981 - RNA, 19 nt, Artificial Sequence
  Description of Artificial Sequence: Synthetic oligonucleotide
  Antisense strand to SEQ ID NO: 1228980
acagaggcgaagauuuauc

SEQ ID NO: 1228982 - RNA, 19 nt, Artificial Sequence
  Description of Artificial Sequence: Synthetic oligonucleotide
  Sense strand starting at position 2074 of SEQ ID NO: 917357
cgccucuguucguagaaca

SEQ ID NO: 1228983 - RNA, 19 nt, Artificial Sequence
  Description of Artificial Sequence: Synthetic oligonucleotide
  Antisense strand to SEQ ID NO: 1228982
uguucuacgaacagaggcg

SEQ ID NO: 1228984 - RNA, 19 nt, Artificial Sequence
  Description of Artificial Sequence: Synthetic oligonucleotide
  Sense strand starting at position 2099 of SEQ ID NO: 917357
cugauuucucuacgccaag

SEQ ID NO: 1228985 - RNA, 19 nt, Artificial Sequence
  Description of Artificial Sequence: Synthetic oligonucleotide
  Antisense strand to SEQ ID NO: 1228984
cuuggcguagagaaaucag

SEQ ID NO: 1228986 - RNA, 19 nt, Artificial Sequence
  Description of Artificial Sequence: Synthetic oligonucleotide
  Sense strand starting at position 2339 of SEQ ID NO: 917357
gggaaacagucucugcauu

SEQ ID NO: 1228987 - RNA, 19 nt, Artificial Sequence
  Description of Artificial Sequence: Synthetic oligonucleotide
  Antisense strand to SEQ ID NO: 1228986
aaugcagagacuguuuccc

SEQ ID NO: 1228988 - RNA, 19 nt, Artificial Sequence
  Description of Artificial Sequence: Synthetic oligonucleotide
  Sense strand starting at position 2449 of SEQ ID NO: 917357
aaaccuuggcgaggaauaa

SEQ ID NO: 1228989 - RNA, 19 nt, Artificial Sequence
  Description of Artificial Sequence: Synthetic oligonucleotide
  Antisense strand to SEQ ID NO: 1228988
uuauuccucgccaagguuu

SEQ ID NO: 1228990 - RNA, 19 nt, Artificial Sequence
  Description of Artificial Sequence: Synthetic oligonucleotide
  Sense strand starting at position 2471 of SEQ ID NO: 917357
ugaugaauauuugaagcaa

SEQ ID NO: 1228991 - RNA, 19 nt, Artificial Sequence
  Description of Artificial Sequence: Synthetic oligonucleotide
  Antisense strand to SEQ ID NO: 1228990
uugcuucaaauauucauca

SEQ ID NO: 1228992 - RNA, 19 nt, Artificial Sequence
  Description of Artificial Sequence: Synthetic oligonucleotide
  Sense strand starting at position 2524 of SEQ ID NO: 917357
cucuuauaguaggaggagu

SEQ ID NO: 1228993 - RNA, 19 nt, Artificial Sequence
  Description of Artificial Sequence: Synthetic oligonucleotide
  Antisense strand to SEQ ID NO: 1228992
acuccuccuacuauaagag

SEQ ID NO: 1228994 - RNA, 19 nt, Artificial Sequence
  Description of Artificial Sequence: Synthetic oligonucleotide
  Sense strand starting at position 2565 of SEQ ID NO: 917357
caagguuuggcgugaugca

SEQ ID NO: 1228995 - RNA, 19 nt, Artificial Sequence
  Description of Artificial Sequence: Synthetic oligonucleotide
  Antisense strand to SEQ ID NO: 1228994
ugcaucacgccaaaccuug

SEQ ID NO: 1228996 - RNA, 19 nt, Artificial Sequence
  Description of Artificial Sequence: Synthetic oligonucleotide
  Sense strand starting at position 2566 of SEQ ID NO: 917357
aagguuuggcgugaugcau

SEQ ID NO: 1228997 - RNA, 19 nt, Artificial Sequence
  Description of Artificial Sequence: Synthetic oligonucleotide
  Antisense strand to SEQ ID NO: 1228996
augcaucacgccaaaccuu

SEQ ID NO: 1228998 - RNA, 19 nt, Artificial Sequence
  Description of Artificial Sequence: Synthetic oligonucleotide
  Sense strand starting at position 2572 of SEQ ID NO: 917357
uggcgugaugcauucugca

SEQ ID NO: 1228999 - RNA, 19 nt, Artificial Sequence
  Description of Artificial Sequence: Synthetic oligonucleotide
  Antisense strand to SEQ ID NO: 1228998
ugcagaaugcaucacgcca

SEQ ID NO: 1229000 - RNA, 19 nt, Artificial Sequence
  Description of Artificial Sequence: Synthetic oligonucleotide
  Sense strand starting at position 2574 of SEQ ID NO: 917357
gcgugaugcauucugcagu

SEQ ID NO: 1229001 - RNA, 19 nt, Artificial Sequence
  Description of Artificial Sequence: Synthetic oligonucleotide
  Antisense strand to SEQ ID NO: 1229000
acugcagaaugcaucacgc

SEQ ID NO: 1229002 - RNA, 19 nt, Artificial Sequence
  Description of Artificial Sequence: Synthetic oligonucleotide
  Sense strand starting at position 2697 of SEQ ID NO: 917357
ggauguuagacacaggucu

SEQ ID NO: 1229003 - RNA, 19 nt, Artificial Sequence
  Description of Artificial Sequence: Synthetic oligonucleotide
  Antisense strand to SEQ ID NO: 1229002
agaccugugucuaacaucc

SEQ ID NO: 1229004 - RNA, 19 nt, Artificial Sequence
  Description of Artificial Sequence: Synthetic oligonucleotide
  Sense strand starting at position 2786 of SEQ ID NO: 917357
uccgaucugccggaugagu

SEQ ID NO: 1229005 - RNA, 19 nt, Artificial Sequence
  Description of Artificial Sequence: Synthetic oligonucleotide
  Antisense strand to SEQ ID NO: 1229004
acucauccggcagaucgga

SEQ ID NO: 1229006 - RNA, 19 nt, Artificial Sequence
  Description of Artificial Sequence: Synthetic oligonucleotide
  Sense strand starting at position 2788 of SEQ ID NO: 917357
cgaucugccggaugaguca

SEQ ID NO: 1229007 - RNA, 19 nt, Artificial Sequence
  Description of Artificial Sequence: Synthetic oligonucleotide
  Antisense strand to SEQ ID NO: 1229006
ugacucauccggcagaucg

SEQ ID NO: 1229008 - RNA, 19 nt, Artificial Sequence
  Description of Artificial Sequence: Synthetic oligonucleotide
  Sense strand starting at position 2888 of SEQ ID NO: 917357
uucucugacucagucuaua

SEQ ID NO: 1229009 - RNA, 19 nt, Artificial Sequence
  Description of Artificial Sequence: Synthetic oligonucleotide
  Antisense strand to SEQ ID NO: 1229008
uauagacugagucagagaa

SEQ ID NO: 1229010 - RNA, 19 nt, Artificial Sequence
  Description of Artificial Sequence: Synthetic oligonucleotide
  Sense strand starting at position 3047 of SEQ ID NO: 917357
ucugcuuugcuagguguau

SEQ ID NO: 1229011 - RNA, 19 nt, Artificial Sequence
  Description of Artificial Sequence: Synthetic oligonucleotide
  Antisense strand to SEQ ID NO: 1229010
auacaccuagcaaagcaga

SEQ ID NO: 1229012 - RNA, 19 nt, Artificial Sequence
  Description of Artificial Sequence: Synthetic oligonucleotide
  Sense strand starting at position 3048 of SEQ ID NO: 917357
cugcuuugcuagguguauu

SEQ ID NO: 1229013 - RNA, 19 nt, Artificial Sequence
  Description of Artificial Sequence: Synthetic oligonucleotide
  Antisense strand to SEQ ID NO: 1229012
aauacaccuagcaaagcag

SEQ ID NO: 1229014 - RNA, 19 nt, Artificial Sequence
  Description of Artificial Sequence: Synthetic oligonucleotide
  Sense strand starting at position 3056 of SEQ ID NO: 917357
cuagguguauugguuuauu

SEQ ID NO: 1229015 - RNA, 19 nt, Artificial Sequence
  Description of Artificial Sequence: Synthetic oligonucleotide
  Antisense strand to SEQ ID NO: 1229014
aauaaaccaauacaccuag

SEQ ID NO: 1229016 - RNA, 19 nt, Artificial Sequence
  Description of Artificial Sequence: Synthetic oligonucleotide
  Sense strand starting at position 3164 of SEQ ID NO: 917357
ucagguuuccaguaauugu

SEQ ID NO: 1229017 - RNA, 19 nt, Artificial Sequence
  Description of Artificial Sequence: Synthetic oligonucleotide
  Antisense strand to SEQ ID NO: 1229016
acaauuacuggaaaccuga

SEQ ID NO: 1229018 - RNA, 19 nt, Artificial Sequence
  Description of Artificial Sequence: Synthetic oligonucleotide
  Sense strand starting at position 3174 of SEQ ID NO: 917357
aguaauuguucccagcuua

SEQ ID NO: 1229019 - RNA, 19 nt, Artificial Sequence
  Description of Artificial Sequence: Synthetic oligonucleotide
  Antisense strand to SEQ ID NO: 1229018
uaagcugggaacaauuacu

SEQ ID NO: 1229020 - RNA, 19 nt, Artificial Sequence
  Description of Artificial Sequence: Synthetic oligonucleotide
  Sense strand starting at position 3187 of SEQ ID NO: 917357
agcuuagccucgcaucaua

SEQ ID NO: 1229021 - RNA, 19 nt, Artificial Sequence
  Description of Artificial Sequence: Synthetic oligonucleotide
  Antisense strand to SEQ ID NO: 1229020
uaugaugcgaggcuaagcu

SEQ ID NO: 1229022 - RNA, 19 nt, Artificial Sequence
  Description of Artificial Sequence: Synthetic oligonucleotide
  Sense strand starting at position 3243 of SEQ ID NO: 917357
guccaacaucgauguguac

SEQ ID NO: 1229023 - RNA, 19 nt, Artificial Sequence
  Description of Artificial Sequence: Synthetic oligonucleotide
  Antisense strand to SEQ ID NO: 1229022
guacacaucgauguuggac

SEQ ID NO: 1229024 - RNA, 19 nt, Artificial Sequence
  Description of Artificial Sequence: Synthetic oligonucleotide
  Sense strand starting at position 3249 of SEQ ID NO: 917357
caucgauguguacaguuaa

SEQ ID NO: 1229025 - RNA, 19 nt, Artificial Sequence
  Description of Artificial Sequence: Synthetic oligonucleotide
  Antisense strand to SEQ ID NO: 1229024
uuaacuguacacaucgaug

SEQ ID NO: 1229026 - RNA, 19 nt, Artificial Sequence
  Description of Artificial Sequence: Synthetic oligonucleotide
  Sense strand starting at position 3263 of SEQ ID NO: 917357
guuaauugugcagucuguu

SEQ ID NO: 1229027 - RNA, 19 nt, Artificial Sequence
  Description of Artificial Sequence: Synthetic oligonucleotide
  Antisense strand to SEQ ID NO: 1229026
aacagacugcacaauuaac

SEQ ID NO: 1229028 - RNA, 19 nt, Artificial Sequence
  Description of Artificial Sequence: Synthetic oligonucleotide
  Sense strand starting at position 3360 of SEQ ID NO: 917357
cccacagucugagaaagau

SEQ ID NO: 1229029 - RNA, 19 nt, Artificial Sequence
  Description of Artificial Sequence: Synthetic oligonucleotide
  Antisense strand to SEQ ID NO: 1229028
aucuuucucagacuguggg

SEQ ID NO: 1229030 - RNA, 19 nt, Artificial Sequence
  Description of Artificial Sequence: Synthetic oligonucleotide
  Sense strand starting at position 3368 of SEQ ID NO: 917357
cugagaaagauaugcggau

SEQ ID NO: 1229031 - RNA, 19 nt, Artificial Sequence
  Description of Artificial Sequence: Synthetic oligonucleotide
  Antisense strand to SEQ ID NO: 1229030
auccgcauaucuuucucag

SEQ ID NO: 1229032 - RNA, 19 nt, Artificial Sequence
  Description of Artificial Sequence: Synthetic oligonucleotide
  Sense strand starting at position 3369 of SEQ ID NO: 917357
ugagaaagauaugcggauu

SEQ ID NO: 1229033 - RNA, 19 nt, Artificial Sequence
  Description of Artificial Sequence: Synthetic oligonucleotide
  Antisense strand to SEQ ID NO: 1229032
aauccgcauaucuuucuca

SEQ ID NO: 1229034 - RNA, 19 nt, Artificial Sequence
  Description of Artificial Sequence: Synthetic oligonucleotide
  Sense strand starting at position 3570 of SEQ ID NO: 917357
ccgcuuaaacauugauacu

SEQ ID NO: 1229035 - RNA, 19 nt, Artificial Sequence
  Description of Artificial Sequence: Synthetic oligonucleotide
  Antisense strand to SEQ ID NO: 1229034
aguaucaauguuuaagcgg

SEQ ID NO: 1229036 - RNA, 19 nt, Artificial Sequence
  Description of Artificial Sequence: Synthetic oligonucleotide
  Sense strand starting at position 3694 of SEQ ID NO: 917357
gcucuucggagucauugau

SEQ ID NO: 1229037 - RNA, 19 nt, Artificial Sequence
  Description of Artificial Sequence: Synthetic oligonucleotide
  Antisense strand to SEQ ID NO: 1229036
aucaaugacuccgaagagc

SEQ ID NO: 1229038 - RNA, 19 nt, Artificial Sequence
  Description of Artificial Sequence: Synthetic oligonucleotide
  Sense strand starting at position 3698 of SEQ ID NO: 917357
uucggagucauugauuaga

SEQ ID NO: 1229039 - RNA, 19 nt, Artificial Sequence
  Description of Artificial Sequence: Synthetic oligonucleotide
  Antisense strand to SEQ ID NO: 1229038
ucuaaucaaugacuccgaa

SEQ ID NO: 1229040 - RNA, 19 nt, Artificial Sequence
  Description of Artificial Sequence: Synthetic oligonucleotide
  Sense strand starting at position 3700 of SEQ ID NO: 917357
cggagucauugauuagauc

SEQ ID NO: 1229041 - RNA, 19 nt, Artificial Sequence
  Description of Artificial Sequence: Synthetic oligonucleotide
  Antisense strand to SEQ ID NO: 1229040
gaucuaaucaaugacuccg

SEQ ID NO: 1229042 - RNA, 19 nt, Artificial Sequence
  Description of Artificial Sequence: Synthetic oligonucleotide
  Sense strand starting at position 3708 of SEQ ID NO: 917357
uugauuagaucaguuagau

SEQ ID NO: 1229043 - RNA, 19 nt, Artificial Sequence
  Description of Artificial Sequence: Synthetic oligonucleotide
  Antisense strand to SEQ ID NO: 1229042
aucuaacugaucuaaucaa

SEQ ID NO: 1229044 - RNA, 19 nt, Artificial Sequence
  Description of Artificial Sequence: Synthetic oligonucleotide
  Sense strand starting at position 3806 of SEQ ID NO: 917357
ccuuuaaccaccgggagua

SEQ ID NO: 1229045 - RNA, 19 nt, Artificial Sequence
  Description of Artificial Sequence: Synthetic oligonucleotide
  Antisense strand to SEQ ID NO: 1229044
uacucccggugguuaaagg

SEQ ID NO: 1229046 - RNA, 19 nt, Artificial Sequence
  Description of Artificial Sequence: Synthetic oligonucleotide
  Sense strand starting at position 3915 of SEQ ID NO: 917357
cgggaaucgcaguaugcuu

SEQ ID NO: 1229047 - RNA, 19 nt, Artificial Sequence
  Description of Artificial Sequence: Synthetic oligonucleotide
  Antisense strand to SEQ ID NO: 1229046
aagcauacugcgauucccg

SEQ ID NO: 1229048 - RNA, 19 nt, Artificial Sequence
  Description of Artificial Sequence: Synthetic oligonucleotide
  Sense strand starting at position 3922 of SEQ ID NO: 917357
cgcaguaugcuugcagaau

SEQ ID NO: 1229049 - RNA, 19 nt, Artificial Sequence
  Description of Artificial Sequence: Synthetic oligonucleotide
  Antisense strand to SEQ ID NO: 1229048
auucugcaagcauacugcg

SEQ ID NO: 1229050 - RNA, 19 nt, Artificial Sequence
  Description of Artificial Sequence: Synthetic oligonucleotide
  Sense strand starting at position 3923 of SEQ ID NO: 917357
gcaguaugcuugcagaaua

SEQ ID NO: 1229051 - RNA, 19 nt, Artificial Sequence
  Description of Artificial Sequence: Synthetic oligonucleotide
  Antisense strand to SEQ ID NO: 1229050
uauucugcaagcauacugc

SEQ ID NO: 1229052 - RNA, 19 nt, Artificial Sequence
  Description of Artificial Sequence: Synthetic oligonucleotide
  Sense strand starting at position 3958 of SEQ ID NO: 917358
ccuaaaggguuucucuaca

SEQ ID NO: 1229053 - RNA, 19 nt, Artificial Sequence
  Description of Artificial Sequence: Synthetic oligonucleotide
  Antisense strand to SEQ ID NO: 1229052
uguagagaaacccuuuagg

SEQ ID NO: 1229054 - RNA, 19 nt, Artificial Sequence
  Description of Artificial Sequence: Synthetic oligonucleotide
  Sense strand starting at position 6 of SEQ ID NO: 917358
ugaaguauuccugaggcag

SEQ ID NO: 1229055 - RNA, 19 nt, Artificial Sequence
  Description of Artificial Sequence: Synthetic oligonucleotide
  Antisense strand to SEQ ID NO: 1229054
cugccucaggaauacuuca

SEQ ID NO: 1229056 - RNA, 19 nt, Artificial Sequence
  Description of Artificial Sequence: Synthetic oligonucleotide
  Sense strand starting at position 132 of SEQ ID NO: 917358
ugucgaucuccugagcuga

SEQ ID NO: 1229057 - RNA, 19 nt, Artificial Sequence
  Description of Artificial Sequence: Synthetic oligonucleotide
  Antisense strand to SEQ ID NO: 1229056
ucagcucaggagaucgaca

SEQ ID NO: 1229058 - RNA, 19 nt, Artificial Sequence
  Description of Artificial Sequence: Synthetic oligonucleotide
  Sense strand starting at position 344 of SEQ ID NO: 917358
gcggguagucccucguuua

SEQ ID NO: 1229059 - RNA, 19 nt, Artificial Sequence
  Description of Artificial Sequence: Synthetic oligonucleotide
  Antisense strand to SEQ ID NO: 1229058
uaaacgagggacuacccgc

SEQ ID NO: 1229060 - RNA, 19 nt, Artificial Sequence
  Description of Artificial Sequence: Synthetic oligonucleotide
  Sense strand starting at position 356 of SEQ ID NO: 917358
ucguuuaggcuguacagaa

SEQ ID NO: 1229061 - RNA, 19 nt, Artificial Sequence
  Description of Artificial Sequence: Synthetic oligonucleotide
  Antisense strand to SEQ ID NO: 1229060
uucuguacagccuaaacga

SEQ ID NO: 1229062 - RNA, 19 nt, Artificial Sequence
  Description of Artificial Sequence: Synthetic oligonucleotide
  Sense strand starting at position 850 of SEQ ID NO: 917358
cacugaaaggugggcaauu

SEQ ID NO: 1229063 - RNA, 19 nt, Artificial Sequence
  Description of Artificial Sequence: Synthetic oligonucleotide
  Antisense strand to SEQ ID NO: 1229062
aauugcccaccuuucagug

SEQ ID NO: 1229064 - RNA, 19 nt, Artificial Sequence
  Description of Artificial Sequence: Synthetic oligonucleotide
  Sense strand starting at position 1021 of SEQ ID NO: 917358
aggucuuaggucggaaaga

SEQ ID NO: 1229065 - RNA, 19 nt, Artificial Sequence
  Description of Artificial Sequence: Synthetic oligonucleotide
  Antisense strand to SEQ ID NO: 1229064
ucuuuccgaccuaagaccu

SEQ ID NO: 1229066 - RNA, 19 nt, Artificial Sequence
  Description of Artificial Sequence: Synthetic oligonucleotide
  Sense strand starting at position 1269 of SEQ ID NO: 917358
ccucgaccuuaucuggaua

SEQ ID NO: 1229067 - RNA, 19 nt, Artificial Sequence
  Description of Artificial Sequence: Synthetic oligonucleotide
  Antisense strand to SEQ ID NO: 1229066
uauccagauaaggucgagg

SEQ ID NO: 1229068 - RNA, 19 nt, Artificial Sequence
  Description of Artificial Sequence: Synthetic oligonucleotide
  Sense strand starting at position 1272 of SEQ ID NO: 917358
cgaccuuaucuggauacau

SEQ ID NO: 1229069 - RNA, 19 nt, Artificial Sequence
  Description of Artificial Sequence: Synthetic oligonucleotide
  Antisense strand to SEQ ID NO: 1229068
auguauccagauaaggucg

SEQ ID NO: 1229070 - RNA, 19 nt, Artificial Sequence
  Description of Artificial Sequence: Synthetic oligonucleotide
  Sense strand starting at position 1394 of SEQ ID NO: 917358
ucccgugaaguuuagauaa

SEQ ID NO: 1229071 - RNA, 19 nt, Artificial Sequence
  Description of Artificial Sequence: Synthetic oligonucleotide
  Antisense strand to SEQ ID NO: 1229070
uuaucuaaacuucacggga

SEQ ID NO: 1229072 - RNA, 19 nt, Artificial Sequence
  Description of Artificial Sequence: Synthetic oligonucleotide
  Sense strand starting at position 1429 of SEQ ID NO: 917358
aaaccauccgagugggaau

SEQ ID NO: 1229073 - RNA, 19 nt, Artificial Sequence
  Description of Artificial Sequence: Synthetic oligonucleotide
  Antisense strand to SEQ ID NO: 1229072
auucccacucggaugguuu

SEQ ID NO: 1229074 - RNA, 19 nt, Artificial Sequence
  Description of Artificial Sequence: Synthetic oligonucleotide
  Sense strand starting at position 1864 of SEQ ID NO: 917358
ggacuugcuccugaagacu

SEQ ID NO: 1229075 - RNA, 19 nt, Artificial Sequence
  Description of Artificial Sequence: Synthetic oligonucleotide
  Antisense strand to SEQ ID NO: 1229074
agucuucaggagcaagucc

SEQ ID NO: 1229076 - RNA, 19 nt, Artificial Sequence
  Description of Artificial Sequence: Synthetic oligonucleotide
  Sense strand starting at position 2015 of SEQ ID NO: 917358
uuuguauauggauguaaca

SEQ ID NO: 1229077 - RNA, 19 nt, Artificial Sequence
  Description of Artificial Sequence: Synthetic oligonucleotide
  Antisense strand to SEQ ID NO: 1229076
uguuacauccauauacaaa

SEQ ID NO: 1229078 - RNA, 19 nt, Artificial Sequence
  Description of Artificial Sequence: Synthetic oligonucleotide
  Sense strand starting at position 2177 of SEQ ID NO: 917358
ucaacuucuguguaacgua

SEQ ID NO: 1229079 - RNA, 19 nt, Artificial Sequence
  Description of Artificial Sequence: Synthetic oligonucleotide
  Antisense strand to SEQ ID NO: 1229078
uacguuacacagaaguuga

SEQ ID NO: 1229080 - RNA, 19 nt, Artificial Sequence
  Description of Artificial Sequence: Synthetic oligonucleotide
  Sense strand starting at position 2393 of SEQ ID NO: 917358
agaaacaauugugcuguaa

SEQ ID NO: 1229081 - RNA, 19 nt, Artificial Sequence
  Description of Artificial Sequence: Synthetic oligonucleotide
  Antisense strand to SEQ ID NO: 1229080
uuacagcacaauuguuucu

SEQ ID NO: 1229082 - RNA, 19 nt, Artificial Sequence
  Description of Artificial Sequence: Synthetic oligonucleotide
  Sense strand starting at position 2397 of SEQ ID NO: 917358
acaauugugcuguaacaca

SEQ ID NO: 1229083 - RNA, 19 nt, Artificial Sequence
  Description of Artificial Sequence: Synthetic oligonucleotide
  Antisense strand to SEQ ID NO: 1229082
uguguuacagcacaauugu

SEQ ID NO: 1229084 - RNA, 19 nt, Artificial Sequence
  Description of Artificial Sequence: Synthetic oligonucleotide
  Sense strand starting at position 2417 of SEQ ID NO: 917358
guaguucugccugcaagua

SEQ ID NO: 1229085 - RNA, 19 nt, Artificial Sequence
  Description of Artificial Sequence: Synthetic oligonucleotide
  Antisense strand to SEQ ID NO: 1229084
uacuugcaggcagaacuac

SEQ ID NO: 1229086 - RNA, 19 nt, Artificial Sequence
  Description of Artificial Sequence: Synthetic oligonucleotide
  Sense strand starting at position 2449 of SEQ ID NO: 917358
uuaucuaagcgguaaauug

SEQ ID NO: 1229087 - RNA, 19 nt, Artificial Sequence
  Description of Artificial Sequence: Synthetic oligonucleotide
  Antisense strand to SEQ ID NO: 1229086
caauuuaccgcuuagauaa

SEQ ID NO: 1229088 - RNA, 19 nt, Artificial Sequence
  Description of Artificial Sequence: Synthetic oligonucleotide
  Sense strand starting at position 2884 of SEQ ID NO: 917358
cuucuauggcuuugacacu

SEQ ID NO: 1229089 - RNA, 19 nt, Artificial Sequence
  Description of Artificial Sequence: Synthetic oligonucleotide
  Antisense strand to SEQ ID NO: 1229088
agugucaaagccauagaag

SEQ ID NO: 1229090 - RNA, 19 nt, Artificial Sequence
  Description of Artificial Sequence: Synthetic oligonucleotide
  Sense strand starting at position 2890 of SEQ ID NO: 917358
uggcuuugacacugaauag

SEQ ID NO: 1229091 - RNA, 19 nt, Artificial Sequence
  Description of Artificial Sequence: Synthetic oligonucleotide
  Antisense strand to SEQ ID NO: 1229090
cuauucagugucaaagcca

SEQ ID NO: 1229092 - RNA, 19 nt, Artificial Sequence
  Description of Artificial Sequence: Synthetic oligonucleotide
  Sense strand starting at position 2897 of SEQ ID NO: 917358
gacacugaauagcuaugua

SEQ ID NO: 1229093 - RNA, 19 nt, Artificial Sequence
  Description of Artificial Sequence: Synthetic oligonucleotide
  Antisense strand to SEQ ID NO: 1229092
uacauagcuauucaguguc

SEQ ID NO: 1229094 - RNA, 19 nt, Artificial Sequence
  Description of Artificial Sequence: Synthetic oligonucleotide
  Sense strand starting at position 2974 of SEQ ID NO: 917358
gggauacuccagugcauua

SEQ ID NO: 1229095 - RNA, 19 nt, Artificial Sequence
  Description of Artificial Sequence: Synthetic oligonucleotide
  Antisense strand to SEQ ID NO: 1229094
uaaugcacuggaguauccc

SEQ ID NO: 1229096 - RNA, 19 nt, Artificial Sequence
  Description of Artificial Sequence: Synthetic oligonucleotide
  Sense strand starting at position 2987 of SEQ ID NO: 917358
gcauuaagccucugaaaca

SEQ ID NO: 1229097 - RNA, 19 nt, Artificial Sequence
  Description of Artificial Sequence: Synthetic oligonucleotide
  Antisense strand to SEQ ID NO: 1229096
uguuucagaggcuuaaugc

SEQ ID NO: 1229098 - RNA, 19 nt, Artificial Sequence
  Description of Artificial Sequence: Synthetic oligonucleotide
  Sense strand starting at position 3022 of SEQ ID NO: 917358
uugccauguaaguaaugga

SEQ ID NO: 1229099 - RNA, 19 nt, Artificial Sequence
  Description of Artificial Sequence: Synthetic oligonucleotide
  Antisense strand to SEQ ID NO: 1229098
uccauuacuuacauggcaa

SEQ ID NO: 1229100 - RNA, 19 nt, Artificial Sequence
  Description of Artificial Sequence: Synthetic oligonucleotide
  Sense strand starting at position 3054 of SEQ ID NO: 917358
cggccuuuccuugagaaga

SEQ ID NO: 1229101 - RNA, 19 nt, Artificial Sequence
  Description of Artificial Sequence: Synthetic oligonucleotide
  Antisense strand to SEQ ID NO: 1229100
ucuucucaaggaaaggccg

SEQ ID NO: 1229102 - RNA, 19 nt, Artificial Sequence
  Description of Artificial Sequence: Synthetic oligonucleotide
  Sense strand starting at position 3097 of SEQ ID NO: 917358
cagauauccucugcagggu

SEQ ID NO: 1229103 - RNA, 19 nt, Artificial Sequence
  Description of Artificial Sequence: Synthetic oligonucleotide
  Antisense strand to SEQ ID NO: 1229102
acccugcagaggauaucug

SEQ ID NO: 1229104 - RNA, 19 nt, Artificial Sequence
  Description of Artificial Sequence: Synthetic oligonucleotide
  Sense strand starting at position 3138 of SEQ ID NO: 917358
cugaaugaccagugacuga

SEQ ID NO: 1229105 - RNA, 19 nt, Artificial Sequence
  Description of Artificial Sequence: Synthetic oligonucleotide
  Antisense strand to SEQ ID NO: 1229104
ucagucacuggucauucag

SEQ ID NO: 1229106 - RNA, 19 nt, Artificial Sequence
  Description of Artificial Sequence: Synthetic oligonucleotide
  Sense strand starting at position 3194 of SEQ ID NO: 917358
auaugcuuucuguaggaac

SEQ ID NO: 1229107 - RNA, 19 nt, Artificial Sequence
  Description of Artificial Sequence: Synthetic oligonucleotide
  Antisense strand to SEQ ID NO: 1229106
guuccuacagaaagcauau

SEQ ID NO: 1229108 - RNA, 19 nt, Artificial Sequence
  Description of Artificial Sequence: Synthetic oligonucleotide
  Sense strand starting at position 3196 of SEQ ID NO: 917358
augcuuucuguaggaacua

SEQ ID NO: 1229109 - RNA, 19 nt, Artificial Sequence
  Description of Artificial Sequence: Synthetic oligonucleotide
  Antisense strand to SEQ ID NO: 1229108
uaguuccuacagaaagcau

SEQ ID NO: 1229110 - RNA, 19 nt, Artificial Sequence
  Description of Artificial Sequence: Synthetic oligonucleotide
  Sense strand starting at position 3250 of SEQ ID NO: 917358
auauaaauugcuuggcuga

SEQ ID NO: 1229111 - RNA, 19 nt, Artificial Sequence
  Description of Artificial Sequence: Synthetic oligonucleotide
  Antisense strand to SEQ ID NO: 1229110
ucagccaagcaauuuauau

SEQ ID NO: 1229112 - RNA, 19 nt, Artificial Sequence
  Description of Artificial Sequence: Synthetic oligonucleotide
  Sense strand starting at position 3255 of SEQ ID NO: 917358
aauugcuuggcugagcuaa

SEQ ID NO: 1229113 - RNA, 19 nt, Artificial Sequence
  Description of Artificial Sequence: Synthetic oligonucleotide
  Antisense strand to SEQ ID NO: 1229112
uuagcucagccaagcaauu

SEQ ID NO: 1229114 - RNA, 19 nt, Artificial Sequence
  Description of Artificial Sequence: Synthetic oligonucleotide
  Sense strand starting at position 3619 of SEQ ID NO: 917358
gcacaucugaguugaaggu

SEQ ID NO: 1229115 - RNA, 19 nt, Artificial Sequence
  Description of Artificial Sequence: Synthetic oligonucleotide
  Antisense strand to SEQ ID NO: 1229114
accuucaacucagaugugc

SEQ ID NO: 1229116 - RNA, 19 nt, Artificial Sequence
  Description of Artificial Sequence: Synthetic oligonucleotide
  Sense strand starting at position 3626 of SEQ ID NO: 917358
ugaguugaagguugguaaa

SEQ ID NO: 1229117 - RNA, 19 nt, Artificial Sequence
  Description of Artificial Sequence: Synthetic oligonucleotide
  Antisense strand to SEQ ID NO: 1229116
uuuaccaaccuucaacuca

SEQ ID NO: 1229118 - RNA, 19 nt, Artificial Sequence
  Description of Artificial Sequence: Synthetic oligonucleotide
  Sense strand starting at position 3628 of SEQ ID NO: 917358
aguugaagguugguaaaca

SEQ ID NO: 1229119 - RNA, 19 nt, Artificial Sequence
  Description of Artificial Sequence: Synthetic oligonucleotide
  Antisense strand to SEQ ID NO: 1229118
uguuuaccaaccuucaacu

SEQ ID NO: 1229120 - RNA, 19 nt, Artificial Sequence
  Description of Artificial Sequence: Synthetic oligonucleotide
  Sense strand starting at position 3741 of SEQ ID NO: 917358
cuuugaggucuguaguuga

SEQ ID NO: 1229121 - RNA, 19 nt, Artificial Sequence
  Description of Artificial Sequence: Synthetic oligonucleotide
  Antisense strand to SEQ ID NO: 1229120
ucaacuacagaccucaaag

SEQ ID NO: 1229122 - RNA, 19 nt, Artificial Sequence
  Description of Artificial Sequence: Synthetic oligonucleotide
  Sense strand starting at position 3744 of SEQ ID NO: 917358
ugaggucuguaguugaaac

SEQ ID NO: 1229123 - RNA, 19 nt, Artificial Sequence
  Description of Artificial Sequence: Synthetic oligonucleotide
  Antisense strand to SEQ ID NO: 1229122
guuucaacuacagaccuca

SEQ ID NO: 1229124 - RNA, 19 nt, Artificial Sequence
  Description of Artificial Sequence: Synthetic oligonucleotide
  Sense strand starting at position 3745 of SEQ ID NO: 917358
gaggucuguaguugaaaca

SEQ ID NO: 1229125 - RNA, 19 nt, Artificial Sequence
  Description of Artificial Sequence: Synthetic oligonucleotide
  Antisense strand to SEQ ID NO: 1229124
uguuucaacuacagaccuc

SEQ ID NO: 1229126 - RNA, 19 nt, Artificial Sequence
  Description of Artificial Sequence: Synthetic oligonucleotide
  Sense strand starting at position 3746 of SEQ ID NO: 917358
aggucuguaguugaaacau

SEQ ID NO: 1229127 - RNA, 19 nt, Artificial Sequence
  Description of Artificial Sequence: Synthetic oligonucleotide
  Antisense strand to SEQ ID NO: 1229126
auguuucaacuacagaccu

SEQ ID NO: 1229128 - RNA, 19 nt, Artificial Sequence
  Description of Artificial Sequence: Synthetic oligonucleotide
  Sense strand starting at position 3797 of SEQ ID NO: 917358
cugaaacguguuuaacuua

SEQ ID NO: 1229129 - RNA, 19 nt, Artificial Sequence
  Description of Artificial Sequence: Synthetic oligonucleotide
  Antisense strand to SEQ ID NO: 1229128
uaaguuaaacacguuucag

SEQ ID NO: 1229130 - RNA, 19 nt, Artificial Sequence
  Description of Artificial Sequence: Synthetic oligonucleotide
  Sense strand starting at position 3876 of SEQ ID NO: 917358
ucugucagcagucagagaa

SEQ ID NO: 1229131 - RNA, 19 nt, Artificial Sequence
  Description of Artificial Sequence: Synthetic oligonucleotide
  Antisense strand to SEQ ID NO: 1229130
uucucugacugcugacaga

SEQ ID NO: 1229132 - RNA, 19 nt, Artificial Sequence
  Description of Artificial Sequence: Synthetic oligonucleotide
  Sense strand starting at position 3894 of SEQ ID NO: 917359
accugcagucugcaacaau

SEQ ID NO: 1229133 - RNA, 19 nt, Artificial Sequence
  Description of Artificial Sequence: Synthetic oligonucleotide
  Antisense strand to SEQ ID NO: 1229132
auuguugcagacugcaggu

SEQ ID NO: 1229134 - RNA, 19 nt, Artificial Sequence
  Description of Artificial Sequence: Synthetic oligonucleotide
  Sense strand starting at position 266 of SEQ ID NO: 917359
gguuguucucgcgcaccga

SEQ ID NO: 1229135 - RNA, 19 nt, Artificial Sequence
  Description of Artificial Sequence: Synthetic oligonucleotide
  Antisense strand to SEQ ID NO: 1229134
ucggugcgcgagaacaacc

SEQ ID NO: 1229136 - RNA, 19 nt, Artificial Sequence
  Description of Artificial Sequence: Synthetic oligonucleotide
  Sense strand starting at position 401 of SEQ ID NO: 917359
ucaaguuguacucggcgau

SEQ ID NO: 1229137 - RNA, 19 nt, Artificial Sequence
  Description of Artificial Sequence: Synthetic oligonucleotide
  Antisense strand to SEQ ID NO: 1229136
aucgccgaguacaacuuga

SEQ ID NO: 1229138 - RNA, 19 nt, Artificial Sequence
  Description of Artificial Sequence: Synthetic oligonucleotide
  Sense strand starting at position 487 of SEQ ID NO: 917359
aagugcucgugcccauaga

SEQ ID NO: 1229139 - RNA, 19 nt, Artificial Sequence
  Description of Artificial Sequence: Synthetic oligonucleotide
  Antisense strand to SEQ ID NO: 1229138
ucuaugggcacgagcacuu

SEQ ID NO: 1229140 - RNA, 19 nt, Artificial Sequence
  Description of Artificial Sequence: Synthetic oligonucleotide
  Sense strand starting at position 1574 of SEQ ID NO: 917359
ggagcagagagcuguugaa

SEQ ID NO: 1229141 - RNA, 19 nt, Artificial Sequence
  Description of Artificial Sequence: Synthetic oligonucleotide
  Antisense strand to SEQ ID NO: 1229140
uucaacagcucucugcucc

SEQ ID NO: 1229142 - RNA, 19 nt, Artificial Sequence
  Description of Artificial Sequence: Synthetic oligonucleotide
  Sense strand starting at position 1609 of SEQ ID NO: 917359
aagcuugugucacccgaua

SEQ ID NO: 1229143 - RNA, 19 nt, Artificial Sequence
  Description of Artificial Sequence: Synthetic oligonucleotide
  Antisense strand to SEQ ID NO: 1229142
uaucgggugacacaagcuu

SEQ ID NO: 1229144 - RNA, 19 nt, Artificial Sequence
  Description of Artificial Sequence: Synthetic oligonucleotide
  Sense strand starting at position 1611 of SEQ ID NO: 917359
gcuugugucacccgauacu

SEQ ID NO: 1229145 - RNA, 19 nt, Artificial Sequence
  Description of Artificial Sequence: Synthetic oligonucleotide
  Antisense strand to SEQ ID NO: 1229144
aguaucgggugacacaagc

SEQ ID NO: 1229146 - RNA, 19 nt, Artificial Sequence
  Description of Artificial Sequence: Synthetic oligonucleotide
  Sense strand starting at position 1903 of SEQ ID NO: 917359
cgggagaagucugcgggua

SEQ ID NO: 1229147 - RNA, 19 nt, Artificial Sequence
  Description of Artificial Sequence: Synthetic oligonucleotide
  Antisense strand to SEQ ID NO: 1229146
uacccgcagacuucucccg

SEQ ID NO: 1229148 - RNA, 19 nt, Artificial Sequence
  Description of Artificial Sequence: Synthetic oligonucleotide
  Sense strand starting at position 2022 of SEQ ID NO: 917359
gccuuuauagccgccgaua

SEQ ID NO: 1229149 - RNA, 19 nt, Artificial Sequence
  Description of Artificial Sequence: Synthetic oligonucleotide
  Antisense strand to SEQ ID NO: 1229148
uaucggcggcuauaaaggc

SEQ ID NO: 1229150 - RNA, 19 nt, Artificial Sequence
  Description of Artificial Sequence: Synthetic oligonucleotide
  Sense strand starting at position 2106 of SEQ ID NO: 917359
ugacaaucccuuuaaugug

SEQ ID NO: 1229151 - RNA, 19 nt, Artificial Sequence
  Description of Artificial Sequence: Synthetic oligonucleotide
  Antisense strand to SEQ ID NO: 1229150
cacauuaaagggauuguca

SEQ ID NO: 1229152 - RNA, 19 nt, Artificial Sequence
  Description of Artificial Sequence: Synthetic oligonucleotide
  Sense strand starting at position 2438 of SEQ ID NO: 917359
acagacuugcucugcugaa

SEQ ID NO: 1229153 - RNA, 19 nt, Artificial Sequence
  Description of Artificial Sequence: Synthetic oligonucleotide
  Antisense strand to SEQ ID NO: 1229152
uucagcagagcaagucugu

SEQ ID NO: 1229154 - RNA, 19 nt, Artificial Sequence
  Description of Artificial Sequence: Synthetic oligonucleotide
  Sense strand starting at position 2499 of SEQ ID NO: 917359
uagccucucgauuaagaag

SEQ ID NO: 1229155 - RNA, 19 nt, Artificial Sequence
  Description of Artificial Sequence: Synthetic oligonucleotide
  Antisense strand to SEQ ID NO: 1229154
cuucuuaaucgagaggcua

SEQ ID NO: 1229156 - RNA, 19 nt, Artificial Sequence
  Description of Artificial Sequence: Synthetic oligonucleotide
  Sense strand starting at position 2554 of SEQ ID NO: 917359
uguguacucaauuguguuu

SEQ ID NO: 1229157 - RNA, 19 nt, Artificial Sequence
  Description of Artificial Sequence: Synthetic oligonucleotide
  Antisense strand to SEQ ID NO: 1229156
aaacacaauugaguacaca

SEQ ID NO: 1229158 - RNA, 19 nt, Artificial Sequence
  Description of Artificial Sequence: Synthetic oligonucleotide
  Sense strand starting at position 2730 of SEQ ID NO: 917359
ugaggagauuuggaaaggu

SEQ ID NO: 1229159 - RNA, 19 nt, Artificial Sequence
  Description of Artificial Sequence: Synthetic oligonucleotide
  Antisense strand to SEQ ID NO: 1229158
accuuuccaaaucuccuca

SEQ ID NO: 1229160 - RNA, 19 nt, Artificial Sequence
  Description of Artificial Sequence: Synthetic oligonucleotide
  Sense strand starting at position 2784 of SEQ ID NO: 917359
ccucguuagcaguggaaau

SEQ ID NO: 1229161 - RNA, 19 nt, Artificial Sequence
  Description of Artificial Sequence: Synthetic oligonucleotide
  Antisense strand to SEQ ID NO: 1229160
auuuccacugcuaacgagg

SEQ ID NO: 1229162 - RNA, 19 nt, Artificial Sequence
  Description of Artificial Sequence: Synthetic oligonucleotide
  Sense strand starting at position 2785 of SEQ ID NO: 917359
cucguuagcaguggaaaua

SEQ ID NO: 1229163 - RNA, 19 nt, Artificial Sequence
  Description of Artificial Sequence: Synthetic oligonucleotide
  Antisense strand to SEQ ID NO: 1229162
uauuuccacugcuaacgag

SEQ ID NO: 1229164 - RNA, 19 nt, Artificial Sequence
  Description of Artificial Sequence: Synthetic oligonucleotide
  Sense strand starting at position 2925 of SEQ ID NO: 917359
gagcaaacgccacauguau

SEQ ID NO: 1229165 - RNA, 19 nt, Artificial Sequence
  Description of Artificial Sequence: Synthetic oligonucleotide
  Antisense strand to SEQ ID NO: 1229164
auacauguggcguuugcuc

SEQ ID NO: 1229166 - RNA, 19 nt, Artificial Sequence
  Description of Artificial Sequence: Synthetic oligonucleotide
  Sense strand starting at position 2932 of SEQ ID NO: 917359
cgccacauguauccauuau

SEQ ID NO: 1229167 - RNA, 19 nt, Artificial Sequence
  Description of Artificial Sequence: Synthetic oligonucleotide
  Antisense strand to SEQ ID NO: 1229166
auaauggauacauguggcg

SEQ ID NO: 1229168 - RNA, 19 nt, Artificial Sequence
  Description of Artificial Sequence: Synthetic oligonucleotide
  Sense strand starting at position 2936 of SEQ ID NO: 917359
acauguauccauuauguuc

SEQ ID NO: 1229169 - RNA, 19 nt, Artificial Sequence
  Description of Artificial Sequence: Synthetic oligonucleotide
  Antisense strand to SEQ ID NO: 1229168
gaacauaauggauacaugu

SEQ ID NO: 1229170 - RNA, 19 nt, Artificial Sequence
  Description of Artificial Sequence: Synthetic oligonucleotide
  Sense strand starting at position 2975 of SEQ ID NO: 917359
ugccauaacucuccggcua

SEQ ID NO: 1229171 - RNA, 19 nt, Artificial Sequence
  Description of Artificial Sequence: Synthetic oligonucleotide
  Antisense strand to SEQ ID NO: 1229170
uagccggagaguuauggca

SEQ ID NO: 1229172 - RNA, 19 nt, Artificial Sequence
  Description of Artificial Sequence: Synthetic oligonucleotide
  Sense strand starting at position 2976 of SEQ ID NO: 917359
gccauaacucuccggcuaa

SEQ ID NO: 1229173 - RNA, 19 nt, Artificial Sequence
  Description of Artificial Sequence: Synthetic oligonucleotide
  Antisense strand to SEQ ID NO: 1229172
uuagccggagaguuauggc

SEQ ID NO: 1229174 - RNA, 19 nt, Artificial Sequence
  Description of Artificial Sequence: Synthetic oligonucleotide
  Sense strand starting at position 2997 of SEQ ID NO: 917359
ggugaugggcgcugaauuc

SEQ ID NO: 1229175 - RNA, 19 nt, Artificial Sequence
  Description of Artificial Sequence: Synthetic oligonucleotide
  Antisense strand to SEQ ID NO: 1229174
gaauucagcgcccaucacc

SEQ ID NO: 1229176 - RNA, 19 nt, Artificial Sequence
  Description of Artificial Sequence: Synthetic oligonucleotide
  Sense strand starting at position 3006 of SEQ ID NO: 917359
cgcugaauuccacacaaua

SEQ ID NO: 1229177 - RNA, 19 nt, Artificial Sequence
  Description of Artificial Sequence: Synthetic oligonucleotide
  Antisense strand to SEQ ID NO: 1229176
uauuguguggaauucagcg

SEQ ID NO: 1229178 - RNA, 19 nt, Artificial Sequence
  Description of Artificial Sequence: Synthetic oligonucleotide
  Sense strand starting at position 3029 of SEQ ID NO: 917359
gcucguauuaaagugcauu

SEQ ID NO: 1229179 - RNA, 19 nt, Artificial Sequence
  Description of Artificial Sequence: Synthetic oligonucleotide
  Antisense strand to SEQ ID NO: 1229178
aaugcacuuuaauacgagc

SEQ ID NO: 1229180 - RNA, 19 nt, Artificial Sequence
  Description of Artificial Sequence: Synthetic oligonucleotide
  Sense strand starting at position 3077 of SEQ ID NO: 917359
uccgccuauuuagaggauu

SEQ ID NO: 1229181 - RNA, 19 nt, Artificial Sequence
  Description of Artificial Sequence: Synthetic oligonucleotide
  Antisense strand to SEQ ID NO: 1229180
aauccucuaaauaggcgga

SEQ ID NO: 1229182 - RNA, 19 nt, Artificial Sequence
  Description of Artificial Sequence: Synthetic oligonucleotide
  Sense strand starting at position 3201 of SEQ ID NO: 917359
uuaaccaucugcuuaggaa

SEQ ID NO: 1229183 - RNA, 19 nt, Artificial Sequence
  Description of Artificial Sequence: Synthetic oligonucleotide
  Antisense strand to SEQ ID NO: 1229182
uuccuaagcagaugguuaa

SEQ ID NO: 1229184 - RNA, 19 nt, Artificial Sequence
  Description of Artificial Sequence: Synthetic oligonucleotide
  Sense strand starting at position 3226 of SEQ ID NO: 917359
gagcuucggcacugccaaa

SEQ ID NO: 1229185 - RNA, 19 nt, Artificial Sequence
  Description of Artificial Sequence: Synthetic oligonucleotide
  Antisense strand to SEQ ID NO: 1229184
uuuggcagugccgaagcuc

SEQ ID NO: 1229186 - RNA, 19 nt, Artificial Sequence
  Description of Artificial Sequence: Synthetic oligonucleotide
  Sense strand starting at position 3347 of SEQ ID NO: 917359
caagacggauucuuaauga

SEQ ID NO: 1229187 - RNA, 19 nt, Artificial Sequence
  Description of Artificial Sequence: Synthetic oligonucleotide
  Antisense strand to SEQ ID NO: 1229186
ucauuaagaauccgucuug

SEQ ID NO: 1229188 - RNA, 19 nt, Artificial Sequence
  Description of Artificial Sequence: Synthetic oligonucleotide
  Sense strand starting at position 3378 of SEQ ID NO: 917359
ggcuuuauugagcaggcua

SEQ ID NO: 1229189 - RNA, 19 nt, Artificial Sequence
  Description of Artificial Sequence: Synthetic oligonucleotide
  Antisense strand to SEQ ID NO: 1229188
uagccugcucaauaaagcc

SEQ ID NO: 1229190 - RNA, 19 nt, Artificial Sequence
  Description of Artificial Sequence: Synthetic oligonucleotide
  Sense strand starting at position 3464 of SEQ ID NO: 917359
aggcgauagguuugguaag

SEQ ID NO: 1229191 - RNA, 19 nt, Artificial Sequence
  Description of Artificial Sequence: Synthetic oligonucleotide
  Antisense strand to SEQ ID NO: 1229190
cuuaccaaaccuaucgccu

SEQ ID NO: 1229192 - RNA, 19 nt, Artificial Sequence
  Description of Artificial Sequence: Synthetic oligonucleotide
  Sense strand starting at position 3466 of SEQ ID NO: 917359
gcgauagguuugguaagua

SEQ ID NO: 1229193 - RNA, 19 nt, Artificial Sequence
  Description of Artificial Sequence: Synthetic oligonucleotide
  Antisense strand to SEQ ID NO: 1229192
uacuuaccaaaccuaucgc

SEQ ID NO: 1229194 - RNA, 19 nt, Artificial Sequence
  Description of Artificial Sequence: Synthetic oligonucleotide
  Sense strand starting at position 3470 of SEQ ID NO: 917359
uagguuugguaaguagauu

SEQ ID NO: 1229195 - RNA, 19 nt, Artificial Sequence
  Description of Artificial Sequence: Synthetic oligonucleotide
  Antisense strand to SEQ ID NO: 1229194
aaucuacuuaccaaaccua

SEQ ID NO: 1229196 - RNA, 19 nt, Artificial Sequence
  Description of Artificial Sequence: Synthetic oligonucleotide
  Sense strand starting at position 3476 of SEQ ID NO: 917359
ugguaaguagauugaauuc

SEQ ID NO: 1229197 - RNA, 19 nt, Artificial Sequence
  Description of Artificial Sequence: Synthetic oligonucleotide
  Antisense strand to SEQ ID NO: 1229196
gaauucaaucuacuuacca

SEQ ID NO: 1229198 - RNA, 19 nt, Artificial Sequence
  Description of Artificial Sequence: Synthetic oligonucleotide
  Sense strand starting at position 3597 of SEQ ID NO: 917359
agaagagggucaggaguuu

SEQ ID NO: 1229199 - RNA, 19 nt, Artificial Sequence
  Description of Artificial Sequence: Synthetic oligonucleotide
  Antisense strand to SEQ ID NO: 1229198
aaacuccugacccucuucu

SEQ ID NO: 1229200 - RNA, 19 nt, Artificial Sequence
  Description of Artificial Sequence: Synthetic oligonucleotide
  Sense strand starting at position 3606 of SEQ ID NO: 917359
ucaggaguuuccuuggagu

SEQ ID NO: 1229201 - RNA, 19 nt, Artificial Sequence
  Description of Artificial Sequence: Synthetic oligonucleotide
  Antisense strand to SEQ ID NO: 1229200
acuccaaggaaacuccuga

SEQ ID NO: 1229202 - RNA, 19 nt, Artificial Sequence
  Description of Artificial Sequence: Synthetic oligonucleotide
  Sense strand starting at position 3608 of SEQ ID NO: 917359
aggaguuuccuuggaguag

SEQ ID NO: 1229203 - RNA, 19 nt, Artificial Sequence
  Description of Artificial Sequence: Synthetic oligonucleotide
  Antisense strand to SEQ ID NO: 1229202
cuacuccaaggaaacuccu

SEQ ID NO: 1229204 - RNA, 19 nt, Artificial Sequence
  Description of Artificial Sequence: Synthetic oligonucleotide
  Sense strand starting at position 3657 of SEQ ID NO: 917359
augagaggugcuuggaauu

SEQ ID NO: 1229205 - RNA, 19 nt, Artificial Sequence
  Description of Artificial Sequence: Synthetic oligonucleotide
  Antisense strand to SEQ ID NO: 1229204
aauuccaagcaccucucau

SEQ ID NO: 1229206 - RNA, 19 nt, Artificial Sequence
  Description of Artificial Sequence: Synthetic oligonucleotide
  Sense strand starting at position 3663 of SEQ ID NO: 917359
ggugcuuggaauugucaga

SEQ ID NO: 1229207 - RNA, 19 nt, Artificial Sequence
  Description of Artificial Sequence: Synthetic oligonucleotide
  Antisense strand to SEQ ID NO: 1229206
ucugacaauuccaagcacc

SEQ ID NO: 1229208 - RNA, 19 nt, Artificial Sequence
  Description of Artificial Sequence: Synthetic oligonucleotide
  Sense strand starting at position 3670 of SEQ ID NO: 917359
ggaauugucagagagcgga

SEQ ID NO: 1229209 - RNA, 19 nt, Artificial Sequence
  Description of Artificial Sequence: Synthetic oligonucleotide
  Antisense strand to SEQ ID NO: 1229208
uccgcucucugacaauucc

SEQ ID NO: 1229210 - RNA, 19 nt, Artificial Sequence
  Description of Artificial Sequence: Synthetic oligonucleotide
  Sense strand starting at position 3813 of SEQ ID NO: 917359
uagucuugggaaugcuaaa

SEQ ID NO: 1229211 - RNA, 19 nt, Artificial Sequence
  Description of Artificial Sequence: Synthetic oligonucleotide
  Antisense strand to SEQ ID NO: 1229210
uuuagcauucccaagacua

SEQ ID NO: 1229212 - RNA, 19 nt, Artificial Sequence
  Description of Artificial Sequence: Synthetic oligonucleotide
  Sense strand starting at position 3936 of SEQ ID NO: 917359
aagugcgauuuaguaugua

SEQ ID NO: 1229213 - RNA, 19 nt, Artificial Sequence
  Description of Artificial Sequence: Synthetic oligonucleotide
  Antisense strand to SEQ ID NO: 1229212
uacauacuaaaucgcacuu

SEQ ID NO: 1229214 - RNA, 19 nt, Artificial Sequence
  Description of Artificial Sequence: Synthetic oligonucleotide
  Sense strand starting at position 3936 of SEQ ID NO: 917360
aagugcgauuuaguaugua

SEQ ID NO: 1229215 - RNA, 19 nt, Artificial Sequence
  Description of Artificial Sequence: Synthetic oligonucleotide
  Antisense strand to SEQ ID NO: 1229214
uacauacuaaaucgcacuu

SEQ ID NO: 1229216 - RNA, 19 nt, Artificial Sequence
  Description of Artificial Sequence: Synthetic oligonucleotide
  Sense strand starting at position 1 of SEQ ID NO: 917360
ggcaauuccucucuaauag

SEQ ID NO: 1229217 - RNA, 19 nt, Artificial Sequence
  Description of Artificial Sequence: Synthetic oligonucleotide
  Antisense strand to SEQ ID NO: 1229216
cuauuagagaggaauugcc

SEQ ID NO: 1229218 - RNA, 19 nt, Artificial Sequence
  Description of Artificial Sequence: Synthetic oligonucleotide
  Sense strand starting at position 21 of SEQ ID NO: 917360
guaaauaaguucuugagcu

SEQ ID NO: 1229219 - RNA, 19 nt, Artificial Sequence
  Description of Artificial Sequence: Synthetic oligonucleotide
  Antisense strand to SEQ ID NO: 1229218
agcucaagaacuuauuuac

SEQ ID NO: 1229220 - RNA, 19 nt, Artificial Sequence
  Description of Artificial Sequence: Synthetic oligonucleotide
  Sense strand starting at position 25 of SEQ ID NO: 917360
auaaguucuugagcuauug

SEQ ID NO: 1229221 - RNA, 19 nt, Artificial Sequence
  Description of Artificial Sequence: Synthetic oligonucleotide
  Antisense strand to SEQ ID NO: 1229220
caauagcucaagaacuuau

SEQ ID NO: 1229222 - RNA, 19 nt, Artificial Sequence
  Description of Artificial Sequence: Synthetic oligonucleotide
  Sense strand starting at position 34 of SEQ ID NO: 917360
ugagcuauugcggaaucca

SEQ ID NO: 1229223 - RNA, 19 nt, Artificial Sequence
  Description of Artificial Sequence: Synthetic oligonucleotide
  Antisense strand to SEQ ID NO: 1229222
uggauuccgcaauagcuca

SEQ ID NO: 1229224 - RNA, 19 nt, Artificial Sequence
  Description of Artificial Sequence: Synthetic oligonucleotide
  Sense strand starting at position 90 of SEQ ID NO: 917360
aucccucagguccaugaua

SEQ ID NO: 1229225 - RNA, 19 nt, Artificial Sequence
  Description of Artificial Sequence: Synthetic oligonucleotide
  Antisense strand to SEQ ID NO: 1229224
uaucauggaccugagggau

SEQ ID NO: 1229226 - RNA, 19 nt, Artificial Sequence
  Description of Artificial Sequence: Synthetic oligonucleotide
  Sense strand starting at position 92 of SEQ ID NO: 917360
cccucagguccaugauaau

SEQ ID NO: 1229227 - RNA, 19 nt, Artificial Sequence
  Description of Artificial Sequence: Synthetic oligonucleotide
  Antisense strand to SEQ ID NO: 1229226
auuaucauggaccugaggg

SEQ ID NO: 1229228 - RNA, 19 nt, Artificial Sequence
  Description of Artificial Sequence: Synthetic oligonucleotide
  Sense strand starting at position 140 of SEQ ID NO: 917360
guuuaaagguuuccacuga

SEQ ID NO: 1229229 - RNA, 19 nt, Artificial Sequence
  Description of Artificial Sequence: Synthetic oligonucleotide
  Antisense strand to SEQ ID NO: 1229228
ucaguggaaaccuuuaaac

SEQ ID NO: 1229230 - RNA, 19 nt, Artificial Sequence
  Description of Artificial Sequence: Synthetic oligonucleotide
  Sense strand starting at position 363 of SEQ ID NO: 917360
caaguuuacucuguggaga

SEQ ID NO: 1229231 - RNA, 19 nt, Artificial Sequence
  Description of Artificial Sequence: Synthetic oligonucleotide
  Antisense strand to SEQ ID NO: 1229230
ucuccacagaguaaacuug

SEQ ID NO: 1229232 - RNA, 19 nt, Artificial Sequence
  Description of Artificial Sequence: Synthetic oligonucleotide
  Sense strand starting at position 405 of SEQ ID NO: 917360
guugcauuugccgggagaa

SEQ ID NO: 1229233 - RNA, 19 nt, Artificial Sequence
  Description of Artificial Sequence: Synthetic oligonucleotide
  Antisense strand to SEQ ID NO: 1229232
uucucccggcaaaugcaac

SEQ ID NO: 1229234 - RNA, 19 nt, Artificial Sequence
  Description of Artificial Sequence: Synthetic oligonucleotide
  Sense strand starting at position 1004 of SEQ ID NO: 917360
gugaaacgcagcuaacauu

SEQ ID NO: 1229235 - RNA, 19 nt, Artificial Sequence
  Description of Artificial Sequence: Synthetic oligonucleotide
  Antisense strand to SEQ ID NO: 1229234
aauguuagcugcguuucac

SEQ ID NO: 1229236 - RNA, 19 nt, Artificial Sequence
  Description of Artificial Sequence: Synthetic oligonucleotide
  Sense strand starting at position 1086 of SEQ ID NO: 917360
ccugaucucugguuagaau

SEQ ID NO: 1229237 - RNA, 19 nt, Artificial Sequence
  Description of Artificial Sequence: Synthetic oligonucleotide
  Antisense strand to SEQ ID NO: 1229236
auucuaaccagagaucagg

SEQ ID NO: 1229238 - RNA, 19 nt, Artificial Sequence
  Description of Artificial Sequence: Synthetic oligonucleotide
  Sense strand starting at position 1166 of SEQ ID NO: 917360
cuuagauaacugcaguuua

SEQ ID NO: 1229239 - RNA, 19 nt, Artificial Sequence
  Description of Artificial Sequence: Synthetic oligonucleotide
  Antisense strand to SEQ ID NO: 1229238
uaaacugcaguuaucuaag

SEQ ID NO: 1229240 - RNA, 19 nt, Artificial Sequence
  Description of Artificial Sequence: Synthetic oligonucleotide
  Sense strand starting at position 1216 of SEQ ID NO: 917360
uugaguaggacuggucagu

SEQ ID NO: 1229241 - RNA, 19 nt, Artificial Sequence
  Description of Artificial Sequence: Synthetic oligonucleotide
  Antisense strand to SEQ ID NO: 1229240
acugaccaguccuacucaa

SEQ ID NO: 1229242 - RNA, 19 nt, Artificial Sequence
  Description of Artificial Sequence: Synthetic oligonucleotide
  Sense strand starting at position 1233 of SEQ ID NO: 917360
guucucaggcucuaaucuu

SEQ ID NO: 1229243 - RNA, 19 nt, Artificial Sequence
  Description of Artificial Sequence: Synthetic oligonucleotide
  Antisense strand to SEQ ID NO: 1229242
aagauuagagccugagaac

SEQ ID NO: 1229244 - RNA, 19 nt, Artificial Sequence
  Description of Artificial Sequence: Synthetic oligonucleotide
  Sense strand starting at position 1300 of SEQ ID NO: 917360
gagugaugcagguagggau

SEQ ID NO: 1229245 - RNA, 19 nt, Artificial Sequence
  Description of Artificial Sequence: Synthetic oligonucleotide
  Antisense strand to SEQ ID NO: 1229244
aucccuaccugcaucacuc

SEQ ID NO: 1229246 - RNA, 19 nt, Artificial Sequence
  Description of Artificial Sequence: Synthetic oligonucleotide
  Sense strand starting at position 1474 of SEQ ID NO: 917360
guaugcugcaguuaggaau

SEQ ID NO: 1229247 - RNA, 19 nt, Artificial Sequence
  Description of Artificial Sequence: Synthetic oligonucleotide
  Antisense strand to SEQ ID NO: 1229246
auuccuaacugcagcauac

SEQ ID NO: 1229248 - RNA, 19 nt, Artificial Sequence
  Description of Artificial Sequence: Synthetic oligonucleotide
  Sense strand starting at position 1628 of SEQ ID NO: 917360
acggauuugucguuaguca

SEQ ID NO: 1229249 - RNA, 19 nt, Artificial Sequence
  Description of Artificial Sequence: Synthetic oligonucleotide
  Antisense strand to SEQ ID NO: 1229248
ugacuaacgacaaauccgu

SEQ ID NO: 1229250 - RNA, 19 nt, Artificial Sequence
  Description of Artificial Sequence: Synthetic oligonucleotide
  Sense strand starting at position 1629 of SEQ ID NO: 917360
cggauuugucguuagucau

SEQ ID NO: 1229251 - RNA, 19 nt, Artificial Sequence
  Description of Artificial Sequence: Synthetic oligonucleotide
  Antisense strand to SEQ ID NO: 1229250
augacuaacgacaaauccg

SEQ ID NO: 1229252 - RNA, 19 nt, Artificial Sequence
  Description of Artificial Sequence: Synthetic oligonucleotide
  Sense strand starting at position 1780 of SEQ ID NO: 917360
gccaauacugcuuaagucu

SEQ ID NO: 1229253 - RNA, 19 nt, Artificial Sequence
  Description of Artificial Sequence: Synthetic oligonucleotide
  Antisense strand to SEQ ID NO: 1229252
agacuuaagcaguauuggc

SEQ ID NO: 1229254 - RNA, 19 nt, Artificial Sequence
  Description of Artificial Sequence: Synthetic oligonucleotide
  Sense strand starting at position 1805 of SEQ ID NO: 917360
ucuuguaggaaacgucaga

SEQ ID NO: 1229255 - RNA, 19 nt, Artificial Sequence
  Description of Artificial Sequence: Synthetic oligonucleotide
  Antisense strand to SEQ ID NO: 1229254
ucugacguuuccuacaaga

SEQ ID NO: 1229256 - RNA, 19 nt, Artificial Sequence
  Description of Artificial Sequence: Synthetic oligonucleotide
  Sense strand starting at position 1831 of SEQ ID NO: 917360
ugaugaugauucucugaca

SEQ ID NO: 1229257 - RNA, 19 nt, Artificial Sequence
  Description of Artificial Sequence: Synthetic oligonucleotide
  Antisense strand to SEQ ID NO: 1229256
ugucagagaaucaucauca

SEQ ID NO: 1229258 - RNA, 19 nt, Artificial Sequence
  Description of Artificial Sequence: Synthetic oligonucleotide
  Sense strand starting at position 1846 of SEQ ID NO: 917360
gacagcuauccgggugaca

SEQ ID NO: 1229259 - RNA, 19 nt, Artificial Sequence
  Description of Artificial Sequence: Synthetic oligonucleotide
  Antisense strand to SEQ ID NO: 1229258
ugucacccggauagcuguc

SEQ ID NO: 1229260 - RNA, 19 nt, Artificial Sequence
  Description of Artificial Sequence: Synthetic oligonucleotide
  Sense strand starting at position 1878 of SEQ ID NO: 917360
uuccuaaucgguuaucucu

SEQ ID NO: 1229261 - RNA, 19 nt, Artificial Sequence
  Description of Artificial Sequence: Synthetic oligonucleotide
  Antisense strand to SEQ ID NO: 1229260
agagauaaccgauuaggaa

SEQ ID NO: 1229262 - RNA, 19 nt, Artificial Sequence
  Description of Artificial Sequence: Synthetic oligonucleotide
  Sense strand starting at position 2703 of SEQ ID NO: 917360
uuuggaaucucugcggaga

SEQ ID NO: 1229263 - RNA, 19 nt, Artificial Sequence
  Description of Artificial Sequence: Synthetic oligonucleotide
  Antisense strand to SEQ ID NO: 1229262
ucuccgcagagauuccaaa

SEQ ID NO: 1229264 - RNA, 19 nt, Artificial Sequence
  Description of Artificial Sequence: Synthetic oligonucleotide
  Sense strand starting at position 3133 of SEQ ID NO: 917360
guacuaaauccucacaagu

SEQ ID NO: 1229265 - RNA, 19 nt, Artificial Sequence
  Description of Artificial Sequence: Synthetic oligonucleotide
  Antisense strand to SEQ ID NO: 1229264
acuugugaggauuuaguac

SEQ ID NO: 1229266 - RNA, 19 nt, Artificial Sequence
  Description of Artificial Sequence: Synthetic oligonucleotide
  Sense strand starting at position 3274 of SEQ ID NO: 917360
accacaaagguuuguguaa

SEQ ID NO: 1229267 - RNA, 19 nt, Artificial Sequence
  Description of Artificial Sequence: Synthetic oligonucleotide
  Antisense strand to SEQ ID NO: 1229266
uuacacaaaccuuuguggu

SEQ ID NO: 1229268 - RNA, 19 nt, Artificial Sequence
  Description of Artificial Sequence: Synthetic oligonucleotide
  Sense strand starting at position 3275 of SEQ ID NO: 917360
ccacaaagguuuguguaau

SEQ ID NO: 1229269 - RNA, 19 nt, Artificial Sequence
  Description of Artificial Sequence: Synthetic oligonucleotide
  Antisense strand to SEQ ID NO: 1229268
auuacacaaaccuuugugg

SEQ ID NO: 1229270 - RNA, 19 nt, Artificial Sequence
  Description of Artificial Sequence: Synthetic oligonucleotide
  Sense strand starting at position 3309 of SEQ ID NO: 917360
ccugauaccugaguaaagu

SEQ ID NO: 1229271 - RNA, 19 nt, Artificial Sequence
  Description of Artificial Sequence: Synthetic oligonucleotide
  Antisense strand to SEQ ID NO: 1229270
acuuuacucagguaucagg

SEQ ID NO: 1229272 - RNA, 19 nt, Artificial Sequence
  Description of Artificial Sequence: Synthetic oligonucleotide
  Sense strand starting at position 3310 of SEQ ID NO: 917360
cugauaccugaguaaaguu

SEQ ID NO: 1229273 - RNA, 19 nt, Artificial Sequence
  Description of Artificial Sequence: Synthetic oligonucleotide
  Antisense strand to SEQ ID NO: 1229272
aacuuuacucagguaucag

SEQ ID NO: 1229274 - RNA, 19 nt, Artificial Sequence
  Description of Artificial Sequence: Synthetic oligonucleotide
  Sense strand starting at position 3317 of SEQ ID NO: 917360
cugaguaaaguuugaagca

SEQ ID NO: 1229275 - RNA, 19 nt, Artificial Sequence
  Description of Artificial Sequence: Synthetic oligonucleotide
  Antisense strand to SEQ ID NO: 1229274
ugcuucaaacuuuacucag

SEQ ID NO: 1229276 - RNA, 19 nt, Artificial Sequence
  Description of Artificial Sequence: Synthetic oligonucleotide
  Sense strand starting at position 3383 of SEQ ID NO: 917360
accuauaaagguugucaga

SEQ ID NO: 1229277 - RNA, 19 nt, Artificial Sequence
  Description of Artificial Sequence: Synthetic oligonucleotide
  Antisense strand to SEQ ID NO: 1229276
ucugacaaccuuuauaggu

SEQ ID NO: 1229278 - RNA, 19 nt, Artificial Sequence
  Description of Artificial Sequence: Synthetic oligonucleotide
  Sense strand starting at position 3385 of SEQ ID NO: 917360
cuauaaagguugucagaga

SEQ ID NO: 1229279 - RNA, 19 nt, Artificial Sequence
  Description of Artificial Sequence: Synthetic oligonucleotide
  Antisense strand to SEQ ID NO: 1229278
ucucugacaaccuuuauag

SEQ ID NO: 1229280 - RNA, 19 nt, Artificial Sequence
  Description of Artificial Sequence: Synthetic oligonucleotide
  Sense strand starting at position 3393 of SEQ ID NO: 917360
guugucagagaaggucuua

SEQ ID NO: 1229281 - RNA, 19 nt, Artificial Sequence
  Description of Artificial Sequence: Synthetic oligonucleotide
  Antisense strand to SEQ ID NO: 1229280
uaagaccuucucugacaac

SEQ ID NO: 1229282 - RNA, 19 nt, Artificial Sequence
  Description of Artificial Sequence: Synthetic oligonucleotide
  Sense strand starting at position 3403 of SEQ ID NO: 917360
aaggucuuaguacaugauu

SEQ ID NO: 1229283 - RNA, 19 nt, Artificial Sequence
  Description of Artificial Sequence: Synthetic oligonucleotide
  Antisense strand to SEQ ID NO: 1229282
aaucauguacuaagaccuu

SEQ ID NO: 1229284 - RNA, 19 nt, Artificial Sequence
  Description of Artificial Sequence: Synthetic oligonucleotide
  Sense strand starting at position 3405 of SEQ ID NO: 917360
ggucuuaguacaugauuga

SEQ ID NO: 1229285 - RNA, 19 nt, Artificial Sequence
  Description of Artificial Sequence: Synthetic oligonucleotide
  Antisense strand to SEQ ID NO: 1229284
ucaaucauguacuaagacc

SEQ ID NO: 1229286 - RNA, 19 nt, Artificial Sequence
  Description of Artificial Sequence: Synthetic oligonucleotide
  Sense strand starting at position 3406 of SEQ ID NO: 917360
gucuuaguacaugauugaa

SEQ ID NO: 1229287 - RNA, 19 nt, Artificial Sequence
  Description of Artificial Sequence: Synthetic oligonucleotide
  Antisense strand to SEQ ID NO: 1229286
uucaaucauguacuaagac

SEQ ID NO: 1229288 - RNA, 19 nt, Artificial Sequence
  Description of Artificial Sequence: Synthetic oligonucleotide
  Sense strand starting at position 3408 of SEQ ID NO: 917360
cuuaguacaugauugaaua

SEQ ID NO: 1229289 - RNA, 19 nt, Artificial Sequence
  Description of Artificial Sequence: Synthetic oligonucleotide
  Antisense strand to SEQ ID NO: 1229288
uauucaaucauguacuaag

SEQ ID NO: 1229290 - RNA, 19 nt, Artificial Sequence
  Description of Artificial Sequence: Synthetic oligonucleotide
  Sense strand starting at position 3419 of SEQ ID NO: 917360
auugaauaacuuggucuaa

SEQ ID NO: 1229291 - RNA, 19 nt, Artificial Sequence
  Description of Artificial Sequence: Synthetic oligonucleotide
  Antisense strand to SEQ ID NO: 1229290
uuagaccaaguuauucaau

SEQ ID NO: 1229292 - RNA, 19 nt, Artificial Sequence
  Description of Artificial Sequence: Synthetic oligonucleotide
  Sense strand starting at position 3421 of SEQ ID NO: 917360
ugaauaacuuggucuaacu

SEQ ID NO: 1229293 - RNA, 19 nt, Artificial Sequence
  Description of Artificial Sequence: Synthetic oligonucleotide
  Antisense strand to SEQ ID NO: 1229292
aguuagaccaaguuauuca

SEQ ID NO: 1229294 - RNA, 19 nt, Artificial Sequence
  Description of Artificial Sequence: Synthetic oligonucleotide
  Sense strand starting at position 3741 of SEQ ID NO: 917360
augaaauuguaagcucuuu

SEQ ID NO: 1229295 - RNA, 19 nt, Artificial Sequence
  Description of Artificial Sequence: Synthetic oligonucleotide
  Antisense strand to SEQ ID NO: 1229294
aaagagcuuacaauuucau

SEQ ID NO: 1229296 - RNA, 19 nt, Artificial Sequence
  Description of Artificial Sequence: Synthetic oligonucleotide
  Sense strand starting at position 3741 of SEQ ID NO: 917361
augaaauuguaagcucuuu

SEQ ID NO: 1229297 - RNA, 19 nt, Artificial Sequence
  Description of Artificial Sequence: Synthetic oligonucleotide
  Antisense strand to SEQ ID NO: 1229296
aaagagcuuacaauuucau

SEQ ID NO: 1229298 - RNA, 19 nt, Artificial Sequence
  Description of Artificial Sequence: Synthetic oligonucleotide
  Sense strand starting at position 101 of SEQ ID NO: 917361
gcaugcacaucuccauaga

SEQ ID NO: 1229299 - RNA, 19 nt, Artificial Sequence
  Description of Artificial Sequence: Synthetic oligonucleotide
  Antisense strand to SEQ ID NO: 1229298
ucuauggagaugugcaugc

SEQ ID NO: 1229300 - RNA, 19 nt, Artificial Sequence
  Description of Artificial Sequence: Synthetic oligonucleotide
  Sense strand starting at position 104 of SEQ ID NO: 917361
ugcacaucuccauagaagu

SEQ ID NO: 1229301 - RNA, 19 nt, Artificial Sequence
  Description of Artificial Sequence: Synthetic oligonucleotide
  Antisense strand to SEQ ID NO: 1229300
acuucuauggagaugugca

SEQ ID NO: 1229302 - RNA, 19 nt, Artificial Sequence
  Description of Artificial Sequence: Synthetic oligonucleotide
  Sense strand starting at position 187 of SEQ ID NO: 917361
agucuuucccaucauguga

SEQ ID NO: 1229303 - RNA, 19 nt, Artificial Sequence
  Description of Artificial Sequence: Synthetic oligonucleotide
  Antisense strand to SEQ ID NO: 1229302
ucacaugaugggaaagacu

SEQ ID NO: 1229304 - RNA, 19 nt, Artificial Sequence
  Description of Artificial Sequence: Synthetic oligonucleotide
  Sense strand starting at position 194 of SEQ ID NO: 917361
cccaucaugugacuacgaa

SEQ ID NO: 1229305 - RNA, 19 nt, Artificial Sequence
  Description of Artificial Sequence: Synthetic oligonucleotide
  Antisense strand to SEQ ID NO: 1229304
uucguagucacaugauggg

SEQ ID NO: 1229306 - RNA, 19 nt, Artificial Sequence
  Description of Artificial Sequence: Synthetic oligonucleotide
  Sense strand starting at position 195 of SEQ ID NO: 917361
ccaucaugugacuacgaag

SEQ ID NO: 1229307 - RNA, 19 nt, Artificial Sequence
  Description of Artificial Sequence: Synthetic oligonucleotide
  Antisense strand to SEQ ID NO: 1229306
cuucguagucacaugaugg

SEQ ID NO: 1229308 - RNA, 19 nt, Artificial Sequence
  Description of Artificial Sequence: Synthetic oligonucleotide
  Sense strand starting at position 219 of SEQ ID NO: 917361
ucagguuuguaucuuuaac

SEQ ID NO: 1229309 - RNA, 19 nt, Artificial Sequence
  Description of Artificial Sequence: Synthetic oligonucleotide
  Antisense strand to SEQ ID NO: 1229308
guuaaagauacaaaccuga

SEQ ID NO: 1229310 - RNA, 19 nt, Artificial Sequence
  Description of Artificial Sequence: Synthetic oligonucleotide
  Sense strand starting at position 236 of SEQ ID NO: 917361
acccaaaucugucuguuua

SEQ ID NO: 1229311 - RNA, 19 nt, Artificial Sequence
  Description of Artificial Sequence: Synthetic oligonucleotide
  Antisense strand to SEQ ID NO: 1229310
uaaacagacagauuugggu

SEQ ID NO: 1229312 - RNA, 19 nt, Artificial Sequence
  Description of Artificial Sequence: Synthetic oligonucleotide
  Sense strand starting at position 237 of SEQ ID NO: 917361
cccaaaucugucuguuuaa

SEQ ID NO: 1229313 - RNA, 19 nt, Artificial Sequence
  Description of Artificial Sequence: Synthetic oligonucleotide
  Antisense strand to SEQ ID NO: 1229312
uuaaacagacagauuuggg

SEQ ID NO: 1229314 - RNA, 19 nt, Artificial Sequence
  Description of Artificial Sequence: Synthetic oligonucleotide
  Sense strand starting at position 238 of SEQ ID NO: 917361
ccaaaucugucuguuuaaa

SEQ ID NO: 1229315 - RNA, 19 nt, Artificial Sequence
  Description of Artificial Sequence: Synthetic oligonucleotide
  Antisense strand to SEQ ID NO: 1229314
uuuaaacagacagauuugg

SEQ ID NO: 1229316 - RNA, 19 nt, Artificial Sequence
  Description of Artificial Sequence: Synthetic oligonucleotide
  Sense strand starting at position 442 of SEQ ID NO: 917361
guguucucauauccagaug

SEQ ID NO: 1229317 - RNA, 19 nt, Artificial Sequence
  Description of Artificial Sequence: Synthetic oligonucleotide
  Antisense strand to SEQ ID NO: 1229316
caucuggauaugagaacac

SEQ ID NO: 1229318 - RNA, 19 nt, Artificial Sequence
  Description of Artificial Sequence: Synthetic oligonucleotide
  Sense strand starting at position 445 of SEQ ID NO: 917361
uucucauauccagaugugu

SEQ ID NO: 1229319 - RNA, 19 nt, Artificial Sequence
  Description of Artificial Sequence: Synthetic oligonucleotide
  Antisense strand to SEQ ID NO: 1229318
acacaucuggauaugagaa

SEQ ID NO: 1229320 - RNA, 19 nt, Artificial Sequence
  Description of Artificial Sequence: Synthetic oligonucleotide
  Sense strand starting at position 456 of SEQ ID NO: 917361
agauguguuuguucucaaa

SEQ ID NO: 1229321 - RNA, 19 nt, Artificial Sequence
  Description of Artificial Sequence: Synthetic oligonucleotide
  Antisense strand to SEQ ID NO: 1229320
uuugagaacaaacacaucu

SEQ ID NO: 1229322 - RNA, 19 nt, Artificial Sequence
  Description of Artificial Sequence: Synthetic oligonucleotide
  Sense strand starting at position 552 of SEQ ID NO: 917361
acaguuguuucucuauaag

SEQ ID NO: 1229323 - RNA, 19 nt, Artificial Sequence
  Description of Artificial Sequence: Synthetic oligonucleotide
  Antisense strand to SEQ ID NO: 1229322
cuuauagagaaacaacugu

SEQ ID NO: 1229324 - RNA, 19 nt, Artificial Sequence
  Description of Artificial Sequence: Synthetic oligonucleotide
  Sense strand starting at position 594 of SEQ ID NO: 917361
cucacuugaguuuguuaaa

SEQ ID NO: 1229325 - RNA, 19 nt, Artificial Sequence
  Description of Artificial Sequence: Synthetic oligonucleotide
  Antisense strand to SEQ ID NO: 1229324
uuuaacaaacucaagugag

SEQ ID NO: 1229326 - RNA, 19 nt, Artificial Sequence
  Description of Artificial Sequence: Synthetic oligonucleotide
  Sense strand starting at position 671 of SEQ ID NO: 917361
guaucaaauugguucuuaa

SEQ ID NO: 1229327 - RNA, 19 nt, Artificial Sequence
  Description of Artificial Sequence: Synthetic oligonucleotide
  Antisense strand to SEQ ID NO: 1229326
uuaagaaccaauuugauac

SEQ ID NO: 1229328 - RNA, 19 nt, Artificial Sequence
  Description of Artificial Sequence: Synthetic oligonucleotide
  Sense strand starting at position 674 of SEQ ID NO: 917361
ucaaauugguucuuaaaug

SEQ ID NO: 1229329 - RNA, 19 nt, Artificial Sequence
  Description of Artificial Sequence: Synthetic oligonucleotide
  Antisense strand to SEQ ID NO: 1229328
cauuuaagaaccaauuuga

SEQ ID NO: 1229330 - RNA, 19 nt, Artificial Sequence
  Description of Artificial Sequence: Synthetic oligonucleotide
  Sense strand starting at position 732 of SEQ ID NO: 917361
aaauguuaagucugcuaag

SEQ ID NO: 1229331 - RNA, 19 nt, Artificial Sequence
  Description of Artificial Sequence: Synthetic oligonucleotide
  Antisense strand to SEQ ID NO: 1229330
cuuagcagacuuaacauuu

SEQ ID NO: 1229332 - RNA, 19 nt, Artificial Sequence
  Description of Artificial Sequence: Synthetic oligonucleotide
  Sense strand starting at position 733 of SEQ ID NO: 917361
aauguuaagucugcuaaga

SEQ ID NO: 1229333 - RNA, 19 nt, Artificial Sequence
  Description of Artificial Sequence: Synthetic oligonucleotide
  Antisense strand to SEQ ID NO: 1229332
ucuuagcagacuuaacauu

SEQ ID NO: 1229334 - RNA, 19 nt, Artificial Sequence
  Description of Artificial Sequence: Synthetic oligonucleotide
  Sense strand starting at position 893 of SEQ ID NO: 917361
auccauuucuucgugauuc

SEQ ID NO: 1229335 - RNA, 19 nt, Artificial Sequence
  Description of Artificial Sequence: Synthetic oligonucleotide
  Antisense strand to SEQ ID NO: 1229334
gaaucacgaagaaauggau

SEQ ID NO: 1229336 - RNA, 19 nt, Artificial Sequence
  Description of Artificial Sequence: Synthetic oligonucleotide
  Sense strand starting at position 1080 of SEQ ID NO: 917361
agauuacaagccugggaau

SEQ ID NO: 1229337 - RNA, 19 nt, Artificial Sequence
  Description of Artificial Sequence: Synthetic oligonucleotide
  Antisense strand to SEQ ID NO: 1229336
auucccaggcuuguaaucu

SEQ ID NO: 1229338 - RNA, 19 nt, Artificial Sequence
  Description of Artificial Sequence: Synthetic oligonucleotide
  Sense strand starting at position 1224 of SEQ ID NO: 917361
ucugaagacaggcauaguu

SEQ ID NO: 1229339 - RNA, 19 nt, Artificial Sequence
  Description of Artificial Sequence: Synthetic oligonucleotide
  Antisense strand to SEQ ID NO: 1229338
aacuaugccugucuucaga

SEQ ID NO: 1229340 - RNA, 19 nt, Artificial Sequence
  Description of Artificial Sequence: Synthetic oligonucleotide
  Sense strand starting at position 1233 of SEQ ID NO: 917361
aggcauaguuuaguggaaa

SEQ ID NO: 1229341 - RNA, 19 nt, Artificial Sequence
  Description of Artificial Sequence: Synthetic oligonucleotide
  Antisense strand to SEQ ID NO: 1229340
uuuccacuaaacuaugccu

SEQ ID NO: 1229342 - RNA, 19 nt, Artificial Sequence
  Description of Artificial Sequence: Synthetic oligonucleotide
  Sense strand starting at position 1248 of SEQ ID NO: 917361
gaaagaauaugcguugaau

SEQ ID NO: 1229343 - RNA, 19 nt, Artificial Sequence
  Description of Artificial Sequence: Synthetic oligonucleotide
  Antisense strand to SEQ ID NO: 1229342
auucaacgcauauucuuuc

SEQ ID NO: 1229344 - RNA, 19 nt, Artificial Sequence
  Description of Artificial Sequence: Synthetic oligonucleotide
  Sense strand starting at position 1250 of SEQ ID NO: 917361
aagaauaugcguugaaucu

SEQ ID NO: 1229345 - RNA, 19 nt, Artificial Sequence
  Description of Artificial Sequence: Synthetic oligonucleotide
  Antisense strand to SEQ ID NO: 1229344
agauucaacgcauauucuu

SEQ ID NO: 1229346 - RNA, 19 nt, Artificial Sequence
  Description of Artificial Sequence: Synthetic oligonucleotide
  Sense strand starting at position 1251 of SEQ ID NO: 917361
agaauaugcguugaaucuu

SEQ ID NO: 1229347 - RNA, 19 nt, Artificial Sequence
  Description of Artificial Sequence: Synthetic oligonucleotide
  Antisense strand to SEQ ID NO: 1229346
aagauucaacgcauauucu

SEQ ID NO: 1229348 - RNA, 19 nt, Artificial Sequence
  Description of Artificial Sequence: Synthetic oligonucleotide
  Sense strand starting at position 1268 of SEQ ID NO: 917361
uuuacaaguguccaucuuu

SEQ ID NO: 1229349 - RNA, 19 nt, Artificial Sequence
  Description of Artificial Sequence: Synthetic oligonucleotide
  Antisense strand to SEQ ID NO: 1229348
aaagauggacacuuguaaa

SEQ ID NO: 1229350 - RNA, 19 nt, Artificial Sequence
  Description of Artificial Sequence: Synthetic oligonucleotide
  Sense strand starting at position 1333 of SEQ ID NO: 917361
acgcauguaccgagcgaua

SEQ ID NO: 1229351 - RNA, 19 nt, Artificial Sequence
  Description of Artificial Sequence: Synthetic oligonucleotide
  Antisense strand to SEQ ID NO: 1229350
uaucgcucgguacaugcgu

SEQ ID NO: 1229352 - RNA, 19 nt, Artificial Sequence
  Description of Artificial Sequence: Synthetic oligonucleotide
  Sense strand starting at position 1372 of SEQ ID NO: 917361
gagagugaagggcguuaaa

SEQ ID NO: 1229353 - RNA, 19 nt, Artificial Sequence
  Description of Artificial Sequence: Synthetic oligonucleotide
  Antisense strand to SEQ ID NO: 1229352
uuuaacgcccuucacucuc

SEQ ID NO: 1229354 - RNA, 19 nt, Artificial Sequence
  Description of Artificial Sequence: Synthetic oligonucleotide
  Sense strand starting at position 2038 of SEQ ID NO: 917361
guugguuccggagggagaa

SEQ ID NO: 1229355 - RNA, 19 nt, Artificial Sequence
  Description of Artificial Sequence: Synthetic oligonucleotide
  Antisense strand to SEQ ID NO: 1229354
uucucccuccggaaccaac

SEQ ID NO: 1229356 - RNA, 19 nt, Artificial Sequence
  Description of Artificial Sequence: Synthetic oligonucleotide
  Sense strand starting at position 2351 of SEQ ID NO: 917361
gcgcucccgagcucucaua

SEQ ID NO: 1229357 - RNA, 19 nt, Artificial Sequence
  Description of Artificial Sequence: Synthetic oligonucleotide
  Antisense strand to SEQ ID NO: 1229356
uaugagagcucgggagcgc

SEQ ID NO: 1229358 - RNA, 19 nt, Artificial Sequence
  Description of Artificial Sequence: Synthetic oligonucleotide
  Sense strand starting at position 3595 of SEQ ID NO: 917361
aaguuaucccauuacggaa

SEQ ID NO: 1229359 - RNA, 19 nt, Artificial Sequence
  Description of Artificial Sequence: Synthetic oligonucleotide
  Antisense strand to SEQ ID NO: 1229358
uuccguaaugggauaacuu

SEQ ID NO: 1229360 - RNA, 19 nt, Artificial Sequence
  Description of Artificial Sequence: Synthetic oligonucleotide
  Sense strand starting at position 3612 of SEQ ID NO: 917361
aagagaaggagguguguuu

SEQ ID NO: 1229361 - RNA, 19 nt, Artificial Sequence
  Description of Artificial Sequence: Synthetic oligonucleotide
  Antisense strand to SEQ ID NO: 1229360
aaacacaccuccuucucuu

SEQ ID NO: 1229362 - RNA, 19 nt, Artificial Sequence
  Description of Artificial Sequence: Synthetic oligonucleotide
  Sense strand starting at position 3619 of SEQ ID NO: 917361
ggagguguguuucuaggag

SEQ ID NO: 1229363 - RNA, 19 nt, Artificial Sequence
  Description of Artificial Sequence: Synthetic oligonucleotide
  Antisense strand to SEQ ID NO: 1229362
cuccuagaaacacaccucc

SEQ ID NO: 1229364 - RNA, 19 nt, Artificial Sequence
  Description of Artificial Sequence: Synthetic oligonucleotide
  Sense strand starting at position 3656 of SEQ ID NO: 917361
gcaaguauacggcaaauua

SEQ ID NO: 1229365 - RNA, 19 nt, Artificial Sequence
  Description of Artificial Sequence: Synthetic oligonucleotide
  Antisense strand to SEQ ID NO: 1229364
uaauuugccguauacuugc

SEQ ID NO: 1229366 - RNA, 19 nt, Artificial Sequence
  Description of Artificial Sequence: Synthetic oligonucleotide
  Sense strand starting at position 3705 of SEQ ID NO: 917361
ugucacuugccacaguaau

SEQ ID NO: 1229367 - RNA, 19 nt, Artificial Sequence
  Description of Artificial Sequence: Synthetic oligonucleotide
  Antisense strand to SEQ ID NO: 1229366
auuacuguggcaagugaca

SEQ ID NO: 1229368 - RNA, 19 nt, Artificial Sequence
  Description of Artificial Sequence: Synthetic oligonucleotide
  Sense strand starting at position 3716 of SEQ ID NO: 917361
acaguaauaagagggucuu

SEQ ID NO: 1229369 - RNA, 19 nt, Artificial Sequence
  Description of Artificial Sequence: Synthetic oligonucleotide
  Antisense strand to SEQ ID NO: 1229368
aagacccucuuauuacugu

SEQ ID NO: 1229370 - RNA, 19 nt, Artificial Sequence
  Description of Artificial Sequence: Synthetic oligonucleotide
  Sense strand starting at position 3717 of SEQ ID NO: 917361
caguaauaagagggucuuu

SEQ ID NO: 1229371 - RNA, 19 nt, Artificial Sequence
  Description of Artificial Sequence: Synthetic oligonucleotide
  Antisense strand to SEQ ID NO: 1229370
aaagacccucuuauuacug

SEQ ID NO: 1229372 - RNA, 19 nt, Artificial Sequence
  Description of Artificial Sequence: Synthetic oligonucleotide
  Sense strand starting at position 3753 of SEQ ID NO: 917361
gauuaaugguugccuuuaa

SEQ ID NO: 1229373 - RNA, 19 nt, Artificial Sequence
  Description of Artificial Sequence: Synthetic oligonucleotide
  Antisense strand to SEQ ID NO: 1229372
uuaaaggcaaccauuaauc

SEQ ID NO: 1229374 - RNA, 19 nt, Artificial Sequence
  Description of Artificial Sequence: Synthetic oligonucleotide
  Sense strand starting at position 3757 of SEQ ID NO: 917361
aaugguugccuuuaagaua

SEQ ID NO: 1229375 - RNA, 19 nt, Artificial Sequence
  Description of Artificial Sequence: Synthetic oligonucleotide
  Antisense strand to SEQ ID NO: 1229374
uaucuuaaaggcaaccauu

SEQ ID NO: 1229376 - RNA, 19 nt, Artificial Sequence
  Description of Artificial Sequence: Synthetic oligonucleotide
  Sense strand starting at position 3845 of SEQ ID NO: 917361
agugguugccuuuaaggua

SEQ ID NO: 1229377 - RNA, 19 nt, Artificial Sequence
  Description of Artificial Sequence: Synthetic oligonucleotide
  Antisense strand to SEQ ID NO: 1229376
uaccuuaaaggcaaccacu

SEQ ID NO: 1229378 - RNA, 19 nt, Artificial Sequence
  Description of Artificial Sequence: Synthetic oligonucleotide
  Sense strand starting at position 3845 of SEQ ID NO: 917362
agugguugccuuuaaggua

SEQ ID NO: 1229379 - RNA, 19 nt, Artificial Sequence
  Description of Artificial Sequence: Synthetic oligonucleotide
  Antisense strand to SEQ ID NO: 1229378
uaccuuaaaggcaaccacu

SEQ ID NO: 1229380 - RNA, 19 nt, Artificial Sequence
  Description of Artificial Sequence: Synthetic oligonucleotide
  Sense strand starting at position 168 of SEQ ID NO: 917362
gcaugcacaucuccauaga

SEQ ID NO: 1229381 - RNA, 19 nt, Artificial Sequence
  Description of Artificial Sequence: Synthetic oligonucleotide
  Antisense strand to SEQ ID NO: 1229380
ucuauggagaugugcaugc

SEQ ID NO: 1229382 - RNA, 19 nt, Artificial Sequence
  Description of Artificial Sequence: Synthetic oligonucleotide
  Sense strand starting at position 171 of SEQ ID NO: 917362
ugcacaucuccauagaagu

SEQ ID NO: 1229383 - RNA, 19 nt, Artificial Sequence
  Description of Artificial Sequence: Synthetic oligonucleotide
  Antisense strand to SEQ ID NO: 1229382
acuucuauggagaugugca

SEQ ID NO: 1229384 - RNA, 19 nt, Artificial Sequence
  Description of Artificial Sequence: Synthetic oligonucleotide
  Sense strand starting at position 254 of SEQ ID NO: 917362
agucuuucccaucauguga

SEQ ID NO: 1229385 - RNA, 19 nt, Artificial Sequence
  Description of Artificial Sequence: Synthetic oligonucleotide
  Antisense strand to SEQ ID NO: 1229384
ucacaugaugggaaagacu

SEQ ID NO: 1229386 - RNA, 19 nt, Artificial Sequence
  Description of Artificial Sequence: Synthetic oligonucleotide
  Sense strand starting at position 261 of SEQ ID NO: 917362
cccaucaugugacuacgaa

SEQ ID NO: 1229387 - RNA, 19 nt, Artificial Sequence
  Description of Artificial Sequence: Synthetic oligonucleotide
  Antisense strand to SEQ ID NO: 1229386
uucguagucacaugauggg

SEQ ID NO: 1229388 - RNA, 19 nt, Artificial Sequence
  Description of Artificial Sequence: Synthetic oligonucleotide
  Sense strand starting at position 262 of SEQ ID NO: 917362
ccaucaugugacuacgaag

SEQ ID NO: 1229389 - RNA, 19 nt, Artificial Sequence
  Description of Artificial Sequence: Synthetic oligonucleotide
  Antisense strand to SEQ ID NO: 1229388
cuucguagucacaugaugg

SEQ ID NO: 1229390 - RNA, 19 nt, Artificial Sequence
  Description of Artificial Sequence: Synthetic oligonucleotide
  Sense strand starting at position 286 of SEQ ID NO: 917362
ucagguuuguaucuuuaac

SEQ ID NO: 1229391 - RNA, 19 nt, Artificial Sequence
  Description of Artificial Sequence: Synthetic oligonucleotide
  Antisense strand to SEQ ID NO: 1229390
guuaaagauacaaaccuga

SEQ ID NO: 1229392 - RNA, 19 nt, Artificial Sequence
  Description of Artificial Sequence: Synthetic oligonucleotide
  Sense strand starting at position 303 of SEQ ID NO: 917362
acccaaaucugucuguuua

SEQ ID NO: 1229393 - RNA, 19 nt, Artificial Sequence
  Description of Artificial Sequence: Synthetic oligonucleotide
  Antisense strand to SEQ ID NO: 1229392
uaaacagacagauuugggu

SEQ ID NO: 1229394 - RNA, 19 nt, Artificial Sequence
  Description of Artificial Sequence: Synthetic oligonucleotide
  Sense strand starting at position 304 of SEQ ID NO: 917362
cccaaaucugucuguuuaa

SEQ ID NO: 1229395 - RNA, 19 nt, Artificial Sequence
  Description of Artificial Sequence: Synthetic oligonucleotide
  Antisense strand to SEQ ID NO: 1229394
uuaaacagacagauuuggg

SEQ ID NO: 1229396 - RNA, 19 nt, Artificial Sequence
  Description of Artificial Sequence: Synthetic oligonucleotide
  Sense strand starting at position 305 of SEQ ID NO: 917362
ccaaaucugucuguuuaaa

SEQ ID NO: 1229397 - RNA, 19 nt, Artificial Sequence
  Description of Artificial Sequence: Synthetic oligonucleotide
  Antisense strand to SEQ ID NO: 1229396
uuuaaacagacagauuugg

SEQ ID NO: 1229398 - RNA, 19 nt, Artificial Sequence
  Description of Artificial Sequence: Synthetic oligonucleotide
  Sense strand starting at position 509 of SEQ ID NO: 917362
guguucucauauccagaug

SEQ ID NO: 1229399 - RNA, 19 nt, Artificial Sequence
  Description of Artificial Sequence: Synthetic oligonucleotide
  Antisense strand to SEQ ID NO: 1229398
caucuggauaugagaacac

SEQ ID NO: 1229400 - RNA, 19 nt, Artificial Sequence
  Description of Artificial Sequence: Synthetic oligonucleotide
  Sense strand starting at position 512 of SEQ ID NO: 917362
uucucauauccagaugugu

SEQ ID NO: 1229401 - RNA, 19 nt, Artificial Sequence
  Description of Artificial Sequence: Synthetic oligonucleotide
  Antisense strand to SEQ ID NO: 1229400
acacaucuggauaugagaa

SEQ ID NO: 1229402 - RNA, 19 nt, Artificial Sequence
  Description of Artificial Sequence: Synthetic oligonucleotide
  Sense strand starting at position 523 of SEQ ID NO: 917362
agauguguuuguucucaaa

SEQ ID NO: 1229403 - RNA, 19 nt, Artificial Sequence
  Description of Artificial Sequence: Synthetic oligonucleotide
  Antisense strand to SEQ ID NO: 1229402
uuugagaacaaacacaucu

SEQ ID NO: 1229404 - RNA, 19 nt, Artificial Sequence
  Description of Artificial Sequence: Synthetic oligonucleotide
  Sense strand starting at position 619 of SEQ ID NO: 917362
acaguuguuucucuauaag

SEQ ID NO: 1229405 - RNA, 19 nt, Artificial Sequence
  Description of Artificial Sequence: Synthetic oligonucleotide
  Antisense strand to SEQ ID NO: 1229404
cuuauagagaaacaacugu

SEQ ID NO: 1229406 - RNA, 19 nt, Artificial Sequence
  Description of Artificial Sequence: Synthetic oligonucleotide
  Sense strand starting at position 661 of SEQ ID NO: 917362
cucacuugaguuuguuaaa

SEQ ID NO: 1229407 - RNA, 19 nt, Artificial Sequence
  Description of Artificial Sequence: Synthetic oligonucleotide
  Antisense strand to SEQ ID NO: 1229406
uuuaacaaacucaagugag

SEQ ID NO: 1229408 - RNA, 19 nt, Artificial Sequence
  Description of Artificial Sequence: Synthetic oligonucleotide
  Sense strand starting at position 738 of SEQ ID NO: 917362
guaucaaauugguucuuaa

SEQ ID NO: 1229409 - RNA, 19 nt, Artificial Sequence
  Description of Artificial Sequence: Synthetic oligonucleotide
  Antisense strand to SEQ ID NO: 1229408
uuaagaaccaauuugauac

SEQ ID NO: 1229410 - RNA, 19 nt, Artificial Sequence
  Description of Artificial Sequence: Synthetic oligonucleotide
  Sense strand starting at position 741 of SEQ ID NO: 917362
ucaaauugguucuuaaaug

SEQ ID NO: 1229411 - RNA, 19 nt, Artificial Sequence
  Description of Artificial Sequence: Synthetic oligonucleotide
  Antisense strand to SEQ ID NO: 1229410
cauuuaagaaccaauuuga

SEQ ID NO: 1229412 - RNA, 19 nt, Artificial Sequence
  Description of Artificial Sequence: Synthetic oligonucleotide
  Sense strand starting at position 799 of SEQ ID NO: 917362
aaauguuaagucugcuaag

SEQ ID NO: 1229413 - RNA, 19 nt, Artificial Sequence
  Description of Artificial Sequence: Synthetic oligonucleotide
  Antisense strand to SEQ ID NO: 1229412
cuuagcagacuuaacauuu

SEQ ID NO: 1229414 - RNA, 19 nt, Artificial Sequence
  Description of Artificial Sequence: Synthetic oligonucleotide
  Sense strand starting at position 800 of SEQ ID NO: 917362
aauguuaagucugcuaaga

SEQ ID NO: 1229415 - RNA, 19 nt, Artificial Sequence
  Description of Artificial Sequence: Synthetic oligonucleotide
  Antisense strand to SEQ ID NO: 1229414
ucuuagcagacuuaacauu

SEQ ID NO: 1229416 - RNA, 19 nt, Artificial Sequence
  Description of Artificial Sequence: Synthetic oligonucleotide
  Sense strand starting at position 960 of SEQ ID NO: 917362
auccauuucuucgugauuc

SEQ ID NO: 1229417 - RNA, 19 nt, Artificial Sequence
  Description of Artificial Sequence: Synthetic oligonucleotide
  Antisense strand to SEQ ID NO: 1229416
gaaucacgaagaaauggau

SEQ ID NO: 1229418 - RNA, 19 nt, Artificial Sequence
  Description of Artificial Sequence: Synthetic oligonucleotide
  Sense strand starting at position 1147 of SEQ ID NO: 917362
agauuacaagccugggaau

SEQ ID NO: 1229419 - RNA, 19 nt, Artificial Sequence
  Description of Artificial Sequence: Synthetic oligonucleotide
  Antisense strand to SEQ ID NO: 1229418
auucccaggcuuguaaucu

SEQ ID NO: 1229420 - RNA, 19 nt, Artificial Sequence
  Description of Artificial Sequence: Synthetic oligonucleotide
  Sense strand starting at position 1291 of SEQ ID NO: 917362
ucugaagacaggcauaguu

SEQ ID NO: 1229421 - RNA, 19 nt, Artificial Sequence
  Description of Artificial Sequence: Synthetic oligonucleotide
  Antisense strand to SEQ ID NO: 1229420
aacuaugccugucuucaga

SEQ ID NO: 1229422 - RNA, 19 nt, Artificial Sequence
  Description of Artificial Sequence: Synthetic oligonucleotide
  Sense strand starting at position 1300 of SEQ ID NO: 917362
aggcauaguuuaguggaaa

SEQ ID NO: 1229423 - RNA, 19 nt, Artificial Sequence
  Description of Artificial Sequence: Synthetic oligonucleotide
  Antisense strand to SEQ ID NO: 1229422
uuuccacuaaacuaugccu

SEQ ID NO: 1229424 - RNA, 19 nt, Artificial Sequence
  Description of Artificial Sequence: Synthetic oligonucleotide
  Sense strand starting at position 1315 of SEQ ID NO: 917362
gaaagaauaugcguugaau

SEQ ID NO: 1229425 - RNA, 19 nt, Artificial Sequence
  Description of Artificial Sequence: Synthetic oligonucleotide
  Antisense strand to SEQ ID NO: 1229424
auucaacgcauauucuuuc

SEQ ID NO: 1229426 - RNA, 19 nt, Artificial Sequence
  Description of Artificial Sequence: Synthetic oligonucleotide
  Sense strand starting at position 1317 of SEQ ID NO: 917362
aagaauaugcguugaaucu

SEQ ID NO: 1229427 - RNA, 19 nt, Artificial Sequence
  Description of Artificial Sequence: Synthetic oligonucleotide
  Antisense strand to SEQ ID NO: 1229426
agauucaacgcauauucuu

SEQ ID NO: 1229428 - RNA, 19 nt, Artificial Sequence
  Description of Artificial Sequence: Synthetic oligonucleotide
  Sense strand starting at position 1318 of SEQ ID NO: 917362
agaauaugcguugaaucuu

SEQ ID NO: 1229429 - RNA, 19 nt, Artificial Sequence
  Description of Artificial Sequence: Synthetic oligonucleotide
  Antisense strand to SEQ ID NO: 1229428
aagauucaacgcauauucu

SEQ ID NO: 1229430 - RNA, 19 nt, Artificial Sequence
  Description of Artificial Sequence: Synthetic oligonucleotide
  Sense strand starting at position 1335 of SEQ ID NO: 917362
uuuacaaguguccaucuuu

SEQ ID NO: 1229431 - RNA, 19 nt, Artificial Sequence
  Description of Artificial Sequence: Synthetic oligonucleotide
  Antisense strand to SEQ ID NO: 1229430
aaagauggacacuuguaaa

SEQ ID NO: 1229432 - RNA, 19 nt, Artificial Sequence
  Description of Artificial Sequence: Synthetic oligonucleotide
  Sense strand starting at position 1400 of SEQ ID NO: 917362
acgcauguaccgagcgaua

SEQ ID NO: 1229433 - RNA, 19 nt, Artificial Sequence
  Description of Artificial Sequence: Synthetic oligonucleotide
  Antisense strand to SEQ ID NO: 1229432
uaucgcucgguacaugcgu

SEQ ID NO: 1229434 - RNA, 19 nt, Artificial Sequence
  Description of Artificial Sequence: Synthetic oligonucleotide
  Sense strand starting at position 1439 of SEQ ID NO: 917362
gagagugaagggcguuaaa

SEQ ID NO: 1229435 - RNA, 19 nt, Artificial Sequence
  Description of Artificial Sequence: Synthetic oligonucleotide
  Antisense strand to SEQ ID NO: 1229434
uuuaacgcccuucacucuc

SEQ ID NO: 1229436 - RNA, 19 nt, Artificial Sequence
  Description of Artificial Sequence: Synthetic oligonucleotide
  Sense strand starting at position 2105 of SEQ ID NO: 917362
guugguuccggagggagaa

SEQ ID NO: 1229437 - RNA, 19 nt, Artificial Sequence
  Description of Artificial Sequence: Synthetic oligonucleotide
  Antisense strand to SEQ ID NO: 1229436
uucucccuccggaaccaac

SEQ ID NO: 1229438 - RNA, 19 nt, Artificial Sequence
  Description of Artificial Sequence: Synthetic oligonucleotide
  Sense strand starting at position 2418 of SEQ ID NO: 917362
gcgcucccgagcucucaua

SEQ ID NO: 1229439 - RNA, 19 nt, Artificial Sequence
  Description of Artificial Sequence: Synthetic oligonucleotide
  Antisense strand to SEQ ID NO: 1229438
uaugagagcucgggagcgc

SEQ ID NO: 1229440 - RNA, 19 nt, Artificial Sequence
  Description of Artificial Sequence: Synthetic oligonucleotide
  Sense strand starting at position 3662 of SEQ ID NO: 917362
aaguuaucccauuacggaa

SEQ ID NO: 1229441 - RNA, 19 nt, Artificial Sequence
  Description of Artificial Sequence: Synthetic oligonucleotide
  Antisense strand to SEQ ID NO: 1229440
uuccguaaugggauaacuu

SEQ ID NO: 1229442 - RNA, 19 nt, Artificial Sequence
  Description of Artificial Sequence: Synthetic oligonucleotide
  Sense strand starting at position 3679 of SEQ ID NO: 917362
aagagaaggagguguguuu

SEQ ID NO: 1229443 - RNA, 19 nt, Artificial Sequence
  Description of Artificial Sequence: Synthetic oligonucleotide
  Antisense strand to SEQ ID NO: 1229442
aaacacaccuccuucucuu

SEQ ID NO: 1229444 - RNA, 19 nt, Artificial Sequence
  Description of Artificial Sequence: Synthetic oligonucleotide
  Sense strand starting at position 3686 of SEQ ID NO: 917362
ggagguguguuucuaggag

SEQ ID NO: 1229445 - RNA, 19 nt, Artificial Sequence
  Description of Artificial Sequence: Synthetic oligonucleotide
  Antisense strand to SEQ ID NO: 1229444
cuccuagaaacacaccucc

SEQ ID NO: 1229446 - RNA, 19 nt, Artificial Sequence
  Description of Artificial Sequence: Synthetic oligonucleotide
  Sense strand starting at position 3723 of SEQ ID NO: 917362
gcaaguauacggcaaauua

SEQ ID NO: 1229447 - RNA, 19 nt, Artificial Sequence
  Description of Artificial Sequence: Synthetic oligonucleotide
  Antisense strand to SEQ ID NO: 1229446
uaauuugccguauacuugc

SEQ ID NO: 1229448 - RNA, 19 nt, Artificial Sequence
  Description of Artificial Sequence: Synthetic oligonucleotide
  Sense strand starting at position 3772 of SEQ ID NO: 917362
ugucacuugccacaguaau

SEQ ID NO: 1229449 - RNA, 19 nt, Artificial Sequence
  Description of Artificial Sequence: Synthetic oligonucleotide
  Antisense strand to SEQ ID NO: 1229448
auuacuguggcaagugaca

SEQ ID NO: 1229450 - RNA, 19 nt, Artificial Sequence
  Description of Artificial Sequence: Synthetic oligonucleotide
  Sense strand starting at position 3783 of SEQ ID NO: 917362
acaguaauaagagggucuu

SEQ ID NO: 1229451 - RNA, 19 nt, Artificial Sequence
  Description of Artificial Sequence: Synthetic oligonucleotide
  Antisense strand to SEQ ID NO: 1229450
aagacccucuuauuacugu

SEQ ID NO: 1229452 - RNA, 19 nt, Artificial Sequence
  Description of Artificial Sequence: Synthetic oligonucleotide
  Sense strand starting at position 3784 of SEQ ID NO: 917362
caguaauaagagggucuuu

SEQ ID NO: 1229453 - RNA, 19 nt, Artificial Sequence
  Description of Artificial Sequence: Synthetic oligonucleotide
  Antisense strand to SEQ ID NO: 1229452
aaagacccucuuauuacug

SEQ ID NO: 1229454 - RNA, 19 nt, Artificial Sequence
  Description of Artificial Sequence: Synthetic oligonucleotide
  Sense strand starting at position 3820 of SEQ ID NO: 917362
gauuaaugguugccuuuaa

SEQ ID NO: 1229455 - RNA, 19 nt, Artificial Sequence
  Description of Artificial Sequence: Synthetic oligonucleotide
  Antisense strand to SEQ ID NO: 1229454
uuaaaggcaaccauuaauc

SEQ ID NO: 1229456 - RNA, 19 nt, Artificial Sequence
  Description of Artificial Sequence: Synthetic oligonucleotide
  Sense strand starting at position 3824 of SEQ ID NO: 917362
aaugguugccuuuaagaua

SEQ ID NO: 1229457 - RNA, 19 nt, Artificial Sequence
  Description of Artificial Sequence: Synthetic oligonucleotide
  Antisense strand to SEQ ID NO: 1229456
uaucuuaaaggcaaccauu

SEQ ID NO: 1229458 - RNA, 19 nt, Artificial Sequence
  Description of Artificial Sequence: Synthetic oligonucleotide
  Sense strand starting at position 3912 of SEQ ID NO: 917361
agugguugccuuuaaggua

SEQ ID NO: 1229459 - RNA, 19 nt, Artificial Sequence
  Description of Artificial Sequence: Synthetic oligonucleotide
  Antisense strand to SEQ ID NO: 1229458
uaccuuaaaggcaaccacu

SEQ ID NO: 1229460 - RNA, 19 nt, Artificial Sequence
  Description of Artificial Sequence: Synthetic oligonucleotide
  Sense strand starting at position 3845 of SEQ ID NO: 917363
agugguugccuuuaaggua

SEQ ID NO: 1229461 - RNA, 19 nt, Artificial Sequence
  Description of Artificial Sequence: Synthetic oligonucleotide
  Antisense strand to SEQ ID NO: 1229460
uaccuuaaaggcaaccacu

SEQ ID NO: 1229462 - RNA, 19 nt, Artificial Sequence
  Description of Artificial Sequence: Synthetic oligonucleotide
  Sense strand starting at position 70 of SEQ ID NO: 917363
ggaauaauguucuuaagau

SEQ ID NO: 1229463 - RNA, 19 nt, Artificial Sequence
  Description of Artificial Sequence: Synthetic oligonucleotide
  Antisense strand to SEQ ID NO: 1229462
aucuuaagaacauuauucc

SEQ ID NO: 1229464 - RNA, 19 nt, Artificial Sequence
  Description of Artificial Sequence: Synthetic oligonucleotide
  Sense strand starting at position 97 of SEQ ID NO: 917363
acaguuaaguuucugagac

SEQ ID NO: 1229465 - RNA, 19 nt, Artificial Sequence
  Description of Artificial Sequence: Synthetic oligonucleotide
  Antisense strand to SEQ ID NO: 1229464
gucucagaaacuuaacugu

SEQ ID NO: 1229466 - RNA, 19 nt, Artificial Sequence
  Description of Artificial Sequence: Synthetic oligonucleotide
  Sense strand starting at position 192 of SEQ ID NO: 917363
cugcuaucaccaugagaua

SEQ ID NO: 1229467 - RNA, 19 nt, Artificial Sequence
  Description of Artificial Sequence: Synthetic oligonucleotide
  Antisense strand to SEQ ID NO: 1229466
uaucucauggugauagcag

SEQ ID NO: 1229468 - RNA, 19 nt, Artificial Sequence
  Description of Artificial Sequence: Synthetic oligonucleotide
  Sense strand starting at position 193 of SEQ ID NO: 917363
ugcuaucaccaugagauac

SEQ ID NO: 1229469 - RNA, 19 nt, Artificial Sequence
  Description of Artificial Sequence: Synthetic oligonucleotide
  Antisense strand to SEQ ID NO: 1229468
guaucucauggugauagca

SEQ ID NO: 1229470 - RNA, 19 nt, Artificial Sequence
  Description of Artificial Sequence: Synthetic oligonucleotide
  Sense strand starting at position 294 of SEQ ID NO: 917363
auguguacugcaugaagag

SEQ ID NO: 1229471 - RNA, 19 nt, Artificial Sequence
  Description of Artificial Sequence: Synthetic oligonucleotide
  Antisense strand to SEQ ID NO: 1229470
cucuucaugcaguacacau

SEQ ID NO: 1229472 - RNA, 19 nt, Artificial Sequence
  Description of Artificial Sequence: Synthetic oligonucleotide
  Sense strand starting at position 380 of SEQ ID NO: 917363
aaacguucugucugggaac

SEQ ID NO: 1229473 - RNA, 19 nt, Artificial Sequence
  Description of Artificial Sequence: Synthetic oligonucleotide
  Antisense strand to SEQ ID NO: 1229472
guucccagacagaacguuu

SEQ ID NO: 1229474 - RNA, 19 nt, Artificial Sequence
  Description of Artificial Sequence: Synthetic oligonucleotide
  Sense strand starting at position 393 of SEQ ID NO: 917363
gggaacucgggauguguua

SEQ ID NO: 1229475 - RNA, 19 nt, Artificial Sequence
  Description of Artificial Sequence: Synthetic oligonucleotide
  Antisense strand to SEQ ID NO: 1229474
uaacacaucccgaguuccc

SEQ ID NO: 1229476 - RNA, 19 nt, Artificial Sequence
  Description of Artificial Sequence: Synthetic oligonucleotide
  Sense strand starting at position 402 of SEQ ID NO: 917363
ggauguguuaacugagaac

SEQ ID NO: 1229477 - RNA, 19 nt, Artificial Sequence
  Description of Artificial Sequence: Synthetic oligonucleotide
  Antisense strand to SEQ ID NO: 1229476
guucucaguuaacacaucc

SEQ ID NO: 1229478 - RNA, 19 nt, Artificial Sequence
  Description of Artificial Sequence: Synthetic oligonucleotide
  Sense strand starting at position 441 of SEQ ID NO: 917363
agcauuggguaauuacgau

SEQ ID NO: 1229479 - RNA, 19 nt, Artificial Sequence
  Description of Artificial Sequence: Synthetic oligonucleotide
  Antisense strand to SEQ ID NO: 1229478
aucguaauuacccaaugcu

SEQ ID NO: 1229480 - RNA, 19 nt, Artificial Sequence
  Description of Artificial Sequence: Synthetic oligonucleotide
  Sense strand starting at position 667 of SEQ ID NO: 917363
agaagcacuuucuucgaca

SEQ ID NO: 1229481 - RNA, 19 nt, Artificial Sequence
  Description of Artificial Sequence: Synthetic oligonucleotide
  Antisense strand to SEQ ID NO: 1229480
ugucgaagaaagugcuucu

SEQ ID NO: 1229482 - RNA, 19 nt, Artificial Sequence
  Description of Artificial Sequence: Synthetic oligonucleotide
  Sense strand starting at position 866 of SEQ ID NO: 917363
ugucgagcuacuuaagagu

SEQ ID NO: 1229483 - RNA, 19 nt, Artificial Sequence
  Description of Artificial Sequence: Synthetic oligonucleotide
  Antisense strand to SEQ ID NO: 1229482
acucuuaaguagcucgaca

SEQ ID NO: 1229484 - RNA, 19 nt, Artificial Sequence
  Description of Artificial Sequence: Synthetic oligonucleotide
  Sense strand starting at position 1518 of SEQ ID NO: 917363
ggaucagagcggcaaguuu

SEQ ID NO: 1229485 - RNA, 19 nt, Artificial Sequence
  Description of Artificial Sequence: Synthetic oligonucleotide
  Antisense strand to SEQ ID NO: 1229484
aaacuugccgcucugaucc

SEQ ID NO: 1229486 - RNA, 19 nt, Artificial Sequence
  Description of Artificial Sequence: Synthetic oligonucleotide
  Sense strand starting at position 2297 of SEQ ID NO: 917363
gauaaagguugggagauuu

SEQ ID NO: 1229487 - RNA, 19 nt, Artificial Sequence
  Description of Artificial Sequence: Synthetic oligonucleotide
  Antisense strand to SEQ ID NO: 1229486
aaaucucccaaccuuuauc

SEQ ID NO: 1229488 - RNA, 19 nt, Artificial Sequence
  Description of Artificial Sequence: Synthetic oligonucleotide
  Sense strand starting at position 2339 of SEQ ID NO: 917363
agguguugugauggguaaa

SEQ ID NO: 1229489 - RNA, 19 nt, Artificial Sequence
  Description of Artificial Sequence: Synthetic oligonucleotide
  Antisense strand to SEQ ID NO: 1229488
uuuacccaucacaacaccu

SEQ ID NO: 1229490 - RNA, 19 nt, Artificial Sequence
  Description of Artificial Sequence: Synthetic oligonucleotide
  Sense strand starting at position 2342 of SEQ ID NO: 917363
uguugugauggguaaacag

SEQ ID NO: 1229491 - RNA, 19 nt, Artificial Sequence
  Description of Artificial Sequence: Synthetic oligonucleotide
  Antisense strand to SEQ ID NO: 1229490
cuguuuacccaucacaaca

SEQ ID NO: 1229492 - RNA, 19 nt, Artificial Sequence
  Description of Artificial Sequence: Synthetic oligonucleotide
  Sense strand starting at position 2352 of SEQ ID NO: 917363
gguaaacagaauugguauu

SEQ ID NO: 1229493 - RNA, 19 nt, Artificial Sequence
  Description of Artificial Sequence: Synthetic oligonucleotide
  Antisense strand to SEQ ID NO: 1229492
aauaccaauucuguuuacc

SEQ ID NO: 1229494 - RNA, 19 nt, Artificial Sequence
  Description of Artificial Sequence: Synthetic oligonucleotide
  Sense strand starting at position 2414 of SEQ ID NO: 917363
cucggaaugccauacaaau

SEQ ID NO: 1229495 - RNA, 19 nt, Artificial Sequence
  Description of Artificial Sequence: Synthetic oligonucleotide
  Antisense strand to SEQ ID NO: 1229494
auuuguauggcauuccgag

SEQ ID NO: 1229496 - RNA, 19 nt, Artificial Sequence
  Description of Artificial Sequence: Synthetic oligonucleotide
  Sense strand starting at position 2478 of SEQ ID NO: 917363
cuuuccuaauuugaggaau

SEQ ID NO: 1229497 - RNA, 19 nt, Artificial Sequence
  Description of Artificial Sequence: Synthetic oligonucleotide
  Antisense strand to SEQ ID NO: 1229496
auuccucaaauuaggaaag

SEQ ID NO: 1229498 - RNA, 19 nt, Artificial Sequence
  Description of Artificial Sequence: Synthetic oligonucleotide
  Sense strand starting at position 2480 of SEQ ID NO: 917363
uuccuaauuugaggaauug

SEQ ID NO: 1229499 - RNA, 19 nt, Artificial Sequence
  Description of Artificial Sequence: Synthetic oligonucleotide
  Antisense strand to SEQ ID NO: 1229498
caauuccucaaauuaggaa

SEQ ID NO: 1229500 - RNA, 19 nt, Artificial Sequence
  Description of Artificial Sequence: Synthetic oligonucleotide
  Sense strand starting at position 2489 of SEQ ID NO: 917363
ugaggaauuguuuauaggu

SEQ ID NO: 1229501 - RNA, 19 nt, Artificial Sequence
  Description of Artificial Sequence: Synthetic oligonucleotide
  Antisense strand to SEQ ID NO: 1229500
accuauaaacaauuccuca

SEQ ID NO: 1229502 - RNA, 19 nt, Artificial Sequence
  Description of Artificial Sequence: Synthetic oligonucleotide
  Sense strand starting at position 2550 of SEQ ID NO: 917363
auuccauuccuuuggcaga

SEQ ID NO: 1229503 - RNA, 19 nt, Artificial Sequence
  Description of Artificial Sequence: Synthetic oligonucleotide
  Antisense strand to SEQ ID NO: 1229502
ucugccaaaggaauggaau

SEQ ID NO: 1229504 - RNA, 19 nt, Artificial Sequence
  Description of Artificial Sequence: Synthetic oligonucleotide
  Sense strand starting at position 2552 of SEQ ID NO: 917363
uccauuccuuuggcagaau

SEQ ID NO: 1229505 - RNA, 19 nt, Artificial Sequence
  Description of Artificial Sequence: Synthetic oligonucleotide
  Antisense strand to SEQ ID NO: 1229504
auucugccaaaggaaugga

SEQ ID NO: 1229506 - RNA, 19 nt, Artificial Sequence
  Description of Artificial Sequence: Synthetic oligonucleotide
  Sense strand starting at position 2555 of SEQ ID NO: 917363
auuccuuuggcagaauugu

SEQ ID NO: 1229507 - RNA, 19 nt, Artificial Sequence
  Description of Artificial Sequence: Synthetic oligonucleotide
  Antisense strand to SEQ ID NO: 1229506
acaauucugccaaaggaau

SEQ ID NO: 1229508 - RNA, 19 nt, Artificial Sequence
  Description of Artificial Sequence: Synthetic oligonucleotide
  Sense strand starting at position 2564 of SEQ ID NO: 917363
gcagaauuguccuuauuag

SEQ ID NO: 1229509 - RNA, 19 nt, Artificial Sequence
  Description of Artificial Sequence: Synthetic oligonucleotide
  Antisense strand to SEQ ID NO: 1229508
cuaauaaggacaauucugc

SEQ ID NO: 1229510 - RNA, 19 nt, Artificial Sequence
  Description of Artificial Sequence: Synthetic oligonucleotide
  Sense strand starting at position 2890 of SEQ ID NO: 917363
gugugaaugaauggauuac

SEQ ID NO: 1229511 - RNA, 19 nt, Artificial Sequence
  Description of Artificial Sequence: Synthetic oligonucleotide
  Antisense strand to SEQ ID NO: 1229510
guaauccauucauucacac

SEQ ID NO: 1229512 - RNA, 19 nt, Artificial Sequence
  Description of Artificial Sequence: Synthetic oligonucleotide
  Sense strand starting at position 2910 of SEQ ID NO: 917363
guaggauacuuaucaacug

SEQ ID NO: 1229513 - RNA, 19 nt, Artificial Sequence
  Description of Artificial Sequence: Synthetic oligonucleotide
  Antisense strand to SEQ ID NO: 1229512
caguugauaaguauccuac

SEQ ID NO: 1229514 - RNA, 19 nt, Artificial Sequence
  Description of Artificial Sequence: Synthetic oligonucleotide
  Sense strand starting at position 2961 of SEQ ID NO: 917363
uaaugcuacuguguuagaa

SEQ ID NO: 1229515 - RNA, 19 nt, Artificial Sequence
  Description of Artificial Sequence: Synthetic oligonucleotide
  Antisense strand to SEQ ID NO: 1229514
uucuaacacaguagcauua

SEQ ID NO: 1229516 - RNA, 19 nt, Artificial Sequence
  Description of Artificial Sequence: Synthetic oligonucleotide
  Sense strand starting at position 3052 of SEQ ID NO: 917363
ugggauucgcuggacaauu

SEQ ID NO: 1229517 - RNA, 19 nt, Artificial Sequence
  Description of Artificial Sequence: Synthetic oligonucleotide
  Antisense strand to SEQ ID NO: 1229516
aauuguccagcgaauccca

SEQ ID NO: 1229518 - RNA, 19 nt, Artificial Sequence
  Description of Artificial Sequence: Synthetic oligonucleotide
  Sense strand starting at position 3087 of SEQ ID NO: 917363
cagugcuugcuagaccaau

SEQ ID NO: 1229519 - RNA, 19 nt, Artificial Sequence
  Description of Artificial Sequence: Synthetic oligonucleotide
  Antisense strand to SEQ ID NO: 1229518
auuggucuagcaagcacug

SEQ ID NO: 1229520 - RNA, 19 nt, Artificial Sequence
  Description of Artificial Sequence: Synthetic oligonucleotide
  Sense strand starting at position 3145 of SEQ ID NO: 917363
cugaauacuccagguucua

SEQ ID NO: 1229521 - RNA, 19 nt, Artificial Sequence
  Description of Artificial Sequence: Synthetic oligonucleotide
  Antisense strand to SEQ ID NO: 1229520
uagaaccuggaguauucag

SEQ ID NO: 1229522 - RNA, 19 nt, Artificial Sequence
  Description of Artificial Sequence: Synthetic oligonucleotide
  Sense strand starting at position 3169 of SEQ ID NO: 917363
uuuauacauuccucgauga

SEQ ID NO: 1229523 - RNA, 19 nt, Artificial Sequence
  Description of Artificial Sequence: Synthetic oligonucleotide
  Antisense strand to SEQ ID NO: 1229522
ucaucgaggaauguauaaa

SEQ ID NO: 1229524 - RNA, 19 nt, Artificial Sequence
  Description of Artificial Sequence: Synthetic oligonucleotide
  Sense strand starting at position 3170 of SEQ ID NO: 917363
uuauacauuccucgaugaa

SEQ ID NO: 1229525 - RNA, 19 nt, Artificial Sequence
  Description of Artificial Sequence: Synthetic oligonucleotide
  Antisense strand to SEQ ID NO: 1229524
uucaucgaggaauguauaa

SEQ ID NO: 1229526 - RNA, 19 nt, Artificial Sequence
  Description of Artificial Sequence: Synthetic oligonucleotide
  Sense strand starting at position 3173 of SEQ ID NO: 917363
uacauuccucgaugaaguc

SEQ ID NO: 1229527 - RNA, 19 nt, Artificial Sequence
  Description of Artificial Sequence: Synthetic oligonucleotide
  Antisense strand to SEQ ID NO: 1229526
gacuucaucgaggaaugua

SEQ ID NO: 1229528 - RNA, 19 nt, Artificial Sequence
  Description of Artificial Sequence: Synthetic oligonucleotide
  Sense strand starting at position 3185 of SEQ ID NO: 917363
ugaagucuacuaugaguuu

SEQ ID NO: 1229529 - RNA, 19 nt, Artificial Sequence
  Description of Artificial Sequence: Synthetic oligonucleotide
  Antisense strand to SEQ ID NO: 1229528
aaacucauaguagacuuca

SEQ ID NO: 1229530 - RNA, 19 nt, Artificial Sequence
  Description of Artificial Sequence: Synthetic oligonucleotide
  Sense strand starting at position 3269 of SEQ ID NO: 917363
aaaucuuguaugggagagu

SEQ ID NO: 1229531 - RNA, 19 nt, Artificial Sequence
  Description of Artificial Sequence: Synthetic oligonucleotide
  Antisense strand to SEQ ID NO: 1229530
acucucccauacaagauuu

SEQ ID NO: 1229532 - RNA, 19 nt, Artificial Sequence
  Description of Artificial Sequence: Synthetic oligonucleotide
  Sense strand starting at position 3283 of SEQ ID NO: 917363
agaguaggaugucuagauc

SEQ ID NO: 1229533 - RNA, 19 nt, Artificial Sequence
  Description of Artificial Sequence: Synthetic oligonucleotide
  Antisense strand to SEQ ID NO: 1229532
gaucuagacauccuacucu

SEQ ID NO: 1229534 - RNA, 19 nt, Artificial Sequence
  Description of Artificial Sequence: Synthetic oligonucleotide
  Sense strand starting at position 3286 of SEQ ID NO: 917363
guaggaugucuagaucuag

SEQ ID NO: 1229535 - RNA, 19 nt, Artificial Sequence
  Description of Artificial Sequence: Synthetic oligonucleotide
  Antisense strand to SEQ ID NO: 1229534
cuagaucuagacauccuac

SEQ ID NO: 1229536 - RNA, 19 nt, Artificial Sequence
  Description of Artificial Sequence: Synthetic oligonucleotide
  Sense strand starting at position 3794 of SEQ ID NO: 917363
cuggaagccucaguaaaua

SEQ ID NO: 1229537 - RNA, 19 nt, Artificial Sequence
  Description of Artificial Sequence: Synthetic oligonucleotide
  Antisense strand to SEQ ID NO: 1229536
uauuuacugaggcuuccag

SEQ ID NO: 1229538 - RNA, 19 nt, Artificial Sequence
  Description of Artificial Sequence: Synthetic oligonucleotide
  Sense strand starting at position 3820 of SEQ ID NO: 917363
ggauguaugaauuguuuaa

SEQ ID NO: 1229539 - RNA, 19 nt, Artificial Sequence
  Description of Artificial Sequence: Synthetic oligonucleotide
  Antisense strand to SEQ ID NO: 1229538
uuaaacaauucauacaucc

SEQ ID NO: 1229540 - RNA, 19 nt, Artificial Sequence
  Description of Artificial Sequence: Synthetic oligonucleotide
  Sense strand starting at position 3981 of SEQ ID NO: 917364
auacauauugcccacguua

SEQ ID NO: 1229541 - RNA, 19 nt, Artificial Sequence
  Description of Artificial Sequence: Synthetic oligonucleotide
  Antisense strand to SEQ ID NO: 1229540
uaacgugggcaauauguau

SEQ ID NO: 1229542 - RNA, 19 nt, Artificial Sequence
  Description of Artificial Sequence: Synthetic oligonucleotide
  Sense strand starting at position 137 of SEQ ID NO: 917364
cugcgcgagcuggauaaau

SEQ ID NO: 1229543 - RNA, 19 nt, Artificial Sequence
  Description of Artificial Sequence: Synthetic oligonucleotide
  Antisense strand to SEQ ID NO: 1229542
auuuauccagcucgcgcag

SEQ ID NO: 1229544 - RNA, 19 nt, Artificial Sequence
  Description of Artificial Sequence: Synthetic oligonucleotide
  Sense strand starting at position 139 of SEQ ID NO: 917364
gcgcgagcuggauaaauuu

SEQ ID NO: 1229545 - RNA, 19 nt, Artificial Sequence
  Description of Artificial Sequence: Synthetic oligonucleotide
  Antisense strand to SEQ ID NO: 1229544
aaauuuauccagcucgcgc

SEQ ID NO: 1229546 - RNA, 19 nt, Artificial Sequence
  Description of Artificial Sequence: Synthetic oligonucleotide
  Sense strand starting at position 798 of SEQ ID NO: 917364
cgaauucgcuucucagauu

SEQ ID NO: 1229547 - RNA, 19 nt, Artificial Sequence
  Description of Artificial Sequence: Synthetic oligonucleotide
  Antisense strand to SEQ ID NO: 1229546
aaucugagaagcgaauucg

SEQ ID NO: 1229548 - RNA, 19 nt, Artificial Sequence
  Description of Artificial Sequence: Synthetic oligonucleotide
  Sense strand starting at position 810 of SEQ ID NO: 917364
ucagauugcucuccuagcu

SEQ ID NO: 1229549 - RNA, 19 nt, Artificial Sequence
  Description of Artificial Sequence: Synthetic oligonucleotide
  Antisense strand to SEQ ID NO: 1229548
agcuaggagagcaaucuga

SEQ ID NO: 1229550 - RNA, 19 nt, Artificial Sequence
  Description of Artificial Sequence: Synthetic oligonucleotide
  Sense strand starting at position 1367 of SEQ ID NO: 917364
uuuaguccgacccgggaua

SEQ ID NO: 1229551 - RNA, 19 nt, Artificial Sequence
  Description of Artificial Sequence: Synthetic oligonucleotide
  Antisense strand to SEQ ID NO: 1229550
uaucccgggucggacuaaa

SEQ ID NO: 1229552 - RNA, 19 nt, Artificial Sequence
  Description of Artificial Sequence: Synthetic oligonucleotide
  Sense strand starting at position 1369 of SEQ ID NO: 917364
uaguccgacccgggauaau

SEQ ID NO: 1229553 - RNA, 19 nt, Artificial Sequence
  Description of Artificial Sequence: Synthetic oligonucleotide
  Antisense strand to SEQ ID NO: 1229552
auuaucccgggucggacua

SEQ ID NO: 1229554 - RNA, 19 nt, Artificial Sequence
  Description of Artificial Sequence: Synthetic oligonucleotide
  Sense strand starting at position 2377 of SEQ ID NO: 917364
uggacauaguguguuuguu

SEQ ID NO: 1229555 - RNA, 19 nt, Artificial Sequence
  Description of Artificial Sequence: Synthetic oligonucleotide
  Antisense strand to SEQ ID NO: 1229554
aacaaacacacuaugucca

SEQ ID NO: 1229556 - RNA, 19 nt, Artificial Sequence
  Description of Artificial Sequence: Synthetic oligonucleotide
  Sense strand starting at position 2379 of SEQ ID NO: 917364
gacauaguguguuuguuaa

SEQ ID NO: 1229557 - RNA, 19 nt, Artificial Sequence
  Description of Artificial Sequence: Synthetic oligonucleotide
  Antisense strand to SEQ ID NO: 1229556
uuaacaaacacacuauguc

SEQ ID NO: 1229558 - RNA, 19 nt, Artificial Sequence
  Description of Artificial Sequence: Synthetic oligonucleotide
  Sense strand starting at position 2381 of SEQ ID NO: 917364
cauaguguguuuguuaauu

SEQ ID NO: 1229559 - RNA, 19 nt, Artificial Sequence
  Description of Artificial Sequence: Synthetic oligonucleotide
  Antisense strand to SEQ ID NO: 1229558
aauuaacaaacacacuaug

SEQ ID NO: 1229560 - RNA, 19 nt, Artificial Sequence
  Description of Artificial Sequence: Synthetic oligonucleotide
  Sense strand starting at position 2387 of SEQ ID NO: 917364
guguuuguuaauugaugua

SEQ ID NO: 1229561 - RNA, 19 nt, Artificial Sequence
  Description of Artificial Sequence: Synthetic oligonucleotide
  Antisense strand to SEQ ID NO: 1229560
uacaucaauuaacaaacac

SEQ ID NO: 1229562 - RNA, 19 nt, Artificial Sequence
  Description of Artificial Sequence: Synthetic oligonucleotide
  Sense strand starting at position 2402 of SEQ ID NO: 917364
uguaguuuacaaggagaca

SEQ ID NO: 1229563 - RNA, 19 nt, Artificial Sequence
  Description of Artificial Sequence: Synthetic oligonucleotide
  Antisense strand to SEQ ID NO: 1229562
ugucuccuuguaaacuaca

SEQ ID NO: 1229564 - RNA, 19 nt, Artificial Sequence
  Description of Artificial Sequence: Synthetic oligonucleotide
  Sense strand starting at position 2446 of SEQ ID NO: 917364
acuguugcggaauacgaua

SEQ ID NO: 1229565 - RNA, 19 nt, Artificial Sequence
  Description of Artificial Sequence: Synthetic oligonucleotide
  Antisense strand to SEQ ID NO: 1229564
uaucguauuccgcaacagu

SEQ ID NO: 1229566 - RNA, 19 nt, Artificial Sequence
  Description of Artificial Sequence: Synthetic oligonucleotide
  Sense strand starting at position 2482 of SEQ ID NO: 917364
cccagcucucuaggucaga

SEQ ID NO: 1229567 - RNA, 19 nt, Artificial Sequence
  Description of Artificial Sequence: Synthetic oligonucleotide
  Antisense strand to SEQ ID NO: 1229566
ucugaccuagagagcuggg

SEQ ID NO: 1229568 - RNA, 19 nt, Artificial Sequence
  Description of Artificial Sequence: Synthetic oligonucleotide
  Sense strand starting at position 2483 of SEQ ID NO: 917364
ccagcucucuaggucagaa

SEQ ID NO: 1229569 - RNA, 19 nt, Artificial Sequence
  Description of Artificial Sequence: Synthetic oligonucleotide
  Antisense strand to SEQ ID NO: 1229568
uucugaccuagagagcugg

SEQ ID NO: 1229570 - RNA, 19 nt, Artificial Sequence
  Description of Artificial Sequence: Synthetic oligonucleotide
  Sense strand starting at position 2496 of SEQ ID NO: 917364
ucagaagcauuugauucua

SEQ ID NO: 1229571 - RNA, 19 nt, Artificial Sequence
  Description of Artificial Sequence: Synthetic oligonucleotide
  Antisense strand to SEQ ID NO: 1229570
uagaaucaaaugcuucuga

SEQ ID NO: 1229572 - RNA, 19 nt, Artificial Sequence
  Description of Artificial Sequence: Synthetic oligonucleotide
  Sense strand starting at position 2541 of SEQ ID NO: 917364
cacaaagaugucgguuaaa

SEQ ID NO: 1229573 - RNA, 19 nt, Artificial Sequence
  Description of Artificial Sequence: Synthetic oligonucleotide
  Antisense strand to SEQ ID NO: 1229572
uuuaaccgacaucuuugug

SEQ ID NO: 1229574 - RNA, 19 nt, Artificial Sequence
  Description of Artificial Sequence: Synthetic oligonucleotide
  Sense strand starting at position 2574 of SEQ ID NO: 917364
cuggcauucguuguguguu

SEQ ID NO: 1229575 - RNA, 19 nt, Artificial Sequence
  Description of Artificial Sequence: Synthetic oligonucleotide
  Antisense strand to SEQ ID NO: 1229574
aacacacaacgaaugccag

SEQ ID NO: 1229576 - RNA, 19 nt, Artificial Sequence
  Description of Artificial Sequence: Synthetic oligonucleotide
  Sense strand starting at position 2686 of SEQ ID NO: 917364
auugaaggguauuacaaau

SEQ ID NO: 1229577 - RNA, 19 nt, Artificial Sequence
  Description of Artificial Sequence: Synthetic oligonucleotide
  Antisense strand to SEQ ID NO: 1229576
auuuguaauacccuucaau

SEQ ID NO: 1229578 - RNA, 19 nt, Artificial Sequence
  Description of Artificial Sequence: Synthetic oligonucleotide
  Sense strand starting at position 2869 of SEQ ID NO: 917364
ggaguuugccggcagagaa

SEQ ID NO: 1229579 - RNA, 19 nt, Artificial Sequence
  Description of Artificial Sequence: Synthetic oligonucleotide
  Antisense strand to SEQ ID NO: 1229578
uucucugccggcaaacucc

SEQ ID NO: 1229580 - RNA, 19 nt, Artificial Sequence
  Description of Artificial Sequence: Synthetic oligonucleotide
  Sense strand starting at position 2943 of SEQ ID NO: 917364
gaggaagaguuacauauuu

SEQ ID NO: 1229581 - RNA, 19 nt, Artificial Sequence
  Description of Artificial Sequence: Synthetic oligonucleotide
  Antisense strand to SEQ ID NO: 1229580
aaauauguaacucuuccuc

SEQ ID NO: 1229582 - RNA, 19 nt, Artificial Sequence
  Description of Artificial Sequence: Synthetic oligonucleotide
  Sense strand starting at position 3191 of SEQ ID NO: 917364
ugaggacguuucucgaaac

SEQ ID NO: 1229583 - RNA, 19 nt, Artificial Sequence
  Description of Artificial Sequence: Synthetic oligonucleotide
  Antisense strand to SEQ ID NO: 1229582
guuucgagaaacguccuca

SEQ ID NO: 1229584 - RNA, 19 nt, Artificial Sequence
  Description of Artificial Sequence: Synthetic oligonucleotide
  Sense strand starting at position 3231 of SEQ ID NO: 917364
acuagacagcuuugcagaa

SEQ ID NO: 1229585 - RNA, 19 nt, Artificial Sequence
  Description of Artificial Sequence: Synthetic oligonucleotide
  Antisense strand to SEQ ID NO: 1229584
uucugcaaagcugucuagu

SEQ ID NO: 1229586 - RNA, 19 nt, Artificial Sequence
  Description of Artificial Sequence: Synthetic oligonucleotide
  Sense strand starting at position 3232 of SEQ ID NO: 917364
cuagacagcuuugcagaaa

SEQ ID NO: 1229587 - RNA, 19 nt, Artificial Sequence
  Description of Artificial Sequence: Synthetic oligonucleotide
  Antisense strand to SEQ ID NO: 1229586
uuucugcaaagcugucuag

SEQ ID NO: 1229588 - RNA, 19 nt, Artificial Sequence
  Description of Artificial Sequence: Synthetic oligonucleotide
  Sense strand starting at position 3235 of SEQ ID NO: 917364
gacagcuuugcagaaacgu

SEQ ID NO: 1229589 - RNA, 19 nt, Artificial Sequence
  Description of Artificial Sequence: Synthetic oligonucleotide
  Antisense strand to SEQ ID NO: 1229588
acguuucugcaaagcuguc

SEQ ID NO: 1229590 - RNA, 19 nt, Artificial Sequence
  Description of Artificial Sequence: Synthetic oligonucleotide
  Sense strand starting at position 3334 of SEQ ID NO: 917364
cauccagaccuuugagagu

SEQ ID NO: 1229591 - RNA, 19 nt, Artificial Sequence
  Description of Artificial Sequence: Synthetic oligonucleotide
  Antisense strand to SEQ ID NO: 1229590
acucucaaaggucuggaug

SEQ ID NO: 1229592 - RNA, 19 nt, Artificial Sequence
  Description of Artificial Sequence: Synthetic oligonucleotide
  Sense strand starting at position 3404 of SEQ ID NO: 917364
cggauugagugcucuauuc

SEQ ID NO: 1229593 - RNA, 19 nt, Artificial Sequence
  Description of Artificial Sequence: Synthetic oligonucleotide
  Antisense strand to SEQ ID NO: 1229592
gaauagagcacucaauccg

SEQ ID NO: 1229594 - RNA, 19 nt, Artificial Sequence
  Description of Artificial Sequence: Synthetic oligonucleotide
  Sense strand starting at position 3406 of SEQ ID NO: 917364
gauugagugcucuauucug

SEQ ID NO: 1229595 - RNA, 19 nt, Artificial Sequence
  Description of Artificial Sequence: Synthetic oligonucleotide
  Antisense strand to SEQ ID NO: 1229594
cagaauagagcacucaauc

SEQ ID NO: 1229596 - RNA, 19 nt, Artificial Sequence
  Description of Artificial Sequence: Synthetic oligonucleotide
  Sense strand starting at position 3415 of SEQ ID NO: 917364
cucuauucugaggacucuu

SEQ ID NO: 1229597 - RNA, 19 nt, Artificial Sequence
  Description of Artificial Sequence: Synthetic oligonucleotide
  Antisense strand to SEQ ID NO: 1229596
aagaguccucagaauagag

SEQ ID NO: 1229598 - RNA, 19 nt, Artificial Sequence
  Description of Artificial Sequence: Synthetic oligonucleotide
  Sense strand starting at position 3469 of SEQ ID NO: 917364
uguggacuucucugcagau

SEQ ID NO: 1229599 - RNA, 19 nt, Artificial Sequence
  Description of Artificial Sequence: Synthetic oligonucleotide
  Antisense strand to SEQ ID NO: 1229598
aucugcagagaaguccaca

SEQ ID NO: 1229600 - RNA, 19 nt, Artificial Sequence
  Description of Artificial Sequence: Synthetic oligonucleotide
  Sense strand starting at position 3470 of SEQ ID NO: 917364
guggacuucucugcagauu

SEQ ID NO: 1229601 - RNA, 19 nt, Artificial Sequence
  Description of Artificial Sequence: Synthetic oligonucleotide
  Antisense strand to SEQ ID NO: 1229600
aaucugcagagaaguccac

SEQ ID NO: 1229602 - RNA, 19 nt, Artificial Sequence
  Description of Artificial Sequence: Synthetic oligonucleotide
  Sense strand starting at position 3471 of SEQ ID NO: 917364
uggacuucucugcagauuc

SEQ ID NO: 1229603 - RNA, 19 nt, Artificial Sequence
  Description of Artificial Sequence: Synthetic oligonucleotide
  Antisense strand to SEQ ID NO: 1229602
gaaucugcagagaagucca

SEQ ID NO: 1229604 - RNA, 19 nt, Artificial Sequence
  Description of Artificial Sequence: Synthetic oligonucleotide
  Sense strand starting at position 3505 of SEQ ID NO: 917364
gccgguauagucucagcau

SEQ ID NO: 1229605 - RNA, 19 nt, Artificial Sequence
  Description of Artificial Sequence: Synthetic oligonucleotide
  Antisense strand to SEQ ID NO: 1229604
augcugagacuauaccggc

SEQ ID NO: 1229606 - RNA, 19 nt, Artificial Sequence
  Description of Artificial Sequence: Synthetic oligonucleotide
  Sense strand starting at position 3524 of SEQ ID NO: 917364
uugcuucgaugugugagaa

SEQ ID NO: 1229607 - RNA, 19 nt, Artificial Sequence
  Description of Artificial Sequence: Synthetic oligonucleotide
  Antisense strand to SEQ ID NO: 1229606
uucucacacaucgaagcaa

SEQ ID NO: 1229608 - RNA, 19 nt, Artificial Sequence
  Description of Artificial Sequence: Synthetic oligonucleotide
  Sense strand starting at position 3525 of SEQ ID NO: 917364
ugcuucgaugugugagaac

SEQ ID NO: 1229609 - RNA, 19 nt, Artificial Sequence
  Description of Artificial Sequence: Synthetic oligonucleotide
  Antisense strand to SEQ ID NO: 1229608
guucucacacaucgaagca

SEQ ID NO: 1229610 - RNA, 19 nt, Artificial Sequence
  Description of Artificial Sequence: Synthetic oligonucleotide
  Sense strand starting at position 3618 of SEQ ID NO: 917364
cuugcugucaccgaagaca

SEQ ID NO: 1229611 - RNA, 19 nt, Artificial Sequence
  Description of Artificial Sequence: Synthetic oligonucleotide
  Antisense strand to SEQ ID NO: 1229610
ugucuucggugacagcaag

SEQ ID NO: 1229612 - RNA, 19 nt, Artificial Sequence
  Description of Artificial Sequence: Synthetic oligonucleotide
  Sense strand starting at position 3667 of SEQ ID NO: 917364
gaguuucggugauuucuuc

SEQ ID NO: 1229613 - RNA, 19 nt, Artificial Sequence
  Description of Artificial Sequence: Synthetic oligonucleotide
  Antisense strand to SEQ ID NO: 1229612
gaagaaaucaccgaaacuc

SEQ ID NO: 1229614 - RNA, 19 nt, Artificial Sequence
  Description of Artificial Sequence: Synthetic oligonucleotide
  Sense strand starting at position 3793 of SEQ ID NO: 917364
cgcggagaacucuacccua

SEQ ID NO: 1229615 - RNA, 19 nt, Artificial Sequence
  Description of Artificial Sequence: Synthetic oligonucleotide
  Antisense strand to SEQ ID NO: 1229614
uaggguagaguucuccgcg

SEQ ID NO: 1229616 - RNA, 19 nt, Artificial Sequence
  Description of Artificial Sequence: Synthetic oligonucleotide
  Sense strand starting at position 3877 of SEQ ID NO: 917364
cguguugacccuuggagau

SEQ ID NO: 1229617 - RNA, 19 nt, Artificial Sequence
  Description of Artificial Sequence: Synthetic oligonucleotide
  Antisense strand to SEQ ID NO: 1229616
aucuccaagggucaacacg

SEQ ID NO: 1229618 - RNA, 19 nt, Artificial Sequence
  Description of Artificial Sequence: Synthetic oligonucleotide
  Sense strand starting at position 3889 of SEQ ID NO: 917364
uggagauaaucugccgagu

SEQ ID NO: 1229619 - RNA, 19 nt, Artificial Sequence
  Description of Artificial Sequence: Synthetic oligonucleotide
  Antisense strand to SEQ ID NO: 1229618
acucggcagauuaucucca

SEQ ID NO: 1229620 - RNA, 19 nt, Artificial Sequence
  Description of Artificial Sequence: Synthetic oligonucleotide
  Sense strand starting at position 3961 of SEQ ID NO: 917365
ggacaaagaucggccacuu

SEQ ID NO: 1229621 - RNA, 19 nt, Artificial Sequence
  Description of Artificial Sequence: Synthetic oligonucleotide
  Antisense strand to SEQ ID NO: 1229620
aaguggccgaucuuugucc

SEQ ID NO: 1229622 - RNA, 19 nt, Artificial Sequence
  Description of Artificial Sequence: Synthetic oligonucleotide
  Sense strand starting at position 38 of SEQ ID NO: 917365
caggccugccuguauuaaa

SEQ ID NO: 1229623 - RNA, 19 nt, Artificial Sequence
  Description of Artificial Sequence: Synthetic oligonucleotide
  Antisense strand to SEQ ID NO: 1229622
uuuaauacaggcaggccug

SEQ ID NO: 1229624 - RNA, 19 nt, Artificial Sequence
  Description of Artificial Sequence: Synthetic oligonucleotide
  Sense strand starting at position 45 of SEQ ID NO: 917365
gccuguauuaaaggcuaga

SEQ ID NO: 1229625 - RNA, 19 nt, Artificial Sequence
  Description of Artificial Sequence: Synthetic oligonucleotide
  Antisense strand to SEQ ID NO: 1229624
ucuagccuuuaauacaggc

SEQ ID NO: 1229626 - RNA, 19 nt, Artificial Sequence
  Description of Artificial Sequence: Synthetic oligonucleotide
  Sense strand starting at position 93 of SEQ ID NO: 917365
agaagaucaugauggcgua

SEQ ID NO: 1229627 - RNA, 19 nt, Artificial Sequence
  Description of Artificial Sequence: Synthetic oligonucleotide
  Antisense strand to SEQ ID NO: 1229626
uacgccaucaugaucuucu

SEQ ID NO: 1229628 - RNA, 19 nt, Artificial Sequence
  Description of Artificial Sequence: Synthetic oligonucleotide
  Sense strand starting at position 111 of SEQ ID NO: 917365
aggcuuggguggcaguaau

SEQ ID NO: 1229629 - RNA, 19 nt, Artificial Sequence
  Description of Artificial Sequence: Synthetic oligonucleotide
  Antisense strand to SEQ ID NO: 1229628
auuacugccacccaagccu

SEQ ID NO: 1229630 - RNA, 19 nt, Artificial Sequence
  Description of Artificial Sequence: Synthetic oligonucleotide
  Sense strand starting at position 189 of SEQ ID NO: 917365
gcccgacugaugcauuaga

SEQ ID NO: 1229631 - RNA, 19 nt, Artificial Sequence
  Description of Artificial Sequence: Synthetic oligonucleotide
  Antisense strand to SEQ ID NO: 1229630
ucuaaugcaucagucgggc

SEQ ID NO: 1229632 - RNA, 19 nt, Artificial Sequence
  Description of Artificial Sequence: Synthetic oligonucleotide
  Sense strand starting at position 296 of SEQ ID NO: 917365
gcagguuuggaguaccuga

SEQ ID NO: 1229633 - RNA, 19 nt, Artificial Sequence
  Description of Artificial Sequence: Synthetic oligonucleotide
  Antisense strand to SEQ ID NO: 1229632
ucagguacuccaaaccugc

SEQ ID NO: 1229634 - RNA, 19 nt, Artificial Sequence
  Description of Artificial Sequence: Synthetic oligonucleotide
  Sense strand starting at position 332 of SEQ ID NO: 917365
agaauucucuuugggacau

SEQ ID NO: 1229635 - RNA, 19 nt, Artificial Sequence
  Description of Artificial Sequence: Synthetic oligonucleotide
  Antisense strand to SEQ ID NO: 1229634
augucccaaagagaauucu

SEQ ID NO: 1229636 - RNA, 19 nt, Artificial Sequence
  Description of Artificial Sequence: Synthetic oligonucleotide
  Sense strand starting at position 344 of SEQ ID NO: 917365
gggacauacucaguuugag

SEQ ID NO: 1229637 - RNA, 19 nt, Artificial Sequence
  Description of Artificial Sequence: Synthetic oligonucleotide
  Antisense strand to SEQ ID NO: 1229636
cucaaacugaguauguccc

SEQ ID NO: 1229638 - RNA, 19 nt, Artificial Sequence
  Description of Artificial Sequence: Synthetic oligonucleotide
  Sense strand starting at position 347 of SEQ ID NO: 917365
acauacucaguuugagauc

SEQ ID NO: 1229639 - RNA, 19 nt, Artificial Sequence
  Description of Artificial Sequence: Synthetic oligonucleotide
  Antisense strand to SEQ ID NO: 1229638
gaucucaaacugaguaugu

SEQ ID NO: 1229640 - RNA, 19 nt, Artificial Sequence
  Description of Artificial Sequence: Synthetic oligonucleotide
  Sense strand starting at position 375 of SEQ ID NO: 917365
auggaagaaguugguuaua

SEQ ID NO: 1229641 - RNA, 19 nt, Artificial Sequence
  Description of Artificial Sequence: Synthetic oligonucleotide
  Antisense strand to SEQ ID NO: 1229640
uauaaccaacuucuuccau

SEQ ID NO: 1229642 - RNA, 19 nt, Artificial Sequence
  Description of Artificial Sequence: Synthetic oligonucleotide
  Sense strand starting at position 380 of SEQ ID NO: 917365
agaaguugguuauaccagu

SEQ ID NO: 1229643 - RNA, 19 nt, Artificial Sequence
  Description of Artificial Sequence: Synthetic oligonucleotide
  Antisense strand to SEQ ID NO: 1229642
acugguauaaccaacuucu

SEQ ID NO: 1229644 - RNA, 19 nt, Artificial Sequence
  Description of Artificial Sequence: Synthetic oligonucleotide
  Sense strand starting at position 388 of SEQ ID NO: 917365
guuauaccagucuggaguu

SEQ ID NO: 1229645 - RNA, 19 nt, Artificial Sequence
  Description of Artificial Sequence: Synthetic oligonucleotide
  Antisense strand to SEQ ID NO: 1229644
aacuccagacugguauaac

SEQ ID NO: 1229646 - RNA, 19 nt, Artificial Sequence
  Description of Artificial Sequence: Synthetic oligonucleotide
  Sense strand starting at position 429 of SEQ ID NO: 917365
gcgcaucucccgugacuua

SEQ ID NO: 1229647 - RNA, 19 nt, Artificial Sequence
  Description of Artificial Sequence: Synthetic oligonucleotide
  Antisense strand to SEQ ID NO: 1229646
uaagucacgggagaugcgc

SEQ ID NO: 1229648 - RNA, 19 nt, Artificial Sequence
  Description of Artificial Sequence: Synthetic oligonucleotide
  Sense strand starting at position 597 of SEQ ID NO: 917365
ggcugagucuugcccuuua

SEQ ID NO: 1229649 - RNA, 19 nt, Artificial Sequence
  Description of Artificial Sequence: Synthetic oligonucleotide
  Antisense strand to SEQ ID NO: 1229648
uaaagggcaagacucagcc

SEQ ID NO: 1229650 - RNA, 19 nt, Artificial Sequence
  Description of Artificial Sequence: Synthetic oligonucleotide
  Sense strand starting at position 602 of SEQ ID NO: 917365
agucuugcccuuuaaaggu

SEQ ID NO: 1229651 - RNA, 19 nt, Artificial Sequence
  Description of Artificial Sequence: Synthetic oligonucleotide
  Antisense strand to SEQ ID NO: 1229650
accuuuaaagggcaagacu

SEQ ID NO: 1229652 - RNA, 19 nt, Artificial Sequence
  Description of Artificial Sequence: Synthetic oligonucleotide
  Sense strand starting at position 887 of SEQ ID NO: 917365
ucaggagucucucaucugu

SEQ ID NO: 1229653 - RNA, 19 nt, Artificial Sequence
  Description of Artificial Sequence: Synthetic oligonucleotide
  Antisense strand to SEQ ID NO: 1229652
acagaugagagacuccuga

SEQ ID NO: 1229654 - RNA, 19 nt, Artificial Sequence
  Description of Artificial Sequence: Synthetic oligonucleotide
  Sense strand starting at position 889 of SEQ ID NO: 917365
aggagucucucaucuguac

SEQ ID NO: 1229655 - RNA, 19 nt, Artificial Sequence
  Description of Artificial Sequence: Synthetic oligonucleotide
  Antisense strand to SEQ ID NO: 1229654
guacagaugagagacuccu

SEQ ID NO: 1229656 - RNA, 19 nt, Artificial Sequence
  Description of Artificial Sequence: Synthetic oligonucleotide
  Sense strand starting at position 927 of SEQ ID NO: 917365
ucauuaaaguugccuagua

SEQ ID NO: 1229657 - RNA, 19 nt, Artificial Sequence
  Description of Artificial Sequence: Synthetic oligonucleotide
  Antisense strand to SEQ ID NO: 1229656
uacuaggcaacuuuaauga

SEQ ID NO: 1229658 - RNA, 19 nt, Artificial Sequence
  Description of Artificial Sequence: Synthetic oligonucleotide
  Sense strand starting at position 929 of SEQ ID NO: 917365
auuaaaguugccuaguaga

SEQ ID NO: 1229659 - RNA, 19 nt, Artificial Sequence
  Description of Artificial Sequence: Synthetic oligonucleotide
  Antisense strand to SEQ ID NO: 1229658
ucuacuaggcaacuuuaau

SEQ ID NO: 1229660 - RNA, 19 nt, Artificial Sequence
  Description of Artificial Sequence: Synthetic oligonucleotide
  Sense strand starting at position 978 of SEQ ID NO: 917365
uuuguaugcucaggaccuu

SEQ ID NO: 1229661 - RNA, 19 nt, Artificial Sequence
  Description of Artificial Sequence: Synthetic oligonucleotide
  Antisense strand to SEQ ID NO: 1229660
aagguccugagcauacaaa

SEQ ID NO: 1229662 - RNA, 19 nt, Artificial Sequence
  Description of Artificial Sequence: Synthetic oligonucleotide
  Sense strand starting at position 1403 of SEQ ID NO: 917365
gcgaguggugagccaaguu

SEQ ID NO: 1229663 - RNA, 19 nt, Artificial Sequence
  Description of Artificial Sequence: Synthetic oligonucleotide
  Antisense strand to SEQ ID NO: 1229662
aacuuggcucaccacucgc

SEQ ID NO: 1229664 - RNA, 19 nt, Artificial Sequence
  Description of Artificial Sequence: Synthetic oligonucleotide
  Sense strand starting at position 2248 of SEQ ID NO: 917365
caaucacucuccugagggu

SEQ ID NO: 1229665 - RNA, 19 nt, Artificial Sequence
  Description of Artificial Sequence: Synthetic oligonucleotide
  Antisense strand to SEQ ID NO: 1229664
acccucaggagagugauug

SEQ ID NO: 1229666 - RNA, 19 nt, Artificial Sequence
  Description of Artificial Sequence: Synthetic oligonucleotide
  Sense strand starting at position 2257 of SEQ ID NO: 917365
uccugaggguuccuccuaa

SEQ ID NO: 1229667 - RNA, 19 nt, Artificial Sequence
  Description of Artificial Sequence: Synthetic oligonucleotide
  Antisense strand to SEQ ID NO: 1229666
uuaggaggaacccucagga

SEQ ID NO: 1229668 - RNA, 19 nt, Artificial Sequence
  Description of Artificial Sequence: Synthetic oligonucleotide
  Sense strand starting at position 2604 of SEQ ID NO: 917365
uaccgaguuuggcuuaaau

SEQ ID NO: 1229669 - RNA, 19 nt, Artificial Sequence
  Description of Artificial Sequence: Synthetic oligonucleotide
  Antisense strand to SEQ ID NO: 1229668
auuuaagccaaacucggua

SEQ ID NO: 1229670 - RNA, 19 nt, Artificial Sequence
  Description of Artificial Sequence: Synthetic oligonucleotide
  Sense strand starting at position 2606 of SEQ ID NO: 917365
ccgaguuuggcuuaaauaa

SEQ ID NO: 1229671 - RNA, 19 nt, Artificial Sequence
  Description of Artificial Sequence: Synthetic oligonucleotide
  Antisense strand to SEQ ID NO: 1229670
uuauuuaagccaaacucgg

SEQ ID NO: 1229672 - RNA, 19 nt, Artificial Sequence
  Description of Artificial Sequence: Synthetic oligonucleotide
  Sense strand starting at position 2641 of SEQ ID NO: 917365
cgcagaauuagccgauccu

SEQ ID NO: 1229673 - RNA, 19 nt, Artificial Sequence
  Description of Artificial Sequence: Synthetic oligonucleotide
  Antisense strand to SEQ ID NO: 1229672
aggaucggcuaauucugcg

SEQ ID NO: 1229674 - RNA, 19 nt, Artificial Sequence
  Description of Artificial Sequence: Synthetic oligonucleotide
  Sense strand starting at position 2642 of SEQ ID NO: 917366
gcagaauuagccgauccua

SEQ ID NO: 1229675 - RNA, 19 nt, Artificial Sequence
  Description of Artificial Sequence: Synthetic oligonucleotide
  Antisense strand to SEQ ID NO: 1229674
uaggaucggcuaauucugc

SEQ ID NO: 1229676 - RNA, 19 nt, Artificial Sequence
  Description of Artificial Sequence: Synthetic oligonucleotide
  Sense strand starting at position 12 of SEQ ID NO: 917366
agaaaugugcuagguuacu

SEQ ID NO: 1229677 - RNA, 19 nt, Artificial Sequence
  Description of Artificial Sequence: Synthetic oligonucleotide
  Antisense strand to SEQ ID NO: 1229676
aguaaccuagcacauuucu

SEQ ID NO: 1229678 - RNA, 19 nt, Artificial Sequence
  Description of Artificial Sequence: Synthetic oligonucleotide
  Sense strand starting at position 23 of SEQ ID NO: 917366
agguuacugucagaaugau

SEQ ID NO: 1229679 - RNA, 19 nt, Artificial Sequence
  Description of Artificial Sequence: Synthetic oligonucleotide
  Antisense strand to SEQ ID NO: 1229678
aucauucugacaguaaccu

SEQ ID NO: 1229680 - RNA, 19 nt, Artificial Sequence
  Description of Artificial Sequence: Synthetic oligonucleotide
  Sense strand starting at position 47 of SEQ ID NO: 917366
ggaaauguacuauguuacu

SEQ ID NO: 1229681 - RNA, 19 nt, Artificial Sequence
  Description of Artificial Sequence: Synthetic oligonucleotide
  Antisense strand to SEQ ID NO: 1229680
aguaacauaguacauuucc

SEQ ID NO: 1229682 - RNA, 19 nt, Artificial Sequence
  Description of Artificial Sequence: Synthetic oligonucleotide
  Sense strand starting at position 86 of SEQ ID NO: 917366
auggacaucugcucauauu

SEQ ID NO: 1229683 - RNA, 19 nt, Artificial Sequence
  Description of Artificial Sequence: Synthetic oligonucleotide
  Antisense strand to SEQ ID NO: 1229682
aauaugagcagauguccau

SEQ ID NO: 1229684 - RNA, 19 nt, Artificial Sequence
  Description of Artificial Sequence: Synthetic oligonucleotide
  Sense strand starting at position 122 of SEQ ID NO: 917366
agucaagcuccguaguguu

SEQ ID NO: 1229685 - RNA, 19 nt, Artificial Sequence
  Description of Artificial Sequence: Synthetic oligonucleotide
  Antisense strand to SEQ ID NO: 1229684
aacacuacggagcuugacu

SEQ ID NO: 1229686 - RNA, 19 nt, Artificial Sequence
  Description of Artificial Sequence: Synthetic oligonucleotide
  Sense strand starting at position 124 of SEQ ID NO: 917366
ucaagcuccguaguguuau

SEQ ID NO: 1229687 - RNA, 19 nt, Artificial Sequence
  Description of Artificial Sequence: Synthetic oligonucleotide
  Antisense strand to SEQ ID NO: 1229686
auaacacuacggagcuuga

SEQ ID NO: 1229688 - RNA, 19 nt, Artificial Sequence
  Description of Artificial Sequence: Synthetic oligonucleotide
  Sense strand starting at position 132 of SEQ ID NO: 917366
cguaguguuauauacaagu

SEQ ID NO: 1229689 - RNA, 19 nt, Artificial Sequence
  Description of Artificial Sequence: Synthetic oligonucleotide
  Antisense strand to SEQ ID NO: 1229688
acuuguauauaacacuacg

SEQ ID NO: 1229690 - RNA, 19 nt, Artificial Sequence
  Description of Artificial Sequence: Synthetic oligonucleotide
  Sense strand starting at position 300 of SEQ ID NO: 917366
gugguagagacaggcauua

SEQ ID NO: 1229691 - RNA, 19 nt, Artificial Sequence
  Description of Artificial Sequence: Synthetic oligonucleotide
  Antisense strand to SEQ ID NO: 1229690
uaaugccugucucuaccac

SEQ ID NO: 1229692 - RNA, 19 nt, Artificial Sequence
  Description of Artificial Sequence: Synthetic oligonucleotide
  Sense strand starting at position 336 of SEQ ID NO: 917366
uuuccagguagugauaagu

SEQ ID NO: 1229693 - RNA, 19 nt, Artificial Sequence
  Description of Artificial Sequence: Synthetic oligonucleotide
  Antisense strand to SEQ ID NO: 1229692
acuuaucacuaccuggaaa

SEQ ID NO: 1229694 - RNA, 19 nt, Artificial Sequence
  Description of Artificial Sequence: Synthetic oligonucleotide
  Sense strand starting at position 345 of SEQ ID NO: 917366
agugauaaguacuauagag

SEQ ID NO: 1229695 - RNA, 19 nt, Artificial Sequence
  Description of Artificial Sequence: Synthetic oligonucleotide
  Antisense strand to SEQ ID NO: 1229694
cucuauaguacuuaucacu

SEQ ID NO: 1229696 - RNA, 19 nt, Artificial Sequence
  Description of Artificial Sequence: Synthetic oligonucleotide
  Sense strand starting at position 449 of SEQ ID NO: 917366
ggaagauguauaugagcag

SEQ ID NO: 1229697 - RNA, 19 nt, Artificial Sequence
  Description of Artificial Sequence: Synthetic oligonucleotide
  Antisense strand to SEQ ID NO: 1229696
cugcucauauacaucuucc

SEQ ID NO: 1229698 - RNA, 19 nt, Artificial Sequence
  Description of Artificial Sequence: Synthetic oligonucleotide
  Sense strand starting at position 450 of SEQ ID NO: 917366
gaagauguauaugagcaga

SEQ ID NO: 1229699 - RNA, 19 nt, Artificial Sequence
  Description of Artificial Sequence: Synthetic oligonucleotide
  Antisense strand to SEQ ID NO: 1229698
ucugcucauauacaucuuc

SEQ ID NO: 1229700 - RNA, 19 nt, Artificial Sequence
  Description of Artificial Sequence: Synthetic oligonucleotide
  Sense strand starting at position 452 of SEQ ID NO: 917366
agauguauaugagcagaca

SEQ ID NO: 1229701 - RNA, 19 nt, Artificial Sequence
  Description of Artificial Sequence: Synthetic oligonucleotide
  Antisense strand to SEQ ID NO: 1229700
ugucugcucauauacaucu

SEQ ID NO: 1229702 - RNA, 19 nt, Artificial Sequence
  Description of Artificial Sequence: Synthetic oligonucleotide
  Sense strand starting at position 497 of SEQ ID NO: 917366
gggauaauguggcaaugag

SEQ ID NO: 1229703 - RNA, 19 nt, Artificial Sequence
  Description of Artificial Sequence: Synthetic oligonucleotide
  Antisense strand to SEQ ID NO: 1229702
cucauugccacauuauccc

SEQ ID NO: 1229704 - RNA, 19 nt, Artificial Sequence
  Description of Artificial Sequence: Synthetic oligonucleotide
  Sense strand starting at position 538 of SEQ ID NO: 917366
auggaaagauccugaggca

SEQ ID NO: 1229705 - RNA, 19 nt, Artificial Sequence
  Description of Artificial Sequence: Synthetic oligonucleotide
  Antisense strand to SEQ ID NO: 1229704
ugccucaggaucuuuccau

SEQ ID NO: 1229706 - RNA, 19 nt, Artificial Sequence
  Description of Artificial Sequence: Synthetic oligonucleotide
  Sense strand starting at position 598 of SEQ ID NO: 917366
guagcagagucauuaagau

SEQ ID NO: 1229707 - RNA, 19 nt, Artificial Sequence
  Description of Artificial Sequence: Synthetic oligonucleotide
  Antisense strand to SEQ ID NO: 1229706
aucuuaaugacucugcuac

SEQ ID NO: 1229708 - RNA, 19 nt, Artificial Sequence
  Description of Artificial Sequence: Synthetic oligonucleotide
  Sense strand starting at position 665 of SEQ ID NO: 917366
cucauagauuguucugaga

SEQ ID NO: 1229709 - RNA, 19 nt, Artificial Sequence
  Description of Artificial Sequence: Synthetic oligonucleotide
  Antisense strand to SEQ ID NO: 1229708
ucucagaacaaucuaugag

SEQ ID NO: 1229710 - RNA, 19 nt, Artificial Sequence
  Description of Artificial Sequence: Synthetic oligonucleotide
  Sense strand starting at position 674 of SEQ ID NO: 917366
uguucugagagucauggga

SEQ ID NO: 1229711 - RNA, 19 nt, Artificial Sequence
  Description of Artificial Sequence: Synthetic oligonucleotide
  Antisense strand to SEQ ID NO: 1229710
ucccaugacucucagaaca

SEQ ID NO: 1229712 - RNA, 19 nt, Artificial Sequence
  Description of Artificial Sequence: Synthetic oligonucleotide
  Sense strand starting at position 676 of SEQ ID NO: 917366
uucugagagucaugggaga

SEQ ID NO: 1229713 - RNA, 19 nt, Artificial Sequence
  Description of Artificial Sequence: Synthetic oligonucleotide
  Antisense strand to SEQ ID NO: 1229712
ucucccaugacucucagaa

SEQ ID NO: 1229714 - RNA, 19 nt, Artificial Sequence
  Description of Artificial Sequence: Synthetic oligonucleotide
  Sense strand starting at position 678 of SEQ ID NO: 917366
cugagagucaugggagacu

SEQ ID NO: 1229715 - RNA, 19 nt, Artificial Sequence
  Description of Artificial Sequence: Synthetic oligonucleotide
  Antisense strand to SEQ ID NO: 1229714
agucucccaugacucucag

SEQ ID NO: 1229716 - RNA, 19 nt, Artificial Sequence
  Description of Artificial Sequence: Synthetic oligonucleotide
  Sense strand starting at position 689 of SEQ ID NO: 917366
gggagacuauugguggguu

SEQ ID NO: 1229717 - RNA, 19 nt, Artificial Sequence
  Description of Artificial Sequence: Synthetic oligonucleotide
  Antisense strand to SEQ ID NO: 1229716
aacccaccaauagucuccc

SEQ ID NO: 1229718 - RNA, 19 nt, Artificial Sequence
  Description of Artificial Sequence: Synthetic oligonucleotide
  Sense strand starting at position 765 of SEQ ID NO: 917366
caggccugccuguauuaaa

SEQ ID NO: 1229719 - RNA, 19 nt, Artificial Sequence
  Description of Artificial Sequence: Synthetic oligonucleotide
  Antisense strand to SEQ ID NO: 1229718
uuuaauacaggcaggccug

SEQ ID NO: 1229720 - RNA, 19 nt, Artificial Sequence
  Description of Artificial Sequence: Synthetic oligonucleotide
  Sense strand starting at position 772 of SEQ ID NO: 917366
gccuguauuaaaggcuaga

SEQ ID NO: 1229721 - RNA, 19 nt, Artificial Sequence
  Description of Artificial Sequence: Synthetic oligonucleotide
  Antisense strand to SEQ ID NO: 1229720
ucuagccuuuaauacaggc

SEQ ID NO: 1229722 - RNA, 19 nt, Artificial Sequence
  Description of Artificial Sequence: Synthetic oligonucleotide
  Sense strand starting at position 916 of SEQ ID NO: 917366
gcccgacugaugcauuaga

SEQ ID NO: 1229723 - RNA, 19 nt, Artificial Sequence
  Description of Artificial Sequence: Synthetic oligonucleotide
  Antisense strand to SEQ ID NO: 1229722
ucuaaugcaucagucgggc

SEQ ID NO: 1229724 - RNA, 19 nt, Artificial Sequence
  Description of Artificial Sequence: Synthetic oligonucleotide
  Sense strand starting at position 1023 of SEQ ID NO: 917366
gcagguuuggaguaccuga

SEQ ID NO: 1229725 - RNA, 19 nt, Artificial Sequence
  Description of Artificial Sequence: Synthetic oligonucleotide
  Antisense strand to SEQ ID NO: 1229724
ucagguacuccaaaccugc

SEQ ID NO: 1229726 - RNA, 19 nt, Artificial Sequence
  Description of Artificial Sequence: Synthetic oligonucleotide
  Sense strand starting at position 1071 of SEQ ID NO: 917366
gggacauacucaguuugag

SEQ ID NO: 1229727 - RNA, 19 nt, Artificial Sequence
  Description of Artificial Sequence: Synthetic oligonucleotide
  Antisense strand to SEQ ID NO: 1229726
cucaaacugaguauguccc

SEQ ID NO: 1229728 - RNA, 19 nt, Artificial Sequence
  Description of Artificial Sequence: Synthetic oligonucleotide
  Sense strand starting at position 1074 of SEQ ID NO: 917366
acauacucaguuugagauc

SEQ ID NO: 1229729 - RNA, 19 nt, Artificial Sequence
  Description of Artificial Sequence: Synthetic oligonucleotide
  Antisense strand to SEQ ID NO: 1229728
gaucucaaacugaguaugu

SEQ ID NO: 1229730 - RNA, 19 nt, Artificial Sequence
  Description of Artificial Sequence: Synthetic oligonucleotide
  Sense strand starting at position 1102 of SEQ ID NO: 917366
auggaagaaguugguuaua

SEQ ID NO: 1229731 - RNA, 19 nt, Artificial Sequence
  Description of Artificial Sequence: Synthetic oligonucleotide
  Antisense strand to SEQ ID NO: 1229730
uauaaccaacuucuuccau

SEQ ID NO: 1229732 - RNA, 19 nt, Artificial Sequence
  Description of Artificial Sequence: Synthetic oligonucleotide
  Sense strand starting at position 1115 of SEQ ID NO: 917366
guuauaccagucuggaguu

SEQ ID NO: 1229733 - RNA, 19 nt, Artificial Sequence
  Description of Artificial Sequence: Synthetic oligonucleotide
  Antisense strand to SEQ ID NO: 1229732
aacuccagacugguauaac

SEQ ID NO: 1229734 - RNA, 19 nt, Artificial Sequence
  Description of Artificial Sequence: Synthetic oligonucleotide
  Sense strand starting at position 1324 of SEQ ID NO: 917366
ggcugagucuugcccuuua

SEQ ID NO: 1229735 - RNA, 19 nt, Artificial Sequence
  Description of Artificial Sequence: Synthetic oligonucleotide
  Antisense strand to SEQ ID NO: 1229734
uaaagggcaagacucagcc

SEQ ID NO: 1229736 - RNA, 19 nt, Artificial Sequence
  Description of Artificial Sequence: Synthetic oligonucleotide
  Sense strand starting at position 1329 of SEQ ID NO: 917366
agucuugcccuuuaaaggu

SEQ ID NO: 1229737 - RNA, 19 nt, Artificial Sequence
  Description of Artificial Sequence: Synthetic oligonucleotide
  Antisense strand to SEQ ID NO: 1229736
accuuuaaagggcaagacu

SEQ ID NO: 1229738 - RNA, 19 nt, Artificial Sequence
  Description of Artificial Sequence: Synthetic oligonucleotide
  Sense strand starting at position 1616 of SEQ ID NO: 917366
aggagucucucaucuguac

SEQ ID NO: 1229739 - RNA, 19 nt, Artificial Sequence
  Description of Artificial Sequence: Synthetic oligonucleotide
  Antisense strand to SEQ ID NO: 1229738
guacagaugagagacuccu

SEQ ID NO: 1229740 - RNA, 19 nt, Artificial Sequence
  Description of Artificial Sequence: Synthetic oligonucleotide
  Sense strand starting at position 1654 of SEQ ID NO: 917366
ucauuaaaguugccuagua

SEQ ID NO: 1229741 - RNA, 19 nt, Artificial Sequence
  Description of Artificial Sequence: Synthetic oligonucleotide
  Antisense strand to SEQ ID NO: 1229740
uacuaggcaacuuuaauga

SEQ ID NO: 1229742 - RNA, 19 nt, Artificial Sequence
  Description of Artificial Sequence: Synthetic oligonucleotide
  Sense strand starting at position 1656 of SEQ ID NO: 917366
auuaaaguugccuaguaga

SEQ ID NO: 1229743 - RNA, 19 nt, Artificial Sequence
  Description of Artificial Sequence: Synthetic oligonucleotide
  Antisense strand to SEQ ID NO: 1229742
ucuacuaggcaacuuuaau

SEQ ID NO: 1229744 - RNA, 19 nt, Artificial Sequence
  Description of Artificial Sequence: Synthetic oligonucleotide
  Sense strand starting at position 2130 of SEQ ID NO: 917366
gcgaguggugagccaaguu

SEQ ID NO: 1229745 - RNA, 19 nt, Artificial Sequence
  Description of Artificial Sequence: Synthetic oligonucleotide
  Antisense strand to SEQ ID NO: 1229744
aacuuggcucaccacucgc

SEQ ID NO: 1229746 - RNA, 19 nt, Artificial Sequence
  Description of Artificial Sequence: Synthetic oligonucleotide
  Sense strand starting at position 2984 of SEQ ID NO: 917366
uccugaggguuccuccuaa

SEQ ID NO: 1229747 - RNA, 19 nt, Artificial Sequence
  Description of Artificial Sequence: Synthetic oligonucleotide
  Antisense strand to SEQ ID NO: 1229746
uuaggaggaacccucagga

SEQ ID NO: 1229748 - RNA, 19 nt, Artificial Sequence
  Description of Artificial Sequence: Synthetic oligonucleotide
  Sense strand starting at position 3331 of SEQ ID NO: 917366
uaccgaguuuggcuuaaau

SEQ ID NO: 1229749 - RNA, 19 nt, Artificial Sequence
  Description of Artificial Sequence: Synthetic oligonucleotide
  Antisense strand to SEQ ID NO: 1229748
auuuaagccaaacucggua

SEQ ID NO: 1229750 - RNA, 19 nt, Artificial Sequence
  Description of Artificial Sequence: Synthetic oligonucleotide
  Sense strand starting at position 3333 of SEQ ID NO: 917366
ccgaguuuggcuuaaauaa

SEQ ID NO: 1229751 - RNA, 19 nt, Artificial Sequence
  Description of Artificial Sequence: Synthetic oligonucleotide
  Antisense strand to SEQ ID NO: 1229750
uuauuuaagccaaacucgg

SEQ ID NO: 1229752 - RNA, 19 nt, Artificial Sequence
  Description of Artificial Sequence: Synthetic oligonucleotide
  Sense strand starting at position 3368 of SEQ ID NO: 917366
cgcagaauuagccgauccu

SEQ ID NO: 1229753 - RNA, 19 nt, Artificial Sequence
  Description of Artificial Sequence: Synthetic oligonucleotide
  Antisense strand to SEQ ID NO: 1229752
aggaucggcuaauucugcg

SEQ ID NO: 1229754 - RNA, 19 nt, Artificial Sequence
  Description of Artificial Sequence: Synthetic oligonucleotide
  Sense strand starting at position 3369 of SEQ ID NO: 917367
gcagaauuagccgauccua

SEQ ID NO: 1229755 - RNA, 19 nt, Artificial Sequence
  Description of Artificial Sequence: Synthetic oligonucleotide
  Antisense strand to SEQ ID NO: 1229754
uaggaucggcuaauucugc

SEQ ID NO: 1229756 - RNA, 19 nt, Artificial Sequence
  Description of Artificial Sequence: Synthetic oligonucleotide
  Sense strand starting at position 248 of SEQ ID NO: 917367
uguacuugucaagaaauau

SEQ ID NO: 1229757 - RNA, 19 nt, Artificial Sequence
  Description of Artificial Sequence: Synthetic oligonucleotide
  Antisense strand to SEQ ID NO: 1229756
auauuucuugacaaguaca

SEQ ID NO: 1229758 - RNA, 19 nt, Artificial Sequence
  Description of Artificial Sequence: Synthetic oligonucleotide
  Sense strand starting at position 319 of SEQ ID NO: 917367
gccguuugaagacaauaaa

SEQ ID NO: 1229759 - RNA, 19 nt, Artificial Sequence
  Description of Artificial Sequence: Synthetic oligonucleotide
  Antisense strand to SEQ ID NO: 1229758
uuuauugucuucaaacggc

SEQ ID NO: 1229760 - RNA, 19 nt, Artificial Sequence
  Description of Artificial Sequence: Synthetic oligonucleotide
  Sense strand starting at position 360 of SEQ ID NO: 917367
accugaucuuaccuuugua

SEQ ID NO: 1229761 - RNA, 19 nt, Artificial Sequence
  Description of Artificial Sequence: Synthetic oligonucleotide
  Antisense strand to SEQ ID NO: 1229760
uacaaagguaagaucaggu

SEQ ID NO: 1229762 - RNA, 19 nt, Artificial Sequence
  Description of Artificial Sequence: Synthetic oligonucleotide
  Sense strand starting at position 363 of SEQ ID NO: 917367
ugaucuuaccuuuguaaga

SEQ ID NO: 1229763 - RNA, 19 nt, Artificial Sequence
  Description of Artificial Sequence: Synthetic oligonucleotide
  Antisense strand to SEQ ID NO: 1229762
ucuuacaaagguaagauca

SEQ ID NO: 1229764 - RNA, 19 nt, Artificial Sequence
  Description of Artificial Sequence: Synthetic oligonucleotide
  Sense strand starting at position 715 of SEQ ID NO: 917367
uacagaaaucauggacugu

SEQ ID NO: 1229765 - RNA, 19 nt, Artificial Sequence
  Description of Artificial Sequence: Synthetic oligonucleotide
  Antisense strand to SEQ ID NO: 1229764
acaguccaugauuucugua

SEQ ID NO: 1229766 - RNA, 19 nt, Artificial Sequence
  Description of Artificial Sequence: Synthetic oligonucleotide
  Sense strand starting at position 719 of SEQ ID NO: 917367
gaaaucauggacuguauua

SEQ ID NO: 1229767 - RNA, 19 nt, Artificial Sequence
  Description of Artificial Sequence: Synthetic oligonucleotide
  Antisense strand to SEQ ID NO: 1229766
uaauacaguccaugauuuc

SEQ ID NO: 1229768 - RNA, 19 nt, Artificial Sequence
  Description of Artificial Sequence: Synthetic oligonucleotide
  Sense strand starting at position 852 of SEQ ID NO: 917367
gaagucagccuucgagaaa

SEQ ID NO: 1229769 - RNA, 19 nt, Artificial Sequence
  Description of Artificial Sequence: Synthetic oligonucleotide
  Antisense strand to SEQ ID NO: 1229768
uuucucgaaggcugacuuc

SEQ ID NO: 1229770 - RNA, 19 nt, Artificial Sequence
  Description of Artificial Sequence: Synthetic oligonucleotide
  Sense strand starting at position 855 of SEQ ID NO: 917367
gucagccuucgagaaacuu

SEQ ID NO: 1229771 - RNA, 19 nt, Artificial Sequence
  Description of Artificial Sequence: Synthetic oligonucleotide
  Antisense strand to SEQ ID NO: 1229770
aaguuucucgaaggcugac

SEQ ID NO: 1229772 - RNA, 19 nt, Artificial Sequence
  Description of Artificial Sequence: Synthetic oligonucleotide
  Sense strand starting at position 998 of SEQ ID NO: 917367
agaaaucacgucugaguug

SEQ ID NO: 1229773 - RNA, 19 nt, Artificial Sequence
  Description of Artificial Sequence: Synthetic oligonucleotide
  Antisense strand to SEQ ID NO: 1229772
caacucagacgugauuucu

SEQ ID NO: 1229774 - RNA, 19 nt, Artificial Sequence
  Description of Artificial Sequence: Synthetic oligonucleotide
  Sense strand starting at position 1007 of SEQ ID NO: 917367
gucugaguuggucagggaa

SEQ ID NO: 1229775 - RNA, 19 nt, Artificial Sequence
  Description of Artificial Sequence: Synthetic oligonucleotide
  Antisense strand to SEQ ID NO: 1229774
uucccugaccaacucagac

SEQ ID NO: 1229776 - RNA, 19 nt, Artificial Sequence
  Description of Artificial Sequence: Synthetic oligonucleotide
  Sense strand starting at position 1062 of SEQ ID NO: 917367
uuuggacaggcaugguaaa

SEQ ID NO: 1229777 - RNA, 19 nt, Artificial Sequence
  Description of Artificial Sequence: Synthetic oligonucleotide
  Antisense strand to SEQ ID NO: 1229776
uuuaccaugccuguccaaa

SEQ ID NO: 1229778 - RNA, 19 nt, Artificial Sequence
  Description of Artificial Sequence: Synthetic oligonucleotide
  Sense strand starting at position 1218 of SEQ ID NO: 917367
gcccuuaacgaucaagacu

SEQ ID NO: 1229779 - RNA, 19 nt, Artificial Sequence
  Description of Artificial Sequence: Synthetic oligonucleotide
  Antisense strand to SEQ ID NO: 1229778
agucuugaucguuaagggc

SEQ ID NO: 1229780 - RNA, 19 nt, Artificial Sequence
  Description of Artificial Sequence: Synthetic oligonucleotide
  Sense strand starting at position 1234 of SEQ ID NO: 917367
acuggaaggccuuaaaugu

SEQ ID NO: 1229781 - RNA, 19 nt, Artificial Sequence
  Description of Artificial Sequence: Synthetic oligonucleotide
  Antisense strand to SEQ ID NO: 1229780
acauuuaaggccuuccagu

SEQ ID NO: 1229782 - RNA, 19 nt, Artificial Sequence
  Description of Artificial Sequence: Synthetic oligonucleotide
  Sense strand starting at position 1288 of SEQ ID NO: 917367
ggcaucauugaagauguuu

SEQ ID NO: 1229783 - RNA, 19 nt, Artificial Sequence
  Description of Artificial Sequence: Synthetic oligonucleotide
  Antisense strand to SEQ ID NO: 1229782
aaacaucuucaaugaugcc

SEQ ID NO: 1229784 - RNA, 19 nt, Artificial Sequence
  Description of Artificial Sequence: Synthetic oligonucleotide
  Sense strand starting at position 1417 of SEQ ID NO: 917367
auaagaauguuagcaacua

SEQ ID NO: 1229785 - RNA, 19 nt, Artificial Sequence
  Description of Artificial Sequence: Synthetic oligonucleotide
  Antisense strand to SEQ ID NO: 1229784
uaguugcuaacauucuuau

SEQ ID NO: 1229786 - RNA, 19 nt, Artificial Sequence
  Description of Artificial Sequence: Synthetic oligonucleotide
  Sense strand starting at position 1715 of SEQ ID NO: 917367
gaaagaaagcgaugauagu

SEQ ID NO: 1229787 - RNA, 19 nt, Artificial Sequence
  Description of Artificial Sequence: Synthetic oligonucleotide
  Antisense strand to SEQ ID NO: 1229786
acuaucaucgcuuucuuuc

SEQ ID NO: 1229788 - RNA, 19 nt, Artificial Sequence
  Description of Artificial Sequence: Synthetic oligonucleotide
  Sense strand starting at position 2104 of SEQ ID NO: 917367
agagccaaccaauguuuau

SEQ ID NO: 1229789 - RNA, 19 nt, Artificial Sequence
  Description of Artificial Sequence: Synthetic oligonucleotide
  Antisense strand to SEQ ID NO: 1229788
auaaacauugguuggcucu

SEQ ID NO: 1229790 - RNA, 19 nt, Artificial Sequence
  Description of Artificial Sequence: Synthetic oligonucleotide
  Sense strand starting at position 2114 of SEQ ID NO: 917367
aauguuuaucucggcauuu

SEQ ID NO: 1229791 - RNA, 19 nt, Artificial Sequence
  Description of Artificial Sequence: Synthetic oligonucleotide
  Antisense strand to SEQ ID NO: 1229790
aaaugccgagauaaacauu

SEQ ID NO: 1229792 - RNA, 19 nt, Artificial Sequence
  Description of Artificial Sequence: Synthetic oligonucleotide
  Sense strand starting at position 2138 of SEQ ID NO: 917367
cgagaaguguuacuaauau

SEQ ID NO: 1229793 - RNA, 19 nt, Artificial Sequence
  Description of Artificial Sequence: Synthetic oligonucleotide
  Antisense strand to SEQ ID NO: 1229792
auauuaguaacacuucucg

SEQ ID NO: 1229794 - RNA, 19 nt, Artificial Sequence
  Description of Artificial Sequence: Synthetic oligonucleotide
  Sense strand starting at position 2146 of SEQ ID NO: 917367
guuacuaauauccgggaau

SEQ ID NO: 1229795 - RNA, 19 nt, Artificial Sequence
  Description of Artificial Sequence: Synthetic oligonucleotide
  Antisense strand to SEQ ID NO: 1229794
auucccggauauuaguaac

SEQ ID NO: 1229796 - RNA, 19 nt, Artificial Sequence
  Description of Artificial Sequence: Synthetic oligonucleotide
  Sense strand starting at position 2189 of SEQ ID NO: 917367
aggcguauucuagauugac

SEQ ID NO: 1229797 - RNA, 19 nt, Artificial Sequence
  Description of Artificial Sequence: Synthetic oligonucleotide
  Antisense strand to SEQ ID NO: 1229796
gucaaucuagaauacgccu

SEQ ID NO: 1229798 - RNA, 19 nt, Artificial Sequence
  Description of Artificial Sequence: Synthetic oligonucleotide
  Sense strand starting at position 2190 of SEQ ID NO: 917367
ggcguauucuagauugacg

SEQ ID NO: 1229799 - RNA, 19 nt, Artificial Sequence
  Description of Artificial Sequence: Synthetic oligonucleotide
  Antisense strand to SEQ ID NO: 1229798
cgucaaucuagaauacgcc

SEQ ID NO: 1229800 - RNA, 19 nt, Artificial Sequence
  Description of Artificial Sequence: Synthetic oligonucleotide
  Sense strand starting at position 2722 of SEQ ID NO: 917367
ucucuucugccuuagauug

SEQ ID NO: 1229801 - RNA, 19 nt, Artificial Sequence
  Description of Artificial Sequence: Synthetic oligonucleotide
  Antisense strand to SEQ ID NO: 1229800
caaucuaaggcagaagaga

SEQ ID NO: 1229802 - RNA, 19 nt, Artificial Sequence
  Description of Artificial Sequence: Synthetic oligonucleotide
  Sense strand starting at position 2886 of SEQ ID NO: 917367
gucuguuuaagugugcuuu

SEQ ID NO: 1229803 - RNA, 19 nt, Artificial Sequence
  Description of Artificial Sequence: Synthetic oligonucleotide
  Antisense strand to SEQ ID NO: 1229802
aaagcacacuuaaacagac

SEQ ID NO: 1229804 - RNA, 19 nt, Artificial Sequence
  Description of Artificial Sequence: Synthetic oligonucleotide
  Sense strand starting at position 3086 of SEQ ID NO: 917367
uaagauugauguucuugag

SEQ ID NO: 1229805 - RNA, 19 nt, Artificial Sequence
  Description of Artificial Sequence: Synthetic oligonucleotide
  Antisense strand to SEQ ID NO: 1229804
cucaagaacaucaaucuua

SEQ ID NO: 1229806 - RNA, 19 nt, Artificial Sequence
  Description of Artificial Sequence: Synthetic oligonucleotide
  Sense strand starting at position 3110 of SEQ ID NO: 917367
ugccaucaggaauguaauu

SEQ ID NO: 1229807 - RNA, 19 nt, Artificial Sequence
  Description of Artificial Sequence: Synthetic oligonucleotide
  Antisense strand to SEQ ID NO: 1229806
aauuacauuccugauggca

SEQ ID NO: 1229808 - RNA, 19 nt, Artificial Sequence
  Description of Artificial Sequence: Synthetic oligonucleotide
  Sense strand starting at position 3123 of SEQ ID NO: 917367
guaauugugcuacaaacag

SEQ ID NO: 1229809 - RNA, 19 nt, Artificial Sequence
  Description of Artificial Sequence: Synthetic oligonucleotide
  Antisense strand to SEQ ID NO: 1229808
cuguuuguagcacaauuac

SEQ ID NO: 1229810 - RNA, 19 nt, Artificial Sequence
  Description of Artificial Sequence: Synthetic oligonucleotide
  Sense strand starting at position 3180 of SEQ ID NO: 917367
aaacgcauccgagauguga

SEQ ID NO: 1229811 - RNA, 19 nt, Artificial Sequence
  Description of Artificial Sequence: Synthetic oligonucleotide
  Antisense strand to SEQ ID NO: 1229810
ucacaucucggaugcguuu

SEQ ID NO: 1229812 - RNA, 19 nt, Artificial Sequence
  Description of Artificial Sequence: Synthetic oligonucleotide
  Sense strand starting at position 3252 of SEQ ID NO: 917367
gaggaauauuacguuaaau

SEQ ID NO: 1229813 - RNA, 19 nt, Artificial Sequence
  Description of Artificial Sequence: Synthetic oligonucleotide
  Antisense strand to SEQ ID NO: 1229812
auuuaacguaauauuccuc

SEQ ID NO: 1229814 - RNA, 19 nt, Artificial Sequence
  Description of Artificial Sequence: Synthetic oligonucleotide
  Sense strand starting at position 3306 of SEQ ID NO: 917367
ggguuccugugaguaauuu

SEQ ID NO: 1229815 - RNA, 19 nt, Artificial Sequence
  Description of Artificial Sequence: Synthetic oligonucleotide
  Antisense strand to SEQ ID NO: 1229814
aaauuacucacaggaaccc

SEQ ID NO: 1229816 - RNA, 19 nt, Artificial Sequence
  Description of Artificial Sequence: Synthetic oligonucleotide
  Sense strand starting at position 3315 of SEQ ID NO: 917367
ugaguaauuuaugacauug

SEQ ID NO: 1229817 - RNA, 19 nt, Artificial Sequence
  Description of Artificial Sequence: Synthetic oligonucleotide
  Antisense strand to SEQ ID NO: 1229816
caaugucauaaauuacuca

SEQ ID NO: 1229818 - RNA, 19 nt, Artificial Sequence
  Description of Artificial Sequence: Synthetic oligonucleotide
  Sense strand starting at position 3337 of SEQ ID NO: 917367
gaagauaagugauagauuu

SEQ ID NO: 1229819 - RNA, 19 nt, Artificial Sequence
  Description of Artificial Sequence: Synthetic oligonucleotide
  Antisense strand to SEQ ID NO: 1229818
aaaucuaucacuuaucuuc

SEQ ID NO: 1229820 - RNA, 19 nt, Artificial Sequence
  Description of Artificial Sequence: Synthetic oligonucleotide
  Sense strand starting at position 3376 of SEQ ID NO: 917367
cauggcugugcagaagaua

SEQ ID NO: 1229821 - RNA, 19 nt, Artificial Sequence
  Description of Artificial Sequence: Synthetic oligonucleotide
  Antisense strand to SEQ ID NO: 1229820
uaucuucugcacagccaug

SEQ ID NO: 1229822 - RNA, 19 nt, Artificial Sequence
  Description of Artificial Sequence: Synthetic oligonucleotide
  Sense strand starting at position 3401 of SEQ ID NO: 917367
aguggaucucucuaagguc

SEQ ID NO: 1229823 - RNA, 19 nt, Artificial Sequence
  Description of Artificial Sequence: Synthetic oligonucleotide
  Antisense strand to SEQ ID NO: 1229822
gaccuuagagagauccacu

SEQ ID NO: 1229824 - RNA, 19 nt, Artificial Sequence
  Description of Artificial Sequence: Synthetic oligonucleotide
  Sense strand starting at position 3458 of SEQ ID NO: 917367
ugcugacuccuagacuaca

SEQ ID NO: 1229825 - RNA, 19 nt, Artificial Sequence
  Description of Artificial Sequence: Synthetic oligonucleotide
  Antisense strand to SEQ ID NO: 1229824
uguagucuaggagucagca

SEQ ID NO: 1229826 - RNA, 19 nt, Artificial Sequence
  Description of Artificial Sequence: Synthetic oligonucleotide
  Sense strand starting at position 3613 of SEQ ID NO: 917367
aauauaugaguuugugaag

SEQ ID NO: 1229827 - RNA, 19 nt, Artificial Sequence
  Description of Artificial Sequence: Synthetic oligonucleotide
  Antisense strand to SEQ ID NO: 1229826
cuucacaaacucauauauu

SEQ ID NO: 1229828 - RNA, 19 nt, Artificial Sequence
  Description of Artificial Sequence: Synthetic oligonucleotide
  Sense strand starting at position 3614 of SEQ ID NO: 917367
auauaugaguuugugaagu

SEQ ID NO: 1229829 - RNA, 19 nt, Artificial Sequence
  Description of Artificial Sequence: Synthetic oligonucleotide
  Antisense strand to SEQ ID NO: 1229828
acuucacaaacucauauau

SEQ ID NO: 1229830 - RNA, 19 nt, Artificial Sequence
  Description of Artificial Sequence: Synthetic oligonucleotide
  Sense strand starting at position 3701 of SEQ ID NO: 917367
agcugauuacauugagcaa

SEQ ID NO: 1229831 - RNA, 19 nt, Artificial Sequence
  Description of Artificial Sequence: Synthetic oligonucleotide
  Antisense strand to SEQ ID NO: 1229830
uugcucaauguaaucagcu

SEQ ID NO: 1229832 - RNA, 19 nt, Artificial Sequence
  Description of Artificial Sequence: Synthetic oligonucleotide
  Sense strand starting at position 3702 of SEQ ID NO: 917367
gcugauuacauugagcaag

SEQ ID NO: 1229833 - RNA, 19 nt, Artificial Sequence
  Description of Artificial Sequence: Synthetic oligonucleotide
  Antisense strand to SEQ ID NO: 1229832
cuugcucaauguaaucagc

SEQ ID NO: 1229834 - RNA, 19 nt, Artificial Sequence
  Description of Artificial Sequence: Synthetic oligonucleotide
  Sense strand starting at position 3704 of SEQ ID NO: 917368
ugauuacauugagcaagau

SEQ ID NO: 1229835 - RNA, 19 nt, Artificial Sequence
  Description of Artificial Sequence: Synthetic oligonucleotide
  Antisense strand to SEQ ID NO: 1229834
aucuugcucaauguaauca

SEQ ID NO: 1229836 - RNA, 19 nt, Artificial Sequence
  Description of Artificial Sequence: Synthetic oligonucleotide
  Sense strand starting at position 223 of SEQ ID NO: 917368
agaaaucccgauugcucua

SEQ ID NO: 1229837 - RNA, 19 nt, Artificial Sequence
  Description of Artificial Sequence: Synthetic oligonucleotide
  Antisense strand to SEQ ID NO: 1229836
uagagcaaucgggauuucu

SEQ ID NO: 1229838 - RNA, 19 nt, Artificial Sequence
  Description of Artificial Sequence: Synthetic oligonucleotide
  Sense strand starting at position 226 of SEQ ID NO: 917368
aaucccgauugcucuagua

SEQ ID NO: 1229839 - RNA, 19 nt, Artificial Sequence
  Description of Artificial Sequence: Synthetic oligonucleotide
  Antisense strand to SEQ ID NO: 1229838
uacuagagcaaucgggauu

SEQ ID NO: 1229840 - RNA, 19 nt, Artificial Sequence
  Description of Artificial Sequence: Synthetic oligonucleotide
  Sense strand starting at position 228 of SEQ ID NO: 917368
ucccgauugcucuaguaua

SEQ ID NO: 1229841 - RNA, 19 nt, Artificial Sequence
  Description of Artificial Sequence: Synthetic oligonucleotide
  Antisense strand to SEQ ID NO: 1229840
uauacuagagcaaucggga

SEQ ID NO: 1229842 - RNA, 19 nt, Artificial Sequence
  Description of Artificial Sequence: Synthetic oligonucleotide
  Sense strand starting at position 404 of SEQ ID NO: 917368
gaaggugagccguaguuac

SEQ ID NO: 1229843 - RNA, 19 nt, Artificial Sequence
  Description of Artificial Sequence: Synthetic oligonucleotide
  Antisense strand to SEQ ID NO: 1229842
guaacuacggcucaccuuc

SEQ ID NO: 1229844 - RNA, 19 nt, Artificial Sequence
  Description of Artificial Sequence: Synthetic oligonucleotide
  Sense strand starting at position 1287 of SEQ ID NO: 917368
acuguagucggucaacaca

SEQ ID NO: 1229845 - RNA, 19 nt, Artificial Sequence
  Description of Artificial Sequence: Synthetic oligonucleotide
  Antisense strand to SEQ ID NO: 1229844
uguguugaccgacuacagu

SEQ ID NO: 1229846 - RNA, 19 nt, Artificial Sequence
  Description of Artificial Sequence: Synthetic oligonucleotide
  Sense strand starting at position 1332 of SEQ ID NO: 917368
cgagaugagucaccacaga

SEQ ID NO: 1229847 - RNA, 19 nt, Artificial Sequence
  Description of Artificial Sequence: Synthetic oligonucleotide
  Antisense strand to SEQ ID NO: 1229846
ucuguggugacucaucucg

SEQ ID NO: 1229848 - RNA, 19 nt, Artificial Sequence
  Description of Artificial Sequence: Synthetic oligonucleotide
  Sense strand starting at position 1358 of SEQ ID NO: 917368
gguugaaggcgguauuugu

SEQ ID NO: 1229849 - RNA, 19 nt, Artificial Sequence
  Description of Artificial Sequence: Synthetic oligonucleotide
  Antisense strand to SEQ ID NO: 1229848
acaaauaccgccuucaacc

SEQ ID NO: 1229850 - RNA, 19 nt, Artificial Sequence
  Description of Artificial Sequence: Synthetic oligonucleotide
  Sense strand starting at position 1448 of SEQ ID NO: 917368
ggagugagaguuugggaga

SEQ ID NO: 1229851 - RNA, 19 nt, Artificial Sequence
  Description of Artificial Sequence: Synthetic oligonucleotide
  Antisense strand to SEQ ID NO: 1229850
ucucccaaacucucacucc

SEQ ID NO: 1229852 - RNA, 19 nt, Artificial Sequence
  Description of Artificial Sequence: Synthetic oligonucleotide
  Sense strand starting at position 2182 of SEQ ID NO: 917368
aagugaagucuuggccgga

SEQ ID NO: 1229853 - RNA, 19 nt, Artificial Sequence
  Description of Artificial Sequence: Synthetic oligonucleotide
  Antisense strand to SEQ ID NO: 1229852
uccggccaagacuucacuu

SEQ ID NO: 1229854 - RNA, 19 nt, Artificial Sequence
  Description of Artificial Sequence: Synthetic oligonucleotide
  Sense strand starting at position 2184 of SEQ ID NO: 917368
gugaagucuuggccggagu

SEQ ID NO: 1229855 - RNA, 19 nt, Artificial Sequence
  Description of Artificial Sequence: Synthetic oligonucleotide
  Antisense strand to SEQ ID NO: 1229854
acuccggccaagacuucac

SEQ ID NO: 1229856 - RNA, 19 nt, Artificial Sequence
  Description of Artificial Sequence: Synthetic oligonucleotide
  Sense strand starting at position 2185 of SEQ ID NO: 917368
ugaagucuuggccggaguu

SEQ ID NO: 1229857 - RNA, 19 nt, Artificial Sequence
  Description of Artificial Sequence: Synthetic oligonucleotide
  Antisense strand to SEQ ID NO: 1229856
aacuccggccaagacuuca

SEQ ID NO: 1229858 - RNA, 19 nt, Artificial Sequence
  Description of Artificial Sequence: Synthetic oligonucleotide
  Sense strand starting at position 2186 of SEQ ID NO: 917368
gaagucuuggccggaguuu

SEQ ID NO: 1229859 - RNA, 19 nt, Artificial Sequence
  Description of Artificial Sequence: Synthetic oligonucleotide
  Antisense strand to SEQ ID NO: 1229858
aaacuccggccaagacuuc

SEQ ID NO: 1229860 - RNA, 19 nt, Artificial Sequence
  Description of Artificial Sequence: Synthetic oligonucleotide
  Sense strand starting at position 2358 of SEQ ID NO: 917368
cgcgcuuucccagugagua

SEQ ID NO: 1229861 - RNA, 19 nt, Artificial Sequence
  Description of Artificial Sequence: Synthetic oligonucleotide
  Antisense strand to SEQ ID NO: 1229860
uacucacugggaaagcgcg

SEQ ID NO: 1229862 - RNA, 19 nt, Artificial Sequence
  Description of Artificial Sequence: Synthetic oligonucleotide
  Sense strand starting at position 2360 of SEQ ID NO: 917368
cgcuuucccagugaguaac

SEQ ID NO: 1229863 - RNA, 19 nt, Artificial Sequence
  Description of Artificial Sequence: Synthetic oligonucleotide
  Antisense strand to SEQ ID NO: 1229862
guuacucacugggaaagcg

SEQ ID NO: 1229864 - RNA, 19 nt, Artificial Sequence
  Description of Artificial Sequence: Synthetic oligonucleotide
  Sense strand starting at position 2733 of SEQ ID NO: 917368
guuuaaauuuccucugugu

SEQ ID NO: 1229865 - RNA, 19 nt, Artificial Sequence
  Description of Artificial Sequence: Synthetic oligonucleotide
  Antisense strand to SEQ ID NO: 1229864
acacagaggaaauuuaaac

SEQ ID NO: 1229866 - RNA, 19 nt, Artificial Sequence
  Description of Artificial Sequence: Synthetic oligonucleotide
  Sense strand starting at position 2735 of SEQ ID NO: 917368
uuaaauuuccucugugugu

SEQ ID NO: 1229867 - RNA, 19 nt, Artificial Sequence
  Description of Artificial Sequence: Synthetic oligonucleotide
  Antisense strand to SEQ ID NO: 1229866
acacacagaggaaauuuaa

SEQ ID NO: 1229868 - RNA, 19 nt, Artificial Sequence
  Description of Artificial Sequence: Synthetic oligonucleotide
  Sense strand starting at position 2757 of SEQ ID NO: 917368
uggugucggcaaugagagu

SEQ ID NO: 1229869 - RNA, 19 nt, Artificial Sequence
  Description of Artificial Sequence: Synthetic oligonucleotide
  Antisense strand to SEQ ID NO: 1229868
acucucauugccgacacca

SEQ ID NO: 1229870 - RNA, 19 nt, Artificial Sequence
  Description of Artificial Sequence: Synthetic oligonucleotide
  Sense strand starting at position 2852 of SEQ ID NO: 917368
gccugugaauucucaccuu

SEQ ID NO: 1229871 - RNA, 19 nt, Artificial Sequence
  Description of Artificial Sequence: Synthetic oligonucleotide
  Antisense strand to SEQ ID NO: 1229870
aaggugagaauucacaggc

SEQ ID NO: 1229872 - RNA, 19 nt, Artificial Sequence
  Description of Artificial Sequence: Synthetic oligonucleotide
  Sense strand starting at position 2935 of SEQ ID NO: 917368
gaaucuugauuuggaagca

SEQ ID NO: 1229873 - RNA, 19 nt, Artificial Sequence
  Description of Artificial Sequence: Synthetic oligonucleotide
  Antisense strand to SEQ ID NO: 1229872
ugcuuccaaaucaagauuc

SEQ ID NO: 1229874 - RNA, 19 nt, Artificial Sequence
  Description of Artificial Sequence: Synthetic oligonucleotide
  Sense strand starting at position 2976 of SEQ ID NO: 917368
ggaaauacaucacucgcuu

SEQ ID NO: 1229875 - RNA, 19 nt, Artificial Sequence
  Description of Artificial Sequence: Synthetic oligonucleotide
  Antisense strand to SEQ ID NO: 1229874
aagcgagugauguauuucc

SEQ ID NO: 1229876 - RNA, 19 nt, Artificial Sequence
  Description of Artificial Sequence: Synthetic oligonucleotide
  Sense strand starting at position 3072 of SEQ ID NO: 917368
aguuuaugaauccagacgu

SEQ ID NO: 1229877 - RNA, 19 nt, Artificial Sequence
  Description of Artificial Sequence: Synthetic oligonucleotide
  Antisense strand to SEQ ID NO: 1229876
acgucuggauucauaaacu

SEQ ID NO: 1229878 - RNA, 19 nt, Artificial Sequence
  Description of Artificial Sequence: Synthetic oligonucleotide
  Sense strand starting at position 3091 of SEQ ID NO: 917368
ucguuuguaccaggagcua

SEQ ID NO: 1229879 - RNA, 19 nt, Artificial Sequence
  Description of Artificial Sequence: Synthetic oligonucleotide
  Antisense strand to SEQ ID NO: 1229878
uagcuccugguacaaacga

SEQ ID NO: 1229880 - RNA, 19 nt, Artificial Sequence
  Description of Artificial Sequence: Synthetic oligonucleotide
  Sense strand starting at position 3127 of SEQ ID NO: 917368
ggcuuugcuguguauauua

SEQ ID NO: 1229881 - RNA, 19 nt, Artificial Sequence
  Description of Artificial Sequence: Synthetic oligonucleotide
  Antisense strand to SEQ ID NO: 1229880
uaauauacacagcaaagcc

SEQ ID NO: 1229882 - RNA, 19 nt, Artificial Sequence
  Description of Artificial Sequence: Synthetic oligonucleotide
  Sense strand starting at position 3215 of SEQ ID NO: 917368
acuugugagcuccagcuua

SEQ ID NO: 1229883 - RNA, 19 nt, Artificial Sequence
  Description of Artificial Sequence: Synthetic oligonucleotide
  Antisense strand to SEQ ID NO: 1229882
uaagcuggagcucacaagu

SEQ ID NO: 1229884 - RNA, 19 nt, Artificial Sequence
  Description of Artificial Sequence: Synthetic oligonucleotide
  Sense strand starting at position 3257 of SEQ ID NO: 917368
acauucuugcggcaauagu

SEQ ID NO: 1229885 - RNA, 19 nt, Artificial Sequence
  Description of Artificial Sequence: Synthetic oligonucleotide
  Antisense strand to SEQ ID NO: 1229884
acuauugccgcaagaaugu

SEQ ID NO: 1229886 - RNA, 19 nt, Artificial Sequence
  Description of Artificial Sequence: Synthetic oligonucleotide
  Sense strand starting at position 3355 of SEQ ID NO: 917368
guuggaucucaguagauca

SEQ ID NO: 1229887 - RNA, 19 nt, Artificial Sequence
  Description of Artificial Sequence: Synthetic oligonucleotide
  Antisense strand to SEQ ID NO: 1229886
ugaucuacugagauccaac

SEQ ID NO: 1229888 - RNA, 19 nt, Artificial Sequence
  Description of Artificial Sequence: Synthetic oligonucleotide
  Sense strand starting at position 3482 of SEQ ID NO: 917368
aagcuuuguugagccauga

SEQ ID NO: 1229889 - RNA, 19 nt, Artificial Sequence
  Description of Artificial Sequence: Synthetic oligonucleotide
  Antisense strand to SEQ ID NO: 1229888
ucauggcucaacaaagcuu

SEQ ID NO: 1229890 - RNA, 19 nt, Artificial Sequence
  Description of Artificial Sequence: Synthetic oligonucleotide
  Sense strand starting at position 3486 of SEQ ID NO: 917368
uuuguugagccaugaauaa

SEQ ID NO: 1229891 - RNA, 19 nt, Artificial Sequence
  Description of Artificial Sequence: Synthetic oligonucleotide
  Antisense strand to SEQ ID NO: 1229890
uuauucauggcucaacaaa

SEQ ID NO: 1229892 - RNA, 19 nt, Artificial Sequence
  Description of Artificial Sequence: Synthetic oligonucleotide
  Sense strand starting at position 3527 of SEQ ID NO: 917368
guccgagucccacauguga

SEQ ID NO: 1229893 - RNA, 19 nt, Artificial Sequence
  Description of Artificial Sequence: Synthetic oligonucleotide
  Antisense strand to SEQ ID NO: 1229892
ucacaugugggacucggac

SEQ ID NO: 1229894 - RNA, 19 nt, Artificial Sequence
  Description of Artificial Sequence: Synthetic oligonucleotide
  Sense strand starting at position 3529 of SEQ ID NO: 917368
ccgagucccacaugugagu

SEQ ID NO: 1229895 - RNA, 19 nt, Artificial Sequence
  Description of Artificial Sequence: Synthetic oligonucleotide
  Antisense strand to SEQ ID NO: 1229894
acucacaugugggacucgg

SEQ ID NO: 1229896 - RNA, 19 nt, Artificial Sequence
  Description of Artificial Sequence: Synthetic oligonucleotide
  Sense strand starting at position 3610 of SEQ ID NO: 917368
ggcccacuuguguguuaca

SEQ ID NO: 1229897 - RNA, 19 nt, Artificial Sequence
  Description of Artificial Sequence: Synthetic oligonucleotide
  Antisense strand to SEQ ID NO: 1229896
uguaacacacaagugggcc

SEQ ID NO: 1229898 - RNA, 19 nt, Artificial Sequence
  Description of Artificial Sequence: Synthetic oligonucleotide
  Sense strand starting at position 3620 of SEQ ID NO: 917368
uguguuacauucuccauau

SEQ ID NO: 1229899 - RNA, 19 nt, Artificial Sequence
  Description of Artificial Sequence: Synthetic oligonucleotide
  Antisense strand to SEQ ID NO: 1229898
auauggagaauguaacaca

SEQ ID NO: 1229900 - RNA, 19 nt, Artificial Sequence
  Description of Artificial Sequence: Synthetic oligonucleotide
  Sense strand starting at position 3621 of SEQ ID NO: 917368
guguuacauucuccauaua

SEQ ID NO: 1229901 - RNA, 19 nt, Artificial Sequence
  Description of Artificial Sequence: Synthetic oligonucleotide
  Antisense strand to SEQ ID NO: 1229900
uauauggagaauguaacac

SEQ ID NO: 1229902 - RNA, 19 nt, Artificial Sequence
  Description of Artificial Sequence: Synthetic oligonucleotide
  Sense strand starting at position 3786 of SEQ ID NO: 917368
acuaguuacccugaaguaa

SEQ ID NO: 1229903 - RNA, 19 nt, Artificial Sequence
  Description of Artificial Sequence: Synthetic oligonucleotide
  Antisense strand to SEQ ID NO: 1229902
uuacuucaggguaacuagu

SEQ ID NO: 1229904 - RNA, 19 nt, Artificial Sequence
  Description of Artificial Sequence: Synthetic oligonucleotide
  Sense strand starting at position 3836 of SEQ ID NO: 917368
ccuguaagaauagguguua

SEQ ID NO: 1229905 - RNA, 19 nt, Artificial Sequence
  Description of Artificial Sequence: Synthetic oligonucleotide
  Antisense strand to SEQ ID NO: 1229904
uaacaccuauucuuacagg

SEQ ID NO: 1229906 - RNA, 19 nt, Artificial Sequence
  Description of Artificial Sequence: Synthetic oligonucleotide
  Sense strand starting at position 3848 of SEQ ID NO: 917368
gguguuacguaggcacuua

SEQ ID NO: 1229907 - RNA, 19 nt, Artificial Sequence
  Description of Artificial Sequence: Synthetic oligonucleotide
  Antisense strand to SEQ ID NO: 1229906
uaagugccuacguaacacc

SEQ ID NO: 1229908 - RNA, 19 nt, Artificial Sequence
  Description of Artificial Sequence: Synthetic oligonucleotide
  Sense strand starting at position 3868 of SEQ ID NO: 917368
ucuucagauugguuuggga

SEQ ID NO: 1229909 - RNA, 19 nt, Artificial Sequence
  Description of Artificial Sequence: Synthetic oligonucleotide
  Antisense strand to SEQ ID NO: 1229908
ucccaaaccaaucugaaga

SEQ ID NO: 1229910 - RNA, 19 nt, Artificial Sequence
  Description of Artificial Sequence: Synthetic oligonucleotide
  Sense strand starting at position 3870 of SEQ ID NO: 917368
uucagauugguuugggauu

SEQ ID NO: 1229911 - RNA, 19 nt, Artificial Sequence
  Description of Artificial Sequence: Synthetic oligonucleotide
  Antisense strand to SEQ ID NO: 1229910
aaucccaaaccaaucugaa

SEQ ID NO: 1229912 - RNA, 19 nt, Artificial Sequence
  Description of Artificial Sequence: Synthetic oligonucleotide
  Sense strand starting at position 3871 of SEQ ID NO: 917368
ucagauugguuugggauuu

SEQ ID NO: 1229913 - RNA, 19 nt, Artificial Sequence
  Description of Artificial Sequence: Synthetic oligonucleotide
  Antisense strand to SEQ ID NO: 1229912
aaaucccaaaccaaucuga

SEQ ID NO: 1229914 - RNA, 19 nt, Artificial Sequence
  Description of Artificial Sequence: Synthetic oligonucleotide
  Sense strand starting at position 3955 of SEQ ID NO: 917369
uauuacgagcuuugcauau

SEQ ID NO: 1229915 - RNA, 19 nt, Artificial Sequence
  Description of Artificial Sequence: Synthetic oligonucleotide
  Antisense strand to SEQ ID NO: 1229914
auaugcaaagcucguaaua

SEQ ID NO: 1229916 - RNA, 19 nt, Artificial Sequence
  Description of Artificial Sequence: Synthetic oligonucleotide
  Sense strand starting at position 206 of SEQ ID NO: 917369
ugaucacaguucuugucua

SEQ ID NO: 1229917 - RNA, 19 nt, Artificial Sequence
  Description of Artificial Sequence: Synthetic oligonucleotide
  Antisense strand to SEQ ID NO: 1229916
uagacaagaacugugauca

SEQ ID NO: 1229918 - RNA, 19 nt, Artificial Sequence
  Description of Artificial Sequence: Synthetic oligonucleotide
  Sense strand starting at position 219 of SEQ ID NO: 917369
ugucuaggccucugauauu

SEQ ID NO: 1229919 - RNA, 19 nt, Artificial Sequence
  Description of Artificial Sequence: Synthetic oligonucleotide
  Antisense strand to SEQ ID NO: 1229918
aauaucagaggccuagaca

SEQ ID NO: 1229920 - RNA, 19 nt, Artificial Sequence
  Description of Artificial Sequence: Synthetic oligonucleotide
  Sense strand starting at position 228 of SEQ ID NO: 917369
cucugauauucucaguuuc

SEQ ID NO: 1229921 - RNA, 19 nt, Artificial Sequence
  Description of Artificial Sequence: Synthetic oligonucleotide
  Antisense strand to SEQ ID NO: 1229920
gaaacugagaauaucagag

SEQ ID NO: 1229922 - RNA, 19 nt, Artificial Sequence
  Description of Artificial Sequence: Synthetic oligonucleotide
  Sense strand starting at position 230 of SEQ ID NO: 917369
cugauauucucaguuuccu

SEQ ID NO: 1229923 - RNA, 19 nt, Artificial Sequence
  Description of Artificial Sequence: Synthetic oligonucleotide
  Antisense strand to SEQ ID NO: 1229922
aggaaacugagaauaucag

SEQ ID NO: 1229924 - RNA, 19 nt, Artificial Sequence
  Description of Artificial Sequence: Synthetic oligonucleotide
  Sense strand starting at position 293 of SEQ ID NO: 917369
accauuugguugcauggaa

SEQ ID NO: 1229925 - RNA, 19 nt, Artificial Sequence
  Description of Artificial Sequence: Synthetic oligonucleotide
  Antisense strand to SEQ ID NO: 1229924
uuccaugcaaccaaauggu

SEQ ID NO: 1229926 - RNA, 19 nt, Artificial Sequence
  Description of Artificial Sequence: Synthetic oligonucleotide
  Sense strand starting at position 929 of SEQ ID NO: 917369
augagaucauacugaauau

SEQ ID NO: 1229927 - RNA, 19 nt, Artificial Sequence
  Description of Artificial Sequence: Synthetic oligonucleotide
  Antisense strand to SEQ ID NO: 1229926
auauucaguaugaucucau

SEQ ID NO: 1229928 - RNA, 19 nt, Artificial Sequence
  Description of Artificial Sequence: Synthetic oligonucleotide
  Sense strand starting at position 1181 of SEQ ID NO: 917369
uugguagagucacaagcaa

SEQ ID NO: 1229929 - RNA, 19 nt, Artificial Sequence
  Description of Artificial Sequence: Synthetic oligonucleotide
  Antisense strand to SEQ ID NO: 1229928
uugcuugugacucuaccaa

SEQ ID NO: 1229930 - RNA, 19 nt, Artificial Sequence
  Description of Artificial Sequence: Synthetic oligonucleotide
  Sense strand starting at position 1215 of SEQ ID NO: 917369
uaggacugguccugcuaga

SEQ ID NO: 1229931 - RNA, 19 nt, Artificial Sequence
  Description of Artificial Sequence: Synthetic oligonucleotide
  Antisense strand to SEQ ID NO: 1229930
ucuagcaggaccaguccua

SEQ ID NO: 1229932 - RNA, 19 nt, Artificial Sequence
  Description of Artificial Sequence: Synthetic oligonucleotide
  Sense strand starting at position 1259 of SEQ ID NO: 917369
agaaaucccgauugcucua

SEQ ID NO: 1229933 - RNA, 19 nt, Artificial Sequence
  Description of Artificial Sequence: Synthetic oligonucleotide
  Antisense strand to SEQ ID NO: 1229932
uagagcaaucgggauuucu

SEQ ID NO: 1229934 - RNA, 19 nt, Artificial Sequence
  Description of Artificial Sequence: Synthetic oligonucleotide
  Sense strand starting at position 1262 of SEQ ID NO: 917369
aaucccgauugcucuagua

SEQ ID NO: 1229935 - RNA, 19 nt, Artificial Sequence
  Description of Artificial Sequence: Synthetic oligonucleotide
  Antisense strand to SEQ ID NO: 1229934
uacuagagcaaucgggauu

SEQ ID NO: 1229936 - RNA, 19 nt, Artificial Sequence
  Description of Artificial Sequence: Synthetic oligonucleotide
  Sense strand starting at position 1264 of SEQ ID NO: 917369
ucccgauugcucuaguaua

SEQ ID NO: 1229937 - RNA, 19 nt, Artificial Sequence
  Description of Artificial Sequence: Synthetic oligonucleotide
  Antisense strand to SEQ ID NO: 1229936
uauacuagagcaaucggga

SEQ ID NO: 1229938 - RNA, 19 nt, Artificial Sequence
  Description of Artificial Sequence: Synthetic oligonucleotide
  Sense strand starting at position 1440 of SEQ ID NO: 917369
gaaggugagccguaguuac

SEQ ID NO: 1229939 - RNA, 19 nt, Artificial Sequence
  Description of Artificial Sequence: Synthetic oligonucleotide
  Antisense strand to SEQ ID NO: 1229938
guaacuacggcucaccuuc

SEQ ID NO: 1229940 - RNA, 19 nt, Artificial Sequence
  Description of Artificial Sequence: Synthetic oligonucleotide
  Sense strand starting at position 1536 of SEQ ID NO: 917369
gugggcaguucggauacuu

SEQ ID NO: 1229941 - RNA, 19 nt, Artificial Sequence
  Description of Artificial Sequence: Synthetic oligonucleotide
  Antisense strand to SEQ ID NO: 1229940
aaguauccgaacugcccac

SEQ ID NO: 1229942 - RNA, 19 nt, Artificial Sequence
  Description of Artificial Sequence: Synthetic oligonucleotide
  Sense strand starting at position 2134 of SEQ ID NO: 917369
gcucaacucugguaccuuu

SEQ ID NO: 1229943 - RNA, 19 nt, Artificial Sequence
  Description of Artificial Sequence: Synthetic oligonucleotide
  Antisense strand to SEQ ID NO: 1229942
aaagguaccagaguugagc

SEQ ID NO: 1229944 - RNA, 19 nt, Artificial Sequence
  Description of Artificial Sequence: Synthetic oligonucleotide
  Sense strand starting at position 2323 of SEQ ID NO: 917369
acuguagucggucaacaca

SEQ ID NO: 1229945 - RNA, 19 nt, Artificial Sequence
  Description of Artificial Sequence: Synthetic oligonucleotide
  Antisense strand to SEQ ID NO: 1229944
uguguugaccgacuacagu

SEQ ID NO: 1229946 - RNA, 19 nt, Artificial Sequence
  Description of Artificial Sequence: Synthetic oligonucleotide
  Sense strand starting at position 2368 of SEQ ID NO: 917369
cgagaugagucaccacaga

SEQ ID NO: 1229947 - RNA, 19 nt, Artificial Sequence
  Description of Artificial Sequence: Synthetic oligonucleotide
  Antisense strand to SEQ ID NO: 1229946
ucuguggugacucaucucg

SEQ ID NO: 1229948 - RNA, 19 nt, Artificial Sequence
  Description of Artificial Sequence: Synthetic oligonucleotide
  Sense strand starting at position 2394 of SEQ ID NO: 917369
gguugaaggcgguauuugu

SEQ ID NO: 1229949 - RNA, 19 nt, Artificial Sequence
  Description of Artificial Sequence: Synthetic oligonucleotide
  Antisense strand to SEQ ID NO: 1229948
acaaauaccgccuucaacc

SEQ ID NO: 1229950 - RNA, 19 nt, Artificial Sequence
  Description of Artificial Sequence: Synthetic oligonucleotide
  Sense strand starting at position 2484 of SEQ ID NO: 917369
ggagugagaguuugggaga

SEQ ID NO: 1229951 - RNA, 19 nt, Artificial Sequence
  Description of Artificial Sequence: Synthetic oligonucleotide
  Antisense strand to SEQ ID NO: 1229950
ucucccaaacucucacucc

SEQ ID NO: 1229952 - RNA, 19 nt, Artificial Sequence
  Description of Artificial Sequence: Synthetic oligonucleotide
  Sense strand starting at position 2485 of SEQ ID NO: 917369
gagugagaguuugggagaa

SEQ ID NO: 1229953 - RNA, 19 nt, Artificial Sequence
  Description of Artificial Sequence: Synthetic oligonucleotide
  Antisense strand to SEQ ID NO: 1229952
uucucccaaacucucacuc

SEQ ID NO: 1229954 - RNA, 19 nt, Artificial Sequence
  Description of Artificial Sequence: Synthetic oligonucleotide
  Sense strand starting at position 2521 of SEQ ID NO: 917369
uccuuuccguccuaggauu

SEQ ID NO: 1229955 - RNA, 19 nt, Artificial Sequence
  Description of Artificial Sequence: Synthetic oligonucleotide
  Antisense strand to SEQ ID NO: 1229954
aauccuaggacggaaagga

SEQ ID NO: 1229956 - RNA, 19 nt, Artificial Sequence
  Description of Artificial Sequence: Synthetic oligonucleotide
  Sense strand starting at position 3218 of SEQ ID NO: 917369
aagugaagucuuggccgga

SEQ ID NO: 1229957 - RNA, 19 nt, Artificial Sequence
  Description of Artificial Sequence: Synthetic oligonucleotide
  Antisense strand to SEQ ID NO: 1229956
uccggccaagacuucacuu

SEQ ID NO: 1229958 - RNA, 19 nt, Artificial Sequence
  Description of Artificial Sequence: Synthetic oligonucleotide
  Sense strand starting at position 3220 of SEQ ID NO: 917369
gugaagucuuggccggagu

SEQ ID NO: 1229959 - RNA, 19 nt, Artificial Sequence
  Description of Artificial Sequence: Synthetic oligonucleotide
  Antisense strand to SEQ ID NO: 1229958
acuccggccaagacuucac

SEQ ID NO: 1229960 - RNA, 19 nt, Artificial Sequence
  Description of Artificial Sequence: Synthetic oligonucleotide
  Sense strand starting at position 3221 of SEQ ID NO: 917369
ugaagucuuggccggaguu

SEQ ID NO: 1229961 - RNA, 19 nt, Artificial Sequence
  Description of Artificial Sequence: Synthetic oligonucleotide
  Antisense strand to SEQ ID NO: 1229960
aacuccggccaagacuuca

SEQ ID NO: 1229962 - RNA, 19 nt, Artificial Sequence
  Description of Artificial Sequence: Synthetic oligonucleotide
  Sense strand starting at position 3222 of SEQ ID NO: 917369
gaagucuuggccggaguuu

SEQ ID NO: 1229963 - RNA, 19 nt, Artificial Sequence
  Description of Artificial Sequence: Synthetic oligonucleotide
  Antisense strand to SEQ ID NO: 1229962
aaacuccggccaagacuuc

SEQ ID NO: 1229964 - RNA, 19 nt, Artificial Sequence
  Description of Artificial Sequence: Synthetic oligonucleotide
  Sense strand starting at position 3394 of SEQ ID NO: 917369
cgcgcuuucccagugagua

SEQ ID NO: 1229965 - RNA, 19 nt, Artificial Sequence
  Description of Artificial Sequence: Synthetic oligonucleotide
  Antisense strand to SEQ ID NO: 1229964
uacucacugggaaagcgcg

SEQ ID NO: 1229966 - RNA, 19 nt, Artificial Sequence
  Description of Artificial Sequence: Synthetic oligonucleotide
  Sense strand starting at position 3395 of SEQ ID NO: 917369
gcgcuuucccagugaguaa

SEQ ID NO: 1229967 - RNA, 19 nt, Artificial Sequence
  Description of Artificial Sequence: Synthetic oligonucleotide
  Antisense strand to SEQ ID NO: 1229966
uuacucacugggaaagcgc

SEQ ID NO: 1229968 - RNA, 19 nt, Artificial Sequence
  Description of Artificial Sequence: Synthetic oligonucleotide
  Sense strand starting at position 3396 of SEQ ID NO: 917369
cgcuuucccagugaguaac

SEQ ID NO: 1229969 - RNA, 19 nt, Artificial Sequence
  Description of Artificial Sequence: Synthetic oligonucleotide
  Antisense strand to SEQ ID NO: 1229968
guuacucacugggaaagcg

SEQ ID NO: 1229970 - RNA, 19 nt, Artificial Sequence
  Description of Artificial Sequence: Synthetic oligonucleotide
  Sense strand starting at position 3727 of SEQ ID NO: 917369
ggcgucguuugcuucuuaa

SEQ ID NO: 1229971 - RNA, 19 nt, Artificial Sequence
  Description of Artificial Sequence: Synthetic oligonucleotide
  Antisense strand to SEQ ID NO: 1229970
uuaagaagcaaacgacgcc

SEQ ID NO: 1229972 - RNA, 19 nt, Artificial Sequence
  Description of Artificial Sequence: Synthetic oligonucleotide
  Sense strand starting at position 3731 of SEQ ID NO: 917369
ucguuugcuucuuaaggga

SEQ ID NO: 1229973 - RNA, 19 nt, Artificial Sequence
  Description of Artificial Sequence: Synthetic oligonucleotide
  Antisense strand to SEQ ID NO: 1229972
ucccuuaagaagcaaacga

SEQ ID NO: 1229974 - RNA, 19 nt, Artificial Sequence
  Description of Artificial Sequence: Synthetic oligonucleotide
  Sense strand starting at position 3769 of SEQ ID NO: 917369
guuuaaauuuccucugugu

SEQ ID NO: 1229975 - RNA, 19 nt, Artificial Sequence
  Description of Artificial Sequence: Synthetic oligonucleotide
  Antisense strand to SEQ ID NO: 1229974
acacagaggaaauuuaaac

SEQ ID NO: 1229976 - RNA, 19 nt, Artificial Sequence
  Description of Artificial Sequence: Synthetic oligonucleotide
  Sense strand starting at position 3771 of SEQ ID NO: 917369
uuaaauuuccucugugugu

SEQ ID NO: 1229977 - RNA, 19 nt, Artificial Sequence
  Description of Artificial Sequence: Synthetic oligonucleotide
  Antisense strand to SEQ ID NO: 1229976
acacacagaggaaauuuaa

SEQ ID NO: 1229978 - RNA, 19 nt, Artificial Sequence
  Description of Artificial Sequence: Synthetic oligonucleotide
  Sense strand starting at position 3789 of SEQ ID NO: 917369
uguguggugucggcaauga

SEQ ID NO: 1229979 - RNA, 19 nt, Artificial Sequence
  Description of Artificial Sequence: Synthetic oligonucleotide
  Antisense strand to SEQ ID NO: 1229978
ucauugccgacaccacaca

SEQ ID NO: 1229980 - RNA, 19 nt, Artificial Sequence
  Description of Artificial Sequence: Synthetic oligonucleotide
  Sense strand starting at position 3793 of SEQ ID NO: 917369
uggugucggcaaugagagu

SEQ ID NO: 1229981 - RNA, 19 nt, Artificial Sequence
  Description of Artificial Sequence: Synthetic oligonucleotide
  Antisense strand to SEQ ID NO: 1229980
acucucauugccgacacca

SEQ ID NO: 1229982 - RNA, 19 nt, Artificial Sequence
  Description of Artificial Sequence: Synthetic oligonucleotide
  Sense strand starting at position 3879 of SEQ ID NO: 917369
cagccuguugccugugaau

SEQ ID NO: 1229983 - RNA, 19 nt, Artificial Sequence
  Description of Artificial Sequence: Synthetic oligonucleotide
  Antisense strand to SEQ ID NO: 1229982
auucacaggcaacaggcug

SEQ ID NO: 1229984 - RNA, 19 nt, Artificial Sequence
  Description of Artificial Sequence: Synthetic oligonucleotide
  Sense strand starting at position 3881 of SEQ ID NO: 917369
gccuguugccugugaauuc

SEQ ID NO: 1229985 - RNA, 19 nt, Artificial Sequence
  Description of Artificial Sequence: Synthetic oligonucleotide
  Antisense strand to SEQ ID NO: 1229984
gaauucacaggcaacaggc

SEQ ID NO: 1229986 - RNA, 19 nt, Artificial Sequence
  Description of Artificial Sequence: Synthetic oligonucleotide
  Sense strand starting at position 3882 of SEQ ID NO: 917369
ccuguugccugugaauucu

SEQ ID NO: 1229987 - RNA, 19 nt, Artificial Sequence
  Description of Artificial Sequence: Synthetic oligonucleotide
  Antisense strand to SEQ ID NO: 1229986
agaauucacaggcaacagg

SEQ ID NO: 1229988 - RNA, 19 nt, Artificial Sequence
  Description of Artificial Sequence: Synthetic oligonucleotide
  Sense strand starting at position 3888 of SEQ ID NO: 917369
gccugugaauucucaccuu

SEQ ID NO: 1229989 - RNA, 19 nt, Artificial Sequence
  Description of Artificial Sequence: Synthetic oligonucleotide
  Antisense strand to SEQ ID NO: 1229988
aaggugagaauucacaggc

SEQ ID NO: 1229990 - RNA, 19 nt, Artificial Sequence
  Description of Artificial Sequence: Synthetic oligonucleotide
  Sense strand starting at position 3971 of SEQ ID NO: 917369
gaaucuugauuuggaagca

SEQ ID NO: 1229991 - RNA, 19 nt, Artificial Sequence
  Description of Artificial Sequence: Synthetic oligonucleotide
  Antisense strand to SEQ ID NO: 1229990
ugcuuccaaaucaagauuc

SEQ ID NO: 1229992 - RNA, 19 nt, Artificial Sequence
  Description of Artificial Sequence: Synthetic oligonucleotide
  Sense strand starting at position 3971 of SEQ ID NO: 917370
gaaucuugauuuggaagca

SEQ ID NO: 1229993 - RNA, 19 nt, Artificial Sequence
  Description of Artificial Sequence: Synthetic oligonucleotide
  Antisense strand to SEQ ID NO: 1229992
ugcuuccaaaucaagauuc

SEQ ID NO: 1229994 - RNA, 19 nt, Artificial Sequence
  Description of Artificial Sequence: Synthetic oligonucleotide
  Sense strand starting at position 117 of SEQ ID NO: 917370
uuuccaguucuguauauca

SEQ ID NO: 1229995 - RNA, 19 nt, Artificial Sequence
  Description of Artificial Sequence: Synthetic oligonucleotide
  Antisense strand to SEQ ID NO: 1229994
ugauauacagaacuggaaa

SEQ ID NO: 1229996 - RNA, 19 nt, Artificial Sequence
  Description of Artificial Sequence: Synthetic oligonucleotide
  Sense strand starting at position 119 of SEQ ID NO: 917370
uccaguucuguauaucaag

SEQ ID NO: 1229997 - RNA, 19 nt, Artificial Sequence
  Description of Artificial Sequence: Synthetic oligonucleotide
  Antisense strand to SEQ ID NO: 1229996
cuugauauacagaacugga

SEQ ID NO: 1229998 - RNA, 19 nt, Artificial Sequence
  Description of Artificial Sequence: Synthetic oligonucleotide
  Sense strand starting at position 319 of SEQ ID NO: 917370
guggacugucacuaaccua

SEQ ID NO: 1229999 - RNA, 19 nt, Artificial Sequence
  Description of Artificial Sequence: Synthetic oligonucleotide
  Antisense strand to SEQ ID NO: 1229998
uagguuagugacaguccac

SEQ ID NO: 1230000 - RNA, 19 nt, Artificial Sequence
  Description of Artificial Sequence: Synthetic oligonucleotide
  Sense strand starting at position 680 of SEQ ID NO: 917370
cuguauugguacucaaaua

SEQ ID NO: 1230001 - RNA, 19 nt, Artificial Sequence
  Description of Artificial Sequence: Synthetic oligonucleotide
  Antisense strand to SEQ ID NO: 1230000
uauuugaguaccaauacag

SEQ ID NO: 1230002 - RNA, 19 nt, Artificial Sequence
  Description of Artificial Sequence: Synthetic oligonucleotide
  Sense strand starting at position 738 of SEQ ID NO: 917370
aagucagaagauuguugaa

SEQ ID NO: 1230003 - RNA, 19 nt, Artificial Sequence
  Description of Artificial Sequence: Synthetic oligonucleotide
  Antisense strand to SEQ ID NO: 1230002
uucaacaaucuucugacuu

SEQ ID NO: 1230004 - RNA, 19 nt, Artificial Sequence
  Description of Artificial Sequence: Synthetic oligonucleotide
  Sense strand starting at position 771 of SEQ ID NO: 917370
ggaccuucagcagagaugu

SEQ ID NO: 1230005 - RNA, 19 nt, Artificial Sequence
  Description of Artificial Sequence: Synthetic oligonucleotide
  Antisense strand to SEQ ID NO: 1230004
acaucucugcugaaggucc

SEQ ID NO: 1230006 - RNA, 19 nt, Artificial Sequence
  Description of Artificial Sequence: Synthetic oligonucleotide
  Sense strand starting at position 849 of SEQ ID NO: 917370
ucuggacugcuuuauugua

SEQ ID NO: 1230007 - RNA, 19 nt, Artificial Sequence
  Description of Artificial Sequence: Synthetic oligonucleotide
  Antisense strand to SEQ ID NO: 1230006
uacaauaaagcaguccaga

SEQ ID NO: 1230008 - RNA, 19 nt, Artificial Sequence
  Description of Artificial Sequence: Synthetic oligonucleotide
  Sense strand starting at position 1061 of SEQ ID NO: 917370
uuagauaacgauuagcagu

SEQ ID NO: 1230009 - RNA, 19 nt, Artificial Sequence
  Description of Artificial Sequence: Synthetic oligonucleotide
  Antisense strand to SEQ ID NO: 1230008
acugcuaaucguuaucuaa

SEQ ID NO: 1230010 - RNA, 19 nt, Artificial Sequence
  Description of Artificial Sequence: Synthetic oligonucleotide
  Sense strand starting at position 1096 of SEQ ID NO: 917370
uuucuagauuuggauggau

SEQ ID NO: 1230011 - RNA, 19 nt, Artificial Sequence
  Description of Artificial Sequence: Synthetic oligonucleotide
  Antisense strand to SEQ ID NO: 1230010
auccauccaaaucuagaaa

SEQ ID NO: 1230012 - RNA, 19 nt, Artificial Sequence
  Description of Artificial Sequence: Synthetic oligonucleotide
  Sense strand starting at position 1260 of SEQ ID NO: 917370
gggaauagcaacugucuga

SEQ ID NO: 1230013 - RNA, 19 nt, Artificial Sequence
  Description of Artificial Sequence: Synthetic oligonucleotide
  Antisense strand to SEQ ID NO: 1230012
ucagacaguugcuauuccc

SEQ ID NO: 1230014 - RNA, 19 nt, Artificial Sequence
  Description of Artificial Sequence: Synthetic oligonucleotide
  Sense strand starting at position 1439 of SEQ ID NO: 917370
gagguuacccgucaaggaa

SEQ ID NO: 1230015 - RNA, 19 nt, Artificial Sequence
  Description of Artificial Sequence: Synthetic oligonucleotide
  Antisense strand to SEQ ID NO: 1230014
uuccuugacggguaaccuc

SEQ ID NO: 1230016 - RNA, 19 nt, Artificial Sequence
  Description of Artificial Sequence: Synthetic oligonucleotide
  Sense strand starting at position 1664 of SEQ ID NO: 917370
cgugacucgacagauuaug

SEQ ID NO: 1230017 - RNA, 19 nt, Artificial Sequence
  Description of Artificial Sequence: Synthetic oligonucleotide
  Antisense strand to SEQ ID NO: 1230016
cauaaucugucgagucacg

SEQ ID NO: 1230018 - RNA, 19 nt, Artificial Sequence
  Description of Artificial Sequence: Synthetic oligonucleotide
  Sense strand starting at position 2095 of SEQ ID NO: 917370
gacuccgguuuauuaauaa

SEQ ID NO: 1230019 - RNA, 19 nt, Artificial Sequence
  Description of Artificial Sequence: Synthetic oligonucleotide
  Antisense strand to SEQ ID NO: 1230018
uuauuaauaaaccggaguc

SEQ ID NO: 1230020 - RNA, 19 nt, Artificial Sequence
  Description of Artificial Sequence: Synthetic oligonucleotide
  Sense strand starting at position 2238 of SEQ ID NO: 917370
ugguuugagugauuugcuu

SEQ ID NO: 1230021 - RNA, 19 nt, Artificial Sequence
  Description of Artificial Sequence: Synthetic oligonucleotide
  Antisense strand to SEQ ID NO: 1230020
aagcaaaucacucaaacca

SEQ ID NO: 1230022 - RNA, 19 nt, Artificial Sequence
  Description of Artificial Sequence: Synthetic oligonucleotide
  Sense strand starting at position 2240 of SEQ ID NO: 917370
guuugagugauuugcuuga

SEQ ID NO: 1230023 - RNA, 19 nt, Artificial Sequence
  Description of Artificial Sequence: Synthetic oligonucleotide
  Antisense strand to SEQ ID NO: 1230022
ucaagcaaaucacucaaac

SEQ ID NO: 1230024 - RNA, 19 nt, Artificial Sequence
  Description of Artificial Sequence: Synthetic oligonucleotide
  Sense strand starting at position 2253 of SEQ ID NO: 917370
gcuugagaucguucggcua

SEQ ID NO: 1230025 - RNA, 19 nt, Artificial Sequence
  Description of Artificial Sequence: Synthetic oligonucleotide
  Antisense strand to SEQ ID NO: 1230024
uagccgaacgaucucaagc

SEQ ID NO: 1230026 - RNA, 19 nt, Artificial Sequence
  Description of Artificial Sequence: Synthetic oligonucleotide
  Sense strand starting at position 2348 of SEQ ID NO: 917370
cugugcugaggcuaggaau

SEQ ID NO: 1230027 - RNA, 19 nt, Artificial Sequence
  Description of Artificial Sequence: Synthetic oligonucleotide
  Antisense strand to SEQ ID NO: 1230026
auuccuagccucagcacag

SEQ ID NO: 1230028 - RNA, 19 nt, Artificial Sequence
  Description of Artificial Sequence: Synthetic oligonucleotide
  Sense strand starting at position 2442 of SEQ ID NO: 917370
ggacgauagugacuacaaa

SEQ ID NO: 1230029 - RNA, 19 nt, Artificial Sequence
  Description of Artificial Sequence: Synthetic oligonucleotide
  Antisense strand to SEQ ID NO: 1230028
uuuguagucacuaucgucc

SEQ ID NO: 1230030 - RNA, 19 nt, Artificial Sequence
  Description of Artificial Sequence: Synthetic oligonucleotide
  Sense strand starting at position 2463 of SEQ ID NO: 917370
aaguaaaugugaucaugac

SEQ ID NO: 1230031 - RNA, 19 nt, Artificial Sequence
  Description of Artificial Sequence: Synthetic oligonucleotide
  Antisense strand to SEQ ID NO: 1230030
gucaugaucacauuuacuu

SEQ ID NO: 1230032 - RNA, 19 nt, Artificial Sequence
  Description of Artificial Sequence: Synthetic oligonucleotide
  Sense strand starting at position 2469 of SEQ ID NO: 917370
augugaucaugaccgacau

SEQ ID NO: 1230033 - RNA, 19 nt, Artificial Sequence
  Description of Artificial Sequence: Synthetic oligonucleotide
  Antisense strand to SEQ ID NO: 1230032
augucggucaugaucacau

SEQ ID NO: 1230034 - RNA, 19 nt, Artificial Sequence
  Description of Artificial Sequence: Synthetic oligonucleotide
  Sense strand starting at position 2470 of SEQ ID NO: 917370
ugugaucaugaccgacaua

SEQ ID NO: 1230035 - RNA, 19 nt, Artificial Sequence
  Description of Artificial Sequence: Synthetic oligonucleotide
  Antisense strand to SEQ ID NO: 1230034
uaugucggucaugaucaca

SEQ ID NO: 1230036 - RNA, 19 nt, Artificial Sequence
  Description of Artificial Sequence: Synthetic oligonucleotide
  Sense strand starting at position 2471 of SEQ ID NO: 917370
gugaucaugaccgacauau

SEQ ID NO: 1230037 - RNA, 19 nt, Artificial Sequence
  Description of Artificial Sequence: Synthetic oligonucleotide
  Antisense strand to SEQ ID NO: 1230036
auaugucggucaugaucac

SEQ ID NO: 1230038 - RNA, 19 nt, Artificial Sequence
  Description of Artificial Sequence: Synthetic oligonucleotide
  Sense strand starting at position 2473 of SEQ ID NO: 917370
gaucaugaccgacauaugu

SEQ ID NO: 1230039 - RNA, 19 nt, Artificial Sequence
  Description of Artificial Sequence: Synthetic oligonucleotide
  Antisense strand to SEQ ID NO: 1230038
acauaugucggucaugauc

SEQ ID NO: 1230040 - RNA, 19 nt, Artificial Sequence
  Description of Artificial Sequence: Synthetic oligonucleotide
  Sense strand starting at position 2495 of SEQ ID NO: 917370
gcccuuugaauugcguuau

SEQ ID NO: 1230041 - RNA, 19 nt, Artificial Sequence
  Description of Artificial Sequence: Synthetic oligonucleotide
  Antisense strand to SEQ ID NO: 1230040
auaacgcaauucaaagggc

SEQ ID NO: 1230042 - RNA, 19 nt, Artificial Sequence
  Description of Artificial Sequence: Synthetic oligonucleotide
  Sense strand starting at position 2630 of SEQ ID NO: 917370
ggacauauuuaugagucua

SEQ ID NO: 1230043 - RNA, 19 nt, Artificial Sequence
  Description of Artificial Sequence: Synthetic oligonucleotide
  Antisense strand to SEQ ID NO: 1230042
uagacucauaaauaugucc

SEQ ID NO: 1230044 - RNA, 19 nt, Artificial Sequence
  Description of Artificial Sequence: Synthetic oligonucleotide
  Sense strand starting at position 2886 of SEQ ID NO: 917370
uggagaguacugugagaug

SEQ ID NO: 1230045 - RNA, 19 nt, Artificial Sequence
  Description of Artificial Sequence: Synthetic oligonucleotide
  Antisense strand to SEQ ID NO: 1230044
caucucacaguacucucca

SEQ ID NO: 1230046 - RNA, 19 nt, Artificial Sequence
  Description of Artificial Sequence: Synthetic oligonucleotide
  Sense strand starting at position 2891 of SEQ ID NO: 917370
aguacugugagaugagguu

SEQ ID NO: 1230047 - RNA, 19 nt, Artificial Sequence
  Description of Artificial Sequence: Synthetic oligonucleotide
  Antisense strand to SEQ ID NO: 1230046
aaccucaucucacaguacu

SEQ ID NO: 1230048 - RNA, 19 nt, Artificial Sequence
  Description of Artificial Sequence: Synthetic oligonucleotide
  Sense strand starting at position 2966 of SEQ ID NO: 917370
aaugauaggguuuagcuau

SEQ ID NO: 1230049 - RNA, 19 nt, Artificial Sequence
  Description of Artificial Sequence: Synthetic oligonucleotide
  Antisense strand to SEQ ID NO: 1230048
auagcuaaacccuaucauu

SEQ ID NO: 1230050 - RNA, 19 nt, Artificial Sequence
  Description of Artificial Sequence: Synthetic oligonucleotide
  Sense strand starting at position 3039 of SEQ ID NO: 917370
ggcugaguaaugggaacua

SEQ ID NO: 1230051 - RNA, 19 nt, Artificial Sequence
  Description of Artificial Sequence: Synthetic oligonucleotide
  Antisense strand to SEQ ID NO: 1230050
uaguucccauuacucagcc

SEQ ID NO: 1230052 - RNA, 19 nt, Artificial Sequence
  Description of Artificial Sequence: Synthetic oligonucleotide
  Sense strand starting at position 3101 of SEQ ID NO: 917370
cuuuguaggcaagauuaag

SEQ ID NO: 1230053 - RNA, 19 nt, Artificial Sequence
  Description of Artificial Sequence: Synthetic oligonucleotide
  Antisense strand to SEQ ID NO: 1230052
cuuaaucuugccuacaaag

SEQ ID NO: 1230054 - RNA, 19 nt, Artificial Sequence
  Description of Artificial Sequence: Synthetic oligonucleotide
  Sense strand starting at position 3168 of SEQ ID NO: 917370
augauaaggccauauaugu

SEQ ID NO: 1230055 - RNA, 19 nt, Artificial Sequence
  Description of Artificial Sequence: Synthetic oligonucleotide
  Antisense strand to SEQ ID NO: 1230054
acauauauggccuuaucau

SEQ ID NO: 1230056 - RNA, 19 nt, Artificial Sequence
  Description of Artificial Sequence: Synthetic oligonucleotide
  Sense strand starting at position 3207 of SEQ ID NO: 917370
gucauacaacuuugaaguu

SEQ ID NO: 1230057 - RNA, 19 nt, Artificial Sequence
  Description of Artificial Sequence: Synthetic oligonucleotide
  Antisense strand to SEQ ID NO: 1230056
aacuucaaaguuguaugac

SEQ ID NO: 1230058 - RNA, 19 nt, Artificial Sequence
  Description of Artificial Sequence: Synthetic oligonucleotide
  Sense strand starting at position 3217 of SEQ ID NO: 917370
uuugaaguuccagauguua

SEQ ID NO: 1230059 - RNA, 19 nt, Artificial Sequence
  Description of Artificial Sequence: Synthetic oligonucleotide
  Antisense strand to SEQ ID NO: 1230058
uaacaucuggaacuucaaa

SEQ ID NO: 1230060 - RNA, 19 nt, Artificial Sequence
  Description of Artificial Sequence: Synthetic oligonucleotide
  Sense strand starting at position 3219 of SEQ ID NO: 917370
ugaaguuccagauguuaug

SEQ ID NO: 1230061 - RNA, 19 nt, Artificial Sequence
  Description of Artificial Sequence: Synthetic oligonucleotide
  Antisense strand to SEQ ID NO: 1230060
cauaacaucuggaacuuca

SEQ ID NO: 1230062 - RNA, 19 nt, Artificial Sequence
  Description of Artificial Sequence: Synthetic oligonucleotide
  Sense strand starting at position 3233 of SEQ ID NO: 917370
uuauguguucugccaugcu

SEQ ID NO: 1230063 - RNA, 19 nt, Artificial Sequence
  Description of Artificial Sequence: Synthetic oligonucleotide
  Antisense strand to SEQ ID NO: 1230062
agcauggcagaacacauaa

SEQ ID NO: 1230064 - RNA, 19 nt, Artificial Sequence
  Description of Artificial Sequence: Synthetic oligonucleotide
  Sense strand starting at position 3482 of SEQ ID NO: 917370
agcaauucccuguaccuga

SEQ ID NO: 1230065 - RNA, 19 nt, Artificial Sequence
  Description of Artificial Sequence: Synthetic oligonucleotide
  Antisense strand to SEQ ID NO: 1230064
ucagguacagggaauugcu

SEQ ID NO: 1230066 - RNA, 19 nt, Artificial Sequence
  Description of Artificial Sequence: Synthetic oligonucleotide
  Sense strand starting at position 3495 of SEQ ID NO: 917370
accugagaugcuuauauau

SEQ ID NO: 1230067 - RNA, 19 nt, Artificial Sequence
  Description of Artificial Sequence: Synthetic oligonucleotide
  Antisense strand to SEQ ID NO: 1230066
auauauaagcaucucaggu

SEQ ID NO: 1230068 - RNA, 19 nt, Artificial Sequence
  Description of Artificial Sequence: Synthetic oligonucleotide
  Sense strand starting at position 3879 of SEQ ID NO: 917370
ugugauaaaugcuugauag

SEQ ID NO: 1230069 - RNA, 19 nt, Artificial Sequence
  Description of Artificial Sequence: Synthetic oligonucleotide
  Antisense strand to SEQ ID NO: 1230068
cuaucaagcauuuaucaca

SEQ ID NO: 1230070 - RNA, 19 nt, Artificial Sequence
  Description of Artificial Sequence: Synthetic oligonucleotide
  Sense strand starting at position 3880 of SEQ ID NO: 917370
gugauaaaugcuugauaga

SEQ ID NO: 1230071 - RNA, 19 nt, Artificial Sequence
  Description of Artificial Sequence: Synthetic oligonucleotide
  Antisense strand to SEQ ID NO: 1230070
ucuaucaagcauuuaucac

SEQ ID NO: 1230072 - RNA, 19 nt, Artificial Sequence
  Description of Artificial Sequence: Synthetic oligonucleotide
  Sense strand starting at position 3967 of SEQ ID NO: 917371
aggcaagagaucugugaaa

SEQ ID NO: 1230073 - RNA, 19 nt, Artificial Sequence
  Description of Artificial Sequence: Synthetic oligonucleotide
  Antisense strand to SEQ ID NO: 1230072
uuucacagaucucuugccu

SEQ ID NO: 1230074 - RNA, 19 nt, Artificial Sequence
  Description of Artificial Sequence: Synthetic oligonucleotide
  Sense strand starting at position 250 of SEQ ID NO: 917371
agaagaaugguguguacac

SEQ ID NO: 1230075 - RNA, 19 nt, Artificial Sequence
  Description of Artificial Sequence: Synthetic oligonucleotide
  Antisense strand to SEQ ID NO: 1230074
guguacacaccauucuucu

SEQ ID NO: 1230076 - RNA, 19 nt, Artificial Sequence
  Description of Artificial Sequence: Synthetic oligonucleotide
  Sense strand starting at position 375 of SEQ ID NO: 917371
cuuacaagugcugaaguau

SEQ ID NO: 1230077 - RNA, 19 nt, Artificial Sequence
  Description of Artificial Sequence: Synthetic oligonucleotide
  Antisense strand to SEQ ID NO: 1230076
auacuucagcacuuguaag

SEQ ID NO: 1230078 - RNA, 19 nt, Artificial Sequence
  Description of Artificial Sequence: Synthetic oligonucleotide
  Sense strand starting at position 494 of SEQ ID NO: 917371
guaucuaaagauugguuga

SEQ ID NO: 1230079 - RNA, 19 nt, Artificial Sequence
  Description of Artificial Sequence: Synthetic oligonucleotide
  Antisense strand to SEQ ID NO: 1230078
ucaaccaaucuuuagauac

SEQ ID NO: 1230080 - RNA, 19 nt, Artificial Sequence
  Description of Artificial Sequence: Synthetic oligonucleotide
  Sense strand starting at position 496 of SEQ ID NO: 917371
aucuaaagauugguugaua

SEQ ID NO: 1230081 - RNA, 19 nt, Artificial Sequence
  Description of Artificial Sequence: Synthetic oligonucleotide
  Antisense strand to SEQ ID NO: 1230080
uaucaaccaaucuuuagau

SEQ ID NO: 1230082 - RNA, 19 nt, Artificial Sequence
  Description of Artificial Sequence: Synthetic oligonucleotide
  Sense strand starting at position 497 of SEQ ID NO: 917371
ucuaaagauugguugauag

SEQ ID NO: 1230083 - RNA, 19 nt, Artificial Sequence
  Description of Artificial Sequence: Synthetic oligonucleotide
  Antisense strand to SEQ ID NO: 1230082
cuaucaaccaaucuuuaga

SEQ ID NO: 1230084 - RNA, 19 nt, Artificial Sequence
  Description of Artificial Sequence: Synthetic oligonucleotide
  Sense strand starting at position 653 of SEQ ID NO: 917371
auacauuucugagaguaaa

SEQ ID NO: 1230085 - RNA, 19 nt, Artificial Sequence
  Description of Artificial Sequence: Synthetic oligonucleotide
  Antisense strand to SEQ ID NO: 1230084
uuuacucucagaaauguau

SEQ ID NO: 1230086 - RNA, 19 nt, Artificial Sequence
  Description of Artificial Sequence: Synthetic oligonucleotide
  Sense strand starting at position 732 of SEQ ID NO: 917371
auuucuaugugccuuauua

SEQ ID NO: 1230087 - RNA, 19 nt, Artificial Sequence
  Description of Artificial Sequence: Synthetic oligonucleotide
  Antisense strand to SEQ ID NO: 1230086
uaauaaggcacauagaaau

SEQ ID NO: 1230088 - RNA, 19 nt, Artificial Sequence
  Description of Artificial Sequence: Synthetic oligonucleotide
  Sense strand starting at position 862 of SEQ ID NO: 917371
agacaagguuuauuaugua

SEQ ID NO: 1230089 - RNA, 19 nt, Artificial Sequence
  Description of Artificial Sequence: Synthetic oligonucleotide
  Antisense strand to SEQ ID NO: 1230088
uacauaauaaaccuugucu

SEQ ID NO: 1230090 - RNA, 19 nt, Artificial Sequence
  Description of Artificial Sequence: Synthetic oligonucleotide
  Sense strand starting at position 906 of SEQ ID NO: 917371
cuagguaaguaaucacaga

SEQ ID NO: 1230091 - RNA, 19 nt, Artificial Sequence
  Description of Artificial Sequence: Synthetic oligonucleotide
  Antisense strand to SEQ ID NO: 1230090
ucugugauuacuuaccuag

SEQ ID NO: 1230092 - RNA, 19 nt, Artificial Sequence
  Description of Artificial Sequence: Synthetic oligonucleotide
  Sense strand starting at position 949 of SEQ ID NO: 917371
gaaacaauaugguugcaca

SEQ ID NO: 1230093 - RNA, 19 nt, Artificial Sequence
  Description of Artificial Sequence: Synthetic oligonucleotide
  Antisense strand to SEQ ID NO: 1230092
ugugcaaccauauuguuuc

SEQ ID NO: 1230094 - RNA, 19 nt, Artificial Sequence
  Description of Artificial Sequence: Synthetic oligonucleotide
  Sense strand starting at position 1083 of SEQ ID NO: 917371
gaagcuugugaacauuaug

SEQ ID NO: 1230095 - RNA, 19 nt, Artificial Sequence
  Description of Artificial Sequence: Synthetic oligonucleotide
  Antisense strand to SEQ ID NO: 1230094
cauaauguucacaagcuuc

SEQ ID NO: 1230096 - RNA, 19 nt, Artificial Sequence
  Description of Artificial Sequence: Synthetic oligonucleotide
  Sense strand starting at position 1086 of SEQ ID NO: 917371
gcuugugaacauuaugaaa

SEQ ID NO: 1230097 - RNA, 19 nt, Artificial Sequence
  Description of Artificial Sequence: Synthetic oligonucleotide
  Antisense strand to SEQ ID NO: 1230096
uuucauaauguucacaagc

SEQ ID NO: 1230098 - RNA, 19 nt, Artificial Sequence
  Description of Artificial Sequence: Synthetic oligonucleotide
  Sense strand starting at position 1109 of SEQ ID NO: 917371
cugugaggcauaggaagaa

SEQ ID NO: 1230099 - RNA, 19 nt, Artificial Sequence
  Description of Artificial Sequence: Synthetic oligonucleotide
  Antisense strand to SEQ ID NO: 1230098
uucuuccuaugccucacag

SEQ ID NO: 1230100 - RNA, 19 nt, Artificial Sequence
  Description of Artificial Sequence: Synthetic oligonucleotide
  Sense strand starting at position 1156 of SEQ ID NO: 917371
augguuggauaaguuacaa

SEQ ID NO: 1230101 - RNA, 19 nt, Artificial Sequence
  Description of Artificial Sequence: Synthetic oligonucleotide
  Antisense strand to SEQ ID NO: 1230100
uuguaacuuauccaaccau

SEQ ID NO: 1230102 - RNA, 19 nt, Artificial Sequence
  Description of Artificial Sequence: Synthetic oligonucleotide
  Sense strand starting at position 1822 of SEQ ID NO: 917371
cguuuauaggguuaacaau

SEQ ID NO: 1230103 - RNA, 19 nt, Artificial Sequence
  Description of Artificial Sequence: Synthetic oligonucleotide
  Antisense strand to SEQ ID NO: 1230102
auuguuaacccuauaaacg

SEQ ID NO: 1230104 - RNA, 19 nt, Artificial Sequence
  Description of Artificial Sequence: Synthetic oligonucleotide
  Sense strand starting at position 1998 of SEQ ID NO: 917371
ucugaacucuuuccaggaa

SEQ ID NO: 1230105 - RNA, 19 nt, Artificial Sequence
  Description of Artificial Sequence: Synthetic oligonucleotide
  Antisense strand to SEQ ID NO: 1230104
uuccuggaaagaguucaga

SEQ ID NO: 1230106 - RNA, 19 nt, Artificial Sequence
  Description of Artificial Sequence: Synthetic oligonucleotide
  Sense strand starting at position 2220 of SEQ ID NO: 917371
agagauauucugcaauccu

SEQ ID NO: 1230107 - RNA, 19 nt, Artificial Sequence
  Description of Artificial Sequence: Synthetic oligonucleotide
  Antisense strand to SEQ ID NO: 1230106
aggauugcagaauaucucu

SEQ ID NO: 1230108 - RNA, 19 nt, Artificial Sequence
  Description of Artificial Sequence: Synthetic oligonucleotide
  Sense strand starting at position 2240 of SEQ ID NO: 917371
uccagaguagaauguauaa

SEQ ID NO: 1230109 - RNA, 19 nt, Artificial Sequence
  Description of Artificial Sequence: Synthetic oligonucleotide
  Antisense strand to SEQ ID NO: 1230108
uuauacauucuacucugga

SEQ ID NO: 1230110 - RNA, 19 nt, Artificial Sequence
  Description of Artificial Sequence: Synthetic oligonucleotide
  Sense strand starting at position 2270 of SEQ ID NO: 917371
ucaagauuauuguuaggug

SEQ ID NO: 1230111 - RNA, 19 nt, Artificial Sequence
  Description of Artificial Sequence: Synthetic oligonucleotide
  Antisense strand to SEQ ID NO: 1230110
caccuaacaauaaucuuga

SEQ ID NO: 1230112 - RNA, 19 nt, Artificial Sequence
  Description of Artificial Sequence: Synthetic oligonucleotide
  Sense strand starting at position 2457 of SEQ ID NO: 917371
gcugaagaaccauguagga

SEQ ID NO: 1230113 - RNA, 19 nt, Artificial Sequence
  Description of Artificial Sequence: Synthetic oligonucleotide
  Antisense strand to SEQ ID NO: 1230112
uccuacaugguucuucagc

SEQ ID NO: 1230114 - RNA, 19 nt, Artificial Sequence
  Description of Artificial Sequence: Synthetic oligonucleotide
  Sense strand starting at position 2620 of SEQ ID NO: 917371
acauuugugcuuuauuguu

SEQ ID NO: 1230115 - RNA, 19 nt, Artificial Sequence
  Description of Artificial Sequence: Synthetic oligonucleotide
  Antisense strand to SEQ ID NO: 1230114
aacaauaaagcacaaaugu

SEQ ID NO: 1230116 - RNA, 19 nt, Artificial Sequence
  Description of Artificial Sequence: Synthetic oligonucleotide
  Sense strand starting at position 2653 of SEQ ID NO: 917371
uuaugugauguugaacaug

SEQ ID NO: 1230117 - RNA, 19 nt, Artificial Sequence
  Description of Artificial Sequence: Synthetic oligonucleotide
  Antisense strand to SEQ ID NO: 1230116
cauguucaacaucacauaa

SEQ ID NO: 1230118 - RNA, 19 nt, Artificial Sequence
  Description of Artificial Sequence: Synthetic oligonucleotide
  Sense strand starting at position 2688 of SEQ ID NO: 917371
acugauaaccacuggugaa

SEQ ID NO: 1230119 - RNA, 19 nt, Artificial Sequence
  Description of Artificial Sequence: Synthetic oligonucleotide
  Antisense strand to SEQ ID NO: 1230118
uucaccagugguuaucagu

SEQ ID NO: 1230120 - RNA, 19 nt, Artificial Sequence
  Description of Artificial Sequence: Synthetic oligonucleotide
  Sense strand starting at position 2729 of SEQ ID NO: 917371
guguuacgaaucuagagau

SEQ ID NO: 1230121 - RNA, 19 nt, Artificial Sequence
  Description of Artificial Sequence: Synthetic oligonucleotide
  Antisense strand to SEQ ID NO: 1230120
aucucuagauucguaacac

SEQ ID NO: 1230122 - RNA, 19 nt, Artificial Sequence
  Description of Artificial Sequence: Synthetic oligonucleotide
  Sense strand starting at position 3156 of SEQ ID NO: 917371
agaggauucugaguauccu

SEQ ID NO: 1230123 - RNA, 19 nt, Artificial Sequence
  Description of Artificial Sequence: Synthetic oligonucleotide
  Antisense strand to SEQ ID NO: 1230122
aggauacucagaauccucu

SEQ ID NO: 1230124 - RNA, 19 nt, Artificial Sequence
  Description of Artificial Sequence: Synthetic oligonucleotide
  Sense strand starting at position 3173 of SEQ ID NO: 917371
cugaguuaugcuuaaacuc

SEQ ID NO: 1230125 - RNA, 19 nt, Artificial Sequence
  Description of Artificial Sequence: Synthetic oligonucleotide
  Antisense strand to SEQ ID NO: 1230124
gaguuuaagcauaacucag

SEQ ID NO: 1230126 - RNA, 19 nt, Artificial Sequence
  Description of Artificial Sequence: Synthetic oligonucleotide
  Sense strand starting at position 3264 of SEQ ID NO: 917371
gcugaaauaugaucgagag

SEQ ID NO: 1230127 - RNA, 19 nt, Artificial Sequence
  Description of Artificial Sequence: Synthetic oligonucleotide
  Antisense strand to SEQ ID NO: 1230126
cucucgaucauauuucagc

SEQ ID NO: 1230128 - RNA, 19 nt, Artificial Sequence
  Description of Artificial Sequence: Synthetic oligonucleotide
  Sense strand starting at position 3270 of SEQ ID NO: 917371
auaugaucgagaggccauu

SEQ ID NO: 1230129 - RNA, 19 nt, Artificial Sequence
  Description of Artificial Sequence: Synthetic oligonucleotide
  Antisense strand to SEQ ID NO: 1230128
aauggccucucgaucauau

SEQ ID NO: 1230130 - RNA, 19 nt, Artificial Sequence
  Description of Artificial Sequence: Synthetic oligonucleotide
  Sense strand starting at position 3390 of SEQ ID NO: 917371
ugguccuuuguggaaggaa

SEQ ID NO: 1230131 - RNA, 19 nt, Artificial Sequence
  Description of Artificial Sequence: Synthetic oligonucleotide
  Antisense strand to SEQ ID NO: 1230130
uuccuuccacaaaggacca

SEQ ID NO: 1230132 - RNA, 19 nt, Artificial Sequence
  Description of Artificial Sequence: Synthetic oligonucleotide
  Sense strand starting at position 3405 of SEQ ID NO: 917371
ggaagaguuuagucuauca

SEQ ID NO: 1230133 - RNA, 19 nt, Artificial Sequence
  Description of Artificial Sequence: Synthetic oligonucleotide
  Antisense strand to SEQ ID NO: 1230132
ugauagacuaaacucuucc

SEQ ID NO: 1230134 - RNA, 19 nt, Artificial Sequence
  Description of Artificial Sequence: Synthetic oligonucleotide
  Sense strand starting at position 3425 of SEQ ID NO: 917371
uuacauuucucugaaugga

SEQ ID NO: 1230135 - RNA, 19 nt, Artificial Sequence
  Description of Artificial Sequence: Synthetic oligonucleotide
  Antisense strand to SEQ ID NO: 1230134
uccauucagagaaauguaa

SEQ ID NO: 1230136 - RNA, 19 nt, Artificial Sequence
  Description of Artificial Sequence: Synthetic oligonucleotide
  Sense strand starting at position 3581 of SEQ ID NO: 917371
uaggacauuccugguuaaa

SEQ ID NO: 1230137 - RNA, 19 nt, Artificial Sequence
  Description of Artificial Sequence: Synthetic oligonucleotide
  Antisense strand to SEQ ID NO: 1230136
uuuaaccaggaauguccua

SEQ ID NO: 1230138 - RNA, 19 nt, Artificial Sequence
  Description of Artificial Sequence: Synthetic oligonucleotide
  Sense strand starting at position 3583 of SEQ ID NO: 917371
ggacauuccugguuaaaug

SEQ ID NO: 1230139 - RNA, 19 nt, Artificial Sequence
  Description of Artificial Sequence: Synthetic oligonucleotide
  Antisense strand to SEQ ID NO: 1230138
cauuuaaccaggaaugucc

SEQ ID NO: 1230140 - RNA, 19 nt, Artificial Sequence
  Description of Artificial Sequence: Synthetic oligonucleotide
  Sense strand starting at position 3677 of SEQ ID NO: 917371
ucaucuuuagacugaugua

SEQ ID NO: 1230141 - RNA, 19 nt, Artificial Sequence
  Description of Artificial Sequence: Synthetic oligonucleotide
  Antisense strand to SEQ ID NO: 1230140
uacaucagucuaaagauga

SEQ ID NO: 1230142 - RNA, 19 nt, Artificial Sequence
  Description of Artificial Sequence: Synthetic oligonucleotide
  Sense strand starting at position 3689 of SEQ ID NO: 917371
ugauguaacuacuuacaga

SEQ ID NO: 1230143 - RNA, 19 nt, Artificial Sequence
  Description of Artificial Sequence: Synthetic oligonucleotide
  Antisense strand to SEQ ID NO: 1230142
ucuguaaguaguuacauca

SEQ ID NO: 1230144 - RNA, 19 nt, Artificial Sequence
  Description of Artificial Sequence: Synthetic oligonucleotide
  Sense strand starting at position 3714 of SEQ ID NO: 917371
uguaaugaagcugauaucu

SEQ ID NO: 1230145 - RNA, 19 nt, Artificial Sequence
  Description of Artificial Sequence: Synthetic oligonucleotide
  Antisense strand to SEQ ID NO: 1230144
agauaucagcuucauuaca

SEQ ID NO: 1230146 - RNA, 19 nt, Artificial Sequence
  Description of Artificial Sequence: Synthetic oligonucleotide
  Sense strand starting at position 3733 of SEQ ID NO: 917371
gcucaaauccaauaggguu

SEQ ID NO: 1230147 - RNA, 19 nt, Artificial Sequence
  Description of Artificial Sequence: Synthetic oligonucleotide
  Antisense strand to SEQ ID NO: 1230146
aacccuauuggauuugagc

SEQ ID NO: 1230148 - RNA, 19 nt, Artificial Sequence
  Description of Artificial Sequence: Synthetic oligonucleotide
  Sense strand starting at position 3860 of SEQ ID NO: 917371
gauagaccugauugugaau

SEQ ID NO: 1230149 - RNA, 19 nt, Artificial Sequence
  Description of Artificial Sequence: Synthetic oligonucleotide
  Antisense strand to SEQ ID NO: 1230148
auucacaaucaggucuauc

SEQ ID NO: 1230150 - RNA, 19 nt, Artificial Sequence
  Description of Artificial Sequence: Synthetic oligonucleotide
  Sense strand starting at position 3871 of SEQ ID NO: 917371
uugugaauacaaggaguga

SEQ ID NO: 1230151 - RNA, 19 nt, Artificial Sequence
  Description of Artificial Sequence: Synthetic oligonucleotide
  Antisense strand to SEQ ID NO: 1230150
ucacuccuuguauucacaa

SEQ ID NO: 1230152 - RNA, 19 nt, Artificial Sequence
  Description of Artificial Sequence: Synthetic oligonucleotide
  Sense strand starting at position 3929 of SEQ ID NO: 917371
uaauauugccuggaacgaa

SEQ ID NO: 1230153 - RNA, 19 nt, Artificial Sequence
  Description of Artificial Sequence: Synthetic oligonucleotide
  Antisense strand to SEQ ID NO: 1230152
uucguuccaggcaauauua

SEQ ID NO: 1230154 - RNA, 19 nt, Artificial Sequence
  Description of Artificial Sequence: Synthetic oligonucleotide
  Sense strand starting at position 3929 of SEQ ID NO: 917372
uaauauugccuggaacgaa

SEQ ID NO: 1230155 - RNA, 19 nt, Artificial Sequence
  Description of Artificial Sequence: Synthetic oligonucleotide
  Antisense strand to SEQ ID NO: 1230154
uucguuccaggcaauauua

SEQ ID NO: 1230156 - RNA, 19 nt, Artificial Sequence
  Description of Artificial Sequence: Synthetic oligonucleotide
  Sense strand starting at position 61 of SEQ ID NO: 917372
cguugaagagcucaggcuu

SEQ ID NO: 1230157 - RNA, 19 nt, Artificial Sequence
  Description of Artificial Sequence: Synthetic oligonucleotide
  Antisense strand to SEQ ID NO: 1230156
aagccugagcucuucaacg

SEQ ID NO: 1230158 - RNA, 19 nt, Artificial Sequence
  Description of Artificial Sequence: Synthetic oligonucleotide
  Sense strand starting at position 136 of SEQ ID NO: 917372
gcuugagcgcgaucauguu

SEQ ID NO: 1230159 - RNA, 19 nt, Artificial Sequence
  Description of Artificial Sequence: Synthetic oligonucleotide
  Antisense strand to SEQ ID NO: 1230158
aacaugaucgcgcucaagc

SEQ ID NO: 1230160 - RNA, 19 nt, Artificial Sequence
  Description of Artificial Sequence: Synthetic oligonucleotide
  Sense strand starting at position 752 of SEQ ID NO: 917372
ggagaugugguccagcaga

SEQ ID NO: 1230161 - RNA, 19 nt, Artificial Sequence
  Description of Artificial Sequence: Synthetic oligonucleotide
  Antisense strand to SEQ ID NO: 1230160
ucugcuggaccacaucucc

SEQ ID NO: 1230162 - RNA, 19 nt, Artificial Sequence
  Description of Artificial Sequence: Synthetic oligonucleotide
  Sense strand starting at position 872 of SEQ ID NO: 917372
cguggcguccggcuugaaa

SEQ ID NO: 1230163 - RNA, 19 nt, Artificial Sequence
  Description of Artificial Sequence: Synthetic oligonucleotide
  Antisense strand to SEQ ID NO: 1230162
uuucaagccggacgccacg

SEQ ID NO: 1230164 - RNA, 19 nt, Artificial Sequence
  Description of Artificial Sequence: Synthetic oligonucleotide
  Sense strand starting at position 883 of SEQ ID NO: 917372
gcuugaaaggauggcucuu

SEQ ID NO: 1230165 - RNA, 19 nt, Artificial Sequence
  Description of Artificial Sequence: Synthetic oligonucleotide
  Antisense strand to SEQ ID NO: 1230164
aagagccauccuuucaagc

SEQ ID NO: 1230166 - RNA, 19 nt, Artificial Sequence
  Description of Artificial Sequence: Synthetic oligonucleotide
  Sense strand starting at position 1361 of SEQ ID NO: 917372
cuuucugaggcgugaaauu

SEQ ID NO: 1230167 - RNA, 19 nt, Artificial Sequence
  Description of Artificial Sequence: Synthetic oligonucleotide
  Antisense strand to SEQ ID NO: 1230166
aauuucacgccucagaaag

SEQ ID NO: 1230168 - RNA, 19 nt, Artificial Sequence
  Description of Artificial Sequence: Synthetic oligonucleotide
  Sense strand starting at position 1699 of SEQ ID NO: 917372
ggguacuugugcucaggga

SEQ ID NO: 1230169 - RNA, 19 nt, Artificial Sequence
  Description of Artificial Sequence: Synthetic oligonucleotide
  Antisense strand to SEQ ID NO: 1230168
ucccugagcacaaguaccc

SEQ ID NO: 1230170 - RNA, 19 nt, Artificial Sequence
  Description of Artificial Sequence: Synthetic oligonucleotide
  Sense strand starting at position 1777 of SEQ ID NO: 917372
uggcauguauauccacaaa

SEQ ID NO: 1230171 - RNA, 19 nt, Artificial Sequence
  Description of Artificial Sequence: Synthetic oligonucleotide
  Antisense strand to SEQ ID NO: 1230170
uuuguggauauacaugcca

SEQ ID NO: 1230172 - RNA, 19 nt, Artificial Sequence
  Description of Artificial Sequence: Synthetic oligonucleotide
  Sense strand starting at position 1789 of SEQ ID NO: 917372
ccacaaacacuccgaaagu

SEQ ID NO: 1230173 - RNA, 19 nt, Artificial Sequence
  Description of Artificial Sequence: Synthetic oligonucleotide
  Antisense strand to SEQ ID NO: 1230172
acuuucggaguguuugugg

SEQ ID NO: 1230174 - RNA, 19 nt, Artificial Sequence
  Description of Artificial Sequence: Synthetic oligonucleotide
  Sense strand starting at position 1799 of SEQ ID NO: 917372
uccgaaaguccgcgggaaa

SEQ ID NO: 1230175 - RNA, 19 nt, Artificial Sequence
  Description of Artificial Sequence: Synthetic oligonucleotide
  Antisense strand to SEQ ID NO: 1230174
uuucccgcggacuuucgga

SEQ ID NO: 1230176 - RNA, 19 nt, Artificial Sequence
  Description of Artificial Sequence: Synthetic oligonucleotide
  Sense strand starting at position 2286 of SEQ ID NO: 917372
caccguggucuggaaagau

SEQ ID NO: 1230177 - RNA, 19 nt, Artificial Sequence
  Description of Artificial Sequence: Synthetic oligonucleotide
  Antisense strand to SEQ ID NO: 1230176
aucuuuccagaccacggug

SEQ ID NO: 1230178 - RNA, 19 nt, Artificial Sequence
  Description of Artificial Sequence: Synthetic oligonucleotide
  Sense strand starting at position 2313 of SEQ ID NO: 917372
ccagcuauugucuaagggu

SEQ ID NO: 1230179 - RNA, 19 nt, Artificial Sequence
  Description of Artificial Sequence: Synthetic oligonucleotide
  Antisense strand to SEQ ID NO: 1230178
acccuuagacaauagcugg

SEQ ID NO: 1230180 - RNA, 19 nt, Artificial Sequence
  Description of Artificial Sequence: Synthetic oligonucleotide
  Sense strand starting at position 2424 of SEQ ID NO: 917372
guauguuucuucucccuga

SEQ ID NO: 1230181 - RNA, 19 nt, Artificial Sequence
  Description of Artificial Sequence: Synthetic oligonucleotide
  Antisense strand to SEQ ID NO: 1230180
ucagggagaagaaacauac

SEQ ID NO: 1230182 - RNA, 19 nt, Artificial Sequence
  Description of Artificial Sequence: Synthetic oligonucleotide
  Sense strand starting at position 2427 of SEQ ID NO: 917372
uguuucuucucccugauag

SEQ ID NO: 1230183 - RNA, 19 nt, Artificial Sequence
  Description of Artificial Sequence: Synthetic oligonucleotide
  Antisense strand to SEQ ID NO: 1230182
cuaucagggagaagaaaca

SEQ ID NO: 1230184 - RNA, 19 nt, Artificial Sequence
  Description of Artificial Sequence: Synthetic oligonucleotide
  Sense strand starting at position 2428 of SEQ ID NO: 917372
guuucuucucccugauagc

SEQ ID NO: 1230185 - RNA, 19 nt, Artificial Sequence
  Description of Artificial Sequence: Synthetic oligonucleotide
  Antisense strand to SEQ ID NO: 1230184
gcuaucagggagaagaaac

SEQ ID NO: 1230186 - RNA, 19 nt, Artificial Sequence
  Description of Artificial Sequence: Synthetic oligonucleotide
  Sense strand starting at position 2442 of SEQ ID NO: 917372
auagcaagccuugaauaua

SEQ ID NO: 1230187 - RNA, 19 nt, Artificial Sequence
  Description of Artificial Sequence: Synthetic oligonucleotide
  Antisense strand to SEQ ID NO: 1230186
uauauucaaggcuugcuau

SEQ ID NO: 1230188 - RNA, 19 nt, Artificial Sequence
  Description of Artificial Sequence: Synthetic oligonucleotide
  Sense strand starting at position 2445 of SEQ ID NO: 917372
gcaagccuugaauauauga

SEQ ID NO: 1230189 - RNA, 19 nt, Artificial Sequence
  Description of Artificial Sequence: Synthetic oligonucleotide
  Antisense strand to SEQ ID NO: 1230188
ucauauauucaaggcuugc

SEQ ID NO: 1230190 - RNA, 19 nt, Artificial Sequence
  Description of Artificial Sequence: Synthetic oligonucleotide
  Sense strand starting at position 2501 of SEQ ID NO: 917372
caagcuguuguauaaugua

SEQ ID NO: 1230191 - RNA, 19 nt, Artificial Sequence
  Description of Artificial Sequence: Synthetic oligonucleotide
  Antisense strand to SEQ ID NO: 1230190
uacauuauacaacagcuug

SEQ ID NO: 1230192 - RNA, 19 nt, Artificial Sequence
  Description of Artificial Sequence: Synthetic oligonucleotide
  Sense strand starting at position 2515 of SEQ ID NO: 917372
auguauacagcuggacauu

SEQ ID NO: 1230193 - RNA, 19 nt, Artificial Sequence
  Description of Artificial Sequence: Synthetic oligonucleotide
  Antisense strand to SEQ ID NO: 1230192
aauguccagcuguauacau

SEQ ID NO: 1230194 - RNA, 19 nt, Artificial Sequence
  Description of Artificial Sequence: Synthetic oligonucleotide
  Sense strand starting at position 2541 of SEQ ID NO: 917372
uaaauuaugcccgcgcauu

SEQ ID NO: 1230195 - RNA, 19 nt, Artificial Sequence
  Description of Artificial Sequence: Synthetic oligonucleotide
  Antisense strand to SEQ ID NO: 1230194
aaugcgcgggcauaauuua

SEQ ID NO: 1230196 - RNA, 19 nt, Artificial Sequence
  Description of Artificial Sequence: Synthetic oligonucleotide
  Sense strand starting at position 2551 of SEQ ID NO: 917372
ccgcgcauuccucuguaua

SEQ ID NO: 1230197 - RNA, 19 nt, Artificial Sequence
  Description of Artificial Sequence: Synthetic oligonucleotide
  Antisense strand to SEQ ID NO: 1230196
uauacagaggaaugcgcgg

SEQ ID NO: 1230198 - RNA, 19 nt, Artificial Sequence
  Description of Artificial Sequence: Synthetic oligonucleotide
  Sense strand starting at position 2657 of SEQ ID NO: 917372
gagaauaaucgcggugaca

SEQ ID NO: 1230199 - RNA, 19 nt, Artificial Sequence
  Description of Artificial Sequence: Synthetic oligonucleotide
  Antisense strand to SEQ ID NO: 1230198
ugucaccgcgauuauucuc

SEQ ID NO: 1230200 - RNA, 19 nt, Artificial Sequence
  Description of Artificial Sequence: Synthetic oligonucleotide
  Sense strand starting at position 2659 of SEQ ID NO: 917372
gaauaaucgcggugacaga

SEQ ID NO: 1230201 - RNA, 19 nt, Artificial Sequence
  Description of Artificial Sequence: Synthetic oligonucleotide
  Antisense strand to SEQ ID NO: 1230200
ucugucaccgcgauuauuc

SEQ ID NO: 1230202 - RNA, 19 nt, Artificial Sequence
  Description of Artificial Sequence: Synthetic oligonucleotide
  Sense strand starting at position 2690 of SEQ ID NO: 917372
gcagucagacgcuauugau

SEQ ID NO: 1230203 - RNA, 19 nt, Artificial Sequence
  Description of Artificial Sequence: Synthetic oligonucleotide
  Antisense strand to SEQ ID NO: 1230202
aucaauagcgucugacugc

SEQ ID NO: 1230204 - RNA, 19 nt, Artificial Sequence
  Description of Artificial Sequence: Synthetic oligonucleotide
  Sense strand starting at position 2746 of SEQ ID NO: 917372
uguuguugugaauauaacu

SEQ ID NO: 1230205 - RNA, 19 nt, Artificial Sequence
  Description of Artificial Sequence: Synthetic oligonucleotide
  Antisense strand to SEQ ID NO: 1230204
aguuauauucacaacaaca

SEQ ID NO: 1230206 - RNA, 19 nt, Artificial Sequence
  Description of Artificial Sequence: Synthetic oligonucleotide
  Sense strand starting at position 2811 of SEQ ID NO: 917372
ugugcuuucuacucgggaa

SEQ ID NO: 1230207 - RNA, 19 nt, Artificial Sequence
  Description of Artificial Sequence: Synthetic oligonucleotide
  Antisense strand to SEQ ID NO: 1230206
uucccgaguagaaagcaca

SEQ ID NO: 1230208 - RNA, 19 nt, Artificial Sequence
  Description of Artificial Sequence: Synthetic oligonucleotide
  Sense strand starting at position 2812 of SEQ ID NO: 917372
gugcuuucuacucgggaaa

SEQ ID NO: 1230209 - RNA, 19 nt, Artificial Sequence
  Description of Artificial Sequence: Synthetic oligonucleotide
  Antisense strand to SEQ ID NO: 1230208
uuucccgaguagaaagcac

SEQ ID NO: 1230210 - RNA, 19 nt, Artificial Sequence
  Description of Artificial Sequence: Synthetic oligonucleotide
  Sense strand starting at position 2903 of SEQ ID NO: 917372
acgagcuccgggugaucua

SEQ ID NO: 1230211 - RNA, 19 nt, Artificial Sequence
  Description of Artificial Sequence: Synthetic oligonucleotide
  Antisense strand to SEQ ID NO: 1230210
uagaucacccggagcucgu

SEQ ID NO: 1230212 - RNA, 19 nt, Artificial Sequence
  Description of Artificial Sequence: Synthetic oligonucleotide
  Sense strand starting at position 2904 of SEQ ID NO: 917372
cgagcuccgggugaucuaa

SEQ ID NO: 1230213 - RNA, 19 nt, Artificial Sequence
  Description of Artificial Sequence: Synthetic oligonucleotide
  Antisense strand to SEQ ID NO: 1230212
uuagaucacccggagcucg

SEQ ID NO: 1230214 - RNA, 19 nt, Artificial Sequence
  Description of Artificial Sequence: Synthetic oligonucleotide
  Sense strand starting at position 2949 of SEQ ID NO: 917372
caguuaacaggguguaguu

SEQ ID NO: 1230215 - RNA, 19 nt, Artificial Sequence
  Description of Artificial Sequence: Synthetic oligonucleotide
  Antisense strand to SEQ ID NO: 1230214
aacuacacccuguuaacug

SEQ ID NO: 1230216 - RNA, 19 nt, Artificial Sequence
  Description of Artificial Sequence: Synthetic oligonucleotide
  Sense strand starting at position 3025 of SEQ ID NO: 917372
acacuuuaugcugggaacu

SEQ ID NO: 1230217 - RNA, 19 nt, Artificial Sequence
  Description of Artificial Sequence: Synthetic oligonucleotide
  Antisense strand to SEQ ID NO: 1230216
aguucccagcauaaagugu

SEQ ID NO: 1230218 - RNA, 19 nt, Artificial Sequence
  Description of Artificial Sequence: Synthetic oligonucleotide
  Sense strand starting at position 3317 of SEQ ID NO: 917372
ccuguuauauggcccuuau

SEQ ID NO: 1230219 - RNA, 19 nt, Artificial Sequence
  Description of Artificial Sequence: Synthetic oligonucleotide
  Antisense strand to SEQ ID NO: 1230218
auaagggccauauaacagg

SEQ ID NO: 1230220 - RNA, 19 nt, Artificial Sequence
  Description of Artificial Sequence: Synthetic oligonucleotide
  Sense strand starting at position 3412 of SEQ ID NO: 917372
cggugauaauaaccuaaca

SEQ ID NO: 1230221 - RNA, 19 nt, Artificial Sequence
  Description of Artificial Sequence: Synthetic oligonucleotide
  Antisense strand to SEQ ID NO: 1230220
uguuagguuauuaucaccg

SEQ ID NO: 1230222 - RNA, 19 nt, Artificial Sequence
  Description of Artificial Sequence: Synthetic oligonucleotide
  Sense strand starting at position 3424 of SEQ ID NO: 917372
ccuaacagcccagauguua

SEQ ID NO: 1230223 - RNA, 19 nt, Artificial Sequence
  Description of Artificial Sequence: Synthetic oligonucleotide
  Antisense strand to SEQ ID NO: 1230222
uaacaucugggcuguuagg

SEQ ID NO: 1230224 - RNA, 19 nt, Artificial Sequence
  Description of Artificial Sequence: Synthetic oligonucleotide
  Sense strand starting at position 3439 of SEQ ID NO: 917372
guuaucacaucugcgguaa

SEQ ID NO: 1230225 - RNA, 19 nt, Artificial Sequence
  Description of Artificial Sequence: Synthetic oligonucleotide
  Antisense strand to SEQ ID NO: 1230224
uuaccgcagaugugauaac

SEQ ID NO: 1230226 - RNA, 19 nt, Artificial Sequence
  Description of Artificial Sequence: Synthetic oligonucleotide
  Sense strand starting at position 3443 of SEQ ID NO: 917372
ucacaucugcgguaagaga

SEQ ID NO: 1230227 - RNA, 19 nt, Artificial Sequence
  Description of Artificial Sequence: Synthetic oligonucleotide
  Antisense strand to SEQ ID NO: 1230226
ucucuuaccgcagauguga

SEQ ID NO: 1230228 - RNA, 19 nt, Artificial Sequence
  Description of Artificial Sequence: Synthetic oligonucleotide
  Sense strand starting at position 3616 of SEQ ID NO: 917372
acaaaugcauguguguuua

SEQ ID NO: 1230229 - RNA, 19 nt, Artificial Sequence
  Description of Artificial Sequence: Synthetic oligonucleotide
  Antisense strand to SEQ ID NO: 1230228
uaaacacacaugcauuugu

SEQ ID NO: 1230230 - RNA, 19 nt, Artificial Sequence
  Description of Artificial Sequence: Synthetic oligonucleotide
  Sense strand starting at position 3886 of SEQ ID NO: 917372
ugaguccuacgguagucau

SEQ ID NO: 1230231 - RNA, 19 nt, Artificial Sequence
  Description of Artificial Sequence: Synthetic oligonucleotide
  Antisense strand to SEQ ID NO: 1230230
augacuaccguaggacuca

SEQ ID NO: 1230232 - RNA, 19 nt, Artificial Sequence
  Description of Artificial Sequence: Synthetic oligonucleotide
  Sense strand starting at position 3898 of SEQ ID NO: 917372
uagucaucacaccgggagu

SEQ ID NO: 1230233 - RNA, 19 nt, Artificial Sequence
  Description of Artificial Sequence: Synthetic oligonucleotide
  Antisense strand to SEQ ID NO: 1230232
acucccggugugaugacua

SEQ ID NO: 1230234 - RNA, 19 nt, Artificial Sequence
  Description of Artificial Sequence: Synthetic oligonucleotide
  Sense strand starting at position 3967 of SEQ ID NO: 917373
ucucucuugacgggaaaga

SEQ ID NO: 1230235 - RNA, 19 nt, Artificial Sequence
  Description of Artificial Sequence: Synthetic oligonucleotide
  Antisense strand to SEQ ID NO: 1230234
ucuuucccgucaagagaga

SEQ ID NO: 1230236 - RNA, 19 nt, Artificial Sequence
  Description of Artificial Sequence: Synthetic oligonucleotide
  Sense strand starting at position 301 of SEQ ID NO: 917373
gcaacaauuucuuccguuu

SEQ ID NO: 1230237 - RNA, 19 nt, Artificial Sequence
  Description of Artificial Sequence: Synthetic oligonucleotide
  Antisense strand to SEQ ID NO: 1230236
aaacggaagaaauuguugc

SEQ ID NO: 1230238 - RNA, 19 nt, Artificial Sequence
  Description of Artificial Sequence: Synthetic oligonucleotide
  Sense strand starting at position 352 of SEQ ID NO: 917373
aaagaauaauugcccggaa

SEQ ID NO: 1230239 - RNA, 19 nt, Artificial Sequence
  Description of Artificial Sequence: Synthetic oligonucleotide
  Antisense strand to SEQ ID NO: 1230238
uuccgggcaauuauucuuu

SEQ ID NO: 1230240 - RNA, 19 nt, Artificial Sequence
  Description of Artificial Sequence: Synthetic oligonucleotide
  Sense strand starting at position 434 of SEQ ID NO: 917373
aaguaacuucucgguauuu

SEQ ID NO: 1230241 - RNA, 19 nt, Artificial Sequence
  Description of Artificial Sequence: Synthetic oligonucleotide
  Antisense strand to SEQ ID NO: 1230240
aaauaccgagaaguuacuu

SEQ ID NO: 1230242 - RNA, 19 nt, Artificial Sequence
  Description of Artificial Sequence: Synthetic oligonucleotide
  Sense strand starting at position 462 of SEQ ID NO: 917373
agauauuguuaggcucaag

SEQ ID NO: 1230243 - RNA, 19 nt, Artificial Sequence
  Description of Artificial Sequence: Synthetic oligonucleotide
  Antisense strand to SEQ ID NO: 1230242
cuugagccuaacaauaucu

SEQ ID NO: 1230244 - RNA, 19 nt, Artificial Sequence
  Description of Artificial Sequence: Synthetic oligonucleotide
  Sense strand starting at position 465 of SEQ ID NO: 917373
uauuguuaggcucaagacu

SEQ ID NO: 1230245 - RNA, 19 nt, Artificial Sequence
  Description of Artificial Sequence: Synthetic oligonucleotide
  Antisense strand to SEQ ID NO: 1230244
agucuugagccuaacaaua

SEQ ID NO: 1230246 - RNA, 19 nt, Artificial Sequence
  Description of Artificial Sequence: Synthetic oligonucleotide
  Sense strand starting at position 506 of SEQ ID NO: 917373
ugguucacucugggaaaug

SEQ ID NO: 1230247 - RNA, 19 nt, Artificial Sequence
  Description of Artificial Sequence: Synthetic oligonucleotide
  Antisense strand to SEQ ID NO: 1230246
cauuucccagagugaacca

SEQ ID NO: 1230248 - RNA, 19 nt, Artificial Sequence
  Description of Artificial Sequence: Synthetic oligonucleotide
  Sense strand starting at position 610 of SEQ ID NO: 917373
uccuaagaacgugacuuua

SEQ ID NO: 1230249 - RNA, 19 nt, Artificial Sequence
  Description of Artificial Sequence: Synthetic oligonucleotide
  Antisense strand to SEQ ID NO: 1230248
uaaagucacguucuuagga

SEQ ID NO: 1230250 - RNA, 19 nt, Artificial Sequence
  Description of Artificial Sequence: Synthetic oligonucleotide
  Sense strand starting at position 612 of SEQ ID NO: 917373
cuaagaacgugacuuuaaa

SEQ ID NO: 1230251 - RNA, 19 nt, Artificial Sequence
  Description of Artificial Sequence: Synthetic oligonucleotide
  Antisense strand to SEQ ID NO: 1230250
uuuaaagucacguucuuag

SEQ ID NO: 1230252 - RNA, 19 nt, Artificial Sequence
  Description of Artificial Sequence: Synthetic oligonucleotide
  Sense strand starting at position 748 of SEQ ID NO: 917373
cugcguauuaccucucguu

SEQ ID NO: 1230253 - RNA, 19 nt, Artificial Sequence
  Description of Artificial Sequence: Synthetic oligonucleotide
  Antisense strand to SEQ ID NO: 1230252
aacgagagguaauacgcag

SEQ ID NO: 1230254 - RNA, 19 nt, Artificial Sequence
  Description of Artificial Sequence: Synthetic oligonucleotide
  Sense strand starting at position 749 of SEQ ID NO: 917373
ugcguauuaccucucguuu

SEQ ID NO: 1230255 - RNA, 19 nt, Artificial Sequence
  Description of Artificial Sequence: Synthetic oligonucleotide
  Antisense strand to SEQ ID NO: 1230254
aaacgagagguaauacgca

SEQ ID NO: 1230256 - RNA, 19 nt, Artificial Sequence
  Description of Artificial Sequence: Synthetic oligonucleotide
  Sense strand starting at position 774 of SEQ ID NO: 917373
acucuuguguuacugaaag

SEQ ID NO: 1230257 - RNA, 19 nt, Artificial Sequence
  Description of Artificial Sequence: Synthetic oligonucleotide
  Antisense strand to SEQ ID NO: 1230256
cuuucaguaacacaagagu

SEQ ID NO: 1230258 - RNA, 19 nt, Artificial Sequence
  Description of Artificial Sequence: Synthetic oligonucleotide
  Sense strand starting at position 873 of SEQ ID NO: 917373
aaccgagggcuuuacaaau

SEQ ID NO: 1230259 - RNA, 19 nt, Artificial Sequence
  Description of Artificial Sequence: Synthetic oligonucleotide
  Antisense strand to SEQ ID NO: 1230258
auuuguaaagcccucgguu

SEQ ID NO: 1230260 - RNA, 19 nt, Artificial Sequence
  Description of Artificial Sequence: Synthetic oligonucleotide
  Sense strand starting at position 916 of SEQ ID NO: 917373
gucucaaauuuggcguuaa

SEQ ID NO: 1230261 - RNA, 19 nt, Artificial Sequence
  Description of Artificial Sequence: Synthetic oligonucleotide
  Antisense strand to SEQ ID NO: 1230260
uuaacgccaaauuugagac

SEQ ID NO: 1230262 - RNA, 19 nt, Artificial Sequence
  Description of Artificial Sequence: Synthetic oligonucleotide
  Sense strand starting at position 920 of SEQ ID NO: 917373
caaauuuggcguuaacgua

SEQ ID NO: 1230263 - RNA, 19 nt, Artificial Sequence
  Description of Artificial Sequence: Synthetic oligonucleotide
  Antisense strand to SEQ ID NO: 1230262
uacguuaacgccaaauuug

SEQ ID NO: 1230264 - RNA, 19 nt, Artificial Sequence
  Description of Artificial Sequence: Synthetic oligonucleotide
  Sense strand starting at position 1103 of SEQ ID NO: 917373
auggaaucggucuaauuac

SEQ ID NO: 1230265 - RNA, 19 nt, Artificial Sequence
  Description of Artificial Sequence: Synthetic oligonucleotide
  Antisense strand to SEQ ID NO: 1230264
guaauuagaccgauuccau

SEQ ID NO: 1230266 - RNA, 19 nt, Artificial Sequence
  Description of Artificial Sequence: Synthetic oligonucleotide
  Sense strand starting at position 1255 of SEQ ID NO: 917373
auuuauagcugaggaggaa

SEQ ID NO: 1230267 - RNA, 19 nt, Artificial Sequence
  Description of Artificial Sequence: Synthetic oligonucleotide
  Antisense strand to SEQ ID NO: 1230266
uuccuccucagcuauaaau

SEQ ID NO: 1230268 - RNA, 19 nt, Artificial Sequence
  Description of Artificial Sequence: Synthetic oligonucleotide
  Sense strand starting at position 1303 of SEQ ID NO: 917373
agagguagagaguauugca

SEQ ID NO: 1230269 - RNA, 19 nt, Artificial Sequence
  Description of Artificial Sequence: Synthetic oligonucleotide
  Antisense strand to SEQ ID NO: 1230268
ugcaauacucucuaccucu

SEQ ID NO: 1230270 - RNA, 19 nt, Artificial Sequence
  Description of Artificial Sequence: Synthetic oligonucleotide
  Sense strand starting at position 1765 of SEQ ID NO: 917373
cccggcaggcucuuuguua

SEQ ID NO: 1230271 - RNA, 19 nt, Artificial Sequence
  Description of Artificial Sequence: Synthetic oligonucleotide
  Antisense strand to SEQ ID NO: 1230270
uaacaaagagccugccggg

SEQ ID NO: 1230272 - RNA, 19 nt, Artificial Sequence
  Description of Artificial Sequence: Synthetic oligonucleotide
  Sense strand starting at position 2029 of SEQ ID NO: 917373
gguccuggugugggaauau

SEQ ID NO: 1230273 - RNA, 19 nt, Artificial Sequence
  Description of Artificial Sequence: Synthetic oligonucleotide
  Antisense strand to SEQ ID NO: 1230272
auauucccacaccaggacc

SEQ ID NO: 1230274 - RNA, 19 nt, Artificial Sequence
  Description of Artificial Sequence: Synthetic oligonucleotide
  Sense strand starting at position 2194 of SEQ ID NO: 917373
agaauaaauggcgagcgau

SEQ ID NO: 1230275 - RNA, 19 nt, Artificial Sequence
  Description of Artificial Sequence: Synthetic oligonucleotide
  Antisense strand to SEQ ID NO: 1230274
aucgcucgccauuuauucu

SEQ ID NO: 1230276 - RNA, 19 nt, Artificial Sequence
  Description of Artificial Sequence: Synthetic oligonucleotide
  Sense strand starting at position 2208 of SEQ ID NO: 917373
gcgauuaaggcauaucuac

SEQ ID NO: 1230277 - RNA, 19 nt, Artificial Sequence
  Description of Artificial Sequence: Synthetic oligonucleotide
  Antisense strand to SEQ ID NO: 1230276
guagauaugccuuaaucgc

SEQ ID NO: 1230278 - RNA, 19 nt, Artificial Sequence
  Description of Artificial Sequence: Synthetic oligonucleotide
  Sense strand starting at position 2789 of SEQ ID NO: 917373
uugacccuuugaguuuaaa

SEQ ID NO: 1230279 - RNA, 19 nt, Artificial Sequence
  Description of Artificial Sequence: Synthetic oligonucleotide
  Antisense strand to SEQ ID NO: 1230278
uuuaaacucaaagggucaa

SEQ ID NO: 1230280 - RNA, 19 nt, Artificial Sequence
  Description of Artificial Sequence: Synthetic oligonucleotide
  Sense strand starting at position 2813 of SEQ ID NO: 917373
guguauguuacaucgccau

SEQ ID NO: 1230281 - RNA, 19 nt, Artificial Sequence
  Description of Artificial Sequence: Synthetic oligonucleotide
  Antisense strand to SEQ ID NO: 1230280
auggcgauguaacauacac

SEQ ID NO: 1230282 - RNA, 19 nt, Artificial Sequence
  Description of Artificial Sequence: Synthetic oligonucleotide
  Sense strand starting at position 3009 of SEQ ID NO: 917373
uguucuuaccuagacggua

SEQ ID NO: 1230283 - RNA, 19 nt, Artificial Sequence
  Description of Artificial Sequence: Synthetic oligonucleotide
  Antisense strand to SEQ ID NO: 1230282
uaccgucuagguaagaaca

SEQ ID NO: 1230284 - RNA, 19 nt, Artificial Sequence
  Description of Artificial Sequence: Synthetic oligonucleotide
  Sense strand starting at position 3014 of SEQ ID NO: 917373
uuaccuagacgguaaacua

SEQ ID NO: 1230285 - RNA, 19 nt, Artificial Sequence
  Description of Artificial Sequence: Synthetic oligonucleotide
  Antisense strand to SEQ ID NO: 1230284
uaguuuaccgucuagguaa

SEQ ID NO: 1230286 - RNA, 19 nt, Artificial Sequence
  Description of Artificial Sequence: Synthetic oligonucleotide
  Sense strand starting at position 3196 of SEQ ID NO: 917373
ugguuuacauaggucaagu

SEQ ID NO: 1230287 - RNA, 19 nt, Artificial Sequence
  Description of Artificial Sequence: Synthetic oligonucleotide
  Antisense strand to SEQ ID NO: 1230286
acuugaccuauguaaacca

SEQ ID NO: 1230288 - RNA, 19 nt, Artificial Sequence
  Description of Artificial Sequence: Synthetic oligonucleotide
  Sense strand starting at position 3198 of SEQ ID NO: 917373
guuuacauaggucaaguaa

SEQ ID NO: 1230289 - RNA, 19 nt, Artificial Sequence
  Description of Artificial Sequence: Synthetic oligonucleotide
  Antisense strand to SEQ ID NO: 1230288
uuacuugaccuauguaaac

SEQ ID NO: 1230290 - RNA, 19 nt, Artificial Sequence
  Description of Artificial Sequence: Synthetic oligonucleotide
  Sense strand starting at position 3205 of SEQ ID NO: 917373
uaggucaaguaaguaaaua

SEQ ID NO: 1230291 - RNA, 19 nt, Artificial Sequence
  Description of Artificial Sequence: Synthetic oligonucleotide
  Antisense strand to SEQ ID NO: 1230290
uauuuacuuacuugaccua

SEQ ID NO: 1230292 - RNA, 19 nt, Artificial Sequence
  Description of Artificial Sequence: Synthetic oligonucleotide
  Sense strand starting at position 3287 of SEQ ID NO: 917373
accauaugcguuuauauca

SEQ ID NO: 1230293 - RNA, 19 nt, Artificial Sequence
  Description of Artificial Sequence: Synthetic oligonucleotide
  Antisense strand to SEQ ID NO: 1230292
ugauauaaacgcauauggu

SEQ ID NO: 1230294 - RNA, 19 nt, Artificial Sequence
  Description of Artificial Sequence: Synthetic oligonucleotide
  Sense strand starting at position 3346 of SEQ ID NO: 917373
uuugguuucgaaugugaaa

SEQ ID NO: 1230295 - RNA, 19 nt, Artificial Sequence
  Description of Artificial Sequence: Synthetic oligonucleotide
  Antisense strand to SEQ ID NO: 1230294
uuucacauucgaaaccaaa

SEQ ID NO: 1230296 - RNA, 19 nt, Artificial Sequence
  Description of Artificial Sequence: Synthetic oligonucleotide
  Sense strand starting at position 3348 of SEQ ID NO: 917373
ugguuucgaaugugaaaga

SEQ ID NO: 1230297 - RNA, 19 nt, Artificial Sequence
  Description of Artificial Sequence: Synthetic oligonucleotide
  Antisense strand to SEQ ID NO: 1230296
ucuuucacauucgaaacca

SEQ ID NO: 1230298 - RNA, 19 nt, Artificial Sequence
  Description of Artificial Sequence: Synthetic oligonucleotide
  Sense strand starting at position 3353 of SEQ ID NO: 917373
ucgaaugugaaagauaugu

SEQ ID NO: 1230299 - RNA, 19 nt, Artificial Sequence
  Description of Artificial Sequence: Synthetic oligonucleotide
  Antisense strand to SEQ ID NO: 1230298
acauaucuuucacauucga

SEQ ID NO: 1230300 - RNA, 19 nt, Artificial Sequence
  Description of Artificial Sequence: Synthetic oligonucleotide
  Sense strand starting at position 3357 of SEQ ID NO: 917373
augugaaagauauguuaga

SEQ ID NO: 1230301 - RNA, 19 nt, Artificial Sequence
  Description of Artificial Sequence: Synthetic oligonucleotide
  Antisense strand to SEQ ID NO: 1230300
ucuaacauaucuuucacau

SEQ ID NO: 1230302 - RNA, 19 nt, Artificial Sequence
  Description of Artificial Sequence: Synthetic oligonucleotide
  Sense strand starting at position 3358 of SEQ ID NO: 917373
ugugaaagauauguuagau

SEQ ID NO: 1230303 - RNA, 19 nt, Artificial Sequence
  Description of Artificial Sequence: Synthetic oligonucleotide
  Antisense strand to SEQ ID NO: 1230302
aucuaacauaucuuucaca

SEQ ID NO: 1230304 - RNA, 19 nt, Artificial Sequence
  Description of Artificial Sequence: Synthetic oligonucleotide
  Sense strand starting at position 3627 of SEQ ID NO: 917373
uaggaagugguauguauag

SEQ ID NO: 1230305 - RNA, 19 nt, Artificial Sequence
  Description of Artificial Sequence: Synthetic oligonucleotide
  Antisense strand to SEQ ID NO: 1230304
cuauacauaccacuuccua

SEQ ID NO: 1230306 - RNA, 19 nt, Artificial Sequence
  Description of Artificial Sequence: Synthetic oligonucleotide
  Sense strand starting at position 3629 of SEQ ID NO: 917373
ggaagugguauguauagua

SEQ ID NO: 1230307 - RNA, 19 nt, Artificial Sequence
  Description of Artificial Sequence: Synthetic oligonucleotide
  Antisense strand to SEQ ID NO: 1230306
uacuauacauaccacuucc

SEQ ID NO: 1230308 - RNA, 19 nt, Artificial Sequence
  Description of Artificial Sequence: Synthetic oligonucleotide
  Sense strand starting at position 3711 of SEQ ID NO: 917373
aaaucagaguugcugaauc

SEQ ID NO: 1230309 - RNA, 19 nt, Artificial Sequence
  Description of Artificial Sequence: Synthetic oligonucleotide
  Antisense strand to SEQ ID NO: 1230308
gauucagcaacucugauuu

SEQ ID NO: 1230310 - RNA, 19 nt, Artificial Sequence
  Description of Artificial Sequence: Synthetic oligonucleotide
  Sense strand starting at position 3713 of SEQ ID NO: 917373
aucagaguugcugaaucua

SEQ ID NO: 1230311 - RNA, 19 nt, Artificial Sequence
  Description of Artificial Sequence: Synthetic oligonucleotide
  Antisense strand to SEQ ID NO: 1230310
uagauucagcaacucugau

SEQ ID NO: 1230312 - RNA, 19 nt, Artificial Sequence
  Description of Artificial Sequence: Synthetic oligonucleotide
  Sense strand starting at position 3721 of SEQ ID NO: 917373
ugcugaaucuaauuguaau

SEQ ID NO: 1230313 - RNA, 19 nt, Artificial Sequence
  Description of Artificial Sequence: Synthetic oligonucleotide
  Antisense strand to SEQ ID NO: 1230312
auuacaauuagauucagca

SEQ ID NO: 1230314 - RNA, 19 nt, Artificial Sequence
  Description of Artificial Sequence: Synthetic oligonucleotide
  Sense strand starting at position 3786 of SEQ ID NO: 917374
uguacuucuguggaauuaa

SEQ ID NO: 1230315 - RNA, 19 nt, Artificial Sequence
  Description of Artificial Sequence: Synthetic oligonucleotide
  Antisense strand to SEQ ID NO: 1230314
uuaauuccacagaaguaca

SEQ ID NO: 1230316 - RNA, 19 nt, Artificial Sequence
  Description of Artificial Sequence: Synthetic oligonucleotide
  Sense strand starting at position 104 of SEQ ID NO: 917374
auauauaccucuguaggga

SEQ ID NO: 1230317 - RNA, 19 nt, Artificial Sequence
  Description of Artificial Sequence: Synthetic oligonucleotide
  Antisense strand to SEQ ID NO: 1230316
ucccuacagagguauauau

SEQ ID NO: 1230318 - RNA, 19 nt, Artificial Sequence
  Description of Artificial Sequence: Synthetic oligonucleotide
  Sense strand starting at position 307 of SEQ ID NO: 917374
uuaagucgauucucuaaau

SEQ ID NO: 1230319 - RNA, 19 nt, Artificial Sequence
  Description of Artificial Sequence: Synthetic oligonucleotide
  Antisense strand to SEQ ID NO: 1230318
auuuagagaaucgacuuaa

SEQ ID NO: 1230320 - RNA, 19 nt, Artificial Sequence
  Description of Artificial Sequence: Synthetic oligonucleotide
  Sense strand starting at position 357 of SEQ ID NO: 917374
caaccucaucgguaaguaa

SEQ ID NO: 1230321 - RNA, 19 nt, Artificial Sequence
  Description of Artificial Sequence: Synthetic oligonucleotide
  Antisense strand to SEQ ID NO: 1230320
uuacuuaccgaugagguug

SEQ ID NO: 1230322 - RNA, 19 nt, Artificial Sequence
  Description of Artificial Sequence: Synthetic oligonucleotide
  Sense strand starting at position 360 of SEQ ID NO: 917374
ccucaucgguaaguaaaua

SEQ ID NO: 1230323 - RNA, 19 nt, Artificial Sequence
  Description of Artificial Sequence: Synthetic oligonucleotide
  Antisense strand to SEQ ID NO: 1230322
uauuuacuuaccgaugagg

SEQ ID NO: 1230324 - RNA, 19 nt, Artificial Sequence
  Description of Artificial Sequence: Synthetic oligonucleotide
  Sense strand starting at position 368 of SEQ ID NO: 917374
guaaguaaauaggcuaauu

SEQ ID NO: 1230325 - RNA, 19 nt, Artificial Sequence
  Description of Artificial Sequence: Synthetic oligonucleotide
  Antisense strand to SEQ ID NO: 1230324
aauuagccuauuuacuuac

SEQ ID NO: 1230326 - RNA, 19 nt, Artificial Sequence
  Description of Artificial Sequence: Synthetic oligonucleotide
  Sense strand starting at position 863 of SEQ ID NO: 917374
cacuaagguucugcagaga

SEQ ID NO: 1230327 - RNA, 19 nt, Artificial Sequence
  Description of Artificial Sequence: Synthetic oligonucleotide
  Antisense strand to SEQ ID NO: 1230326
ucucugcagaaccuuagug

SEQ ID NO: 1230328 - RNA, 19 nt, Artificial Sequence
  Description of Artificial Sequence: Synthetic oligonucleotide
  Sense strand starting at position 1022 of SEQ ID NO: 917374
cucugugcgcagcauuuaa

SEQ ID NO: 1230329 - RNA, 19 nt, Artificial Sequence
  Description of Artificial Sequence: Synthetic oligonucleotide
  Antisense strand to SEQ ID NO: 1230328
uuaaaugcugcgcacagag

SEQ ID NO: 1230330 - RNA, 19 nt, Artificial Sequence
  Description of Artificial Sequence: Synthetic oligonucleotide
  Sense strand starting at position 1662 of SEQ ID NO: 917374
cggccuuucccggcugaau

SEQ ID NO: 1230331 - RNA, 19 nt, Artificial Sequence
  Description of Artificial Sequence: Synthetic oligonucleotide
  Antisense strand to SEQ ID NO: 1230330
auucagccgggaaaggccg

SEQ ID NO: 1230332 - RNA, 19 nt, Artificial Sequence
  Description of Artificial Sequence: Synthetic oligonucleotide
  Sense strand starting at position 2166 of SEQ ID NO: 917374
ggagauauuuagggagaca

SEQ ID NO: 1230333 - RNA, 19 nt, Artificial Sequence
  Description of Artificial Sequence: Synthetic oligonucleotide
  Antisense strand to SEQ ID NO: 1230332
ugucucccuaaauaucucc

SEQ ID NO: 1230334 - RNA, 19 nt, Artificial Sequence
  Description of Artificial Sequence: Synthetic oligonucleotide
  Sense strand starting at position 2244 of SEQ ID NO: 917374
ggucaauggaggugagaua

SEQ ID NO: 1230335 - RNA, 19 nt, Artificial Sequence
  Description of Artificial Sequence: Synthetic oligonucleotide
  Antisense strand to SEQ ID NO: 1230334
uaucucaccuccauugacc

SEQ ID NO: 1230336 - RNA, 19 nt, Artificial Sequence
  Description of Artificial Sequence: Synthetic oligonucleotide
  Sense strand starting at position 2848 of SEQ ID NO: 917374
ccaagaauagcauggugga

SEQ ID NO: 1230337 - RNA, 19 nt, Artificial Sequence
  Description of Artificial Sequence: Synthetic oligonucleotide
  Antisense strand to SEQ ID NO: 1230336
uccaccaugcuauucuugg

SEQ ID NO: 1230338 - RNA, 19 nt, Artificial Sequence
  Description of Artificial Sequence: Synthetic oligonucleotide
  Sense strand starting at position 2993 of SEQ ID NO: 917374
gagguaagaaccugguguu

SEQ ID NO: 1230339 - RNA, 19 nt, Artificial Sequence
  Description of Artificial Sequence: Synthetic oligonucleotide
  Antisense strand to SEQ ID NO: 1230338
aacaccagguucuuaccuc

SEQ ID NO: 1230340 - RNA, 19 nt, Artificial Sequence
  Description of Artificial Sequence: Synthetic oligonucleotide
  Sense strand starting at position 2994 of SEQ ID NO: 917374
agguaagaaccugguguuu

SEQ ID NO: 1230341 - RNA, 19 nt, Artificial Sequence
  Description of Artificial Sequence: Synthetic oligonucleotide
  Antisense strand to SEQ ID NO: 1230340
aaacaccagguucuuaccu

SEQ ID NO: 1230342 - RNA, 19 nt, Artificial Sequence
  Description of Artificial Sequence: Synthetic oligonucleotide
  Sense strand starting at position 3021 of SEQ ID NO: 917374
cuguguugggaagauauug

SEQ ID NO: 1230343 - RNA, 19 nt, Artificial Sequence
  Description of Artificial Sequence: Synthetic oligonucleotide
  Antisense strand to SEQ ID NO: 1230342
caauaucuucccaacacag

SEQ ID NO: 1230344 - RNA, 19 nt, Artificial Sequence
  Description of Artificial Sequence: Synthetic oligonucleotide
  Sense strand starting at position 3185 of SEQ ID NO: 917374
gcacguuugcagucuggau

SEQ ID NO: 1230345 - RNA, 19 nt, Artificial Sequence
  Description of Artificial Sequence: Synthetic oligonucleotide
  Antisense strand to SEQ ID NO: 1230344
auccagacugcaaacgugc

SEQ ID NO: 1230346 - RNA, 19 nt, Artificial Sequence
  Description of Artificial Sequence: Synthetic oligonucleotide
  Sense strand starting at position 3264 of SEQ ID NO: 917374
agguuugggcugagcgauu

SEQ ID NO: 1230347 - RNA, 19 nt, Artificial Sequence
  Description of Artificial Sequence: Synthetic oligonucleotide
  Antisense strand to SEQ ID NO: 1230346
aaucgcucagcccaaaccu

SEQ ID NO: 1230348 - RNA, 19 nt, Artificial Sequence
  Description of Artificial Sequence: Synthetic oligonucleotide
  Sense strand starting at position 3348 of SEQ ID NO: 917374
gcaaauuugaggugucugu

SEQ ID NO: 1230349 - RNA, 19 nt, Artificial Sequence
  Description of Artificial Sequence: Synthetic oligonucleotide
  Antisense strand to SEQ ID NO: 1230348
acagacaccucaaauuugc

SEQ ID NO: 1230350 - RNA, 19 nt, Artificial Sequence
  Description of Artificial Sequence: Synthetic oligonucleotide
  Sense strand starting at position 3408 of SEQ ID NO: 917374
gggacucacaguggagauu

SEQ ID NO: 1230351 - RNA, 19 nt, Artificial Sequence
  Description of Artificial Sequence: Synthetic oligonucleotide
  Antisense strand to SEQ ID NO: 1230350
aaucuccacugugaguccc

SEQ ID NO: 1230352 - RNA, 19 nt, Artificial Sequence
  Description of Artificial Sequence: Synthetic oligonucleotide
  Sense strand starting at position 3420 of SEQ ID NO: 917374
ggagauucaggugguaaca

SEQ ID NO: 1230353 - RNA, 19 nt, Artificial Sequence
  Description of Artificial Sequence: Synthetic oligonucleotide
  Antisense strand to SEQ ID NO: 1230352
uguuaccaccugaaucucc

SEQ ID NO: 1230354 - RNA, 19 nt, Artificial Sequence
  Description of Artificial Sequence: Synthetic oligonucleotide
  Sense strand starting at position 3429 of SEQ ID NO: 917374
ggugguaacagaugaaaug

SEQ ID NO: 1230355 - RNA, 19 nt, Artificial Sequence
  Description of Artificial Sequence: Synthetic oligonucleotide
  Antisense strand to SEQ ID NO: 1230354
cauuucaucuguuaccacc

SEQ ID NO: 1230356 - RNA, 19 nt, Artificial Sequence
  Description of Artificial Sequence: Synthetic oligonucleotide
  Sense strand starting at position 3449 of SEQ ID NO: 917374
cagcauugucagcauauag

SEQ ID NO: 1230357 - RNA, 19 nt, Artificial Sequence
  Description of Artificial Sequence: Synthetic oligonucleotide
  Antisense strand to SEQ ID NO: 1230356
cuauaugcugacaaugcug

SEQ ID NO: 1230358 - RNA, 19 nt, Artificial Sequence
  Description of Artificial Sequence: Synthetic oligonucleotide
  Sense strand starting at position 3463 of SEQ ID NO: 917374
uauagauauuguucgauug

SEQ ID NO: 1230359 - RNA, 19 nt, Artificial Sequence
  Description of Artificial Sequence: Synthetic oligonucleotide
  Antisense strand to SEQ ID NO: 1230358
caaucgaacaauaucuaua

SEQ ID NO: 1230360 - RNA, 19 nt, Artificial Sequence
  Description of Artificial Sequence: Synthetic oligonucleotide
  Sense strand starting at position 3464 of SEQ ID NO: 917374
auagauauuguucgauuga

SEQ ID NO: 1230361 - RNA, 19 nt, Artificial Sequence
  Description of Artificial Sequence: Synthetic oligonucleotide
  Antisense strand to SEQ ID NO: 1230360
ucaaucgaacaauaucuau

SEQ ID NO: 1230362 - RNA, 19 nt, Artificial Sequence
  Description of Artificial Sequence: Synthetic oligonucleotide
  Sense strand starting at position 3563 of SEQ ID NO: 917374
agcugacacccuugauuaa

SEQ ID NO: 1230363 - RNA, 19 nt, Artificial Sequence
  Description of Artificial Sequence: Synthetic oligonucleotide
  Antisense strand to SEQ ID NO: 1230362
uuaaucaagggugucagcu

SEQ ID NO: 1230364 - RNA, 19 nt, Artificial Sequence
  Description of Artificial Sequence: Synthetic oligonucleotide
  Sense strand starting at position 3646 of SEQ ID NO: 917374
aaaguuuaucuuuagugag

SEQ ID NO: 1230365 - RNA, 19 nt, Artificial Sequence
  Description of Artificial Sequence: Synthetic oligonucleotide
  Antisense strand to SEQ ID NO: 1230364
cucacuaaagauaaacuuu

SEQ ID NO: 1230366 - RNA, 19 nt, Artificial Sequence
  Description of Artificial Sequence: Synthetic oligonucleotide
  Sense strand starting at position 3654 of SEQ ID NO: 917374
ucuuuagugagugaguuaa

SEQ ID NO: 1230367 - RNA, 19 nt, Artificial Sequence
  Description of Artificial Sequence: Synthetic oligonucleotide
  Antisense strand to SEQ ID NO: 1230366
uuaacucacucacuaaaga

SEQ ID NO: 1230368 - RNA, 19 nt, Artificial Sequence
  Description of Artificial Sequence: Synthetic oligonucleotide
  Sense strand starting at position 3683 of SEQ ID NO: 917374
aagccagaaguugauugua

SEQ ID NO: 1230369 - RNA, 19 nt, Artificial Sequence
  Description of Artificial Sequence: Synthetic oligonucleotide
  Antisense strand to SEQ ID NO: 1230368
uacaaucaacuucuggcuu

SEQ ID NO: 1230370 - RNA, 19 nt, Artificial Sequence
  Description of Artificial Sequence: Synthetic oligonucleotide
  Sense strand starting at position 3685 of SEQ ID NO: 917374
gccagaaguugauuguaua

SEQ ID NO: 1230371 - RNA, 19 nt, Artificial Sequence
  Description of Artificial Sequence: Synthetic oligonucleotide
  Antisense strand to SEQ ID NO: 1230370
uauacaaucaacuucuggc

SEQ ID NO: 1230372 - RNA, 19 nt, Artificial Sequence
  Description of Artificial Sequence: Synthetic oligonucleotide
  Sense strand starting at position 3686 of SEQ ID NO: 917374
ccagaaguugauuguauag

SEQ ID NO: 1230373 - RNA, 19 nt, Artificial Sequence
  Description of Artificial Sequence: Synthetic oligonucleotide
  Antisense strand to SEQ ID NO: 1230372
cuauacaaucaacuucugg

SEQ ID NO: 1230374 - RNA, 19 nt, Artificial Sequence
  Description of Artificial Sequence: Synthetic oligonucleotide
  Sense strand starting at position 3705 of SEQ ID NO: 917374
gauagcucuugggugaauu

SEQ ID NO: 1230375 - RNA, 19 nt, Artificial Sequence
  Description of Artificial Sequence: Synthetic oligonucleotide
  Antisense strand to SEQ ID NO: 1230374
aauucacccaagagcuauc

SEQ ID NO: 1230376 - RNA, 19 nt, Artificial Sequence
  Description of Artificial Sequence: Synthetic oligonucleotide
  Sense strand starting at position 3706 of SEQ ID NO: 917374
auagcucuugggugaauug

SEQ ID NO: 1230377 - RNA, 19 nt, Artificial Sequence
  Description of Artificial Sequence: Synthetic oligonucleotide
  Antisense strand to SEQ ID NO: 1230376
caauucacccaagagcuau

SEQ ID NO: 1230378 - RNA, 19 nt, Artificial Sequence
  Description of Artificial Sequence: Synthetic oligonucleotide
  Sense strand starting at position 3787 of SEQ ID NO: 917374
guauucccacauggaaauu

SEQ ID NO: 1230379 - RNA, 19 nt, Artificial Sequence
  Description of Artificial Sequence: Synthetic oligonucleotide
  Antisense strand to SEQ ID NO: 1230378
aauuuccaugugggaauac

SEQ ID NO: 1230380 - RNA, 19 nt, Artificial Sequence
  Description of Artificial Sequence: Synthetic oligonucleotide
  Sense strand starting at position 3815 of SEQ ID NO: 917374
aauacuucugcuggauagu

SEQ ID NO: 1230381 - RNA, 19 nt, Artificial Sequence
  Description of Artificial Sequence: Synthetic oligonucleotide
  Antisense strand to SEQ ID NO: 1230380
acuauccagcagaaguauu

SEQ ID NO: 1230382 - RNA, 19 nt, Artificial Sequence
  Description of Artificial Sequence: Synthetic oligonucleotide
  Sense strand starting at position 3816 of SEQ ID NO: 917374
auacuucugcuggauaguu

SEQ ID NO: 1230383 - RNA, 19 nt, Artificial Sequence
  Description of Artificial Sequence: Synthetic oligonucleotide
  Antisense strand to SEQ ID NO: 1230382
aacuauccagcagaaguau

SEQ ID NO: 1230384 - RNA, 19 nt, Artificial Sequence
  Description of Artificial Sequence: Synthetic oligonucleotide
  Sense strand starting at position 3818 of SEQ ID NO: 917374
acuucugcuggauaguuua

SEQ ID NO: 1230385 - RNA, 19 nt, Artificial Sequence
  Description of Artificial Sequence: Synthetic oligonucleotide
  Antisense strand to SEQ ID NO: 1230384
uaaacuauccagcagaagu

SEQ ID NO: 1230386 - RNA, 19 nt, Artificial Sequence
  Description of Artificial Sequence: Synthetic oligonucleotide
  Sense strand starting at position 3885 of SEQ ID NO: 917374
acauucgaucaauaagugu

SEQ ID NO: 1230387 - RNA, 19 nt, Artificial Sequence
  Description of Artificial Sequence: Synthetic oligonucleotide
  Antisense strand to SEQ ID NO: 1230386
acacuuauugaucgaaugu

SEQ ID NO: 1230388 - RNA, 19 nt, Artificial Sequence
  Description of Artificial Sequence: Synthetic oligonucleotide
  Sense strand starting at position 3888 of SEQ ID NO: 917374
uucgaucaauaaguguuaa

SEQ ID NO: 1230389 - RNA, 19 nt, Artificial Sequence
  Description of Artificial Sequence: Synthetic oligonucleotide
  Antisense strand to SEQ ID NO: 1230388
uuaacacuuauugaucgaa

SEQ ID NO: 1230390 - RNA, 19 nt, Artificial Sequence
  Description of Artificial Sequence: Synthetic oligonucleotide
  Sense strand starting at position 3915 of SEQ ID NO: 917374
auccuauaugccugacaug

SEQ ID NO: 1230391 - RNA, 19 nt, Artificial Sequence
  Description of Artificial Sequence: Synthetic oligonucleotide
  Antisense strand to SEQ ID NO: 1230390
caugucaggcauauaggau

SEQ ID NO: 1230392 - RNA, 19 nt, Artificial Sequence
  Description of Artificial Sequence: Synthetic oligonucleotide
  Sense strand starting at position 3924 of SEQ ID NO: 917374
gccugacauggguaucuga

SEQ ID NO: 1230393 - RNA, 19 nt, Artificial Sequence
  Description of Artificial Sequence: Synthetic oligonucleotide
  Antisense strand to SEQ ID NO: 1230392
ucagauacccaugucaggc

SEQ ID NO: 1230394 - RNA, 19 nt, Artificial Sequence
  Description of Artificial Sequence: Synthetic oligonucleotide
  Sense strand starting at position 3931 of SEQ ID NO: 917374
auggguaucugagcuacaa

SEQ ID NO: 1230395 - RNA, 19 nt, Artificial Sequence
  Description of Artificial Sequence: Synthetic oligonucleotide
  Antisense strand to SEQ ID NO: 1230394
uuguagcucagauacccau

SEQ ID NO: 1230396 - RNA, 19 nt, Artificial Sequence
  Description of Artificial Sequence: Synthetic oligonucleotide
  Sense strand starting at position 3931 of SEQ ID NO: 917375
auggguaucugagcuacaa

SEQ ID NO: 1230397 - RNA, 19 nt, Artificial Sequence
  Description of Artificial Sequence: Synthetic oligonucleotide
  Antisense strand to SEQ ID NO: 1230396
uuguagcucagauacccau

SEQ ID NO: 1230398 - RNA, 19 nt, Artificial Sequence
  Description of Artificial Sequence: Synthetic oligonucleotide
  Sense strand starting at position 2465 of SEQ ID NO: 917375
ggagguggugcgugugaga

SEQ ID NO: 1230399 - RNA, 19 nt, Artificial Sequence
  Description of Artificial Sequence: Synthetic oligonucleotide
  Antisense strand to SEQ ID NO: 1230398
ucucacacgcaccaccucc

SEQ ID NO: 1230400 - RNA, 19 nt, Artificial Sequence
  Description of Artificial Sequence: Synthetic oligonucleotide
  Sense strand starting at position 2611 of SEQ ID NO: 917375
ugguuugcauccuuguguu

SEQ ID NO: 1230401 - RNA, 19 nt, Artificial Sequence
  Description of Artificial Sequence: Synthetic oligonucleotide
  Antisense strand to SEQ ID NO: 1230400
aacacaaggaugcaaacca

SEQ ID NO: 1230402 - RNA, 19 nt, Artificial Sequence
  Description of Artificial Sequence: Synthetic oligonucleotide
  Sense strand starting at position 3102 of SEQ ID NO: 917375
uuugaugacucugacacuu

SEQ ID NO: 1230403 - RNA, 19 nt, Artificial Sequence
  Description of Artificial Sequence: Synthetic oligonucleotide
  Antisense strand to SEQ ID NO: 1230402
aagugucagagucaucaaa

SEQ ID NO: 1230404 - RNA, 19 nt, Artificial Sequence
  Description of Artificial Sequence: Synthetic oligonucleotide
  Sense strand starting at position 3668 of SEQ ID NO: 917375
agguaauuacuuuguuacu

SEQ ID NO: 1230405 - RNA, 19 nt, Artificial Sequence
  Description of Artificial Sequence: Synthetic oligonucleotide
  Antisense strand to SEQ ID NO: 1230404
aguaacaaaguaauuaccu

SEQ ID NO: 1230406 - RNA, 19 nt, Artificial Sequence
  Description of Artificial Sequence: Synthetic oligonucleotide
  Sense strand starting at position 3669 of SEQ ID NO: 917375
gguaauuacuuuguuacuc

SEQ ID NO: 1230407 - RNA, 19 nt, Artificial Sequence
  Description of Artificial Sequence: Synthetic oligonucleotide
  Antisense strand to SEQ ID NO: 1230406
gaguaacaaaguaauuacc

SEQ ID NO: 1230408 - RNA, 19 nt, Artificial Sequence
  Description of Artificial Sequence: Synthetic oligonucleotide
  Sense strand starting at position 3670 of SEQ ID NO: 917375
guaauuacuuuguuacuca

SEQ ID NO: 1230409 - RNA, 19 nt, Artificial Sequence
  Description of Artificial Sequence: Synthetic oligonucleotide
  Antisense strand to SEQ ID NO: 1230408
ugaguaacaaaguaauuac

SEQ ID NO: 1230410 - RNA, 19 nt, Artificial Sequence
  Description of Artificial Sequence: Synthetic oligonucleotide
  Sense strand starting at position 3674 of SEQ ID NO: 917375
uuacuuuguuacucaaugu

SEQ ID NO: 1230411 - RNA, 19 nt, Artificial Sequence
  Description of Artificial Sequence: Synthetic oligonucleotide
  Antisense strand to SEQ ID NO: 1230410
acauugaguaacaaaguaa

SEQ ID NO: 1230412 - RNA, 19 nt, Artificial Sequence
  Description of Artificial Sequence: Synthetic oligonucleotide
  Sense strand starting at position 3804 of SEQ ID NO: 917375
cucauaagugggcgucgaa

SEQ ID NO: 1230413 - RNA, 19 nt, Artificial Sequence
  Description of Artificial Sequence: Synthetic oligonucleotide
  Antisense strand to SEQ ID NO: 1230412
uucgacgcccacuuaugag

SEQ ID NO: 1230414 - RNA, 19 nt, Artificial Sequence
  Description of Artificial Sequence: Synthetic oligonucleotide
  Sense strand starting at position 3807 of SEQ ID NO: 917375
auaagugggcgucgaacaa

SEQ ID NO: 1230415 - RNA, 19 nt, Artificial Sequence
  Description of Artificial Sequence: Synthetic oligonucleotide
  Antisense strand to SEQ ID NO: 1230414
uuguucgacgcccacuuau

SEQ ID NO: 1230416 - RNA, 19 nt, Artificial Sequence
  Description of Artificial Sequence: Synthetic oligonucleotide
  Sense strand starting at position 3814 of SEQ ID NO: 917375
ggcgucgaacaaugugaau

SEQ ID NO: 1230417 - RNA, 19 nt, Artificial Sequence
  Description of Artificial Sequence: Synthetic oligonucleotide
  Antisense strand to SEQ ID NO: 1230416
auucacauuguucgacgcc

SEQ ID NO: 1230418 - RNA, 19 nt, Artificial Sequence
  Description of Artificial Sequence: Synthetic oligonucleotide
  Sense strand starting at position 3816 of SEQ ID NO: 917375
cgucgaacaaugugaauac

SEQ ID NO: 1230419 - RNA, 19 nt, Artificial Sequence
  Description of Artificial Sequence: Synthetic oligonucleotide
  Antisense strand to SEQ ID NO: 1230418
guauucacauuguucgacg

SEQ ID NO: 1230420 - RNA, 19 nt, Artificial Sequence
  Description of Artificial Sequence: Synthetic oligonucleotide
  Sense strand starting at position 3817 of SEQ ID NO: 917375
gucgaacaaugugaauaca

SEQ ID NO: 1230421 - RNA, 19 nt, Artificial Sequence
  Description of Artificial Sequence: Synthetic oligonucleotide
  Antisense strand to SEQ ID NO: 1230420
uguauucacauuguucgac

SEQ ID NO: 1230422 - RNA, 19 nt, Artificial Sequence
  Description of Artificial Sequence: Synthetic oligonucleotide
  Sense strand starting at position 3894 of SEQ ID NO: 917375
gagggagacuauuaggaga

SEQ ID NO: 1230423 - RNA, 19 nt, Artificial Sequence
  Description of Artificial Sequence: Synthetic oligonucleotide
  Antisense strand to SEQ ID NO: 1230422
ucuccuaauagucucccuc

SEQ ID NO: 1230424 - RNA, 19 nt, Artificial Sequence
  Description of Artificial Sequence: Synthetic oligonucleotide
  Sense strand starting at position 3896 of SEQ ID NO: 917375
gggagacuauuaggagaaa

SEQ ID NO: 1230425 - RNA, 19 nt, Artificial Sequence
  Description of Artificial Sequence: Synthetic oligonucleotide
  Antisense strand to SEQ ID NO: 1230424
uuucuccuaauagucuccc

SEQ ID NO: 1230426 - RNA, 19 nt, Artificial Sequence
  Description of Artificial Sequence: Synthetic oligonucleotide
  Sense strand starting at position 3897 of SEQ ID NO: 917380
ggagacuauuaggagaaau

SEQ ID NO: 1230427 - RNA, 19 nt, Artificial Sequence
  Description of Artificial Sequence: Synthetic oligonucleotide
  Antisense strand to SEQ ID NO: 1230426
auuucuccuaauagucucc

SEQ ID NO: 1230428 - RNA, 19 nt, Artificial Sequence
  Description of Artificial Sequence: Synthetic oligonucleotide
  Sense strand starting at position 2465 of SEQ ID NO: 917380
ggagguggugcgugugaga

SEQ ID NO: 1230429 - RNA, 19 nt, Artificial Sequence
  Description of Artificial Sequence: Synthetic oligonucleotide
  Antisense strand to SEQ ID NO: 1230428
ucucacacgcaccaccucc

SEQ ID NO: 1230430 - RNA, 19 nt, Artificial Sequence
  Description of Artificial Sequence: Synthetic oligonucleotide
  Sense strand starting at position 2611 of SEQ ID NO: 917380
ugguuugcauccuuguguu

SEQ ID NO: 1230431 - RNA, 19 nt, Artificial Sequence
  Description of Artificial Sequence: Synthetic oligonucleotide
  Antisense strand to SEQ ID NO: 1230430
aacacaaggaugcaaacca

SEQ ID NO: 1230432 - RNA, 19 nt, Artificial Sequence
  Description of Artificial Sequence: Synthetic oligonucleotide
  Sense strand starting at position 3102 of SEQ ID NO: 917380
uuugaugacucugacacuu

SEQ ID NO: 1230433 - RNA, 19 nt, Artificial Sequence
  Description of Artificial Sequence: Synthetic oligonucleotide
  Antisense strand to SEQ ID NO: 1230432
aagugucagagucaucaaa

SEQ ID NO: 1230434 - RNA, 19 nt, Artificial Sequence
  Description of Artificial Sequence: Synthetic oligonucleotide
  Sense strand starting at position 3668 of SEQ ID NO: 917380
agguaauuacuuuguuacu

SEQ ID NO: 1230435 - RNA, 19 nt, Artificial Sequence
  Description of Artificial Sequence: Synthetic oligonucleotide
  Antisense strand to SEQ ID NO: 1230434
aguaacaaaguaauuaccu

SEQ ID NO: 1230436 - RNA, 19 nt, Artificial Sequence
  Description of Artificial Sequence: Synthetic oligonucleotide
  Sense strand starting at position 3669 of SEQ ID NO: 917380
gguaauuacuuuguuacuc

SEQ ID NO: 1230437 - RNA, 19 nt, Artificial Sequence
  Description of Artificial Sequence: Synthetic oligonucleotide
  Antisense strand to SEQ ID NO: 1230436
gaguaacaaaguaauuacc

SEQ ID NO: 1230438 - RNA, 19 nt, Artificial Sequence
  Description of Artificial Sequence: Synthetic oligonucleotide
  Sense strand starting at position 3670 of SEQ ID NO: 917380
guaauuacuuuguuacuca

SEQ ID NO: 1230439 - RNA, 19 nt, Artificial Sequence
  Description of Artificial Sequence: Synthetic oligonucleotide
  Antisense strand to SEQ ID NO: 1230438
ugaguaacaaaguaauuac

SEQ ID NO: 1230440 - RNA, 19 nt, Artificial Sequence
  Description of Artificial Sequence: Synthetic oligonucleotide
  Sense strand starting at position 3674 of SEQ ID NO: 917380
uuacuuuguuacucaaugu

SEQ ID NO: 1230441 - RNA, 19 nt, Artificial Sequence
  Description of Artificial Sequence: Synthetic oligonucleotide
  Antisense strand to SEQ ID NO: 1230440
acauugaguaacaaaguaa

SEQ ID NO: 1230442 - RNA, 19 nt, Artificial Sequence
  Description of Artificial Sequence: Synthetic oligonucleotide
  Sense strand starting at position 3804 of SEQ ID NO: 917380
cucauaagugggcgucgaa

SEQ ID NO: 1230443 - RNA, 19 nt, Artificial Sequence
  Description of Artificial Sequence: Synthetic oligonucleotide
  Antisense strand to SEQ ID NO: 1230442
uucgacgcccacuuaugag

SEQ ID NO: 1230444 - RNA, 19 nt, Artificial Sequence
  Description of Artificial Sequence: Synthetic oligonucleotide
  Sense strand starting at position 3807 of SEQ ID NO: 917380
auaagugggcgucgaacaa

SEQ ID NO: 1230445 - RNA, 19 nt, Artificial Sequence
  Description of Artificial Sequence: Synthetic oligonucleotide
  Antisense strand to SEQ ID NO: 1230444
uuguucgacgcccacuuau

SEQ ID NO: 1230446 - RNA, 19 nt, Artificial Sequence
  Description of Artificial Sequence: Synthetic oligonucleotide
  Sense strand starting at position 3814 of SEQ ID NO: 917380
ggcgucgaacaaugugaau

SEQ ID NO: 1230447 - RNA, 19 nt, Artificial Sequence
  Description of Artificial Sequence: Synthetic oligonucleotide
  Antisense strand to SEQ ID NO: 1230446
auucacauuguucgacgcc

SEQ ID NO: 1230448 - RNA, 19 nt, Artificial Sequence
  Description of Artificial Sequence: Synthetic oligonucleotide
  Sense strand starting at position 3816 of SEQ ID NO: 917380
cgucgaacaaugugaauac

SEQ ID NO: 1230449 - RNA, 19 nt, Artificial Sequence
  Description of Artificial Sequence: Synthetic oligonucleotide
  Antisense strand to SEQ ID NO: 1230448
guauucacauuguucgacg

SEQ ID NO: 1230450 - RNA, 19 nt, Artificial Sequence
  Description of Artificial Sequence: Synthetic oligonucleotide
  Sense strand starting at position 3817 of SEQ ID NO: 917380
gucgaacaaugugaauaca

SEQ ID NO: 1230451 - RNA, 19 nt, Artificial Sequence
  Description of Artificial Sequence: Synthetic oligonucleotide
  Antisense strand to SEQ ID NO: 1230450
uguauucacauuguucgac

SEQ ID NO: 1230452 - RNA, 19 nt, Artificial Sequence
  Description of Artificial Sequence: Synthetic oligonucleotide
  Sense strand starting at position 3894 of SEQ ID NO: 917380
gagggagacuauuaggaga

SEQ ID NO: 1230453 - RNA, 19 nt, Artificial Sequence
  Description of Artificial Sequence: Synthetic oligonucleotide
  Antisense strand to SEQ ID NO: 1230452
ucuccuaauagucucccuc

SEQ ID NO: 1230454 - RNA, 19 nt, Artificial Sequence
  Description of Artificial Sequence: Synthetic oligonucleotide
  Sense strand starting at position 3896 of SEQ ID NO: 917380
gggagacuauuaggagaaa

SEQ ID NO: 1230455 - RNA, 19 nt, Artificial Sequence
  Description of Artificial Sequence: Synthetic oligonucleotide
  Antisense strand to SEQ ID NO: 1230454
uuucuccuaauagucuccc

SEQ ID NO: 1230456 - RNA, 19 nt, Artificial Sequence
  Description of Artificial Sequence: Synthetic oligonucleotide
  Sense strand starting at position 3897 of SEQ ID NO: 917385
ggagacuauuaggagaaau

SEQ ID NO: 1230457 - RNA, 19 nt, Artificial Sequence
  Description of Artificial Sequence: Synthetic oligonucleotide
  Antisense strand to SEQ ID NO: 1230456
auuucuccuaauagucucc

SEQ ID NO: 1230458 - RNA, 19 nt, Artificial Sequence
  Description of Artificial Sequence: Synthetic oligonucleotide
  Sense strand starting at position 2465 of SEQ ID NO: 917385
ggagguggugcgugugaga

SEQ ID NO: 1230459 - RNA, 19 nt, Artificial Sequence
  Description of Artificial Sequence: Synthetic oligonucleotide
  Antisense strand to SEQ ID NO: 1230458
ucucacacgcaccaccucc

SEQ ID NO: 1230460 - RNA, 19 nt, Artificial Sequence
  Description of Artificial Sequence: Synthetic oligonucleotide
  Sense strand starting at position 2611 of SEQ ID NO: 917385
ugguuugcauccuuguguu

SEQ ID NO: 1230461 - RNA, 19 nt, Artificial Sequence
  Description of Artificial Sequence: Synthetic oligonucleotide
  Antisense strand to SEQ ID NO: 1230460
aacacaaggaugcaaacca

SEQ ID NO: 1230462 - RNA, 19 nt, Artificial Sequence
  Description of Artificial Sequence: Synthetic oligonucleotide
  Sense strand starting at position 3102 of SEQ ID NO: 917385
uuugaugacucugacacuu

SEQ ID NO: 1230463 - RNA, 19 nt, Artificial Sequence
  Description of Artificial Sequence: Synthetic oligonucleotide
  Antisense strand to SEQ ID NO: 1230462
aagugucagagucaucaaa

SEQ ID NO: 1230464 - RNA, 19 nt, Artificial Sequence
  Description of Artificial Sequence: Synthetic oligonucleotide
  Sense strand starting at position 3668 of SEQ ID NO: 917385
agguaauuacuuuguuacu

SEQ ID NO: 1230465 - RNA, 19 nt, Artificial Sequence
  Description of Artificial Sequence: Synthetic oligonucleotide
  Antisense strand to SEQ ID NO: 1230464
aguaacaaaguaauuaccu

SEQ ID NO: 1230466 - RNA, 19 nt, Artificial Sequence
  Description of Artificial Sequence: Synthetic oligonucleotide
  Sense strand starting at position 3669 of SEQ ID NO: 917385
gguaauuacuuuguuacuc

SEQ ID NO: 1230467 - RNA, 19 nt, Artificial Sequence
  Description of Artificial Sequence: Synthetic oligonucleotide
  Antisense strand to SEQ ID NO: 1230466
gaguaacaaaguaauuacc

SEQ ID NO: 1230468 - RNA, 19 nt, Artificial Sequence
  Description of Artificial Sequence: Synthetic oligonucleotide
  Sense strand starting at position 3670 of SEQ ID NO: 917385
guaauuacuuuguuacuca

SEQ ID NO: 1230469 - RNA, 19 nt, Artificial Sequence
  Description of Artificial Sequence: Synthetic oligonucleotide
  Antisense strand to SEQ ID NO: 1230468
ugaguaacaaaguaauuac

SEQ ID NO: 1230470 - RNA, 19 nt, Artificial Sequence
  Description of Artificial Sequence: Synthetic oligonucleotide
  Sense strand starting at position 3674 of SEQ ID NO: 917385
uuacuuuguuacucaaugu

SEQ ID NO: 1230471 - RNA, 19 nt, Artificial Sequence
  Description of Artificial Sequence: Synthetic oligonucleotide
  Antisense strand to SEQ ID NO: 1230470
acauugaguaacaaaguaa

SEQ ID NO: 1230472 - RNA, 19 nt, Artificial Sequence
  Description of Artificial Sequence: Synthetic oligonucleotide
  Sense strand starting at position 3804 of SEQ ID NO: 917385
cucauaagugggcgucgaa

SEQ ID NO: 1230473 - RNA, 19 nt, Artificial Sequence
  Description of Artificial Sequence: Synthetic oligonucleotide
  Antisense strand to SEQ ID NO: 1230472
uucgacgcccacuuaugag

SEQ ID NO: 1230474 - RNA, 19 nt, Artificial Sequence
  Description of Artificial Sequence: Synthetic oligonucleotide
  Sense strand starting at position 3807 of SEQ ID NO: 917385
auaagugggcgucgaacaa

SEQ ID NO: 1230475 - RNA, 19 nt, Artificial Sequence
  Description of Artificial Sequence: Synthetic oligonucleotide
  Antisense strand to SEQ ID NO: 1230474
uuguucgacgcccacuuau

SEQ ID NO: 1230476 - RNA, 19 nt, Artificial Sequence
  Description of Artificial Sequence: Synthetic oligonucleotide
  Sense strand starting at position 3814 of SEQ ID NO: 917385
ggcgucgaacaaugugaau

SEQ ID NO: 1230477 - RNA, 19 nt, Artificial Sequence
  Description of Artificial Sequence: Synthetic oligonucleotide
  Antisense strand to SEQ ID NO: 1230476
auucacauuguucgacgcc

SEQ ID NO: 1230478 - RNA, 19 nt, Artificial Sequence
  Description of Artificial Sequence: Synthetic oligonucleotide
  Sense strand starting at position 3816 of SEQ ID NO: 917385
cgucgaacaaugugaauac

SEQ ID NO: 1230479 - RNA, 19 nt, Artificial Sequence
  Description of Artificial Sequence: Synthetic oligonucleotide
  Antisense strand to SEQ ID NO: 1230478
guauucacauuguucgacg

SEQ ID NO: 1230480 - RNA, 19 nt, Artificial Sequence
  Description of Artificial Sequence: Synthetic oligonucleotide
  Sense strand starting at position 3817 of SEQ ID NO: 917385
gucgaacaaugugaauaca

SEQ ID NO: 1230481 - RNA, 19 nt, Artificial Sequence
  Description of Artificial Sequence: Synthetic oligonucleotide
  Antisense strand to SEQ ID NO: 1230480
uguauucacauuguucgac

SEQ ID NO: 1230482 - RNA, 19 nt, Artificial Sequence
  Description of Artificial Sequence: Synthetic oligonucleotide
  Sense strand starting at position 3894 of SEQ ID NO: 917385
gagggagacuauuaggaga

SEQ ID NO: 1230483 - RNA, 19 nt, Artificial Sequence
  Description of Artificial Sequence: Synthetic oligonucleotide
  Antisense strand to SEQ ID NO: 1230482
ucuccuaauagucucccuc

SEQ ID NO: 1230484 - RNA, 19 nt, Artificial Sequence
  Description of Artificial Sequence: Synthetic oligonucleotide
  Sense strand starting at position 3896 of SEQ ID NO: 917385
gggagacuauuaggagaaa

SEQ ID NO: 1230485 - RNA, 19 nt, Artificial Sequence
  Description of Artificial Sequence: Synthetic oligonucleotide
  Antisense strand to SEQ ID NO: 1230484
uuucuccuaauagucuccc

SEQ ID NO: 1230486 - RNA, 19 nt, Artificial Sequence
  Description of Artificial Sequence: Synthetic oligonucleotide
  Sense strand starting at position 3897 of SEQ ID NO: 917390
ggagacuauuaggagaaau

SEQ ID NO: 1230487 - RNA, 19 nt, Artificial Sequence
  Description of Artificial Sequence: Synthetic oligonucleotide
  Antisense strand to SEQ ID NO: 1230486
auuucuccuaauagucucc

SEQ ID NO: 1230488 - RNA, 19 nt, Artificial Sequence
  Description of Artificial Sequence: Synthetic oligonucleotide
  Sense strand starting at position 2465 of SEQ ID NO: 917390
ggagguggugcgugugaga

SEQ ID NO: 1230489 - RNA, 19 nt, Artificial Sequence
  Description of Artificial Sequence: Synthetic oligonucleotide
  Antisense strand to SEQ ID NO: 1230488
ucucacacgcaccaccucc

SEQ ID NO: 1230490 - RNA, 19 nt, Artificial Sequence
  Description of Artificial Sequence: Synthetic oligonucleotide
  Sense strand starting at position 2611 of SEQ ID NO: 917390
ugguuugcauccuuguguu

SEQ ID NO: 1230491 - RNA, 19 nt, Artificial Sequence
  Description of Artificial Sequence: Synthetic oligonucleotide
  Antisense strand to SEQ ID NO: 1230490
aacacaaggaugcaaacca

SEQ ID NO: 1230492 - RNA, 19 nt, Artificial Sequence
  Description of Artificial Sequence: Synthetic oligonucleotide
  Sense strand starting at position 3102 of SEQ ID NO: 917390
uuugaugacucugacacuu

SEQ ID NO: 1230493 - RNA, 19 nt, Artificial Sequence
  Description of Artificial Sequence: Synthetic oligonucleotide
  Antisense strand to SEQ ID NO: 1230492
aagugucagagucaucaaa

SEQ ID NO: 1230494 - RNA, 19 nt, Artificial Sequence
  Description of Artificial Sequence: Synthetic oligonucleotide
  Sense strand starting at position 3668 of SEQ ID NO: 917390
agguaauuacuuuguuacu

SEQ ID NO: 1230495 - RNA, 19 nt, Artificial Sequence
  Description of Artificial Sequence: Synthetic oligonucleotide
  Antisense strand to SEQ ID NO: 1230494
aguaacaaaguaauuaccu

SEQ ID NO: 1230496 - RNA, 19 nt, Artificial Sequence
  Description of Artificial Sequence: Synthetic oligonucleotide
  Sense strand starting at position 3669 of SEQ ID NO: 917390
gguaauuacuuuguuacuc

SEQ ID NO: 1230497 - RNA, 19 nt, Artificial Sequence
  Description of Artificial Sequence: Synthetic oligonucleotide
  Antisense strand to SEQ ID NO: 1230496
gaguaacaaaguaauuacc

SEQ ID NO: 1230498 - RNA, 19 nt, Artificial Sequence
  Description of Artificial Sequence: Synthetic oligonucleotide
  Sense strand starting at position 3670 of SEQ ID NO: 917390
guaauuacuuuguuacuca

SEQ ID NO: 1230499 - RNA, 19 nt, Artificial Sequence
  Description of Artificial Sequence: Synthetic oligonucleotide
  Antisense strand to SEQ ID NO: 1230498
ugaguaacaaaguaauuac

SEQ ID NO: 1230500 - RNA, 19 nt, Artificial Sequence
  Description of Artificial Sequence: Synthetic oligonucleotide
  Sense strand starting at position 3674 of SEQ ID NO: 917390
uuacuuuguuacucaaugu

SEQ ID NO: 1230501 - RNA, 19 nt, Artificial Sequence
  Description of Artificial Sequence: Synthetic oligonucleotide
  Antisense strand to SEQ ID NO: 1230500
acauugaguaacaaaguaa

SEQ ID NO: 1230502 - RNA, 19 nt, Artificial Sequence
  Description of Artificial Sequence: Synthetic oligonucleotide
  Sense strand starting at position 3804 of SEQ ID NO: 917390
cucauaagugggcgucgaa

SEQ ID NO: 1230503 - RNA, 19 nt, Artificial Sequence
  Description of Artificial Sequence: Synthetic oligonucleotide
  Antisense strand to SEQ ID NO: 1230502
uucgacgcccacuuaugag

SEQ ID NO: 1230504 - RNA, 19 nt, Artificial Sequence
  Description of Artificial Sequence: Synthetic oligonucleotide
  Sense strand starting at position 3807 of SEQ ID NO: 917390
auaagugggcgucgaacaa

SEQ ID NO: 1230505 - RNA, 19 nt, Artificial Sequence
  Description of Artificial Sequence: Synthetic oligonucleotide
  Antisense strand to SEQ ID NO: 1230504
uuguucgacgcccacuuau

SEQ ID NO: 1230506 - RNA, 19 nt, Artificial Sequence
  Description of Artificial Sequence: Synthetic oligonucleotide
  Sense strand starting at position 3814 of SEQ ID NO: 917390
ggcgucgaacaaugugaau

SEQ ID NO: 1230507 - RNA, 19 nt, Artificial Sequence
  Description of Artificial Sequence: Synthetic oligonucleotide
  Antisense strand to SEQ ID NO: 1230506
auucacauuguucgacgcc

SEQ ID NO: 1230508 - RNA, 19 nt, Artificial Sequence
  Description of Artificial Sequence: Synthetic oligonucleotide
  Sense strand starting at position 3816 of SEQ ID NO: 917390
cgucgaacaaugugaauac

SEQ ID NO: 1230509 - RNA, 19 nt, Artificial Sequence
  Description of Artificial Sequence: Synthetic oligonucleotide
  Antisense strand to SEQ ID NO: 1230508
guauucacauuguucgacg

SEQ ID NO: 1230510 - RNA, 19 nt, Artificial Sequence
  Description of Artificial Sequence: Synthetic oligonucleotide
  Sense strand starting at position 3817 of SEQ ID NO: 917390
gucgaacaaugugaauaca

SEQ ID NO: 1230511 - RNA, 19 nt, Artificial Sequence
  Description of Artificial Sequence: Synthetic oligonucleotide
  Antisense strand to SEQ ID NO: 1230510
uguauucacauuguucgac

SEQ ID NO: 1230512 - RNA, 19 nt, Artificial Sequence
  Description of Artificial Sequence: Synthetic oligonucleotide
  Sense strand starting at position 3894 of SEQ ID NO: 917390
gagggagacuauuaggaga

SEQ ID NO: 1230513 - RNA, 19 nt, Artificial Sequence
  Description of Artificial Sequence: Synthetic oligonucleotide
  Antisense strand to SEQ ID NO: 1230512
ucuccuaauagucucccuc

SEQ ID NO: 1230514 - RNA, 19 nt, Artificial Sequence
  Description of Artificial Sequence: Synthetic oligonucleotide
  Sense strand starting at position 3896 of SEQ ID NO: 917390
gggagacuauuaggagaaa

SEQ ID NO: 1230515 - RNA, 19 nt, Artificial Sequence
  Description of Artificial Sequence: Synthetic oligonucleotide
  Antisense strand to SEQ ID NO: 1230514
uuucuccuaauagucuccc

SEQ ID NO: 1230516 - RNA, 19 nt, Artificial Sequence
  Description of Artificial Sequence: Synthetic oligonucleotide
  Sense strand starting at position 3897 of SEQ ID NO: 917395
ggagacuauuaggagaaau

SEQ ID NO: 1230517 - RNA, 19 nt, Artificial Sequence
  Description of Artificial Sequence: Synthetic oligonucleotide
  Antisense strand to SEQ ID NO: 1230516
auuucuccuaauagucucc

SEQ ID NO: 1230518 - RNA, 19 nt, Artificial Sequence
  Description of Artificial Sequence: Synthetic oligonucleotide
  Sense strand starting at position 2465 of SEQ ID NO: 917395
ggagguggugcgugugaga

SEQ ID NO: 1230519 - RNA, 19 nt, Artificial Sequence
  Description of Artificial Sequence: Synthetic oligonucleotide
  Antisense strand to SEQ ID NO: 1230518
ucucacacgcaccaccucc

SEQ ID NO: 1230520 - RNA, 19 nt, Artificial Sequence
  Description of Artificial Sequence: Synthetic oligonucleotide
  Sense strand starting at position 2611 of SEQ ID NO: 917395
ugguuugcauccuuguguu

SEQ ID NO: 1230521 - RNA, 19 nt, Artificial Sequence
  Description of Artificial Sequence: Synthetic oligonucleotide
  Antisense strand to SEQ ID NO: 1230520
aacacaaggaugcaaacca

SEQ ID NO: 1230522 - RNA, 19 nt, Artificial Sequence
  Description of Artificial Sequence: Synthetic oligonucleotide
  Sense strand starting at position 3102 of SEQ ID NO: 917395
uuugaugacucugacacuu

SEQ ID NO: 1230523 - RNA, 19 nt, Artificial Sequence
  Description of Artificial Sequence: Synthetic oligonucleotide
  Antisense strand to SEQ ID NO: 1230522
aagugucagagucaucaaa

SEQ ID NO: 1230524 - RNA, 19 nt, Artificial Sequence
  Description of Artificial Sequence: Synthetic oligonucleotide
  Sense strand starting at position 3668 of SEQ ID NO: 917395
agguaauuacuuuguuacu

SEQ ID NO: 1230525 - RNA, 19 nt, Artificial Sequence
  Description of Artificial Sequence: Synthetic oligonucleotide
  Antisense strand to SEQ ID NO: 1230524
aguaacaaaguaauuaccu

SEQ ID NO: 1230526 - RNA, 19 nt, Artificial Sequence
  Description of Artificial Sequence: Synthetic oligonucleotide
  Sense strand starting at position 3669 of SEQ ID NO: 917395
gguaauuacuuuguuacuc

SEQ ID NO: 1230527 - RNA, 19 nt, Artificial Sequence
  Description of Artificial Sequence: Synthetic oligonucleotide
  Antisense strand to SEQ ID NO: 1230526
gaguaacaaaguaauuacc

SEQ ID NO: 1230528 - RNA, 19 nt, Artificial Sequence
  Description of Artificial Sequence: Synthetic oligonucleotide
  Sense strand starting at position 3670 of SEQ ID NO: 917395
guaauuacuuuguuacuca

SEQ ID NO: 1230529 - RNA, 19 nt, Artificial Sequence
  Description of Artificial Sequence: Synthetic oligonucleotide
  Antisense strand to SEQ ID NO: 1230528
ugaguaacaaaguaauuac

SEQ ID NO: 1230530 - RNA, 19 nt, Artificial Sequence
  Description of Artificial Sequence: Synthetic oligonucleotide
  Sense strand starting at position 3674 of SEQ ID NO: 917395
uuacuuuguuacucaaugu

SEQ ID NO: 1230531 - RNA, 19 nt, Artificial Sequence
  Description of Artificial Sequence: Synthetic oligonucleotide
  Antisense strand to SEQ ID NO: 1230530
acauugaguaacaaaguaa

SEQ ID NO: 1230532 - RNA, 19 nt, Artificial Sequence
  Description of Artificial Sequence: Synthetic oligonucleotide
  Sense strand starting at position 3804 of SEQ ID NO: 917395
cucauaagugggcgucgaa

SEQ ID NO: 1230533 - RNA, 19 nt, Artificial Sequence
  Description of Artificial Sequence: Synthetic oligonucleotide
  Antisense strand to SEQ ID NO: 1230532
uucgacgcccacuuaugag

SEQ ID NO: 1230534 - RNA, 19 nt, Artificial Sequence
  Description of Artificial Sequence: Synthetic oligonucleotide
  Sense strand starting at position 3807 of SEQ ID NO: 917395
auaagugggcgucgaacaa

SEQ ID NO: 1230535 - RNA, 19 nt, Artificial Sequence
  Description of Artificial Sequence: Synthetic oligonucleotide
  Antisense strand to SEQ ID NO: 1230534
uuguucgacgcccacuuau

SEQ ID NO: 1230536 - RNA, 19 nt, Artificial Sequence
  Description of Artificial Sequence: Synthetic oligonucleotide
  Sense strand starting at position 3814 of SEQ ID NO: 917395
ggcgucgaacaaugugaau

SEQ ID NO: 1230537 - RNA, 19 nt, Artificial Sequence
  Description of Artificial Sequence: Synthetic oligonucleotide
  Antisense strand to SEQ ID NO: 1230536
auucacauuguucgacgcc

SEQ ID NO: 1230538 - RNA, 19 nt, Artificial Sequence
  Description of Artificial Sequence: Synthetic oligonucleotide
  Sense strand starting at position 3816 of SEQ ID NO: 917395
cgucgaacaaugugaauac

SEQ ID NO: 1230539 - RNA, 19 nt, Artificial Sequence
  Description of Artificial Sequence: Synthetic oligonucleotide
  Antisense strand to SEQ ID NO: 1230538
guauucacauuguucgacg

SEQ ID NO: 1230540 - RNA, 19 nt, Artificial Sequence
  Description of Artificial Sequence: Synthetic oligonucleotide
  Sense strand starting at position 3817 of SEQ ID NO: 917395
gucgaacaaugugaauaca

SEQ ID NO: 1230541 - RNA, 19 nt, Artificial Sequence
  Description of Artificial Sequence: Synthetic oligonucleotide
  Antisense strand to SEQ ID NO: 1230540
uguauucacauuguucgac

SEQ ID NO: 1230542 - RNA, 19 nt, Artificial Sequence
  Description of Artificial Sequence: Synthetic oligonucleotide
  Sense strand starting at position 3894 of SEQ ID NO: 917395
gagggagacuauuaggaga

SEQ ID NO: 1230543 - RNA, 19 nt, Artificial Sequence
  Description of Artificial Sequence: Synthetic oligonucleotide
  Antisense strand to SEQ ID NO: 1230542
ucuccuaauagucucccuc

SEQ ID NO: 1230544 - RNA, 19 nt, Artificial Sequence
  Description of Artificial Sequence: Synthetic oligonucleotide
  Sense strand starting at position 3896 of SEQ ID NO: 917395
gggagacuauuaggagaaa

SEQ ID NO: 1230545 - RNA, 19 nt, Artificial Sequence
  Description of Artificial Sequence: Synthetic oligonucleotide
  Antisense strand to SEQ ID NO: 1230544
uuucuccuaauagucuccc

SEQ ID NO: 1230546 - RNA, 19 nt, Artificial Sequence
  Description of Artificial Sequence: Synthetic oligonucleotide
  Sense strand starting at position 3897 of SEQ ID NO: 917400
ggagacuauuaggagaaau

SEQ ID NO: 1230547 - RNA, 19 nt, Artificial Sequence
  Description of Artificial Sequence: Synthetic oligonucleotide
  Antisense strand to SEQ ID NO: 1230546
auuucuccuaauagucucc

SEQ ID NO: 1230548 - RNA, 19 nt, Artificial Sequence
  Description of Artificial Sequence: Synthetic oligonucleotide
  Sense strand starting at position 144 of SEQ ID NO: 917400
aggcguaaaccuuagcaau

SEQ ID NO: 1230549 - RNA, 19 nt, Artificial Sequence
  Description of Artificial Sequence: Synthetic oligonucleotide
  Antisense strand to SEQ ID NO: 1230548
auugcuaagguuuacgccu

SEQ ID NO: 1230550 - RNA, 19 nt, Artificial Sequence
  Description of Artificial Sequence: Synthetic oligonucleotide
  Sense strand starting at position 146 of SEQ ID NO: 917400
gcguaaaccuuagcaauuu

SEQ ID NO: 1230551 - RNA, 19 nt, Artificial Sequence
  Description of Artificial Sequence: Synthetic oligonucleotide
  Antisense strand to SEQ ID NO: 1230550
aaauugcuaagguuuacgc

SEQ ID NO: 1230552 - RNA, 19 nt, Artificial Sequence
  Description of Artificial Sequence: Synthetic oligonucleotide
  Sense strand starting at position 427 of SEQ ID NO: 917400
gagaguaagcuauauuacu

SEQ ID NO: 1230553 - RNA, 19 nt, Artificial Sequence
  Description of Artificial Sequence: Synthetic oligonucleotide
  Antisense strand to SEQ ID NO: 1230552
aguaauauagcuuacucuc

SEQ ID NO: 1230554 - RNA, 19 nt, Artificial Sequence
  Description of Artificial Sequence: Synthetic oligonucleotide
  Sense strand starting at position 464 of SEQ ID NO: 917400
ucaguaauuuaugaaguag

SEQ ID NO: 1230555 - RNA, 19 nt, Artificial Sequence
  Description of Artificial Sequence: Synthetic oligonucleotide
  Antisense strand to SEQ ID NO: 1230554
cuacuucauaaauuacuga

SEQ ID NO: 1230556 - RNA, 19 nt, Artificial Sequence
  Description of Artificial Sequence: Synthetic oligonucleotide
  Sense strand starting at position 478 of SEQ ID NO: 917400
aguaguacuguguaucaac

SEQ ID NO: 1230557 - RNA, 19 nt, Artificial Sequence
  Description of Artificial Sequence: Synthetic oligonucleotide
  Antisense strand to SEQ ID NO: 1230556
guugauacacaguacuacu

SEQ ID NO: 1230558 - RNA, 19 nt, Artificial Sequence
  Description of Artificial Sequence: Synthetic oligonucleotide
  Sense strand starting at position 516 of SEQ ID NO: 917400
acgugaaacucuccaggau

SEQ ID NO: 1230559 - RNA, 19 nt, Artificial Sequence
  Description of Artificial Sequence: Synthetic oligonucleotide
  Antisense strand to SEQ ID NO: 1230558
auccuggagaguuucacgu

SEQ ID NO: 1230560 - RNA, 19 nt, Artificial Sequence
  Description of Artificial Sequence: Synthetic oligonucleotide
  Sense strand starting at position 517 of SEQ ID NO: 917400
cgugaaacucuccaggaug

SEQ ID NO: 1230561 - RNA, 19 nt, Artificial Sequence
  Description of Artificial Sequence: Synthetic oligonucleotide
  Antisense strand to SEQ ID NO: 1230560
cauccuggagaguuucacg

SEQ ID NO: 1230562 - RNA, 19 nt, Artificial Sequence
  Description of Artificial Sequence: Synthetic oligonucleotide
  Sense strand starting at position 519 of SEQ ID NO: 917400
ugaaacucuccaggauguu

SEQ ID NO: 1230563 - RNA, 19 nt, Artificial Sequence
  Description of Artificial Sequence: Synthetic oligonucleotide
  Antisense strand to SEQ ID NO: 1230562
aacauccuggagaguuuca

SEQ ID NO: 1230564 - RNA, 19 nt, Artificial Sequence
  Description of Artificial Sequence: Synthetic oligonucleotide
  Sense strand starting at position 528 of SEQ ID NO: 917400
ccaggauguuugguagaaa

SEQ ID NO: 1230565 - RNA, 19 nt, Artificial Sequence
  Description of Artificial Sequence: Synthetic oligonucleotide
  Antisense strand to SEQ ID NO: 1230564
uuucuaccaaacauccugg

SEQ ID NO: 1230566 - RNA, 19 nt, Artificial Sequence
  Description of Artificial Sequence: Synthetic oligonucleotide
  Sense strand starting at position 579 of SEQ ID NO: 917400
gucucauuacugcagauua

SEQ ID NO: 1230567 - RNA, 19 nt, Artificial Sequence
  Description of Artificial Sequence: Synthetic oligonucleotide
  Antisense strand to SEQ ID NO: 1230566
uaaucugcaguaaugagac

SEQ ID NO: 1230568 - RNA, 19 nt, Artificial Sequence
  Description of Artificial Sequence: Synthetic oligonucleotide
  Sense strand starting at position 601 of SEQ ID NO: 917400
gguguuacuugaguacaga

SEQ ID NO: 1230569 - RNA, 19 nt, Artificial Sequence
  Description of Artificial Sequence: Synthetic oligonucleotide
  Antisense strand to SEQ ID NO: 1230568
ucuguacucaaguaacacc

SEQ ID NO: 1230570 - RNA, 19 nt, Artificial Sequence
  Description of Artificial Sequence: Synthetic oligonucleotide
  Sense strand starting at position 602 of SEQ ID NO: 917400
guguuacuugaguacagag

SEQ ID NO: 1230571 - RNA, 19 nt, Artificial Sequence
  Description of Artificial Sequence: Synthetic oligonucleotide
  Antisense strand to SEQ ID NO: 1230570
cucuguacucaaguaacac

SEQ ID NO: 1230572 - RNA, 19 nt, Artificial Sequence
  Description of Artificial Sequence: Synthetic oligonucleotide
  Sense strand starting at position 604 of SEQ ID NO: 917400
guuacuugaguacagaguu

SEQ ID NO: 1230573 - RNA, 19 nt, Artificial Sequence
  Description of Artificial Sequence: Synthetic oligonucleotide
  Antisense strand to SEQ ID NO: 1230572
aacucuguacucaaguaac

SEQ ID NO: 1230574 - RNA, 19 nt, Artificial Sequence
  Description of Artificial Sequence: Synthetic oligonucleotide
  Sense strand starting at position 614 of SEQ ID NO: 917400
uacagaguuugggcaccua

SEQ ID NO: 1230575 - RNA, 19 nt, Artificial Sequence
  Description of Artificial Sequence: Synthetic oligonucleotide
  Antisense strand to SEQ ID NO: 1230574
uaggugcccaaacucugua

SEQ ID NO: 1230576 - RNA, 19 nt, Artificial Sequence
  Description of Artificial Sequence: Synthetic oligonucleotide
  Sense strand starting at position 633 of SEQ ID NO: 917400
agcaguuugagguaaauag

SEQ ID NO: 1230577 - RNA, 19 nt, Artificial Sequence
  Description of Artificial Sequence: Synthetic oligonucleotide
  Antisense strand to SEQ ID NO: 1230576
cuauuuaccucaaacugcu

SEQ ID NO: 1230578 - RNA, 19 nt, Artificial Sequence
  Description of Artificial Sequence: Synthetic oligonucleotide
  Sense strand starting at position 655 of SEQ ID NO: 917400
gcugcacugaggugagaaa

SEQ ID NO: 1230579 - RNA, 19 nt, Artificial Sequence
  Description of Artificial Sequence: Synthetic oligonucleotide
  Antisense strand to SEQ ID NO: 1230578
uuucucaccucagugcagc

SEQ ID NO: 1230580 - RNA, 19 nt, Artificial Sequence
  Description of Artificial Sequence: Synthetic oligonucleotide
  Sense strand starting at position 1419 of SEQ ID NO: 917400
ucgccauagcguucgaaga

SEQ ID NO: 1230581 - RNA, 19 nt, Artificial Sequence
  Description of Artificial Sequence: Synthetic oligonucleotide
  Antisense strand to SEQ ID NO: 1230580
ucuucgaacgcuauggcga

SEQ ID NO: 1230582 - RNA, 19 nt, Artificial Sequence
  Description of Artificial Sequence: Synthetic oligonucleotide
  Sense strand starting at position 1534 of SEQ ID NO: 917400
ucuugaugucgauagugaa

SEQ ID NO: 1230583 - RNA, 19 nt, Artificial Sequence
  Description of Artificial Sequence: Synthetic oligonucleotide
  Antisense strand to SEQ ID NO: 1230582
uucacuaucgacaucaaga

SEQ ID NO: 1230584 - RNA, 19 nt, Artificial Sequence
  Description of Artificial Sequence: Synthetic oligonucleotide
  Sense strand starting at position 1770 of SEQ ID NO: 917400
ggccuagauuuauagacag

SEQ ID NO: 1230585 - RNA, 19 nt, Artificial Sequence
  Description of Artificial Sequence: Synthetic oligonucleotide
  Antisense strand to SEQ ID NO: 1230584
cugucuauaaaucuaggcc

SEQ ID NO: 1230586 - RNA, 19 nt, Artificial Sequence
  Description of Artificial Sequence: Synthetic oligonucleotide
  Sense strand starting at position 1780 of SEQ ID NO: 917400
uauagacagugugucuaua

SEQ ID NO: 1230587 - RNA, 19 nt, Artificial Sequence
  Description of Artificial Sequence: Synthetic oligonucleotide
  Antisense strand to SEQ ID NO: 1230586
uauagacacacugucuaua

SEQ ID NO: 1230588 - RNA, 19 nt, Artificial Sequence
  Description of Artificial Sequence: Synthetic oligonucleotide
  Sense strand starting at position 1782 of SEQ ID NO: 917400
uagacagugugucuauaua

SEQ ID NO: 1230589 - RNA, 19 nt, Artificial Sequence
  Description of Artificial Sequence: Synthetic oligonucleotide
  Antisense strand to SEQ ID NO: 1230588
uauauagacacacugucua

SEQ ID NO: 1230590 - RNA, 19 nt, Artificial Sequence
  Description of Artificial Sequence: Synthetic oligonucleotide
  Sense strand starting at position 1803 of SEQ ID NO: 917400
uguauacgucucuacauaa

SEQ ID NO: 1230591 - RNA, 19 nt, Artificial Sequence
  Description of Artificial Sequence: Synthetic oligonucleotide
  Antisense strand to SEQ ID NO: 1230590
uuauguagagacguauaca

SEQ ID NO: 1230592 - RNA, 19 nt, Artificial Sequence
  Description of Artificial Sequence: Synthetic oligonucleotide
  Sense strand starting at position 2139 of SEQ ID NO: 917400
ggcuguacucuugggacaa

SEQ ID NO: 1230593 - RNA, 19 nt, Artificial Sequence
  Description of Artificial Sequence: Synthetic oligonucleotide
  Antisense strand to SEQ ID NO: 1230592
uugucccaagaguacagcc

SEQ ID NO: 1230594 - RNA, 19 nt, Artificial Sequence
  Description of Artificial Sequence: Synthetic oligonucleotide
  Sense strand starting at position 2151 of SEQ ID NO: 917400
gggacaaauuaugugaugu

SEQ ID NO: 1230595 - RNA, 19 nt, Artificial Sequence
  Description of Artificial Sequence: Synthetic oligonucleotide
  Antisense strand to SEQ ID NO: 1230594
acaucacauaauuuguccc

SEQ ID NO: 1230596 - RNA, 19 nt, Artificial Sequence
  Description of Artificial Sequence: Synthetic oligonucleotide
  Sense strand starting at position 2152 of SEQ ID NO: 917400
ggacaaauuaugugaugug

SEQ ID NO: 1230597 - RNA, 19 nt, Artificial Sequence
  Description of Artificial Sequence: Synthetic oligonucleotide
  Antisense strand to SEQ ID NO: 1230596
cacaucacauaauuugucc

SEQ ID NO: 1230598 - RNA, 19 nt, Artificial Sequence
  Description of Artificial Sequence: Synthetic oligonucleotide
  Sense strand starting at position 2749 of SEQ ID NO: 917400
cucagaggacuccgugaaa

SEQ ID NO: 1230599 - RNA, 19 nt, Artificial Sequence
  Description of Artificial Sequence: Synthetic oligonucleotide
  Antisense strand to SEQ ID NO: 1230598
uuucacggaguccucugag

SEQ ID NO: 1230600 - RNA, 19 nt, Artificial Sequence
  Description of Artificial Sequence: Synthetic oligonucleotide
  Sense strand starting at position 2816 of SEQ ID NO: 917400
gucuuaugacaagggucaa

SEQ ID NO: 1230601 - RNA, 19 nt, Artificial Sequence
  Description of Artificial Sequence: Synthetic oligonucleotide
  Antisense strand to SEQ ID NO: 1230600
uugacccuugucauaagac

SEQ ID NO: 1230602 - RNA, 19 nt, Artificial Sequence
  Description of Artificial Sequence: Synthetic oligonucleotide
  Sense strand starting at position 2852 of SEQ ID NO: 917400
gggccagauagccaguauu

SEQ ID NO: 1230603 - RNA, 19 nt, Artificial Sequence
  Description of Artificial Sequence: Synthetic oligonucleotide
  Antisense strand to SEQ ID NO: 1230602
aauacuggcuaucuggccc

SEQ ID NO: 1230604 - RNA, 19 nt, Artificial Sequence
  Description of Artificial Sequence: Synthetic oligonucleotide
  Sense strand starting at position 2924 of SEQ ID NO: 917400
cauggugacuccuuaauga

SEQ ID NO: 1230605 - RNA, 19 nt, Artificial Sequence
  Description of Artificial Sequence: Synthetic oligonucleotide
  Antisense strand to SEQ ID NO: 1230604
ucauuaaggagucaccaug

SEQ ID NO: 1230606 - RNA, 19 nt, Artificial Sequence
  Description of Artificial Sequence: Synthetic oligonucleotide
  Sense strand starting at position 2932 of SEQ ID NO: 917400
cuccuuaaugaauguugaa

SEQ ID NO: 1230607 - RNA, 19 nt, Artificial Sequence
  Description of Artificial Sequence: Synthetic oligonucleotide
  Antisense strand to SEQ ID NO: 1230606
uucaacauucauuaaggag

SEQ ID NO: 1230608 - RNA, 19 nt, Artificial Sequence
  Description of Artificial Sequence: Synthetic oligonucleotide
  Sense strand starting at position 3001 of SEQ ID NO: 917400
gcuugacauuugcuuacuu

SEQ ID NO: 1230609 - RNA, 19 nt, Artificial Sequence
  Description of Artificial Sequence: Synthetic oligonucleotide
  Antisense strand to SEQ ID NO: 1230608
aaguaagcaaaugucaagc

SEQ ID NO: 1230610 - RNA, 19 nt, Artificial Sequence
  Description of Artificial Sequence: Synthetic oligonucleotide
  Sense strand starting at position 3106 of SEQ ID NO: 917400
gggcuuuauuuguccucaa

SEQ ID NO: 1230611 - RNA, 19 nt, Artificial Sequence
  Description of Artificial Sequence: Synthetic oligonucleotide
  Antisense strand to SEQ ID NO: 1230610
uugaggacaaauaaagccc

SEQ ID NO: 1230612 - RNA, 19 nt, Artificial Sequence
  Description of Artificial Sequence: Synthetic oligonucleotide
  Sense strand starting at position 3107 of SEQ ID NO: 917400
ggcuuuauuuguccucaaa

SEQ ID NO: 1230613 - RNA, 19 nt, Artificial Sequence
  Description of Artificial Sequence: Synthetic oligonucleotide
  Antisense strand to SEQ ID NO: 1230612
uuugaggacaaauaaagcc

SEQ ID NO: 1230614 - RNA, 19 nt, Artificial Sequence
  Description of Artificial Sequence: Synthetic oligonucleotide
  Sense strand starting at position 3179 of SEQ ID NO: 917400
gugguacguccacauaaca

SEQ ID NO: 1230615 - RNA, 19 nt, Artificial Sequence
  Description of Artificial Sequence: Synthetic oligonucleotide
  Antisense strand to SEQ ID NO: 1230614
uguuauguggacguaccac

SEQ ID NO: 1230616 - RNA, 19 nt, Artificial Sequence
  Description of Artificial Sequence: Synthetic oligonucleotide
  Sense strand starting at position 3282 of SEQ ID NO: 917400
guuacaaacuguguauaua

SEQ ID NO: 1230617 - RNA, 19 nt, Artificial Sequence
  Description of Artificial Sequence: Synthetic oligonucleotide
  Antisense strand to SEQ ID NO: 1230616
uauauacacaguuuguaac

SEQ ID NO: 1230618 - RNA, 19 nt, Artificial Sequence
  Description of Artificial Sequence: Synthetic oligonucleotide
  Sense strand starting at position 3320 of SEQ ID NO: 917400
acuauugcugcagaacaca

SEQ ID NO: 1230619 - RNA, 19 nt, Artificial Sequence
  Description of Artificial Sequence: Synthetic oligonucleotide
  Antisense strand to SEQ ID NO: 1230618
uguguucugcagcaauagu

SEQ ID NO: 1230620 - RNA, 19 nt, Artificial Sequence
  Description of Artificial Sequence: Synthetic oligonucleotide
  Sense strand starting at position 3371 of SEQ ID NO: 917400
ggcaguuaaccacauggua

SEQ ID NO: 1230621 - RNA, 19 nt, Artificial Sequence
  Description of Artificial Sequence: Synthetic oligonucleotide
  Antisense strand to SEQ ID NO: 1230620
uaccaugugguuaacugcc

SEQ ID NO: 1230622 - RNA, 19 nt, Artificial Sequence
  Description of Artificial Sequence: Synthetic oligonucleotide
  Sense strand starting at position 3417 of SEQ ID NO: 917400
acuaaaucuugauuguggu

SEQ ID NO: 1230623 - RNA, 19 nt, Artificial Sequence
  Description of Artificial Sequence: Synthetic oligonucleotide
  Antisense strand to SEQ ID NO: 1230622
accacaaucaagauuuagu

SEQ ID NO: 1230624 - RNA, 19 nt, Artificial Sequence
  Description of Artificial Sequence: Synthetic oligonucleotide
  Sense strand starting at position 3427 of SEQ ID NO: 917400
gauuguggugaugacuaca

SEQ ID NO: 1230625 - RNA, 19 nt, Artificial Sequence
  Description of Artificial Sequence: Synthetic oligonucleotide
  Antisense strand to SEQ ID NO: 1230624
uguagucaucaccacaauc

SEQ ID NO: 1230626 - RNA, 19 nt, Artificial Sequence
  Description of Artificial Sequence: Synthetic oligonucleotide
  Sense strand starting at position 3471 of SEQ ID NO: 917401
agucuaacugugcacuaaa

SEQ ID NO: 1230627 - RNA, 19 nt, Artificial Sequence
  Description of Artificial Sequence: Synthetic oligonucleotide
  Antisense strand to SEQ ID NO: 1230626
uuuagugcacaguuagacu

SEQ ID NO: 1230628 - RNA, 19 nt, Artificial Sequence
  Description of Artificial Sequence: Synthetic oligonucleotide
  Sense strand starting at position 11 of SEQ ID NO: 917401
aaucucuggugaucaggau

SEQ ID NO: 1230629 - RNA, 19 nt, Artificial Sequence
  Description of Artificial Sequence: Synthetic oligonucleotide
  Antisense strand to SEQ ID NO: 1230628
auccugaucaccagagauu

SEQ ID NO: 1230630 - RNA, 19 nt, Artificial Sequence
  Description of Artificial Sequence: Synthetic oligonucleotide
  Sense strand starting at position 135 of SEQ ID NO: 917401
gcucuuguuccagaaacac

SEQ ID NO: 1230631 - RNA, 19 nt, Artificial Sequence
  Description of Artificial Sequence: Synthetic oligonucleotide
  Antisense strand to SEQ ID NO: 1230630
guguuucuggaacaagagc

SEQ ID NO: 1230632 - RNA, 19 nt, Artificial Sequence
  Description of Artificial Sequence: Synthetic oligonucleotide
  Sense strand starting at position 146 of SEQ ID NO: 917401
agaaacacaccguguguua

SEQ ID NO: 1230633 - RNA, 19 nt, Artificial Sequence
  Description of Artificial Sequence: Synthetic oligonucleotide
  Antisense strand to SEQ ID NO: 1230632
uaacacacgguguguuucu

SEQ ID NO: 1230634 - RNA, 19 nt, Artificial Sequence
  Description of Artificial Sequence: Synthetic oligonucleotide
  Sense strand starting at position 162 of SEQ ID NO: 917401
uuaagagucugccuccaac

SEQ ID NO: 1230635 - RNA, 19 nt, Artificial Sequence
  Description of Artificial Sequence: Synthetic oligonucleotide
  Antisense strand to SEQ ID NO: 1230634
guuggaggcagacucuuaa

SEQ ID NO: 1230636 - RNA, 19 nt, Artificial Sequence
  Description of Artificial Sequence: Synthetic oligonucleotide
  Sense strand starting at position 296 of SEQ ID NO: 917401
gggcaaagcuuuguacaaa

SEQ ID NO: 1230637 - RNA, 19 nt, Artificial Sequence
  Description of Artificial Sequence: Synthetic oligonucleotide
  Antisense strand to SEQ ID NO: 1230636
uuuguacaaagcuuugccc

SEQ ID NO: 1230638 - RNA, 19 nt, Artificial Sequence
  Description of Artificial Sequence: Synthetic oligonucleotide
  Sense strand starting at position 349 of SEQ ID NO: 917401
caaauuggguucgugaauu

SEQ ID NO: 1230639 - RNA, 19 nt, Artificial Sequence
  Description of Artificial Sequence: Synthetic oligonucleotide
  Antisense strand to SEQ ID NO: 1230638
aauucacgaacccaauuug

SEQ ID NO: 1230640 - RNA, 19 nt, Artificial Sequence
  Description of Artificial Sequence: Synthetic oligonucleotide
  Sense strand starting at position 362 of SEQ ID NO: 917401
ugaauuggguucgauuuga

SEQ ID NO: 1230641 - RNA, 19 nt, Artificial Sequence
  Description of Artificial Sequence: Synthetic oligonucleotide
  Antisense strand to SEQ ID NO: 1230640
ucaaaucgaacccaauuca

SEQ ID NO: 1230642 - RNA, 19 nt, Artificial Sequence
  Description of Artificial Sequence: Synthetic oligonucleotide
  Sense strand starting at position 389 of SEQ ID NO: 917401
gcguguguuccaucguuac

SEQ ID NO: 1230643 - RNA, 19 nt, Artificial Sequence
  Description of Artificial Sequence: Synthetic oligonucleotide
  Antisense strand to SEQ ID NO: 1230642
guaacgauggaacacacgc

SEQ ID NO: 1230644 - RNA, 19 nt, Artificial Sequence
  Description of Artificial Sequence: Synthetic oligonucleotide
  Sense strand starting at position 391 of SEQ ID NO: 917401
guguguuccaucguuacca

SEQ ID NO: 1230645 - RNA, 19 nt, Artificial Sequence
  Description of Artificial Sequence: Synthetic oligonucleotide
  Antisense strand to SEQ ID NO: 1230644
ugguaacgauggaacacac

SEQ ID NO: 1230646 - RNA, 19 nt, Artificial Sequence
  Description of Artificial Sequence: Synthetic oligonucleotide
  Sense strand starting at position 393 of SEQ ID NO: 917401
guguuccaucguuaccaaa

SEQ ID NO: 1230647 - RNA, 19 nt, Artificial Sequence
  Description of Artificial Sequence: Synthetic oligonucleotide
  Antisense strand to SEQ ID NO: 1230646
uuugguaacgauggaacac

SEQ ID NO: 1230648 - RNA, 19 nt, Artificial Sequence
  Description of Artificial Sequence: Synthetic oligonucleotide
  Sense strand starting at position 426 of SEQ ID NO: 917401
gagucagcucaguaaaccu

SEQ ID NO: 1230649 - RNA, 19 nt, Artificial Sequence
  Description of Artificial Sequence: Synthetic oligonucleotide
  Antisense strand to SEQ ID NO: 1230648
agguuuacugagcugacuc

SEQ ID NO: 1230650 - RNA, 19 nt, Artificial Sequence
  Description of Artificial Sequence: Synthetic oligonucleotide
  Sense strand starting at position 524 of SEQ ID NO: 917401
ucacaagaugauugccaau

SEQ ID NO: 1230651 - RNA, 19 nt, Artificial Sequence
  Description of Artificial Sequence: Synthetic oligonucleotide
  Antisense strand to SEQ ID NO: 1230650
auuggcaaucaucuuguga

SEQ ID NO: 1230652 - RNA, 19 nt, Artificial Sequence
  Description of Artificial Sequence: Synthetic oligonucleotide
  Sense strand starting at position 538 of SEQ ID NO: 917401
ccaauaaauuagucacgau

SEQ ID NO: 1230653 - RNA, 19 nt, Artificial Sequence
  Description of Artificial Sequence: Synthetic oligonucleotide
  Antisense strand to SEQ ID NO: 1230652
aucgugacuaauuuauugg

SEQ ID NO: 1230654 - RNA, 19 nt, Artificial Sequence
  Description of Artificial Sequence: Synthetic oligonucleotide
  Sense strand starting at position 542 of SEQ ID NO: 917401
uaaauuagucacgauguua

SEQ ID NO: 1230655 - RNA, 19 nt, Artificial Sequence
  Description of Artificial Sequence: Synthetic oligonucleotide
  Antisense strand to SEQ ID NO: 1230654
uaacaucgugacuaauuua

SEQ ID NO: 1230656 - RNA, 19 nt, Artificial Sequence
  Description of Artificial Sequence: Synthetic oligonucleotide
  Sense strand starting at position 550 of SEQ ID NO: 917401
ucacgauguuaacugggau

SEQ ID NO: 1230657 - RNA, 19 nt, Artificial Sequence
  Description of Artificial Sequence: Synthetic oligonucleotide
  Antisense strand to SEQ ID NO: 1230656
aucccaguuaacaucguga

SEQ ID NO: 1230658 - RNA, 19 nt, Artificial Sequence
  Description of Artificial Sequence: Synthetic oligonucleotide
  Sense strand starting at position 553 of SEQ ID NO: 917401
cgauguuaacugggauaau

SEQ ID NO: 1230659 - RNA, 19 nt, Artificial Sequence
  Description of Artificial Sequence: Synthetic oligonucleotide
  Antisense strand to SEQ ID NO: 1230658
auuaucccaguuaacaucg

SEQ ID NO: 1230660 - RNA, 19 nt, Artificial Sequence
  Description of Artificial Sequence: Synthetic oligonucleotide
  Sense strand starting at position 726 of SEQ ID NO: 917401
ggccuuuggguauaugacu

SEQ ID NO: 1230661 - RNA, 19 nt, Artificial Sequence
  Description of Artificial Sequence: Synthetic oligonucleotide
  Antisense strand to SEQ ID NO: 1230660
agucauauacccaaaggcc

SEQ ID NO: 1230662 - RNA, 19 nt, Artificial Sequence
  Description of Artificial Sequence: Synthetic oligonucleotide
  Sense strand starting at position 1023 of SEQ ID NO: 917401
aaaugcuuccaccggaagu

SEQ ID NO: 1230663 - RNA, 19 nt, Artificial Sequence
  Description of Artificial Sequence: Synthetic oligonucleotide
  Antisense strand to SEQ ID NO: 1230662
acuuccgguggaagcauuu

SEQ ID NO: 1230664 - RNA, 19 nt, Artificial Sequence
  Description of Artificial Sequence: Synthetic oligonucleotide
  Sense strand starting at position 1062 of SEQ ID NO: 917401
ugacguaucugagccaaga

SEQ ID NO: 1230665 - RNA, 19 nt, Artificial Sequence
  Description of Artificial Sequence: Synthetic oligonucleotide
  Antisense strand to SEQ ID NO: 1230664
ucuuggcucagauacguca

SEQ ID NO: 1230666 - RNA, 19 nt, Artificial Sequence
  Description of Artificial Sequence: Synthetic oligonucleotide
  Sense strand starting at position 1064 of SEQ ID NO: 917401
acguaucugagccaagauc

SEQ ID NO: 1230667 - RNA, 19 nt, Artificial Sequence
  Description of Artificial Sequence: Synthetic oligonucleotide
  Antisense strand to SEQ ID NO: 1230666
gaucuuggcucagauacgu

SEQ ID NO: 1230668 - RNA, 19 nt, Artificial Sequence
  Description of Artificial Sequence: Synthetic oligonucleotide
  Sense strand starting at position 1085 of SEQ ID NO: 917401
gcagaagauuaacuguaaa

SEQ ID NO: 1230669 - RNA, 19 nt, Artificial Sequence
  Description of Artificial Sequence: Synthetic oligonucleotide
  Antisense strand to SEQ ID NO: 1230668
uuuacaguuaaucuucugc

SEQ ID NO: 1230670 - RNA, 19 nt, Artificial Sequence
  Description of Artificial Sequence: Synthetic oligonucleotide
  Sense strand starting at position 1378 of SEQ ID NO: 917401
gcagcuuagguacacaaau

SEQ ID NO: 1230671 - RNA, 19 nt, Artificial Sequence
  Description of Artificial Sequence: Synthetic oligonucleotide
  Antisense strand to SEQ ID NO: 1230670
auuuguguaccuaagcugc

SEQ ID NO: 1230672 - RNA, 19 nt, Artificial Sequence
  Description of Artificial Sequence: Synthetic oligonucleotide
  Sense strand starting at position 1419 of SEQ ID NO: 917401
uggguugucccugagguca

SEQ ID NO: 1230673 - RNA, 19 nt, Artificial Sequence
  Description of Artificial Sequence: Synthetic oligonucleotide
  Antisense strand to SEQ ID NO: 1230672
ugaccucagggacaaccca

SEQ ID NO: 1230674 - RNA, 19 nt, Artificial Sequence
  Description of Artificial Sequence: Synthetic oligonucleotide
  Sense strand starting at position 1627 of SEQ ID NO: 917401
cggugucccagauggagau

SEQ ID NO: 1230675 - RNA, 19 nt, Artificial Sequence
  Description of Artificial Sequence: Synthetic oligonucleotide
  Antisense strand to SEQ ID NO: 1230674
aucuccaucugggacaccg

SEQ ID NO: 1230676 - RNA, 19 nt, Artificial Sequence
  Description of Artificial Sequence: Synthetic oligonucleotide
  Sense strand starting at position 1633 of SEQ ID NO: 917401
cccagauggagauguugua

SEQ ID NO: 1230677 - RNA, 19 nt, Artificial Sequence
  Description of Artificial Sequence: Synthetic oligonucleotide
  Antisense strand to SEQ ID NO: 1230676
uacaacaucuccaucuggg

SEQ ID NO: 1230678 - RNA, 19 nt, Artificial Sequence
  Description of Artificial Sequence: Synthetic oligonucleotide
  Sense strand starting at position 1791 of SEQ ID NO: 917401
cucaucuucccguaagaac

SEQ ID NO: 1230679 - RNA, 19 nt, Artificial Sequence
  Description of Artificial Sequence: Synthetic oligonucleotide
  Antisense strand to SEQ ID NO: 1230678
guucuuacgggaagaugag

SEQ ID NO: 1230680 - RNA, 19 nt, Artificial Sequence
  Description of Artificial Sequence: Synthetic oligonucleotide
  Sense strand starting at position 2396 of SEQ ID NO: 917401
gcuucuccgcguguaagua

SEQ ID NO: 1230681 - RNA, 19 nt, Artificial Sequence
  Description of Artificial Sequence: Synthetic oligonucleotide
  Antisense strand to SEQ ID NO: 1230680
uacuuacacgcggagaagc

SEQ ID NO: 1230682 - RNA, 19 nt, Artificial Sequence
  Description of Artificial Sequence: Synthetic oligonucleotide
  Sense strand starting at position 2475 of SEQ ID NO: 917401
ugaggcucucacuguuaca

SEQ ID NO: 1230683 - RNA, 19 nt, Artificial Sequence
  Description of Artificial Sequence: Synthetic oligonucleotide
  Antisense strand to SEQ ID NO: 1230682
uguaacagugagagccuca

SEQ ID NO: 1230684 - RNA, 19 nt, Artificial Sequence
  Description of Artificial Sequence: Synthetic oligonucleotide
  Sense strand starting at position 2509 of SEQ ID NO: 917401
cgcuuucuaguggaggauu

SEQ ID NO: 1230685 - RNA, 19 nt, Artificial Sequence
  Description of Artificial Sequence: Synthetic oligonucleotide
  Antisense strand to SEQ ID NO: 1230684
aauccuccacuagaaagcg

SEQ ID NO: 1230686 - RNA, 19 nt, Artificial Sequence
  Description of Artificial Sequence: Synthetic oligonucleotide
  Sense strand starting at position 2573 of SEQ ID NO: 917401
aguggacagucaucuccau

SEQ ID NO: 1230687 - RNA, 19 nt, Artificial Sequence
  Description of Artificial Sequence: Synthetic oligonucleotide
  Antisense strand to SEQ ID NO: 1230686
auggagaugacuguccacu

SEQ ID NO: 1230688 - RNA, 19 nt, Artificial Sequence
  Description of Artificial Sequence: Synthetic oligonucleotide
  Sense strand starting at position 2590 of SEQ ID NO: 917401
auuuauagcuuggaaugaa

SEQ ID NO: 1230689 - RNA, 19 nt, Artificial Sequence
  Description of Artificial Sequence: Synthetic oligonucleotide
  Antisense strand to SEQ ID NO: 1230688
uucauuccaagcuauaaau

SEQ ID NO: 1230690 - RNA, 19 nt, Artificial Sequence
  Description of Artificial Sequence: Synthetic oligonucleotide
  Sense strand starting at position 2608 of SEQ ID NO: 917401
aaauuugacuauggaaguu

SEQ ID NO: 1230691 - RNA, 19 nt, Artificial Sequence
  Description of Artificial Sequence: Synthetic oligonucleotide
  Antisense strand to SEQ ID NO: 1230690
aacuuccauagucaaauuu

SEQ ID NO: 1230692 - RNA, 19 nt, Artificial Sequence
  Description of Artificial Sequence: Synthetic oligonucleotide
  Sense strand starting at position 3129 of SEQ ID NO: 917401
uccugaagguguccuguaa

SEQ ID NO: 1230693 - RNA, 19 nt, Artificial Sequence
  Description of Artificial Sequence: Synthetic oligonucleotide
  Antisense strand to SEQ ID NO: 1230692
uuacaggacaccuucagga

SEQ ID NO: 1230694 - RNA, 19 nt, Artificial Sequence
  Description of Artificial Sequence: Synthetic oligonucleotide
  Sense strand starting at position 3137 of SEQ ID NO: 917401
guguccuguaaagggaaau

SEQ ID NO: 1230695 - RNA, 19 nt, Artificial Sequence
  Description of Artificial Sequence: Synthetic oligonucleotide
  Antisense strand to SEQ ID NO: 1230694
auuucccuuuacaggacac

SEQ ID NO: 1230696 - RNA, 19 nt, Artificial Sequence
  Description of Artificial Sequence: Synthetic oligonucleotide
  Sense strand starting at position 3138 of SEQ ID NO: 917401
uguccuguaaagggaaaua

SEQ ID NO: 1230697 - RNA, 19 nt, Artificial Sequence
  Description of Artificial Sequence: Synthetic oligonucleotide
  Antisense strand to SEQ ID NO: 1230696
uauuucccuuuacaggaca

SEQ ID NO: 1230698 - RNA, 19 nt, Artificial Sequence
  Description of Artificial Sequence: Synthetic oligonucleotide
  Sense strand starting at position 3212 of SEQ ID NO: 917401
gguauuucguaccugcuca

SEQ ID NO: 1230699 - RNA, 19 nt, Artificial Sequence
  Description of Artificial Sequence: Synthetic oligonucleotide
  Antisense strand to SEQ ID NO: 1230698
ugagcagguacgaaauacc

SEQ ID NO: 1230700 - RNA, 19 nt, Artificial Sequence
  Description of Artificial Sequence: Synthetic oligonucleotide
  Sense strand starting at position 3461 of SEQ ID NO: 917401
agagcuuugcaguagaaau

SEQ ID NO: 1230701 - RNA, 19 nt, Artificial Sequence
  Description of Artificial Sequence: Synthetic oligonucleotide
  Antisense strand to SEQ ID NO: 1230700
auuucuacugcaaagcucu

SEQ ID NO: 1230702 - RNA, 19 nt, Artificial Sequence
  Description of Artificial Sequence: Synthetic oligonucleotide
  Sense strand starting at position 3463 of SEQ ID NO: 917401
agcuuugcaguagaaauau

SEQ ID NO: 1230703 - RNA, 19 nt, Artificial Sequence
  Description of Artificial Sequence: Synthetic oligonucleotide
  Antisense strand to SEQ ID NO: 1230702
auauuucuacugcaaagcu

SEQ ID NO: 1230704 - RNA, 19 nt, Artificial Sequence
  Description of Artificial Sequence: Synthetic oligonucleotide
  Sense strand starting at position 3491 of SEQ ID NO: 917401
gguaaacuugugcauauuc

SEQ ID NO: 1230705 - RNA, 19 nt, Artificial Sequence
  Description of Artificial Sequence: Synthetic oligonucleotide
  Antisense strand to SEQ ID NO: 1230704
gaauaugcacaaguuuacc

SEQ ID NO: 1230706 - RNA, 19 nt, Artificial Sequence
  Description of Artificial Sequence: Synthetic oligonucleotide
  Sense strand starting at position 3971 of SEQ ID NO: 917402
ucaagauuagccuggcaac

SEQ ID NO: 1230707 - RNA, 19 nt, Artificial Sequence
  Description of Artificial Sequence: Synthetic oligonucleotide
  Antisense strand to SEQ ID NO: 1230706
guugccaggcuaaucuuga

SEQ ID NO: 1230708 - RNA, 19 nt, Artificial Sequence
  Description of Artificial Sequence: Synthetic oligonucleotide
  Sense strand starting at position 70 of SEQ ID NO: 917402
gcuuuauucuaguuuggaa

SEQ ID NO: 1230709 - RNA, 19 nt, Artificial Sequence
  Description of Artificial Sequence: Synthetic oligonucleotide
  Antisense strand to SEQ ID NO: 1230708
uuccaaacuagaauaaagc

SEQ ID NO: 1230710 - RNA, 19 nt, Artificial Sequence
  Description of Artificial Sequence: Synthetic oligonucleotide
  Sense strand starting at position 172 of SEQ ID NO: 917402
gagagagccuucucuuuga

SEQ ID NO: 1230711 - RNA, 19 nt, Artificial Sequence
  Description of Artificial Sequence: Synthetic oligonucleotide
  Antisense strand to SEQ ID NO: 1230710
ucaaagagaaggcucucuc

SEQ ID NO: 1230712 - RNA, 19 nt, Artificial Sequence
  Description of Artificial Sequence: Synthetic oligonucleotide
  Sense strand starting at position 189 of SEQ ID NO: 917402
gaucucauagguugcauua

SEQ ID NO: 1230713 - RNA, 19 nt, Artificial Sequence
  Description of Artificial Sequence: Synthetic oligonucleotide
  Antisense strand to SEQ ID NO: 1230712
uaaugcaaccuaugagauc

SEQ ID NO: 1230714 - RNA, 19 nt, Artificial Sequence
  Description of Artificial Sequence: Synthetic oligonucleotide
  Sense strand starting at position 293 of SEQ ID NO: 917402
acugacuuacaaugugacu

SEQ ID NO: 1230715 - RNA, 19 nt, Artificial Sequence
  Description of Artificial Sequence: Synthetic oligonucleotide
  Antisense strand to SEQ ID NO: 1230714
agucacauuguaagucagu

SEQ ID NO: 1230716 - RNA, 19 nt, Artificial Sequence
  Description of Artificial Sequence: Synthetic oligonucleotide
  Sense strand starting at position 359 of SEQ ID NO: 917402
uuaggcucuagguagaaua

SEQ ID NO: 1230717 - RNA, 19 nt, Artificial Sequence
  Description of Artificial Sequence: Synthetic oligonucleotide
  Antisense strand to SEQ ID NO: 1230716
uauucuaccuagagccuaa

SEQ ID NO: 1230718 - RNA, 19 nt, Artificial Sequence
  Description of Artificial Sequence: Synthetic oligonucleotide
  Sense strand starting at position 412 of SEQ ID NO: 917402
ggcauuaacuaacaagaac

SEQ ID NO: 1230719 - RNA, 19 nt, Artificial Sequence
  Description of Artificial Sequence: Synthetic oligonucleotide
  Antisense strand to SEQ ID NO: 1230718
guucuuguuaguuaaugcc

SEQ ID NO: 1230720 - RNA, 19 nt, Artificial Sequence
  Description of Artificial Sequence: Synthetic oligonucleotide
  Sense strand starting at position 763 of SEQ ID NO: 917402
gguuaaggcggcuauauua

SEQ ID NO: 1230721 - RNA, 19 nt, Artificial Sequence
  Description of Artificial Sequence: Synthetic oligonucleotide
  Antisense strand to SEQ ID NO: 1230720
uaauauagccgccuuaacc

SEQ ID NO: 1230722 - RNA, 19 nt, Artificial Sequence
  Description of Artificial Sequence: Synthetic oligonucleotide
  Sense strand starting at position 827 of SEQ ID NO: 917402
gugaauggcuuauuuguac

SEQ ID NO: 1230723 - RNA, 19 nt, Artificial Sequence
  Description of Artificial Sequence: Synthetic oligonucleotide
  Antisense strand to SEQ ID NO: 1230722
guacaaauaagccauucac

SEQ ID NO: 1230724 - RNA, 19 nt, Artificial Sequence
  Description of Artificial Sequence: Synthetic oligonucleotide
  Sense strand starting at position 839 of SEQ ID NO: 917402
uuuguacuccucuguuaau

SEQ ID NO: 1230725 - RNA, 19 nt, Artificial Sequence
  Description of Artificial Sequence: Synthetic oligonucleotide
  Antisense strand to SEQ ID NO: 1230724
auuaacagaggaguacaaa

SEQ ID NO: 1230726 - RNA, 19 nt, Artificial Sequence
  Description of Artificial Sequence: Synthetic oligonucleotide
  Sense strand starting at position 840 of SEQ ID NO: 917402
uuguacuccucuguuaaua

SEQ ID NO: 1230727 - RNA, 19 nt, Artificial Sequence
  Description of Artificial Sequence: Synthetic oligonucleotide
  Antisense strand to SEQ ID NO: 1230726
uauuaacagaggaguacaa

SEQ ID NO: 1230728 - RNA, 19 nt, Artificial Sequence
  Description of Artificial Sequence: Synthetic oligonucleotide
  Sense strand starting at position 848 of SEQ ID NO: 917402
cucuguuaauauucucgaa

SEQ ID NO: 1230729 - RNA, 19 nt, Artificial Sequence
  Description of Artificial Sequence: Synthetic oligonucleotide
  Antisense strand to SEQ ID NO: 1230728
uucgagaauauuaacagag

SEQ ID NO: 1230730 - RNA, 19 nt, Artificial Sequence
  Description of Artificial Sequence: Synthetic oligonucleotide
  Sense strand starting at position 850 of SEQ ID NO: 917402
cuguuaauauucucgaaac

SEQ ID NO: 1230731 - RNA, 19 nt, Artificial Sequence
  Description of Artificial Sequence: Synthetic oligonucleotide
  Antisense strand to SEQ ID NO: 1230730
guuucgagaauauuaacag

SEQ ID NO: 1230732 - RNA, 19 nt, Artificial Sequence
  Description of Artificial Sequence: Synthetic oligonucleotide
  Sense strand starting at position 983 of SEQ ID NO: 917402
ugagaaaggucuccuuccu

SEQ ID NO: 1230733 - RNA, 19 nt, Artificial Sequence
  Description of Artificial Sequence: Synthetic oligonucleotide
  Antisense strand to SEQ ID NO: 1230732
aggaaggagaccuuucuca

SEQ ID NO: 1230734 - RNA, 19 nt, Artificial Sequence
  Description of Artificial Sequence: Synthetic oligonucleotide
  Sense strand starting at position 1021 of SEQ ID NO: 917402
auaggugugugagcgauuu

SEQ ID NO: 1230735 - RNA, 19 nt, Artificial Sequence
  Description of Artificial Sequence: Synthetic oligonucleotide
  Antisense strand to SEQ ID NO: 1230734
aaaucgcucacacaccuau

SEQ ID NO: 1230736 - RNA, 19 nt, Artificial Sequence
  Description of Artificial Sequence: Synthetic oligonucleotide
  Sense strand starting at position 1060 of SEQ ID NO: 917402
ggcagauuguuguuguuca

SEQ ID NO: 1230737 - RNA, 19 nt, Artificial Sequence
  Description of Artificial Sequence: Synthetic oligonucleotide
  Antisense strand to SEQ ID NO: 1230736
ugaacaacaacaaucugcc

SEQ ID NO: 1230738 - RNA, 19 nt, Artificial Sequence
  Description of Artificial Sequence: Synthetic oligonucleotide
  Sense strand starting at position 1068 of SEQ ID NO: 917402
guuguuguucagucugcaa

SEQ ID NO: 1230739 - RNA, 19 nt, Artificial Sequence
  Description of Artificial Sequence: Synthetic oligonucleotide
  Antisense strand to SEQ ID NO: 1230738
uugcagacugaacaacaac

SEQ ID NO: 1230740 - RNA, 19 nt, Artificial Sequence
  Description of Artificial Sequence: Synthetic oligonucleotide
  Sense strand starting at position 1082 of SEQ ID NO: 917402
ugcaaaugucucgacuaua

SEQ ID NO: 1230741 - RNA, 19 nt, Artificial Sequence
  Description of Artificial Sequence: Synthetic oligonucleotide
  Antisense strand to SEQ ID NO: 1230740
uauagucgagacauuugca

SEQ ID NO: 1230742 - RNA, 19 nt, Artificial Sequence
  Description of Artificial Sequence: Synthetic oligonucleotide
  Sense strand starting at position 1093 of SEQ ID NO: 917402
cgacuauaccugcacaguu

SEQ ID NO: 1230743 - RNA, 19 nt, Artificial Sequence
  Description of Artificial Sequence: Synthetic oligonucleotide
  Antisense strand to SEQ ID NO: 1230742
aacugugcagguauagucg

SEQ ID NO: 1230744 - RNA, 19 nt, Artificial Sequence
  Description of Artificial Sequence: Synthetic oligonucleotide
  Sense strand starting at position 1272 of SEQ ID NO: 917402
acucaaauuugagauugag

SEQ ID NO: 1230745 - RNA, 19 nt, Artificial Sequence
  Description of Artificial Sequence: Synthetic oligonucleotide
  Antisense strand to SEQ ID NO: 1230744
cucaaucucaaauuugagu

SEQ ID NO: 1230746 - RNA, 19 nt, Artificial Sequence
  Description of Artificial Sequence: Synthetic oligonucleotide
  Sense strand starting at position 2559 of SEQ ID NO: 917402
ucagcacuccuagagcuuu

SEQ ID NO: 1230747 - RNA, 19 nt, Artificial Sequence
  Description of Artificial Sequence: Synthetic oligonucleotide
  Antisense strand to SEQ ID NO: 1230746
aaagcucuaggagugcuga

SEQ ID NO: 1230748 - RNA, 19 nt, Artificial Sequence
  Description of Artificial Sequence: Synthetic oligonucleotide
  Sense strand starting at position 2586 of SEQ ID NO: 917402
cuuguauuagcaugugaag

SEQ ID NO: 1230749 - RNA, 19 nt, Artificial Sequence
  Description of Artificial Sequence: Synthetic oligonucleotide
  Antisense strand to SEQ ID NO: 1230748
cuucacaugcuaauacaag

SEQ ID NO: 1230750 - RNA, 19 nt, Artificial Sequence
  Description of Artificial Sequence: Synthetic oligonucleotide
  Sense strand starting at position 2588 of SEQ ID NO: 917402
uguauuagcaugugaagcu

SEQ ID NO: 1230751 - RNA, 19 nt, Artificial Sequence
  Description of Artificial Sequence: Synthetic oligonucleotide
  Antisense strand to SEQ ID NO: 1230750
agcuucacaugcuaauaca

SEQ ID NO: 1230752 - RNA, 19 nt, Artificial Sequence
  Description of Artificial Sequence: Synthetic oligonucleotide
  Sense strand starting at position 2624 of SEQ ID NO: 917402
acaggcuucugacugaagu

SEQ ID NO: 1230753 - RNA, 19 nt, Artificial Sequence
  Description of Artificial Sequence: Synthetic oligonucleotide
  Antisense strand to SEQ ID NO: 1230752
acuucagucagaagccugu

SEQ ID NO: 1230754 - RNA, 19 nt, Artificial Sequence
  Description of Artificial Sequence: Synthetic oligonucleotide
  Sense strand starting at position 2625 of SEQ ID NO: 917402
caggcuucugacugaaguu

SEQ ID NO: 1230755 - RNA, 19 nt, Artificial Sequence
  Description of Artificial Sequence: Synthetic oligonucleotide
  Antisense strand to SEQ ID NO: 1230754
aacuucagucagaagccug

SEQ ID NO: 1230756 - RNA, 19 nt, Artificial Sequence
  Description of Artificial Sequence: Synthetic oligonucleotide
  Sense strand starting at position 2631 of SEQ ID NO: 917402
ucugacugaaguuguguaa

SEQ ID NO: 1230757 - RNA, 19 nt, Artificial Sequence
  Description of Artificial Sequence: Synthetic oligonucleotide
  Antisense strand to SEQ ID NO: 1230756
uuacacaacuucagucaga

SEQ ID NO: 1230758 - RNA, 19 nt, Artificial Sequence
  Description of Artificial Sequence: Synthetic oligonucleotide
  Sense strand starting at position 2812 of SEQ ID NO: 917402
cgcccacauuucuucuaga

SEQ ID NO: 1230759 - RNA, 19 nt, Artificial Sequence
  Description of Artificial Sequence: Synthetic oligonucleotide
  Antisense strand to SEQ ID NO: 1230758
ucuagaagaaaugugggcg

SEQ ID NO: 1230760 - RNA, 19 nt, Artificial Sequence
  Description of Artificial Sequence: Synthetic oligonucleotide
  Sense strand starting at position 3013 of SEQ ID NO: 917402
gucucuguaccacaaggua

SEQ ID NO: 1230761 - RNA, 19 nt, Artificial Sequence
  Description of Artificial Sequence: Synthetic oligonucleotide
  Antisense strand to SEQ ID NO: 1230760
uaccuugugguacagagac

SEQ ID NO: 1230762 - RNA, 19 nt, Artificial Sequence
  Description of Artificial Sequence: Synthetic oligonucleotide
  Sense strand starting at position 3347 of SEQ ID NO: 917402
cguugcaagccagaaugau

SEQ ID NO: 1230763 - RNA, 19 nt, Artificial Sequence
  Description of Artificial Sequence: Synthetic oligonucleotide
  Antisense strand to SEQ ID NO: 1230762
aucauucuggcuugcaacg

SEQ ID NO: 1230764 - RNA, 19 nt, Artificial Sequence
  Description of Artificial Sequence: Synthetic oligonucleotide
  Sense strand starting at position 3391 of SEQ ID NO: 917402
guggcauucugccuaaaug

SEQ ID NO: 1230765 - RNA, 19 nt, Artificial Sequence
  Description of Artificial Sequence: Synthetic oligonucleotide
  Antisense strand to SEQ ID NO: 1230764
cauuuaggcagaaugccac

SEQ ID NO: 1230766 - RNA, 19 nt, Artificial Sequence
  Description of Artificial Sequence: Synthetic oligonucleotide
  Sense strand starting at position 3392 of SEQ ID NO: 917402
uggcauucugccuaaauga

SEQ ID NO: 1230767 - RNA, 19 nt, Artificial Sequence
  Description of Artificial Sequence: Synthetic oligonucleotide
  Antisense strand to SEQ ID NO: 1230766
ucauuuaggcagaaugcca

SEQ ID NO: 1230768 - RNA, 19 nt, Artificial Sequence
  Description of Artificial Sequence: Synthetic oligonucleotide
  Sense strand starting at position 3465 of SEQ ID NO: 917402
uugucuucagggugagaaa

SEQ ID NO: 1230769 - RNA, 19 nt, Artificial Sequence
  Description of Artificial Sequence: Synthetic oligonucleotide
  Antisense strand to SEQ ID NO: 1230768
uuucucacccugaagacaa

SEQ ID NO: 1230770 - RNA, 19 nt, Artificial Sequence
  Description of Artificial Sequence: Synthetic oligonucleotide
  Sense strand starting at position 3466 of SEQ ID NO: 917402
ugucuucagggugagaaau

SEQ ID NO: 1230771 - RNA, 19 nt, Artificial Sequence
  Description of Artificial Sequence: Synthetic oligonucleotide
  Antisense strand to SEQ ID NO: 1230770
auuucucacccugaagaca

SEQ ID NO: 1230772 - RNA, 19 nt, Artificial Sequence
  Description of Artificial Sequence: Synthetic oligonucleotide
  Sense strand starting at position 3586 of SEQ ID NO: 917402
uagcguucugucgcuagca

SEQ ID NO: 1230773 - RNA, 19 nt, Artificial Sequence
  Description of Artificial Sequence: Synthetic oligonucleotide
  Antisense strand to SEQ ID NO: 1230772
ugcuagcgacagaacgcua

SEQ ID NO: 1230774 - RNA, 19 nt, Artificial Sequence
  Description of Artificial Sequence: Synthetic oligonucleotide
  Sense strand starting at position 3604 of SEQ ID NO: 917402
auugcaucuuaguuacaca

SEQ ID NO: 1230775 - RNA, 19 nt, Artificial Sequence
  Description of Artificial Sequence: Synthetic oligonucleotide
  Antisense strand to SEQ ID NO: 1230774
uguguaacuaagaugcaau

SEQ ID NO: 1230776 - RNA, 19 nt, Artificial Sequence
  Description of Artificial Sequence: Synthetic oligonucleotide
  Sense strand starting at position 3640 of SEQ ID NO: 917402
cgucaaauuuaggagacga

SEQ ID NO: 1230777 - RNA, 19 nt, Artificial Sequence
  Description of Artificial Sequence: Synthetic oligonucleotide
  Antisense strand to SEQ ID NO: 1230776
ucgucuccuaaauuugacg

SEQ ID NO: 1230778 - RNA, 19 nt, Artificial Sequence
  Description of Artificial Sequence: Synthetic oligonucleotide
  Sense strand starting at position 3765 of SEQ ID NO: 917402
gcacauuuccugcgaauaa

SEQ ID NO: 1230779 - RNA, 19 nt, Artificial Sequence
  Description of Artificial Sequence: Synthetic oligonucleotide
  Antisense strand to SEQ ID NO: 1230778
uuauucgcaggaaaugugc

SEQ ID NO: 1230780 - RNA, 19 nt, Artificial Sequence
  Description of Artificial Sequence: Synthetic oligonucleotide
  Sense strand starting at position 3906 of SEQ ID NO: 917402
uucugucgauagucaaacu

SEQ ID NO: 1230781 - RNA, 19 nt, Artificial Sequence
  Description of Artificial Sequence: Synthetic oligonucleotide
  Antisense strand to SEQ ID NO: 1230780
aguuugacuaucgacagaa

SEQ ID NO: 1230782 - RNA, 19 nt, Artificial Sequence
  Description of Artificial Sequence: Synthetic oligonucleotide
  Sense strand starting at position 3948 of SEQ ID NO: 917402
guaguuucuuauuucccua

SEQ ID NO: 1230783 - RNA, 19 nt, Artificial Sequence
  Description of Artificial Sequence: Synthetic oligonucleotide
  Antisense strand to SEQ ID NO: 1230782
uagggaaauaagaaacuac

SEQ ID NO: 1230784 - RNA, 19 nt, Artificial Sequence
  Description of Artificial Sequence: Synthetic oligonucleotide
  Sense strand starting at position 3962 of SEQ ID NO: 917402
cccuauagcuucguuauau

SEQ ID NO: 1230785 - RNA, 19 nt, Artificial Sequence
  Description of Artificial Sequence: Synthetic oligonucleotide
  Antisense strand to SEQ ID NO: 1230784
auauaacgaagcuauaggg

SEQ ID NO: 1230786 - RNA, 19 nt, Artificial Sequence
  Description of Artificial Sequence: Synthetic oligonucleotide
  Sense strand starting at position 3963 of SEQ ID NO: 917403
ccuauagcuucguuauauu

SEQ ID NO: 1230787 - RNA, 19 nt, Artificial Sequence
  Description of Artificial Sequence: Synthetic oligonucleotide
  Antisense strand to SEQ ID NO: 1230786
aauauaacgaagcuauagg

SEQ ID NO: 1230788 - RNA, 19 nt, Artificial Sequence
  Description of Artificial Sequence: Synthetic oligonucleotide
  Sense strand starting at position 36 of SEQ ID NO: 917403
ucccaugccuucuguaaag

SEQ ID NO: 1230789 - RNA, 19 nt, Artificial Sequence
  Description of Artificial Sequence: Synthetic oligonucleotide
  Antisense strand to SEQ ID NO: 1230788
cuuuacagaaggcauggga

SEQ ID NO: 1230790 - RNA, 19 nt, Artificial Sequence
  Description of Artificial Sequence: Synthetic oligonucleotide
  Sense strand starting at position 378 of SEQ ID NO: 917403
cuggcuuucuuguaugaaa

SEQ ID NO: 1230791 - RNA, 19 nt, Artificial Sequence
  Description of Artificial Sequence: Synthetic oligonucleotide
  Antisense strand to SEQ ID NO: 1230790
uuucauacaagaaagccag

SEQ ID NO: 1230792 - RNA, 19 nt, Artificial Sequence
  Description of Artificial Sequence: Synthetic oligonucleotide
  Sense strand starting at position 380 of SEQ ID NO: 917403
ggcuuucuuguaugaaagu

SEQ ID NO: 1230793 - RNA, 19 nt, Artificial Sequence
  Description of Artificial Sequence: Synthetic oligonucleotide
  Antisense strand to SEQ ID NO: 1230792
acuuucauacaagaaagcc

SEQ ID NO: 1230794 - RNA, 19 nt, Artificial Sequence
  Description of Artificial Sequence: Synthetic oligonucleotide
  Sense strand starting at position 381 of SEQ ID NO: 917403
gcuuucuuguaugaaagug

SEQ ID NO: 1230795 - RNA, 19 nt, Artificial Sequence
  Description of Artificial Sequence: Synthetic oligonucleotide
  Antisense strand to SEQ ID NO: 1230794
cacuuucauacaagaaagc

SEQ ID NO: 1230796 - RNA, 19 nt, Artificial Sequence
  Description of Artificial Sequence: Synthetic oligonucleotide
  Sense strand starting at position 482 of SEQ ID NO: 917403
cagcgcuucugggccaaau

SEQ ID NO: 1230797 - RNA, 19 nt, Artificial Sequence
  Description of Artificial Sequence: Synthetic oligonucleotide
  Antisense strand to SEQ ID NO: 1230796
auuuggcccagaagcgcug

SEQ ID NO: 1230798 - RNA, 19 nt, Artificial Sequence
  Description of Artificial Sequence: Synthetic oligonucleotide
  Sense strand starting at position 484 of SEQ ID NO: 917403
gcgcuucugggccaaauau

SEQ ID NO: 1230799 - RNA, 19 nt, Artificial Sequence
  Description of Artificial Sequence: Synthetic oligonucleotide
  Antisense strand to SEQ ID NO: 1230798
auauuuggcccagaagcgc

SEQ ID NO: 1230800 - RNA, 19 nt, Artificial Sequence
  Description of Artificial Sequence: Synthetic oligonucleotide
  Sense strand starting at position 504 of SEQ ID NO: 917403
aagacagugucucagcgau

SEQ ID NO: 1230801 - RNA, 19 nt, Artificial Sequence
  Description of Artificial Sequence: Synthetic oligonucleotide
  Antisense strand to SEQ ID NO: 1230800
aucgcugagacacugucuu

SEQ ID NO: 1230802 - RNA, 19 nt, Artificial Sequence
  Description of Artificial Sequence: Synthetic oligonucleotide
  Sense strand starting at position 506 of SEQ ID NO: 917403
gacagugucucagcgauga

SEQ ID NO: 1230803 - RNA, 19 nt, Artificial Sequence
  Description of Artificial Sequence: Synthetic oligonucleotide
  Antisense strand to SEQ ID NO: 1230802
ucaucgcugagacacuguc

SEQ ID NO: 1230804 - RNA, 19 nt, Artificial Sequence
  Description of Artificial Sequence: Synthetic oligonucleotide
  Sense strand starting at position 508 of SEQ ID NO: 917403
cagugucucagcgaugauc

SEQ ID NO: 1230805 - RNA, 19 nt, Artificial Sequence
  Description of Artificial Sequence: Synthetic oligonucleotide
  Antisense strand to SEQ ID NO: 1230804
gaucaucgcugagacacug

SEQ ID NO: 1230806 - RNA, 19 nt, Artificial Sequence
  Description of Artificial Sequence: Synthetic oligonucleotide
  Sense strand starting at position 517 of SEQ ID NO: 917403
agcgaugauccgcaaacca

SEQ ID NO: 1230807 - RNA, 19 nt, Artificial Sequence
  Description of Artificial Sequence: Synthetic oligonucleotide
  Antisense strand to SEQ ID NO: 1230806
ugguuugcggaucaucgcu

SEQ ID NO: 1230808 - RNA, 19 nt, Artificial Sequence
  Description of Artificial Sequence: Synthetic oligonucleotide
  Sense strand starting at position 756 of SEQ ID NO: 917403
gcacacucauggcaugaau

SEQ ID NO: 1230809 - RNA, 19 nt, Artificial Sequence
  Description of Artificial Sequence: Synthetic oligonucleotide
  Antisense strand to SEQ ID NO: 1230808
auucaugccaugagugugc

SEQ ID NO: 1230810 - RNA, 19 nt, Artificial Sequence
  Description of Artificial Sequence: Synthetic oligonucleotide
  Sense strand starting at position 758 of SEQ ID NO: 917403
acacucauggcaugaauau

SEQ ID NO: 1230811 - RNA, 19 nt, Artificial Sequence
  Description of Artificial Sequence: Synthetic oligonucleotide
  Antisense strand to SEQ ID NO: 1230810
auauucaugccaugagugu

SEQ ID NO: 1230812 - RNA, 19 nt, Artificial Sequence
  Description of Artificial Sequence: Synthetic oligonucleotide
  Sense strand starting at position 999 of SEQ ID NO: 917403
cgccacuucucaguggaaa

SEQ ID NO: 1230813 - RNA, 19 nt, Artificial Sequence
  Description of Artificial Sequence: Synthetic oligonucleotide
  Antisense strand to SEQ ID NO: 1230812
uuuccacugagaaguggcg

SEQ ID NO: 1230814 - RNA, 19 nt, Artificial Sequence
  Description of Artificial Sequence: Synthetic oligonucleotide
  Sense strand starting at position 2275 of SEQ ID NO: 917403
gcgauugacucgcggacga

SEQ ID NO: 1230815 - RNA, 19 nt, Artificial Sequence
  Description of Artificial Sequence: Synthetic oligonucleotide
  Antisense strand to SEQ ID NO: 1230814
ucguccgcgagucaaucgc

SEQ ID NO: 1230816 - RNA, 19 nt, Artificial Sequence
  Description of Artificial Sequence: Synthetic oligonucleotide
  Sense strand starting at position 2276 of SEQ ID NO: 917403
cgauugacucgcggacgaa

SEQ ID NO: 1230817 - RNA, 19 nt, Artificial Sequence
  Description of Artificial Sequence: Synthetic oligonucleotide
  Antisense strand to SEQ ID NO: 1230816
uucguccgcgagucaaucg

SEQ ID NO: 1230818 - RNA, 19 nt, Artificial Sequence
  Description of Artificial Sequence: Synthetic oligonucleotide
  Sense strand starting at position 2289 of SEQ ID NO: 917403
gacgaacuuugccaagaga

SEQ ID NO: 1230819 - RNA, 19 nt, Artificial Sequence
  Description of Artificial Sequence: Synthetic oligonucleotide
  Antisense strand to SEQ ID NO: 1230818
ucucuuggcaaaguucguc

SEQ ID NO: 1230820 - RNA, 19 nt, Artificial Sequence
  Description of Artificial Sequence: Synthetic oligonucleotide
  Sense strand starting at position 3311 of SEQ ID NO: 917403
ccuccucucugaggaguau

SEQ ID NO: 1230821 - RNA, 19 nt, Artificial Sequence
  Description of Artificial Sequence: Synthetic oligonucleotide
  Antisense strand to SEQ ID NO: 1230820
auacuccucagagaggagg

SEQ ID NO: 1230822 - RNA, 19 nt, Artificial Sequence
  Description of Artificial Sequence: Synthetic oligonucleotide
  Sense strand starting at position 3315 of SEQ ID NO: 917403
cucucugaggaguauguuu

SEQ ID NO: 1230823 - RNA, 19 nt, Artificial Sequence
  Description of Artificial Sequence: Synthetic oligonucleotide
  Antisense strand to SEQ ID NO: 1230822
aaacauacuccucagagag

SEQ ID NO: 1230824 - RNA, 19 nt, Artificial Sequence
  Description of Artificial Sequence: Synthetic oligonucleotide
  Sense strand starting at position 3338 of SEQ ID NO: 917403
guguguaugaacuguaggu

SEQ ID NO: 1230825 - RNA, 19 nt, Artificial Sequence
  Description of Artificial Sequence: Synthetic oligonucleotide
  Antisense strand to SEQ ID NO: 1230824
accuacaguucauacacac

SEQ ID NO: 1230826 - RNA, 19 nt, Artificial Sequence
  Description of Artificial Sequence: Synthetic oligonucleotide
  Sense strand starting at position 3348 of SEQ ID NO: 917403
acuguagguguguauauga

SEQ ID NO: 1230827 - RNA, 19 nt, Artificial Sequence
  Description of Artificial Sequence: Synthetic oligonucleotide
  Antisense strand to SEQ ID NO: 1230826
ucauauacacaccuacagu

SEQ ID NO: 1230828 - RNA, 19 nt, Artificial Sequence
  Description of Artificial Sequence: Synthetic oligonucleotide
  Sense strand starting at position 3357 of SEQ ID NO: 917403
guguauaugaacugagacu

SEQ ID NO: 1230829 - RNA, 19 nt, Artificial Sequence
  Description of Artificial Sequence: Synthetic oligonucleotide
  Antisense strand to SEQ ID NO: 1230828
agucucaguucauauacac

SEQ ID NO: 1230830 - RNA, 19 nt, Artificial Sequence
  Description of Artificial Sequence: Synthetic oligonucleotide
  Sense strand starting at position 3794 of SEQ ID NO: 917403
agcaguuccaugcguugaa

SEQ ID NO: 1230831 - RNA, 19 nt, Artificial Sequence
  Description of Artificial Sequence: Synthetic oligonucleotide
  Antisense strand to SEQ ID NO: 1230830
uucaacgcauggaacugcu

SEQ ID NO: 1230832 - RNA, 19 nt, Artificial Sequence
  Description of Artificial Sequence: Synthetic oligonucleotide
  Sense strand starting at position 3795 of SEQ ID NO: 917403
gcaguuccaugcguugaaa

SEQ ID NO: 1230833 - RNA, 19 nt, Artificial Sequence
  Description of Artificial Sequence: Synthetic oligonucleotide
  Antisense strand to SEQ ID NO: 1230832
uuucaacgcauggaacugc

SEQ ID NO: 1230834 - RNA, 19 nt, Artificial Sequence
  Description of Artificial Sequence: Synthetic oligonucleotide
  Sense strand starting at position 3797 of SEQ ID NO: 917403
aguuccaugcguugaaaga

SEQ ID NO: 1230835 - RNA, 19 nt, Artificial Sequence
  Description of Artificial Sequence: Synthetic oligonucleotide
  Antisense strand to SEQ ID NO: 1230834
ucuuucaacgcauggaacu

SEQ ID NO: 1230836 - RNA, 19 nt, Artificial Sequence
  Description of Artificial Sequence: Synthetic oligonucleotide
  Sense strand starting at position 3798 of SEQ ID NO: 917404
guuccaugcguugaaagaa

SEQ ID NO: 1230837 - RNA, 19 nt, Artificial Sequence
  Description of Artificial Sequence: Synthetic oligonucleotide
  Antisense strand to SEQ ID NO: 1230836
uucuuucaacgcauggaac

SEQ ID NO: 1230838 - RNA, 19 nt, Artificial Sequence
  Description of Artificial Sequence: Synthetic oligonucleotide
  Sense strand starting at position 31 of SEQ ID NO: 917404
agauaaauagcugggaguu

SEQ ID NO: 1230839 - RNA, 19 nt, Artificial Sequence
  Description of Artificial Sequence: Synthetic oligonucleotide
  Antisense strand to SEQ ID NO: 1230838
aacucccagcuauuuaucu

SEQ ID NO: 1230840 - RNA, 19 nt, Artificial Sequence
  Description of Artificial Sequence: Synthetic oligonucleotide
  Sense strand starting at position 32 of SEQ ID NO: 917404
gauaaauagcugggaguuc

SEQ ID NO: 1230841 - RNA, 19 nt, Artificial Sequence
  Description of Artificial Sequence: Synthetic oligonucleotide
  Antisense strand to SEQ ID NO: 1230840
gaacucccagcuauuuauc

SEQ ID NO: 1230842 - RNA, 19 nt, Artificial Sequence
  Description of Artificial Sequence: Synthetic oligonucleotide
  Sense strand starting at position 90 of SEQ ID NO: 917404
gcaggagaaucgaggagaa

SEQ ID NO: 1230843 - RNA, 19 nt, Artificial Sequence
  Description of Artificial Sequence: Synthetic oligonucleotide
  Antisense strand to SEQ ID NO: 1230842
uucuccucgauucuccugc

SEQ ID NO: 1230844 - RNA, 19 nt, Artificial Sequence
  Description of Artificial Sequence: Synthetic oligonucleotide
  Sense strand starting at position 216 of SEQ ID NO: 917404
ggagaagagucucucccau

SEQ ID NO: 1230845 - RNA, 19 nt, Artificial Sequence
  Description of Artificial Sequence: Synthetic oligonucleotide
  Antisense strand to SEQ ID NO: 1230844
augggagagacucuucucc

SEQ ID NO: 1230846 - RNA, 19 nt, Artificial Sequence
  Description of Artificial Sequence: Synthetic oligonucleotide
  Sense strand starting at position 218 of SEQ ID NO: 917404
agaagagucucucccauca

SEQ ID NO: 1230847 - RNA, 19 nt, Artificial Sequence
  Description of Artificial Sequence: Synthetic oligonucleotide
  Antisense strand to SEQ ID NO: 1230846
ugaugggagagacucuucu

SEQ ID NO: 1230848 - RNA, 19 nt, Artificial Sequence
  Description of Artificial Sequence: Synthetic oligonucleotide
  Sense strand starting at position 305 of SEQ ID NO: 917404
uggcuaccuccggaagaaa

SEQ ID NO: 1230849 - RNA, 19 nt, Artificial Sequence
  Description of Artificial Sequence: Synthetic oligonucleotide
  Antisense strand to SEQ ID NO: 1230848
uuucuuccggagguagcca

SEQ ID NO: 1230850 - RNA, 19 nt, Artificial Sequence
  Description of Artificial Sequence: Synthetic oligonucleotide
  Sense strand starting at position 326 of SEQ ID NO: 917404
gugagaccugcuuaaguag

SEQ ID NO: 1230851 - RNA, 19 nt, Artificial Sequence
  Description of Artificial Sequence: Synthetic oligonucleotide
  Antisense strand to SEQ ID NO: 1230850
cuacuuaagcaggucucac

SEQ ID NO: 1230852 - RNA, 19 nt, Artificial Sequence
  Description of Artificial Sequence: Synthetic oligonucleotide
  Sense strand starting at position 375 of SEQ ID NO: 917404
uaagucaggugcuuaacaa

SEQ ID NO: 1230853 - RNA, 19 nt, Artificial Sequence
  Description of Artificial Sequence: Synthetic oligonucleotide
  Antisense strand to SEQ ID NO: 1230852
uuguuaagcaccugacuua

SEQ ID NO: 1230854 - RNA, 19 nt, Artificial Sequence
  Description of Artificial Sequence: Synthetic oligonucleotide
  Sense strand starting at position 423 of SEQ ID NO: 917404
cuuagagaguuucuaacac

SEQ ID NO: 1230855 - RNA, 19 nt, Artificial Sequence
  Description of Artificial Sequence: Synthetic oligonucleotide
  Antisense strand to SEQ ID NO: 1230854
guguuagaaacucucuaag

SEQ ID NO: 1230856 - RNA, 19 nt, Artificial Sequence
  Description of Artificial Sequence: Synthetic oligonucleotide
  Sense strand starting at position 680 of SEQ ID NO: 917404
uacagcuugccuggagaau

SEQ ID NO: 1230857 - RNA, 19 nt, Artificial Sequence
  Description of Artificial Sequence: Synthetic oligonucleotide
  Antisense strand to SEQ ID NO: 1230856
auucuccaggcaagcugua

SEQ ID NO: 1230858 - RNA, 19 nt, Artificial Sequence
  Description of Artificial Sequence: Synthetic oligonucleotide
  Sense strand starting at position 681 of SEQ ID NO: 917404
acagcuugccuggagaaug

SEQ ID NO: 1230859 - RNA, 19 nt, Artificial Sequence
  Description of Artificial Sequence: Synthetic oligonucleotide
  Antisense strand to SEQ ID NO: 1230858
cauucuccaggcaagcugu

SEQ ID NO: 1230860 - RNA, 19 nt, Artificial Sequence
  Description of Artificial Sequence: Synthetic oligonucleotide
  Sense strand starting at position 686 of SEQ ID NO: 917404
uugccuggagaaugaagua

SEQ ID NO: 1230861 - RNA, 19 nt, Artificial Sequence
  Description of Artificial Sequence: Synthetic oligonucleotide
  Antisense strand to SEQ ID NO: 1230860
uacuucauucuccaggcaa

SEQ ID NO: 1230862 - RNA, 19 nt, Artificial Sequence
  Description of Artificial Sequence: Synthetic oligonucleotide
  Sense strand starting at position 772 of SEQ ID NO: 917404
gugaaaguauucucaccug

SEQ ID NO: 1230863 - RNA, 19 nt, Artificial Sequence
  Description of Artificial Sequence: Synthetic oligonucleotide
  Antisense strand to SEQ ID NO: 1230862
caggugagaauacuuucac

SEQ ID NO: 1230864 - RNA, 19 nt, Artificial Sequence
  Description of Artificial Sequence: Synthetic oligonucleotide
  Sense strand starting at position 877 of SEQ ID NO: 917404
guagaacaagccugucaaa

SEQ ID NO: 1230865 - RNA, 19 nt, Artificial Sequence
  Description of Artificial Sequence: Synthetic oligonucleotide
  Antisense strand to SEQ ID NO: 1230864
uuugacaggcuuguucuac

SEQ ID NO: 1230866 - RNA, 19 nt, Artificial Sequence
  Description of Artificial Sequence: Synthetic oligonucleotide
  Sense strand starting at position 944 of SEQ ID NO: 917404
ggcacugcucgcuuccaga

SEQ ID NO: 1230867 - RNA, 19 nt, Artificial Sequence
  Description of Artificial Sequence: Synthetic oligonucleotide
  Antisense strand to SEQ ID NO: 1230866
ucuggaagcgagcagugcc

SEQ ID NO: 1230868 - RNA, 19 nt, Artificial Sequence
  Description of Artificial Sequence: Synthetic oligonucleotide
  Sense strand starting at position 1045 of SEQ ID NO: 917404
gcgccaaucccgccgagau

SEQ ID NO: 1230869 - RNA, 19 nt, Artificial Sequence
  Description of Artificial Sequence: Synthetic oligonucleotide
  Antisense strand to SEQ ID NO: 1230868
aucucggcgggauuggcgc

SEQ ID NO: 1230870 - RNA, 19 nt, Artificial Sequence
  Description of Artificial Sequence: Synthetic oligonucleotide
  Sense strand starting at position 2312 of SEQ ID NO: 917404
gggcaagagcucugaauua

SEQ ID NO: 1230871 - RNA, 19 nt, Artificial Sequence
  Description of Artificial Sequence: Synthetic oligonucleotide
  Antisense strand to SEQ ID NO: 1230870
uaauucagagcucuugccc

SEQ ID NO: 1230872 - RNA, 19 nt, Artificial Sequence
  Description of Artificial Sequence: Synthetic oligonucleotide
  Sense strand starting at position 2327 of SEQ ID NO: 917404
auuaguaucaguggaggca

SEQ ID NO: 1230873 - RNA, 19 nt, Artificial Sequence
  Description of Artificial Sequence: Synthetic oligonucleotide
  Antisense strand to SEQ ID NO: 1230872
ugccuccacugauacuaau

SEQ ID NO: 1230874 - RNA, 19 nt, Artificial Sequence
  Description of Artificial Sequence: Synthetic oligonucleotide
  Sense strand starting at position 2404 of SEQ ID NO: 917404
uuagcaucucaguauccau

SEQ ID NO: 1230875 - RNA, 19 nt, Artificial Sequence
  Description of Artificial Sequence: Synthetic oligonucleotide
  Antisense strand to SEQ ID NO: 1230874
auggauacugagaugcuaa

SEQ ID NO: 1230876 - RNA, 19 nt, Artificial Sequence
  Description of Artificial Sequence: Synthetic oligonucleotide
  Sense strand starting at position 2456 of SEQ ID NO: 917404
uggcucauuccugaacacu

SEQ ID NO: 1230877 - RNA, 19 nt, Artificial Sequence
  Description of Artificial Sequence: Synthetic oligonucleotide
  Antisense strand to SEQ ID NO: 1230876
aguguucaggaaugagcca

SEQ ID NO: 1230878 - RNA, 19 nt, Artificial Sequence
  Description of Artificial Sequence: Synthetic oligonucleotide
  Sense strand starting at position 2509 of SEQ ID NO: 917404
gcacuaaguguccaucauu

SEQ ID NO: 1230879 - RNA, 19 nt, Artificial Sequence
  Description of Artificial Sequence: Synthetic oligonucleotide
  Antisense strand to SEQ ID NO: 1230878
aaugauggacacuuagugc

SEQ ID NO: 1230880 - RNA, 19 nt, Artificial Sequence
  Description of Artificial Sequence: Synthetic oligonucleotide
  Sense strand starting at position 2512 of SEQ ID NO: 917404
cuaaguguccaucauuaau

SEQ ID NO: 1230881 - RNA, 19 nt, Artificial Sequence
  Description of Artificial Sequence: Synthetic oligonucleotide
  Antisense strand to SEQ ID NO: 1230880
auuaaugauggacacuuag

SEQ ID NO: 1230882 - RNA, 19 nt, Artificial Sequence
  Description of Artificial Sequence: Synthetic oligonucleotide
  Sense strand starting at position 2515 of SEQ ID NO: 917404
aguguccaucauuaauacu

SEQ ID NO: 1230883 - RNA, 19 nt, Artificial Sequence
  Description of Artificial Sequence: Synthetic oligonucleotide
  Antisense strand to SEQ ID NO: 1230882
aguauuaaugauggacacu

SEQ ID NO: 1230884 - RNA, 19 nt, Artificial Sequence
  Description of Artificial Sequence: Synthetic oligonucleotide
  Sense strand starting at position 2646 of SEQ ID NO: 917404
auagacugguucuuggauu

SEQ ID NO: 1230885 - RNA, 19 nt, Artificial Sequence
  Description of Artificial Sequence: Synthetic oligonucleotide
  Antisense strand to SEQ ID NO: 1230884
aauccaagaaccagucuau

SEQ ID NO: 1230886 - RNA, 19 nt, Artificial Sequence
  Description of Artificial Sequence: Synthetic oligonucleotide
  Sense strand starting at position 2696 of SEQ ID NO: 917404
gccucaggacuuuaaccuu

SEQ ID NO: 1230887 - RNA, 19 nt, Artificial Sequence
  Description of Artificial Sequence: Synthetic oligonucleotide
  Antisense strand to SEQ ID NO: 1230886
aagguuaaaguccugaggc

SEQ ID NO: 1230888 - RNA, 19 nt, Artificial Sequence
  Description of Artificial Sequence: Synthetic oligonucleotide
  Sense strand starting at position 2952 of SEQ ID NO: 917404
cuuggauagccuuacucau

SEQ ID NO: 1230889 - RNA, 19 nt, Artificial Sequence
  Description of Artificial Sequence: Synthetic oligonucleotide
  Antisense strand to SEQ ID NO: 1230888
augaguaaggcuauccaag

SEQ ID NO: 1230890 - RNA, 19 nt, Artificial Sequence
  Description of Artificial Sequence: Synthetic oligonucleotide
  Sense strand starting at position 2998 of SEQ ID NO: 917404
gaggguagugacugaguua

SEQ ID NO: 1230891 - RNA, 19 nt, Artificial Sequence
  Description of Artificial Sequence: Synthetic oligonucleotide
  Antisense strand to SEQ ID NO: 1230890
uaacucagucacuacccuc

SEQ ID NO: 1230892 - RNA, 19 nt, Artificial Sequence
  Description of Artificial Sequence: Synthetic oligonucleotide
  Sense strand starting at position 3001 of SEQ ID NO: 917404
gguagugacugaguuacau

SEQ ID NO: 1230893 - RNA, 19 nt, Artificial Sequence
  Description of Artificial Sequence: Synthetic oligonucleotide
  Antisense strand to SEQ ID NO: 1230892
auguaacucagucacuacc

SEQ ID NO: 1230894 - RNA, 19 nt, Artificial Sequence
  Description of Artificial Sequence: Synthetic oligonucleotide
  Sense strand starting at position 3113 of SEQ ID NO: 917404
agaccuaggccuugagaag

SEQ ID NO: 1230895 - RNA, 19 nt, Artificial Sequence
  Description of Artificial Sequence: Synthetic oligonucleotide
  Antisense strand to SEQ ID NO: 1230894
cuucucaaggccuaggucu

SEQ ID NO: 1230896 - RNA, 19 nt, Artificial Sequence
  Description of Artificial Sequence: Synthetic oligonucleotide
  Sense strand starting at position 3292 of SEQ ID NO: 917404
uuuguaauugaccaugcua

SEQ ID NO: 1230897 - RNA, 19 nt, Artificial Sequence
  Description of Artificial Sequence: Synthetic oligonucleotide
  Antisense strand to SEQ ID NO: 1230896
uagcauggucaauuacaaa

SEQ ID NO: 1230898 - RNA, 19 nt, Artificial Sequence
  Description of Artificial Sequence: Synthetic oligonucleotide
  Sense strand starting at position 3294 of SEQ ID NO: 917404
uguaauugaccaugcuaau

SEQ ID NO: 1230899 - RNA, 19 nt, Artificial Sequence
  Description of Artificial Sequence: Synthetic oligonucleotide
  Antisense strand to SEQ ID NO: 1230898
auuagcauggucaauuaca

SEQ ID NO: 1230900 - RNA, 19 nt, Artificial Sequence
  Description of Artificial Sequence: Synthetic oligonucleotide
  Sense strand starting at position 3311 of SEQ ID NO: 917404
augaaugugucuccaucca

SEQ ID NO: 1230901 - RNA, 19 nt, Artificial Sequence
  Description of Artificial Sequence: Synthetic oligonucleotide
  Antisense strand to SEQ ID NO: 1230900
uggauggagacacauucau

SEQ ID NO: 1230902 - RNA, 19 nt, Artificial Sequence
  Description of Artificial Sequence: Synthetic oligonucleotide
  Sense strand starting at position 3347 of SEQ ID NO: 917404
gggagacauccuugacucu

SEQ ID NO: 1230903 - RNA, 19 nt, Artificial Sequence
  Description of Artificial Sequence: Synthetic oligonucleotide
  Antisense strand to SEQ ID NO: 1230902
agagucaaggaugucuccc

SEQ ID NO: 1230904 - RNA, 19 nt, Artificial Sequence
  Description of Artificial Sequence: Synthetic oligonucleotide
  Sense strand starting at position 3387 of SEQ ID NO: 917404
uugauuaaucgccaaguuc

SEQ ID NO: 1230905 - RNA, 19 nt, Artificial Sequence
  Description of Artificial Sequence: Synthetic oligonucleotide
  Antisense strand to SEQ ID NO: 1230904
gaacuuggcgauuaaucaa

SEQ ID NO: 1230906 - RNA, 19 nt, Artificial Sequence
  Description of Artificial Sequence: Synthetic oligonucleotide
  Sense strand starting at position 3419 of SEQ ID NO: 917404
ccuauauuucuuggugucu

SEQ ID NO: 1230907 - RNA, 19 nt, Artificial Sequence
  Description of Artificial Sequence: Synthetic oligonucleotide
  Antisense strand to SEQ ID NO: 1230906
agacaccaagaaauauagg

SEQ ID NO: 1230908 - RNA, 19 nt, Artificial Sequence
  Description of Artificial Sequence: Synthetic oligonucleotide
  Sense strand starting at position 3839 of SEQ ID NO: 917404
auguuccucccuuggagaa

SEQ ID NO: 1230909 - RNA, 19 nt, Artificial Sequence
  Description of Artificial Sequence: Synthetic oligonucleotide
  Antisense strand to SEQ ID NO: 1230908
uucuccaagggaggaacau

SEQ ID NO: 1230910 - RNA, 19 nt, Artificial Sequence
  Description of Artificial Sequence: Synthetic oligonucleotide
  Sense strand starting at position 3935 of SEQ ID NO: 917404
uuacuuucugguggaauau

SEQ ID NO: 1230911 - RNA, 19 nt, Artificial Sequence
  Description of Artificial Sequence: Synthetic oligonucleotide
  Antisense strand to SEQ ID NO: 1230910
auauuccaccagaaaguaa

SEQ ID NO: 1230912 - RNA, 19 nt, Artificial Sequence
  Description of Artificial Sequence: Synthetic oligonucleotide
  Sense strand starting at position 3936 of SEQ ID NO: 917404
uacuuucugguggaauauu

SEQ ID NO: 1230913 - RNA, 19 nt, Artificial Sequence
  Description of Artificial Sequence: Synthetic oligonucleotide
  Antisense strand to SEQ ID NO: 1230912
aauauuccaccagaaagua

SEQ ID NO: 1230914 - RNA, 19 nt, Artificial Sequence
  Description of Artificial Sequence: Synthetic oligonucleotide
  Sense strand starting at position 3963 of SEQ ID NO: 917404
gucugucuccaggaggaca

SEQ ID NO: 1230915 - RNA, 19 nt, Artificial Sequence
  Description of Artificial Sequence: Synthetic oligonucleotide
  Antisense strand to SEQ ID NO: 1230914
uguccuccuggagacagac

SEQ ID NO: 1230916 - RNA, 19 nt, Artificial Sequence
  Description of Artificial Sequence: Synthetic oligonucleotide
  Sense strand starting at position 3982 of SEQ ID NO: 917405
gggacucuagcuugugacu

SEQ ID NO: 1230917 - RNA, 19 nt, Artificial Sequence
  Description of Artificial Sequence: Synthetic oligonucleotide
  Antisense strand to SEQ ID NO: 1230916
agucacaagcuagaguccc

SEQ ID NO: 1230918 - RNA, 19 nt, Artificial Sequence
  Description of Artificial Sequence: Synthetic oligonucleotide
  Sense strand starting at position 11 of SEQ ID NO: 917405
ucaacugucuauguuaaug

SEQ ID NO: 1230919 - RNA, 19 nt, Artificial Sequence
  Description of Artificial Sequence: Synthetic oligonucleotide
  Antisense strand to SEQ ID NO: 1230918
cauuaacauagacaguuga

SEQ ID NO: 1230920 - RNA, 19 nt, Artificial Sequence
  Description of Artificial Sequence: Synthetic oligonucleotide
  Sense strand starting at position 32 of SEQ ID NO: 917405
acccuuuguggguauggau

SEQ ID NO: 1230921 - RNA, 19 nt, Artificial Sequence
  Description of Artificial Sequence: Synthetic oligonucleotide
  Antisense strand to SEQ ID NO: 1230920
auccauacccacaaagggu

SEQ ID NO: 1230922 - RNA, 19 nt, Artificial Sequence
  Description of Artificial Sequence: Synthetic oligonucleotide
  Sense strand starting at position 174 of SEQ ID NO: 917405
uggccacaacgucaauauu

SEQ ID NO: 1230923 - RNA, 19 nt, Artificial Sequence
  Description of Artificial Sequence: Synthetic oligonucleotide
  Antisense strand to SEQ ID NO: 1230922
aauauugacguuguggcca

SEQ ID NO: 1230924 - RNA, 19 nt, Artificial Sequence
  Description of Artificial Sequence: Synthetic oligonucleotide
  Sense strand starting at position 194 of SEQ ID NO: 917405
cugguuacccuacauuaga

SEQ ID NO: 1230925 - RNA, 19 nt, Artificial Sequence
  Description of Artificial Sequence: Synthetic oligonucleotide
  Antisense strand to SEQ ID NO: 1230924
ucuaauguaggguaaccag

SEQ ID NO: 1230926 - RNA, 19 nt, Artificial Sequence
  Description of Artificial Sequence: Synthetic oligonucleotide
  Sense strand starting at position 202 of SEQ ID NO: 917405
ccuacauuagaguaugcuu

SEQ ID NO: 1230927 - RNA, 19 nt, Artificial Sequence
  Description of Artificial Sequence: Synthetic oligonucleotide
  Antisense strand to SEQ ID NO: 1230926
aagcauacucuaauguagg

SEQ ID NO: 1230928 - RNA, 19 nt, Artificial Sequence
  Description of Artificial Sequence: Synthetic oligonucleotide
  Sense strand starting at position 207 of SEQ ID NO: 917405
auuagaguaugcuuccaaa

SEQ ID NO: 1230929 - RNA, 19 nt, Artificial Sequence
  Description of Artificial Sequence: Synthetic oligonucleotide
  Antisense strand to SEQ ID NO: 1230928
uuuggaagcauacucuaau

SEQ ID NO: 1230930 - RNA, 19 nt, Artificial Sequence
  Description of Artificial Sequence: Synthetic oligonucleotide
  Sense strand starting at position 222 of SEQ ID NO: 917405
caaagcugugugcauaaca

SEQ ID NO: 1230931 - RNA, 19 nt, Artificial Sequence
  Description of Artificial Sequence: Synthetic oligonucleotide
  Antisense strand to SEQ ID NO: 1230930
uguuaugcacacagcuuug

SEQ ID NO: 1230932 - RNA, 19 nt, Artificial Sequence
  Description of Artificial Sequence: Synthetic oligonucleotide
  Sense strand starting at position 251 of SEQ ID NO: 917405
uagaguagccauuacugca

SEQ ID NO: 1230933 - RNA, 19 nt, Artificial Sequence
  Description of Artificial Sequence: Synthetic oligonucleotide
  Antisense strand to SEQ ID NO: 1230932
ugcaguaauggcuacucua

SEQ ID NO: 1230934 - RNA, 19 nt, Artificial Sequence
  Description of Artificial Sequence: Synthetic oligonucleotide
  Sense strand starting at position 277 of SEQ ID NO: 917405
aagggaaauuugcaagaau

SEQ ID NO: 1230935 - RNA, 19 nt, Artificial Sequence
  Description of Artificial Sequence: Synthetic oligonucleotide
  Antisense strand to SEQ ID NO: 1230934
auucuugcaaauuucccuu

SEQ ID NO: 1230936 - RNA, 19 nt, Artificial Sequence
  Description of Artificial Sequence: Synthetic oligonucleotide
  Sense strand starting at position 295 of SEQ ID NO: 917405
uuggauacaucagaauuua

SEQ ID NO: 1230937 - RNA, 19 nt, Artificial Sequence
  Description of Artificial Sequence: Synthetic oligonucleotide
  Antisense strand to SEQ ID NO: 1230936
uaaauucugauguauccaa

SEQ ID NO: 1230938 - RNA, 19 nt, Artificial Sequence
  Description of Artificial Sequence: Synthetic oligonucleotide
  Sense strand starting at position 538 of SEQ ID NO: 917405
gggugagggugaaaggauu

SEQ ID NO: 1230939 - RNA, 19 nt, Artificial Sequence
  Description of Artificial Sequence: Synthetic oligonucleotide
  Antisense strand to SEQ ID NO: 1230938
aauccuuucacccucaccc

SEQ ID NO: 1230940 - RNA, 19 nt, Artificial Sequence
  Description of Artificial Sequence: Synthetic oligonucleotide
  Sense strand starting at position 551 of SEQ ID NO: 917405
aggauuuggugauagacaa

SEQ ID NO: 1230941 - RNA, 19 nt, Artificial Sequence
  Description of Artificial Sequence: Synthetic oligonucleotide
  Antisense strand to SEQ ID NO: 1230940
uugucuaucaccaaauccu

SEQ ID NO: 1230942 - RNA, 19 nt, Artificial Sequence
  Description of Artificial Sequence: Synthetic oligonucleotide
  Sense strand starting at position 1006 of SEQ ID NO: 917405
ucugguaaaugucucauga

SEQ ID NO: 1230943 - RNA, 19 nt, Artificial Sequence
  Description of Artificial Sequence: Synthetic oligonucleotide
  Antisense strand to SEQ ID NO: 1230942
ucaugagacauuuaccaga

SEQ ID NO: 1230944 - RNA, 19 nt, Artificial Sequence
  Description of Artificial Sequence: Synthetic oligonucleotide
  Sense strand starting at position 1054 of SEQ ID NO: 917405
agaguuacgcuccaucaau

SEQ ID NO: 1230945 - RNA, 19 nt, Artificial Sequence
  Description of Artificial Sequence: Synthetic oligonucleotide
  Antisense strand to SEQ ID NO: 1230944
auugauggagcguaacucu

SEQ ID NO: 1230946 - RNA, 19 nt, Artificial Sequence
  Description of Artificial Sequence: Synthetic oligonucleotide
  Sense strand starting at position 1266 of SEQ ID NO: 917405
aacuguugcaucgcgugaa

SEQ ID NO: 1230947 - RNA, 19 nt, Artificial Sequence
  Description of Artificial Sequence: Synthetic oligonucleotide
  Antisense strand to SEQ ID NO: 1230946
uucacgcgaugcaacaguu

SEQ ID NO: 1230948 - RNA, 19 nt, Artificial Sequence
  Description of Artificial Sequence: Synthetic oligonucleotide
  Sense strand starting at position 1308 of SEQ ID NO: 917405
accggaguacuccaauucu

SEQ ID NO: 1230949 - RNA, 19 nt, Artificial Sequence
  Description of Artificial Sequence: Synthetic oligonucleotide
  Antisense strand to SEQ ID NO: 1230948
agaauuggaguacuccggu

SEQ ID NO: 1230950 - RNA, 19 nt, Artificial Sequence
  Description of Artificial Sequence: Synthetic oligonucleotide
  Sense strand starting at position 1316 of SEQ ID NO: 917405
acuccaauucuccggugaa

SEQ ID NO: 1230951 - RNA, 19 nt, Artificial Sequence
  Description of Artificial Sequence: Synthetic oligonucleotide
  Antisense strand to SEQ ID NO: 1230950
uucaccggagaauuggagu

SEQ ID NO: 1230952 - RNA, 19 nt, Artificial Sequence
  Description of Artificial Sequence: Synthetic oligonucleotide
  Sense strand starting at position 2116 of SEQ ID NO: 917405
acgcuaagucaugaggaau

SEQ ID NO: 1230953 - RNA, 19 nt, Artificial Sequence
  Description of Artificial Sequence: Synthetic oligonucleotide
  Antisense strand to SEQ ID NO: 1230952
auuccucaugacuuagcgu

SEQ ID NO: 1230954 - RNA, 19 nt, Artificial Sequence
  Description of Artificial Sequence: Synthetic oligonucleotide
  Sense strand starting at position 2327 of SEQ ID NO: 917405
ggaauaucuggcuagugca

SEQ ID NO: 1230955 - RNA, 19 nt, Artificial Sequence
  Description of Artificial Sequence: Synthetic oligonucleotide
  Antisense strand to SEQ ID NO: 1230954
ugcacuagccagauauucc

SEQ ID NO: 1230956 - RNA, 19 nt, Artificial Sequence
  Description of Artificial Sequence: Synthetic oligonucleotide
  Sense strand starting at position 2451 of SEQ ID NO: 917405
cugauaggugcggaacuuu

SEQ ID NO: 1230957 - RNA, 19 nt, Artificial Sequence
  Description of Artificial Sequence: Synthetic oligonucleotide
  Antisense strand to SEQ ID NO: 1230956
aaaguuccgcaccuaucag

SEQ ID NO: 1230958 - RNA, 19 nt, Artificial Sequence
  Description of Artificial Sequence: Synthetic oligonucleotide
  Sense strand starting at position 2564 of SEQ ID NO: 917405
cggauaguaguguaauaaa

SEQ ID NO: 1230959 - RNA, 19 nt, Artificial Sequence
  Description of Artificial Sequence: Synthetic oligonucleotide
  Antisense strand to SEQ ID NO: 1230958
uuuauuacacuacuauccg

SEQ ID NO: 1230960 - RNA, 19 nt, Artificial Sequence
  Description of Artificial Sequence: Synthetic oligonucleotide
  Sense strand starting at position 2575 of SEQ ID NO: 917405
guaauaaaggauuguagug

SEQ ID NO: 1230961 - RNA, 19 nt, Artificial Sequence
  Description of Artificial Sequence: Synthetic oligonucleotide
  Antisense strand to SEQ ID NO: 1230960
cacuacaauccuuuauuac

SEQ ID NO: 1230962 - RNA, 19 nt, Artificial Sequence
  Description of Artificial Sequence: Synthetic oligonucleotide
  Sense strand starting at position 2585 of SEQ ID NO: 917405
auuguagugguguaagaac

SEQ ID NO: 1230963 - RNA, 19 nt, Artificial Sequence
  Description of Artificial Sequence: Synthetic oligonucleotide
  Antisense strand to SEQ ID NO: 1230962
guucuuacaccacuacaau

SEQ ID NO: 1230964 - RNA, 19 nt, Artificial Sequence
  Description of Artificial Sequence: Synthetic oligonucleotide
  Sense strand starting at position 2648 of SEQ ID NO: 917405
guagcugcugaauagaagu

SEQ ID NO: 1230965 - RNA, 19 nt, Artificial Sequence
  Description of Artificial Sequence: Synthetic oligonucleotide
  Antisense strand to SEQ ID NO: 1230964
acuucuauucagcagcuac

SEQ ID NO: 1230966 - RNA, 19 nt, Artificial Sequence
  Description of Artificial Sequence: Synthetic oligonucleotide
  Sense strand starting at position 2949 of SEQ ID NO: 917405
guauuagcuagucuacguu

SEQ ID NO: 1230967 - RNA, 19 nt, Artificial Sequence
  Description of Artificial Sequence: Synthetic oligonucleotide
  Antisense strand to SEQ ID NO: 1230966
aacguagacuagcuaauac

SEQ ID NO: 1230968 - RNA, 19 nt, Artificial Sequence
  Description of Artificial Sequence: Synthetic oligonucleotide
  Sense strand starting at position 2961 of SEQ ID NO: 917405
cuacguugcagaugaggaa

SEQ ID NO: 1230969 - RNA, 19 nt, Artificial Sequence
  Description of Artificial Sequence: Synthetic oligonucleotide
  Antisense strand to SEQ ID NO: 1230968
uuccucaucugcaacguag

SEQ ID NO: 1230970 - RNA, 19 nt, Artificial Sequence
  Description of Artificial Sequence: Synthetic oligonucleotide
  Sense strand starting at position 3025 of SEQ ID NO: 917405
agcagagaauuugaacuca

SEQ ID NO: 1230971 - RNA, 19 nt, Artificial Sequence
  Description of Artificial Sequence: Synthetic oligonucleotide
  Antisense strand to SEQ ID NO: 1230970
ugaguucaaauucucugcu

SEQ ID NO: 1230972 - RNA, 19 nt, Artificial Sequence
  Description of Artificial Sequence: Synthetic oligonucleotide
  Sense strand starting at position 3052 of SEQ ID NO: 917405
ugauuccacuuguccauua

SEQ ID NO: 1230973 - RNA, 19 nt, Artificial Sequence
  Description of Artificial Sequence: Synthetic oligonucleotide
  Antisense strand to SEQ ID NO: 1230972
uaauggacaaguggaauca

SEQ ID NO: 1230974 - RNA, 19 nt, Artificial Sequence
  Description of Artificial Sequence: Synthetic oligonucleotide
  Sense strand starting at position 3178 of SEQ ID NO: 917405
gcuguuaucacuucugugu

SEQ ID NO: 1230975 - RNA, 19 nt, Artificial Sequence
  Description of Artificial Sequence: Synthetic oligonucleotide
  Antisense strand to SEQ ID NO: 1230974
acacagaagugauaacagc

SEQ ID NO: 1230976 - RNA, 19 nt, Artificial Sequence
  Description of Artificial Sequence: Synthetic oligonucleotide
  Sense strand starting at position 3258 of SEQ ID NO: 917405
acuguuauugcccaucuga

SEQ ID NO: 1230977 - RNA, 19 nt, Artificial Sequence
  Description of Artificial Sequence: Synthetic oligonucleotide
  Antisense strand to SEQ ID NO: 1230976
ucagaugggcaauaacagu

SEQ ID NO: 1230978 - RNA, 19 nt, Artificial Sequence
  Description of Artificial Sequence: Synthetic oligonucleotide
  Sense strand starting at position 3271 of SEQ ID NO: 917405
aucugaacucgucaacuga

SEQ ID NO: 1230979 - RNA, 19 nt, Artificial Sequence
  Description of Artificial Sequence: Synthetic oligonucleotide
  Antisense strand to SEQ ID NO: 1230978
ucaguugacgaguucagau

SEQ ID NO: 1230980 - RNA, 19 nt, Artificial Sequence
  Description of Artificial Sequence: Synthetic oligonucleotide
  Sense strand starting at position 3422 of SEQ ID NO: 917405
aguuuaucccagcaaguug

SEQ ID NO: 1230981 - RNA, 19 nt, Artificial Sequence
  Description of Artificial Sequence: Synthetic oligonucleotide
  Antisense strand to SEQ ID NO: 1230980
caacuugcugggauaaacu

SEQ ID NO: 1230982 - RNA, 19 nt, Artificial Sequence
  Description of Artificial Sequence: Synthetic oligonucleotide
  Sense strand starting at position 3469 of SEQ ID NO: 917405
uuaugacauaugugaggau

SEQ ID NO: 1230983 - RNA, 19 nt, Artificial Sequence
  Description of Artificial Sequence: Synthetic oligonucleotide
  Antisense strand to SEQ ID NO: 1230982
auccucacauaugucauaa

SEQ ID NO: 1230984 - RNA, 19 nt, Artificial Sequence
  Description of Artificial Sequence: Synthetic oligonucleotide
  Sense strand starting at position 3473 of SEQ ID NO: 917405
gacauaugugaggaugugu

SEQ ID NO: 1230985 - RNA, 19 nt, Artificial Sequence
  Description of Artificial Sequence: Synthetic oligonucleotide
  Antisense strand to SEQ ID NO: 1230984
acacauccucacauauguc

SEQ ID NO: 1230986 - RNA, 19 nt, Artificial Sequence
  Description of Artificial Sequence: Synthetic oligonucleotide
  Sense strand starting at position 3642 of SEQ ID NO: 917405
cccagauuaguuuaggcaa

SEQ ID NO: 1230987 - RNA, 19 nt, Artificial Sequence
  Description of Artificial Sequence: Synthetic oligonucleotide
  Antisense strand to SEQ ID NO: 1230986
uugccuaaacuaaucuggg

SEQ ID NO: 1230988 - RNA, 19 nt, Artificial Sequence
  Description of Artificial Sequence: Synthetic oligonucleotide
  Sense strand starting at position 3645 of SEQ ID NO: 917405
agauuaguuuaggcaagag

SEQ ID NO: 1230989 - RNA, 19 nt, Artificial Sequence
  Description of Artificial Sequence: Synthetic oligonucleotide
  Antisense strand to SEQ ID NO: 1230988
cucuugccuaaacuaaucu

SEQ ID NO: 1230990 - RNA, 19 nt, Artificial Sequence
  Description of Artificial Sequence: Synthetic oligonucleotide
  Sense strand starting at position 3772 of SEQ ID NO: 917405
uauuaaguauuacugagga

SEQ ID NO: 1230991 - RNA, 19 nt, Artificial Sequence
  Description of Artificial Sequence: Synthetic oligonucleotide
  Antisense strand to SEQ ID NO: 1230990
uccucaguaauacuuaaua

SEQ ID NO: 1230992 - RNA, 19 nt, Artificial Sequence
  Description of Artificial Sequence: Synthetic oligonucleotide
  Sense strand starting at position 3779 of SEQ ID NO: 917405
uauuacugaggaugugaca

SEQ ID NO: 1230993 - RNA, 19 nt, Artificial Sequence
  Description of Artificial Sequence: Synthetic oligonucleotide
  Antisense strand to SEQ ID NO: 1230992
ugucacauccucaguaaua

SEQ ID NO: 1230994 - RNA, 19 nt, Artificial Sequence
  Description of Artificial Sequence: Synthetic oligonucleotide
  Sense strand starting at position 3861 of SEQ ID NO: 917405
gauauuggugcaggaggaa

SEQ ID NO: 1230995 - RNA, 19 nt, Artificial Sequence
  Description of Artificial Sequence: Synthetic oligonucleotide
  Antisense strand to SEQ ID NO: 1230994
uuccuccugcaccaauauc

SEQ ID NO: 1230996 - RNA, 19 nt, Artificial Sequence
  Description of Artificial Sequence: Synthetic oligonucleotide
  Sense strand starting at position 3967 of SEQ ID NO: 917406
acuuguuugcaacagaaag

SEQ ID NO: 1230997 - RNA, 19 nt, Artificial Sequence
  Description of Artificial Sequence: Synthetic oligonucleotide
  Antisense strand to SEQ ID NO: 1230996
cuuucuguugcaaacaagu

SEQ ID NO: 1230998 - RNA, 19 nt, Artificial Sequence
  Description of Artificial Sequence: Synthetic oligonucleotide
  Sense strand starting at position 20 of SEQ ID NO: 917406
uguugcuuggguuaucuaa

SEQ ID NO: 1230999 - RNA, 19 nt, Artificial Sequence
  Description of Artificial Sequence: Synthetic oligonucleotide
  Antisense strand to SEQ ID NO: 1230998
uuagauaacccaagcaaca

SEQ ID NO: 1231000 - RNA, 19 nt, Artificial Sequence
  Description of Artificial Sequence: Synthetic oligonucleotide
  Sense strand starting at position 474 of SEQ ID NO: 917406
ggucccuucucuuuagaug

SEQ ID NO: 1231001 - RNA, 19 nt, Artificial Sequence
  Description of Artificial Sequence: Synthetic oligonucleotide
  Antisense strand to SEQ ID NO: 1231000
caucuaaagagaagggacc

SEQ ID NO: 1231002 - RNA, 19 nt, Artificial Sequence
  Description of Artificial Sequence: Synthetic oligonucleotide
  Sense strand starting at position 475 of SEQ ID NO: 917406
gucccuucucuuuagaugu

SEQ ID NO: 1231003 - RNA, 19 nt, Artificial Sequence
  Description of Artificial Sequence: Synthetic oligonucleotide
  Antisense strand to SEQ ID NO: 1231002
acaucuaaagagaagggac

SEQ ID NO: 1231004 - RNA, 19 nt, Artificial Sequence
  Description of Artificial Sequence: Synthetic oligonucleotide
  Sense strand starting at position 485 of SEQ ID NO: 917406
uuuagauguuacuccaaug

SEQ ID NO: 1231005 - RNA, 19 nt, Artificial Sequence
  Description of Artificial Sequence: Synthetic oligonucleotide
  Antisense strand to SEQ ID NO: 1231004
cauuggaguaacaucuaaa

SEQ ID NO: 1231006 - RNA, 19 nt, Artificial Sequence
  Description of Artificial Sequence: Synthetic oligonucleotide
  Sense strand starting at position 516 of SEQ ID NO: 917406
agaguccuuccuugaccaa

SEQ ID NO: 1231007 - RNA, 19 nt, Artificial Sequence
  Description of Artificial Sequence: Synthetic oligonucleotide
  Antisense strand to SEQ ID NO: 1231006
uuggucaaggaaggacucu

SEQ ID NO: 1231008 - RNA, 19 nt, Artificial Sequence
  Description of Artificial Sequence: Synthetic oligonucleotide
  Sense strand starting at position 523 of SEQ ID NO: 917406
uuccuugaccaaugugaaa

SEQ ID NO: 1231009 - RNA, 19 nt, Artificial Sequence
  Description of Artificial Sequence: Synthetic oligonucleotide
  Antisense strand to SEQ ID NO: 1231008
uuucacauuggucaaggaa

SEQ ID NO: 1231010 - RNA, 19 nt, Artificial Sequence
  Description of Artificial Sequence: Synthetic oligonucleotide
  Sense strand starting at position 657 of SEQ ID NO: 917406
caaagccucccguaguaua

SEQ ID NO: 1231011 - RNA, 19 nt, Artificial Sequence
  Description of Artificial Sequence: Synthetic oligonucleotide
  Antisense strand to SEQ ID NO: 1231010
uauacuacgggaggcuuug

SEQ ID NO: 1231012 - RNA, 19 nt, Artificial Sequence
  Description of Artificial Sequence: Synthetic oligonucleotide
  Sense strand starting at position 1071 of SEQ ID NO: 917406
uuaggugaaacgugaguga

SEQ ID NO: 1231013 - RNA, 19 nt, Artificial Sequence
  Description of Artificial Sequence: Synthetic oligonucleotide
  Antisense strand to SEQ ID NO: 1231012
ucacucacguuucaccuaa

SEQ ID NO: 1231014 - RNA, 19 nt, Artificial Sequence
  Description of Artificial Sequence: Synthetic oligonucleotide
  Sense strand starting at position 1153 of SEQ ID NO: 917406
aaauaaucuguaggaagua

SEQ ID NO: 1231015 - RNA, 19 nt, Artificial Sequence
  Description of Artificial Sequence: Synthetic oligonucleotide
  Antisense strand to SEQ ID NO: 1231014
uacuuccuacagauuauuu

SEQ ID NO: 1231016 - RNA, 19 nt, Artificial Sequence
  Description of Artificial Sequence: Synthetic oligonucleotide
  Sense strand starting at position 1265 of SEQ ID NO: 917406
acgagagcagcucagcaau

SEQ ID NO: 1231017 - RNA, 19 nt, Artificial Sequence
  Description of Artificial Sequence: Synthetic oligonucleotide
  Antisense strand to SEQ ID NO: 1231016
auugcugagcugcucucgu

SEQ ID NO: 1231018 - RNA, 19 nt, Artificial Sequence
  Description of Artificial Sequence: Synthetic oligonucleotide
  Sense strand starting at position 1267 of SEQ ID NO: 917406
gagagcagcucagcaauaa

SEQ ID NO: 1231019 - RNA, 19 nt, Artificial Sequence
  Description of Artificial Sequence: Synthetic oligonucleotide
  Antisense strand to SEQ ID NO: 1231018
uuauugcugagcugcucuc

SEQ ID NO: 1231020 - RNA, 19 nt, Artificial Sequence
  Description of Artificial Sequence: Synthetic oligonucleotide
  Sense strand starting at position 1268 of SEQ ID NO: 917406
agagcagcucagcaauaaa

SEQ ID NO: 1231021 - RNA, 19 nt, Artificial Sequence
  Description of Artificial Sequence: Synthetic oligonucleotide
  Antisense strand to SEQ ID NO: 1231020
uuuauugcugagcugcucu

SEQ ID NO: 1231022 - RNA, 19 nt, Artificial Sequence
  Description of Artificial Sequence: Synthetic oligonucleotide
  Sense strand starting at position 2016 of SEQ ID NO: 917406
gguaaaucucgcgagaauu

SEQ ID NO: 1231023 - RNA, 19 nt, Artificial Sequence
  Description of Artificial Sequence: Synthetic oligonucleotide
  Antisense strand to SEQ ID NO: 1231022
aauucucgcgagauuuacc

SEQ ID NO: 1231024 - RNA, 19 nt, Artificial Sequence
  Description of Artificial Sequence: Synthetic oligonucleotide
  Sense strand starting at position 2018 of SEQ ID NO: 917406
uaaaucucgcgagaauuga

SEQ ID NO: 1231025 - RNA, 19 nt, Artificial Sequence
  Description of Artificial Sequence: Synthetic oligonucleotide
  Antisense strand to SEQ ID NO: 1231024
ucaauucucgcgagauuua

SEQ ID NO: 1231026 - RNA, 19 nt, Artificial Sequence
  Description of Artificial Sequence: Synthetic oligonucleotide
  Sense strand starting at position 2022 of SEQ ID NO: 917406
ucucgcgagaauugaugaa

SEQ ID NO: 1231027 - RNA, 19 nt, Artificial Sequence
  Description of Artificial Sequence: Synthetic oligonucleotide
  Antisense strand to SEQ ID NO: 1231026
uucaucaauucucgcgaga

SEQ ID NO: 1231028 - RNA, 19 nt, Artificial Sequence
  Description of Artificial Sequence: Synthetic oligonucleotide
  Sense strand starting at position 2026 of SEQ ID NO: 917406
gcgagaauugaugaagucu

SEQ ID NO: 1231029 - RNA, 19 nt, Artificial Sequence
  Description of Artificial Sequence: Synthetic oligonucleotide
  Antisense strand to SEQ ID NO: 1231028
agacuucaucaauucucgc

SEQ ID NO: 1231030 - RNA, 19 nt, Artificial Sequence
  Description of Artificial Sequence: Synthetic oligonucleotide
  Sense strand starting at position 2304 of SEQ ID NO: 917406
cgcucuuugagagcguaca

SEQ ID NO: 1231031 - RNA, 19 nt, Artificial Sequence
  Description of Artificial Sequence: Synthetic oligonucleotide
  Antisense strand to SEQ ID NO: 1231030
uguacgcucucaaagagcg

SEQ ID NO: 1231032 - RNA, 19 nt, Artificial Sequence
  Description of Artificial Sequence: Synthetic oligonucleotide
  Sense strand starting at position 2395 of SEQ ID NO: 917406
gugcccuaccaguaucaua

SEQ ID NO: 1231033 - RNA, 19 nt, Artificial Sequence
  Description of Artificial Sequence: Synthetic oligonucleotide
  Antisense strand to SEQ ID NO: 1231032
uaugauacugguagggcac

SEQ ID NO: 1231034 - RNA, 19 nt, Artificial Sequence
  Description of Artificial Sequence: Synthetic oligonucleotide
  Sense strand starting at position 2426 of SEQ ID NO: 917406
ugugaugugaacgagguuu

SEQ ID NO: 1231035 - RNA, 19 nt, Artificial Sequence
  Description of Artificial Sequence: Synthetic oligonucleotide
  Antisense strand to SEQ ID NO: 1231034
aaaccucguucacaucaca

SEQ ID NO: 1231036 - RNA, 19 nt, Artificial Sequence
  Description of Artificial Sequence: Synthetic oligonucleotide
  Sense strand starting at position 2432 of SEQ ID NO: 917406
gugaacgagguuuguaaac

SEQ ID NO: 1231037 - RNA, 19 nt, Artificial Sequence
  Description of Artificial Sequence: Synthetic oligonucleotide
  Antisense strand to SEQ ID NO: 1231036
guuuacaaaccucguucac

SEQ ID NO: 1231038 - RNA, 19 nt, Artificial Sequence
  Description of Artificial Sequence: Synthetic oligonucleotide
  Sense strand starting at position 2495 of SEQ ID NO: 917406
ugucuuguccaacaguacu

SEQ ID NO: 1231039 - RNA, 19 nt, Artificial Sequence
  Description of Artificial Sequence: Synthetic oligonucleotide
  Antisense strand to SEQ ID NO: 1231038
aguacuguuggacaagaca

SEQ ID NO: 1231040 - RNA, 19 nt, Artificial Sequence
  Description of Artificial Sequence: Synthetic oligonucleotide
  Sense strand starting at position 2670 of SEQ ID NO: 917406
ccuaucucagaucgggaaa

SEQ ID NO: 1231041 - RNA, 19 nt, Artificial Sequence
  Description of Artificial Sequence: Synthetic oligonucleotide
  Antisense strand to SEQ ID NO: 1231040
uuucccgaucugagauagg

SEQ ID NO: 1231042 - RNA, 19 nt, Artificial Sequence
  Description of Artificial Sequence: Synthetic oligonucleotide
  Sense strand starting at position 2671 of SEQ ID NO: 917406
cuaucucagaucgggaaau

SEQ ID NO: 1231043 - RNA, 19 nt, Artificial Sequence
  Description of Artificial Sequence: Synthetic oligonucleotide
  Antisense strand to SEQ ID NO: 1231042
auuucccgaucugagauag

SEQ ID NO: 1231044 - RNA, 19 nt, Artificial Sequence
  Description of Artificial Sequence: Synthetic oligonucleotide
  Sense strand starting at position 2745 of SEQ ID NO: 917406
uuuccugggugaucaaaua

SEQ ID NO: 1231045 - RNA, 19 nt, Artificial Sequence
  Description of Artificial Sequence: Synthetic oligonucleotide
  Antisense strand to SEQ ID NO: 1231044
uauuugaucacccaggaaa

SEQ ID NO: 1231046 - RNA, 19 nt, Artificial Sequence
  Description of Artificial Sequence: Synthetic oligonucleotide
  Sense strand starting at position 2753 of SEQ ID NO: 917406
gugaucaaauaaguuugau

SEQ ID NO: 1231047 - RNA, 19 nt, Artificial Sequence
  Description of Artificial Sequence: Synthetic oligonucleotide
  Antisense strand to SEQ ID NO: 1231046
aucaaacuuauuugaucac

SEQ ID NO: 1231048 - RNA, 19 nt, Artificial Sequence
  Description of Artificial Sequence: Synthetic oligonucleotide
  Sense strand starting at position 2788 of SEQ ID NO: 917406
uuuagauacuagguggaau

SEQ ID NO: 1231049 - RNA, 19 nt, Artificial Sequence
  Description of Artificial Sequence: Synthetic oligonucleotide
  Antisense strand to SEQ ID NO: 1231048
auuccaccuaguaucuaaa

SEQ ID NO: 1231050 - RNA, 19 nt, Artificial Sequence
  Description of Artificial Sequence: Synthetic oligonucleotide
  Sense strand starting at position 2789 of SEQ ID NO: 917406
uuagauacuagguggaauu

SEQ ID NO: 1231051 - RNA, 19 nt, Artificial Sequence
  Description of Artificial Sequence: Synthetic oligonucleotide
  Antisense strand to SEQ ID NO: 1231050
aauuccaccuaguaucuaa

SEQ ID NO: 1231052 - RNA, 19 nt, Artificial Sequence
  Description of Artificial Sequence: Synthetic oligonucleotide
  Sense strand starting at position 2917 of SEQ ID NO: 917406
gcuaaauuguucuuaggaa

SEQ ID NO: 1231053 - RNA, 19 nt, Artificial Sequence
  Description of Artificial Sequence: Synthetic oligonucleotide
  Antisense strand to SEQ ID NO: 1231052
uuccuaagaacaauuuagc

SEQ ID NO: 1231054 - RNA, 19 nt, Artificial Sequence
  Description of Artificial Sequence: Synthetic oligonucleotide
  Sense strand starting at position 2931 of SEQ ID NO: 917406
aggaacucuugaguuuaua

SEQ ID NO: 1231055 - RNA, 19 nt, Artificial Sequence
  Description of Artificial Sequence: Synthetic oligonucleotide
  Antisense strand to SEQ ID NO: 1231054
uauaaacucaagaguuccu

SEQ ID NO: 1231056 - RNA, 19 nt, Artificial Sequence
  Description of Artificial Sequence: Synthetic oligonucleotide
  Sense strand starting at position 2943 of SEQ ID NO: 917406
guuuauaauuugcuagagu

SEQ ID NO: 1231057 - RNA, 19 nt, Artificial Sequence
  Description of Artificial Sequence: Synthetic oligonucleotide
  Antisense strand to SEQ ID NO: 1231056
acucuagcaaauuauaaac

SEQ ID NO: 1231058 - RNA, 19 nt, Artificial Sequence
  Description of Artificial Sequence: Synthetic oligonucleotide
  Sense strand starting at position 2959 of SEQ ID NO: 917406
agugaagugucuuuaagga

SEQ ID NO: 1231059 - RNA, 19 nt, Artificial Sequence
  Description of Artificial Sequence: Synthetic oligonucleotide
  Antisense strand to SEQ ID NO: 1231058
uccuuaaagacacuucacu

SEQ ID NO: 1231060 - RNA, 19 nt, Artificial Sequence
  Description of Artificial Sequence: Synthetic oligonucleotide
  Sense strand starting at position 3066 of SEQ ID NO: 917406
gaauaaccaggguguugau

SEQ ID NO: 1231061 - RNA, 19 nt, Artificial Sequence
  Description of Artificial Sequence: Synthetic oligonucleotide
  Antisense strand to SEQ ID NO: 1231060
aucaacacccugguuauuc

SEQ ID NO: 1231062 - RNA, 19 nt, Artificial Sequence
  Description of Artificial Sequence: Synthetic oligonucleotide
  Sense strand starting at position 3244 of SEQ ID NO: 917406
ggaguuauauuucagugga

SEQ ID NO: 1231063 - RNA, 19 nt, Artificial Sequence
  Description of Artificial Sequence: Synthetic oligonucleotide
  Antisense strand to SEQ ID NO: 1231062
uccacugaaauauaacucc

SEQ ID NO: 1231064 - RNA, 19 nt, Artificial Sequence
  Description of Artificial Sequence: Synthetic oligonucleotide
  Sense strand starting at position 3284 of SEQ ID NO: 917406
ugauuuagauucuggagau

SEQ ID NO: 1231065 - RNA, 19 nt, Artificial Sequence
  Description of Artificial Sequence: Synthetic oligonucleotide
  Antisense strand to SEQ ID NO: 1231064
aucuccagaaucuaaauca

SEQ ID NO: 1231066 - RNA, 19 nt, Artificial Sequence
  Description of Artificial Sequence: Synthetic oligonucleotide
  Sense strand starting at position 3285 of SEQ ID NO: 917406
gauuuagauucuggagaug

SEQ ID NO: 1231067 - RNA, 19 nt, Artificial Sequence
  Description of Artificial Sequence: Synthetic oligonucleotide
  Antisense strand to SEQ ID NO: 1231066
caucuccagaaucuaaauc

SEQ ID NO: 1231068 - RNA, 19 nt, Artificial Sequence
  Description of Artificial Sequence: Synthetic oligonucleotide
  Sense strand starting at position 3294 of SEQ ID NO: 917406
ucuggagaugagugguguu

SEQ ID NO: 1231069 - RNA, 19 nt, Artificial Sequence
  Description of Artificial Sequence: Synthetic oligonucleotide
  Antisense strand to SEQ ID NO: 1231068
aacaccacucaucuccaga

SEQ ID NO: 1231070 - RNA, 19 nt, Artificial Sequence
  Description of Artificial Sequence: Synthetic oligonucleotide
  Sense strand starting at position 3308 of SEQ ID NO: 917406
guguuguguggguugcaca

SEQ ID NO: 1231071 - RNA, 19 nt, Artificial Sequence
  Description of Artificial Sequence: Synthetic oligonucleotide
  Antisense strand to SEQ ID NO: 1231070
ugugcaacccacacaacac

SEQ ID NO: 1231072 - RNA, 19 nt, Artificial Sequence
  Description of Artificial Sequence: Synthetic oligonucleotide
  Sense strand starting at position 3316 of SEQ ID NO: 917406
uggguugcacaauaugaau

SEQ ID NO: 1231073 - RNA, 19 nt, Artificial Sequence
  Description of Artificial Sequence: Synthetic oligonucleotide
  Antisense strand to SEQ ID NO: 1231072
auucauauugugcaaccca

SEQ ID NO: 1231074 - RNA, 19 nt, Artificial Sequence
  Description of Artificial Sequence: Synthetic oligonucleotide
  Sense strand starting at position 3413 of SEQ ID NO: 917406
uuuaauacugccgaaaguu

SEQ ID NO: 1231075 - RNA, 19 nt, Artificial Sequence
  Description of Artificial Sequence: Synthetic oligonucleotide
  Antisense strand to SEQ ID NO: 1231074
aacuuucggcaguauuaaa

SEQ ID NO: 1231076 - RNA, 19 nt, Artificial Sequence
  Description of Artificial Sequence: Synthetic oligonucleotide
  Sense strand starting at position 3474 of SEQ ID NO: 917406
ggcugacgccaccaauauu

SEQ ID NO: 1231077 - RNA, 19 nt, Artificial Sequence
  Description of Artificial Sequence: Synthetic oligonucleotide
  Antisense strand to SEQ ID NO: 1231076
aauauugguggcgucagcc

SEQ ID NO: 1231078 - RNA, 19 nt, Artificial Sequence
  Description of Artificial Sequence: Synthetic oligonucleotide
  Sense strand starting at position 3474 of SEQ ID NO: 917407
ggcugacgccaccaauauu

SEQ ID NO: 1231079 - RNA, 19 nt, Artificial Sequence
  Description of Artificial Sequence: Synthetic oligonucleotide
  Antisense strand to SEQ ID NO: 1231078
aauauugguggcgucagcc

SEQ ID NO: 1231080 - RNA, 19 nt, Artificial Sequence
  Description of Artificial Sequence: Synthetic oligonucleotide
  Sense strand starting at position 199 of SEQ ID NO: 917407
guguaaucugucgccucaa

SEQ ID NO: 1231081 - RNA, 19 nt, Artificial Sequence
  Description of Artificial Sequence: Synthetic oligonucleotide
  Antisense strand to SEQ ID NO: 1231080
uugaggcgacagauuacac

SEQ ID NO: 1231082 - RNA, 19 nt, Artificial Sequence
  Description of Artificial Sequence: Synthetic oligonucleotide
  Sense strand starting at position 305 of SEQ ID NO: 917407
uuugaaauguguccgaaug

SEQ ID NO: 1231083 - RNA, 19 nt, Artificial Sequence
  Description of Artificial Sequence: Synthetic oligonucleotide
  Antisense strand to SEQ ID NO: 1231082
cauucggacacauuucaaa

SEQ ID NO: 1231084 - RNA, 19 nt, Artificial Sequence
  Description of Artificial Sequence: Synthetic oligonucleotide
  Sense strand starting at position 369 of SEQ ID NO: 917407
augcaugacuuacuguuua

SEQ ID NO: 1231085 - RNA, 19 nt, Artificial Sequence
  Description of Artificial Sequence: Synthetic oligonucleotide
  Antisense strand to SEQ ID NO: 1231084
uaaacaguaagucaugcau

SEQ ID NO: 1231086 - RNA, 19 nt, Artificial Sequence
  Description of Artificial Sequence: Synthetic oligonucleotide
  Sense strand starting at position 374 of SEQ ID NO: 917407
ugacuuacuguuuaaugua

SEQ ID NO: 1231087 - RNA, 19 nt, Artificial Sequence
  Description of Artificial Sequence: Synthetic oligonucleotide
  Antisense strand to SEQ ID NO: 1231086
uacauuaaacaguaaguca

SEQ ID NO: 1231088 - RNA, 19 nt, Artificial Sequence
  Description of Artificial Sequence: Synthetic oligonucleotide
  Sense strand starting at position 511 of SEQ ID NO: 917407
guauauuagguggagccaa

SEQ ID NO: 1231089 - RNA, 19 nt, Artificial Sequence
  Description of Artificial Sequence: Synthetic oligonucleotide
  Antisense strand to SEQ ID NO: 1231088
uuggcuccaccuaauauac

SEQ ID NO: 1231090 - RNA, 19 nt, Artificial Sequence
  Description of Artificial Sequence: Synthetic oligonucleotide
  Sense strand starting at position 695 of SEQ ID NO: 917407
agaugaauaugcuuccucu

SEQ ID NO: 1231091 - RNA, 19 nt, Artificial Sequence
  Description of Artificial Sequence: Synthetic oligonucleotide
  Antisense strand to SEQ ID NO: 1231090
agaggaagcauauucaucu

SEQ ID NO: 1231092 - RNA, 19 nt, Artificial Sequence
  Description of Artificial Sequence: Synthetic oligonucleotide
  Sense strand starting at position 744 of SEQ ID NO: 917407
aaaggacccgucuagagua

SEQ ID NO: 1231093 - RNA, 19 nt, Artificial Sequence
  Description of Artificial Sequence: Synthetic oligonucleotide
  Antisense strand to SEQ ID NO: 1231092
uacucuagacggguccuuu

SEQ ID NO: 1231094 - RNA, 19 nt, Artificial Sequence
  Description of Artificial Sequence: Synthetic oligonucleotide
  Sense strand starting at position 749 of SEQ ID NO: 917407
acccgucuagaguauuaau

SEQ ID NO: 1231095 - RNA, 19 nt, Artificial Sequence
  Description of Artificial Sequence: Synthetic oligonucleotide
  Antisense strand to SEQ ID NO: 1231094
auuaauacucuagacgggu

SEQ ID NO: 1231096 - RNA, 19 nt, Artificial Sequence
  Description of Artificial Sequence: Synthetic oligonucleotide
  Sense strand starting at position 875 of SEQ ID NO: 917407
agcaguuuaaacgggugaa

SEQ ID NO: 1231097 - RNA, 19 nt, Artificial Sequence
  Description of Artificial Sequence: Synthetic oligonucleotide
  Antisense strand to SEQ ID NO: 1231096
uucacccguuuaaacugcu

SEQ ID NO: 1231098 - RNA, 19 nt, Artificial Sequence
  Description of Artificial Sequence: Synthetic oligonucleotide
  Sense strand starting at position 876 of SEQ ID NO: 917407
gcaguuuaaacgggugaaa

SEQ ID NO: 1231099 - RNA, 19 nt, Artificial Sequence
  Description of Artificial Sequence: Synthetic oligonucleotide
  Antisense strand to SEQ ID NO: 1231098
uuucacccguuuaaacugc

SEQ ID NO: 1231100 - RNA, 19 nt, Artificial Sequence
  Description of Artificial Sequence: Synthetic oligonucleotide
  Sense strand starting at position 878 of SEQ ID NO: 917407
aguuuaaacgggugaaauu

SEQ ID NO: 1231101 - RNA, 19 nt, Artificial Sequence
  Description of Artificial Sequence: Synthetic oligonucleotide
  Antisense strand to SEQ ID NO: 1231100
aauuucacccguuuaaacu

SEQ ID NO: 1231102 - RNA, 19 nt, Artificial Sequence
  Description of Artificial Sequence: Synthetic oligonucleotide
  Sense strand starting at position 879 of SEQ ID NO: 917407
guuuaaacgggugaaauuc

SEQ ID NO: 1231103 - RNA, 19 nt, Artificial Sequence
  Description of Artificial Sequence: Synthetic oligonucleotide
  Antisense strand to SEQ ID NO: 1231102
gaauuucacccguuuaaac

SEQ ID NO: 1231104 - RNA, 19 nt, Artificial Sequence
  Description of Artificial Sequence: Synthetic oligonucleotide
  Sense strand starting at position 901 of SEQ ID NO: 917407
cagugcucacuugaaauga

SEQ ID NO: 1231105 - RNA, 19 nt, Artificial Sequence
  Description of Artificial Sequence: Synthetic oligonucleotide
  Antisense strand to SEQ ID NO: 1231104
ucauuucaagugagcacug

SEQ ID NO: 1231106 - RNA, 19 nt, Artificial Sequence
  Description of Artificial Sequence: Synthetic oligonucleotide
  Sense strand starting at position 943 of SEQ ID NO: 917407
auaaacugcccucaggauu

SEQ ID NO: 1231107 - RNA, 19 nt, Artificial Sequence
  Description of Artificial Sequence: Synthetic oligonucleotide
  Antisense strand to SEQ ID NO: 1231106
aauccugagggcaguuuau

SEQ ID NO: 1231108 - RNA, 19 nt, Artificial Sequence
  Description of Artificial Sequence: Synthetic oligonucleotide
  Sense strand starting at position 984 of SEQ ID NO: 917407
ggcauuauauacuuugaug

SEQ ID NO: 1231109 - RNA, 19 nt, Artificial Sequence
  Description of Artificial Sequence: Synthetic oligonucleotide
  Antisense strand to SEQ ID NO: 1231108
caucaaaguauauaaugcc

SEQ ID NO: 1231110 - RNA, 19 nt, Artificial Sequence
  Description of Artificial Sequence: Synthetic oligonucleotide
  Sense strand starting at position 1132 of SEQ ID NO: 917407
gcauuauuacaagacugcu

SEQ ID NO: 1231111 - RNA, 19 nt, Artificial Sequence
  Description of Artificial Sequence: Synthetic oligonucleotide
  Antisense strand to SEQ ID NO: 1231110
agcagucuuguaauaaugc

SEQ ID NO: 1231112 - RNA, 19 nt, Artificial Sequence
  Description of Artificial Sequence: Synthetic oligonucleotide
  Sense strand starting at position 1183 of SEQ ID NO: 917407
cgcagauggcuugaaagug

SEQ ID NO: 1231113 - RNA, 19 nt, Artificial Sequence
  Description of Artificial Sequence: Synthetic oligonucleotide
  Antisense strand to SEQ ID NO: 1231112
cacuuucaagccaucugcg

SEQ ID NO: 1231114 - RNA, 19 nt, Artificial Sequence
  Description of Artificial Sequence: Synthetic oligonucleotide
  Sense strand starting at position 1233 of SEQ ID NO: 917407
cacuuaugcgagcagaaca

SEQ ID NO: 1231115 - RNA, 19 nt, Artificial Sequence
  Description of Artificial Sequence: Synthetic oligonucleotide
  Antisense strand to SEQ ID NO: 1231114
uguucugcucgcauaagug

SEQ ID NO: 1231116 - RNA, 19 nt, Artificial Sequence
  Description of Artificial Sequence: Synthetic oligonucleotide
  Sense strand starting at position 1412 of SEQ ID NO: 917407
aagaauacgguuugugaca

SEQ ID NO: 1231117 - RNA, 19 nt, Artificial Sequence
  Description of Artificial Sequence: Synthetic oligonucleotide
  Antisense strand to SEQ ID NO: 1231116
ugucacaaaccguauucuu

SEQ ID NO: 1231118 - RNA, 19 nt, Artificial Sequence
  Description of Artificial Sequence: Synthetic oligonucleotide
  Sense strand starting at position 2482 of SEQ ID NO: 917407
cucacuuccugauugaaag

SEQ ID NO: 1231119 - RNA, 19 nt, Artificial Sequence
  Description of Artificial Sequence: Synthetic oligonucleotide
  Antisense strand to SEQ ID NO: 1231118
cuuucaaucaggaagugag

SEQ ID NO: 1231120 - RNA, 19 nt, Artificial Sequence
  Description of Artificial Sequence: Synthetic oligonucleotide
  Sense strand starting at position 2483 of SEQ ID NO: 917407
ucacuuccugauugaaagu

SEQ ID NO: 1231121 - RNA, 19 nt, Artificial Sequence
  Description of Artificial Sequence: Synthetic oligonucleotide
  Antisense strand to SEQ ID NO: 1231120
acuuucaaucaggaaguga

SEQ ID NO: 1231122 - RNA, 19 nt, Artificial Sequence
  Description of Artificial Sequence: Synthetic oligonucleotide
  Sense strand starting at position 2539 of SEQ ID NO: 917407
ggacaaagguaugaaggaa

SEQ ID NO: 1231123 - RNA, 19 nt, Artificial Sequence
  Description of Artificial Sequence: Synthetic oligonucleotide
  Antisense strand to SEQ ID NO: 1231122
uuccuucauaccuuugucc

SEQ ID NO: 1231124 - RNA, 19 nt, Artificial Sequence
  Description of Artificial Sequence: Synthetic oligonucleotide
  Sense strand starting at position 2575 of SEQ ID NO: 917407
gguccugguauuggaaaga

SEQ ID NO: 1231125 - RNA, 19 nt, Artificial Sequence
  Description of Artificial Sequence: Synthetic oligonucleotide
  Antisense strand to SEQ ID NO: 1231124
ucuuuccaauaccaggacc

SEQ ID NO: 1231126 - RNA, 19 nt, Artificial Sequence
  Description of Artificial Sequence: Synthetic oligonucleotide
  Sense strand starting at position 2608 of SEQ ID NO: 917407
ggaagcaugccauagaggu

SEQ ID NO: 1231127 - RNA, 19 nt, Artificial Sequence
  Description of Artificial Sequence: Synthetic oligonucleotide
  Antisense strand to SEQ ID NO: 1231126
accucuauggcaugcuucc

SEQ ID NO: 1231128 - RNA, 19 nt, Artificial Sequence
  Description of Artificial Sequence: Synthetic oligonucleotide
  Sense strand starting at position 2735 of SEQ ID NO: 917407
agacuacagucccuuugua

SEQ ID NO: 1231129 - RNA, 19 nt, Artificial Sequence
  Description of Artificial Sequence: Synthetic oligonucleotide
  Antisense strand to SEQ ID NO: 1231128
uacaaagggacuguagucu

SEQ ID NO: 1231130 - RNA, 19 nt, Artificial Sequence
  Description of Artificial Sequence: Synthetic oligonucleotide
  Sense strand starting at position 2986 of SEQ ID NO: 917407
ggaggcucuggcuacaaau

SEQ ID NO: 1231131 - RNA, 19 nt, Artificial Sequence
  Description of Artificial Sequence: Synthetic oligonucleotide
  Antisense strand to SEQ ID NO: 1231130
auuuguagccagagccucc

SEQ ID NO: 1231132 - RNA, 19 nt, Artificial Sequence
  Description of Artificial Sequence: Synthetic oligonucleotide
  Sense strand starting at position 2988 of SEQ ID NO: 917407
aggcucuggcuacaaauaa

SEQ ID NO: 1231133 - RNA, 19 nt, Artificial Sequence
  Description of Artificial Sequence: Synthetic oligonucleotide
  Antisense strand to SEQ ID NO: 1231132
uuauuuguagccagagccu

SEQ ID NO: 1231134 - RNA, 19 nt, Artificial Sequence
  Description of Artificial Sequence: Synthetic oligonucleotide
  Sense strand starting at position 3197 of SEQ ID NO: 917407
gagaauugagcuuaguucu

SEQ ID NO: 1231135 - RNA, 19 nt, Artificial Sequence
  Description of Artificial Sequence: Synthetic oligonucleotide
  Antisense strand to SEQ ID NO: 1231134
agaacuaagcucaauucuc

SEQ ID NO: 1231136 - RNA, 19 nt, Artificial Sequence
  Description of Artificial Sequence: Synthetic oligonucleotide
  Sense strand starting at position 3523 of SEQ ID NO: 917407
aaaggugaauugucuauug

SEQ ID NO: 1231137 - RNA, 19 nt, Artificial Sequence
  Description of Artificial Sequence: Synthetic oligonucleotide
  Antisense strand to SEQ ID NO: 1231136
caauagacaauucaccuuu

SEQ ID NO: 1231138 - RNA, 19 nt, Artificial Sequence
  Description of Artificial Sequence: Synthetic oligonucleotide
  Sense strand starting at position 3525 of SEQ ID NO: 917407
aggugaauugucuauugcu

SEQ ID NO: 1231139 - RNA, 19 nt, Artificial Sequence
  Description of Artificial Sequence: Synthetic oligonucleotide
  Antisense strand to SEQ ID NO: 1231138
agcaauagacaauucaccu

SEQ ID NO: 1231140 - RNA, 19 nt, Artificial Sequence
  Description of Artificial Sequence: Synthetic oligonucleotide
  Sense strand starting at position 3543 of SEQ ID NO: 917407
ugucuucucccuuagauua

SEQ ID NO: 1231141 - RNA, 19 nt, Artificial Sequence
  Description of Artificial Sequence: Synthetic oligonucleotide
  Antisense strand to SEQ ID NO: 1231140
uaaucuaagggagaagaca

SEQ ID NO: 1231142 - RNA, 19 nt, Artificial Sequence
  Description of Artificial Sequence: Synthetic oligonucleotide
  Sense strand starting at position 3578 of SEQ ID NO: 917407
ggauucuucuggguuuaga

SEQ ID NO: 1231143 - RNA, 19 nt, Artificial Sequence
  Description of Artificial Sequence: Synthetic oligonucleotide
  Antisense strand to SEQ ID NO: 1231142
ucuaaacccagaagaaucc

SEQ ID NO: 1231144 - RNA, 19 nt, Artificial Sequence
  Description of Artificial Sequence: Synthetic oligonucleotide
  Sense strand starting at position 3581 of SEQ ID NO: 917407
uucuucuggguuuagaaca

SEQ ID NO: 1231145 - RNA, 19 nt, Artificial Sequence
  Description of Artificial Sequence: Synthetic oligonucleotide
  Antisense strand to SEQ ID NO: 1231144
uguucuaaacccagaagaa

SEQ ID NO: 1231146 - RNA, 19 nt, Artificial Sequence
  Description of Artificial Sequence: Synthetic oligonucleotide
  Sense strand starting at position 3658 of SEQ ID NO: 917407
guggcaguugagugaauuu

SEQ ID NO: 1231147 - RNA, 19 nt, Artificial Sequence
  Description of Artificial Sequence: Synthetic oligonucleotide
  Antisense strand to SEQ ID NO: 1231146
aaauucacucaacugccac

SEQ ID NO: 1231148 - RNA, 19 nt, Artificial Sequence
  Description of Artificial Sequence: Synthetic oligonucleotide
  Sense strand starting at position 3667 of SEQ ID NO: 917407
gagugaauuuacuagaaga

SEQ ID NO: 1231149 - RNA, 19 nt, Artificial Sequence
  Description of Artificial Sequence: Synthetic oligonucleotide
  Antisense strand to SEQ ID NO: 1231148
ucuucuaguaaauucacuc

SEQ ID NO: 1231150 - RNA, 19 nt, Artificial Sequence
  Description of Artificial Sequence: Synthetic oligonucleotide
  Sense strand starting at position 3750 of SEQ ID NO: 917407
guguaaacaugucugagag

SEQ ID NO: 1231151 - RNA, 19 nt, Artificial Sequence
  Description of Artificial Sequence: Synthetic oligonucleotide
  Antisense strand to SEQ ID NO: 1231150
cucucagacauguuuacac

SEQ ID NO: 1231152 - RNA, 19 nt, Artificial Sequence
  Description of Artificial Sequence: Synthetic oligonucleotide
  Sense strand starting at position 3751 of SEQ ID NO: 917407
uguaaacaugucugagaga

SEQ ID NO: 1231153 - RNA, 19 nt, Artificial Sequence
  Description of Artificial Sequence: Synthetic oligonucleotide
  Antisense strand to SEQ ID NO: 1231152
ucucucagacauguuuaca

SEQ ID NO: 1231154 - RNA, 19 nt, Artificial Sequence
  Description of Artificial Sequence: Synthetic oligonucleotide
  Sense strand starting at position 3845 of SEQ ID NO: 917407
gagcaucuuggaggauuaa

SEQ ID NO: 1231155 - RNA, 19 nt, Artificial Sequence
  Description of Artificial Sequence: Synthetic oligonucleotide
  Antisense strand to SEQ ID NO: 1231154
uuaauccuccaagaugcuc

SEQ ID NO: 1231156 - RNA, 19 nt, Artificial Sequence
  Description of Artificial Sequence: Synthetic oligonucleotide
  Sense strand starting at position 3871 of SEQ ID NO: 917407
augagacaugguugcugau

SEQ ID NO: 1231157 - RNA, 19 nt, Artificial Sequence
  Description of Artificial Sequence: Synthetic oligonucleotide
  Antisense strand to SEQ ID NO: 1231156
aucagcaaccaugucucau

SEQ ID NO: 1231158 - RNA, 19 nt, Artificial Sequence
  Description of Artificial Sequence: Synthetic oligonucleotide
  Sense strand starting at position 3873 of SEQ ID NO: 917408
gagacaugguugcugauaa

SEQ ID NO: 1231159 - RNA, 19 nt, Artificial Sequence
  Description of Artificial Sequence: Synthetic oligonucleotide
  Antisense strand to SEQ ID NO: 1231158
uuaucagcaaccaugucuc

SEQ ID NO: 1231160 - RNA, 19 nt, Artificial Sequence
  Description of Artificial Sequence: Synthetic oligonucleotide
  Sense strand starting at position 28 of SEQ ID NO: 917408
uggaguaaguuaguuucca

SEQ ID NO: 1231161 - RNA, 19 nt, Artificial Sequence
  Description of Artificial Sequence: Synthetic oligonucleotide
  Antisense strand to SEQ ID NO: 1231160
uggaaacuaacuuacucca

SEQ ID NO: 1231162 - RNA, 19 nt, Artificial Sequence
  Description of Artificial Sequence: Synthetic oligonucleotide
  Sense strand starting at position 29 of SEQ ID NO: 917408
ggaguaaguuaguuuccaa

SEQ ID NO: 1231163 - RNA, 19 nt, Artificial Sequence
  Description of Artificial Sequence: Synthetic oligonucleotide
  Antisense strand to SEQ ID NO: 1231162
uuggaaacuaacuuacucc

SEQ ID NO: 1231164 - RNA, 19 nt, Artificial Sequence
  Description of Artificial Sequence: Synthetic oligonucleotide
  Sense strand starting at position 32 of SEQ ID NO: 917408
guaaguuaguuuccaauuu

SEQ ID NO: 1231165 - RNA, 19 nt, Artificial Sequence
  Description of Artificial Sequence: Synthetic oligonucleotide
  Antisense strand to SEQ ID NO: 1231164
aaauuggaaacuaacuuac

SEQ ID NO: 1231166 - RNA, 19 nt, Artificial Sequence
  Description of Artificial Sequence: Synthetic oligonucleotide
  Sense strand starting at position 125 of SEQ ID NO: 917408
auaauaucagauggugauu

SEQ ID NO: 1231167 - RNA, 19 nt, Artificial Sequence
  Description of Artificial Sequence: Synthetic oligonucleotide
  Antisense strand to SEQ ID NO: 1231166
aaucaccaucugauauuau

SEQ ID NO: 1231168 - RNA, 19 nt, Artificial Sequence
  Description of Artificial Sequence: Synthetic oligonucleotide
  Sense strand starting at position 204 of SEQ ID NO: 917408
guagucaccucucugaaau

SEQ ID NO: 1231169 - RNA, 19 nt, Artificial Sequence
  Description of Artificial Sequence: Synthetic oligonucleotide
  Antisense strand to SEQ ID NO: 1231168
auuucagagaggugacuac

SEQ ID NO: 1231170 - RNA, 19 nt, Artificial Sequence
  Description of Artificial Sequence: Synthetic oligonucleotide
  Sense strand starting at position 214 of SEQ ID NO: 917408
cucugaaaugauggcaauu

SEQ ID NO: 1231171 - RNA, 19 nt, Artificial Sequence
  Description of Artificial Sequence: Synthetic oligonucleotide
  Antisense strand to SEQ ID NO: 1231170
aauugccaucauuucagag

SEQ ID NO: 1231172 - RNA, 19 nt, Artificial Sequence
  Description of Artificial Sequence: Synthetic oligonucleotide
  Sense strand starting at position 246 of SEQ ID NO: 917408
aauaaaguucugugccaug

SEQ ID NO: 1231173 - RNA, 19 nt, Artificial Sequence
  Description of Artificial Sequence: Synthetic oligonucleotide
  Antisense strand to SEQ ID NO: 1231172
cauggcacagaacuuuauu

SEQ ID NO: 1231174 - RNA, 19 nt, Artificial Sequence
  Description of Artificial Sequence: Synthetic oligonucleotide
  Sense strand starting at position 279 of SEQ ID NO: 917408
gugggaaagugagcauuga

SEQ ID NO: 1231175 - RNA, 19 nt, Artificial Sequence
  Description of Artificial Sequence: Synthetic oligonucleotide
  Antisense strand to SEQ ID NO: 1231174
ucaaugcucacuuucccac

SEQ ID NO: 1231176 - RNA, 19 nt, Artificial Sequence
  Description of Artificial Sequence: Synthetic oligonucleotide
  Sense strand starting at position 283 of SEQ ID NO: 917408
gaaagugagcauugagcau

SEQ ID NO: 1231177 - RNA, 19 nt, Artificial Sequence
  Description of Artificial Sequence: Synthetic oligonucleotide
  Antisense strand to SEQ ID NO: 1231176
augcucaaugcucacuuuc

SEQ ID NO: 1231178 - RNA, 19 nt, Artificial Sequence
  Description of Artificial Sequence: Synthetic oligonucleotide
  Sense strand starting at position 362 of SEQ ID NO: 917408
gcaauaaggccugaguggu

SEQ ID NO: 1231179 - RNA, 19 nt, Artificial Sequence
  Description of Artificial Sequence: Synthetic oligonucleotide
  Antisense strand to SEQ ID NO: 1231178
accacucaggccuuauugc

SEQ ID NO: 1231180 - RNA, 19 nt, Artificial Sequence
  Description of Artificial Sequence: Synthetic oligonucleotide
  Sense strand starting at position 446 of SEQ ID NO: 917408
uacugucuagcaggaaaua

SEQ ID NO: 1231181 - RNA, 19 nt, Artificial Sequence
  Description of Artificial Sequence: Synthetic oligonucleotide
  Antisense strand to SEQ ID NO: 1231180
uauuuccugcuagacagua

SEQ ID NO: 1231182 - RNA, 19 nt, Artificial Sequence
  Description of Artificial Sequence: Synthetic oligonucleotide
  Sense strand starting at position 536 of SEQ ID NO: 917408
ucuguaucagcacaucaua

SEQ ID NO: 1231183 - RNA, 19 nt, Artificial Sequence
  Description of Artificial Sequence: Synthetic oligonucleotide
  Antisense strand to SEQ ID NO: 1231182
uaugaugugcugauacaga

SEQ ID NO: 1231184 - RNA, 19 nt, Artificial Sequence
  Description of Artificial Sequence: Synthetic oligonucleotide
  Sense strand starting at position 572 of SEQ ID NO: 917408
gaguaaugacauuguuaga

SEQ ID NO: 1231185 - RNA, 19 nt, Artificial Sequence
  Description of Artificial Sequence: Synthetic oligonucleotide
  Antisense strand to SEQ ID NO: 1231184
ucuaacaaugucauuacuc

SEQ ID NO: 1231186 - RNA, 19 nt, Artificial Sequence
  Description of Artificial Sequence: Synthetic oligonucleotide
  Sense strand starting at position 615 of SEQ ID NO: 917408
ucacgaaacugacuuaacu

SEQ ID NO: 1231187 - RNA, 19 nt, Artificial Sequence
  Description of Artificial Sequence: Synthetic oligonucleotide
  Antisense strand to SEQ ID NO: 1231186
aguuaagucaguuucguga

SEQ ID NO: 1231188 - RNA, 19 nt, Artificial Sequence
  Description of Artificial Sequence: Synthetic oligonucleotide
  Sense strand starting at position 815 of SEQ ID NO: 917408
aaaguagcuccaugaaaug

SEQ ID NO: 1231189 - RNA, 19 nt, Artificial Sequence
  Description of Artificial Sequence: Synthetic oligonucleotide
  Antisense strand to SEQ ID NO: 1231188
cauuucauggagcuacuuu

SEQ ID NO: 1231190 - RNA, 19 nt, Artificial Sequence
  Description of Artificial Sequence: Synthetic oligonucleotide
  Sense strand starting at position 1067 of SEQ ID NO: 917408
aacggcuucgccuaacaaa

SEQ ID NO: 1231191 - RNA, 19 nt, Artificial Sequence
  Description of Artificial Sequence: Synthetic oligonucleotide
  Antisense strand to SEQ ID NO: 1231190
uuuguuaggcgaagccguu

SEQ ID NO: 1231192 - RNA, 19 nt, Artificial Sequence
  Description of Artificial Sequence: Synthetic oligonucleotide
  Sense strand starting at position 1117 of SEQ ID NO: 917408
ggaccaaaugucgaaagca

SEQ ID NO: 1231193 - RNA, 19 nt, Artificial Sequence
  Description of Artificial Sequence: Synthetic oligonucleotide
  Antisense strand to SEQ ID NO: 1231192
ugcuuucgacauuuggucc

SEQ ID NO: 1231194 - RNA, 19 nt, Artificial Sequence
  Description of Artificial Sequence: Synthetic oligonucleotide
  Sense strand starting at position 1135 of SEQ ID NO: 917408
auauacugccacugaguua

SEQ ID NO: 1231195 - RNA, 19 nt, Artificial Sequence
  Description of Artificial Sequence: Synthetic oligonucleotide
  Antisense strand to SEQ ID NO: 1231194
uaacucaguggcaguauau

SEQ ID NO: 1231196 - RNA, 19 nt, Artificial Sequence
  Description of Artificial Sequence: Synthetic oligonucleotide
  Sense strand starting at position 1186 of SEQ ID NO: 917408
cuagauuuaugggacggga

SEQ ID NO: 1231197 - RNA, 19 nt, Artificial Sequence
  Description of Artificial Sequence: Synthetic oligonucleotide
  Antisense strand to SEQ ID NO: 1231196
ucccgucccauaaaucuag

SEQ ID NO: 1231198 - RNA, 19 nt, Artificial Sequence
  Description of Artificial Sequence: Synthetic oligonucleotide
  Sense strand starting at position 2103 of SEQ ID NO: 917408
ccaccuucuccaggguuau

SEQ ID NO: 1231199 - RNA, 19 nt, Artificial Sequence
  Description of Artificial Sequence: Synthetic oligonucleotide
  Antisense strand to SEQ ID NO: 1231198
auaacccuggagaaggugg

SEQ ID NO: 1231200 - RNA, 19 nt, Artificial Sequence
  Description of Artificial Sequence: Synthetic oligonucleotide
  Sense strand starting at position 2162 of SEQ ID NO: 917408
aaggauaaggcguguauga

SEQ ID NO: 1231201 - RNA, 19 nt, Artificial Sequence
  Description of Artificial Sequence: Synthetic oligonucleotide
  Antisense strand to SEQ ID NO: 1231200
ucauacacgccuuauccuu

SEQ ID NO: 1231202 - RNA, 19 nt, Artificial Sequence
  Description of Artificial Sequence: Synthetic oligonucleotide
  Sense strand starting at position 2164 of SEQ ID NO: 917408
ggauaaggcguguaugaug

SEQ ID NO: 1231203 - RNA, 19 nt, Artificial Sequence
  Description of Artificial Sequence: Synthetic oligonucleotide
  Antisense strand to SEQ ID NO: 1231202
caucauacacgccuuaucc

SEQ ID NO: 1231204 - RNA, 19 nt, Artificial Sequence
  Description of Artificial Sequence: Synthetic oligonucleotide
  Sense strand starting at position 2565 of SEQ ID NO: 917408
uugguuaaaugcucaacaa

SEQ ID NO: 1231205 - RNA, 19 nt, Artificial Sequence
  Description of Artificial Sequence: Synthetic oligonucleotide
  Antisense strand to SEQ ID NO: 1231204
uuguugagcauuuaaccaa

SEQ ID NO: 1231206 - RNA, 19 nt, Artificial Sequence
  Description of Artificial Sequence: Synthetic oligonucleotide
  Sense strand starting at position 2566 of SEQ ID NO: 917408
ugguuaaaugcucaacaau

SEQ ID NO: 1231207 - RNA, 19 nt, Artificial Sequence
  Description of Artificial Sequence: Synthetic oligonucleotide
  Antisense strand to SEQ ID NO: 1231206
auuguugagcauuuaacca

SEQ ID NO: 1231208 - RNA, 19 nt, Artificial Sequence
  Description of Artificial Sequence: Synthetic oligonucleotide
  Sense strand starting at position 2988 of SEQ ID NO: 917408
gguuacaucuuaucaauga

SEQ ID NO: 1231209 - RNA, 19 nt, Artificial Sequence
  Description of Artificial Sequence: Synthetic oligonucleotide
  Antisense strand to SEQ ID NO: 1231208
ucauugauaagauguaacc

SEQ ID NO: 1231210 - RNA, 19 nt, Artificial Sequence
  Description of Artificial Sequence: Synthetic oligonucleotide
  Sense strand starting at position 3096 of SEQ ID NO: 917408
ugccaagagguuuaucuua

SEQ ID NO: 1231211 - RNA, 19 nt, Artificial Sequence
  Description of Artificial Sequence: Synthetic oligonucleotide
  Antisense strand to SEQ ID NO: 1231210
uaagauaaaccucuuggca

SEQ ID NO: 1231212 - RNA, 19 nt, Artificial Sequence
  Description of Artificial Sequence: Synthetic oligonucleotide
  Sense strand starting at position 3098 of SEQ ID NO: 917408
ccaagagguuuaucuuauu

SEQ ID NO: 1231213 - RNA, 19 nt, Artificial Sequence
  Description of Artificial Sequence: Synthetic oligonucleotide
  Antisense strand to SEQ ID NO: 1231212
aauaagauaaaccucuugg

SEQ ID NO: 1231214 - RNA, 19 nt, Artificial Sequence
  Description of Artificial Sequence: Synthetic oligonucleotide
  Sense strand starting at position 3133 of SEQ ID NO: 917408
ccuguaaggcaaggauuau

SEQ ID NO: 1231215 - RNA, 19 nt, Artificial Sequence
  Description of Artificial Sequence: Synthetic oligonucleotide
  Antisense strand to SEQ ID NO: 1231214
auaauccuugccuuacagg

SEQ ID NO: 1231216 - RNA, 19 nt, Artificial Sequence
  Description of Artificial Sequence: Synthetic oligonucleotide
  Sense strand starting at position 3295 of SEQ ID NO: 917408
ucagcugaagccugacaau

SEQ ID NO: 1231217 - RNA, 19 nt, Artificial Sequence
  Description of Artificial Sequence: Synthetic oligonucleotide
  Antisense strand to SEQ ID NO: 1231216
auugucaggcuucagcuga

SEQ ID NO: 1231218 - RNA, 19 nt, Artificial Sequence
  Description of Artificial Sequence: Synthetic oligonucleotide
  Sense strand starting at position 3304 of SEQ ID NO: 917408
gccugacaauuagcuaaca

SEQ ID NO: 1231219 - RNA, 19 nt, Artificial Sequence
  Description of Artificial Sequence: Synthetic oligonucleotide
  Antisense strand to SEQ ID NO: 1231218
uguuagcuaauugucaggc

SEQ ID NO: 1231220 - RNA, 19 nt, Artificial Sequence
  Description of Artificial Sequence: Synthetic oligonucleotide
  Sense strand starting at position 3351 of SEQ ID NO: 917408
cugugauauuaucucagaa

SEQ ID NO: 1231221 - RNA, 19 nt, Artificial Sequence
  Description of Artificial Sequence: Synthetic oligonucleotide
  Antisense strand to SEQ ID NO: 1231220
uucugagauaauaucacag

SEQ ID NO: 1231222 - RNA, 19 nt, Artificial Sequence
  Description of Artificial Sequence: Synthetic oligonucleotide
  Sense strand starting at position 3424 of SEQ ID NO: 917408
uuuauauggguccaacagu

SEQ ID NO: 1231223 - RNA, 19 nt, Artificial Sequence
  Description of Artificial Sequence: Synthetic oligonucleotide
  Antisense strand to SEQ ID NO: 1231222
acuguuggacccauauaaa

SEQ ID NO: 1231224 - RNA, 19 nt, Artificial Sequence
  Description of Artificial Sequence: Synthetic oligonucleotide
  Sense strand starting at position 3583 of SEQ ID NO: 917408
gagagaguauagguuagua

SEQ ID NO: 1231225 - RNA, 19 nt, Artificial Sequence
  Description of Artificial Sequence: Synthetic oligonucleotide
  Antisense strand to SEQ ID NO: 1231224
uacuaaccuauacucucuc

SEQ ID NO: 1231226 - RNA, 19 nt, Artificial Sequence
  Description of Artificial Sequence: Synthetic oligonucleotide
  Sense strand starting at position 3585 of SEQ ID NO: 917408
gagaguauagguuaguauu

SEQ ID NO: 1231227 - RNA, 19 nt, Artificial Sequence
  Description of Artificial Sequence: Synthetic oligonucleotide
  Antisense strand to SEQ ID NO: 1231226
aauacuaaccuauacucuc

SEQ ID NO: 1231228 - RNA, 19 nt, Artificial Sequence
  Description of Artificial Sequence: Synthetic oligonucleotide
  Sense strand starting at position 3673 of SEQ ID NO: 917408
uucccauuacugggaauga

SEQ ID NO: 1231229 - RNA, 19 nt, Artificial Sequence
  Description of Artificial Sequence: Synthetic oligonucleotide
  Antisense strand to SEQ ID NO: 1231228
ucauucccaguaaugggaa

SEQ ID NO: 1231230 - RNA, 19 nt, Artificial Sequence
  Description of Artificial Sequence: Synthetic oligonucleotide
  Sense strand starting at position 3689 of SEQ ID NO: 917408
ugagcugugcaugcucuua

SEQ ID NO: 1231231 - RNA, 19 nt, Artificial Sequence
  Description of Artificial Sequence: Synthetic oligonucleotide
  Antisense strand to SEQ ID NO: 1231230
uaagagcaugcacagcuca

SEQ ID NO: 1231232 - RNA, 19 nt, Artificial Sequence
  Description of Artificial Sequence: Synthetic oligonucleotide
  Sense strand starting at position 3697 of SEQ ID NO: 917408
gcaugcucuuauuuaaguu

SEQ ID NO: 1231233 - RNA, 19 nt, Artificial Sequence
  Description of Artificial Sequence: Synthetic oligonucleotide
  Antisense strand to SEQ ID NO: 1231232
aacuuaaauaagagcaugc

SEQ ID NO: 1231234 - RNA, 19 nt, Artificial Sequence
  Description of Artificial Sequence: Synthetic oligonucleotide
  Sense strand starting at position 3825 of SEQ ID NO: 917408
uuuggaucauucccauaag

SEQ ID NO: 1231235 - RNA, 19 nt, Artificial Sequence
  Description of Artificial Sequence: Synthetic oligonucleotide
  Antisense strand to SEQ ID NO: 1231234
cuuaugggaaugauccaaa

SEQ ID NO: 1231236 - RNA, 19 nt, Artificial Sequence
  Description of Artificial Sequence: Synthetic oligonucleotide
  Sense strand starting at position 3828 of SEQ ID NO: 917408
ggaucauucccauaagcau

SEQ ID NO: 1231237 - RNA, 19 nt, Artificial Sequence
  Description of Artificial Sequence: Synthetic oligonucleotide
  Antisense strand to SEQ ID NO: 1231236
augcuuaugggaaugaucc

SEQ ID NO: 1231238 - RNA, 19 nt, Artificial Sequence
  Description of Artificial Sequence: Synthetic oligonucleotide
  Sense strand starting at position 3847 of SEQ ID NO: 917408
auuaacauugcgcaacauu

SEQ ID NO: 1231239 - RNA, 19 nt, Artificial Sequence
  Description of Artificial Sequence: Synthetic oligonucleotide
  Antisense strand to SEQ ID NO: 1231238
aauguugcgcaauguuaau

SEQ ID NO: 1231240 - RNA, 19 nt, Artificial Sequence
  Description of Artificial Sequence: Synthetic oligonucleotide
  Sense strand starting at position 3847 of SEQ ID NO: 917409
auuaacauugcgcaacauu

SEQ ID NO: 1231241 - RNA, 19 nt, Artificial Sequence
  Description of Artificial Sequence: Synthetic oligonucleotide
  Antisense strand to SEQ ID NO: 1231240
aauguugcgcaauguuaau

SEQ ID NO: 1231242 - RNA, 19 nt, Artificial Sequence
  Description of Artificial Sequence: Synthetic oligonucleotide
  Sense strand starting at position 17 of SEQ ID NO: 917409
uggaauacguaucuuaaga

SEQ ID NO: 1231243 - RNA, 19 nt, Artificial Sequence
  Description of Artificial Sequence: Synthetic oligonucleotide
  Antisense strand to SEQ ID NO: 1231242
ucuuaagauacguauucca

SEQ ID NO: 1231244 - RNA, 19 nt, Artificial Sequence
  Description of Artificial Sequence: Synthetic oligonucleotide
  Sense strand starting at position 40 of SEQ ID NO: 917409
cgcuuauugcaaugaauuu

SEQ ID NO: 1231245 - RNA, 19 nt, Artificial Sequence
  Description of Artificial Sequence: Synthetic oligonucleotide
  Antisense strand to SEQ ID NO: 1231244
aaauucauugcaauaagcg

SEQ ID NO: 1231246 - RNA, 19 nt, Artificial Sequence
  Description of Artificial Sequence: Synthetic oligonucleotide
  Sense strand starting at position 122 of SEQ ID NO: 917409
cuaauauacugccuggaaa

SEQ ID NO: 1231247 - RNA, 19 nt, Artificial Sequence
  Description of Artificial Sequence: Synthetic oligonucleotide
  Antisense strand to SEQ ID NO: 1231246
uuuccaggcaguauauuag

SEQ ID NO: 1231248 - RNA, 19 nt, Artificial Sequence
  Description of Artificial Sequence: Synthetic oligonucleotide
  Sense strand starting at position 203 of SEQ ID NO: 917409
aggguuaugcuuuaaaugu

SEQ ID NO: 1231249 - RNA, 19 nt, Artificial Sequence
  Description of Artificial Sequence: Synthetic oligonucleotide
  Antisense strand to SEQ ID NO: 1231248
acauuuaaagcauaacccu

SEQ ID NO: 1231250 - RNA, 19 nt, Artificial Sequence
  Description of Artificial Sequence: Synthetic oligonucleotide
  Sense strand starting at position 230 of SEQ ID NO: 917409
uugauuaagcugcaaauaa

SEQ ID NO: 1231251 - RNA, 19 nt, Artificial Sequence
  Description of Artificial Sequence: Synthetic oligonucleotide
  Antisense strand to SEQ ID NO: 1231250
uuauuugcagcuuaaucaa

SEQ ID NO: 1231252 - RNA, 19 nt, Artificial Sequence
  Description of Artificial Sequence: Synthetic oligonucleotide
  Sense strand starting at position 371 of SEQ ID NO: 917409
uguauucuaucacuaggaa

SEQ ID NO: 1231253 - RNA, 19 nt, Artificial Sequence
  Description of Artificial Sequence: Synthetic oligonucleotide
  Antisense strand to SEQ ID NO: 1231252
uuccuagugauagaauaca

SEQ ID NO: 1231254 - RNA, 19 nt, Artificial Sequence
  Description of Artificial Sequence: Synthetic oligonucleotide
  Sense strand starting at position 438 of SEQ ID NO: 917409
uggauacugcaguaaucaa

SEQ ID NO: 1231255 - RNA, 19 nt, Artificial Sequence
  Description of Artificial Sequence: Synthetic oligonucleotide
  Antisense strand to SEQ ID NO: 1231254
uugauuacugcaguaucca

SEQ ID NO: 1231256 - RNA, 19 nt, Artificial Sequence
  Description of Artificial Sequence: Synthetic oligonucleotide
  Sense strand starting at position 471 of SEQ ID NO: 917409
guauacaugcaguaucaau

SEQ ID NO: 1231257 - RNA, 19 nt, Artificial Sequence
  Description of Artificial Sequence: Synthetic oligonucleotide
  Antisense strand to SEQ ID NO: 1231256
auugauacugcauguauac

SEQ ID NO: 1231258 - RNA, 19 nt, Artificial Sequence
  Description of Artificial Sequence: Synthetic oligonucleotide
  Sense strand starting at position 585 of SEQ ID NO: 917409
agacgcacuuaauuaaaua

SEQ ID NO: 1231259 - RNA, 19 nt, Artificial Sequence
  Description of Artificial Sequence: Synthetic oligonucleotide
  Antisense strand to SEQ ID NO: 1231258
uauuuaauuaagugcgucu

SEQ ID NO: 1231260 - RNA, 19 nt, Artificial Sequence
  Description of Artificial Sequence: Synthetic oligonucleotide
  Sense strand starting at position 704 of SEQ ID NO: 917409
ggauaaaugucuuccacag

SEQ ID NO: 1231261 - RNA, 19 nt, Artificial Sequence
  Description of Artificial Sequence: Synthetic oligonucleotide
  Antisense strand to SEQ ID NO: 1231260
cuguggaagacauuuaucc

SEQ ID NO: 1231262 - RNA, 19 nt, Artificial Sequence
  Description of Artificial Sequence: Synthetic oligonucleotide
  Sense strand starting at position 753 of SEQ ID NO: 917409
cucucuacucccuggaaga

SEQ ID NO: 1231263 - RNA, 19 nt, Artificial Sequence
  Description of Artificial Sequence: Synthetic oligonucleotide
  Antisense strand to SEQ ID NO: 1231262
ucuuccagggaguagagag

SEQ ID NO: 1231264 - RNA, 19 nt, Artificial Sequence
  Description of Artificial Sequence: Synthetic oligonucleotide
  Sense strand starting at position 754 of SEQ ID NO: 917409
ucucuacucccuggaagau

SEQ ID NO: 1231265 - RNA, 19 nt, Artificial Sequence
  Description of Artificial Sequence: Synthetic oligonucleotide
  Antisense strand to SEQ ID NO: 1231264
aucuuccagggaguagaga

SEQ ID NO: 1231266 - RNA, 19 nt, Artificial Sequence
  Description of Artificial Sequence: Synthetic oligonucleotide
  Sense strand starting at position 1218 of SEQ ID NO: 917409
auuugagaauuagaaacga

SEQ ID NO: 1231267 - RNA, 19 nt, Artificial Sequence
  Description of Artificial Sequence: Synthetic oligonucleotide
  Antisense strand to SEQ ID NO: 1231266
ucguuucuaauucucaaau

SEQ ID NO: 1231268 - RNA, 19 nt, Artificial Sequence
  Description of Artificial Sequence: Synthetic oligonucleotide
  Sense strand starting at position 1228 of SEQ ID NO: 917409
uagaaacgaucuuuggagu

SEQ ID NO: 1231269 - RNA, 19 nt, Artificial Sequence
  Description of Artificial Sequence: Synthetic oligonucleotide
  Antisense strand to SEQ ID NO: 1231268
acuccaaagaucguuucua

SEQ ID NO: 1231270 - RNA, 19 nt, Artificial Sequence
  Description of Artificial Sequence: Synthetic oligonucleotide
  Sense strand starting at position 1229 of SEQ ID NO: 917409
agaaacgaucuuuggagua

SEQ ID NO: 1231271 - RNA, 19 nt, Artificial Sequence
  Description of Artificial Sequence: Synthetic oligonucleotide
  Antisense strand to SEQ ID NO: 1231270
uacuccaaagaucguuucu

SEQ ID NO: 1231272 - RNA, 19 nt, Artificial Sequence
  Description of Artificial Sequence: Synthetic oligonucleotide
  Sense strand starting at position 1234 of SEQ ID NO: 917409
cgaucuuuggaguaaauac

SEQ ID NO: 1231273 - RNA, 19 nt, Artificial Sequence
  Description of Artificial Sequence: Synthetic oligonucleotide
  Antisense strand to SEQ ID NO: 1231272
guauuuacuccaaagaucg

SEQ ID NO: 1231274 - RNA, 19 nt, Artificial Sequence
  Description of Artificial Sequence: Synthetic oligonucleotide
  Sense strand starting at position 1314 of SEQ ID NO: 917409
aguaaaucacaugguguca

SEQ ID NO: 1231275 - RNA, 19 nt, Artificial Sequence
  Description of Artificial Sequence: Synthetic oligonucleotide
  Antisense strand to SEQ ID NO: 1231274
ugacaccaugugauuuacu

SEQ ID NO: 1231276 - RNA, 19 nt, Artificial Sequence
  Description of Artificial Sequence: Synthetic oligonucleotide
  Sense strand starting at position 1543 of SEQ ID NO: 917409
ccacucuuugcucggauuu

SEQ ID NO: 1231277 - RNA, 19 nt, Artificial Sequence
  Description of Artificial Sequence: Synthetic oligonucleotide
  Antisense strand to SEQ ID NO: 1231276
aaauccgagcaaagagugg

SEQ ID NO: 1231278 - RNA, 19 nt, Artificial Sequence
  Description of Artificial Sequence: Synthetic oligonucleotide
  Sense strand starting at position 2123 of SEQ ID NO: 917409
uuguucgcaccgucuauua

SEQ ID NO: 1231279 - RNA, 19 nt, Artificial Sequence
  Description of Artificial Sequence: Synthetic oligonucleotide
  Antisense strand to SEQ ID NO: 1231278
uaauagacggugcgaacaa

SEQ ID NO: 1231280 - RNA, 19 nt, Artificial Sequence
  Description of Artificial Sequence: Synthetic oligonucleotide
  Sense strand starting at position 2133 of SEQ ID NO: 917409
cgucuauuauauucuagaa

SEQ ID NO: 1231281 - RNA, 19 nt, Artificial Sequence
  Description of Artificial Sequence: Synthetic oligonucleotide
  Antisense strand to SEQ ID NO: 1231280
uucuagaauauaauagacg

SEQ ID NO: 1231282 - RNA, 19 nt, Artificial Sequence
  Description of Artificial Sequence: Synthetic oligonucleotide
  Sense strand starting at position 2302 of SEQ ID NO: 917409
uguccucggcacuagaaua

SEQ ID NO: 1231283 - RNA, 19 nt, Artificial Sequence
  Description of Artificial Sequence: Synthetic oligonucleotide
  Antisense strand to SEQ ID NO: 1231282
uauucuagugccgaggaca

SEQ ID NO: 1231284 - RNA, 19 nt, Artificial Sequence
  Description of Artificial Sequence: Synthetic oligonucleotide
  Sense strand starting at position 2370 of SEQ ID NO: 917409
uuggaugaaucgcuugaaa

SEQ ID NO: 1231285 - RNA, 19 nt, Artificial Sequence
  Description of Artificial Sequence: Synthetic oligonucleotide
  Antisense strand to SEQ ID NO: 1231284
uuucaagcgauucauccaa

SEQ ID NO: 1231286 - RNA, 19 nt, Artificial Sequence
  Description of Artificial Sequence: Synthetic oligonucleotide
  Sense strand starting at position 2519 of SEQ ID NO: 917409
gcauucuaagucuagaaua

SEQ ID NO: 1231287 - RNA, 19 nt, Artificial Sequence
  Description of Artificial Sequence: Synthetic oligonucleotide
  Antisense strand to SEQ ID NO: 1231286
uauucuagacuuagaaugc

SEQ ID NO: 1231288 - RNA, 19 nt, Artificial Sequence
  Description of Artificial Sequence: Synthetic oligonucleotide
  Sense strand starting at position 2596 of SEQ ID NO: 917409
ugcauaugaaguugauaug

SEQ ID NO: 1231289 - RNA, 19 nt, Artificial Sequence
  Description of Artificial Sequence: Synthetic oligonucleotide
  Antisense strand to SEQ ID NO: 1231288
cauaucaacuucauaugca

SEQ ID NO: 1231290 - RNA, 19 nt, Artificial Sequence
  Description of Artificial Sequence: Synthetic oligonucleotide
  Sense strand starting at position 2602 of SEQ ID NO: 917409
ugaaguugauaugcaacuu

SEQ ID NO: 1231291 - RNA, 19 nt, Artificial Sequence
  Description of Artificial Sequence: Synthetic oligonucleotide
  Antisense strand to SEQ ID NO: 1231290
aaguugcauaucaacuuca

SEQ ID NO: 1231292 - RNA, 19 nt, Artificial Sequence
  Description of Artificial Sequence: Synthetic oligonucleotide
  Sense strand starting at position 2764 of SEQ ID NO: 917409
ggaaaugauuuccaaauau

SEQ ID NO: 1231293 - RNA, 19 nt, Artificial Sequence
  Description of Artificial Sequence: Synthetic oligonucleotide
  Antisense strand to SEQ ID NO: 1231292
auauuuggaaaucauuucc

SEQ ID NO: 1231294 - RNA, 19 nt, Artificial Sequence
  Description of Artificial Sequence: Synthetic oligonucleotide
  Sense strand starting at position 2803 of SEQ ID NO: 917409
ggugccucuuacucauuua

SEQ ID NO: 1231295 - RNA, 19 nt, Artificial Sequence
  Description of Artificial Sequence: Synthetic oligonucleotide
  Antisense strand to SEQ ID NO: 1231294
uaaaugaguaagaggcacc

SEQ ID NO: 1231296 - RNA, 19 nt, Artificial Sequence
  Description of Artificial Sequence: Synthetic oligonucleotide
  Sense strand starting at position 2834 of SEQ ID NO: 917409
uuaucauguucuucuauga

SEQ ID NO: 1231297 - RNA, 19 nt, Artificial Sequence
  Description of Artificial Sequence: Synthetic oligonucleotide
  Antisense strand to SEQ ID NO: 1231296
ucauagaagaacaugauaa

SEQ ID NO: 1231298 - RNA, 19 nt, Artificial Sequence
  Description of Artificial Sequence: Synthetic oligonucleotide
  Sense strand starting at position 2868 of SEQ ID NO: 917409
gaauuacuccugcagguaa

SEQ ID NO: 1231299 - RNA, 19 nt, Artificial Sequence
  Description of Artificial Sequence: Synthetic oligonucleotide
  Antisense strand to SEQ ID NO: 1231298
uuaccugcaggaguaauuc

SEQ ID NO: 1231300 - RNA, 19 nt, Artificial Sequence
  Description of Artificial Sequence: Synthetic oligonucleotide
  Sense strand starting at position 2919 of SEQ ID NO: 917409
aucccuguucucgagaaac

SEQ ID NO: 1231301 - RNA, 19 nt, Artificial Sequence
  Description of Artificial Sequence: Synthetic oligonucleotide
  Antisense strand to SEQ ID NO: 1231300
guuucucgagaacagggau

SEQ ID NO: 1231302 - RNA, 19 nt, Artificial Sequence
  Description of Artificial Sequence: Synthetic oligonucleotide
  Sense strand starting at position 2921 of SEQ ID NO: 917409
cccuguucucgagaaacuu

SEQ ID NO: 1231303 - RNA, 19 nt, Artificial Sequence
  Description of Artificial Sequence: Synthetic oligonucleotide
  Antisense strand to SEQ ID NO: 1231302
aaguuucucgagaacaggg

SEQ ID NO: 1231304 - RNA, 19 nt, Artificial Sequence
  Description of Artificial Sequence: Synthetic oligonucleotide
  Sense strand starting at position 2929 of SEQ ID NO: 917409
ucgagaaacuuucuauaau

SEQ ID NO: 1231305 - RNA, 19 nt, Artificial Sequence
  Description of Artificial Sequence: Synthetic oligonucleotide
  Antisense strand to SEQ ID NO: 1231304
auuauagaaaguuucucga

SEQ ID NO: 1231306 - RNA, 19 nt, Artificial Sequence
  Description of Artificial Sequence: Synthetic oligonucleotide
  Sense strand starting at position 3061 of SEQ ID NO: 917409
aguauuaucuccucacuga

SEQ ID NO: 1231307 - RNA, 19 nt, Artificial Sequence
  Description of Artificial Sequence: Synthetic oligonucleotide
  Antisense strand to SEQ ID NO: 1231306
ucagugaggagauaauacu

SEQ ID NO: 1231308 - RNA, 19 nt, Artificial Sequence
  Description of Artificial Sequence: Synthetic oligonucleotide
  Sense strand starting at position 3062 of SEQ ID NO: 917409
guauuaucuccucacugag

SEQ ID NO: 1231309 - RNA, 19 nt, Artificial Sequence
  Description of Artificial Sequence: Synthetic oligonucleotide
  Antisense strand to SEQ ID NO: 1231308
cucagugaggagauaauac

SEQ ID NO: 1231310 - RNA, 19 nt, Artificial Sequence
  Description of Artificial Sequence: Synthetic oligonucleotide
  Sense strand starting at position 3156 of SEQ ID NO: 917409
ggaggaaguguuugaaaug

SEQ ID NO: 1231311 - RNA, 19 nt, Artificial Sequence
  Description of Artificial Sequence: Synthetic oligonucleotide
  Antisense strand to SEQ ID NO: 1231310
cauuucaaacacuuccucc

SEQ ID NO: 1231312 - RNA, 19 nt, Artificial Sequence
  Description of Artificial Sequence: Synthetic oligonucleotide
  Sense strand starting at position 3214 of SEQ ID NO: 917409
ggucuauguguauaucaua

SEQ ID NO: 1231313 - RNA, 19 nt, Artificial Sequence
  Description of Artificial Sequence: Synthetic oligonucleotide
  Antisense strand to SEQ ID NO: 1231312
uaugauauacacauagacc

SEQ ID NO: 1231314 - RNA, 19 nt, Artificial Sequence
  Description of Artificial Sequence: Synthetic oligonucleotide
  Sense strand starting at position 3277 of SEQ ID NO: 917409
agaagaaccaagugcuaga

SEQ ID NO: 1231315 - RNA, 19 nt, Artificial Sequence
  Description of Artificial Sequence: Synthetic oligonucleotide
  Antisense strand to SEQ ID NO: 1231314
ucuagcacuugguucuucu

SEQ ID NO: 1231316 - RNA, 19 nt, Artificial Sequence
  Description of Artificial Sequence: Synthetic oligonucleotide
  Sense strand starting at position 3288 of SEQ ID NO: 917409
gugcuagaaugaucaauaa

SEQ ID NO: 1231317 - RNA, 19 nt, Artificial Sequence
  Description of Artificial Sequence: Synthetic oligonucleotide
  Antisense strand to SEQ ID NO: 1231316
uuauugaucauucuagcac

SEQ ID NO: 1231318 - RNA, 19 nt, Artificial Sequence
  Description of Artificial Sequence: Synthetic oligonucleotide
  Sense strand starting at position 3364 of SEQ ID NO: 917409
ggucucuaccgugaagaca

SEQ ID NO: 1231319 - RNA, 19 nt, Artificial Sequence
  Description of Artificial Sequence: Synthetic oligonucleotide
  Antisense strand to SEQ ID NO: 1231318
ugucuucacgguagagacc

SEQ ID NO: 1231320 - RNA, 19 nt, Artificial Sequence
  Description of Artificial Sequence: Synthetic oligonucleotide
  Sense strand starting at position 3444 of SEQ ID NO: 917409
ggagaaauaguguggugac

SEQ ID NO: 1231321 - RNA, 19 nt, Artificial Sequence
  Description of Artificial Sequence: Synthetic oligonucleotide
  Antisense strand to SEQ ID NO: 1231320
gucaccacacuauuucucc

SEQ ID NO: 1231322 - RNA, 19 nt, Artificial Sequence
  Description of Artificial Sequence: Synthetic oligonucleotide
  Sense strand starting at position 3444 of SEQ ID NO: 917410
ggagaaauaguguggugac

SEQ ID NO: 1231323 - RNA, 19 nt, Artificial Sequence
  Description of Artificial Sequence: Synthetic oligonucleotide
  Antisense strand to SEQ ID NO: 1231322
gucaccacacuauuucucc

SEQ ID NO: 1231324 - RNA, 19 nt, Artificial Sequence
  Description of Artificial Sequence: Synthetic oligonucleotide
  Sense strand starting at position 97 of SEQ ID NO: 917410
ccaaguacagcuggguaua

SEQ ID NO: 1231325 - RNA, 19 nt, Artificial Sequence
  Description of Artificial Sequence: Synthetic oligonucleotide
  Antisense strand to SEQ ID NO: 1231324
uauacccagcuguacuugg

SEQ ID NO: 1231326 - RNA, 19 nt, Artificial Sequence
  Description of Artificial Sequence: Synthetic oligonucleotide
  Sense strand starting at position 136 of SEQ ID NO: 917410
uggcuuggaucacuuguaa

SEQ ID NO: 1231327 - RNA, 19 nt, Artificial Sequence
  Description of Artificial Sequence: Synthetic oligonucleotide
  Antisense strand to SEQ ID NO: 1231326
uuacaagugauccaagcca

SEQ ID NO: 1231328 - RNA, 19 nt, Artificial Sequence
  Description of Artificial Sequence: Synthetic oligonucleotide
  Sense strand starting at position 220 of SEQ ID NO: 917410
uugugacagccucaaagua

SEQ ID NO: 1231329 - RNA, 19 nt, Artificial Sequence
  Description of Artificial Sequence: Synthetic oligonucleotide
  Antisense strand to SEQ ID NO: 1231328
uacuuugaggcugucacaa

SEQ ID NO: 1231330 - RNA, 19 nt, Artificial Sequence
  Description of Artificial Sequence: Synthetic oligonucleotide
  Sense strand starting at position 263 of SEQ ID NO: 917410
uggguaagguuugcaaacu

SEQ ID NO: 1231331 - RNA, 19 nt, Artificial Sequence
  Description of Artificial Sequence: Synthetic oligonucleotide
  Antisense strand to SEQ ID NO: 1231330
aguuugcaaaccuuaccca

SEQ ID NO: 1231332 - RNA, 19 nt, Artificial Sequence
  Description of Artificial Sequence: Synthetic oligonucleotide
  Sense strand starting at position 445 of SEQ ID NO: 917410
agucgaacuccagaacacu

SEQ ID NO: 1231333 - RNA, 19 nt, Artificial Sequence
  Description of Artificial Sequence: Synthetic oligonucleotide
  Antisense strand to SEQ ID NO: 1231332
aguguucuggaguucgacu

SEQ ID NO: 1231334 - RNA, 19 nt, Artificial Sequence
  Description of Artificial Sequence: Synthetic oligonucleotide
  Sense strand starting at position 670 of SEQ ID NO: 917410
ugggaacagaguuguaaga

SEQ ID NO: 1231335 - RNA, 19 nt, Artificial Sequence
  Description of Artificial Sequence: Synthetic oligonucleotide
  Antisense strand to SEQ ID NO: 1231334
ucuuacaacucuguuccca

SEQ ID NO: 1231336 - RNA, 19 nt, Artificial Sequence
  Description of Artificial Sequence: Synthetic oligonucleotide
  Sense strand starting at position 727 of SEQ ID NO: 917410
ugaguauagcaguacuaaa

SEQ ID NO: 1231337 - RNA, 19 nt, Artificial Sequence
  Description of Artificial Sequence: Synthetic oligonucleotide
  Antisense strand to SEQ ID NO: 1231336
uuuaguacugcuauacuca

SEQ ID NO: 1231338 - RNA, 19 nt, Artificial Sequence
  Description of Artificial Sequence: Synthetic oligonucleotide
  Sense strand starting at position 847 of SEQ ID NO: 917410
acuggauacugagaauaga

SEQ ID NO: 1231339 - RNA, 19 nt, Artificial Sequence
  Description of Artificial Sequence: Synthetic oligonucleotide
  Antisense strand to SEQ ID NO: 1231338
ucuauucucaguauccagu

SEQ ID NO: 1231340 - RNA, 19 nt, Artificial Sequence
  Description of Artificial Sequence: Synthetic oligonucleotide
  Sense strand starting at position 921 of SEQ ID NO: 917410
cuaagucuccuuuagcgau

SEQ ID NO: 1231341 - RNA, 19 nt, Artificial Sequence
  Description of Artificial Sequence: Synthetic oligonucleotide
  Antisense strand to SEQ ID NO: 1231340
aucgcuaaaggagacuuag

SEQ ID NO: 1231342 - RNA, 19 nt, Artificial Sequence
  Description of Artificial Sequence: Synthetic oligonucleotide
  Sense strand starting at position 925 of SEQ ID NO: 917410
gucuccuuuagcgaugaac

SEQ ID NO: 1231343 - RNA, 19 nt, Artificial Sequence
  Description of Artificial Sequence: Synthetic oligonucleotide
  Antisense strand to SEQ ID NO: 1231342
guucaucgcuaaaggagac

SEQ ID NO: 1231344 - RNA, 19 nt, Artificial Sequence
  Description of Artificial Sequence: Synthetic oligonucleotide
  Sense strand starting at position 927 of SEQ ID NO: 917410
cuccuuuagcgaugaacca

SEQ ID NO: 1231345 - RNA, 19 nt, Artificial Sequence
  Description of Artificial Sequence: Synthetic oligonucleotide
  Antisense strand to SEQ ID NO: 1231344
ugguucaucgcuaaaggag

SEQ ID NO: 1231346 - RNA, 19 nt, Artificial Sequence
  Description of Artificial Sequence: Synthetic oligonucleotide
  Sense strand starting at position 1051 of SEQ ID NO: 917410
acagaacuguuauugcuuu

SEQ ID NO: 1231347 - RNA, 19 nt, Artificial Sequence
  Description of Artificial Sequence: Synthetic oligonucleotide
  Antisense strand to SEQ ID NO: 1231346
aaagcaauaacaguucugu

SEQ ID NO: 1231348 - RNA, 19 nt, Artificial Sequence
  Description of Artificial Sequence: Synthetic oligonucleotide
  Sense strand starting at position 1068 of SEQ ID NO: 917410
uugcacauguugguauaaa

SEQ ID NO: 1231349 - RNA, 19 nt, Artificial Sequence
  Description of Artificial Sequence: Synthetic oligonucleotide
  Antisense strand to SEQ ID NO: 1231348
uuuauaccaacaugugcaa

SEQ ID NO: 1231350 - RNA, 19 nt, Artificial Sequence
  Description of Artificial Sequence: Synthetic oligonucleotide
  Sense strand starting at position 1097 of SEQ ID NO: 917410
gggcaaacacucuaauucu

SEQ ID NO: 1231351 - RNA, 19 nt, Artificial Sequence
  Description of Artificial Sequence: Synthetic oligonucleotide
  Antisense strand to SEQ ID NO: 1231350
agaauuagaguguuugccc

SEQ ID NO: 1231352 - RNA, 19 nt, Artificial Sequence
  Description of Artificial Sequence: Synthetic oligonucleotide
  Sense strand starting at position 1237 of SEQ ID NO: 917410
gucugauaccucgaguuug

SEQ ID NO: 1231353 - RNA, 19 nt, Artificial Sequence
  Description of Artificial Sequence: Synthetic oligonucleotide
  Antisense strand to SEQ ID NO: 1231352
caaacucgagguaucagac

SEQ ID NO: 1231354 - RNA, 19 nt, Artificial Sequence
  Description of Artificial Sequence: Synthetic oligonucleotide
  Sense strand starting at position 2221 of SEQ ID NO: 917410
aaguaucuucuacaggagu

SEQ ID NO: 1231355 - RNA, 19 nt, Artificial Sequence
  Description of Artificial Sequence: Synthetic oligonucleotide
  Antisense strand to SEQ ID NO: 1231354
acuccuguagaagauacuu

SEQ ID NO: 1231356 - RNA, 19 nt, Artificial Sequence
  Description of Artificial Sequence: Synthetic oligonucleotide
  Sense strand starting at position 2235 of SEQ ID NO: 917410
ggaguuccaguaugcaaau

SEQ ID NO: 1231357 - RNA, 19 nt, Artificial Sequence
  Description of Artificial Sequence: Synthetic oligonucleotide
  Antisense strand to SEQ ID NO: 1231356
auuugcauacuggaacucc

SEQ ID NO: 1231358 - RNA, 19 nt, Artificial Sequence
  Description of Artificial Sequence: Synthetic oligonucleotide
  Sense strand starting at position 2236 of SEQ ID NO: 917410
gaguuccaguaugcaaauu

SEQ ID NO: 1231359 - RNA, 19 nt, Artificial Sequence
  Description of Artificial Sequence: Synthetic oligonucleotide
  Antisense strand to SEQ ID NO: 1231358
aauuugcauacuggaacuc

SEQ ID NO: 1231360 - RNA, 19 nt, Artificial Sequence
  Description of Artificial Sequence: Synthetic oligonucleotide
  Sense strand starting at position 2248 of SEQ ID NO: 917410
gcaaauuaggauuguuccu

SEQ ID NO: 1231361 - RNA, 19 nt, Artificial Sequence
  Description of Artificial Sequence: Synthetic oligonucleotide
  Antisense strand to SEQ ID NO: 1231360
aggaacaauccuaauuugc

SEQ ID NO: 1231362 - RNA, 19 nt, Artificial Sequence
  Description of Artificial Sequence: Synthetic oligonucleotide
  Sense strand starting at position 2250 of SEQ ID NO: 917410
aaauuaggauuguuccuga

SEQ ID NO: 1231363 - RNA, 19 nt, Artificial Sequence
  Description of Artificial Sequence: Synthetic oligonucleotide
  Antisense strand to SEQ ID NO: 1231362
ucaggaacaauccuaauuu

SEQ ID NO: 1231364 - RNA, 19 nt, Artificial Sequence
  Description of Artificial Sequence: Synthetic oligonucleotide
  Sense strand starting at position 2455 of SEQ ID NO: 917410
ccgaguuguauuugcauug

SEQ ID NO: 1231365 - RNA, 19 nt, Artificial Sequence
  Description of Artificial Sequence: Synthetic oligonucleotide
  Antisense strand to SEQ ID NO: 1231364
caaugcaaauacaacucgg

SEQ ID NO: 1231366 - RNA, 19 nt, Artificial Sequence
  Description of Artificial Sequence: Synthetic oligonucleotide
  Sense strand starting at position 2456 of SEQ ID NO: 917410
cgaguuguauuugcauuga

SEQ ID NO: 1231367 - RNA, 19 nt, Artificial Sequence
  Description of Artificial Sequence: Synthetic oligonucleotide
  Antisense strand to SEQ ID NO: 1231366
ucaaugcaaauacaacucg

SEQ ID NO: 1231368 - RNA, 19 nt, Artificial Sequence
  Description of Artificial Sequence: Synthetic oligonucleotide
  Sense strand starting at position 2497 of SEQ ID NO: 917410
ccuggaaacucacuugauu

SEQ ID NO: 1231369 - RNA, 19 nt, Artificial Sequence
  Description of Artificial Sequence: Synthetic oligonucleotide
  Antisense strand to SEQ ID NO: 1231368
aaucaagugaguuuccagg

SEQ ID NO: 1231370 - RNA, 19 nt, Artificial Sequence
  Description of Artificial Sequence: Synthetic oligonucleotide
  Sense strand starting at position 2599 of SEQ ID NO: 917410
cugaauggcaaacguuuaa

SEQ ID NO: 1231371 - RNA, 19 nt, Artificial Sequence
  Description of Artificial Sequence: Synthetic oligonucleotide
  Antisense strand to SEQ ID NO: 1231370
uuaaacguuugccauucag

SEQ ID NO: 1231372 - RNA, 19 nt, Artificial Sequence
  Description of Artificial Sequence: Synthetic oligonucleotide
  Sense strand starting at position 2685 of SEQ ID NO: 917410
gcccaaaucccaggagaga

SEQ ID NO: 1231373 - RNA, 19 nt, Artificial Sequence
  Description of Artificial Sequence: Synthetic oligonucleotide
  Antisense strand to SEQ ID NO: 1231372
ucucuccugggauuugggc

SEQ ID NO: 1231374 - RNA, 19 nt, Artificial Sequence
  Description of Artificial Sequence: Synthetic oligonucleotide
  Sense strand starting at position 2722 of SEQ ID NO: 917410
ugaacuguuaaguagaugu

SEQ ID NO: 1231375 - RNA, 19 nt, Artificial Sequence
  Description of Artificial Sequence: Synthetic oligonucleotide
  Antisense strand to SEQ ID NO: 1231374
acaucuacuuaacaguuca

SEQ ID NO: 1231376 - RNA, 19 nt, Artificial Sequence
  Description of Artificial Sequence: Synthetic oligonucleotide
  Sense strand starting at position 2793 of SEQ ID NO: 917410
accggaaagcaaugacuuu

SEQ ID NO: 1231377 - RNA, 19 nt, Artificial Sequence
  Description of Artificial Sequence: Synthetic oligonucleotide
  Antisense strand to SEQ ID NO: 1231376
aaagucauugcuuuccggu

SEQ ID NO: 1231378 - RNA, 19 nt, Artificial Sequence
  Description of Artificial Sequence: Synthetic oligonucleotide
  Sense strand starting at position 2840 of SEQ ID NO: 917410
uaagauguuugggugcuga

SEQ ID NO: 1231379 - RNA, 19 nt, Artificial Sequence
  Description of Artificial Sequence: Synthetic oligonucleotide
  Antisense strand to SEQ ID NO: 1231378
ucagcacccaaacaucuua

SEQ ID NO: 1231380 - RNA, 19 nt, Artificial Sequence
  Description of Artificial Sequence: Synthetic oligonucleotide
  Sense strand starting at position 2853 of SEQ ID NO: 917410
ugcugacauauagguagau

SEQ ID NO: 1231381 - RNA, 19 nt, Artificial Sequence
  Description of Artificial Sequence: Synthetic oligonucleotide
  Antisense strand to SEQ ID NO: 1231380
aucuaccuauaugucagca

SEQ ID NO: 1231382 - RNA, 19 nt, Artificial Sequence
  Description of Artificial Sequence: Synthetic oligonucleotide
  Sense strand starting at position 2862 of SEQ ID NO: 917410
auagguagaucaguuaugu

SEQ ID NO: 1231383 - RNA, 19 nt, Artificial Sequence
  Description of Artificial Sequence: Synthetic oligonucleotide
  Antisense strand to SEQ ID NO: 1231382
acauaacugaucuaccuau

SEQ ID NO: 1231384 - RNA, 19 nt, Artificial Sequence
  Description of Artificial Sequence: Synthetic oligonucleotide
  Sense strand starting at position 3033 of SEQ ID NO: 917410
gaugguaacugguugcuaa

SEQ ID NO: 1231385 - RNA, 19 nt, Artificial Sequence
  Description of Artificial Sequence: Synthetic oligonucleotide
  Antisense strand to SEQ ID NO: 1231384
uuagcaaccaguuaccauc

SEQ ID NO: 1231386 - RNA, 19 nt, Artificial Sequence
  Description of Artificial Sequence: Synthetic oligonucleotide
  Sense strand starting at position 3034 of SEQ ID NO: 917410
augguaacugguugcuaaa

SEQ ID NO: 1231387 - RNA, 19 nt, Artificial Sequence
  Description of Artificial Sequence: Synthetic oligonucleotide
  Antisense strand to SEQ ID NO: 1231386
uuuagcaaccaguuaccau

SEQ ID NO: 1231388 - RNA, 19 nt, Artificial Sequence
  Description of Artificial Sequence: Synthetic oligonucleotide
  Sense strand starting at position 3247 of SEQ ID NO: 917410
auauuauuuaguggugugu

SEQ ID NO: 1231389 - RNA, 19 nt, Artificial Sequence
  Description of Artificial Sequence: Synthetic oligonucleotide
  Antisense strand to SEQ ID NO: 1231388
acacaccacuaaauaauau

SEQ ID NO: 1231390 - RNA, 19 nt, Artificial Sequence
  Description of Artificial Sequence: Synthetic oligonucleotide
  Sense strand starting at position 3251 of SEQ ID NO: 917410
uauuuagugguguguuacu

SEQ ID NO: 1231391 - RNA, 19 nt, Artificial Sequence
  Description of Artificial Sequence: Synthetic oligonucleotide
  Antisense strand to SEQ ID NO: 1231390
aguaacacaccacuaaaua

SEQ ID NO: 1231392 - RNA, 19 nt, Artificial Sequence
  Description of Artificial Sequence: Synthetic oligonucleotide
  Sense strand starting at position 3300 of SEQ ID NO: 917410
ucauguugauugcuugaaa

SEQ ID NO: 1231393 - RNA, 19 nt, Artificial Sequence
  Description of Artificial Sequence: Synthetic oligonucleotide
  Antisense strand to SEQ ID NO: 1231392
uuucaagcaaucaacauga

SEQ ID NO: 1231394 - RNA, 19 nt, Artificial Sequence
  Description of Artificial Sequence: Synthetic oligonucleotide
  Sense strand starting at position 3301 of SEQ ID NO: 917410
cauguugauugcuugaaau

SEQ ID NO: 1231395 - RNA, 19 nt, Artificial Sequence
  Description of Artificial Sequence: Synthetic oligonucleotide
  Antisense strand to SEQ ID NO: 1231394
auuucaagcaaucaacaug

SEQ ID NO: 1231396 - RNA, 19 nt, Artificial Sequence
  Description of Artificial Sequence: Synthetic oligonucleotide
  Sense strand starting at position 3303 of SEQ ID NO: 917410
uguugauugcuugaaauca

SEQ ID NO: 1231397 - RNA, 19 nt, Artificial Sequence
  Description of Artificial Sequence: Synthetic oligonucleotide
  Antisense strand to SEQ ID NO: 1231396
ugauuucaagcaaucaaca

SEQ ID NO: 1231398 - RNA, 19 nt, Artificial Sequence
  Description of Artificial Sequence: Synthetic oligonucleotide
  Sense strand starting at position 3372 of SEQ ID NO: 917410
gguuuacacuuauugcuga

SEQ ID NO: 1231399 - RNA, 19 nt, Artificial Sequence
  Description of Artificial Sequence: Synthetic oligonucleotide
  Antisense strand to SEQ ID NO: 1231398
ucagcaauaaguguaaacc

SEQ ID NO: 1231400 - RNA, 19 nt, Artificial Sequence
  Description of Artificial Sequence: Synthetic oligonucleotide
  Sense strand starting at position 3652 of SEQ ID NO: 917410
ggaggaagagauugcagua

SEQ ID NO: 1231401 - RNA, 19 nt, Artificial Sequence
  Description of Artificial Sequence: Synthetic oligonucleotide
  Antisense strand to SEQ ID NO: 1231400
uacugcaaucucuuccucc

SEQ ID NO: 1231402 - RNA, 19 nt, Artificial Sequence
  Description of Artificial Sequence: Synthetic oligonucleotide
  Sense strand starting at position 3657 of SEQ ID NO: 917411
aagagauugcaguaagcca

SEQ ID NO: 1231403 - RNA, 19 nt, Artificial Sequence
  Description of Artificial Sequence: Synthetic oligonucleotide
  Antisense strand to SEQ ID NO: 1231402
uggcuuacugcaaucucuu

SEQ ID NO: 1231404 - RNA, 19 nt, Artificial Sequence
  Description of Artificial Sequence: Synthetic oligonucleotide
  Sense strand starting at position 148 of SEQ ID NO: 917411
uaauuugcuguuugaggua

SEQ ID NO: 1231405 - RNA, 19 nt, Artificial Sequence
  Description of Artificial Sequence: Synthetic oligonucleotide
  Antisense strand to SEQ ID NO: 1231404
uaccucaaacagcaaauua

SEQ ID NO: 1231406 - RNA, 19 nt, Artificial Sequence
  Description of Artificial Sequence: Synthetic oligonucleotide
  Sense strand starting at position 168 of SEQ ID NO: 917411
cuguaauccucccaggaca

SEQ ID NO: 1231407 - RNA, 19 nt, Artificial Sequence
  Description of Artificial Sequence: Synthetic oligonucleotide
  Antisense strand to SEQ ID NO: 1231406
uguccugggaggauuacag

SEQ ID NO: 1231408 - RNA, 19 nt, Artificial Sequence
  Description of Artificial Sequence: Synthetic oligonucleotide
  Sense strand starting at position 184 of SEQ ID NO: 917411
acaugugaguuccuggaaa

SEQ ID NO: 1231409 - RNA, 19 nt, Artificial Sequence
  Description of Artificial Sequence: Synthetic oligonucleotide
  Antisense strand to SEQ ID NO: 1231408
uuuccaggaacucacaugu

SEQ ID NO: 1231410 - RNA, 19 nt, Artificial Sequence
  Description of Artificial Sequence: Synthetic oligonucleotide
  Sense strand starting at position 231 of SEQ ID NO: 917411
uguugcuguuguugacaaa

SEQ ID NO: 1231411 - RNA, 19 nt, Artificial Sequence
  Description of Artificial Sequence: Synthetic oligonucleotide
  Antisense strand to SEQ ID NO: 1231410
uuugucaacaacagcaaca

SEQ ID NO: 1231412 - RNA, 19 nt, Artificial Sequence
  Description of Artificial Sequence: Synthetic oligonucleotide
  Sense strand starting at position 234 of SEQ ID NO: 917411
ugcuguuguugacaaaguu

SEQ ID NO: 1231413 - RNA, 19 nt, Artificial Sequence
  Description of Artificial Sequence: Synthetic oligonucleotide
  Antisense strand to SEQ ID NO: 1231412
aacuuugucaacaacagca

SEQ ID NO: 1231414 - RNA, 19 nt, Artificial Sequence
  Description of Artificial Sequence: Synthetic oligonucleotide
  Sense strand starting at position 275 of SEQ ID NO: 917411
gguagucuccauugugaga

SEQ ID NO: 1231415 - RNA, 19 nt, Artificial Sequence
  Description of Artificial Sequence: Synthetic oligonucleotide
  Antisense strand to SEQ ID NO: 1231414
ucucacaauggagacuacc

SEQ ID NO: 1231416 - RNA, 19 nt, Artificial Sequence
  Description of Artificial Sequence: Synthetic oligonucleotide
  Sense strand starting at position 277 of SEQ ID NO: 917411
uagucuccauugugagaaa

SEQ ID NO: 1231417 - RNA, 19 nt, Artificial Sequence
  Description of Artificial Sequence: Synthetic oligonucleotide
  Antisense strand to SEQ ID NO: 1231416
uuucucacaauggagacua

SEQ ID NO: 1231418 - RNA, 19 nt, Artificial Sequence
  Description of Artificial Sequence: Synthetic oligonucleotide
  Sense strand starting at position 280 of SEQ ID NO: 917411
ucuccauugugagaaagau

SEQ ID NO: 1231419 - RNA, 19 nt, Artificial Sequence
  Description of Artificial Sequence: Synthetic oligonucleotide
  Antisense strand to SEQ ID NO: 1231418
aucuuucucacaauggaga

SEQ ID NO: 1231420 - RNA, 19 nt, Artificial Sequence
  Description of Artificial Sequence: Synthetic oligonucleotide
  Sense strand starting at position 486 of SEQ ID NO: 917411
gcaguuugggcuuaugaaa

SEQ ID NO: 1231421 - RNA, 19 nt, Artificial Sequence
  Description of Artificial Sequence: Synthetic oligonucleotide
  Antisense strand to SEQ ID NO: 1231420
uuucauaagcccaaacugc

SEQ ID NO: 1231422 - RNA, 19 nt, Artificial Sequence
  Description of Artificial Sequence: Synthetic oligonucleotide
  Sense strand starting at position 582 of SEQ ID NO: 917411
guuccacaucugcaaaguu

SEQ ID NO: 1231423 - RNA, 19 nt, Artificial Sequence
  Description of Artificial Sequence: Synthetic oligonucleotide
  Antisense strand to SEQ ID NO: 1231422
aacuuugcagauguggaac

SEQ ID NO: 1231424 - RNA, 19 nt, Artificial Sequence
  Description of Artificial Sequence: Synthetic oligonucleotide
  Sense strand starting at position 671 of SEQ ID NO: 917411
gggaguccugucuggcuga

SEQ ID NO: 1231425 - RNA, 19 nt, Artificial Sequence
  Description of Artificial Sequence: Synthetic oligonucleotide
  Antisense strand to SEQ ID NO: 1231424
ucagccagacaggacuccc

SEQ ID NO: 1231426 - RNA, 19 nt, Artificial Sequence
  Description of Artificial Sequence: Synthetic oligonucleotide
  Sense strand starting at position 693 of SEQ ID NO: 917411
gggacaagcugcuuaaacu

SEQ ID NO: 1231427 - RNA, 19 nt, Artificial Sequence
  Description of Artificial Sequence: Synthetic oligonucleotide
  Antisense strand to SEQ ID NO: 1231426
aguuuaagcagcuuguccc

SEQ ID NO: 1231428 - RNA, 19 nt, Artificial Sequence
  Description of Artificial Sequence: Synthetic oligonucleotide
  Sense strand starting at position 763 of SEQ ID NO: 917411
agcgaccuuucccgugauu

SEQ ID NO: 1231429 - RNA, 19 nt, Artificial Sequence
  Description of Artificial Sequence: Synthetic oligonucleotide
  Antisense strand to SEQ ID NO: 1231428
aaucacgggaaaggucgcu

SEQ ID NO: 1231430 - RNA, 19 nt, Artificial Sequence
  Description of Artificial Sequence: Synthetic oligonucleotide
  Sense strand starting at position 765 of SEQ ID NO: 917411
cgaccuuucccgugauuau

SEQ ID NO: 1231431 - RNA, 19 nt, Artificial Sequence
  Description of Artificial Sequence: Synthetic oligonucleotide
  Antisense strand to SEQ ID NO: 1231430
auaaucacgggaaaggucg

SEQ ID NO: 1231432 - RNA, 19 nt, Artificial Sequence
  Description of Artificial Sequence: Synthetic oligonucleotide
  Sense strand starting at position 766 of SEQ ID NO: 917411
gaccuuucccgugauuauc

SEQ ID NO: 1231433 - RNA, 19 nt, Artificial Sequence
  Description of Artificial Sequence: Synthetic oligonucleotide
  Antisense strand to SEQ ID NO: 1231432
gauaaucacgggaaagguc

SEQ ID NO: 1231434 - RNA, 19 nt, Artificial Sequence
  Description of Artificial Sequence: Synthetic oligonucleotide
  Sense strand starting at position 814 of SEQ ID NO: 917411
ugcguugagcuucaggaaa

SEQ ID NO: 1231435 - RNA, 19 nt, Artificial Sequence
  Description of Artificial Sequence: Synthetic oligonucleotide
  Antisense strand to SEQ ID NO: 1231434
uuuccugaagcucaacgca

SEQ ID NO: 1231436 - RNA, 19 nt, Artificial Sequence
  Description of Artificial Sequence: Synthetic oligonucleotide
  Sense strand starting at position 828 of SEQ ID NO: 917411
ggaaaccauuccucaguuu

SEQ ID NO: 1231437 - RNA, 19 nt, Artificial Sequence
  Description of Artificial Sequence: Synthetic oligonucleotide
  Antisense strand to SEQ ID NO: 1231436
aaacugaggaaugguuucc

SEQ ID NO: 1231438 - RNA, 19 nt, Artificial Sequence
  Description of Artificial Sequence: Synthetic oligonucleotide
  Sense strand starting at position 837 of SEQ ID NO: 917411
uccucaguuuacugauaag

SEQ ID NO: 1231439 - RNA, 19 nt, Artificial Sequence
  Description of Artificial Sequence: Synthetic oligonucleotide
  Antisense strand to SEQ ID NO: 1231438
cuuaucaguaaacugagga

SEQ ID NO: 1231440 - RNA, 19 nt, Artificial Sequence
  Description of Artificial Sequence: Synthetic oligonucleotide
  Sense strand starting at position 1202 of SEQ ID NO: 917411
acgguucccgaagauaacu

SEQ ID NO: 1231441 - RNA, 19 nt, Artificial Sequence
  Description of Artificial Sequence: Synthetic oligonucleotide
  Antisense strand to SEQ ID NO: 1231440
aguuaucuucgggaaccgu

SEQ ID NO: 1231442 - RNA, 19 nt, Artificial Sequence
  Description of Artificial Sequence: Synthetic oligonucleotide
  Sense strand starting at position 1255 of SEQ ID NO: 917411
agucgcuguuaccuuguaa

SEQ ID NO: 1231443 - RNA, 19 nt, Artificial Sequence
  Description of Artificial Sequence: Synthetic oligonucleotide
  Antisense strand to SEQ ID NO: 1231442
uuacaagguaacagcgacu

SEQ ID NO: 1231444 - RNA, 19 nt, Artificial Sequence
  Description of Artificial Sequence: Synthetic oligonucleotide
  Sense strand starting at position 1256 of SEQ ID NO: 917411
gucgcuguuaccuuguaau

SEQ ID NO: 1231445 - RNA, 19 nt, Artificial Sequence
  Description of Artificial Sequence: Synthetic oligonucleotide
  Antisense strand to SEQ ID NO: 1231444
auuacaagguaacagcgac

SEQ ID NO: 1231446 - RNA, 19 nt, Artificial Sequence
  Description of Artificial Sequence: Synthetic oligonucleotide
  Sense strand starting at position 1259 of SEQ ID NO: 917411
gcuguuaccuuguaaucuu

SEQ ID NO: 1231447 - RNA, 19 nt, Artificial Sequence
  Description of Artificial Sequence: Synthetic oligonucleotide
  Antisense strand to SEQ ID NO: 1231446
aagauuacaagguaacagc

SEQ ID NO: 1231448 - RNA, 19 nt, Artificial Sequence
  Description of Artificial Sequence: Synthetic oligonucleotide
  Sense strand starting at position 1288 of SEQ ID NO: 917411
cccgaagugcguucuauua

SEQ ID NO: 1231449 - RNA, 19 nt, Artificial Sequence
  Description of Artificial Sequence: Synthetic oligonucleotide
  Antisense strand to SEQ ID NO: 1231448
uaauagaacgcacuucggg

SEQ ID NO: 1231450 - RNA, 19 nt, Artificial Sequence
  Description of Artificial Sequence: Synthetic oligonucleotide
  Sense strand starting at position 2450 of SEQ ID NO: 917411
gccugacuuuaucuagaag

SEQ ID NO: 1231451 - RNA, 19 nt, Artificial Sequence
  Description of Artificial Sequence: Synthetic oligonucleotide
  Antisense strand to SEQ ID NO: 1231450
cuucuagauaaagucaggc

SEQ ID NO: 1231452 - RNA, 19 nt, Artificial Sequence
  Description of Artificial Sequence: Synthetic oligonucleotide
  Sense strand starting at position 2470 of SEQ ID NO: 917411
gguuuauuaugggaagaaa

SEQ ID NO: 1231453 - RNA, 19 nt, Artificial Sequence
  Description of Artificial Sequence: Synthetic oligonucleotide
  Antisense strand to SEQ ID NO: 1231452
uuucuucccauaauaaacc

SEQ ID NO: 1231454 - RNA, 19 nt, Artificial Sequence
  Description of Artificial Sequence: Synthetic oligonucleotide
  Sense strand starting at position 2522 of SEQ ID NO: 917411
ugcaguguccacggaguaa

SEQ ID NO: 1231455 - RNA, 19 nt, Artificial Sequence
  Description of Artificial Sequence: Synthetic oligonucleotide
  Antisense strand to SEQ ID NO: 1231454
uuacuccguggacacugca

SEQ ID NO: 1231456 - RNA, 19 nt, Artificial Sequence
  Description of Artificial Sequence: Synthetic oligonucleotide
  Sense strand starting at position 2620 of SEQ ID NO: 917411
accacagacggcuaauuaa

SEQ ID NO: 1231457 - RNA, 19 nt, Artificial Sequence
  Description of Artificial Sequence: Synthetic oligonucleotide
  Antisense strand to SEQ ID NO: 1231456
uuaauuagccgucuguggu

SEQ ID NO: 1231458 - RNA, 19 nt, Artificial Sequence
  Description of Artificial Sequence: Synthetic oligonucleotide
  Sense strand starting at position 2628 of SEQ ID NO: 917411
cggcuaauuaaauguagag

SEQ ID NO: 1231459 - RNA, 19 nt, Artificial Sequence
  Description of Artificial Sequence: Synthetic oligonucleotide
  Antisense strand to SEQ ID NO: 1231458
cucuacauuuaauuagccg

SEQ ID NO: 1231460 - RNA, 19 nt, Artificial Sequence
  Description of Artificial Sequence: Synthetic oligonucleotide
  Sense strand starting at position 2646 of SEQ ID NO: 917411
gcaauuaacauguaacgga

SEQ ID NO: 1231461 - RNA, 19 nt, Artificial Sequence
  Description of Artificial Sequence: Synthetic oligonucleotide
  Antisense strand to SEQ ID NO: 1231460
uccguuacauguuaauugc

SEQ ID NO: 1231462 - RNA, 19 nt, Artificial Sequence
  Description of Artificial Sequence: Synthetic oligonucleotide
  Sense strand starting at position 2654 of SEQ ID NO: 917411
cauguaacggagugaaaca

SEQ ID NO: 1231463 - RNA, 19 nt, Artificial Sequence
  Description of Artificial Sequence: Synthetic oligonucleotide
  Antisense strand to SEQ ID NO: 1231462
uguuucacuccguuacaug

SEQ ID NO: 1231464 - RNA, 19 nt, Artificial Sequence
  Description of Artificial Sequence: Synthetic oligonucleotide
  Sense strand starting at position 2932 of SEQ ID NO: 917411
aaaggaguauauguuaaug

SEQ ID NO: 1231465 - RNA, 19 nt, Artificial Sequence
  Description of Artificial Sequence: Synthetic oligonucleotide
  Antisense strand to SEQ ID NO: 1231464
cauuaacauauacuccuuu

SEQ ID NO: 1231466 - RNA, 19 nt, Artificial Sequence
  Description of Artificial Sequence: Synthetic oligonucleotide
  Sense strand starting at position 2934 of SEQ ID NO: 917411
aggaguauauguuaaugac

SEQ ID NO: 1231467 - RNA, 19 nt, Artificial Sequence
  Description of Artificial Sequence: Synthetic oligonucleotide
  Antisense strand to SEQ ID NO: 1231466
gucauuaacauauacuccu

SEQ ID NO: 1231468 - RNA, 19 nt, Artificial Sequence
  Description of Artificial Sequence: Synthetic oligonucleotide
  Sense strand starting at position 3002 of SEQ ID NO: 917411
gggauaugcuugucuugug

SEQ ID NO: 1231469 - RNA, 19 nt, Artificial Sequence
  Description of Artificial Sequence: Synthetic oligonucleotide
  Antisense strand to SEQ ID NO: 1231468
cacaagacaagcauauccc

SEQ ID NO: 1231470 - RNA, 19 nt, Artificial Sequence
  Description of Artificial Sequence: Synthetic oligonucleotide
  Sense strand starting at position 3280 of SEQ ID NO: 917411
ggaacuggucuagguaucu

SEQ ID NO: 1231471 - RNA, 19 nt, Artificial Sequence
  Description of Artificial Sequence: Synthetic oligonucleotide
  Antisense strand to SEQ ID NO: 1231470
agauaccuagaccaguucc

SEQ ID NO: 1231472 - RNA, 19 nt, Artificial Sequence
  Description of Artificial Sequence: Synthetic oligonucleotide
  Sense strand starting at position 3371 of SEQ ID NO: 917411
ucuaauggugcgcaaucua

SEQ ID NO: 1231473 - RNA, 19 nt, Artificial Sequence
  Description of Artificial Sequence: Synthetic oligonucleotide
  Antisense strand to SEQ ID NO: 1231472
uagauugcgcaccauuaga

SEQ ID NO: 1231474 - RNA, 19 nt, Artificial Sequence
  Description of Artificial Sequence: Synthetic oligonucleotide
  Sense strand starting at position 3662 of SEQ ID NO: 917411
gugaaagggucuugaugga

SEQ ID NO: 1231475 - RNA, 19 nt, Artificial Sequence
  Description of Artificial Sequence: Synthetic oligonucleotide
  Antisense strand to SEQ ID NO: 1231474
uccaucaagacccuuucac

SEQ ID NO: 1231476 - RNA, 19 nt, Artificial Sequence
  Description of Artificial Sequence: Synthetic oligonucleotide
  Sense strand starting at position 3666 of SEQ ID NO: 917411
aagggucuugauggauuga

SEQ ID NO: 1231477 - RNA, 19 nt, Artificial Sequence
  Description of Artificial Sequence: Synthetic oligonucleotide
  Antisense strand to SEQ ID NO: 1231476
ucaauccaucaagacccuu

SEQ ID NO: 1231478 - RNA, 19 nt, Artificial Sequence
  Description of Artificial Sequence: Synthetic oligonucleotide
  Sense strand starting at position 3685 of SEQ ID NO: 917411
gagcacauguacuuagagu

SEQ ID NO: 1231479 - RNA, 19 nt, Artificial Sequence
  Description of Artificial Sequence: Synthetic oligonucleotide
  Antisense strand to SEQ ID NO: 1231478
acucuaaguacaugugcuc

SEQ ID NO: 1231480 - RNA, 19 nt, Artificial Sequence
  Description of Artificial Sequence: Synthetic oligonucleotide
  Sense strand starting at position 3963 of SEQ ID NO: 917412
uguacacagcccuguaaua

SEQ ID NO: 1231481 - RNA, 19 nt, Artificial Sequence
  Description of Artificial Sequence: Synthetic oligonucleotide
  Antisense strand to SEQ ID NO: 1231480
uauuacagggcuguguaca

SEQ ID NO: 1231482 - RNA, 19 nt, Artificial Sequence
  Description of Artificial Sequence: Synthetic oligonucleotide
  Sense strand starting at position 179 of SEQ ID NO: 917412
uagagauaugagugcccau

SEQ ID NO: 1231483 - RNA, 19 nt, Artificial Sequence
  Description of Artificial Sequence: Synthetic oligonucleotide
  Antisense strand to SEQ ID NO: 1231482
augggcacucauaucucua

SEQ ID NO: 1231484 - RNA, 19 nt, Artificial Sequence
  Description of Artificial Sequence: Synthetic oligonucleotide
  Sense strand starting at position 223 of SEQ ID NO: 917412
ugcucugagaaguguaacu

SEQ ID NO: 1231485 - RNA, 19 nt, Artificial Sequence
  Description of Artificial Sequence: Synthetic oligonucleotide
  Antisense strand to SEQ ID NO: 1231484
aguuacacuucucagagca

SEQ ID NO: 1231486 - RNA, 19 nt, Artificial Sequence
  Description of Artificial Sequence: Synthetic oligonucleotide
  Sense strand starting at position 228 of SEQ ID NO: 917412
ugagaaguguaacuuguaa

SEQ ID NO: 1231487 - RNA, 19 nt, Artificial Sequence
  Description of Artificial Sequence: Synthetic oligonucleotide
  Antisense strand to SEQ ID NO: 1231486
uuacaaguuacacuucuca

SEQ ID NO: 1231488 - RNA, 19 nt, Artificial Sequence
  Description of Artificial Sequence: Synthetic oligonucleotide
  Sense strand starting at position 274 of SEQ ID NO: 917412
guccauccacaguagagau

SEQ ID NO: 1231489 - RNA, 19 nt, Artificial Sequence
  Description of Artificial Sequence: Synthetic oligonucleotide
  Antisense strand to SEQ ID NO: 1231488
aucucuacuguggauggac

SEQ ID NO: 1231490 - RNA, 19 nt, Artificial Sequence
  Description of Artificial Sequence: Synthetic oligonucleotide
  Sense strand starting at position 465 of SEQ ID NO: 917412
ggugacagaggucagcaua

SEQ ID NO: 1231491 - RNA, 19 nt, Artificial Sequence
  Description of Artificial Sequence: Synthetic oligonucleotide
  Antisense strand to SEQ ID NO: 1231490
uaugcugaccucugucacc

SEQ ID NO: 1231492 - RNA, 19 nt, Artificial Sequence
  Description of Artificial Sequence: Synthetic oligonucleotide
  Sense strand starting at position 514 of SEQ ID NO: 917412
ugaggcguuauuggaaaca

SEQ ID NO: 1231493 - RNA, 19 nt, Artificial Sequence
  Description of Artificial Sequence: Synthetic oligonucleotide
  Antisense strand to SEQ ID NO: 1231492
uguuuccaauaacgccuca

SEQ ID NO: 1231494 - RNA, 19 nt, Artificial Sequence
  Description of Artificial Sequence: Synthetic oligonucleotide
  Sense strand starting at position 519 of SEQ ID NO: 917412
cguuauuggaaacagucua

SEQ ID NO: 1231495 - RNA, 19 nt, Artificial Sequence
  Description of Artificial Sequence: Synthetic oligonucleotide
  Antisense strand to SEQ ID NO: 1231494
uagacuguuuccaauaacg

SEQ ID NO: 1231496 - RNA, 19 nt, Artificial Sequence
  Description of Artificial Sequence: Synthetic oligonucleotide
  Sense strand starting at position 589 of SEQ ID NO: 917412
cagugaguugcauacuuaa

SEQ ID NO: 1231497 - RNA, 19 nt, Artificial Sequence
  Description of Artificial Sequence: Synthetic oligonucleotide
  Antisense strand to SEQ ID NO: 1231496
uuaaguaugcaacucacug

SEQ ID NO: 1231498 - RNA, 19 nt, Artificial Sequence
  Description of Artificial Sequence: Synthetic oligonucleotide
  Sense strand starting at position 609 of SEQ ID NO: 917412
auccguacacuuuauguau

SEQ ID NO: 1231499 - RNA, 19 nt, Artificial Sequence
  Description of Artificial Sequence: Synthetic oligonucleotide
  Antisense strand to SEQ ID NO: 1231498
auacauaaaguguacggau

SEQ ID NO: 1231500 - RNA, 19 nt, Artificial Sequence
  Description of Artificial Sequence: Synthetic oligonucleotide
  Sense strand starting at position 716 of SEQ ID NO: 917412
agaauauuguuaucagagu

SEQ ID NO: 1231501 - RNA, 19 nt, Artificial Sequence
  Description of Artificial Sequence: Synthetic oligonucleotide
  Antisense strand to SEQ ID NO: 1231500
acucugauaacaauauucu

SEQ ID NO: 1231502 - RNA, 19 nt, Artificial Sequence
  Description of Artificial Sequence: Synthetic oligonucleotide
  Sense strand starting at position 755 of SEQ ID NO: 917412
ugcauuugcugagcuaaag

SEQ ID NO: 1231503 - RNA, 19 nt, Artificial Sequence
  Description of Artificial Sequence: Synthetic oligonucleotide
  Antisense strand to SEQ ID NO: 1231502
cuuuagcucagcaaaugca

SEQ ID NO: 1231504 - RNA, 19 nt, Artificial Sequence
  Description of Artificial Sequence: Synthetic oligonucleotide
  Sense strand starting at position 871 of SEQ ID NO: 917412
uccuuuaacugugucauuu

SEQ ID NO: 1231505 - RNA, 19 nt, Artificial Sequence
  Description of Artificial Sequence: Synthetic oligonucleotide
  Antisense strand to SEQ ID NO: 1231504
aaaugacacaguuaaagga

SEQ ID NO: 1231506 - RNA, 19 nt, Artificial Sequence
  Description of Artificial Sequence: Synthetic oligonucleotide
  Sense strand starting at position 881 of SEQ ID NO: 917412
gugucauuuaaucgguccu

SEQ ID NO: 1231507 - RNA, 19 nt, Artificial Sequence
  Description of Artificial Sequence: Synthetic oligonucleotide
  Antisense strand to SEQ ID NO: 1231506
aggaccgauuaaaugacac

SEQ ID NO: 1231508 - RNA, 19 nt, Artificial Sequence
  Description of Artificial Sequence: Synthetic oligonucleotide
  Sense strand starting at position 1344 of SEQ ID NO: 917412
cggcgcuuccggguuugaa

SEQ ID NO: 1231509 - RNA, 19 nt, Artificial Sequence
  Description of Artificial Sequence: Synthetic oligonucleotide
  Antisense strand to SEQ ID NO: 1231508
uucaaacccggaagcgccg

SEQ ID NO: 1231510 - RNA, 19 nt, Artificial Sequence
  Description of Artificial Sequence: Synthetic oligonucleotide
  Sense strand starting at position 1529 of SEQ ID NO: 917412
gcguguuuaccugaaacca

SEQ ID NO: 1231511 - RNA, 19 nt, Artificial Sequence
  Description of Artificial Sequence: Synthetic oligonucleotide
  Antisense strand to SEQ ID NO: 1231510
ugguuucagguaaacacgc

SEQ ID NO: 1231512 - RNA, 19 nt, Artificial Sequence
  Description of Artificial Sequence: Synthetic oligonucleotide
  Sense strand starting at position 2087 of SEQ ID NO: 917412
guccguguuaaggacaaua

SEQ ID NO: 1231513 - RNA, 19 nt, Artificial Sequence
  Description of Artificial Sequence: Synthetic oligonucleotide
  Antisense strand to SEQ ID NO: 1231512
uauuguccuuaacacggac

SEQ ID NO: 1231514 - RNA, 19 nt, Artificial Sequence
  Description of Artificial Sequence: Synthetic oligonucleotide
  Sense strand starting at position 2137 of SEQ ID NO: 917412
agccaugguccucaauuau

SEQ ID NO: 1231515 - RNA, 19 nt, Artificial Sequence
  Description of Artificial Sequence: Synthetic oligonucleotide
  Antisense strand to SEQ ID NO: 1231514
auaauugaggaccauggcu

SEQ ID NO: 1231516 - RNA, 19 nt, Artificial Sequence
  Description of Artificial Sequence: Synthetic oligonucleotide
  Sense strand starting at position 2164 of SEQ ID NO: 917412
auauauuggucaucaguug

SEQ ID NO: 1231517 - RNA, 19 nt, Artificial Sequence
  Description of Artificial Sequence: Synthetic oligonucleotide
  Antisense strand to SEQ ID NO: 1231516
caacugaugaccaauauau

SEQ ID NO: 1231518 - RNA, 19 nt, Artificial Sequence
  Description of Artificial Sequence: Synthetic oligonucleotide
  Sense strand starting at position 2180 of SEQ ID NO: 917412
uugcauucuguguugcuau

SEQ ID NO: 1231519 - RNA, 19 nt, Artificial Sequence
  Description of Artificial Sequence: Synthetic oligonucleotide
  Antisense strand to SEQ ID NO: 1231518
auagcaacacagaaugcaa

SEQ ID NO: 1231520 - RNA, 19 nt, Artificial Sequence
  Description of Artificial Sequence: Synthetic oligonucleotide
  Sense strand starting at position 2188 of SEQ ID NO: 917412
uguguugcuauugauguga

SEQ ID NO: 1231521 - RNA, 19 nt, Artificial Sequence
  Description of Artificial Sequence: Synthetic oligonucleotide
  Antisense strand to SEQ ID NO: 1231520
ucacaucaauagcaacaca

SEQ ID NO: 1231522 - RNA, 19 nt, Artificial Sequence
  Description of Artificial Sequence: Synthetic oligonucleotide
  Sense strand starting at position 2192 of SEQ ID NO: 917412
uugcuauugaugugagaau

SEQ ID NO: 1231523 - RNA, 19 nt, Artificial Sequence
  Description of Artificial Sequence: Synthetic oligonucleotide
  Antisense strand to SEQ ID NO: 1231522
auucucacaucaauagcaa

SEQ ID NO: 1231524 - RNA, 19 nt, Artificial Sequence
  Description of Artificial Sequence: Synthetic oligonucleotide
  Sense strand starting at position 2204 of SEQ ID NO: 917412
ugagaauaugugugcauug

SEQ ID NO: 1231525 - RNA, 19 nt, Artificial Sequence
  Description of Artificial Sequence: Synthetic oligonucleotide
  Antisense strand to SEQ ID NO: 1231524
caaugcacacauauucuca

SEQ ID NO: 1231526 - RNA, 19 nt, Artificial Sequence
  Description of Artificial Sequence: Synthetic oligonucleotide
  Sense strand starting at position 2313 of SEQ ID NO: 917412
uggagaacgcuguauacug

SEQ ID NO: 1231527 - RNA, 19 nt, Artificial Sequence
  Description of Artificial Sequence: Synthetic oligonucleotide
  Antisense strand to SEQ ID NO: 1231526
caguauacagcguucucca

SEQ ID NO: 1231528 - RNA, 19 nt, Artificial Sequence
  Description of Artificial Sequence: Synthetic oligonucleotide
  Sense strand starting at position 2763 of SEQ ID NO: 917412
agagcuggacucugucaaa

SEQ ID NO: 1231529 - RNA, 19 nt, Artificial Sequence
  Description of Artificial Sequence: Synthetic oligonucleotide
  Antisense strand to SEQ ID NO: 1231528
uuugacagaguccagcucu

SEQ ID NO: 1231530 - RNA, 19 nt, Artificial Sequence
  Description of Artificial Sequence: Synthetic oligonucleotide
  Sense strand starting at position 3130 of SEQ ID NO: 917412
aggccuuucuggcugagga

SEQ ID NO: 1231531 - RNA, 19 nt, Artificial Sequence
  Description of Artificial Sequence: Synthetic oligonucleotide
  Antisense strand to SEQ ID NO: 1231530
uccucagccagaaaggccu

SEQ ID NO: 1231532 - RNA, 19 nt, Artificial Sequence
  Description of Artificial Sequence: Synthetic oligonucleotide
  Sense strand starting at position 3131 of SEQ ID NO: 917412
ggccuuucuggcugaggaa

SEQ ID NO: 1231533 - RNA, 19 nt, Artificial Sequence
  Description of Artificial Sequence: Synthetic oligonucleotide
  Antisense strand to SEQ ID NO: 1231532
uuccucagccagaaaggcc

SEQ ID NO: 1231534 - RNA, 19 nt, Artificial Sequence
  Description of Artificial Sequence: Synthetic oligonucleotide
  Sense strand starting at position 3132 of SEQ ID NO: 917412
gccuuucuggcugaggaaa

SEQ ID NO: 1231535 - RNA, 19 nt, Artificial Sequence
  Description of Artificial Sequence: Synthetic oligonucleotide
  Antisense strand to SEQ ID NO: 1231534
uuuccucagccagaaaggc

SEQ ID NO: 1231536 - RNA, 19 nt, Artificial Sequence
  Description of Artificial Sequence: Synthetic oligonucleotide
  Sense strand starting at position 3299 of SEQ ID NO: 917412
ccauuauuccuguaggaug

SEQ ID NO: 1231537 - RNA, 19 nt, Artificial Sequence
  Description of Artificial Sequence: Synthetic oligonucleotide
  Antisense strand to SEQ ID NO: 1231536
cauccuacaggaauaaugg

SEQ ID NO: 1231538 - RNA, 19 nt, Artificial Sequence
  Description of Artificial Sequence: Synthetic oligonucleotide
  Sense strand starting at position 3389 of SEQ ID NO: 917412
gcauguauaucugugauaa

SEQ ID NO: 1231539 - RNA, 19 nt, Artificial Sequence
  Description of Artificial Sequence: Synthetic oligonucleotide
  Antisense strand to SEQ ID NO: 1231538
uuaucacagauauacaugc

SEQ ID NO: 1231540 - RNA, 19 nt, Artificial Sequence
  Description of Artificial Sequence: Synthetic oligonucleotide
  Sense strand starting at position 3502 of SEQ ID NO: 917412
gcuacuaagugacucauaa

SEQ ID NO: 1231541 - RNA, 19 nt, Artificial Sequence
  Description of Artificial Sequence: Synthetic oligonucleotide
  Antisense strand to SEQ ID NO: 1231540
uuaugagucacuuaguagc

SEQ ID NO: 1231542 - RNA, 19 nt, Artificial Sequence
  Description of Artificial Sequence: Synthetic oligonucleotide
  Sense strand starting at position 3642 of SEQ ID NO: 917412
uacgaauuguuucuggaau

SEQ ID NO: 1231543 - RNA, 19 nt, Artificial Sequence
  Description of Artificial Sequence: Synthetic oligonucleotide
  Antisense strand to SEQ ID NO: 1231542
auuccagaaacaauucgua

SEQ ID NO: 1231544 - RNA, 19 nt, Artificial Sequence
  Description of Artificial Sequence: Synthetic oligonucleotide
  Sense strand starting at position 3738 of SEQ ID NO: 917412
gcuacuguacaugagaaau

SEQ ID NO: 1231545 - RNA, 19 nt, Artificial Sequence
  Description of Artificial Sequence: Synthetic oligonucleotide
  Antisense strand to SEQ ID NO: 1231544
auuucucauguacaguagc

SEQ ID NO: 1231546 - RNA, 19 nt, Artificial Sequence
  Description of Artificial Sequence: Synthetic oligonucleotide
  Sense strand starting at position 3749 of SEQ ID NO: 917412
ugagaaauguuacccauga

SEQ ID NO: 1231547 - RNA, 19 nt, Artificial Sequence
  Description of Artificial Sequence: Synthetic oligonucleotide
  Antisense strand to SEQ ID NO: 1231546
ucauggguaacauuucuca

SEQ ID NO: 1231548 - RNA, 19 nt, Artificial Sequence
  Description of Artificial Sequence: Synthetic oligonucleotide
  Sense strand starting at position 3750 of SEQ ID NO: 917412
gagaaauguuacccaugau

SEQ ID NO: 1231549 - RNA, 19 nt, Artificial Sequence
  Description of Artificial Sequence: Synthetic oligonucleotide
  Antisense strand to SEQ ID NO: 1231548
aucauggguaacauuucuc

SEQ ID NO: 1231550 - RNA, 19 nt, Artificial Sequence
  Description of Artificial Sequence: Synthetic oligonucleotide
  Sense strand starting at position 3762 of SEQ ID NO: 917412
ccaugauucccuugcucag

SEQ ID NO: 1231551 - RNA, 19 nt, Artificial Sequence
  Description of Artificial Sequence: Synthetic oligonucleotide
  Antisense strand to SEQ ID NO: 1231550
cugagcaagggaaucaugg

SEQ ID NO: 1231552 - RNA, 19 nt, Artificial Sequence
  Description of Artificial Sequence: Synthetic oligonucleotide
  Sense strand starting at position 3818 of SEQ ID NO: 917412
agcccuuggcuguauuaau

SEQ ID NO: 1231553 - RNA, 19 nt, Artificial Sequence
  Description of Artificial Sequence: Synthetic oligonucleotide
  Antisense strand to SEQ ID NO: 1231552
auuaauacagccaagggcu

SEQ ID NO: 1231554 - RNA, 19 nt, Artificial Sequence
  Description of Artificial Sequence: Synthetic oligonucleotide
  Sense strand starting at position 3924 of SEQ ID NO: 917412
cgagaaguaucauuguuaa

SEQ ID NO: 1231555 - RNA, 19 nt, Artificial Sequence
  Description of Artificial Sequence: Synthetic oligonucleotide
  Antisense strand to SEQ ID NO: 1231554
uuaacaaugauacuucucg

SEQ ID NO: 1231556 - RNA, 19 nt, Artificial Sequence
  Description of Artificial Sequence: Synthetic oligonucleotide
  Sense strand starting at position 3927 of SEQ ID NO: 917412
gaaguaucauuguuaauga

SEQ ID NO: 1231557 - RNA, 19 nt, Artificial Sequence
  Description of Artificial Sequence: Synthetic oligonucleotide
  Antisense strand to SEQ ID NO: 1231556
ucauuaacaaugauacuuc

SEQ ID NO: 1231558 - RNA, 19 nt, Artificial Sequence
  Description of Artificial Sequence: Synthetic oligonucleotide
  Sense strand starting at position 3969 of SEQ ID NO: 917412
guguacuaggguuaguuau

SEQ ID NO: 1231559 - RNA, 19 nt, Artificial Sequence
  Description of Artificial Sequence: Synthetic oligonucleotide
  Antisense strand to SEQ ID NO: 1231558
auaacuaacccuaguacac

SEQ ID NO: 1231560 - RNA, 19 nt, Artificial Sequence
  Description of Artificial Sequence: Synthetic oligonucleotide
  Sense strand starting at position 3975 of SEQ ID NO: 917412
uaggguuaguuauccauuc

SEQ ID NO: 1231561 - RNA, 19 nt, Artificial Sequence
  Description of Artificial Sequence: Synthetic oligonucleotide
  Antisense strand to SEQ ID NO: 1231560
gaauggauaacuaacccua

SEQ ID NO: 1231562 - RNA, 19 nt, Artificial Sequence
  Description of Artificial Sequence: Synthetic oligonucleotide
  Sense strand starting at position 3975 of SEQ ID NO: 917413
uaggguuaguuauccauuc

SEQ ID NO: 1231563 - RNA, 19 nt, Artificial Sequence
  Description of Artificial Sequence: Synthetic oligonucleotide
  Antisense strand to SEQ ID NO: 1231562
gaauggauaacuaacccua

SEQ ID NO: 1231564 - RNA, 19 nt, Artificial Sequence
  Description of Artificial Sequence: Synthetic oligonucleotide
  Sense strand starting at position 15 of SEQ ID NO: 917413
gguguuugucuugggagag

SEQ ID NO: 1231565 - RNA, 19 nt, Artificial Sequence
  Description of Artificial Sequence: Synthetic oligonucleotide
  Antisense strand to SEQ ID NO: 1231564
cucucccaagacaaacacc

SEQ ID NO: 1231566 - RNA, 19 nt, Artificial Sequence
  Description of Artificial Sequence: Synthetic oligonucleotide
  Sense strand starting at position 30 of SEQ ID NO: 917413
agaggaauacauugccauu

SEQ ID NO: 1231567 - RNA, 19 nt, Artificial Sequence
  Description of Artificial Sequence: Synthetic oligonucleotide
  Antisense strand to SEQ ID NO: 1231566
aauggcaauguauuccucu

SEQ ID NO: 1231568 - RNA, 19 nt, Artificial Sequence
  Description of Artificial Sequence: Synthetic oligonucleotide
  Sense strand starting at position 59 of SEQ ID NO: 917413
ggauguuaacaucagccaa

SEQ ID NO: 1231569 - RNA, 19 nt, Artificial Sequence
  Description of Artificial Sequence: Synthetic oligonucleotide
  Antisense strand to SEQ ID NO: 1231568
uuggcugauguuaacaucc

SEQ ID NO: 1231570 - RNA, 19 nt, Artificial Sequence
  Description of Artificial Sequence: Synthetic oligonucleotide
  Sense strand starting at position 104 of SEQ ID NO: 917413
ggauauucuucugucaacu

SEQ ID NO: 1231571 - RNA, 19 nt, Artificial Sequence
  Description of Artificial Sequence: Synthetic oligonucleotide
  Antisense strand to SEQ ID NO: 1231570
aguugacagaagaauaucc

SEQ ID NO: 1231572 - RNA, 19 nt, Artificial Sequence
  Description of Artificial Sequence: Synthetic oligonucleotide
  Sense strand starting at position 132 of SEQ ID NO: 917413
cuugguucuuaacugauau

SEQ ID NO: 1231573 - RNA, 19 nt, Artificial Sequence
  Description of Artificial Sequence: Synthetic oligonucleotide
  Antisense strand to SEQ ID NO: 1231572
auaucaguuaagaaccaag

SEQ ID NO: 1231574 - RNA, 19 nt, Artificial Sequence
  Description of Artificial Sequence: Synthetic oligonucleotide
  Sense strand starting at position 341 of SEQ ID NO: 917413
ugauguguaacagagcuuu

SEQ ID NO: 1231575 - RNA, 19 nt, Artificial Sequence
  Description of Artificial Sequence: Synthetic oligonucleotide
  Antisense strand to SEQ ID NO: 1231574
aaagcucuguuacacauca

SEQ ID NO: 1231576 - RNA, 19 nt, Artificial Sequence
  Description of Artificial Sequence: Synthetic oligonucleotide
  Sense strand starting at position 347 of SEQ ID NO: 917413
guaacagagcuuuauaacu

SEQ ID NO: 1231577 - RNA, 19 nt, Artificial Sequence
  Description of Artificial Sequence: Synthetic oligonucleotide
  Antisense strand to SEQ ID NO: 1231576
aguuauaaagcucuguuac

SEQ ID NO: 1231578 - RNA, 19 nt, Artificial Sequence
  Description of Artificial Sequence: Synthetic oligonucleotide
  Sense strand starting at position 730 of SEQ ID NO: 917413
gcaaauaauucugcaguga

SEQ ID NO: 1231579 - RNA, 19 nt, Artificial Sequence
  Description of Artificial Sequence: Synthetic oligonucleotide
  Antisense strand to SEQ ID NO: 1231578
ucacugcagaauuauuugc

SEQ ID NO: 1231580 - RNA, 19 nt, Artificial Sequence
  Description of Artificial Sequence: Synthetic oligonucleotide
  Sense strand starting at position 759 of SEQ ID NO: 917413
gcacauaccucuuugagau

SEQ ID NO: 1231581 - RNA, 19 nt, Artificial Sequence
  Description of Artificial Sequence: Synthetic oligonucleotide
  Antisense strand to SEQ ID NO: 1231580
aucucaaagagguaugugc

SEQ ID NO: 1231582 - RNA, 19 nt, Artificial Sequence
  Description of Artificial Sequence: Synthetic oligonucleotide
  Sense strand starting at position 801 of SEQ ID NO: 917413
cauacucaggcaugggauu

SEQ ID NO: 1231583 - RNA, 19 nt, Artificial Sequence
  Description of Artificial Sequence: Synthetic oligonucleotide
  Antisense strand to SEQ ID NO: 1231582
aaucccaugccugaguaug

SEQ ID NO: 1231584 - RNA, 19 nt, Artificial Sequence
  Description of Artificial Sequence: Synthetic oligonucleotide
  Sense strand starting at position 823 of SEQ ID NO: 917413
ggaagacugucaucucucu

SEQ ID NO: 1231585 - RNA, 19 nt, Artificial Sequence
  Description of Artificial Sequence: Synthetic oligonucleotide
  Antisense strand to SEQ ID NO: 1231584
agagagaugacagucuucc

SEQ ID NO: 1231586 - RNA, 19 nt, Artificial Sequence
  Description of Artificial Sequence: Synthetic oligonucleotide
  Sense strand starting at position 881 of SEQ ID NO: 917413
agacuugagucuuucuuau

SEQ ID NO: 1231587 - RNA, 19 nt, Artificial Sequence
  Description of Artificial Sequence: Synthetic oligonucleotide
  Antisense strand to SEQ ID NO: 1231586
auaagaaagacucaagucu

SEQ ID NO: 1231588 - RNA, 19 nt, Artificial Sequence
  Description of Artificial Sequence: Synthetic oligonucleotide
  Sense strand starting at position 883 of SEQ ID NO: 917413
acuugagucuuucuuaucu

SEQ ID NO: 1231589 - RNA, 19 nt, Artificial Sequence
  Description of Artificial Sequence: Synthetic oligonucleotide
  Antisense strand to SEQ ID NO: 1231588
agauaagaaagacucaagu

SEQ ID NO: 1231590 - RNA, 19 nt, Artificial Sequence
  Description of Artificial Sequence: Synthetic oligonucleotide
  Sense strand starting at position 1036 of SEQ ID NO: 917413
gcaguuucgccaucaguuc

SEQ ID NO: 1231591 - RNA, 19 nt, Artificial Sequence
  Description of Artificial Sequence: Synthetic oligonucleotide
  Antisense strand to SEQ ID NO: 1231590
gaacugauggcgaaacugc

SEQ ID NO: 1231592 - RNA, 19 nt, Artificial Sequence
  Description of Artificial Sequence: Synthetic oligonucleotide
  Sense strand starting at position 1130 of SEQ ID NO: 917413
cgcgcagcucucgcagaaa

SEQ ID NO: 1231593 - RNA, 19 nt, Artificial Sequence
  Description of Artificial Sequence: Synthetic oligonucleotide
  Antisense strand to SEQ ID NO: 1231592
uuucugcgagagcugcgcg

SEQ ID NO: 1231594 - RNA, 19 nt, Artificial Sequence
  Description of Artificial Sequence: Synthetic oligonucleotide
  Sense strand starting at position 1133 of SEQ ID NO: 917413
gcagcucucgcagaaauaa

SEQ ID NO: 1231595 - RNA, 19 nt, Artificial Sequence
  Description of Artificial Sequence: Synthetic oligonucleotide
  Antisense strand to SEQ ID NO: 1231594
uuauuucugcgagagcugc

SEQ ID NO: 1231596 - RNA, 19 nt, Artificial Sequence
  Description of Artificial Sequence: Synthetic oligonucleotide
  Sense strand starting at position 1199 of SEQ ID NO: 917413
gaaacaccugaaugguauu

SEQ ID NO: 1231597 - RNA, 19 nt, Artificial Sequence
  Description of Artificial Sequence: Synthetic oligonucleotide
  Antisense strand to SEQ ID NO: 1231596
aauaccauucagguguuuc

SEQ ID NO: 1231598 - RNA, 19 nt, Artificial Sequence
  Description of Artificial Sequence: Synthetic oligonucleotide
  Sense strand starting at position 1316 of SEQ ID NO: 917413
ggaacggucguggaggaau

SEQ ID NO: 1231599 - RNA, 19 nt, Artificial Sequence
  Description of Artificial Sequence: Synthetic oligonucleotide
  Antisense strand to SEQ ID NO: 1231598
auuccuccacgaccguucc

SEQ ID NO: 1231600 - RNA, 19 nt, Artificial Sequence
  Description of Artificial Sequence: Synthetic oligonucleotide
  Sense strand starting at position 1384 of SEQ ID NO: 917413
agaugucaggcugguaauc

SEQ ID NO: 1231601 - RNA, 19 nt, Artificial Sequence
  Description of Artificial Sequence: Synthetic oligonucleotide
  Antisense strand to SEQ ID NO: 1231600
gauuaccagccugacaucu

SEQ ID NO: 1231602 - RNA, 19 nt, Artificial Sequence
  Description of Artificial Sequence: Synthetic oligonucleotide
  Sense strand starting at position 1466 of SEQ ID NO: 917413
ggaggaguugcccauggac

SEQ ID NO: 1231603 - RNA, 19 nt, Artificial Sequence
  Description of Artificial Sequence: Synthetic oligonucleotide
  Antisense strand to SEQ ID NO: 1231602
guccaugggcaacuccucc

SEQ ID NO: 1231604 - RNA, 19 nt, Artificial Sequence
  Description of Artificial Sequence: Synthetic oligonucleotide
  Sense strand starting at position 2119 of SEQ ID NO: 917413
cuuguaaucccgggacacu

SEQ ID NO: 1231605 - RNA, 19 nt, Artificial Sequence
  Description of Artificial Sequence: Synthetic oligonucleotide
  Antisense strand to SEQ ID NO: 1231604
agugucccgggauuacaag

SEQ ID NO: 1231606 - RNA, 19 nt, Artificial Sequence
  Description of Artificial Sequence: Synthetic oligonucleotide
  Sense strand starting at position 2151 of SEQ ID NO: 917413
gggagaaucacccgagguc

SEQ ID NO: 1231607 - RNA, 19 nt, Artificial Sequence
  Description of Artificial Sequence: Synthetic oligonucleotide
  Antisense strand to SEQ ID NO: 1231606
gaccucgggugauucuccc

SEQ ID NO: 1231608 - RNA, 19 nt, Artificial Sequence
  Description of Artificial Sequence: Synthetic oligonucleotide
  Sense strand starting at position 2160 of SEQ ID NO: 917413
acccgaggucagcaguuua

SEQ ID NO: 1231609 - RNA, 19 nt, Artificial Sequence
  Description of Artificial Sequence: Synthetic oligonucleotide
  Antisense strand to SEQ ID NO: 1231608
uaaacugcugaccucgggu

SEQ ID NO: 1231610 - RNA, 19 nt, Artificial Sequence
  Description of Artificial Sequence: Synthetic oligonucleotide
  Sense strand starting at position 2544 of SEQ ID NO: 917413
ggaaucauuccaggccaua

SEQ ID NO: 1231611 - RNA, 19 nt, Artificial Sequence
  Description of Artificial Sequence: Synthetic oligonucleotide
  Antisense strand to SEQ ID NO: 1231610
uauggccuggaaugauucc

SEQ ID NO: 1231612 - RNA, 19 nt, Artificial Sequence
  Description of Artificial Sequence: Synthetic oligonucleotide
  Sense strand starting at position 2593 of SEQ ID NO: 917413
ggcgcuugaaaugcguauu

SEQ ID NO: 1231613 - RNA, 19 nt, Artificial Sequence
  Description of Artificial Sequence: Synthetic oligonucleotide
  Antisense strand to SEQ ID NO: 1231612
aauacgcauuucaagcgcc

SEQ ID NO: 1231614 - RNA, 19 nt, Artificial Sequence
  Description of Artificial Sequence: Synthetic oligonucleotide
  Sense strand starting at position 3308 of SEQ ID NO: 917413
ucuaguucuuauuuagcca

SEQ ID NO: 1231615 - RNA, 19 nt, Artificial Sequence
  Description of Artificial Sequence: Synthetic oligonucleotide
  Antisense strand to SEQ ID NO: 1231614
uggcuaaauaagaacuaga

SEQ ID NO: 1231616 - RNA, 19 nt, Artificial Sequence
  Description of Artificial Sequence: Synthetic oligonucleotide
  Sense strand starting at position 3371 of SEQ ID NO: 917413
gguucuaucucuuuacuua

SEQ ID NO: 1231617 - RNA, 19 nt, Artificial Sequence
  Description of Artificial Sequence: Synthetic oligonucleotide
  Antisense strand to SEQ ID NO: 1231616
uaaguaaagagauagaacc

SEQ ID NO: 1231618 - RNA, 19 nt, Artificial Sequence
  Description of Artificial Sequence: Synthetic oligonucleotide
  Sense strand starting at position 3456 of SEQ ID NO: 917413
ggagaaguugugugggucu

SEQ ID NO: 1231619 - RNA, 19 nt, Artificial Sequence
  Description of Artificial Sequence: Synthetic oligonucleotide
  Antisense strand to SEQ ID NO: 1231618
agacccacacaacuucucc

SEQ ID NO: 1231620 - RNA, 19 nt, Artificial Sequence
  Description of Artificial Sequence: Synthetic oligonucleotide
  Sense strand starting at position 3467 of SEQ ID NO: 917413
gugggucucucuuccuaga

SEQ ID NO: 1231621 - RNA, 19 nt, Artificial Sequence
  Description of Artificial Sequence: Synthetic oligonucleotide
  Antisense strand to SEQ ID NO: 1231620
ucuaggaagagagacccac

SEQ ID NO: 1231622 - RNA, 19 nt, Artificial Sequence
  Description of Artificial Sequence: Synthetic oligonucleotide
  Sense strand starting at position 3469 of SEQ ID NO: 917413
gggucucucuuccuagaca

SEQ ID NO: 1231623 - RNA, 19 nt, Artificial Sequence
  Description of Artificial Sequence: Synthetic oligonucleotide
  Antisense strand to SEQ ID NO: 1231622
ugucuaggaagagagaccc

SEQ ID NO: 1231624 - RNA, 19 nt, Artificial Sequence
  Description of Artificial Sequence: Synthetic oligonucleotide
  Sense strand starting at position 3523 of SEQ ID NO: 917413
aagcuuacaguguaaagaa

SEQ ID NO: 1231625 - RNA, 19 nt, Artificial Sequence
  Description of Artificial Sequence: Synthetic oligonucleotide
  Antisense strand to SEQ ID NO: 1231624
uucuuuacacuguaagcuu

SEQ ID NO: 1231626 - RNA, 19 nt, Artificial Sequence
  Description of Artificial Sequence: Synthetic oligonucleotide
  Sense strand starting at position 3561 of SEQ ID NO: 917413
uuucucuuaggauaguaau

SEQ ID NO: 1231627 - RNA, 19 nt, Artificial Sequence
  Description of Artificial Sequence: Synthetic oligonucleotide
  Antisense strand to SEQ ID NO: 1231626
auuacuauccuaagagaaa

SEQ ID NO: 1231628 - RNA, 19 nt, Artificial Sequence
  Description of Artificial Sequence: Synthetic oligonucleotide
  Sense strand starting at position 3567 of SEQ ID NO: 917413
uuaggauaguaauucuaga

SEQ ID NO: 1231629 - RNA, 19 nt, Artificial Sequence
  Description of Artificial Sequence: Synthetic oligonucleotide
  Antisense strand to SEQ ID NO: 1231628
ucuagaauuacuauccuaa

SEQ ID NO: 1231630 - RNA, 19 nt, Artificial Sequence
  Description of Artificial Sequence: Synthetic oligonucleotide
  Sense strand starting at position 3691 of SEQ ID NO: 917413
cuggaauccaucgguauug

SEQ ID NO: 1231631 - RNA, 19 nt, Artificial Sequence
  Description of Artificial Sequence: Synthetic oligonucleotide
  Antisense strand to SEQ ID NO: 1231630
caauaccgauggauuccag

SEQ ID NO: 1231632 - RNA, 19 nt, Artificial Sequence
  Description of Artificial Sequence: Synthetic oligonucleotide
  Sense strand starting at position 3693 of SEQ ID NO: 917413
ggaauccaucgguauuguu

SEQ ID NO: 1231633 - RNA, 19 nt, Artificial Sequence
  Description of Artificial Sequence: Synthetic oligonucleotide
  Antisense strand to SEQ ID NO: 1231632
aacaauaccgauggauucc

SEQ ID NO: 1231634 - RNA, 19 nt, Artificial Sequence
  Description of Artificial Sequence: Synthetic oligonucleotide
  Sense strand starting at position 3735 of SEQ ID NO: 917413
uugugugauucaguuggaa

SEQ ID NO: 1231635 - RNA, 19 nt, Artificial Sequence
  Description of Artificial Sequence: Synthetic oligonucleotide
  Antisense strand to SEQ ID NO: 1231634
uuccaacugaaucacacaa

SEQ ID NO: 1231636 - RNA, 19 nt, Artificial Sequence
  Description of Artificial Sequence: Synthetic oligonucleotide
  Sense strand starting at position 3779 of SEQ ID NO: 917413
agauguugguguccauauu

SEQ ID NO: 1231637 - RNA, 19 nt, Artificial Sequence
  Description of Artificial Sequence: Synthetic oligonucleotide
  Antisense strand to SEQ ID NO: 1231636
aauauggacaccaacaucu

SEQ ID NO: 1231638 - RNA, 19 nt, Artificial Sequence
  Description of Artificial Sequence: Synthetic oligonucleotide
  Sense strand starting at position 3780 of SEQ ID NO: 917413
gauguugguguccauauua

SEQ ID NO: 1231639 - RNA, 19 nt, Artificial Sequence
  Description of Artificial Sequence: Synthetic oligonucleotide
  Antisense strand to SEQ ID NO: 1231638
uaauauggacaccaacauc

SEQ ID NO: 1231640 - RNA, 19 nt, Artificial Sequence
  Description of Artificial Sequence: Synthetic oligonucleotide
  Sense strand starting at position 3896 of SEQ ID NO: 917413
ucucacaauccaugguaga

SEQ ID NO: 1231641 - RNA, 19 nt, Artificial Sequence
  Description of Artificial Sequence: Synthetic oligonucleotide
  Antisense strand to SEQ ID NO: 1231640
ucuaccauggauugugaga

SEQ ID NO: 1231642 - RNA, 19 nt, Artificial Sequence
  Description of Artificial Sequence: Synthetic oligonucleotide
  Sense strand starting at position 3897 of SEQ ID NO: 917414
cucacaauccaugguagaa

SEQ ID NO: 1231643 - RNA, 19 nt, Artificial Sequence
  Description of Artificial Sequence: Synthetic oligonucleotide
  Antisense strand to SEQ ID NO: 1231642
uucuaccauggauugugag

SEQ ID NO: 1231644 - RNA, 19 nt, Artificial Sequence
  Description of Artificial Sequence: Synthetic oligonucleotide
  Sense strand starting at position 311 of SEQ ID NO: 917414
cuauuuaacuuccagggau

SEQ ID NO: 1231645 - RNA, 19 nt, Artificial Sequence
  Description of Artificial Sequence: Synthetic oligonucleotide
  Antisense strand to SEQ ID NO: 1231644
aucccuggaaguuaaauag

SEQ ID NO: 1231646 - RNA, 19 nt, Artificial Sequence
  Description of Artificial Sequence: Synthetic oligonucleotide
  Sense strand starting at position 314 of SEQ ID NO: 917414
uuuaacuuccagggauaau

SEQ ID NO: 1231647 - RNA, 19 nt, Artificial Sequence
  Description of Artificial Sequence: Synthetic oligonucleotide
  Antisense strand to SEQ ID NO: 1231646
auuaucccuggaaguuaaa

SEQ ID NO: 1231648 - RNA, 19 nt, Artificial Sequence
  Description of Artificial Sequence: Synthetic oligonucleotide
  Sense strand starting at position 611 of SEQ ID NO: 917414
ggagaaacuugguucucca

SEQ ID NO: 1231649 - RNA, 19 nt, Artificial Sequence
  Description of Artificial Sequence: Synthetic oligonucleotide
  Antisense strand to SEQ ID NO: 1231648
uggagaaccaaguuucucc

SEQ ID NO: 1231650 - RNA, 19 nt, Artificial Sequence
  Description of Artificial Sequence: Synthetic oligonucleotide
  Sense strand starting at position 677 of SEQ ID NO: 917414
ucuugccaagacugagaaa

SEQ ID NO: 1231651 - RNA, 19 nt, Artificial Sequence
  Description of Artificial Sequence: Synthetic oligonucleotide
  Antisense strand to SEQ ID NO: 1231650
uuucucagucuuggcaaga

SEQ ID NO: 1231652 - RNA, 19 nt, Artificial Sequence
  Description of Artificial Sequence: Synthetic oligonucleotide
  Sense strand starting at position 706 of SEQ ID NO: 917414
ugaccuuaacuuugaaagu

SEQ ID NO: 1231653 - RNA, 19 nt, Artificial Sequence
  Description of Artificial Sequence: Synthetic oligonucleotide
  Antisense strand to SEQ ID NO: 1231652
acuuucaaaguuaagguca

SEQ ID NO: 1231654 - RNA, 19 nt, Artificial Sequence
  Description of Artificial Sequence: Synthetic oligonucleotide
  Sense strand starting at position 767 of SEQ ID NO: 917414
agcuccaggaauugagauu

SEQ ID NO: 1231655 - RNA, 19 nt, Artificial Sequence
  Description of Artificial Sequence: Synthetic oligonucleotide
  Antisense strand to SEQ ID NO: 1231654
aaucucaauuccuggagcu

SEQ ID NO: 1231656 - RNA, 19 nt, Artificial Sequence
  Description of Artificial Sequence: Synthetic oligonucleotide
  Sense strand starting at position 788 of SEQ ID NO: 917414
acaacucagcuguauuaag

SEQ ID NO: 1231657 - RNA, 19 nt, Artificial Sequence
  Description of Artificial Sequence: Synthetic oligonucleotide
  Antisense strand to SEQ ID NO: 1231656
cuuaauacagcugaguugu

SEQ ID NO: 1231658 - RNA, 19 nt, Artificial Sequence
  Description of Artificial Sequence: Synthetic oligonucleotide
  Sense strand starting at position 797 of SEQ ID NO: 917414
cuguauuaagagcacacua

SEQ ID NO: 1231659 - RNA, 19 nt, Artificial Sequence
  Description of Artificial Sequence: Synthetic oligonucleotide
  Antisense strand to SEQ ID NO: 1231658
uagugugcucuuaauacag

SEQ ID NO: 1231660 - RNA, 19 nt, Artificial Sequence
  Description of Artificial Sequence: Synthetic oligonucleotide
  Sense strand starting at position 1162 of SEQ ID NO: 917414
cugugaucacuugaguaga

SEQ ID NO: 1231661 - RNA, 19 nt, Artificial Sequence
  Description of Artificial Sequence: Synthetic oligonucleotide
  Antisense strand to SEQ ID NO: 1231660
ucuacucaagugaucacag

SEQ ID NO: 1231662 - RNA, 19 nt, Artificial Sequence
  Description of Artificial Sequence: Synthetic oligonucleotide
  Sense strand starting at position 1164 of SEQ ID NO: 917414
gugaucacuugaguagauu

SEQ ID NO: 1231663 - RNA, 19 nt, Artificial Sequence
  Description of Artificial Sequence: Synthetic oligonucleotide
  Antisense strand to SEQ ID NO: 1231662
aaucuacucaagugaucac

SEQ ID NO: 1231664 - RNA, 19 nt, Artificial Sequence
  Description of Artificial Sequence: Synthetic oligonucleotide
  Sense strand starting at position 1175 of SEQ ID NO: 917414
aguagauuguaggugaaca

SEQ ID NO: 1231665 - RNA, 19 nt, Artificial Sequence
  Description of Artificial Sequence: Synthetic oligonucleotide
  Antisense strand to SEQ ID NO: 1231664
uguucaccuacaaucuacu

SEQ ID NO: 1231666 - RNA, 19 nt, Artificial Sequence
  Description of Artificial Sequence: Synthetic oligonucleotide
  Sense strand starting at position 1176 of SEQ ID NO: 917414
guagauuguaggugaacag

SEQ ID NO: 1231667 - RNA, 19 nt, Artificial Sequence
  Description of Artificial Sequence: Synthetic oligonucleotide
  Antisense strand to SEQ ID NO: 1231666
cuguucaccuacaaucuac

SEQ ID NO: 1231668 - RNA, 19 nt, Artificial Sequence
  Description of Artificial Sequence: Synthetic oligonucleotide
  Sense strand starting at position 1199 of SEQ ID NO: 917414
auaauagugcaguguauuu

SEQ ID NO: 1231669 - RNA, 19 nt, Artificial Sequence
  Description of Artificial Sequence: Synthetic oligonucleotide
  Antisense strand to SEQ ID NO: 1231668
aaauacacugcacuauuau

SEQ ID NO: 1231670 - RNA, 19 nt, Artificial Sequence
  Description of Artificial Sequence: Synthetic oligonucleotide
  Sense strand starting at position 1535 of SEQ ID NO: 917414
cugccuugugaggaguaga

SEQ ID NO: 1231671 - RNA, 19 nt, Artificial Sequence
  Description of Artificial Sequence: Synthetic oligonucleotide
  Antisense strand to SEQ ID NO: 1231670
ucuacuccucacaaggcag

SEQ ID NO: 1231672 - RNA, 19 nt, Artificial Sequence
  Description of Artificial Sequence: Synthetic oligonucleotide
  Sense strand starting at position 1538 of SEQ ID NO: 917414
ccuugugaggaguagauua

SEQ ID NO: 1231673 - RNA, 19 nt, Artificial Sequence
  Description of Artificial Sequence: Synthetic oligonucleotide
  Antisense strand to SEQ ID NO: 1231672
uaaucuacuccucacaagg

SEQ ID NO: 1231674 - RNA, 19 nt, Artificial Sequence
  Description of Artificial Sequence: Synthetic oligonucleotide
  Sense strand starting at position 1597 of SEQ ID NO: 917414
gaggccuggauggguaauu

SEQ ID NO: 1231675 - RNA, 19 nt, Artificial Sequence
  Description of Artificial Sequence: Synthetic oligonucleotide
  Antisense strand to SEQ ID NO: 1231674
aauuacccauccaggccuc

SEQ ID NO: 1231676 - RNA, 19 nt, Artificial Sequence
  Description of Artificial Sequence: Synthetic oligonucleotide
  Sense strand starting at position 2166 of SEQ ID NO: 917414
cguugaggaccguucguuu

SEQ ID NO: 1231677 - RNA, 19 nt, Artificial Sequence
  Description of Artificial Sequence: Synthetic oligonucleotide
  Antisense strand to SEQ ID NO: 1231676
aaacgaacgguccucaacg

SEQ ID NO: 1231678 - RNA, 19 nt, Artificial Sequence
  Description of Artificial Sequence: Synthetic oligonucleotide
  Sense strand starting at position 2278 of SEQ ID NO: 917414
agauaaucauuuggauuga

SEQ ID NO: 1231679 - RNA, 19 nt, Artificial Sequence
  Description of Artificial Sequence: Synthetic oligonucleotide
  Antisense strand to SEQ ID NO: 1231678
ucaauccaaaugauuaucu

SEQ ID NO: 1231680 - RNA, 19 nt, Artificial Sequence
  Description of Artificial Sequence: Synthetic oligonucleotide
  Sense strand starting at position 2434 of SEQ ID NO: 917414
uuucgaauuaaggaguguu

SEQ ID NO: 1231681 - RNA, 19 nt, Artificial Sequence
  Description of Artificial Sequence: Synthetic oligonucleotide
  Antisense strand to SEQ ID NO: 1231680
aacacuccuuaauucgaaa

SEQ ID NO: 1231682 - RNA, 19 nt, Artificial Sequence
  Description of Artificial Sequence: Synthetic oligonucleotide
  Sense strand starting at position 2519 of SEQ ID NO: 917414
cuaagaauuuaugaacuag

SEQ ID NO: 1231683 - RNA, 19 nt, Artificial Sequence
  Description of Artificial Sequence: Synthetic oligonucleotide
  Antisense strand to SEQ ID NO: 1231682
cuaguucauaaauucuuag

SEQ ID NO: 1231684 - RNA, 19 nt, Artificial Sequence
  Description of Artificial Sequence: Synthetic oligonucleotide
  Sense strand starting at position 2614 of SEQ ID NO: 917414
accuguguuagagacagua

SEQ ID NO: 1231685 - RNA, 19 nt, Artificial Sequence
  Description of Artificial Sequence: Synthetic oligonucleotide
  Antisense strand to SEQ ID NO: 1231684
uacugucucuaacacaggu

SEQ ID NO: 1231686 - RNA, 19 nt, Artificial Sequence
  Description of Artificial Sequence: Synthetic oligonucleotide
  Sense strand starting at position 2616 of SEQ ID NO: 917414
cuguguuagagacaguaag

SEQ ID NO: 1231687 - RNA, 19 nt, Artificial Sequence
  Description of Artificial Sequence: Synthetic oligonucleotide
  Antisense strand to SEQ ID NO: 1231686
cuuacugucucuaacacag

SEQ ID NO: 1231688 - RNA, 19 nt, Artificial Sequence
  Description of Artificial Sequence: Synthetic oligonucleotide
  Sense strand starting at position 3040 of SEQ ID NO: 917414
acucuucguagaggauaua

SEQ ID NO: 1231689 - RNA, 19 nt, Artificial Sequence
  Description of Artificial Sequence: Synthetic oligonucleotide
  Antisense strand to SEQ ID NO: 1231688
uauauccucuacgaagagu

SEQ ID NO: 1231690 - RNA, 19 nt, Artificial Sequence
  Description of Artificial Sequence: Synthetic oligonucleotide
  Sense strand starting at position 3052 of SEQ ID NO: 917414
ggauauaggguuugcacua

SEQ ID NO: 1231691 - RNA, 19 nt, Artificial Sequence
  Description of Artificial Sequence: Synthetic oligonucleotide
  Antisense strand to SEQ ID NO: 1231690
uagugcaaacccuauaucc

SEQ ID NO: 1231692 - RNA, 19 nt, Artificial Sequence
  Description of Artificial Sequence: Synthetic oligonucleotide
  Sense strand starting at position 3059 of SEQ ID NO: 917414
ggguuugcacuagaccuua

SEQ ID NO: 1231693 - RNA, 19 nt, Artificial Sequence
  Description of Artificial Sequence: Synthetic oligonucleotide
  Antisense strand to SEQ ID NO: 1231692
uaaggucuagugcaaaccc

SEQ ID NO: 1231694 - RNA, 19 nt, Artificial Sequence
  Description of Artificial Sequence: Synthetic oligonucleotide
  Sense strand starting at position 3086 of SEQ ID NO: 917414
guaguacuuacaggaguaa

SEQ ID NO: 1231695 - RNA, 19 nt, Artificial Sequence
  Description of Artificial Sequence: Synthetic oligonucleotide
  Antisense strand to SEQ ID NO: 1231694
uuacuccuguaaguacuac

SEQ ID NO: 1231696 - RNA, 19 nt, Artificial Sequence
  Description of Artificial Sequence: Synthetic oligonucleotide
  Sense strand starting at position 3181 of SEQ ID NO: 917414
cacagugacuucuugagaa

SEQ ID NO: 1231697 - RNA, 19 nt, Artificial Sequence
  Description of Artificial Sequence: Synthetic oligonucleotide
  Antisense strand to SEQ ID NO: 1231696
uucucaagaagucacugug

SEQ ID NO: 1231698 - RNA, 19 nt, Artificial Sequence
  Description of Artificial Sequence: Synthetic oligonucleotide
  Sense strand starting at position 3219 of SEQ ID NO: 917414
gaguaugaguuuccuuaaa

SEQ ID NO: 1231699 - RNA, 19 nt, Artificial Sequence
  Description of Artificial Sequence: Synthetic oligonucleotide
  Antisense strand to SEQ ID NO: 1231698
uuuaaggaaacucauacuc

SEQ ID NO: 1231700 - RNA, 19 nt, Artificial Sequence
  Description of Artificial Sequence: Synthetic oligonucleotide
  Sense strand starting at position 3235 of SEQ ID NO: 917414
aaaguaagcuucuuuggag

SEQ ID NO: 1231701 - RNA, 19 nt, Artificial Sequence
  Description of Artificial Sequence: Synthetic oligonucleotide
  Antisense strand to SEQ ID NO: 1231700
cuccaaagaagcuuacuuu

SEQ ID NO: 1231702 - RNA, 19 nt, Artificial Sequence
  Description of Artificial Sequence: Synthetic oligonucleotide
  Sense strand starting at position 3236 of SEQ ID NO: 917414
aaguaagcuucuuuggaga

SEQ ID NO: 1231703 - RNA, 19 nt, Artificial Sequence
  Description of Artificial Sequence: Synthetic oligonucleotide
  Antisense strand to SEQ ID NO: 1231702
ucuccaaagaagcuuacuu

SEQ ID NO: 1231704 - RNA, 19 nt, Artificial Sequence
  Description of Artificial Sequence: Synthetic oligonucleotide
  Sense strand starting at position 3263 of SEQ ID NO: 917414
agggaagaauuucggagaa

SEQ ID NO: 1231705 - RNA, 19 nt, Artificial Sequence
  Description of Artificial Sequence: Synthetic oligonucleotide
  Antisense strand to SEQ ID NO: 1231704
uucuccgaaauucuucccu

SEQ ID NO: 1231706 - RNA, 19 nt, Artificial Sequence
  Description of Artificial Sequence: Synthetic oligonucleotide
  Sense strand starting at position 3265 of SEQ ID NO: 917414
ggaagaauuucggagaauc

SEQ ID NO: 1231707 - RNA, 19 nt, Artificial Sequence
  Description of Artificial Sequence: Synthetic oligonucleotide
  Antisense strand to SEQ ID NO: 1231706
gauucuccgaaauucuucc

SEQ ID NO: 1231708 - RNA, 19 nt, Artificial Sequence
  Description of Artificial Sequence: Synthetic oligonucleotide
  Sense strand starting at position 3277 of SEQ ID NO: 917414
gagaaucucgaguguaagg

SEQ ID NO: 1231709 - RNA, 19 nt, Artificial Sequence
  Description of Artificial Sequence: Synthetic oligonucleotide
  Antisense strand to SEQ ID NO: 1231708
ccuuacacucgagauucuc

SEQ ID NO: 1231710 - RNA, 19 nt, Artificial Sequence
  Description of Artificial Sequence: Synthetic oligonucleotide
  Sense strand starting at position 3286 of SEQ ID NO: 917414
gaguguaaggcugaggagu

SEQ ID NO: 1231711 - RNA, 19 nt, Artificial Sequence
  Description of Artificial Sequence: Synthetic oligonucleotide
  Antisense strand to SEQ ID NO: 1231710
acuccucagccuuacacuc

SEQ ID NO: 1231712 - RNA, 19 nt, Artificial Sequence
  Description of Artificial Sequence: Synthetic oligonucleotide
  Sense strand starting at position 3301 of SEQ ID NO: 917414
gaguuuggacuuuacucuu

SEQ ID NO: 1231713 - RNA, 19 nt, Artificial Sequence
  Description of Artificial Sequence: Synthetic oligonucleotide
  Antisense strand to SEQ ID NO: 1231712
aagaguaaaguccaaacuc

SEQ ID NO: 1231714 - RNA, 19 nt, Artificial Sequence
  Description of Artificial Sequence: Synthetic oligonucleotide
  Sense strand starting at position 3307 of SEQ ID NO: 917414
ggacuuuacucuuuaagca

SEQ ID NO: 1231715 - RNA, 19 nt, Artificial Sequence
  Description of Artificial Sequence: Synthetic oligonucleotide
  Antisense strand to SEQ ID NO: 1231714
ugcuuaaagaguaaagucc

SEQ ID NO: 1231716 - RNA, 19 nt, Artificial Sequence
  Description of Artificial Sequence: Synthetic oligonucleotide
  Sense strand starting at position 3548 of SEQ ID NO: 917414
cuuuguaauuuguugucuu

SEQ ID NO: 1231717 - RNA, 19 nt, Artificial Sequence
  Description of Artificial Sequence: Synthetic oligonucleotide
  Antisense strand to SEQ ID NO: 1231716
aagacaacaaauuacaaag

SEQ ID NO: 1231718 - RNA, 19 nt, Artificial Sequence
  Description of Artificial Sequence: Synthetic oligonucleotide
  Sense strand starting at position 3551 of SEQ ID NO: 917414
uguaauuuguugucuucga

SEQ ID NO: 1231719 - RNA, 19 nt, Artificial Sequence
  Description of Artificial Sequence: Synthetic oligonucleotide
  Antisense strand to SEQ ID NO: 1231718
ucgaagacaacaaauuaca

SEQ ID NO: 1231720 - RNA, 19 nt, Artificial Sequence
  Description of Artificial Sequence: Synthetic oligonucleotide
  Sense strand starting at position 3552 of SEQ ID NO: 917414
guaauuuguugucuucgag

SEQ ID NO: 1231721 - RNA, 19 nt, Artificial Sequence
  Description of Artificial Sequence: Synthetic oligonucleotide
  Antisense strand to SEQ ID NO: 1231720
cucgaagacaacaaauuac

SEQ ID NO: 1231722 - RNA, 19 nt, Artificial Sequence
  Description of Artificial Sequence: Synthetic oligonucleotide
  Sense strand starting at position 3555 of SEQ ID NO: 917414
auuuguugucuucgagaga

SEQ ID NO: 1231723 - RNA, 19 nt, Artificial Sequence
  Description of Artificial Sequence: Synthetic oligonucleotide
  Antisense strand to SEQ ID NO: 1231722
ucucucgaagacaacaaau

SEQ ID NO: 1231724 - RNA, 19 nt, Artificial Sequence
  Description of Artificial Sequence: Synthetic oligonucleotide
  Sense strand starting at position 3555 of SEQ ID NO: 917415
auuuguugucuucgagaga

SEQ ID NO: 1231725 - RNA, 19 nt, Artificial Sequence
  Description of Artificial Sequence: Synthetic oligonucleotide
  Antisense strand to SEQ ID NO: 1231724
ucucucgaagacaacaaau

SEQ ID NO: 1231726 - RNA, 19 nt, Artificial Sequence
  Description of Artificial Sequence: Synthetic oligonucleotide
  Sense strand starting at position 2 of SEQ ID NO: 917415
augugcaaaguuuagcaua

SEQ ID NO: 1231727 - RNA, 19 nt, Artificial Sequence
  Description of Artificial Sequence: Synthetic oligonucleotide
  Antisense strand to SEQ ID NO: 1231726
uaugcuaaacuuugcacau

SEQ ID NO: 1231728 - RNA, 19 nt, Artificial Sequence
  Description of Artificial Sequence: Synthetic oligonucleotide
  Sense strand starting at position 131 of SEQ ID NO: 917415
gccugaugucauggaugaa

SEQ ID NO: 1231729 - RNA, 19 nt, Artificial Sequence
  Description of Artificial Sequence: Synthetic oligonucleotide
  Antisense strand to SEQ ID NO: 1231728
uucauccaugacaucaggc

SEQ ID NO: 1231730 - RNA, 19 nt, Artificial Sequence
  Description of Artificial Sequence: Synthetic oligonucleotide
  Sense strand starting at position 134 of SEQ ID NO: 917415
ugaugucauggaugaacuu

SEQ ID NO: 1231731 - RNA, 19 nt, Artificial Sequence
  Description of Artificial Sequence: Synthetic oligonucleotide
  Antisense strand to SEQ ID NO: 1231730
aaguucauccaugacauca

SEQ ID NO: 1231732 - RNA, 19 nt, Artificial Sequence
  Description of Artificial Sequence: Synthetic oligonucleotide
  Sense strand starting at position 223 of SEQ ID NO: 917415
aagucuuaguauucugaag

SEQ ID NO: 1231733 - RNA, 19 nt, Artificial Sequence
  Description of Artificial Sequence: Synthetic oligonucleotide
  Antisense strand to SEQ ID NO: 1231732
cuucagaauacuaagacuu

SEQ ID NO: 1231734 - RNA, 19 nt, Artificial Sequence
  Description of Artificial Sequence: Synthetic oligonucleotide
  Sense strand starting at position 323 of SEQ ID NO: 917415
cuuaaagcauuggugugaa

SEQ ID NO: 1231735 - RNA, 19 nt, Artificial Sequence
  Description of Artificial Sequence: Synthetic oligonucleotide
  Antisense strand to SEQ ID NO: 1231734
uucacaccaaugcuuuaag

SEQ ID NO: 1231736 - RNA, 19 nt, Artificial Sequence
  Description of Artificial Sequence: Synthetic oligonucleotide
  Sense strand starting at position 326 of SEQ ID NO: 917415
aaagcauuggugugaagag

SEQ ID NO: 1231737 - RNA, 19 nt, Artificial Sequence
  Description of Artificial Sequence: Synthetic oligonucleotide
  Antisense strand to SEQ ID NO: 1231736
cucuucacaccaaugcuuu

SEQ ID NO: 1231738 - RNA, 19 nt, Artificial Sequence
  Description of Artificial Sequence: Synthetic oligonucleotide
  Sense strand starting at position 375 of SEQ ID NO: 917415
cucuguagucugcaaauca

SEQ ID NO: 1231739 - RNA, 19 nt, Artificial Sequence
  Description of Artificial Sequence: Synthetic oligonucleotide
  Antisense strand to SEQ ID NO: 1231738
ugauuugcagacuacagag

SEQ ID NO: 1231740 - RNA, 19 nt, Artificial Sequence
  Description of Artificial Sequence: Synthetic oligonucleotide
  Sense strand starting at position 430 of SEQ ID NO: 917415
aaaguauagguuugguaaa

SEQ ID NO: 1231741 - RNA, 19 nt, Artificial Sequence
  Description of Artificial Sequence: Synthetic oligonucleotide
  Antisense strand to SEQ ID NO: 1231740
uuuaccaaaccuauacuuu

SEQ ID NO: 1231742 - RNA, 19 nt, Artificial Sequence
  Description of Artificial Sequence: Synthetic oligonucleotide
  Sense strand starting at position 432 of SEQ ID NO: 917415
aguauagguuugguaaauc

SEQ ID NO: 1231743 - RNA, 19 nt, Artificial Sequence
  Description of Artificial Sequence: Synthetic oligonucleotide
  Antisense strand to SEQ ID NO: 1231742
gauuuaccaaaccuauacu

SEQ ID NO: 1231744 - RNA, 19 nt, Artificial Sequence
  Description of Artificial Sequence: Synthetic oligonucleotide
  Sense strand starting at position 557 of SEQ ID NO: 917415
gccaguguuggaggaaauu

SEQ ID NO: 1231745 - RNA, 19 nt, Artificial Sequence
  Description of Artificial Sequence: Synthetic oligonucleotide
  Antisense strand to SEQ ID NO: 1231744
aauuuccuccaacacuggc

SEQ ID NO: 1231746 - RNA, 19 nt, Artificial Sequence
  Description of Artificial Sequence: Synthetic oligonucleotide
  Sense strand starting at position 605 of SEQ ID NO: 917415
acuuuaugucaggagccaa

SEQ ID NO: 1231747 - RNA, 19 nt, Artificial Sequence
  Description of Artificial Sequence: Synthetic oligonucleotide
  Antisense strand to SEQ ID NO: 1231746
uuggcuccugacauaaagu

SEQ ID NO: 1231748 - RNA, 19 nt, Artificial Sequence
  Description of Artificial Sequence: Synthetic oligonucleotide
  Sense strand starting at position 622 of SEQ ID NO: 917415
aaauguagacuguggcaaa

SEQ ID NO: 1231749 - RNA, 19 nt, Artificial Sequence
  Description of Artificial Sequence: Synthetic oligonucleotide
  Antisense strand to SEQ ID NO: 1231748
uuugccacagucuacauuu

SEQ ID NO: 1231750 - RNA, 19 nt, Artificial Sequence
  Description of Artificial Sequence: Synthetic oligonucleotide
  Sense strand starting at position 808 of SEQ ID NO: 917415
ucugacugcuauccagaau

SEQ ID NO: 1231751 - RNA, 19 nt, Artificial Sequence
  Description of Artificial Sequence: Synthetic oligonucleotide
  Antisense strand to SEQ ID NO: 1231750
auucuggauagcagucaga

SEQ ID NO: 1231752 - RNA, 19 nt, Artificial Sequence
  Description of Artificial Sequence: Synthetic oligonucleotide
  Sense strand starting at position 926 of SEQ ID NO: 917415
aaaugcuugcucuagaagu

SEQ ID NO: 1231753 - RNA, 19 nt, Artificial Sequence
  Description of Artificial Sequence: Synthetic oligonucleotide
  Antisense strand to SEQ ID NO: 1231752
acuucuagagcaagcauuu

SEQ ID NO: 1231754 - RNA, 19 nt, Artificial Sequence
  Description of Artificial Sequence: Synthetic oligonucleotide
  Sense strand starting at position 1069 of SEQ ID NO: 917415
uuuaucuauucgguaaaga

SEQ ID NO: 1231755 - RNA, 19 nt, Artificial Sequence
  Description of Artificial Sequence: Synthetic oligonucleotide
  Antisense strand to SEQ ID NO: 1231754
ucuuuaccgaauagauaaa

SEQ ID NO: 1231756 - RNA, 19 nt, Artificial Sequence
  Description of Artificial Sequence: Synthetic oligonucleotide
  Sense strand starting at position 1070 of SEQ ID NO: 917415
uuaucuauucgguaaagaa

SEQ ID NO: 1231757 - RNA, 19 nt, Artificial Sequence
  Description of Artificial Sequence: Synthetic oligonucleotide
  Antisense strand to SEQ ID NO: 1231756
uucuuuaccgaauagauaa

SEQ ID NO: 1231758 - RNA, 19 nt, Artificial Sequence
  Description of Artificial Sequence: Synthetic oligonucleotide
  Sense strand starting at position 1104 of SEQ ID NO: 917415
ccgaaagugaggcacaaau

SEQ ID NO: 1231759 - RNA, 19 nt, Artificial Sequence
  Description of Artificial Sequence: Synthetic oligonucleotide
  Antisense strand to SEQ ID NO: 1231758
auuugugccucacuuucgg

SEQ ID NO: 1231760 - RNA, 19 nt, Artificial Sequence
  Description of Artificial Sequence: Synthetic oligonucleotide
  Sense strand starting at position 1238 of SEQ ID NO: 917415
agaguauucuaucuccuga

SEQ ID NO: 1231761 - RNA, 19 nt, Artificial Sequence
  Description of Artificial Sequence: Synthetic oligonucleotide
  Antisense strand to SEQ ID NO: 1231760
ucaggagauagaauacucu

SEQ ID NO: 1231762 - RNA, 19 nt, Artificial Sequence
  Description of Artificial Sequence: Synthetic oligonucleotide
  Sense strand starting at position 1240 of SEQ ID NO: 917415
aguauucuaucuccugacu

SEQ ID NO: 1231763 - RNA, 19 nt, Artificial Sequence
  Description of Artificial Sequence: Synthetic oligonucleotide
  Antisense strand to SEQ ID NO: 1231762
agucaggagauagaauacu

SEQ ID NO: 1231764 - RNA, 19 nt, Artificial Sequence
  Description of Artificial Sequence: Synthetic oligonucleotide
  Sense strand starting at position 1258 of SEQ ID NO: 917415
ugacccauucuuggaguua

SEQ ID NO: 1231765 - RNA, 19 nt, Artificial Sequence
  Description of Artificial Sequence: Synthetic oligonucleotide
  Antisense strand to SEQ ID NO: 1231764
uaacuccaagaauggguca

SEQ ID NO: 1231766 - RNA, 19 nt, Artificial Sequence
  Description of Artificial Sequence: Synthetic oligonucleotide
  Sense strand starting at position 1345 of SEQ ID NO: 917415
gagcaaaggucauccucaa

SEQ ID NO: 1231767 - RNA, 19 nt, Artificial Sequence
  Description of Artificial Sequence: Synthetic oligonucleotide
  Antisense strand to SEQ ID NO: 1231766
uugaggaugaccuuugcuc

SEQ ID NO: 1231768 - RNA, 19 nt, Artificial Sequence
  Description of Artificial Sequence: Synthetic oligonucleotide
  Sense strand starting at position 1469 of SEQ ID NO: 917415
ugaggcucccaggaaaugu

SEQ ID NO: 1231769 - RNA, 19 nt, Artificial Sequence
  Description of Artificial Sequence: Synthetic oligonucleotide
  Antisense strand to SEQ ID NO: 1231768
acauuuccugggagccuca

SEQ ID NO: 1231770 - RNA, 19 nt, Artificial Sequence
  Description of Artificial Sequence: Synthetic oligonucleotide
  Sense strand starting at position 1544 of SEQ ID NO: 917415
cugcgaugcguuucugaug

SEQ ID NO: 1231771 - RNA, 19 nt, Artificial Sequence
  Description of Artificial Sequence: Synthetic oligonucleotide
  Antisense strand to SEQ ID NO: 1231770
caucagaaacgcaucgcag

SEQ ID NO: 1231772 - RNA, 19 nt, Artificial Sequence
  Description of Artificial Sequence: Synthetic oligonucleotide
  Sense strand starting at position 1900 of SEQ ID NO: 917415
cagagugagcgacaaugua

SEQ ID NO: 1231773 - RNA, 19 nt, Artificial Sequence
  Description of Artificial Sequence: Synthetic oligonucleotide
  Antisense strand to SEQ ID NO: 1231772
uacauugucgcucacucug

SEQ ID NO: 1231774 - RNA, 19 nt, Artificial Sequence
  Description of Artificial Sequence: Synthetic oligonucleotide
  Sense strand starting at position 2199 of SEQ ID NO: 917415
guaggaagguaguuuacua

SEQ ID NO: 1231775 - RNA, 19 nt, Artificial Sequence
  Description of Artificial Sequence: Synthetic oligonucleotide
  Antisense strand to SEQ ID NO: 1231774
uaguaaacuaccuuccuac

SEQ ID NO: 1231776 - RNA, 19 nt, Artificial Sequence
  Description of Artificial Sequence: Synthetic oligonucleotide
  Sense strand starting at position 2206 of SEQ ID NO: 917415
gguaguuuacuacaaguau

SEQ ID NO: 1231777 - RNA, 19 nt, Artificial Sequence
  Description of Artificial Sequence: Synthetic oligonucleotide
  Antisense strand to SEQ ID NO: 1231776
auacuuguaguaaacuacc

SEQ ID NO: 1231778 - RNA, 19 nt, Artificial Sequence
  Description of Artificial Sequence: Synthetic oligonucleotide
  Sense strand starting at position 2331 of SEQ ID NO: 917415
ggugaaggauggagaguuu

SEQ ID NO: 1231779 - RNA, 19 nt, Artificial Sequence
  Description of Artificial Sequence: Synthetic oligonucleotide
  Antisense strand to SEQ ID NO: 1231778
aaacucuccauccuucacc

SEQ ID NO: 1231780 - RNA, 19 nt, Artificial Sequence
  Description of Artificial Sequence: Synthetic oligonucleotide
  Sense strand starting at position 2410 of SEQ ID NO: 917415
agacauuaucuacacguuu

SEQ ID NO: 1231781 - RNA, 19 nt, Artificial Sequence
  Description of Artificial Sequence: Synthetic oligonucleotide
  Antisense strand to SEQ ID NO: 1231780
aaacguguagauaaugucu

SEQ ID NO: 1231782 - RNA, 19 nt, Artificial Sequence
  Description of Artificial Sequence: Synthetic oligonucleotide
  Sense strand starting at position 2547 of SEQ ID NO: 917415
cgagacgauccugauacau

SEQ ID NO: 1231783 - RNA, 19 nt, Artificial Sequence
  Description of Artificial Sequence: Synthetic oligonucleotide
  Antisense strand to SEQ ID NO: 1231782
auguaucaggaucgucucg

SEQ ID NO: 1231784 - RNA, 19 nt, Artificial Sequence
  Description of Artificial Sequence: Synthetic oligonucleotide
  Sense strand starting at position 2549 of SEQ ID NO: 917415
agacgauccugauacauuu

SEQ ID NO: 1231785 - RNA, 19 nt, Artificial Sequence
  Description of Artificial Sequence: Synthetic oligonucleotide
  Antisense strand to SEQ ID NO: 1231784
aaauguaucaggaucgucu

SEQ ID NO: 1231786 - RNA, 19 nt, Artificial Sequence
  Description of Artificial Sequence: Synthetic oligonucleotide
  Sense strand starting at position 2706 of SEQ ID NO: 917415
gggagaauuugugagguua

SEQ ID NO: 1231787 - RNA, 19 nt, Artificial Sequence
  Description of Artificial Sequence: Synthetic oligonucleotide
  Antisense strand to SEQ ID NO: 1231786
uaaccucacaaauucuccc

SEQ ID NO: 1231788 - RNA, 19 nt, Artificial Sequence
  Description of Artificial Sequence: Synthetic oligonucleotide
  Sense strand starting at position 2845 of SEQ ID NO: 917415
gugauaaauuacgcuaaca

SEQ ID NO: 1231789 - RNA, 19 nt, Artificial Sequence
  Description of Artificial Sequence: Synthetic oligonucleotide
  Antisense strand to SEQ ID NO: 1231788
uguuagcguaauuuaucac

SEQ ID NO: 1231790 - RNA, 19 nt, Artificial Sequence
  Description of Artificial Sequence: Synthetic oligonucleotide
  Sense strand starting at position 2957 of SEQ ID NO: 917415
cagccucaugguuaagaga

SEQ ID NO: 1231791 - RNA, 19 nt, Artificial Sequence
  Description of Artificial Sequence: Synthetic oligonucleotide
  Antisense strand to SEQ ID NO: 1231790
ucucuuaaccaugaggcug

SEQ ID NO: 1231792 - RNA, 19 nt, Artificial Sequence
  Description of Artificial Sequence: Synthetic oligonucleotide
  Sense strand starting at position 3444 of SEQ ID NO: 917415
uuagauuguacaugugaga

SEQ ID NO: 1231793 - RNA, 19 nt, Artificial Sequence
  Description of Artificial Sequence: Synthetic oligonucleotide
  Antisense strand to SEQ ID NO: 1231792
ucucacauguacaaucuaa

SEQ ID NO: 1231794 - RNA, 19 nt, Artificial Sequence
  Description of Artificial Sequence: Synthetic oligonucleotide
  Sense strand starting at position 3809 of SEQ ID NO: 917415
cagccauuucugugcugau

SEQ ID NO: 1231795 - RNA, 19 nt, Artificial Sequence
  Description of Artificial Sequence: Synthetic oligonucleotide
  Antisense strand to SEQ ID NO: 1231794
aucagcacagaaauggcug

SEQ ID NO: 1231796 - RNA, 19 nt, Artificial Sequence
  Description of Artificial Sequence: Synthetic oligonucleotide
  Sense strand starting at position 3810 of SEQ ID NO: 917415
agccauuucugugcugaug

SEQ ID NO: 1231797 - RNA, 19 nt, Artificial Sequence
  Description of Artificial Sequence: Synthetic oligonucleotide
  Antisense strand to SEQ ID NO: 1231796
caucagcacagaaauggcu

SEQ ID NO: 1231798 - RNA, 19 nt, Artificial Sequence
  Description of Artificial Sequence: Synthetic oligonucleotide
  Sense strand starting at position 3906 of SEQ ID NO: 917415
aucuaaugucuguaauagg

SEQ ID NO: 1231799 - RNA, 19 nt, Artificial Sequence
  Description of Artificial Sequence: Synthetic oligonucleotide
  Antisense strand to SEQ ID NO: 1231798
ccuauuacagacauuagau

SEQ ID NO: 1231800 - RNA, 19 nt, Artificial Sequence
  Description of Artificial Sequence: Synthetic oligonucleotide
  Sense strand starting at position 3914 of SEQ ID NO: 917415
ucuguaauagguuacuguu

SEQ ID NO: 1231801 - RNA, 19 nt, Artificial Sequence
  Description of Artificial Sequence: Synthetic oligonucleotide
  Antisense strand to SEQ ID NO: 1231800
aacaguaaccuauuacaga

SEQ ID NO: 1231802 - RNA, 19 nt, Artificial Sequence
  Description of Artificial Sequence: Synthetic oligonucleotide
  Sense strand starting at position 3920 of SEQ ID NO: 917415
auagguuacuguuccacaa

SEQ ID NO: 1231803 - RNA, 19 nt, Artificial Sequence
  Description of Artificial Sequence: Synthetic oligonucleotide
  Antisense strand to SEQ ID NO: 1231802
uuguggaacaguaaccuau

SEQ ID NO: 1231804 - RNA, 19 nt, Artificial Sequence
  Description of Artificial Sequence: Synthetic oligonucleotide
  Sense strand starting at position 3924 of SEQ ID NO: 917416
guuacuguuccacaaauag

SEQ ID NO: 1231805 - RNA, 19 nt, Artificial Sequence
  Description of Artificial Sequence: Synthetic oligonucleotide
  Antisense strand to SEQ ID NO: 1231804
cuauuuguggaacaguaac

SEQ ID NO: 1231806 - RNA, 19 nt, Artificial Sequence
  Description of Artificial Sequence: Synthetic oligonucleotide
  Sense strand starting at position 9 of SEQ ID NO: 917416
ucagaaugccagugaaacu

SEQ ID NO: 1231807 - RNA, 19 nt, Artificial Sequence
  Description of Artificial Sequence: Synthetic oligonucleotide
  Antisense strand to SEQ ID NO: 1231806
aguuucacuggcauucuga

SEQ ID NO: 1231808 - RNA, 19 nt, Artificial Sequence
  Description of Artificial Sequence: Synthetic oligonucleotide
  Sense strand starting at position 28 of SEQ ID NO: 917416
uccugacuuugccuaagaa

SEQ ID NO: 1231809 - RNA, 19 nt, Artificial Sequence
  Description of Artificial Sequence: Synthetic oligonucleotide
  Antisense strand to SEQ ID NO: 1231808
uucuuaggcaaagucagga

SEQ ID NO: 1231810 - RNA, 19 nt, Artificial Sequence
  Description of Artificial Sequence: Synthetic oligonucleotide
  Sense strand starting at position 29 of SEQ ID NO: 917416
ccugacuuugccuaagaaa

SEQ ID NO: 1231811 - RNA, 19 nt, Artificial Sequence
  Description of Artificial Sequence: Synthetic oligonucleotide
  Antisense strand to SEQ ID NO: 1231810
uuucuuaggcaaagucagg

SEQ ID NO: 1231812 - RNA, 19 nt, Artificial Sequence
  Description of Artificial Sequence: Synthetic oligonucleotide
  Sense strand starting at position 247 of SEQ ID NO: 917416
cccaauccuugauuagagu

SEQ ID NO: 1231813 - RNA, 19 nt, Artificial Sequence
  Description of Artificial Sequence: Synthetic oligonucleotide
  Antisense strand to SEQ ID NO: 1231812
acucuaaucaaggauuggg

SEQ ID NO: 1231814 - RNA, 19 nt, Artificial Sequence
  Description of Artificial Sequence: Synthetic oligonucleotide
  Sense strand starting at position 248 of SEQ ID NO: 917416
ccaauccuugauuagaguu

SEQ ID NO: 1231815 - RNA, 19 nt, Artificial Sequence
  Description of Artificial Sequence: Synthetic oligonucleotide
  Antisense strand to SEQ ID NO: 1231814
aacucuaaucaaggauugg

SEQ ID NO: 1231816 - RNA, 19 nt, Artificial Sequence
  Description of Artificial Sequence: Synthetic oligonucleotide
  Sense strand starting at position 296 of SEQ ID NO: 917416
gagcuaauuuggguguucu

SEQ ID NO: 1231817 - RNA, 19 nt, Artificial Sequence
  Description of Artificial Sequence: Synthetic oligonucleotide
  Antisense strand to SEQ ID NO: 1231816
agaacacccaaauuagcuc

SEQ ID NO: 1231818 - RNA, 19 nt, Artificial Sequence
  Description of Artificial Sequence: Synthetic oligonucleotide
  Sense strand starting at position 304 of SEQ ID NO: 917416
uuggguguucugcagauga

SEQ ID NO: 1231819 - RNA, 19 nt, Artificial Sequence
  Description of Artificial Sequence: Synthetic oligonucleotide
  Antisense strand to SEQ ID NO: 1231818
ucaucugcagaacacccaa

SEQ ID NO: 1231820 - RNA, 19 nt, Artificial Sequence
  Description of Artificial Sequence: Synthetic oligonucleotide
  Sense strand starting at position 306 of SEQ ID NO: 917416
ggguguucugcagaugaaa

SEQ ID NO: 1231821 - RNA, 19 nt, Artificial Sequence
  Description of Artificial Sequence: Synthetic oligonucleotide
  Antisense strand to SEQ ID NO: 1231820
uuucaucugcagaacaccc

SEQ ID NO: 1231822 - RNA, 19 nt, Artificial Sequence
  Description of Artificial Sequence: Synthetic oligonucleotide
  Sense strand starting at position 309 of SEQ ID NO: 917416
uguucugcagaugaaauaa

SEQ ID NO: 1231823 - RNA, 19 nt, Artificial Sequence
  Description of Artificial Sequence: Synthetic oligonucleotide
  Antisense strand to SEQ ID NO: 1231822
uuauuucaucugcagaaca

SEQ ID NO: 1231824 - RNA, 19 nt, Artificial Sequence
  Description of Artificial Sequence: Synthetic oligonucleotide
  Sense strand starting at position 353 of SEQ ID NO: 917416
gucacuaaaggguaugagu

SEQ ID NO: 1231825 - RNA, 19 nt, Artificial Sequence
  Description of Artificial Sequence: Synthetic oligonucleotide
  Antisense strand to SEQ ID NO: 1231824
acucauacccuuuagugac

SEQ ID NO: 1231826 - RNA, 19 nt, Artificial Sequence
  Description of Artificial Sequence: Synthetic oligonucleotide
  Sense strand starting at position 355 of SEQ ID NO: 917416
cacuaaaggguaugaguaa

SEQ ID NO: 1231827 - RNA, 19 nt, Artificial Sequence
  Description of Artificial Sequence: Synthetic oligonucleotide
  Antisense strand to SEQ ID NO: 1231826
uuacucauacccuuuagug

SEQ ID NO: 1231828 - RNA, 19 nt, Artificial Sequence
  Description of Artificial Sequence: Synthetic oligonucleotide
  Sense strand starting at position 367 of SEQ ID NO: 917416
ugaguaauacagcaccuga

SEQ ID NO: 1231829 - RNA, 19 nt, Artificial Sequence
  Description of Artificial Sequence: Synthetic oligonucleotide
  Antisense strand to SEQ ID NO: 1231828
ucaggugcuguauuacuca

SEQ ID NO: 1231830 - RNA, 19 nt, Artificial Sequence
  Description of Artificial Sequence: Synthetic oligonucleotide
  Sense strand starting at position 449 of SEQ ID NO: 917416
cucgaaauacacuagguau

SEQ ID NO: 1231831 - RNA, 19 nt, Artificial Sequence
  Description of Artificial Sequence: Synthetic oligonucleotide
  Antisense strand to SEQ ID NO: 1231830
auaccuaguguauuucgag

SEQ ID NO: 1231832 - RNA, 19 nt, Artificial Sequence
  Description of Artificial Sequence: Synthetic oligonucleotide
  Sense strand starting at position 494 of SEQ ID NO: 917416
aggugaaauuagccuacaa

SEQ ID NO: 1231833 - RNA, 19 nt, Artificial Sequence
  Description of Artificial Sequence: Synthetic oligonucleotide
  Antisense strand to SEQ ID NO: 1231832
uuguaggcuaauuucaccu

SEQ ID NO: 1231834 - RNA, 19 nt, Artificial Sequence
  Description of Artificial Sequence: Synthetic oligonucleotide
  Sense strand starting at position 496 of SEQ ID NO: 917416
gugaaauuagccuacaagu

SEQ ID NO: 1231835 - RNA, 19 nt, Artificial Sequence
  Description of Artificial Sequence: Synthetic oligonucleotide
  Antisense strand to SEQ ID NO: 1231834
acuuguaggcuaauuucac

SEQ ID NO: 1231836 - RNA, 19 nt, Artificial Sequence
  Description of Artificial Sequence: Synthetic oligonucleotide
  Sense strand starting at position 711 of SEQ ID NO: 917416
agagcauauuucguaggua

SEQ ID NO: 1231837 - RNA, 19 nt, Artificial Sequence
  Description of Artificial Sequence: Synthetic oligonucleotide
  Antisense strand to SEQ ID NO: 1231836
uaccuacgaaauaugcucu

SEQ ID NO: 1231838 - RNA, 19 nt, Artificial Sequence
  Description of Artificial Sequence: Synthetic oligonucleotide
  Sense strand starting at position 714 of SEQ ID NO: 917416
gcauauuucguagguacag

SEQ ID NO: 1231839 - RNA, 19 nt, Artificial Sequence
  Description of Artificial Sequence: Synthetic oligonucleotide
  Antisense strand to SEQ ID NO: 1231838
cuguaccuacgaaauaugc

SEQ ID NO: 1231840 - RNA, 19 nt, Artificial Sequence
  Description of Artificial Sequence: Synthetic oligonucleotide
  Sense strand starting at position 815 of SEQ ID NO: 917416
ugagcuucuccuuaaaggu

SEQ ID NO: 1231841 - RNA, 19 nt, Artificial Sequence
  Description of Artificial Sequence: Synthetic oligonucleotide
  Antisense strand to SEQ ID NO: 1231840
accuuuaaggagaagcuca

SEQ ID NO: 1231842 - RNA, 19 nt, Artificial Sequence
  Description of Artificial Sequence: Synthetic oligonucleotide
  Sense strand starting at position 1052 of SEQ ID NO: 917416
aagcaaauucuccagugga

SEQ ID NO: 1231843 - RNA, 19 nt, Artificial Sequence
  Description of Artificial Sequence: Synthetic oligonucleotide
  Antisense strand to SEQ ID NO: 1231842
uccacuggagaauuugcuu

SEQ ID NO: 1231844 - RNA, 19 nt, Artificial Sequence
  Description of Artificial Sequence: Synthetic oligonucleotide
  Sense strand starting at position 1753 of SEQ ID NO: 917416
cccgcugugcccucgaauu

SEQ ID NO: 1231845 - RNA, 19 nt, Artificial Sequence
  Description of Artificial Sequence: Synthetic oligonucleotide
  Antisense strand to SEQ ID NO: 1231844
aauucgagggcacagcggg

SEQ ID NO: 1231846 - RNA, 19 nt, Artificial Sequence
  Description of Artificial Sequence: Synthetic oligonucleotide
  Sense strand starting at position 2171 of SEQ ID NO: 917416
cgguguaugcgucucuuua

SEQ ID NO: 1231847 - RNA, 19 nt, Artificial Sequence
  Description of Artificial Sequence: Synthetic oligonucleotide
  Antisense strand to SEQ ID NO: 1231846
uaaagagacgcauacaccg

SEQ ID NO: 1231848 - RNA, 19 nt, Artificial Sequence
  Description of Artificial Sequence: Synthetic oligonucleotide
  Sense strand starting at position 2172 of SEQ ID NO: 917416
gguguaugcgucucuuuac

SEQ ID NO: 1231849 - RNA, 19 nt, Artificial Sequence
  Description of Artificial Sequence: Synthetic oligonucleotide
  Antisense strand to SEQ ID NO: 1231848
guaaagagacgcauacacc

SEQ ID NO: 1231850 - RNA, 19 nt, Artificial Sequence
  Description of Artificial Sequence: Synthetic oligonucleotide
  Sense strand starting at position 2557 of SEQ ID NO: 917416
ucaccuucccgcuaggaaa

SEQ ID NO: 1231851 - RNA, 19 nt, Artificial Sequence
  Description of Artificial Sequence: Synthetic oligonucleotide
  Antisense strand to SEQ ID NO: 1231850
uuuccuagcgggaagguga

SEQ ID NO: 1231852 - RNA, 19 nt, Artificial Sequence
  Description of Artificial Sequence: Synthetic oligonucleotide
  Sense strand starting at position 2570 of SEQ ID NO: 917416
aggaaagcaguuugaaacu

SEQ ID NO: 1231853 - RNA, 19 nt, Artificial Sequence
  Description of Artificial Sequence: Synthetic oligonucleotide
  Antisense strand to SEQ ID NO: 1231852
aguuucaaacugcuuuccu

SEQ ID NO: 1231854 - RNA, 19 nt, Artificial Sequence
  Description of Artificial Sequence: Synthetic oligonucleotide
  Sense strand starting at position 2622 of SEQ ID NO: 917416
augugaggcuuacuaaacu

SEQ ID NO: 1231855 - RNA, 19 nt, Artificial Sequence
  Description of Artificial Sequence: Synthetic oligonucleotide
  Antisense strand to SEQ ID NO: 1231854
aguuuaguaagccucacau

SEQ ID NO: 1231856 - RNA, 19 nt, Artificial Sequence
  Description of Artificial Sequence: Synthetic oligonucleotide
  Sense strand starting at position 2640 of SEQ ID NO: 917416
uuaccucaccguuaguuaa

SEQ ID NO: 1231857 - RNA, 19 nt, Artificial Sequence
  Description of Artificial Sequence: Synthetic oligonucleotide
  Antisense strand to SEQ ID NO: 1231856
uuaacuaacggugagguaa

SEQ ID NO: 1231858 - RNA, 19 nt, Artificial Sequence
  Description of Artificial Sequence: Synthetic oligonucleotide
  Sense strand starting at position 2732 of SEQ ID NO: 917416
acuggagagugcucacaau

SEQ ID NO: 1231859 - RNA, 19 nt, Artificial Sequence
  Description of Artificial Sequence: Synthetic oligonucleotide
  Antisense strand to SEQ ID NO: 1231858
auugugagcacucuccagu

SEQ ID NO: 1231860 - RNA, 19 nt, Artificial Sequence
  Description of Artificial Sequence: Synthetic oligonucleotide
  Sense strand starting at position 2761 of SEQ ID NO: 917416
guuauucuuccguuuguuc

SEQ ID NO: 1231861 - RNA, 19 nt, Artificial Sequence
  Description of Artificial Sequence: Synthetic oligonucleotide
  Antisense strand to SEQ ID NO: 1231860
gaacaaacggaagaauaac

SEQ ID NO: 1231862 - RNA, 19 nt, Artificial Sequence
  Description of Artificial Sequence: Synthetic oligonucleotide
  Sense strand starting at position 3032 of SEQ ID NO: 917416
gaaguuccgccacaagaua

SEQ ID NO: 1231863 - RNA, 19 nt, Artificial Sequence
  Description of Artificial Sequence: Synthetic oligonucleotide
  Antisense strand to SEQ ID NO: 1231862
uaucuuguggcggaacuuc

SEQ ID NO: 1231864 - RNA, 19 nt, Artificial Sequence
  Description of Artificial Sequence: Synthetic oligonucleotide
  Sense strand starting at position 3281 of SEQ ID NO: 917416
acaaauagugagugugacu

SEQ ID NO: 1231865 - RNA, 19 nt, Artificial Sequence
  Description of Artificial Sequence: Synthetic oligonucleotide
  Antisense strand to SEQ ID NO: 1231864
agucacacucacuauuugu

SEQ ID NO: 1231866 - RNA, 19 nt, Artificial Sequence
  Description of Artificial Sequence: Synthetic oligonucleotide
  Sense strand starting at position 3290 of SEQ ID NO: 917416
gagugugacuauguauuag

SEQ ID NO: 1231867 - RNA, 19 nt, Artificial Sequence
  Description of Artificial Sequence: Synthetic oligonucleotide
  Antisense strand to SEQ ID NO: 1231866
cuaauacauagucacacuc

SEQ ID NO: 1231868 - RNA, 19 nt, Artificial Sequence
  Description of Artificial Sequence: Synthetic oligonucleotide
  Sense strand starting at position 3325 of SEQ ID NO: 917416
ccgugaaucagacagucau

SEQ ID NO: 1231869 - RNA, 19 nt, Artificial Sequence
  Description of Artificial Sequence: Synthetic oligonucleotide
  Antisense strand to SEQ ID NO: 1231868
augacugucugauucacgg

SEQ ID NO: 1231870 - RNA, 19 nt, Artificial Sequence
  Description of Artificial Sequence: Synthetic oligonucleotide
  Sense strand starting at position 3336 of SEQ ID NO: 917416
acagucauguccucauaga

SEQ ID NO: 1231871 - RNA, 19 nt, Artificial Sequence
  Description of Artificial Sequence: Synthetic oligonucleotide
  Antisense strand to SEQ ID NO: 1231870
ucuaugaggacaugacugu

SEQ ID NO: 1231872 - RNA, 19 nt, Artificial Sequence
  Description of Artificial Sequence: Synthetic oligonucleotide
  Sense strand starting at position 3394 of SEQ ID NO: 917416
uugagcaaauacuuaagau

SEQ ID NO: 1231873 - RNA, 19 nt, Artificial Sequence
  Description of Artificial Sequence: Synthetic oligonucleotide
  Antisense strand to SEQ ID NO: 1231872
aucuuaaguauuugcucaa

SEQ ID NO: 1231874 - RNA, 19 nt, Artificial Sequence
  Description of Artificial Sequence: Synthetic oligonucleotide
  Sense strand starting at position 3460 of SEQ ID NO: 917416
gugugaucaaauggucuaa

SEQ ID NO: 1231875 - RNA, 19 nt, Artificial Sequence
  Description of Artificial Sequence: Synthetic oligonucleotide
  Antisense strand to SEQ ID NO: 1231874
uuagaccauuugaucacac

SEQ ID NO: 1231876 - RNA, 19 nt, Artificial Sequence
  Description of Artificial Sequence: Synthetic oligonucleotide
  Sense strand starting at position 3462 of SEQ ID NO: 917416
gugaucaaauggucuaauu

SEQ ID NO: 1231877 - RNA, 19 nt, Artificial Sequence
  Description of Artificial Sequence: Synthetic oligonucleotide
  Antisense strand to SEQ ID NO: 1231876
aauuagaccauuugaucac

SEQ ID NO: 1231878 - RNA, 19 nt, Artificial Sequence
  Description of Artificial Sequence: Synthetic oligonucleotide
  Sense strand starting at position 3531 of SEQ ID NO: 917416
cagccuacugcauagauga

SEQ ID NO: 1231879 - RNA, 19 nt, Artificial Sequence
  Description of Artificial Sequence: Synthetic oligonucleotide
  Antisense strand to SEQ ID NO: 1231878
ucaucuaugcaguaggcug

SEQ ID NO: 1231880 - RNA, 19 nt, Artificial Sequence
  Description of Artificial Sequence: Synthetic oligonucleotide
  Sense strand starting at position 3569 of SEQ ID NO: 917416
uuuggcaaacgggauuaau

SEQ ID NO: 1231881 - RNA, 19 nt, Artificial Sequence
  Description of Artificial Sequence: Synthetic oligonucleotide
  Antisense strand to SEQ ID NO: 1231880
auuaaucccguuugccaaa

SEQ ID NO: 1231882 - RNA, 19 nt, Artificial Sequence
  Description of Artificial Sequence: Synthetic oligonucleotide
  Sense strand starting at position 3714 of SEQ ID NO: 917416
uuuacauguugaguggaaa

SEQ ID NO: 1231883 - RNA, 19 nt, Artificial Sequence
  Description of Artificial Sequence: Synthetic oligonucleotide
  Antisense strand to SEQ ID NO: 1231882
uuuccacucaacauguaaa

SEQ ID NO: 1231884 - RNA, 19 nt, Artificial Sequence
  Description of Artificial Sequence: Synthetic oligonucleotide
  Sense strand starting at position 3877 of SEQ ID NO: 917417
cagguaauguauguaacuu

SEQ ID NO: 1231885 - RNA, 19 nt, Artificial Sequence
  Description of Artificial Sequence: Synthetic oligonucleotide
  Antisense strand to SEQ ID NO: 1231884
aaguuacauacauuaccug

SEQ ID NO: 1231886 - RNA, 19 nt, Artificial Sequence
  Description of Artificial Sequence: Synthetic oligonucleotide
  Sense strand starting at position 31 of SEQ ID NO: 917417
gccugaauaccauagugau

SEQ ID NO: 1231887 - RNA, 19 nt, Artificial Sequence
  Description of Artificial Sequence: Synthetic oligonucleotide
  Antisense strand to SEQ ID NO: 1231886
aucacuaugguauucaggc

SEQ ID NO: 1231888 - RNA, 19 nt, Artificial Sequence
  Description of Artificial Sequence: Synthetic oligonucleotide
  Sense strand starting at position 325 of SEQ ID NO: 917417
acuggaagguggucucuua

SEQ ID NO: 1231889 - RNA, 19 nt, Artificial Sequence
  Description of Artificial Sequence: Synthetic oligonucleotide
  Antisense strand to SEQ ID NO: 1231888
uaagagaccaccuuccagu

SEQ ID NO: 1231890 - RNA, 19 nt, Artificial Sequence
  Description of Artificial Sequence: Synthetic oligonucleotide
  Sense strand starting at position 390 of SEQ ID NO: 917417
ucauguauggcucaaggau

SEQ ID NO: 1231891 - RNA, 19 nt, Artificial Sequence
  Description of Artificial Sequence: Synthetic oligonucleotide
  Antisense strand to SEQ ID NO: 1231890
auccuugagccauacauga

SEQ ID NO: 1231892 - RNA, 19 nt, Artificial Sequence
  Description of Artificial Sequence: Synthetic oligonucleotide
  Sense strand starting at position 397 of SEQ ID NO: 917417
uggcucaaggauugugaaa

SEQ ID NO: 1231893 - RNA, 19 nt, Artificial Sequence
  Description of Artificial Sequence: Synthetic oligonucleotide
  Antisense strand to SEQ ID NO: 1231892
uuucacaauccuugagcca

SEQ ID NO: 1231894 - RNA, 19 nt, Artificial Sequence
  Description of Artificial Sequence: Synthetic oligonucleotide
  Sense strand starting at position 420 of SEQ ID NO: 917417
aucagagcacuuuguauca

SEQ ID NO: 1231895 - RNA, 19 nt, Artificial Sequence
  Description of Artificial Sequence: Synthetic oligonucleotide
  Antisense strand to SEQ ID NO: 1231894
ugauacaaagugcucugau

SEQ ID NO: 1231896 - RNA, 19 nt, Artificial Sequence
  Description of Artificial Sequence: Synthetic oligonucleotide
  Sense strand starting at position 489 of SEQ ID NO: 917417
ucagaaugccagugaaacu

SEQ ID NO: 1231897 - RNA, 19 nt, Artificial Sequence
  Description of Artificial Sequence: Synthetic oligonucleotide
  Antisense strand to SEQ ID NO: 1231896
aguuucacuggcauucuga

SEQ ID NO: 1231898 - RNA, 19 nt, Artificial Sequence
  Description of Artificial Sequence: Synthetic oligonucleotide
  Sense strand starting at position 508 of SEQ ID NO: 917417
uccugacuuugccuaagaa

SEQ ID NO: 1231899 - RNA, 19 nt, Artificial Sequence
  Description of Artificial Sequence: Synthetic oligonucleotide
  Antisense strand to SEQ ID NO: 1231898
uucuuaggcaaagucagga

SEQ ID NO: 1231900 - RNA, 19 nt, Artificial Sequence
  Description of Artificial Sequence: Synthetic oligonucleotide
  Sense strand starting at position 509 of SEQ ID NO: 917417
ccugacuuugccuaagaaa

SEQ ID NO: 1231901 - RNA, 19 nt, Artificial Sequence
  Description of Artificial Sequence: Synthetic oligonucleotide
  Antisense strand to SEQ ID NO: 1231900
uuucuuaggcaaagucagg

SEQ ID NO: 1231902 - RNA, 19 nt, Artificial Sequence
  Description of Artificial Sequence: Synthetic oligonucleotide
  Sense strand starting at position 727 of SEQ ID NO: 917417
cccaauccuugauuagagu

SEQ ID NO: 1231903 - RNA, 19 nt, Artificial Sequence
  Description of Artificial Sequence: Synthetic oligonucleotide
  Antisense strand to SEQ ID NO: 1231902
acucuaaucaaggauuggg

SEQ ID NO: 1231904 - RNA, 19 nt, Artificial Sequence
  Description of Artificial Sequence: Synthetic oligonucleotide
  Sense strand starting at position 728 of SEQ ID NO: 917417
ccaauccuugauuagaguu

SEQ ID NO: 1231905 - RNA, 19 nt, Artificial Sequence
  Description of Artificial Sequence: Synthetic oligonucleotide
  Antisense strand to SEQ ID NO: 1231904
aacucuaaucaaggauugg

SEQ ID NO: 1231906 - RNA, 19 nt, Artificial Sequence
  Description of Artificial Sequence: Synthetic oligonucleotide
  Sense strand starting at position 776 of SEQ ID NO: 917417
gagcuaauuuggguguucu

SEQ ID NO: 1231907 - RNA, 19 nt, Artificial Sequence
  Description of Artificial Sequence: Synthetic oligonucleotide
  Antisense strand to SEQ ID NO: 1231906
agaacacccaaauuagcuc

SEQ ID NO: 1231908 - RNA, 19 nt, Artificial Sequence
  Description of Artificial Sequence: Synthetic oligonucleotide
  Sense strand starting at position 784 of SEQ ID NO: 917417
uuggguguucugcagauga

SEQ ID NO: 1231909 - RNA, 19 nt, Artificial Sequence
  Description of Artificial Sequence: Synthetic oligonucleotide
  Antisense strand to SEQ ID NO: 1231908
ucaucugcagaacacccaa

SEQ ID NO: 1231910 - RNA, 19 nt, Artificial Sequence
  Description of Artificial Sequence: Synthetic oligonucleotide
  Sense strand starting at position 786 of SEQ ID NO: 917417
ggguguucugcagaugaaa

SEQ ID NO: 1231911 - RNA, 19 nt, Artificial Sequence
  Description of Artificial Sequence: Synthetic oligonucleotide
  Antisense strand to SEQ ID NO: 1231910
uuucaucugcagaacaccc

SEQ ID NO: 1231912 - RNA, 19 nt, Artificial Sequence
  Description of Artificial Sequence: Synthetic oligonucleotide
  Sense strand starting at position 789 of SEQ ID NO: 917417
uguucugcagaugaaauaa

SEQ ID NO: 1231913 - RNA, 19 nt, Artificial Sequence
  Description of Artificial Sequence: Synthetic oligonucleotide
  Antisense strand to SEQ ID NO: 1231912
uuauuucaucugcagaaca

SEQ ID NO: 1231914 - RNA, 19 nt, Artificial Sequence
  Description of Artificial Sequence: Synthetic oligonucleotide
  Sense strand starting at position 833 of SEQ ID NO: 917417
gucacuaaaggguaugagu

SEQ ID NO: 1231915 - RNA, 19 nt, Artificial Sequence
  Description of Artificial Sequence: Synthetic oligonucleotide
  Antisense strand to SEQ ID NO: 1231914
acucauacccuuuagugac

SEQ ID NO: 1231916 - RNA, 19 nt, Artificial Sequence
  Description of Artificial Sequence: Synthetic oligonucleotide
  Sense strand starting at position 835 of SEQ ID NO: 917417
cacuaaaggguaugaguaa

SEQ ID NO: 1231917 - RNA, 19 nt, Artificial Sequence
  Description of Artificial Sequence: Synthetic oligonucleotide
  Antisense strand to SEQ ID NO: 1231916
uuacucauacccuuuagug

SEQ ID NO: 1231918 - RNA, 19 nt, Artificial Sequence
  Description of Artificial Sequence: Synthetic oligonucleotide
  Sense strand starting at position 847 of SEQ ID NO: 917417
ugaguaauacagcaccuga

SEQ ID NO: 1231919 - RNA, 19 nt, Artificial Sequence
  Description of Artificial Sequence: Synthetic oligonucleotide
  Antisense strand to SEQ ID NO: 1231918
ucaggugcuguauuacuca

SEQ ID NO: 1231920 - RNA, 19 nt, Artificial Sequence
  Description of Artificial Sequence: Synthetic oligonucleotide
  Sense strand starting at position 929 of SEQ ID NO: 917417
cucgaaauacacuagguau

SEQ ID NO: 1231921 - RNA, 19 nt, Artificial Sequence
  Description of Artificial Sequence: Synthetic oligonucleotide
  Antisense strand to SEQ ID NO: 1231920
auaccuaguguauuucgag

SEQ ID NO: 1231922 - RNA, 19 nt, Artificial Sequence
  Description of Artificial Sequence: Synthetic oligonucleotide
  Sense strand starting at position 974 of SEQ ID NO: 917417
aggugaaauuagccuacaa

SEQ ID NO: 1231923 - RNA, 19 nt, Artificial Sequence
  Description of Artificial Sequence: Synthetic oligonucleotide
  Antisense strand to SEQ ID NO: 1231922
uuguaggcuaauuucaccu

SEQ ID NO: 1231924 - RNA, 19 nt, Artificial Sequence
  Description of Artificial Sequence: Synthetic oligonucleotide
  Sense strand starting at position 976 of SEQ ID NO: 917417
gugaaauuagccuacaagu

SEQ ID NO: 1231925 - RNA, 19 nt, Artificial Sequence
  Description of Artificial Sequence: Synthetic oligonucleotide
  Antisense strand to SEQ ID NO: 1231924
acuuguaggcuaauuucac

SEQ ID NO: 1231926 - RNA, 19 nt, Artificial Sequence
  Description of Artificial Sequence: Synthetic oligonucleotide
  Sense strand starting at position 1191 of SEQ ID NO: 917417
agagcauauuucguaggua

SEQ ID NO: 1231927 - RNA, 19 nt, Artificial Sequence
  Description of Artificial Sequence: Synthetic oligonucleotide
  Antisense strand to SEQ ID NO: 1231926
uaccuacgaaauaugcucu

SEQ ID NO: 1231928 - RNA, 19 nt, Artificial Sequence
  Description of Artificial Sequence: Synthetic oligonucleotide
  Sense strand starting at position 1194 of SEQ ID NO: 917417
gcauauuucguagguacag

SEQ ID NO: 1231929 - RNA, 19 nt, Artificial Sequence
  Description of Artificial Sequence: Synthetic oligonucleotide
  Antisense strand to SEQ ID NO: 1231928
cuguaccuacgaaauaugc

SEQ ID NO: 1231930 - RNA, 19 nt, Artificial Sequence
  Description of Artificial Sequence: Synthetic oligonucleotide
  Sense strand starting at position 1295 of SEQ ID NO: 917417
ugagcuucuccuuaaaggu

SEQ ID NO: 1231931 - RNA, 19 nt, Artificial Sequence
  Description of Artificial Sequence: Synthetic oligonucleotide
  Antisense strand to SEQ ID NO: 1231930
accuuuaaggagaagcuca

SEQ ID NO: 1231932 - RNA, 19 nt, Artificial Sequence
  Description of Artificial Sequence: Synthetic oligonucleotide
  Sense strand starting at position 1532 of SEQ ID NO: 917417
aagcaaauucuccagugga

SEQ ID NO: 1231933 - RNA, 19 nt, Artificial Sequence
  Description of Artificial Sequence: Synthetic oligonucleotide
  Antisense strand to SEQ ID NO: 1231932
uccacuggagaauuugcuu

SEQ ID NO: 1231934 - RNA, 19 nt, Artificial Sequence
  Description of Artificial Sequence: Synthetic oligonucleotide
  Sense strand starting at position 2233 of SEQ ID NO: 917417
cccgcugugcccucgaauu

SEQ ID NO: 1231935 - RNA, 19 nt, Artificial Sequence
  Description of Artificial Sequence: Synthetic oligonucleotide
  Antisense strand to SEQ ID NO: 1231934
aauucgagggcacagcggg

SEQ ID NO: 1231936 - RNA, 19 nt, Artificial Sequence
  Description of Artificial Sequence: Synthetic oligonucleotide
  Sense strand starting at position 2651 of SEQ ID NO: 917417
cgguguaugcgucucuuua

SEQ ID NO: 1231937 - RNA, 19 nt, Artificial Sequence
  Description of Artificial Sequence: Synthetic oligonucleotide
  Antisense strand to SEQ ID NO: 1231936
uaaagagacgcauacaccg

SEQ ID NO: 1231938 - RNA, 19 nt, Artificial Sequence
  Description of Artificial Sequence: Synthetic oligonucleotide
  Sense strand starting at position 2652 of SEQ ID NO: 917417
gguguaugcgucucuuuac

SEQ ID NO: 1231939 - RNA, 19 nt, Artificial Sequence
  Description of Artificial Sequence: Synthetic oligonucleotide
  Antisense strand to SEQ ID NO: 1231938
guaaagagacgcauacacc

SEQ ID NO: 1231940 - RNA, 19 nt, Artificial Sequence
  Description of Artificial Sequence: Synthetic oligonucleotide
  Sense strand starting at position 3037 of SEQ ID NO: 917417
ucaccuucccgcuaggaaa

SEQ ID NO: 1231941 - RNA, 19 nt, Artificial Sequence
  Description of Artificial Sequence: Synthetic oligonucleotide
  Antisense strand to SEQ ID NO: 1231940
uuuccuagcgggaagguga

SEQ ID NO: 1231942 - RNA, 19 nt, Artificial Sequence
  Description of Artificial Sequence: Synthetic oligonucleotide
  Sense strand starting at position 3050 of SEQ ID NO: 917417
aggaaagcaguuugaaacu

SEQ ID NO: 1231943 - RNA, 19 nt, Artificial Sequence
  Description of Artificial Sequence: Synthetic oligonucleotide
  Antisense strand to SEQ ID NO: 1231942
aguuucaaacugcuuuccu

SEQ ID NO: 1231944 - RNA, 19 nt, Artificial Sequence
  Description of Artificial Sequence: Synthetic oligonucleotide
  Sense strand starting at position 3102 of SEQ ID NO: 917417
augugaggcuuacuaaacu

SEQ ID NO: 1231945 - RNA, 19 nt, Artificial Sequence
  Description of Artificial Sequence: Synthetic oligonucleotide
  Antisense strand to SEQ ID NO: 1231944
aguuuaguaagccucacau

SEQ ID NO: 1231946 - RNA, 19 nt, Artificial Sequence
  Description of Artificial Sequence: Synthetic oligonucleotide
  Sense strand starting at position 3212 of SEQ ID NO: 917417
acuggagagugcucacaau

SEQ ID NO: 1231947 - RNA, 19 nt, Artificial Sequence
  Description of Artificial Sequence: Synthetic oligonucleotide
  Antisense strand to SEQ ID NO: 1231946
auugugagcacucuccagu

SEQ ID NO: 1231948 - RNA, 19 nt, Artificial Sequence
  Description of Artificial Sequence: Synthetic oligonucleotide
  Sense strand starting at position 3241 of SEQ ID NO: 917417
guuauucuuccguuuguuc

SEQ ID NO: 1231949 - RNA, 19 nt, Artificial Sequence
  Description of Artificial Sequence: Synthetic oligonucleotide
  Antisense strand to SEQ ID NO: 1231948
gaacaaacggaagaauaac

SEQ ID NO: 1231950 - RNA, 19 nt, Artificial Sequence
  Description of Artificial Sequence: Synthetic oligonucleotide
  Sense strand starting at position 3512 of SEQ ID NO: 917417
gaaguuccgccacaagaua

SEQ ID NO: 1231951 - RNA, 19 nt, Artificial Sequence
  Description of Artificial Sequence: Synthetic oligonucleotide
  Antisense strand to SEQ ID NO: 1231950
uaucuuguggcggaacuuc

SEQ ID NO: 1231952 - RNA, 19 nt, Artificial Sequence
  Description of Artificial Sequence: Synthetic oligonucleotide
  Sense strand starting at position 3761 of SEQ ID NO: 917417
acaaauagugagugugacu

SEQ ID NO: 1231953 - RNA, 19 nt, Artificial Sequence
  Description of Artificial Sequence: Synthetic oligonucleotide
  Antisense strand to SEQ ID NO: 1231952
agucacacucacuauuugu

SEQ ID NO: 1231954 - RNA, 19 nt, Artificial Sequence
  Description of Artificial Sequence: Synthetic oligonucleotide
  Sense strand starting at position 3770 of SEQ ID NO: 917417
gagugugacuauguauuag

SEQ ID NO: 1231955 - RNA, 19 nt, Artificial Sequence
  Description of Artificial Sequence: Synthetic oligonucleotide
  Antisense strand to SEQ ID NO: 1231954
cuaauacauagucacacuc

SEQ ID NO: 1231956 - RNA, 19 nt, Artificial Sequence
  Description of Artificial Sequence: Synthetic oligonucleotide
  Sense strand starting at position 3805 of SEQ ID NO: 917417
ccgugaaucagacagucau

SEQ ID NO: 1231957 - RNA, 19 nt, Artificial Sequence
  Description of Artificial Sequence: Synthetic oligonucleotide
  Antisense strand to SEQ ID NO: 1231956
augacugucugauucacgg

SEQ ID NO: 1231958 - RNA, 19 nt, Artificial Sequence
  Description of Artificial Sequence: Synthetic oligonucleotide
  Sense strand starting at position 3816 of SEQ ID NO: 917417
acagucauguccucauaga

SEQ ID NO: 1231959 - RNA, 19 nt, Artificial Sequence
  Description of Artificial Sequence: Synthetic oligonucleotide
  Antisense strand to SEQ ID NO: 1231958
ucuaugaggacaugacugu

SEQ ID NO: 1231960 - RNA, 19 nt, Artificial Sequence
  Description of Artificial Sequence: Synthetic oligonucleotide
  Sense strand starting at position 3874 of SEQ ID NO: 917417
uugagcaaauacuuaagau

SEQ ID NO: 1231961 - RNA, 19 nt, Artificial Sequence
  Description of Artificial Sequence: Synthetic oligonucleotide
  Antisense strand to SEQ ID NO: 1231960
aucuuaaguauuugcucaa

SEQ ID NO: 1231962 - RNA, 19 nt, Artificial Sequence
  Description of Artificial Sequence: Synthetic oligonucleotide
  Sense strand starting at position 3940 of SEQ ID NO: 917417
gugugaucaaauggucuaa

SEQ ID NO: 1231963 - RNA, 19 nt, Artificial Sequence
  Description of Artificial Sequence: Synthetic oligonucleotide
  Antisense strand to SEQ ID NO: 1231962
uuagaccauuugaucacac

SEQ ID NO: 1231964 - RNA, 19 nt, Artificial Sequence
  Description of Artificial Sequence: Synthetic oligonucleotide
  Sense strand starting at position 3942 of SEQ ID NO: 917418
gugaucaaauggucuaauu

SEQ ID NO: 1231965 - RNA, 19 nt, Artificial Sequence
  Description of Artificial Sequence: Synthetic oligonucleotide
  Antisense strand to SEQ ID NO: 1231964
aauuagaccauuugaucac

SEQ ID NO: 1231966 - RNA, 19 nt, Artificial Sequence
  Description of Artificial Sequence: Synthetic oligonucleotide
  Sense strand starting at position 34 of SEQ ID NO: 917418
caaaucuugcagugagaag

SEQ ID NO: 1231967 - RNA, 19 nt, Artificial Sequence
  Description of Artificial Sequence: Synthetic oligonucleotide
  Antisense strand to SEQ ID NO: 1231966
cuucucacugcaagauuug

SEQ ID NO: 1231968 - RNA, 19 nt, Artificial Sequence
  Description of Artificial Sequence: Synthetic oligonucleotide
  Sense strand starting at position 43 of SEQ ID NO: 917418
cagugagaagcuuacauau

SEQ ID NO: 1231969 - RNA, 19 nt, Artificial Sequence
  Description of Artificial Sequence: Synthetic oligonucleotide
  Antisense strand to SEQ ID NO: 1231968
auauguaagcuucucacug

SEQ ID NO: 1231970 - RNA, 19 nt, Artificial Sequence
  Description of Artificial Sequence: Synthetic oligonucleotide
  Sense strand starting at position 114 of SEQ ID NO: 917418
gccuaaagccauuaaguca

SEQ ID NO: 1231971 - RNA, 19 nt, Artificial Sequence
  Description of Artificial Sequence: Synthetic oligonucleotide
  Antisense strand to SEQ ID NO: 1231970
ugacuuaauggcuuuaggc

SEQ ID NO: 1231972 - RNA, 19 nt, Artificial Sequence
  Description of Artificial Sequence: Synthetic oligonucleotide
  Sense strand starting at position 165 of SEQ ID NO: 917418
gccugaauaccauagugau

SEQ ID NO: 1231973 - RNA, 19 nt, Artificial Sequence
  Description of Artificial Sequence: Synthetic oligonucleotide
  Antisense strand to SEQ ID NO: 1231972
aucacuaugguauucaggc

SEQ ID NO: 1231974 - RNA, 19 nt, Artificial Sequence
  Description of Artificial Sequence: Synthetic oligonucleotide
  Sense strand starting at position 459 of SEQ ID NO: 917418
acuggaagguggucucuua

SEQ ID NO: 1231975 - RNA, 19 nt, Artificial Sequence
  Description of Artificial Sequence: Synthetic oligonucleotide
  Antisense strand to SEQ ID NO: 1231974
uaagagaccaccuuccagu

SEQ ID NO: 1231976 - RNA, 19 nt, Artificial Sequence
  Description of Artificial Sequence: Synthetic oligonucleotide
  Sense strand starting at position 524 of SEQ ID NO: 917418
ucauguauggcucaaggau

SEQ ID NO: 1231977 - RNA, 19 nt, Artificial Sequence
  Description of Artificial Sequence: Synthetic oligonucleotide
  Antisense strand to SEQ ID NO: 1231976
auccuugagccauacauga

SEQ ID NO: 1231978 - RNA, 19 nt, Artificial Sequence
  Description of Artificial Sequence: Synthetic oligonucleotide
  Sense strand starting at position 531 of SEQ ID NO: 917418
uggcucaaggauugugaaa

SEQ ID NO: 1231979 - RNA, 19 nt, Artificial Sequence
  Description of Artificial Sequence: Synthetic oligonucleotide
  Antisense strand to SEQ ID NO: 1231978
uuucacaauccuugagcca

SEQ ID NO: 1231980 - RNA, 19 nt, Artificial Sequence
  Description of Artificial Sequence: Synthetic oligonucleotide
  Sense strand starting at position 554 of SEQ ID NO: 917418
aucagagcacuuuguauca

SEQ ID NO: 1231981 - RNA, 19 nt, Artificial Sequence
  Description of Artificial Sequence: Synthetic oligonucleotide
  Antisense strand to SEQ ID NO: 1231980
ugauacaaagugcucugau

SEQ ID NO: 1231982 - RNA, 19 nt, Artificial Sequence
  Description of Artificial Sequence: Synthetic oligonucleotide
  Sense strand starting at position 623 of SEQ ID NO: 917418
ucagaaugccagugaaacu

SEQ ID NO: 1231983 - RNA, 19 nt, Artificial Sequence
  Description of Artificial Sequence: Synthetic oligonucleotide
  Antisense strand to SEQ ID NO: 1231982
aguuucacuggcauucuga

SEQ ID NO: 1231984 - RNA, 19 nt, Artificial Sequence
  Description of Artificial Sequence: Synthetic oligonucleotide
  Sense strand starting at position 642 of SEQ ID NO: 917418
uccugacuuugccuaagaa

SEQ ID NO: 1231985 - RNA, 19 nt, Artificial Sequence
  Description of Artificial Sequence: Synthetic oligonucleotide
  Antisense strand to SEQ ID NO: 1231984
uucuuaggcaaagucagga

SEQ ID NO: 1231986 - RNA, 19 nt, Artificial Sequence
  Description of Artificial Sequence: Synthetic oligonucleotide
  Sense strand starting at position 643 of SEQ ID NO: 917418
ccugacuuugccuaagaaa

SEQ ID NO: 1231987 - RNA, 19 nt, Artificial Sequence
  Description of Artificial Sequence: Synthetic oligonucleotide
  Antisense strand to SEQ ID NO: 1231986
uuucuuaggcaaagucagg

SEQ ID NO: 1231988 - RNA, 19 nt, Artificial Sequence
  Description of Artificial Sequence: Synthetic oligonucleotide
  Sense strand starting at position 861 of SEQ ID NO: 917418
cccaauccuugauuagagu

SEQ ID NO: 1231989 - RNA, 19 nt, Artificial Sequence
  Description of Artificial Sequence: Synthetic oligonucleotide
  Antisense strand to SEQ ID NO: 1231988
acucuaaucaaggauuggg

SEQ ID NO: 1231990 - RNA, 19 nt, Artificial Sequence
  Description of Artificial Sequence: Synthetic oligonucleotide
  Sense strand starting at position 862 of SEQ ID NO: 917418
ccaauccuugauuagaguu

SEQ ID NO: 1231991 - RNA, 19 nt, Artificial Sequence
  Description of Artificial Sequence: Synthetic oligonucleotide
  Antisense strand to SEQ ID NO: 1231990
aacucuaaucaaggauugg

SEQ ID NO: 1231992 - RNA, 19 nt, Artificial Sequence
  Description of Artificial Sequence: Synthetic oligonucleotide
  Sense strand starting at position 910 of SEQ ID NO: 917418
gagcuaauuuggguguucu

SEQ ID NO: 1231993 - RNA, 19 nt, Artificial Sequence
  Description of Artificial Sequence: Synthetic oligonucleotide
  Antisense strand to SEQ ID NO: 1231992
agaacacccaaauuagcuc

SEQ ID NO: 1231994 - RNA, 19 nt, Artificial Sequence
  Description of Artificial Sequence: Synthetic oligonucleotide
  Sense strand starting at position 918 of SEQ ID NO: 917418
uuggguguucugcagauga

SEQ ID NO: 1231995 - RNA, 19 nt, Artificial Sequence
  Description of Artificial Sequence: Synthetic oligonucleotide
  Antisense strand to SEQ ID NO: 1231994
ucaucugcagaacacccaa

SEQ ID NO: 1231996 - RNA, 19 nt, Artificial Sequence
  Description of Artificial Sequence: Synthetic oligonucleotide
  Sense strand starting at position 920 of SEQ ID NO: 917418
ggguguucugcagaugaaa

SEQ ID NO: 1231997 - RNA, 19 nt, Artificial Sequence
  Description of Artificial Sequence: Synthetic oligonucleotide
  Antisense strand to SEQ ID NO: 1231996
uuucaucugcagaacaccc

SEQ ID NO: 1231998 - RNA, 19 nt, Artificial Sequence
  Description of Artificial Sequence: Synthetic oligonucleotide
  Sense strand starting at position 923 of SEQ ID NO: 917418
uguucugcagaugaaauaa

SEQ ID NO: 1231999 - RNA, 19 nt, Artificial Sequence
  Description of Artificial Sequence: Synthetic oligonucleotide
  Antisense strand to SEQ ID NO: 1231998
uuauuucaucugcagaaca

SEQ ID NO: 1232000 - RNA, 19 nt, Artificial Sequence
  Description of Artificial Sequence: Synthetic oligonucleotide
  Sense strand starting at position 967 of SEQ ID NO: 917418
gucacuaaaggguaugagu

SEQ ID NO: 1232001 - RNA, 19 nt, Artificial Sequence
  Description of Artificial Sequence: Synthetic oligonucleotide
  Antisense strand to SEQ ID NO: 1232000
acucauacccuuuagugac

SEQ ID NO: 1232002 - RNA, 19 nt, Artificial Sequence
  Description of Artificial Sequence: Synthetic oligonucleotide
  Sense strand starting at position 969 of SEQ ID NO: 917418
cacuaaaggguaugaguaa

SEQ ID NO: 1232003 - RNA, 19 nt, Artificial Sequence
  Description of Artificial Sequence: Synthetic oligonucleotide
  Antisense strand to SEQ ID NO: 1232002
uuacucauacccuuuagug

SEQ ID NO: 1232004 - RNA, 19 nt, Artificial Sequence
  Description of Artificial Sequence: Synthetic oligonucleotide
  Sense strand starting at position 981 of SEQ ID NO: 917418
ugaguaauacagcaccuga

SEQ ID NO: 1232005 - RNA, 19 nt, Artificial Sequence
  Description of Artificial Sequence: Synthetic oligonucleotide
  Antisense strand to SEQ ID NO: 1232004
ucaggugcuguauuacuca

SEQ ID NO: 1232006 - RNA, 19 nt, Artificial Sequence
  Description of Artificial Sequence: Synthetic oligonucleotide
  Sense strand starting at position 1063 of SEQ ID NO: 917418
cucgaaauacacuagguau

SEQ ID NO: 1232007 - RNA, 19 nt, Artificial Sequence
  Description of Artificial Sequence: Synthetic oligonucleotide
  Antisense strand to SEQ ID NO: 1232006
auaccuaguguauuucgag

SEQ ID NO: 1232008 - RNA, 19 nt, Artificial Sequence
  Description of Artificial Sequence: Synthetic oligonucleotide
  Sense strand starting at position 1108 of SEQ ID NO: 917418
aggugaaauuagccuacaa

SEQ ID NO: 1232009 - RNA, 19 nt, Artificial Sequence
  Description of Artificial Sequence: Synthetic oligonucleotide
  Antisense strand to SEQ ID NO: 1232008
uuguaggcuaauuucaccu

SEQ ID NO: 1232010 - RNA, 19 nt, Artificial Sequence
  Description of Artificial Sequence: Synthetic oligonucleotide
  Sense strand starting at position 1110 of SEQ ID NO: 917418
gugaaauuagccuacaagu

SEQ ID NO: 1232011 - RNA, 19 nt, Artificial Sequence
  Description of Artificial Sequence: Synthetic oligonucleotide
  Antisense strand to SEQ ID NO: 1232010
acuuguaggcuaauuucac

SEQ ID NO: 1232012 - RNA, 19 nt, Artificial Sequence
  Description of Artificial Sequence: Synthetic oligonucleotide
  Sense strand starting at position 1325 of SEQ ID NO: 917418
agagcauauuucguaggua

SEQ ID NO: 1232013 - RNA, 19 nt, Artificial Sequence
  Description of Artificial Sequence: Synthetic oligonucleotide
  Antisense strand to SEQ ID NO: 1232012
uaccuacgaaauaugcucu

SEQ ID NO: 1232014 - RNA, 19 nt, Artificial Sequence
  Description of Artificial Sequence: Synthetic oligonucleotide
  Sense strand starting at position 1328 of SEQ ID NO: 917418
gcauauuucguagguacag

SEQ ID NO: 1232015 - RNA, 19 nt, Artificial Sequence
  Description of Artificial Sequence: Synthetic oligonucleotide
  Antisense strand to SEQ ID NO: 1232014
cuguaccuacgaaauaugc

SEQ ID NO: 1232016 - RNA, 19 nt, Artificial Sequence
  Description of Artificial Sequence: Synthetic oligonucleotide
  Sense strand starting at position 1429 of SEQ ID NO: 917418
ugagcuucuccuuaaaggu

SEQ ID NO: 1232017 - RNA, 19 nt, Artificial Sequence
  Description of Artificial Sequence: Synthetic oligonucleotide
  Antisense strand to SEQ ID NO: 1232016
accuuuaaggagaagcuca

SEQ ID NO: 1232018 - RNA, 19 nt, Artificial Sequence
  Description of Artificial Sequence: Synthetic oligonucleotide
  Sense strand starting at position 1666 of SEQ ID NO: 917418
aagcaaauucuccagugga

SEQ ID NO: 1232019 - RNA, 19 nt, Artificial Sequence
  Description of Artificial Sequence: Synthetic oligonucleotide
  Antisense strand to SEQ ID NO: 1232018
uccacuggagaauuugcuu

SEQ ID NO: 1232020 - RNA, 19 nt, Artificial Sequence
  Description of Artificial Sequence: Synthetic oligonucleotide
  Sense strand starting at position 2367 of SEQ ID NO: 917418
cccgcugugcccucgaauu

SEQ ID NO: 1232021 - RNA, 19 nt, Artificial Sequence
  Description of Artificial Sequence: Synthetic oligonucleotide
  Antisense strand to SEQ ID NO: 1232020
aauucgagggcacagcggg

SEQ ID NO: 1232022 - RNA, 19 nt, Artificial Sequence
  Description of Artificial Sequence: Synthetic oligonucleotide
  Sense strand starting at position 2785 of SEQ ID NO: 917418
cgguguaugcgucucuuua

SEQ ID NO: 1232023 - RNA, 19 nt, Artificial Sequence
  Description of Artificial Sequence: Synthetic oligonucleotide
  Antisense strand to SEQ ID NO: 1232022
uaaagagacgcauacaccg

SEQ ID NO: 1232024 - RNA, 19 nt, Artificial Sequence
  Description of Artificial Sequence: Synthetic oligonucleotide
  Sense strand starting at position 2786 of SEQ ID NO: 917418
gguguaugcgucucuuuac

SEQ ID NO: 1232025 - RNA, 19 nt, Artificial Sequence
  Description of Artificial Sequence: Synthetic oligonucleotide
  Antisense strand to SEQ ID NO: 1232024
guaaagagacgcauacacc

SEQ ID NO: 1232026 - RNA, 19 nt, Artificial Sequence
  Description of Artificial Sequence: Synthetic oligonucleotide
  Sense strand starting at position 3171 of SEQ ID NO: 917418
ucaccuucccgcuaggaaa

SEQ ID NO: 1232027 - RNA, 19 nt, Artificial Sequence
  Description of Artificial Sequence: Synthetic oligonucleotide
  Antisense strand to SEQ ID NO: 1232026
uuuccuagcgggaagguga

SEQ ID NO: 1232028 - RNA, 19 nt, Artificial Sequence
  Description of Artificial Sequence: Synthetic oligonucleotide
  Sense strand starting at position 3184 of SEQ ID NO: 917418
aggaaagcaguuugaaacu

SEQ ID NO: 1232029 - RNA, 19 nt, Artificial Sequence
  Description of Artificial Sequence: Synthetic oligonucleotide
  Antisense strand to SEQ ID NO: 1232028
aguuucaaacugcuuuccu

SEQ ID NO: 1232030 - RNA, 19 nt, Artificial Sequence
  Description of Artificial Sequence: Synthetic oligonucleotide
  Sense strand starting at position 3236 of SEQ ID NO: 917418
augugaggcuuacuaaacu

SEQ ID NO: 1232031 - RNA, 19 nt, Artificial Sequence
  Description of Artificial Sequence: Synthetic oligonucleotide
  Antisense strand to SEQ ID NO: 1232030
aguuuaguaagccucacau

SEQ ID NO: 1232032 - RNA, 19 nt, Artificial Sequence
  Description of Artificial Sequence: Synthetic oligonucleotide
  Sense strand starting at position 3346 of SEQ ID NO: 917418
acuggagagugcucacaau

SEQ ID NO: 1232033 - RNA, 19 nt, Artificial Sequence
  Description of Artificial Sequence: Synthetic oligonucleotide
  Antisense strand to SEQ ID NO: 1232032
auugugagcacucuccagu

SEQ ID NO: 1232034 - RNA, 19 nt, Artificial Sequence
  Description of Artificial Sequence: Synthetic oligonucleotide
  Sense strand starting at position 3375 of SEQ ID NO: 917418
guuauucuuccguuuguuc

SEQ ID NO: 1232035 - RNA, 19 nt, Artificial Sequence
  Description of Artificial Sequence: Synthetic oligonucleotide
  Antisense strand to SEQ ID NO: 1232034
gaacaaacggaagaauaac

SEQ ID NO: 1232036 - RNA, 19 nt, Artificial Sequence
  Description of Artificial Sequence: Synthetic oligonucleotide
  Sense strand starting at position 3646 of SEQ ID NO: 917418
gaaguuccgccacaagaua

SEQ ID NO: 1232037 - RNA, 19 nt, Artificial Sequence
  Description of Artificial Sequence: Synthetic oligonucleotide
  Antisense strand to SEQ ID NO: 1232036
uaucuuguggcggaacuuc

SEQ ID NO: 1232038 - RNA, 19 nt, Artificial Sequence
  Description of Artificial Sequence: Synthetic oligonucleotide
  Sense strand starting at position 3895 of SEQ ID NO: 917418
acaaauagugagugugacu

SEQ ID NO: 1232039 - RNA, 19 nt, Artificial Sequence
  Description of Artificial Sequence: Synthetic oligonucleotide
  Antisense strand to SEQ ID NO: 1232038
agucacacucacuauuugu

SEQ ID NO: 1232040 - RNA, 19 nt, Artificial Sequence
  Description of Artificial Sequence: Synthetic oligonucleotide
  Sense strand starting at position 3904 of SEQ ID NO: 917418
gagugugacuauguauuag

SEQ ID NO: 1232041 - RNA, 19 nt, Artificial Sequence
  Description of Artificial Sequence: Synthetic oligonucleotide
  Antisense strand to SEQ ID NO: 1232040
cuaauacauagucacacuc

SEQ ID NO: 1232042 - RNA, 19 nt, Artificial Sequence
  Description of Artificial Sequence: Synthetic oligonucleotide
  Sense strand starting at position 3939 of SEQ ID NO: 917418
ccgugaaucagacagucau

SEQ ID NO: 1232043 - RNA, 19 nt, Artificial Sequence
  Description of Artificial Sequence: Synthetic oligonucleotide
  Antisense strand to SEQ ID NO: 1232042
augacugucugauucacgg

SEQ ID NO: 1232044 - RNA, 19 nt, Artificial Sequence
  Description of Artificial Sequence: Synthetic oligonucleotide
  Sense strand starting at position 3950 of SEQ ID NO: 917419
acagucauguccucauaga

SEQ ID NO: 1232045 - RNA, 19 nt, Artificial Sequence
  Description of Artificial Sequence: Synthetic oligonucleotide
  Antisense strand to SEQ ID NO: 1232044
ucuaugaggacaugacugu

SEQ ID NO: 1232046 - RNA, 19 nt, Artificial Sequence
  Description of Artificial Sequence: Synthetic oligonucleotide
  Sense strand starting at position 44 of SEQ ID NO: 917419
guacccuuucucuaugaga

SEQ ID NO: 1232047 - RNA, 19 nt, Artificial Sequence
  Description of Artificial Sequence: Synthetic oligonucleotide
  Antisense strand to SEQ ID NO: 1232046
ucucauagagaaaggguac

SEQ ID NO: 1232048 - RNA, 19 nt, Artificial Sequence
  Description of Artificial Sequence: Synthetic oligonucleotide
  Sense strand starting at position 146 of SEQ ID NO: 917419
aagauaauuuaguggagaa

SEQ ID NO: 1232049 - RNA, 19 nt, Artificial Sequence
  Description of Artificial Sequence: Synthetic oligonucleotide
  Antisense strand to SEQ ID NO: 1232048
uucuccacuaaauuaucuu

SEQ ID NO: 1232050 - RNA, 19 nt, Artificial Sequence
  Description of Artificial Sequence: Synthetic oligonucleotide
  Sense strand starting at position 486 of SEQ ID NO: 917419
ccguguaaagugcucagua

SEQ ID NO: 1232051 - RNA, 19 nt, Artificial Sequence
  Description of Artificial Sequence: Synthetic oligonucleotide
  Antisense strand to SEQ ID NO: 1232050
uacugagcacuuuacacgg

SEQ ID NO: 1232052 - RNA, 19 nt, Artificial Sequence
  Description of Artificial Sequence: Synthetic oligonucleotide
  Sense strand starting at position 602 of SEQ ID NO: 917419
uugauagcucuuuagucau

SEQ ID NO: 1232053 - RNA, 19 nt, Artificial Sequence
  Description of Artificial Sequence: Synthetic oligonucleotide
  Antisense strand to SEQ ID NO: 1232052
augacuaaagagcuaucaa

SEQ ID NO: 1232054 - RNA, 19 nt, Artificial Sequence
  Description of Artificial Sequence: Synthetic oligonucleotide
  Sense strand starting at position 688 of SEQ ID NO: 917419
acguguugacaauauucua

SEQ ID NO: 1232055 - RNA, 19 nt, Artificial Sequence
  Description of Artificial Sequence: Synthetic oligonucleotide
  Antisense strand to SEQ ID NO: 1232054
uagaauauugucaacacgu

SEQ ID NO: 1232056 - RNA, 19 nt, Artificial Sequence
  Description of Artificial Sequence: Synthetic oligonucleotide
  Sense strand starting at position 816 of SEQ ID NO: 917419
gucaaaccauuguuacaau

SEQ ID NO: 1232057 - RNA, 19 nt, Artificial Sequence
  Description of Artificial Sequence: Synthetic oligonucleotide
  Antisense strand to SEQ ID NO: 1232056
auuguaacaaugguuugac

SEQ ID NO: 1232058 - RNA, 19 nt, Artificial Sequence
  Description of Artificial Sequence: Synthetic oligonucleotide
  Sense strand starting at position 880 of SEQ ID NO: 917419
ccuuuagauguguauaaag

SEQ ID NO: 1232059 - RNA, 19 nt, Artificial Sequence
  Description of Artificial Sequence: Synthetic oligonucleotide
  Antisense strand to SEQ ID NO: 1232058
cuuuauacacaucuaaagg

SEQ ID NO: 1232060 - RNA, 19 nt, Artificial Sequence
  Description of Artificial Sequence: Synthetic oligonucleotide
  Sense strand starting at position 932 of SEQ ID NO: 917419
ggugauacuguguagauuc

SEQ ID NO: 1232061 - RNA, 19 nt, Artificial Sequence
  Description of Artificial Sequence: Synthetic oligonucleotide
  Antisense strand to SEQ ID NO: 1232060
gaaucuacacaguaucacc

SEQ ID NO: 1232062 - RNA, 19 nt, Artificial Sequence
  Description of Artificial Sequence: Synthetic oligonucleotide
  Sense strand starting at position 949 of SEQ ID NO: 917419
ucaagucacuuuguggaau

SEQ ID NO: 1232063 - RNA, 19 nt, Artificial Sequence
  Description of Artificial Sequence: Synthetic oligonucleotide
  Antisense strand to SEQ ID NO: 1232062
auuccacaaagugacuuga

SEQ ID NO: 1232064 - RNA, 19 nt, Artificial Sequence
  Description of Artificial Sequence: Synthetic oligonucleotide
  Sense strand starting at position 963 of SEQ ID NO: 917419
ggaaucaccaaguggcaua

SEQ ID NO: 1232065 - RNA, 19 nt, Artificial Sequence
  Description of Artificial Sequence: Synthetic oligonucleotide
  Antisense strand to SEQ ID NO: 1232064
uaugccacuuggugauucc

SEQ ID NO: 1232066 - RNA, 19 nt, Artificial Sequence
  Description of Artificial Sequence: Synthetic oligonucleotide
  Sense strand starting at position 1026 of SEQ ID NO: 917419
agauccaucuuucugaguu

SEQ ID NO: 1232067 - RNA, 19 nt, Artificial Sequence
  Description of Artificial Sequence: Synthetic oligonucleotide
  Antisense strand to SEQ ID NO: 1232066
aacucagaaagauggaucu

SEQ ID NO: 1232068 - RNA, 19 nt, Artificial Sequence
  Description of Artificial Sequence: Synthetic oligonucleotide
  Sense strand starting at position 1030 of SEQ ID NO: 917419
ccaucuuucugaguuugga

SEQ ID NO: 1232069 - RNA, 19 nt, Artificial Sequence
  Description of Artificial Sequence: Synthetic oligonucleotide
  Antisense strand to SEQ ID NO: 1232068
uccaaacucagaaagaugg

SEQ ID NO: 1232070 - RNA, 19 nt, Artificial Sequence
  Description of Artificial Sequence: Synthetic oligonucleotide
  Sense strand starting at position 1184 of SEQ ID NO: 917419
uguugacguccacaaacua

SEQ ID NO: 1232071 - RNA, 19 nt, Artificial Sequence
  Description of Artificial Sequence: Synthetic oligonucleotide
  Antisense strand to SEQ ID NO: 1232070
uaguuuguggacgucaaca

SEQ ID NO: 1232072 - RNA, 19 nt, Artificial Sequence
  Description of Artificial Sequence: Synthetic oligonucleotide
  Sense strand starting at position 1211 of SEQ ID NO: 917419
gaugaacuauggcuaaaug

SEQ ID NO: 1232073 - RNA, 19 nt, Artificial Sequence
  Description of Artificial Sequence: Synthetic oligonucleotide
  Antisense strand to SEQ ID NO: 1232072
cauuuagccauaguucauc

SEQ ID NO: 1232074 - RNA, 19 nt, Artificial Sequence
  Description of Artificial Sequence: Synthetic oligonucleotide
  Sense strand starting at position 1212 of SEQ ID NO: 917419
augaacuauggcuaaaugu

SEQ ID NO: 1232075 - RNA, 19 nt, Artificial Sequence
  Description of Artificial Sequence: Synthetic oligonucleotide
  Antisense strand to SEQ ID NO: 1232074
acauuuagccauaguucau

SEQ ID NO: 1232076 - RNA, 19 nt, Artificial Sequence
  Description of Artificial Sequence: Synthetic oligonucleotide
  Sense strand starting at position 1277 of SEQ ID NO: 917419
cuccucuuggugcaaauau

SEQ ID NO: 1232077 - RNA, 19 nt, Artificial Sequence
  Description of Artificial Sequence: Synthetic oligonucleotide
  Antisense strand to SEQ ID NO: 1232076
auauuugcaccaagaggag

SEQ ID NO: 1232078 - RNA, 19 nt, Artificial Sequence
  Description of Artificial Sequence: Synthetic oligonucleotide
  Sense strand starting at position 1679 of SEQ ID NO: 917419
uuuaaagauuaacucgagu

SEQ ID NO: 1232079 - RNA, 19 nt, Artificial Sequence
  Description of Artificial Sequence: Synthetic oligonucleotide
  Antisense strand to SEQ ID NO: 1232078
acucgaguuaaucuuuaaa

SEQ ID NO: 1232080 - RNA, 19 nt, Artificial Sequence
  Description of Artificial Sequence: Synthetic oligonucleotide
  Sense strand starting at position 1819 of SEQ ID NO: 917419
cuggcagaacaugguuuaa

SEQ ID NO: 1232081 - RNA, 19 nt, Artificial Sequence
  Description of Artificial Sequence: Synthetic oligonucleotide
  Antisense strand to SEQ ID NO: 1232080
uuaaaccauguucugccag

SEQ ID NO: 1232082 - RNA, 19 nt, Artificial Sequence
  Description of Artificial Sequence: Synthetic oligonucleotide
  Sense strand starting at position 2095 of SEQ ID NO: 917419
ggaagaagaucgucucuga

SEQ ID NO: 1232083 - RNA, 19 nt, Artificial Sequence
  Description of Artificial Sequence: Synthetic oligonucleotide
  Antisense strand to SEQ ID NO: 1232082
ucagagacgaucuucuucc

SEQ ID NO: 1232084 - RNA, 19 nt, Artificial Sequence
  Description of Artificial Sequence: Synthetic oligonucleotide
  Sense strand starting at position 2098 of SEQ ID NO: 917419
agaagaucgucucugagaa

SEQ ID NO: 1232085 - RNA, 19 nt, Artificial Sequence
  Description of Artificial Sequence: Synthetic oligonucleotide
  Antisense strand to SEQ ID NO: 1232084
uucucagagacgaucuucu

SEQ ID NO: 1232086 - RNA, 19 nt, Artificial Sequence
  Description of Artificial Sequence: Synthetic oligonucleotide
  Sense strand starting at position 2099 of SEQ ID NO: 917419
gaagaucgucucugagaac

SEQ ID NO: 1232087 - RNA, 19 nt, Artificial Sequence
  Description of Artificial Sequence: Synthetic oligonucleotide
  Antisense strand to SEQ ID NO: 1232086
guucucagagacgaucuuc

SEQ ID NO: 1232088 - RNA, 19 nt, Artificial Sequence
  Description of Artificial Sequence: Synthetic oligonucleotide
  Sense strand starting at position 2117 of SEQ ID NO: 917419
cacagaaagucugugagga

SEQ ID NO: 1232089 - RNA, 19 nt, Artificial Sequence
  Description of Artificial Sequence: Synthetic oligonucleotide
  Antisense strand to SEQ ID NO: 1232088
uccucacagacuuucugug

SEQ ID NO: 1232090 - RNA, 19 nt, Artificial Sequence
  Description of Artificial Sequence: Synthetic oligonucleotide
  Sense strand starting at position 2118 of SEQ ID NO: 917419
acagaaagucugugaggau

SEQ ID NO: 1232091 - RNA, 19 nt, Artificial Sequence
  Description of Artificial Sequence: Synthetic oligonucleotide
  Antisense strand to SEQ ID NO: 1232090
auccucacagacuuucugu

SEQ ID NO: 1232092 - RNA, 19 nt, Artificial Sequence
  Description of Artificial Sequence: Synthetic oligonucleotide
  Sense strand starting at position 2346 of SEQ ID NO: 917419
gugcuauuaguaguuguuu

SEQ ID NO: 1232093 - RNA, 19 nt, Artificial Sequence
  Description of Artificial Sequence: Synthetic oligonucleotide
  Antisense strand to SEQ ID NO: 1232092
aaacaacuacuaauagcac

SEQ ID NO: 1232094 - RNA, 19 nt, Artificial Sequence
  Description of Artificial Sequence: Synthetic oligonucleotide
  Sense strand starting at position 2365 of SEQ ID NO: 917419
auuuguuuguuugcagaaa

SEQ ID NO: 1232095 - RNA, 19 nt, Artificial Sequence
  Description of Artificial Sequence: Synthetic oligonucleotide
  Antisense strand to SEQ ID NO: 1232094
uuucugcaaacaaacaaau

SEQ ID NO: 1232096 - RNA, 19 nt, Artificial Sequence
  Description of Artificial Sequence: Synthetic oligonucleotide
  Sense strand starting at position 2379 of SEQ ID NO: 917419
agaaauaauugcuugggua

SEQ ID NO: 1232097 - RNA, 19 nt, Artificial Sequence
  Description of Artificial Sequence: Synthetic oligonucleotide
  Antisense strand to SEQ ID NO: 1232096
uacccaagcaauuauuucu

SEQ ID NO: 1232098 - RNA, 19 nt, Artificial Sequence
  Description of Artificial Sequence: Synthetic oligonucleotide
  Sense strand starting at position 2380 of SEQ ID NO: 917419
gaaauaauugcuuggguac

SEQ ID NO: 1232099 - RNA, 19 nt, Artificial Sequence
  Description of Artificial Sequence: Synthetic oligonucleotide
  Antisense strand to SEQ ID NO: 1232098
guacccaagcaauuauuuc

SEQ ID NO: 1232100 - RNA, 19 nt, Artificial Sequence
  Description of Artificial Sequence: Synthetic oligonucleotide
  Sense strand starting at position 2587 of SEQ ID NO: 917419
auaugucuuguagaaacuu

SEQ ID NO: 1232101 - RNA, 19 nt, Artificial Sequence
  Description of Artificial Sequence: Synthetic oligonucleotide
  Antisense strand to SEQ ID NO: 1232100
aaguuucuacaagacauau

SEQ ID NO: 1232102 - RNA, 19 nt, Artificial Sequence
  Description of Artificial Sequence: Synthetic oligonucleotide
  Sense strand starting at position 2596 of SEQ ID NO: 917419
guagaaacuuugguaagug

SEQ ID NO: 1232103 - RNA, 19 nt, Artificial Sequence
  Description of Artificial Sequence: Synthetic oligonucleotide
  Antisense strand to SEQ ID NO: 1232102
cacuuaccaaaguuucuac

SEQ ID NO: 1232104 - RNA, 19 nt, Artificial Sequence
  Description of Artificial Sequence: Synthetic oligonucleotide
  Sense strand starting at position 2600 of SEQ ID NO: 917419
aaacuuugguaagugaaca

SEQ ID NO: 1232105 - RNA, 19 nt, Artificial Sequence
  Description of Artificial Sequence: Synthetic oligonucleotide
  Antisense strand to SEQ ID NO: 1232104
uguucacuuaccaaaguuu

SEQ ID NO: 1232106 - RNA, 19 nt, Artificial Sequence
  Description of Artificial Sequence: Synthetic oligonucleotide
  Sense strand starting at position 2608 of SEQ ID NO: 917419
guaagugaacaaggaugua

SEQ ID NO: 1232107 - RNA, 19 nt, Artificial Sequence
  Description of Artificial Sequence: Synthetic oligonucleotide
  Antisense strand to SEQ ID NO: 1232106
uacauccuuguucacuuac

SEQ ID NO: 1232108 - RNA, 19 nt, Artificial Sequence
  Description of Artificial Sequence: Synthetic oligonucleotide
  Sense strand starting at position 2696 of SEQ ID NO: 917419
gauguuaggauguaguauu

SEQ ID NO: 1232109 - RNA, 19 nt, Artificial Sequence
  Description of Artificial Sequence: Synthetic oligonucleotide
  Antisense strand to SEQ ID NO: 1232108
aauacuacauccuaacauc

SEQ ID NO: 1232110 - RNA, 19 nt, Artificial Sequence
  Description of Artificial Sequence: Synthetic oligonucleotide
  Sense strand starting at position 2709 of SEQ ID NO: 917419
aguauuauacgccaauaaa

SEQ ID NO: 1232111 - RNA, 19 nt, Artificial Sequence
  Description of Artificial Sequence: Synthetic oligonucleotide
  Antisense strand to SEQ ID NO: 1232110
uuuauuggcguauaauacu

SEQ ID NO: 1232112 - RNA, 19 nt, Artificial Sequence
  Description of Artificial Sequence: Synthetic oligonucleotide
  Sense strand starting at position 2843 of SEQ ID NO: 917419
cuuaguuaugcauacauau

SEQ ID NO: 1232113 - RNA, 19 nt, Artificial Sequence
  Description of Artificial Sequence: Synthetic oligonucleotide
  Antisense strand to SEQ ID NO: 1232112
auauguaugcauaacuaag

SEQ ID NO: 1232114 - RNA, 19 nt, Artificial Sequence
  Description of Artificial Sequence: Synthetic oligonucleotide
  Sense strand starting at position 2970 of SEQ ID NO: 917419
uauuaaaccggguguuaaa

SEQ ID NO: 1232115 - RNA, 19 nt, Artificial Sequence
  Description of Artificial Sequence: Synthetic oligonucleotide
  Antisense strand to SEQ ID NO: 1232114
uuuaacacccgguuuaaua

SEQ ID NO: 1232116 - RNA, 19 nt, Artificial Sequence
  Description of Artificial Sequence: Synthetic oligonucleotide
  Sense strand starting at position 2979 of SEQ ID NO: 917419
ggguguuaaauauaugggu

SEQ ID NO: 1232117 - RNA, 19 nt, Artificial Sequence
  Description of Artificial Sequence: Synthetic oligonucleotide
  Antisense strand to SEQ ID NO: 1232116
acccauauauuuaacaccc

SEQ ID NO: 1232118 - RNA, 19 nt, Artificial Sequence
  Description of Artificial Sequence: Synthetic oligonucleotide
  Sense strand starting at position 2985 of SEQ ID NO: 917419
uaaauauauggguggccau

SEQ ID NO: 1232119 - RNA, 19 nt, Artificial Sequence
  Description of Artificial Sequence: Synthetic oligonucleotide
  Antisense strand to SEQ ID NO: 1232118
auggccacccauauauuua

SEQ ID NO: 1232120 - RNA, 19 nt, Artificial Sequence
  Description of Artificial Sequence: Synthetic oligonucleotide
  Sense strand starting at position 3535 of SEQ ID NO: 917419
ccugaugcaccugaaaguu

SEQ ID NO: 1232121 - RNA, 19 nt, Artificial Sequence
  Description of Artificial Sequence: Synthetic oligonucleotide
  Antisense strand to SEQ ID NO: 1232120
aacuuucaggugcaucagg

SEQ ID NO: 1232122 - RNA, 19 nt, Artificial Sequence
  Description of Artificial Sequence: Synthetic oligonucleotide
  Sense strand starting at position 3827 of SEQ ID NO: 917419
cuuucuuugagagggaauu

SEQ ID NO: 1232123 - RNA, 19 nt, Artificial Sequence
  Description of Artificial Sequence: Synthetic oligonucleotide
  Antisense strand to SEQ ID NO: 1232122
aauucccucucaaagaaag

SEQ ID NO: 1232124 - RNA, 19 nt, Artificial Sequence
  Description of Artificial Sequence: Synthetic oligonucleotide
  Sense strand starting at position 3879 of SEQ ID NO: 917420
gcgacaucgacucaccaca

SEQ ID NO: 1232125 - RNA, 19 nt, Artificial Sequence
  Description of Artificial Sequence: Synthetic oligonucleotide
  Antisense strand to SEQ ID NO: 1232124
uguggugagucgaugucgc

SEQ ID NO: 1232126 - RNA, 19 nt, Artificial Sequence
  Description of Artificial Sequence: Synthetic oligonucleotide
  Sense strand starting at position 31 of SEQ ID NO: 917420
uuucuuugguuacuaugaa

SEQ ID NO: 1232127 - RNA, 19 nt, Artificial Sequence
  Description of Artificial Sequence: Synthetic oligonucleotide
  Antisense strand to SEQ ID NO: 1232126
uucauaguaaccaaagaaa

SEQ ID NO: 1232128 - RNA, 19 nt, Artificial Sequence
  Description of Artificial Sequence: Synthetic oligonucleotide
  Sense strand starting at position 149 of SEQ ID NO: 917420
augucaaagcauugauuaa

SEQ ID NO: 1232129 - RNA, 19 nt, Artificial Sequence
  Description of Artificial Sequence: Synthetic oligonucleotide
  Antisense strand to SEQ ID NO: 1232128
uuaaucaaugcuuugacau

SEQ ID NO: 1232130 - RNA, 19 nt, Artificial Sequence
  Description of Artificial Sequence: Synthetic oligonucleotide
  Sense strand starting at position 205 of SEQ ID NO: 917420
agguuuaaauuaguaguca

SEQ ID NO: 1232131 - RNA, 19 nt, Artificial Sequence
  Description of Artificial Sequence: Synthetic oligonucleotide
  Antisense strand to SEQ ID NO: 1232130
ugacuacuaauuuaaaccu

SEQ ID NO: 1232132 - RNA, 19 nt, Artificial Sequence
  Description of Artificial Sequence: Synthetic oligonucleotide
  Sense strand starting at position 276 of SEQ ID NO: 917420
auuuguuagguugguacua

SEQ ID NO: 1232133 - RNA, 19 nt, Artificial Sequence
  Description of Artificial Sequence: Synthetic oligonucleotide
  Antisense strand to SEQ ID NO: 1232132
uaguaccaaccuaacaaau

SEQ ID NO: 1232134 - RNA, 19 nt, Artificial Sequence
  Description of Artificial Sequence: Synthetic oligonucleotide
  Sense strand starting at position 289 of SEQ ID NO: 917420
guacuaggaguuugaaaua

SEQ ID NO: 1232135 - RNA, 19 nt, Artificial Sequence
  Description of Artificial Sequence: Synthetic oligonucleotide
  Antisense strand to SEQ ID NO: 1232134
uauuucaaacuccuaguac

SEQ ID NO: 1232136 - RNA, 19 nt, Artificial Sequence
  Description of Artificial Sequence: Synthetic oligonucleotide
  Sense strand starting at position 361 of SEQ ID NO: 917420
uaguuuaaagggugacuuu

SEQ ID NO: 1232137 - RNA, 19 nt, Artificial Sequence
  Description of Artificial Sequence: Synthetic oligonucleotide
  Antisense strand to SEQ ID NO: 1232136
aaagucacccuuuaaacua

SEQ ID NO: 1232138 - RNA, 19 nt, Artificial Sequence
  Description of Artificial Sequence: Synthetic oligonucleotide
  Sense strand starting at position 372 of SEQ ID NO: 917420
gugacuuuacauuauggua

SEQ ID NO: 1232139 - RNA, 19 nt, Artificial Sequence
  Description of Artificial Sequence: Synthetic oligonucleotide
  Antisense strand to SEQ ID NO: 1232138
uaccauaauguaaagucac

SEQ ID NO: 1232140 - RNA, 19 nt, Artificial Sequence
  Description of Artificial Sequence: Synthetic oligonucleotide
  Sense strand starting at position 430 of SEQ ID NO: 917420
ucauaaacgguuuaagcaa

SEQ ID NO: 1232141 - RNA, 19 nt, Artificial Sequence
  Description of Artificial Sequence: Synthetic oligonucleotide
  Antisense strand to SEQ ID NO: 1232140
uugcuuaaaccguuuauga

SEQ ID NO: 1232142 - RNA, 19 nt, Artificial Sequence
  Description of Artificial Sequence: Synthetic oligonucleotide
  Sense strand starting at position 545 of SEQ ID NO: 917420
agaugagcucuaugacaug

SEQ ID NO: 1232143 - RNA, 19 nt, Artificial Sequence
  Description of Artificial Sequence: Synthetic oligonucleotide
  Antisense strand to SEQ ID NO: 1232142
caugucauagagcucaucu

SEQ ID NO: 1232144 - RNA, 19 nt, Artificial Sequence
  Description of Artificial Sequence: Synthetic oligonucleotide
  Sense strand starting at position 575 of SEQ ID NO: 917420
ugcuuuguagcuguauauu

SEQ ID NO: 1232145 - RNA, 19 nt, Artificial Sequence
  Description of Artificial Sequence: Synthetic oligonucleotide
  Antisense strand to SEQ ID NO: 1232144
aauauacagcuacaaagca

SEQ ID NO: 1232146 - RNA, 19 nt, Artificial Sequence
  Description of Artificial Sequence: Synthetic oligonucleotide
  Sense strand starting at position 1153 of SEQ ID NO: 917420
gaauguauaggcugacaac

SEQ ID NO: 1232147 - RNA, 19 nt, Artificial Sequence
  Description of Artificial Sequence: Synthetic oligonucleotide
  Antisense strand to SEQ ID NO: 1232146
guugucagccuauacauuc

SEQ ID NO: 1232148 - RNA, 19 nt, Artificial Sequence
  Description of Artificial Sequence: Synthetic oligonucleotide
  Sense strand starting at position 1252 of SEQ ID NO: 917420
aacuuaagaguuugacuga

SEQ ID NO: 1232149 - RNA, 19 nt, Artificial Sequence
  Description of Artificial Sequence: Synthetic oligonucleotide
  Antisense strand to SEQ ID NO: 1232148
ucagucaaacucuuaaguu

SEQ ID NO: 1232150 - RNA, 19 nt, Artificial Sequence
  Description of Artificial Sequence: Synthetic oligonucleotide
  Sense strand starting at position 1255 of SEQ ID NO: 917420
uuaagaguuugacugaaau

SEQ ID NO: 1232151 - RNA, 19 nt, Artificial Sequence
  Description of Artificial Sequence: Synthetic oligonucleotide
  Antisense strand to SEQ ID NO: 1232150
auuucagucaaacucuuaa

SEQ ID NO: 1232152 - RNA, 19 nt, Artificial Sequence
  Description of Artificial Sequence: Synthetic oligonucleotide
  Sense strand starting at position 1349 of SEQ ID NO: 917420
uuuagagagguuuacucuu

SEQ ID NO: 1232153 - RNA, 19 nt, Artificial Sequence
  Description of Artificial Sequence: Synthetic oligonucleotide
  Antisense strand to SEQ ID NO: 1232152
aagaguaaaccucucuaaa

SEQ ID NO: 1232154 - RNA, 19 nt, Artificial Sequence
  Description of Artificial Sequence: Synthetic oligonucleotide
  Sense strand starting at position 1432 of SEQ ID NO: 917420
gcaagauaguuacuaauaa

SEQ ID NO: 1232155 - RNA, 19 nt, Artificial Sequence
  Description of Artificial Sequence: Synthetic oligonucleotide
  Antisense strand to SEQ ID NO: 1232154
uuauuaguaacuaucuugc

SEQ ID NO: 1232156 - RNA, 19 nt, Artificial Sequence
  Description of Artificial Sequence: Synthetic oligonucleotide
  Sense strand starting at position 1568 of SEQ ID NO: 917420
ugauauagucaacauuguu

SEQ ID NO: 1232157 - RNA, 19 nt, Artificial Sequence
  Description of Artificial Sequence: Synthetic oligonucleotide
  Antisense strand to SEQ ID NO: 1232156
aacaauguugacuauauca

SEQ ID NO: 1232158 - RNA, 19 nt, Artificial Sequence
  Description of Artificial Sequence: Synthetic oligonucleotide
  Sense strand starting at position 1623 of SEQ ID NO: 917420
aaaggcuuguuuccaugaa

SEQ ID NO: 1232159 - RNA, 19 nt, Artificial Sequence
  Description of Artificial Sequence: Synthetic oligonucleotide
  Antisense strand to SEQ ID NO: 1232158
uucauggaaacaagccuuu

SEQ ID NO: 1232160 - RNA, 19 nt, Artificial Sequence
  Description of Artificial Sequence: Synthetic oligonucleotide
  Sense strand starting at position 2054 of SEQ ID NO: 917420
ggagauggauucuugucac

SEQ ID NO: 1232161 - RNA, 19 nt, Artificial Sequence
  Description of Artificial Sequence: Synthetic oligonucleotide
  Antisense strand to SEQ ID NO: 1232160
gugacaagaauccaucucc

SEQ ID NO: 1232162 - RNA, 19 nt, Artificial Sequence
  Description of Artificial Sequence: Synthetic oligonucleotide
  Sense strand starting at position 2057 of SEQ ID NO: 917420
gauggauucuugucacuau

SEQ ID NO: 1232163 - RNA, 19 nt, Artificial Sequence
  Description of Artificial Sequence: Synthetic oligonucleotide
  Antisense strand to SEQ ID NO: 1232162
auagugacaagaauccauc

SEQ ID NO: 1232164 - RNA, 19 nt, Artificial Sequence
  Description of Artificial Sequence: Synthetic oligonucleotide
  Sense strand starting at position 2115 of SEQ ID NO: 917420
aguuuaaaucuacaguugu

SEQ ID NO: 1232165 - RNA, 19 nt, Artificial Sequence
  Description of Artificial Sequence: Synthetic oligonucleotide
  Antisense strand to SEQ ID NO: 1232164
acaacuguagauuuaaacu

SEQ ID NO: 1232166 - RNA, 19 nt, Artificial Sequence
  Description of Artificial Sequence: Synthetic oligonucleotide
  Sense strand starting at position 2131 of SEQ ID NO: 917420
uguguucuugaucacuaau

SEQ ID NO: 1232167 - RNA, 19 nt, Artificial Sequence
  Description of Artificial Sequence: Synthetic oligonucleotide
  Antisense strand to SEQ ID NO: 1232166
auuagugaucaagaacaca

SEQ ID NO: 1232168 - RNA, 19 nt, Artificial Sequence
  Description of Artificial Sequence: Synthetic oligonucleotide
  Sense strand starting at position 2174 of SEQ ID NO: 917420
auaauaggacuuugguauu

SEQ ID NO: 1232169 - RNA, 19 nt, Artificial Sequence
  Description of Artificial Sequence: Synthetic oligonucleotide
  Antisense strand to SEQ ID NO: 1232168
aauaccaaaguccuauuau

SEQ ID NO: 1232170 - RNA, 19 nt, Artificial Sequence
  Description of Artificial Sequence: Synthetic oligonucleotide
  Sense strand starting at position 2245 of SEQ ID NO: 917420
uguacaauuugcucuguuu

SEQ ID NO: 1232171 - RNA, 19 nt, Artificial Sequence
  Description of Artificial Sequence: Synthetic oligonucleotide
  Antisense strand to SEQ ID NO: 1232170
aaacagagcaaauuguaca

SEQ ID NO: 1232172 - RNA, 19 nt, Artificial Sequence
  Description of Artificial Sequence: Synthetic oligonucleotide
  Sense strand starting at position 2696 of SEQ ID NO: 917420
uaggauucuguugauccua

SEQ ID NO: 1232173 - RNA, 19 nt, Artificial Sequence
  Description of Artificial Sequence: Synthetic oligonucleotide
  Antisense strand to SEQ ID NO: 1232172
uaggaucaacagaauccua

SEQ ID NO: 1232174 - RNA, 19 nt, Artificial Sequence
  Description of Artificial Sequence: Synthetic oligonucleotide
  Sense strand starting at position 2706 of SEQ ID NO: 917420
uugauccuaguguaaucau

SEQ ID NO: 1232175 - RNA, 19 nt, Artificial Sequence
  Description of Artificial Sequence: Synthetic oligonucleotide
  Antisense strand to SEQ ID NO: 1232174
augauuacacuaggaucaa

SEQ ID NO: 1232176 - RNA, 19 nt, Artificial Sequence
  Description of Artificial Sequence: Synthetic oligonucleotide
  Sense strand starting at position 2709 of SEQ ID NO: 917420
auccuaguguaaucauuaa

SEQ ID NO: 1232177 - RNA, 19 nt, Artificial Sequence
  Description of Artificial Sequence: Synthetic oligonucleotide
  Antisense strand to SEQ ID NO: 1232176
uuaaugauuacacuaggau

SEQ ID NO: 1232178 - RNA, 19 nt, Artificial Sequence
  Description of Artificial Sequence: Synthetic oligonucleotide
  Sense strand starting at position 2810 of SEQ ID NO: 917420
uaguucugauuugaagaga

SEQ ID NO: 1232179 - RNA, 19 nt, Artificial Sequence
  Description of Artificial Sequence: Synthetic oligonucleotide
  Antisense strand to SEQ ID NO: 1232178
ucucuucaaaucagaacua

SEQ ID NO: 1232180 - RNA, 19 nt, Artificial Sequence
  Description of Artificial Sequence: Synthetic oligonucleotide
  Sense strand starting at position 2902 of SEQ ID NO: 917420
cuaccuuguggugacuauu

SEQ ID NO: 1232181 - RNA, 19 nt, Artificial Sequence
  Description of Artificial Sequence: Synthetic oligonucleotide
  Antisense strand to SEQ ID NO: 1232180
aauagucaccacaagguag

SEQ ID NO: 1232182 - RNA, 19 nt, Artificial Sequence
  Description of Artificial Sequence: Synthetic oligonucleotide
  Sense strand starting at position 2913 of SEQ ID NO: 917420
ugacuauuaucgucacaaa

SEQ ID NO: 1232183 - RNA, 19 nt, Artificial Sequence
  Description of Artificial Sequence: Synthetic oligonucleotide
  Antisense strand to SEQ ID NO: 1232182
uuugugacgauaauaguca

SEQ ID NO: 1232184 - RNA, 19 nt, Artificial Sequence
  Description of Artificial Sequence: Synthetic oligonucleotide
  Sense strand starting at position 2966 of SEQ ID NO: 917420
cauucuagccuuugagaga

SEQ ID NO: 1232185 - RNA, 19 nt, Artificial Sequence
  Description of Artificial Sequence: Synthetic oligonucleotide
  Antisense strand to SEQ ID NO: 1232184
ucucucaaaggcuagaaug

SEQ ID NO: 1232186 - RNA, 19 nt, Artificial Sequence
  Description of Artificial Sequence: Synthetic oligonucleotide
  Sense strand starting at position 3066 of SEQ ID NO: 917420
ugaguuaaguucucuaaga

SEQ ID NO: 1232187 - RNA, 19 nt, Artificial Sequence
  Description of Artificial Sequence: Synthetic oligonucleotide
  Antisense strand to SEQ ID NO: 1232186
ucuuagagaacuuaacuca

SEQ ID NO: 1232188 - RNA, 19 nt, Artificial Sequence
  Description of Artificial Sequence: Synthetic oligonucleotide
  Sense strand starting at position 3067 of SEQ ID NO: 917420
gaguuaaguucucuaagac

SEQ ID NO: 1232189 - RNA, 19 nt, Artificial Sequence
  Description of Artificial Sequence: Synthetic oligonucleotide
  Antisense strand to SEQ ID NO: 1232188
gucuuagagaacuuaacuc

SEQ ID NO: 1232190 - RNA, 19 nt, Artificial Sequence
  Description of Artificial Sequence: Synthetic oligonucleotide
  Sense strand starting at position 3068 of SEQ ID NO: 917420
aguuaaguucucuaagaca

SEQ ID NO: 1232191 - RNA, 19 nt, Artificial Sequence
  Description of Artificial Sequence: Synthetic oligonucleotide
  Antisense strand to SEQ ID NO: 1232190
ugucuuagagaacuuaacu

SEQ ID NO: 1232192 - RNA, 19 nt, Artificial Sequence
  Description of Artificial Sequence: Synthetic oligonucleotide
  Sense strand starting at position 3605 of SEQ ID NO: 917420
ggaacaucuuuggcucacu

SEQ ID NO: 1232193 - RNA, 19 nt, Artificial Sequence
  Description of Artificial Sequence: Synthetic oligonucleotide
  Antisense strand to SEQ ID NO: 1232192
agugagccaaagauguucc

SEQ ID NO: 1232194 - RNA, 19 nt, Artificial Sequence
  Description of Artificial Sequence: Synthetic oligonucleotide
  Sense strand starting at position 3747 of SEQ ID NO: 917420
agggauauaauguaugugu

SEQ ID NO: 1232195 - RNA, 19 nt, Artificial Sequence
  Description of Artificial Sequence: Synthetic oligonucleotide
  Antisense strand to SEQ ID NO: 1232194
acacauacauuauaucccu

SEQ ID NO: 1232196 - RNA, 19 nt, Artificial Sequence
  Description of Artificial Sequence: Synthetic oligonucleotide
  Sense strand starting at position 3775 of SEQ ID NO: 917420
agugaaugaauguagucua

SEQ ID NO: 1232197 - RNA, 19 nt, Artificial Sequence
  Description of Artificial Sequence: Synthetic oligonucleotide
  Antisense strand to SEQ ID NO: 1232196
uagacuacauucauucacu

SEQ ID NO: 1232198 - RNA, 19 nt, Artificial Sequence
  Description of Artificial Sequence: Synthetic oligonucleotide
  Sense strand starting at position 3778 of SEQ ID NO: 917420
gaaugaauguagucuauuc

SEQ ID NO: 1232199 - RNA, 19 nt, Artificial Sequence
  Description of Artificial Sequence: Synthetic oligonucleotide
  Antisense strand to SEQ ID NO: 1232198
gaauagacuacauucauuc

SEQ ID NO: 1232200 - RNA, 19 nt, Artificial Sequence
  Description of Artificial Sequence: Synthetic oligonucleotide
  Sense strand starting at position 3780 of SEQ ID NO: 917420
augaauguagucuauucuu

SEQ ID NO: 1232201 - RNA, 19 nt, Artificial Sequence
  Description of Artificial Sequence: Synthetic oligonucleotide
  Antisense strand to SEQ ID NO: 1232200
aagaauagacuacauucau

SEQ ID NO: 1232202 - RNA, 19 nt, Artificial Sequence
  Description of Artificial Sequence: Synthetic oligonucleotide
  Sense strand starting at position 3869 of SEQ ID NO: 917420
ugauucucacucgauagua

SEQ ID NO: 1232203 - RNA, 19 nt, Artificial Sequence
  Description of Artificial Sequence: Synthetic oligonucleotide
  Antisense strand to SEQ ID NO: 1232202
uacuaucgagugagaauca

SEQ ID NO: 1232204 - RNA, 19 nt, Artificial Sequence
  Description of Artificial Sequence: Synthetic oligonucleotide
  Sense strand starting at position 3959 of SEQ ID NO: 917420
guugguaggacccauacuu

SEQ ID NO: 1232205 - RNA, 19 nt, Artificial Sequence
  Description of Artificial Sequence: Synthetic oligonucleotide
  Antisense strand to SEQ ID NO: 1232204
aaguauggguccuaccaac

SEQ ID NO: 1232206 - RNA, 19 nt, Artificial Sequence
  Description of Artificial Sequence: Synthetic oligonucleotide
  Sense strand starting at position 3959 of SEQ ID NO: 917421
guugguaggacccauacuu

SEQ ID NO: 1232207 - RNA, 19 nt, Artificial Sequence
  Description of Artificial Sequence: Synthetic oligonucleotide
  Antisense strand to SEQ ID NO: 1232206
aaguauggguccuaccaac

SEQ ID NO: 1232208 - RNA, 19 nt, Artificial Sequence
  Description of Artificial Sequence: Synthetic oligonucleotide
  Sense strand starting at position 479 of SEQ ID NO: 917421
gacgacucuggugaugaca

SEQ ID NO: 1232209 - RNA, 19 nt, Artificial Sequence
  Description of Artificial Sequence: Synthetic oligonucleotide
  Antisense strand to SEQ ID NO: 1232208
ugucaucaccagagucguc

SEQ ID NO: 1232210 - RNA, 19 nt, Artificial Sequence
  Description of Artificial Sequence: Synthetic oligonucleotide
  Sense strand starting at position 595 of SEQ ID NO: 917421
agucaaugucugcaugcca

SEQ ID NO: 1232211 - RNA, 19 nt, Artificial Sequence
  Description of Artificial Sequence: Synthetic oligonucleotide
  Antisense strand to SEQ ID NO: 1232210
uggcaugcagacauugacu

SEQ ID NO: 1232212 - RNA, 19 nt, Artificial Sequence
  Description of Artificial Sequence: Synthetic oligonucleotide
  Sense strand starting at position 673 of SEQ ID NO: 917421
agguaauaaauguguguca

SEQ ID NO: 1232213 - RNA, 19 nt, Artificial Sequence
  Description of Artificial Sequence: Synthetic oligonucleotide
  Antisense strand to SEQ ID NO: 1232212
ugacacacauuuauuaccu

SEQ ID NO: 1232214 - RNA, 19 nt, Artificial Sequence
  Description of Artificial Sequence: Synthetic oligonucleotide
  Sense strand starting at position 674 of SEQ ID NO: 917421
gguaauaaaugugugucaa

SEQ ID NO: 1232215 - RNA, 19 nt, Artificial Sequence
  Description of Artificial Sequence: Synthetic oligonucleotide
  Antisense strand to SEQ ID NO: 1232214
uugacacacauuuauuacc

SEQ ID NO: 1232216 - RNA, 19 nt, Artificial Sequence
  Description of Artificial Sequence: Synthetic oligonucleotide
  Sense strand starting at position 675 of SEQ ID NO: 917421
guaauaaaugugugucaag

SEQ ID NO: 1232217 - RNA, 19 nt, Artificial Sequence
  Description of Artificial Sequence: Synthetic oligonucleotide
  Antisense strand to SEQ ID NO: 1232216
cuugacacacauuuauuac

SEQ ID NO: 1232218 - RNA, 19 nt, Artificial Sequence
  Description of Artificial Sequence: Synthetic oligonucleotide
  Sense strand starting at position 735 of SEQ ID NO: 917421
ucaggauuacacugaagca

SEQ ID NO: 1232219 - RNA, 19 nt, Artificial Sequence
  Description of Artificial Sequence: Synthetic oligonucleotide
  Antisense strand to SEQ ID NO: 1232218
ugcuucaguguaauccuga

SEQ ID NO: 1232220 - RNA, 19 nt, Artificial Sequence
  Description of Artificial Sequence: Synthetic oligonucleotide
  Sense strand starting at position 783 of SEQ ID NO: 917421
caauaauauuuguaucgag

SEQ ID NO: 1232221 - RNA, 19 nt, Artificial Sequence
  Description of Artificial Sequence: Synthetic oligonucleotide
  Antisense strand to SEQ ID NO: 1232220
cucgauacaaauauuauug

SEQ ID NO: 1232222 - RNA, 19 nt, Artificial Sequence
  Description of Artificial Sequence: Synthetic oligonucleotide
  Sense strand starting at position 831 of SEQ ID NO: 917421
auccuauacgcucaaguau

SEQ ID NO: 1232223 - RNA, 19 nt, Artificial Sequence
  Description of Artificial Sequence: Synthetic oligonucleotide
  Antisense strand to SEQ ID NO: 1232222
auacuugagcguauaggau

SEQ ID NO: 1232224 - RNA, 19 nt, Artificial Sequence
  Description of Artificial Sequence: Synthetic oligonucleotide
  Sense strand starting at position 840 of SEQ ID NO: 917421
gcucaaguauuccuuguau

SEQ ID NO: 1232225 - RNA, 19 nt, Artificial Sequence
  Description of Artificial Sequence: Synthetic oligonucleotide
  Antisense strand to SEQ ID NO: 1232224
auacaaggaauacuugagc

SEQ ID NO: 1232226 - RNA, 19 nt, Artificial Sequence
  Description of Artificial Sequence: Synthetic oligonucleotide
  Sense strand starting at position 842 of SEQ ID NO: 917421
ucaaguauuccuuguauua

SEQ ID NO: 1232227 - RNA, 19 nt, Artificial Sequence
  Description of Artificial Sequence: Synthetic oligonucleotide
  Antisense strand to SEQ ID NO: 1232226
uaauacaaggaauacuuga

SEQ ID NO: 1232228 - RNA, 19 nt, Artificial Sequence
  Description of Artificial Sequence: Synthetic oligonucleotide
  Sense strand starting at position 909 of SEQ ID NO: 917421
acaugaagauguuuauuag

SEQ ID NO: 1232229 - RNA, 19 nt, Artificial Sequence
  Description of Artificial Sequence: Synthetic oligonucleotide
  Antisense strand to SEQ ID NO: 1232228
cuaauaaacaucuucaugu

SEQ ID NO: 1232230 - RNA, 19 nt, Artificial Sequence
  Description of Artificial Sequence: Synthetic oligonucleotide
  Sense strand starting at position 1618 of SEQ ID NO: 917421
gccagucuccgcgaagaua

SEQ ID NO: 1232231 - RNA, 19 nt, Artificial Sequence
  Description of Artificial Sequence: Synthetic oligonucleotide
  Antisense strand to SEQ ID NO: 1232230
uaucuucgcggagacuggc

SEQ ID NO: 1232232 - RNA, 19 nt, Artificial Sequence
  Description of Artificial Sequence: Synthetic oligonucleotide
  Sense strand starting at position 1800 of SEQ ID NO: 917421
ccgcguuaccucucccaca

SEQ ID NO: 1232233 - RNA, 19 nt, Artificial Sequence
  Description of Artificial Sequence: Synthetic oligonucleotide
  Antisense strand to SEQ ID NO: 1232232
ugugggagagguaacgcgg

SEQ ID NO: 1232234 - RNA, 19 nt, Artificial Sequence
  Description of Artificial Sequence: Synthetic oligonucleotide
  Sense strand starting at position 2336 of SEQ ID NO: 917421
ucaacagugcauugaaaug

SEQ ID NO: 1232235 - RNA, 19 nt, Artificial Sequence
  Description of Artificial Sequence: Synthetic oligonucleotide
  Antisense strand to SEQ ID NO: 1232234
cauuucaaugcacuguuga

SEQ ID NO: 1232236 - RNA, 19 nt, Artificial Sequence
  Description of Artificial Sequence: Synthetic oligonucleotide
  Sense strand starting at position 2373 of SEQ ID NO: 917421
gggccugugucuccuugaa

SEQ ID NO: 1232237 - RNA, 19 nt, Artificial Sequence
  Description of Artificial Sequence: Synthetic oligonucleotide
  Antisense strand to SEQ ID NO: 1232236
uucaaggagacacaggccc

SEQ ID NO: 1232238 - RNA, 19 nt, Artificial Sequence
  Description of Artificial Sequence: Synthetic oligonucleotide
  Sense strand starting at position 2375 of SEQ ID NO: 917421
gccugugucuccuugaacu

SEQ ID NO: 1232239 - RNA, 19 nt, Artificial Sequence
  Description of Artificial Sequence: Synthetic oligonucleotide
  Antisense strand to SEQ ID NO: 1232238
aguucaaggagacacaggc

SEQ ID NO: 1232240 - RNA, 19 nt, Artificial Sequence
  Description of Artificial Sequence: Synthetic oligonucleotide
  Sense strand starting at position 2411 of SEQ ID NO: 917421
auggaagcaucuccaguaa

SEQ ID NO: 1232241 - RNA, 19 nt, Artificial Sequence
  Description of Artificial Sequence: Synthetic oligonucleotide
  Antisense strand to SEQ ID NO: 1232240
uuacuggagaugcuuccau

SEQ ID NO: 1232242 - RNA, 19 nt, Artificial Sequence
  Description of Artificial Sequence: Synthetic oligonucleotide
  Sense strand starting at position 2454 of SEQ ID NO: 917421
gaacgugcugguuacagaa

SEQ ID NO: 1232243 - RNA, 19 nt, Artificial Sequence
  Description of Artificial Sequence: Synthetic oligonucleotide
  Antisense strand to SEQ ID NO: 1232242
uucuguaaccagcacguuc

SEQ ID NO: 1232244 - RNA, 19 nt, Artificial Sequence
  Description of Artificial Sequence: Synthetic oligonucleotide
  Sense strand starting at position 2537 of SEQ ID NO: 917421
cucaguuugcuggaggaaa

SEQ ID NO: 1232245 - RNA, 19 nt, Artificial Sequence
  Description of Artificial Sequence: Synthetic oligonucleotide
  Antisense strand to SEQ ID NO: 1232244
uuuccuccagcaaacugag

SEQ ID NO: 1232246 - RNA, 19 nt, Artificial Sequence
  Description of Artificial Sequence: Synthetic oligonucleotide
  Sense strand starting at position 2539 of SEQ ID NO: 917421
caguuugcuggaggaaaga

SEQ ID NO: 1232247 - RNA, 19 nt, Artificial Sequence
  Description of Artificial Sequence: Synthetic oligonucleotide
  Antisense strand to SEQ ID NO: 1232246
ucuuuccuccagcaaacug

SEQ ID NO: 1232248 - RNA, 19 nt, Artificial Sequence
  Description of Artificial Sequence: Synthetic oligonucleotide
  Sense strand starting at position 2644 of SEQ ID NO: 917421
uauuguugguagccugaau

SEQ ID NO: 1232249 - RNA, 19 nt, Artificial Sequence
  Description of Artificial Sequence: Synthetic oligonucleotide
  Antisense strand to SEQ ID NO: 1232248
auucaggcuaccaacaaua

SEQ ID NO: 1232250 - RNA, 19 nt, Artificial Sequence
  Description of Artificial Sequence: Synthetic oligonucleotide
  Sense strand starting at position 2655 of SEQ ID NO: 917421
gccugaaugucuucccauc

SEQ ID NO: 1232251 - RNA, 19 nt, Artificial Sequence
  Description of Artificial Sequence: Synthetic oligonucleotide
  Antisense strand to SEQ ID NO: 1232250
gaugggaagacauucaggc

SEQ ID NO: 1232252 - RNA, 19 nt, Artificial Sequence
  Description of Artificial Sequence: Synthetic oligonucleotide
  Sense strand starting at position 2695 of SEQ ID NO: 917421
gcaggaacaugagucuuaa

SEQ ID NO: 1232253 - RNA, 19 nt, Artificial Sequence
  Description of Artificial Sequence: Synthetic oligonucleotide
  Antisense strand to SEQ ID NO: 1232252
uuaagacucauguuccugc

SEQ ID NO: 1232254 - RNA, 19 nt, Artificial Sequence
  Description of Artificial Sequence: Synthetic oligonucleotide
  Sense strand starting at position 2706 of SEQ ID NO: 917421
agucuuaagaguugaugaa

SEQ ID NO: 1232255 - RNA, 19 nt, Artificial Sequence
  Description of Artificial Sequence: Synthetic oligonucleotide
  Antisense strand to SEQ ID NO: 1232254
uucaucaacucuuaagacu

SEQ ID NO: 1232256 - RNA, 19 nt, Artificial Sequence
  Description of Artificial Sequence: Synthetic oligonucleotide
  Sense strand starting at position 2737 of SEQ ID NO: 917421
uaaguaaaguugccaugua

SEQ ID NO: 1232257 - RNA, 19 nt, Artificial Sequence
  Description of Artificial Sequence: Synthetic oligonucleotide
  Antisense strand to SEQ ID NO: 1232256
uacauggcaacuuuacuua

SEQ ID NO: 1232258 - RNA, 19 nt, Artificial Sequence
  Description of Artificial Sequence: Synthetic oligonucleotide
  Sense strand starting at position 2808 of SEQ ID NO: 917421
uggcuuauuucucuuaggu

SEQ ID NO: 1232259 - RNA, 19 nt, Artificial Sequence
  Description of Artificial Sequence: Synthetic oligonucleotide
  Antisense strand to SEQ ID NO: 1232258
accuaagagaaauaagcca

SEQ ID NO: 1232260 - RNA, 19 nt, Artificial Sequence
  Description of Artificial Sequence: Synthetic oligonucleotide
  Sense strand starting at position 2816 of SEQ ID NO: 917421
uucucuuagguauauauga

SEQ ID NO: 1232261 - RNA, 19 nt, Artificial Sequence
  Description of Artificial Sequence: Synthetic oligonucleotide
  Antisense strand to SEQ ID NO: 1232260
ucauauauaccuaagagaa

SEQ ID NO: 1232262 - RNA, 19 nt, Artificial Sequence
  Description of Artificial Sequence: Synthetic oligonucleotide
  Sense strand starting at position 2823 of SEQ ID NO: 917421
agguauauaugauacacau

SEQ ID NO: 1232263 - RNA, 19 nt, Artificial Sequence
  Description of Artificial Sequence: Synthetic oligonucleotide
  Antisense strand to SEQ ID NO: 1232262
auguguaucauauauaccu

SEQ ID NO: 1232264 - RNA, 19 nt, Artificial Sequence
  Description of Artificial Sequence: Synthetic oligonucleotide
  Sense strand starting at position 3046 of SEQ ID NO: 917421
gagaauguucuacagcugu

SEQ ID NO: 1232265 - RNA, 19 nt, Artificial Sequence
  Description of Artificial Sequence: Synthetic oligonucleotide
  Antisense strand to SEQ ID NO: 1232264
acagcuguagaacauucuc

SEQ ID NO: 1232266 - RNA, 19 nt, Artificial Sequence
  Description of Artificial Sequence: Synthetic oligonucleotide
  Sense strand starting at position 3134 of SEQ ID NO: 917421
guaaguaaguaugcuccau

SEQ ID NO: 1232267 - RNA, 19 nt, Artificial Sequence
  Description of Artificial Sequence: Synthetic oligonucleotide
  Antisense strand to SEQ ID NO: 1232266
auggagcauacuuacuuac

SEQ ID NO: 1232268 - RNA, 19 nt, Artificial Sequence
  Description of Artificial Sequence: Synthetic oligonucleotide
  Sense strand starting at position 3138 of SEQ ID NO: 917421
guaaguaugcuccaucaau

SEQ ID NO: 1232269 - RNA, 19 nt, Artificial Sequence
  Description of Artificial Sequence: Synthetic oligonucleotide
  Antisense strand to SEQ ID NO: 1232268
auugauggagcauacuuac

SEQ ID NO: 1232270 - RNA, 19 nt, Artificial Sequence
  Description of Artificial Sequence: Synthetic oligonucleotide
  Sense strand starting at position 3417 of SEQ ID NO: 917421
cauagaauuugauggagua

SEQ ID NO: 1232271 - RNA, 19 nt, Artificial Sequence
  Description of Artificial Sequence: Synthetic oligonucleotide
  Antisense strand to SEQ ID NO: 1232270
uacuccaucaaauucuaug

SEQ ID NO: 1232272 - RNA, 19 nt, Artificial Sequence
  Description of Artificial Sequence: Synthetic oligonucleotide
  Sense strand starting at position 3432 of SEQ ID NO: 917421
aguagugaaucauccuaca

SEQ ID NO: 1232273 - RNA, 19 nt, Artificial Sequence
  Description of Artificial Sequence: Synthetic oligonucleotide
  Antisense strand to SEQ ID NO: 1232272
uguaggaugauucacuacu

SEQ ID NO: 1232274 - RNA, 19 nt, Artificial Sequence
  Description of Artificial Sequence: Synthetic oligonucleotide
  Sense strand starting at position 3529 of SEQ ID NO: 917421
auaugacacguccagaauu

SEQ ID NO: 1232275 - RNA, 19 nt, Artificial Sequence
  Description of Artificial Sequence: Synthetic oligonucleotide
  Antisense strand to SEQ ID NO: 1232274
aauucuggacgugucauau

SEQ ID NO: 1232276 - RNA, 19 nt, Artificial Sequence
  Description of Artificial Sequence: Synthetic oligonucleotide
  Sense strand starting at position 3700 of SEQ ID NO: 917421
aggugaauuguacacuuua

SEQ ID NO: 1232277 - RNA, 19 nt, Artificial Sequence
  Description of Artificial Sequence: Synthetic oligonucleotide
  Antisense strand to SEQ ID NO: 1232276
uaaaguguacaauucaccu

SEQ ID NO: 1232278 - RNA, 19 nt, Artificial Sequence
  Description of Artificial Sequence: Synthetic oligonucleotide
  Sense strand starting at position 3732 of SEQ ID NO: 917421
uaugguaugugaguuauac

SEQ ID NO: 1232279 - RNA, 19 nt, Artificial Sequence
  Description of Artificial Sequence: Synthetic oligonucleotide
  Antisense strand to SEQ ID NO: 1232278
guauaacucacauaccaua

SEQ ID NO: 1232280 - RNA, 19 nt, Artificial Sequence
  Description of Artificial Sequence: Synthetic oligonucleotide
  Sense strand starting at position 3734 of SEQ ID NO: 917421
ugguaugugaguuauaccu

SEQ ID NO: 1232281 - RNA, 19 nt, Artificial Sequence
  Description of Artificial Sequence: Synthetic oligonucleotide
  Antisense strand to SEQ ID NO: 1232280
agguauaacucacauacca

SEQ ID NO: 1232282 - RNA, 19 nt, Artificial Sequence
  Description of Artificial Sequence: Synthetic oligonucleotide
  Sense strand starting at position 3771 of SEQ ID NO: 917421
agcugaugugaaugcaaag

SEQ ID NO: 1232283 - RNA, 19 nt, Artificial Sequence
  Description of Artificial Sequence: Synthetic oligonucleotide
  Antisense strand to SEQ ID NO: 1232282
cuuugcauucacaucagcu

SEQ ID NO: 1232284 - RNA, 19 nt, Artificial Sequence
  Description of Artificial Sequence: Synthetic oligonucleotide
  Sense strand starting at position 3872 of SEQ ID NO: 917421
gugguugguuuguucauuu

SEQ ID NO: 1232285 - RNA, 19 nt, Artificial Sequence
  Description of Artificial Sequence: Synthetic oligonucleotide
  Antisense strand to SEQ ID NO: 1232284
aaaugaacaaaccaaccac

SEQ ID NO: 1232286 - RNA, 19 nt, Artificial Sequence
  Description of Artificial Sequence: Synthetic oligonucleotide
  Sense strand starting at position 3920 of SEQ ID NO: 917422
cuaccagaguggucagaac

SEQ ID NO: 1232287 - RNA, 19 nt, Artificial Sequence
  Description of Artificial Sequence: Synthetic oligonucleotide
  Antisense strand to SEQ ID NO: 1232286
guucugaccacucugguag

SEQ ID NO: 1232288 - RNA, 19 nt, Artificial Sequence
  Description of Artificial Sequence: Synthetic oligonucleotide
  Sense strand starting at position 141 of SEQ ID NO: 917422
ggaaauggugcaugaacca

SEQ ID NO: 1232289 - RNA, 19 nt, Artificial Sequence
  Description of Artificial Sequence: Synthetic oligonucleotide
  Antisense strand to SEQ ID NO: 1232288
ugguucaugcaccauuucc

SEQ ID NO: 1232290 - RNA, 19 nt, Artificial Sequence
  Description of Artificial Sequence: Synthetic oligonucleotide
  Sense strand starting at position 232 of SEQ ID NO: 917422
uagugacacugugugaaga

SEQ ID NO: 1232291 - RNA, 19 nt, Artificial Sequence
  Description of Artificial Sequence: Synthetic oligonucleotide
  Antisense strand to SEQ ID NO: 1232290
ucuucacacagugucacua

SEQ ID NO: 1232292 - RNA, 19 nt, Artificial Sequence
  Description of Artificial Sequence: Synthetic oligonucleotide
  Sense strand starting at position 233 of SEQ ID NO: 917422
agugacacugugugaagaa

SEQ ID NO: 1232293 - RNA, 19 nt, Artificial Sequence
  Description of Artificial Sequence: Synthetic oligonucleotide
  Antisense strand to SEQ ID NO: 1232292
uucuucacacagugucacu

SEQ ID NO: 1232294 - RNA, 19 nt, Artificial Sequence
  Description of Artificial Sequence: Synthetic oligonucleotide
  Sense strand starting at position 290 of SEQ ID NO: 917422
cccugugaccauuaaguga

SEQ ID NO: 1232295 - RNA, 19 nt, Artificial Sequence
  Description of Artificial Sequence: Synthetic oligonucleotide
  Antisense strand to SEQ ID NO: 1232294
ucacuuaauggucacaggg

SEQ ID NO: 1232296 - RNA, 19 nt, Artificial Sequence
  Description of Artificial Sequence: Synthetic oligonucleotide
  Sense strand starting at position 293 of SEQ ID NO: 917422
ugugaccauuaagugaaua

SEQ ID NO: 1232297 - RNA, 19 nt, Artificial Sequence
  Description of Artificial Sequence: Synthetic oligonucleotide
  Antisense strand to SEQ ID NO: 1232296
uauucacuuaauggucaca

SEQ ID NO: 1232298 - RNA, 19 nt, Artificial Sequence
  Description of Artificial Sequence: Synthetic oligonucleotide
  Sense strand starting at position 298 of SEQ ID NO: 917422
ccauuaagugaauaauugu

SEQ ID NO: 1232299 - RNA, 19 nt, Artificial Sequence
  Description of Artificial Sequence: Synthetic oligonucleotide
  Antisense strand to SEQ ID NO: 1232298
acaauuauucacuuaaugg

SEQ ID NO: 1232300 - RNA, 19 nt, Artificial Sequence
  Description of Artificial Sequence: Synthetic oligonucleotide
  Sense strand starting at position 348 of SEQ ID NO: 917422
cacagaaguuauguggauu

SEQ ID NO: 1232301 - RNA, 19 nt, Artificial Sequence
  Description of Artificial Sequence: Synthetic oligonucleotide
  Antisense strand to SEQ ID NO: 1232300
aauccacauaacuucugug

SEQ ID NO: 1232302 - RNA, 19 nt, Artificial Sequence
  Description of Artificial Sequence: Synthetic oligonucleotide
  Sense strand starting at position 349 of SEQ ID NO: 917422
acagaaguuauguggauug

SEQ ID NO: 1232303 - RNA, 19 nt, Artificial Sequence
  Description of Artificial Sequence: Synthetic oligonucleotide
  Antisense strand to SEQ ID NO: 1232302
caauccacauaacuucugu

SEQ ID NO: 1232304 - RNA, 19 nt, Artificial Sequence
  Description of Artificial Sequence: Synthetic oligonucleotide
  Sense strand starting at position 379 of SEQ ID NO: 917422
agaguaaggaugugguaga

SEQ ID NO: 1232305 - RNA, 19 nt, Artificial Sequence
  Description of Artificial Sequence: Synthetic oligonucleotide
  Antisense strand to SEQ ID NO: 1232304
ucuaccacauccuuacucu

SEQ ID NO: 1232306 - RNA, 19 nt, Artificial Sequence
  Description of Artificial Sequence: Synthetic oligonucleotide
  Sense strand starting at position 508 of SEQ ID NO: 917422
ucuuccuauuaugugaaga

SEQ ID NO: 1232307 - RNA, 19 nt, Artificial Sequence
  Description of Artificial Sequence: Synthetic oligonucleotide
  Antisense strand to SEQ ID NO: 1232306
ucuucacauaauaggaaga

SEQ ID NO: 1232308 - RNA, 19 nt, Artificial Sequence
  Description of Artificial Sequence: Synthetic oligonucleotide
  Sense strand starting at position 834 of SEQ ID NO: 917422
ccugcauuaacguagaaug

SEQ ID NO: 1232309 - RNA, 19 nt, Artificial Sequence
  Description of Artificial Sequence: Synthetic oligonucleotide
  Antisense strand to SEQ ID NO: 1232308
cauucuacguuaaugcagg

SEQ ID NO: 1232310 - RNA, 19 nt, Artificial Sequence
  Description of Artificial Sequence: Synthetic oligonucleotide
  Sense strand starting at position 848 of SEQ ID NO: 917422
gaaugagucugguuaucaa

SEQ ID NO: 1232311 - RNA, 19 nt, Artificial Sequence
  Description of Artificial Sequence: Synthetic oligonucleotide
  Antisense strand to SEQ ID NO: 1232310
uugauaaccagacucauuc

SEQ ID NO: 1232312 - RNA, 19 nt, Artificial Sequence
  Description of Artificial Sequence: Synthetic oligonucleotide
  Sense strand starting at position 859 of SEQ ID NO: 917422
guuaucaaugggcagcuua

SEQ ID NO: 1232313 - RNA, 19 nt, Artificial Sequence
  Description of Artificial Sequence: Synthetic oligonucleotide
  Antisense strand to SEQ ID NO: 1232312
uaagcugcccauugauaac

SEQ ID NO: 1232314 - RNA, 19 nt, Artificial Sequence
  Description of Artificial Sequence: Synthetic oligonucleotide
  Sense strand starting at position 961 of SEQ ID NO: 917422
auccaugaccugugaauca

SEQ ID NO: 1232315 - RNA, 19 nt, Artificial Sequence
  Description of Artificial Sequence: Synthetic oligonucleotide
  Antisense strand to SEQ ID NO: 1232314
ugauucacaggucauggau

SEQ ID NO: 1232316 - RNA, 19 nt, Artificial Sequence
  Description of Artificial Sequence: Synthetic oligonucleotide
  Sense strand starting at position 989 of SEQ ID NO: 917422
aucugcacugauggagaaa

SEQ ID NO: 1232317 - RNA, 19 nt, Artificial Sequence
  Description of Artificial Sequence: Synthetic oligonucleotide
  Antisense strand to SEQ ID NO: 1232316
uuucuccaucagugcagau

SEQ ID NO: 1232318 - RNA, 19 nt, Artificial Sequence
  Description of Artificial Sequence: Synthetic oligonucleotide
  Sense strand starting at position 1094 of SEQ ID NO: 917422
cggaaugggcuuuauccau

SEQ ID NO: 1232319 - RNA, 19 nt, Artificial Sequence
  Description of Artificial Sequence: Synthetic oligonucleotide
  Antisense strand to SEQ ID NO: 1232318
auggauaaagcccauuccg

SEQ ID NO: 1232320 - RNA, 19 nt, Artificial Sequence
  Description of Artificial Sequence: Synthetic oligonucleotide
  Sense strand starting at position 1246 of SEQ ID NO: 917422
uugcuaaagcuggaauacu

SEQ ID NO: 1232321 - RNA, 19 nt, Artificial Sequence
  Description of Artificial Sequence: Synthetic oligonucleotide
  Antisense strand to SEQ ID NO: 1232320
aguauuccagcuuuagcaa

SEQ ID NO: 1232322 - RNA, 19 nt, Artificial Sequence
  Description of Artificial Sequence: Synthetic oligonucleotide
  Sense strand starting at position 1272 of SEQ ID NO: 917422
agaaucuaaugaucgcuua

SEQ ID NO: 1232323 - RNA, 19 nt, Artificial Sequence
  Description of Artificial Sequence: Synthetic oligonucleotide
  Antisense strand to SEQ ID NO: 1232322
uaagcgaucauuagauucu

SEQ ID NO: 1232324 - RNA, 19 nt, Artificial Sequence
  Description of Artificial Sequence: Synthetic oligonucleotide
  Sense strand starting at position 1365 of SEQ ID NO: 917422
aacauauggcauuguuuga

SEQ ID NO: 1232325 - RNA, 19 nt, Artificial Sequence
  Description of Artificial Sequence: Synthetic oligonucleotide
  Antisense strand to SEQ ID NO: 1232324
ucaaacaaugccauauguu

SEQ ID NO: 1232326 - RNA, 19 nt, Artificial Sequence
  Description of Artificial Sequence: Synthetic oligonucleotide
  Sense strand starting at position 1390 of SEQ ID NO: 917422
gcuguuuaaagugagagca

SEQ ID NO: 1232327 - RNA, 19 nt, Artificial Sequence
  Description of Artificial Sequence: Synthetic oligonucleotide
  Antisense strand to SEQ ID NO: 1232326
ugcucucacuuuaaacagc

SEQ ID NO: 1232328 - RNA, 19 nt, Artificial Sequence
  Description of Artificial Sequence: Synthetic oligonucleotide
  Sense strand starting at position 1403 of SEQ ID NO: 917422
agagcaauucugcaaauua

SEQ ID NO: 1232329 - RNA, 19 nt, Artificial Sequence
  Description of Artificial Sequence: Synthetic oligonucleotide
  Antisense strand to SEQ ID NO: 1232328
uaauuugcagaauugcucu

SEQ ID NO: 1232330 - RNA, 19 nt, Artificial Sequence
  Description of Artificial Sequence: Synthetic oligonucleotide
  Sense strand starting at position 1570 of SEQ ID NO: 917422
ggcagaucucucuagucac

SEQ ID NO: 1232331 - RNA, 19 nt, Artificial Sequence
  Description of Artificial Sequence: Synthetic oligonucleotide
  Antisense strand to SEQ ID NO: 1232330
gugacuagagagaucugcc

SEQ ID NO: 1232332 - RNA, 19 nt, Artificial Sequence
  Description of Artificial Sequence: Synthetic oligonucleotide
  Sense strand starting at position 1715 of SEQ ID NO: 917422
ggguauguuaaaggaaagu

SEQ ID NO: 1232333 - RNA, 19 nt, Artificial Sequence
  Description of Artificial Sequence: Synthetic oligonucleotide
  Antisense strand to SEQ ID NO: 1232332
acuuuccuuuaacauaccc

SEQ ID NO: 1232334 - RNA, 19 nt, Artificial Sequence
  Description of Artificial Sequence: Synthetic oligonucleotide
  Sense strand starting at position 2046 of SEQ ID NO: 917422
acaggacugucaucaaccu

SEQ ID NO: 1232335 - RNA, 19 nt, Artificial Sequence
  Description of Artificial Sequence: Synthetic oligonucleotide
  Antisense strand to SEQ ID NO: 1232334
agguugaugacaguccugu

SEQ ID NO: 1232336 - RNA, 19 nt, Artificial Sequence
  Description of Artificial Sequence: Synthetic oligonucleotide
  Sense strand starting at position 2181 of SEQ ID NO: 917422
acagaagacuggcucuauu

SEQ ID NO: 1232337 - RNA, 19 nt, Artificial Sequence
  Description of Artificial Sequence: Synthetic oligonucleotide
  Antisense strand to SEQ ID NO: 1232336
aauagagccagucuucugu

SEQ ID NO: 1232338 - RNA, 19 nt, Artificial Sequence
  Description of Artificial Sequence: Synthetic oligonucleotide
  Sense strand starting at position 2242 of SEQ ID NO: 917422
cgaguaccucaugggaaau

SEQ ID NO: 1232339 - RNA, 19 nt, Artificial Sequence
  Description of Artificial Sequence: Synthetic oligonucleotide
  Antisense strand to SEQ ID NO: 1232338
auuucccaugagguacucg

SEQ ID NO: 1232340 - RNA, 19 nt, Artificial Sequence
  Description of Artificial Sequence: Synthetic oligonucleotide
  Sense strand starting at position 2263 of SEQ ID NO: 917422
agaccugugaccugguaau

SEQ ID NO: 1232341 - RNA, 19 nt, Artificial Sequence
  Description of Artificial Sequence: Synthetic oligonucleotide
  Antisense strand to SEQ ID NO: 1232340
auuaccaggucacaggucu

SEQ ID NO: 1232342 - RNA, 19 nt, Artificial Sequence
  Description of Artificial Sequence: Synthetic oligonucleotide
  Sense strand starting at position 2303 of SEQ ID NO: 917422
uuuguauguuauuuggagu

SEQ ID NO: 1232343 - RNA, 19 nt, Artificial Sequence
  Description of Artificial Sequence: Synthetic oligonucleotide
  Antisense strand to SEQ ID NO: 1232342
acuccaaauaacauacaaa

SEQ ID NO: 1232344 - RNA, 19 nt, Artificial Sequence
  Description of Artificial Sequence: Synthetic oligonucleotide
  Sense strand starting at position 2304 of SEQ ID NO: 917422
uuguauguuauuuggaguu

SEQ ID NO: 1232345 - RNA, 19 nt, Artificial Sequence
  Description of Artificial Sequence: Synthetic oligonucleotide
  Antisense strand to SEQ ID NO: 1232344
aacuccaaauaacauacaa

SEQ ID NO: 1232346 - RNA, 19 nt, Artificial Sequence
  Description of Artificial Sequence: Synthetic oligonucleotide
  Sense strand starting at position 2310 of SEQ ID NO: 917422
guuauuuggaguuguuuau

SEQ ID NO: 1232347 - RNA, 19 nt, Artificial Sequence
  Description of Artificial Sequence: Synthetic oligonucleotide
  Antisense strand to SEQ ID NO: 1232346
auaaacaacuccaaauaac

SEQ ID NO: 1232348 - RNA, 19 nt, Artificial Sequence
  Description of Artificial Sequence: Synthetic oligonucleotide
  Sense strand starting at position 2328 of SEQ ID NO: 917422
ugagguuccaaugguuaaa

SEQ ID NO: 1232349 - RNA, 19 nt, Artificial Sequence
  Description of Artificial Sequence: Synthetic oligonucleotide
  Antisense strand to SEQ ID NO: 1232348
uuuaaccauuggaaccuca

SEQ ID NO: 1232350 - RNA, 19 nt, Artificial Sequence
  Description of Artificial Sequence: Synthetic oligonucleotide
  Sense strand starting at position 2370 of SEQ ID NO: 917422
ugugguaaacugugaaaug

SEQ ID NO: 1232351 - RNA, 19 nt, Artificial Sequence
  Description of Artificial Sequence: Synthetic oligonucleotide
  Antisense strand to SEQ ID NO: 1232350
cauuucacaguuuaccaca

SEQ ID NO: 1232352 - RNA, 19 nt, Artificial Sequence
  Description of Artificial Sequence: Synthetic oligonucleotide
  Sense strand starting at position 2380 of SEQ ID NO: 917422
ugugaaaugcuauacaauu

SEQ ID NO: 1232353 - RNA, 19 nt, Artificial Sequence
  Description of Artificial Sequence: Synthetic oligonucleotide
  Antisense strand to SEQ ID NO: 1232352
aauuguauagcauuucaca

SEQ ID NO: 1232354 - RNA, 19 nt, Artificial Sequence
  Description of Artificial Sequence: Synthetic oligonucleotide
  Sense strand starting at position 2414 of SEQ ID NO: 917422
ugaaauugcuagucucaau

SEQ ID NO: 1232355 - RNA, 19 nt, Artificial Sequence
  Description of Artificial Sequence: Synthetic oligonucleotide
  Antisense strand to SEQ ID NO: 1232354
auugagacuagcaauuuca

SEQ ID NO: 1232356 - RNA, 19 nt, Artificial Sequence
  Description of Artificial Sequence: Synthetic oligonucleotide
  Sense strand starting at position 2486 of SEQ ID NO: 917422
gugaaauaccaccagcauu

SEQ ID NO: 1232357 - RNA, 19 nt, Artificial Sequence
  Description of Artificial Sequence: Synthetic oligonucleotide
  Antisense strand to SEQ ID NO: 1232356
aaugcuggugguauuucac

SEQ ID NO: 1232358 - RNA, 19 nt, Artificial Sequence
  Description of Artificial Sequence: Synthetic oligonucleotide
  Sense strand starting at position 2544 of SEQ ID NO: 917422
gguacaucauauuccucau

SEQ ID NO: 1232359 - RNA, 19 nt, Artificial Sequence
  Description of Artificial Sequence: Synthetic oligonucleotide
  Antisense strand to SEQ ID NO: 1232358
augaggaauaugauguacc

SEQ ID NO: 1232360 - RNA, 19 nt, Artificial Sequence
  Description of Artificial Sequence: Synthetic oligonucleotide
  Sense strand starting at position 2612 of SEQ ID NO: 917422
uuggcuuaucuggaaauac

SEQ ID NO: 1232361 - RNA, 19 nt, Artificial Sequence
  Description of Artificial Sequence: Synthetic oligonucleotide
  Antisense strand to SEQ ID NO: 1232360
guauuuccagauaagccaa

SEQ ID NO: 1232362 - RNA, 19 nt, Artificial Sequence
  Description of Artificial Sequence: Synthetic oligonucleotide
  Sense strand starting at position 2652 of SEQ ID NO: 917422
ugcuucguuccugcggaaa

SEQ ID NO: 1232363 - RNA, 19 nt, Artificial Sequence
  Description of Artificial Sequence: Synthetic oligonucleotide
  Antisense strand to SEQ ID NO: 1232362
uuuccgcaggaacgaagca

SEQ ID NO: 1232364 - RNA, 19 nt, Artificial Sequence
  Description of Artificial Sequence: Synthetic oligonucleotide
  Sense strand starting at position 2881 of SEQ ID NO: 917422
auuauuuccugggagauag

SEQ ID NO: 1232365 - RNA, 19 nt, Artificial Sequence
  Description of Artificial Sequence: Synthetic oligonucleotide
  Antisense strand to SEQ ID NO: 1232364
cuaucucccaggaaauaau

SEQ ID NO: 1232366 - RNA, 19 nt, Artificial Sequence
  Description of Artificial Sequence: Synthetic oligonucleotide
  Sense strand starting at position 3174 of SEQ ID NO: 917423
gugaauacccaguauguug

SEQ ID NO: 1232367 - RNA, 19 nt, Artificial Sequence
  Description of Artificial Sequence: Synthetic oligonucleotide
  Antisense strand to SEQ ID NO: 1232366
caacauacuggguauucac

SEQ ID NO: 1232368 - RNA, 19 nt, Artificial Sequence
  Description of Artificial Sequence: Synthetic oligonucleotide
  Sense strand starting at position 179 of SEQ ID NO: 917423
aaugguuaacacggcaaau

SEQ ID NO: 1232369 - RNA, 19 nt, Artificial Sequence
  Description of Artificial Sequence: Synthetic oligonucleotide
  Antisense strand to SEQ ID NO: 1232368
auuugccguguuaaccauu

SEQ ID NO: 1232370 - RNA, 19 nt, Artificial Sequence
  Description of Artificial Sequence: Synthetic oligonucleotide
  Sense strand starting at position 500 of SEQ ID NO: 917423
cgugccuggcuuguuauau

SEQ ID NO: 1232371 - RNA, 19 nt, Artificial Sequence
  Description of Artificial Sequence: Synthetic oligonucleotide
  Antisense strand to SEQ ID NO: 1232370
auauaacaagccaggcacg

SEQ ID NO: 1232372 - RNA, 19 nt, Artificial Sequence
  Description of Artificial Sequence: Synthetic oligonucleotide
  Sense strand starting at position 501 of SEQ ID NO: 917423
gugccuggcuuguuauaua

SEQ ID NO: 1232373 - RNA, 19 nt, Artificial Sequence
  Description of Artificial Sequence: Synthetic oligonucleotide
  Antisense strand to SEQ ID NO: 1232372
uauauaacaagccaggcac

SEQ ID NO: 1232374 - RNA, 19 nt, Artificial Sequence
  Description of Artificial Sequence: Synthetic oligonucleotide
  Sense strand starting at position 897 of SEQ ID NO: 917423
ccauuauggugucaaucca

SEQ ID NO: 1232375 - RNA, 19 nt, Artificial Sequence
  Description of Artificial Sequence: Synthetic oligonucleotide
  Antisense strand to SEQ ID NO: 1232374
uggauugacaccauaaugg

SEQ ID NO: 1232376 - RNA, 19 nt, Artificial Sequence
  Description of Artificial Sequence: Synthetic oligonucleotide
  Sense strand starting at position 905 of SEQ ID NO: 917423
gugucaauccaaggaguua

SEQ ID NO: 1232377 - RNA, 19 nt, Artificial Sequence
  Description of Artificial Sequence: Synthetic oligonucleotide
  Antisense strand to SEQ ID NO: 1232376
uaacuccuuggauugacac

SEQ ID NO: 1232378 - RNA, 19 nt, Artificial Sequence
  Description of Artificial Sequence: Synthetic oligonucleotide
  Sense strand starting at position 918 of SEQ ID NO: 917423
gaguuaugugcagcgcuaa

SEQ ID NO: 1232379 - RNA, 19 nt, Artificial Sequence
  Description of Artificial Sequence: Synthetic oligonucleotide
  Antisense strand to SEQ ID NO: 1232378
uuagcgcugcacauaacuc

SEQ ID NO: 1232380 - RNA, 19 nt, Artificial Sequence
  Description of Artificial Sequence: Synthetic oligonucleotide
  Sense strand starting at position 919 of SEQ ID NO: 917423
aguuaugugcagcgcuaaa

SEQ ID NO: 1232381 - RNA, 19 nt, Artificial Sequence
  Description of Artificial Sequence: Synthetic oligonucleotide
  Antisense strand to SEQ ID NO: 1232380
uuuagcgcugcacauaacu

SEQ ID NO: 1232382 - RNA, 19 nt, Artificial Sequence
  Description of Artificial Sequence: Synthetic oligonucleotide
  Sense strand starting at position 1090 of SEQ ID NO: 917423
guaccuaaggcuuaauauu

SEQ ID NO: 1232383 - RNA, 19 nt, Artificial Sequence
  Description of Artificial Sequence: Synthetic oligonucleotide
  Antisense strand to SEQ ID NO: 1232382
aauauuaagccuuagguac

SEQ ID NO: 1232384 - RNA, 19 nt, Artificial Sequence
  Description of Artificial Sequence: Synthetic oligonucleotide
  Sense strand starting at position 1099 of SEQ ID NO: 917423
gcuuaauauuauguggaaa

SEQ ID NO: 1232385 - RNA, 19 nt, Artificial Sequence
  Description of Artificial Sequence: Synthetic oligonucleotide
  Antisense strand to SEQ ID NO: 1232384
uuuccacauaauauuaagc

SEQ ID NO: 1232386 - RNA, 19 nt, Artificial Sequence
  Description of Artificial Sequence: Synthetic oligonucleotide
  Sense strand starting at position 1112 of SEQ ID NO: 917423
uggaaaugcucuuugagaa

SEQ ID NO: 1232387 - RNA, 19 nt, Artificial Sequence
  Description of Artificial Sequence: Synthetic oligonucleotide
  Antisense strand to SEQ ID NO: 1232386
uucucaaagagcauuucca

SEQ ID NO: 1232388 - RNA, 19 nt, Artificial Sequence
  Description of Artificial Sequence: Synthetic oligonucleotide
  Sense strand starting at position 1113 of SEQ ID NO: 917423
ggaaaugcucuuugagaau

SEQ ID NO: 1232389 - RNA, 19 nt, Artificial Sequence
  Description of Artificial Sequence: Synthetic oligonucleotide
  Antisense strand to SEQ ID NO: 1232388
auucucaaagagcauuucc

SEQ ID NO: 1232390 - RNA, 19 nt, Artificial Sequence
  Description of Artificial Sequence: Synthetic oligonucleotide
  Sense strand starting at position 1170 of SEQ ID NO: 917423
guuguccuagugcaauuua

SEQ ID NO: 1232391 - RNA, 19 nt, Artificial Sequence
  Description of Artificial Sequence: Synthetic oligonucleotide
  Antisense strand to SEQ ID NO: 1232390
uaaauugcacuaggacaac

SEQ ID NO: 1232392 - RNA, 19 nt, Artificial Sequence
  Description of Artificial Sequence: Synthetic oligonucleotide
  Sense strand starting at position 1202 of SEQ ID NO: 917423
cccuuuagggcagauacua

SEQ ID NO: 1232393 - RNA, 19 nt, Artificial Sequence
  Description of Artificial Sequence: Synthetic oligonucleotide
  Antisense strand to SEQ ID NO: 1232392
uaguaucugcccuaaaggg

SEQ ID NO: 1232394 - RNA, 19 nt, Artificial Sequence
  Description of Artificial Sequence: Synthetic oligonucleotide
  Sense strand starting at position 1259 of SEQ ID NO: 917423
ccauaacagugacagcaau

SEQ ID NO: 1232395 - RNA, 19 nt, Artificial Sequence
  Description of Artificial Sequence: Synthetic oligonucleotide
  Antisense strand to SEQ ID NO: 1232394
auugcugucacuguuaugg

SEQ ID NO: 1232396 - RNA, 19 nt, Artificial Sequence
  Description of Artificial Sequence: Synthetic oligonucleotide
  Sense strand starting at position 2081 of SEQ ID NO: 917423
cguguugcgacuucgggaa

SEQ ID NO: 1232397 - RNA, 19 nt, Artificial Sequence
  Description of Artificial Sequence: Synthetic oligonucleotide
  Antisense strand to SEQ ID NO: 1232396
uucccgaagucgcaacacg

SEQ ID NO: 1232398 - RNA, 19 nt, Artificial Sequence
  Description of Artificial Sequence: Synthetic oligonucleotide
  Sense strand starting at position 2082 of SEQ ID NO: 917423
guguugcgacuucgggaaa

SEQ ID NO: 1232399 - RNA, 19 nt, Artificial Sequence
  Description of Artificial Sequence: Synthetic oligonucleotide
  Antisense strand to SEQ ID NO: 1232398
uuucccgaagucgcaacac

SEQ ID NO: 1232400 - RNA, 19 nt, Artificial Sequence
  Description of Artificial Sequence: Synthetic oligonucleotide
  Sense strand starting at position 2154 of SEQ ID NO: 917423
guugguugccgggauguuu

SEQ ID NO: 1232401 - RNA, 19 nt, Artificial Sequence
  Description of Artificial Sequence: Synthetic oligonucleotide
  Antisense strand to SEQ ID NO: 1232400
aaacaucccggcaaccaac

SEQ ID NO: 1232402 - RNA, 19 nt, Artificial Sequence
  Description of Artificial Sequence: Synthetic oligonucleotide
  Sense strand starting at position 2253 of SEQ ID NO: 917423
agcguuccuuuauuagcaa

SEQ ID NO: 1232403 - RNA, 19 nt, Artificial Sequence
  Description of Artificial Sequence: Synthetic oligonucleotide
  Antisense strand to SEQ ID NO: 1232402
uugcuaauaaaggaacgcu

SEQ ID NO: 1232404 - RNA, 19 nt, Artificial Sequence
  Description of Artificial Sequence: Synthetic oligonucleotide
  Sense strand starting at position 2461 of SEQ ID NO: 917423
gacuuaugggugggaauau

SEQ ID NO: 1232405 - RNA, 19 nt, Artificial Sequence
  Description of Artificial Sequence: Synthetic oligonucleotide
  Antisense strand to SEQ ID NO: 1232404
auauucccacccauaaguc

SEQ ID NO: 1232406 - RNA, 19 nt, Artificial Sequence
  Description of Artificial Sequence: Synthetic oligonucleotide
  Sense strand starting at position 2462 of SEQ ID NO: 917423
acuuaugggugggaauaua

SEQ ID NO: 1232407 - RNA, 19 nt, Artificial Sequence
  Description of Artificial Sequence: Synthetic oligonucleotide
  Antisense strand to SEQ ID NO: 1232406
uauauucccacccauaagu

SEQ ID NO: 1232408 - RNA, 19 nt, Artificial Sequence
  Description of Artificial Sequence: Synthetic oligonucleotide
  Sense strand starting at position 2470 of SEQ ID NO: 917423
gugggaauauaugauacaa

SEQ ID NO: 1232409 - RNA, 19 nt, Artificial Sequence
  Description of Artificial Sequence: Synthetic oligonucleotide
  Antisense strand to SEQ ID NO: 1232408
uuguaucauauauucccac

SEQ ID NO: 1232410 - RNA, 19 nt, Artificial Sequence
  Description of Artificial Sequence: Synthetic oligonucleotide
  Sense strand starting at position 2578 of SEQ ID NO: 917423
ugccaaguauaugacugaa

SEQ ID NO: 1232411 - RNA, 19 nt, Artificial Sequence
  Description of Artificial Sequence: Synthetic oligonucleotide
  Antisense strand to SEQ ID NO: 1232410
uucagucauauacuuggca

SEQ ID NO: 1232412 - RNA, 19 nt, Artificial Sequence
  Description of Artificial Sequence: Synthetic oligonucleotide
  Sense strand starting at position 2580 of SEQ ID NO: 917423
ccaaguauaugacugaacu

SEQ ID NO: 1232413 - RNA, 19 nt, Artificial Sequence
  Description of Artificial Sequence: Synthetic oligonucleotide
  Antisense strand to SEQ ID NO: 1232412
aguucagucauauacuugg

SEQ ID NO: 1232414 - RNA, 19 nt, Artificial Sequence
  Description of Artificial Sequence: Synthetic oligonucleotide
  Sense strand starting at position 2604 of SEQ ID NO: 917423
gugauaccaucuuacgacu

SEQ ID NO: 1232415 - RNA, 19 nt, Artificial Sequence
  Description of Artificial Sequence: Synthetic oligonucleotide
  Antisense strand to SEQ ID NO: 1232414
agucguaagaugguaucac

SEQ ID NO: 1232416 - RNA, 19 nt, Artificial Sequence
  Description of Artificial Sequence: Synthetic oligonucleotide
  Sense strand starting at position 2606 of SEQ ID NO: 917423
gauaccaucuuacgacuga

SEQ ID NO: 1232417 - RNA, 19 nt, Artificial Sequence
  Description of Artificial Sequence: Synthetic oligonucleotide
  Antisense strand to SEQ ID NO: 1232416
ucagucguaagaugguauc

SEQ ID NO: 1232418 - RNA, 19 nt, Artificial Sequence
  Description of Artificial Sequence: Synthetic oligonucleotide
  Sense strand starting at position 2607 of SEQ ID NO: 917423
auaccaucuuacgacugaa

SEQ ID NO: 1232419 - RNA, 19 nt, Artificial Sequence
  Description of Artificial Sequence: Synthetic oligonucleotide
  Antisense strand to SEQ ID NO: 1232418
uucagucguaagaugguau

SEQ ID NO: 1232420 - RNA, 19 nt, Artificial Sequence
  Description of Artificial Sequence: Synthetic oligonucleotide
  Sense strand starting at position 2610 of SEQ ID NO: 917423
ccaucuuacgacugaagag

SEQ ID NO: 1232421 - RNA, 19 nt, Artificial Sequence
  Description of Artificial Sequence: Synthetic oligonucleotide
  Antisense strand to SEQ ID NO: 1232420
cucuucagucguaagaugg

SEQ ID NO: 1232422 - RNA, 19 nt, Artificial Sequence
  Description of Artificial Sequence: Synthetic oligonucleotide
  Sense strand starting at position 2620 of SEQ ID NO: 917423
acugaagagugggaaauaa

SEQ ID NO: 1232423 - RNA, 19 nt, Artificial Sequence
  Description of Artificial Sequence: Synthetic oligonucleotide
  Antisense strand to SEQ ID NO: 1232422
uuauuucccacucuucagu

SEQ ID NO: 1232424 - RNA, 19 nt, Artificial Sequence
  Description of Artificial Sequence: Synthetic oligonucleotide
  Sense strand starting at position 2666 of SEQ ID NO: 917423
guagaaauuuguuacacau

SEQ ID NO: 1232425 - RNA, 19 nt, Artificial Sequence
  Description of Artificial Sequence: Synthetic oligonucleotide
  Antisense strand to SEQ ID NO: 1232424
auguguaacaaauuucuac

SEQ ID NO: 1232426 - RNA, 19 nt, Artificial Sequence
  Description of Artificial Sequence: Synthetic oligonucleotide
  Sense strand starting at position 2767 of SEQ ID NO: 917423
gugcuuuggcaaugacaaa

SEQ ID NO: 1232427 - RNA, 19 nt, Artificial Sequence
  Description of Artificial Sequence: Synthetic oligonucleotide
  Antisense strand to SEQ ID NO: 1232426
uuugucauugccaaagcac

SEQ ID NO: 1232428 - RNA, 19 nt, Artificial Sequence
  Description of Artificial Sequence: Synthetic oligonucleotide
  Sense strand starting at position 2814 of SEQ ID NO: 917423
gcgcaagcgcauuacgaau

SEQ ID NO: 1232429 - RNA, 19 nt, Artificial Sequence
  Description of Artificial Sequence: Synthetic oligonucleotide
  Antisense strand to SEQ ID NO: 1232428
auucguaaugcgcuugcgc

SEQ ID NO: 1232430 - RNA, 19 nt, Artificial Sequence
  Description of Artificial Sequence: Synthetic oligonucleotide
  Sense strand starting at position 3614 of SEQ ID NO: 917423
ucauauacugcugguaaga

SEQ ID NO: 1232431 - RNA, 19 nt, Artificial Sequence
  Description of Artificial Sequence: Synthetic oligonucleotide
  Antisense strand to SEQ ID NO: 1232430
ucuuaccagcaguauauga

SEQ ID NO: 1232432 - RNA, 19 nt, Artificial Sequence
  Description of Artificial Sequence: Synthetic oligonucleotide
  Sense strand starting at position 3645 of SEQ ID NO: 917423
acaccugcuuuagaaagua

SEQ ID NO: 1232433 - RNA, 19 nt, Artificial Sequence
  Description of Artificial Sequence: Synthetic oligonucleotide
  Antisense strand to SEQ ID NO: 1232432
uacuuucuaaagcaggugu

SEQ ID NO: 1232434 - RNA, 19 nt, Artificial Sequence
  Description of Artificial Sequence: Synthetic oligonucleotide
  Sense strand starting at position 3687 of SEQ ID NO: 917423
gcucaaguguauccagaga

SEQ ID NO: 1232435 - RNA, 19 nt, Artificial Sequence
  Description of Artificial Sequence: Synthetic oligonucleotide
  Antisense strand to SEQ ID NO: 1232434
ucucuggauacacuugagc

SEQ ID NO: 1232436 - RNA, 19 nt, Artificial Sequence
  Description of Artificial Sequence: Synthetic oligonucleotide
  Sense strand starting at position 3710 of SEQ ID NO: 917423
acaagaauguucuuagcua

SEQ ID NO: 1232437 - RNA, 19 nt, Artificial Sequence
  Description of Artificial Sequence: Synthetic oligonucleotide
  Antisense strand to SEQ ID NO: 1232436
uagcuaagaacauucuugu

SEQ ID NO: 1232438 - RNA, 19 nt, Artificial Sequence
  Description of Artificial Sequence: Synthetic oligonucleotide
  Sense strand starting at position 3717 of SEQ ID NO: 917423
uguucuuagcuauauuguu

SEQ ID NO: 1232439 - RNA, 19 nt, Artificial Sequence
  Description of Artificial Sequence: Synthetic oligonucleotide
  Antisense strand to SEQ ID NO: 1232438
aacaauauagcuaagaaca

SEQ ID NO: 1232440 - RNA, 19 nt, Artificial Sequence
  Description of Artificial Sequence: Synthetic oligonucleotide
  Sense strand starting at position 3781 of SEQ ID NO: 917423
aggacaguucagugaauug

SEQ ID NO: 1232441 - RNA, 19 nt, Artificial Sequence
  Description of Artificial Sequence: Synthetic oligonucleotide
  Antisense strand to SEQ ID NO: 1232440
caauucacugaacuguccu

SEQ ID NO: 1232442 - RNA, 19 nt, Artificial Sequence
  Description of Artificial Sequence: Synthetic oligonucleotide
  Sense strand starting at position 3793 of SEQ ID NO: 917423
ugaauugugguguacuaga

SEQ ID NO: 1232443 - RNA, 19 nt, Artificial Sequence
  Description of Artificial Sequence: Synthetic oligonucleotide
  Antisense strand to SEQ ID NO: 1232442
ucuaguacaccacaauuca

SEQ ID NO: 1232444 - RNA, 19 nt, Artificial Sequence
  Description of Artificial Sequence: Synthetic oligonucleotide
  Sense strand starting at position 3800 of SEQ ID NO: 917423
ugguguacuagacagcaau

SEQ ID NO: 1232445 - RNA, 19 nt, Artificial Sequence
  Description of Artificial Sequence: Synthetic oligonucleotide
  Antisense strand to SEQ ID NO: 1232444
auugcugucuaguacacca

SEQ ID NO: 1232446 - RNA, 19 nt, Artificial Sequence
  Description of Artificial Sequence: Synthetic oligonucleotide
  Sense strand starting at position 3899 of SEQ ID NO: 917424
caaacaugauggugaauau

SEQ ID NO: 1232447 - RNA, 19 nt, Artificial Sequence
  Description of Artificial Sequence: Synthetic oligonucleotide
  Antisense strand to SEQ ID NO: 1232446
auauucaccaucauguuug

SEQ ID NO: 1232448 - RNA, 19 nt, Artificial Sequence
  Description of Artificial Sequence: Synthetic oligonucleotide
  Sense strand starting at position 7 of SEQ ID NO: 917424
aggcaaggguguucugauu

SEQ ID NO: 1232449 - RNA, 19 nt, Artificial Sequence
  Description of Artificial Sequence: Synthetic oligonucleotide
  Antisense strand to SEQ ID NO: 1232448
aaucagaacacccuugccu

SEQ ID NO: 1232450 - RNA, 19 nt, Artificial Sequence
  Description of Artificial Sequence: Synthetic oligonucleotide
  Sense strand starting at position 13 of SEQ ID NO: 917424
ggguguucugauuguacag

SEQ ID NO: 1232451 - RNA, 19 nt, Artificial Sequence
  Description of Artificial Sequence: Synthetic oligonucleotide
  Antisense strand to SEQ ID NO: 1232450
cuguacaaucagaacaccc

SEQ ID NO: 1232452 - RNA, 19 nt, Artificial Sequence
  Description of Artificial Sequence: Synthetic oligonucleotide
  Sense strand starting at position 117 of SEQ ID NO: 917424
cggcaacacugauuccaua

SEQ ID NO: 1232453 - RNA, 19 nt, Artificial Sequence
  Description of Artificial Sequence: Synthetic oligonucleotide
  Antisense strand to SEQ ID NO: 1232452
uauggaaucaguguugccg

SEQ ID NO: 1232454 - RNA, 19 nt, Artificial Sequence
  Description of Artificial Sequence: Synthetic oligonucleotide
  Sense strand starting at position 226 of SEQ ID NO: 917424
gauggaguguggcucauuu

SEQ ID NO: 1232455 - RNA, 19 nt, Artificial Sequence
  Description of Artificial Sequence: Synthetic oligonucleotide
  Antisense strand to SEQ ID NO: 1232454
aaaugagccacacuccauc

SEQ ID NO: 1232456 - RNA, 19 nt, Artificial Sequence
  Description of Artificial Sequence: Synthetic oligonucleotide
  Sense strand starting at position 230 of SEQ ID NO: 917424
gaguguggcucauuuauug

SEQ ID NO: 1232457 - RNA, 19 nt, Artificial Sequence
  Description of Artificial Sequence: Synthetic oligonucleotide
  Antisense strand to SEQ ID NO: 1232456
caauaaaugagccacacuc

SEQ ID NO: 1232458 - RNA, 19 nt, Artificial Sequence
  Description of Artificial Sequence: Synthetic oligonucleotide
  Sense strand starting at position 464 of SEQ ID NO: 917424
cuaagauuuauacgacgcu

SEQ ID NO: 1232459 - RNA, 19 nt, Artificial Sequence
  Description of Artificial Sequence: Synthetic oligonucleotide
  Antisense strand to SEQ ID NO: 1232458
agcgucguauaaaucuuag

SEQ ID NO: 1232460 - RNA, 19 nt, Artificial Sequence
  Description of Artificial Sequence: Synthetic oligonucleotide
  Sense strand starting at position 470 of SEQ ID NO: 917424
uuuauacgacgcuaacauu

SEQ ID NO: 1232461 - RNA, 19 nt, Artificial Sequence
  Description of Artificial Sequence: Synthetic oligonucleotide
  Antisense strand to SEQ ID NO: 1232460
aauguuagcgucguauaaa

SEQ ID NO: 1232462 - RNA, 19 nt, Artificial Sequence
  Description of Artificial Sequence: Synthetic oligonucleotide
  Sense strand starting at position 635 of SEQ ID NO: 917424
auauauuaggaaggcuuua

SEQ ID NO: 1232463 - RNA, 19 nt, Artificial Sequence
  Description of Artificial Sequence: Synthetic oligonucleotide
  Antisense strand to SEQ ID NO: 1232462
uaaagccuuccuaauauau

SEQ ID NO: 1232464 - RNA, 19 nt, Artificial Sequence
  Description of Artificial Sequence: Synthetic oligonucleotide
  Sense strand starting at position 640 of SEQ ID NO: 917424
uuaggaaggcuuuaucuac

SEQ ID NO: 1232465 - RNA, 19 nt, Artificial Sequence
  Description of Artificial Sequence: Synthetic oligonucleotide
  Antisense strand to SEQ ID NO: 1232464
guagauaaagccuuccuaa

SEQ ID NO: 1232466 - RNA, 19 nt, Artificial Sequence
  Description of Artificial Sequence: Synthetic oligonucleotide
  Sense strand starting at position 647 of SEQ ID NO: 917424
ggcuuuaucuacguuauaa

SEQ ID NO: 1232467 - RNA, 19 nt, Artificial Sequence
  Description of Artificial Sequence: Synthetic oligonucleotide
  Antisense strand to SEQ ID NO: 1232466
uuauaacguagauaaagcc

SEQ ID NO: 1232468 - RNA, 19 nt, Artificial Sequence
  Description of Artificial Sequence: Synthetic oligonucleotide
  Sense strand starting at position 658 of SEQ ID NO: 917424
cguuauaaacuauggaagu

SEQ ID NO: 1232469 - RNA, 19 nt, Artificial Sequence
  Description of Artificial Sequence: Synthetic oligonucleotide
  Antisense strand to SEQ ID NO: 1232468
acuuccauaguuuauaacg

SEQ ID NO: 1232470 - RNA, 19 nt, Artificial Sequence
  Description of Artificial Sequence: Synthetic oligonucleotide
  Sense strand starting at position 845 of SEQ ID NO: 917424
gugaccuugucagcaauag

SEQ ID NO: 1232471 - RNA, 19 nt, Artificial Sequence
  Description of Artificial Sequence: Synthetic oligonucleotide
  Antisense strand to SEQ ID NO: 1232470
cuauugcugacaaggucac

SEQ ID NO: 1232472 - RNA, 19 nt, Artificial Sequence
  Description of Artificial Sequence: Synthetic oligonucleotide
  Sense strand starting at position 976 of SEQ ID NO: 917424
cccacagcucuguaucaua

SEQ ID NO: 1232473 - RNA, 19 nt, Artificial Sequence
  Description of Artificial Sequence: Synthetic oligonucleotide
  Antisense strand to SEQ ID NO: 1232472
uaugauacagagcuguggg

SEQ ID NO: 1232474 - RNA, 19 nt, Artificial Sequence
  Description of Artificial Sequence: Synthetic oligonucleotide
  Sense strand starting at position 1110 of SEQ ID NO: 917424
cuaggcuaugaauaaaguu

SEQ ID NO: 1232475 - RNA, 19 nt, Artificial Sequence
  Description of Artificial Sequence: Synthetic oligonucleotide
  Antisense strand to SEQ ID NO: 1232474
aacuuuauucauagccuag

SEQ ID NO: 1232476 - RNA, 19 nt, Artificial Sequence
  Description of Artificial Sequence: Synthetic oligonucleotide
  Sense strand starting at position 1153 of SEQ ID NO: 917424
aucacuccuuagguuagaa

SEQ ID NO: 1232477 - RNA, 19 nt, Artificial Sequence
  Description of Artificial Sequence: Synthetic oligonucleotide
  Antisense strand to SEQ ID NO: 1232476
uucuaaccuaaggagugau

SEQ ID NO: 1232478 - RNA, 19 nt, Artificial Sequence
  Description of Artificial Sequence: Synthetic oligonucleotide
  Sense strand starting at position 1207 of SEQ ID NO: 917424
cacagaucccugugaggaa

SEQ ID NO: 1232479 - RNA, 19 nt, Artificial Sequence
  Description of Artificial Sequence: Synthetic oligonucleotide
  Antisense strand to SEQ ID NO: 1232478
uuccucacagggaucugug

SEQ ID NO: 1232480 - RNA, 19 nt, Artificial Sequence
  Description of Artificial Sequence: Synthetic oligonucleotide
  Sense strand starting at position 1222 of SEQ ID NO: 917424
ggaaccauguacccuuauu

SEQ ID NO: 1232481 - RNA, 19 nt, Artificial Sequence
  Description of Artificial Sequence: Synthetic oligonucleotide
  Antisense strand to SEQ ID NO: 1232480
aauaaggguacaugguucc

SEQ ID NO: 1232482 - RNA, 19 nt, Artificial Sequence
  Description of Artificial Sequence: Synthetic oligonucleotide
  Sense strand starting at position 1257 of SEQ ID NO: 917424
ccuuuacuccuugguacuu

SEQ ID NO: 1232483 - RNA, 19 nt, Artificial Sequence
  Description of Artificial Sequence: Synthetic oligonucleotide
  Antisense strand to SEQ ID NO: 1232482
aaguaccaaggaguaaagg

SEQ ID NO: 1232484 - RNA, 19 nt, Artificial Sequence
  Description of Artificial Sequence: Synthetic oligonucleotide
  Sense strand starting at position 1496 of SEQ ID NO: 917424
uguauagucgcuugagaaa

SEQ ID NO: 1232485 - RNA, 19 nt, Artificial Sequence
  Description of Artificial Sequence: Synthetic oligonucleotide
  Antisense strand to SEQ ID NO: 1232484
uuucucaagcgacuauaca

SEQ ID NO: 1232486 - RNA, 19 nt, Artificial Sequence
  Description of Artificial Sequence: Synthetic oligonucleotide
  Sense strand starting at position 1623 of SEQ ID NO: 917424
cugugaugcccauaacgug

SEQ ID NO: 1232487 - RNA, 19 nt, Artificial Sequence
  Description of Artificial Sequence: Synthetic oligonucleotide
  Antisense strand to SEQ ID NO: 1232486
cacguuaugggcaucacag

SEQ ID NO: 1232488 - RNA, 19 nt, Artificial Sequence
  Description of Artificial Sequence: Synthetic oligonucleotide
  Sense strand starting at position 1791 of SEQ ID NO: 917424
cagagaaagcugugcacau

SEQ ID NO: 1232489 - RNA, 19 nt, Artificial Sequence
  Description of Artificial Sequence: Synthetic oligonucleotide
  Antisense strand to SEQ ID NO: 1232488
augugcacagcuuucucug

SEQ ID NO: 1232490 - RNA, 19 nt, Artificial Sequence
  Description of Artificial Sequence: Synthetic oligonucleotide
  Sense strand starting at position 1792 of SEQ ID NO: 917424
agagaaagcugugcacaua

SEQ ID NO: 1232491 - RNA, 19 nt, Artificial Sequence
  Description of Artificial Sequence: Synthetic oligonucleotide
  Antisense strand to SEQ ID NO: 1232490
uaugugcacagcuuucucu

SEQ ID NO: 1232492 - RNA, 19 nt, Artificial Sequence
  Description of Artificial Sequence: Synthetic oligonucleotide
  Sense strand starting at position 1815 of SEQ ID NO: 917424
agauguauuucuguuugca

SEQ ID NO: 1232493 - RNA, 19 nt, Artificial Sequence
  Description of Artificial Sequence: Synthetic oligonucleotide
  Antisense strand to SEQ ID NO: 1232492
ugcaaacagaaauacaucu

SEQ ID NO: 1232494 - RNA, 19 nt, Artificial Sequence
  Description of Artificial Sequence: Synthetic oligonucleotide
  Sense strand starting at position 1817 of SEQ ID NO: 917424
auguauuucuguuugcaag

SEQ ID NO: 1232495 - RNA, 19 nt, Artificial Sequence
  Description of Artificial Sequence: Synthetic oligonucleotide
  Antisense strand to SEQ ID NO: 1232494
cuugcaaacagaaauacau

SEQ ID NO: 1232496 - RNA, 19 nt, Artificial Sequence
  Description of Artificial Sequence: Synthetic oligonucleotide
  Sense strand starting at position 1818 of SEQ ID NO: 917424
uguauuucuguuugcaagu

SEQ ID NO: 1232497 - RNA, 19 nt, Artificial Sequence
  Description of Artificial Sequence: Synthetic oligonucleotide
  Antisense strand to SEQ ID NO: 1232496
acuugcaaacagaaauaca

SEQ ID NO: 1232498 - RNA, 19 nt, Artificial Sequence
  Description of Artificial Sequence: Synthetic oligonucleotide
  Sense strand starting at position 1819 of SEQ ID NO: 917424
guauuucuguuugcaagua

SEQ ID NO: 1232499 - RNA, 19 nt, Artificial Sequence
  Description of Artificial Sequence: Synthetic oligonucleotide
  Antisense strand to SEQ ID NO: 1232498
uacuugcaaacagaaauac

SEQ ID NO: 1232500 - RNA, 19 nt, Artificial Sequence
  Description of Artificial Sequence: Synthetic oligonucleotide
  Sense strand starting at position 2100 of SEQ ID NO: 917424
ccuacugucuuuguuugaa

SEQ ID NO: 1232501 - RNA, 19 nt, Artificial Sequence
  Description of Artificial Sequence: Synthetic oligonucleotide
  Antisense strand to SEQ ID NO: 1232500
uucaaacaaagacaguagg

SEQ ID NO: 1232502 - RNA, 19 nt, Artificial Sequence
  Description of Artificial Sequence: Synthetic oligonucleotide
  Sense strand starting at position 2406 of SEQ ID NO: 917424
caggaacccuaggauuaga

SEQ ID NO: 1232503 - RNA, 19 nt, Artificial Sequence
  Description of Artificial Sequence: Synthetic oligonucleotide
  Antisense strand to SEQ ID NO: 1232502
ucuaauccuaggguuccug

SEQ ID NO: 1232504 - RNA, 19 nt, Artificial Sequence
  Description of Artificial Sequence: Synthetic oligonucleotide
  Sense strand starting at position 2841 of SEQ ID NO: 917424
uuuaaagucugaguggaca

SEQ ID NO: 1232505 - RNA, 19 nt, Artificial Sequence
  Description of Artificial Sequence: Synthetic oligonucleotide
  Antisense strand to SEQ ID NO: 1232504
uguccacucagacuuuaaa

SEQ ID NO: 1232506 - RNA, 19 nt, Artificial Sequence
  Description of Artificial Sequence: Synthetic oligonucleotide
  Sense strand starting at position 3570 of SEQ ID NO: 917424
ucagaacuuccugggugau

SEQ ID NO: 1232507 - RNA, 19 nt, Artificial Sequence
  Description of Artificial Sequence: Synthetic oligonucleotide
  Antisense strand to SEQ ID NO: 1232506
aucacccaggaaguucuga

SEQ ID NO: 1232508 - RNA, 19 nt, Artificial Sequence
  Description of Artificial Sequence: Synthetic oligonucleotide
  Sense strand starting at position 3571 of SEQ ID NO: 917424
cagaacuuccugggugauc

SEQ ID NO: 1232509 - RNA, 19 nt, Artificial Sequence
  Description of Artificial Sequence: Synthetic oligonucleotide
  Antisense strand to SEQ ID NO: 1232508
gaucacccaggaaguucug

SEQ ID NO: 1232510 - RNA, 19 nt, Artificial Sequence
  Description of Artificial Sequence: Synthetic oligonucleotide
  Sense strand starting at position 3580 of SEQ ID NO: 917424
cugggugaucgucauucau

SEQ ID NO: 1232511 - RNA, 19 nt, Artificial Sequence
  Description of Artificial Sequence: Synthetic oligonucleotide
  Antisense strand to SEQ ID NO: 1232510
augaaugacgaucacccag

SEQ ID NO: 1232512 - RNA, 19 nt, Artificial Sequence
  Description of Artificial Sequence: Synthetic oligonucleotide
  Sense strand starting at position 3582 of SEQ ID NO: 917424
gggugaucgucauucauau

SEQ ID NO: 1232513 - RNA, 19 nt, Artificial Sequence
  Description of Artificial Sequence: Synthetic oligonucleotide
  Antisense strand to SEQ ID NO: 1232512
auaugaaugacgaucaccc

SEQ ID NO: 1232514 - RNA, 19 nt, Artificial Sequence
  Description of Artificial Sequence: Synthetic oligonucleotide
  Sense strand starting at position 3650 of SEQ ID NO: 917424
cuacaaugcagcugaguga

SEQ ID NO: 1232515 - RNA, 19 nt, Artificial Sequence
  Description of Artificial Sequence: Synthetic oligonucleotide
  Antisense strand to SEQ ID NO: 1232514
ucacucagcugcauuguag

SEQ ID NO: 1232516 - RNA, 19 nt, Artificial Sequence
  Description of Artificial Sequence: Synthetic oligonucleotide
  Sense strand starting at position 3736 of SEQ ID NO: 917424
ggucauugugacugggaga

SEQ ID NO: 1232517 - RNA, 19 nt, Artificial Sequence
  Description of Artificial Sequence: Synthetic oligonucleotide
  Antisense strand to SEQ ID NO: 1232516
ucucccagucacaaugacc

SEQ ID NO: 1232518 - RNA, 19 nt, Artificial Sequence
  Description of Artificial Sequence: Synthetic oligonucleotide
  Sense strand starting at position 3760 of SEQ ID NO: 917424
uccuguauguucccugaug

SEQ ID NO: 1232519 - RNA, 19 nt, Artificial Sequence
  Description of Artificial Sequence: Synthetic oligonucleotide
  Antisense strand to SEQ ID NO: 1232518
caucagggaacauacagga

SEQ ID NO: 1232520 - RNA, 19 nt, Artificial Sequence
  Description of Artificial Sequence: Synthetic oligonucleotide
  Sense strand starting at position 3771 of SEQ ID NO: 917424
cccugauguucccuuauuc

SEQ ID NO: 1232521 - RNA, 19 nt, Artificial Sequence
  Description of Artificial Sequence: Synthetic oligonucleotide
  Antisense strand to SEQ ID NO: 1232520
gaauaagggaacaucaggg

SEQ ID NO: 1232522 - RNA, 19 nt, Artificial Sequence
  Description of Artificial Sequence: Synthetic oligonucleotide
  Sense strand starting at position 3783 of SEQ ID NO: 917424
cuuauucugggcugaggaa

SEQ ID NO: 1232523 - RNA, 19 nt, Artificial Sequence
  Description of Artificial Sequence: Synthetic oligonucleotide
  Antisense strand to SEQ ID NO: 1232522
uuccucagcccagaauaag

SEQ ID NO: 1232524 - RNA, 19 nt, Artificial Sequence
  Description of Artificial Sequence: Synthetic oligonucleotide
  Sense strand starting at position 3784 of SEQ ID NO: 917424
uuauucugggcugaggaau

SEQ ID NO: 1232525 - RNA, 19 nt, Artificial Sequence
  Description of Artificial Sequence: Synthetic oligonucleotide
  Antisense strand to SEQ ID NO: 1232524
auuccucagcccagaauaa

SEQ ID NO: 1232526 - RNA, 19 nt, Artificial Sequence
  Description of Artificial Sequence: Synthetic oligonucleotide
  Sense strand starting at position 3843 of SEQ ID NO: 917424
auauauacgugucuacuca

SEQ ID NO: 1232527 - RNA, 19 nt, Artificial Sequence
  Description of Artificial Sequence: Synthetic oligonucleotide
  Antisense strand to SEQ ID NO: 1232526
ugaguagacacguauauau

SEQ ID NO: 1232528 - RNA, 19 nt, Artificial Sequence
  Description of Artificial Sequence: Synthetic oligonucleotide
  Sense strand starting at position 3843 of SEQ ID NO: 917425
auauauacgugucuacuca

SEQ ID NO: 1232529 - RNA, 19 nt, Artificial Sequence
  Description of Artificial Sequence: Synthetic oligonucleotide
  Antisense strand to SEQ ID NO: 1232528
ugaguagacacguauauau

SEQ ID NO: 1232530 - RNA, 19 nt, Artificial Sequence
  Description of Artificial Sequence: Synthetic oligonucleotide
  Sense strand starting at position 170 of SEQ ID NO: 917425
gagccacaugacuaguuau

SEQ ID NO: 1232531 - RNA, 19 nt, Artificial Sequence
  Description of Artificial Sequence: Synthetic oligonucleotide
  Antisense strand to SEQ ID NO: 1232530
auaacuagucauguggcuc

SEQ ID NO: 1232532 - RNA, 19 nt, Artificial Sequence
  Description of Artificial Sequence: Synthetic oligonucleotide
  Sense strand starting at position 208 of SEQ ID NO: 917425
caggucugaucccuugaga

SEQ ID NO: 1232533 - RNA, 19 nt, Artificial Sequence
  Description of Artificial Sequence: Synthetic oligonucleotide
  Antisense strand to SEQ ID NO: 1232532
ucucaagggaucagaccug

SEQ ID NO: 1232534 - RNA, 19 nt, Artificial Sequence
  Description of Artificial Sequence: Synthetic oligonucleotide
  Sense strand starting at position 414 of SEQ ID NO: 917425
gugauauaauuccuaaaug

SEQ ID NO: 1232535 - RNA, 19 nt, Artificial Sequence
  Description of Artificial Sequence: Synthetic oligonucleotide
  Antisense strand to SEQ ID NO: 1232534
cauuuaggaauuauaucac

SEQ ID NO: 1232536 - RNA, 19 nt, Artificial Sequence
  Description of Artificial Sequence: Synthetic oligonucleotide
  Sense strand starting at position 452 of SEQ ID NO: 917425
uuaggucuuguguauaaag

SEQ ID NO: 1232537 - RNA, 19 nt, Artificial Sequence
  Description of Artificial Sequence: Synthetic oligonucleotide
  Antisense strand to SEQ ID NO: 1232536
cuuuauacacaagaccuaa

SEQ ID NO: 1232538 - RNA, 19 nt, Artificial Sequence
  Description of Artificial Sequence: Synthetic oligonucleotide
  Sense strand starting at position 473 of SEQ ID NO: 917425
cugaguagaguugaguuau

SEQ ID NO: 1232539 - RNA, 19 nt, Artificial Sequence
  Description of Artificial Sequence: Synthetic oligonucleotide
  Antisense strand to SEQ ID NO: 1232538
auaacucaacucuacucag

SEQ ID NO: 1232540 - RNA, 19 nt, Artificial Sequence
  Description of Artificial Sequence: Synthetic oligonucleotide
  Sense strand starting at position 483 of SEQ ID NO: 917425
uugaguuaugcuuagacuu

SEQ ID NO: 1232541 - RNA, 19 nt, Artificial Sequence
  Description of Artificial Sequence: Synthetic oligonucleotide
  Antisense strand to SEQ ID NO: 1232540
aagucuaagcauaacucaa

SEQ ID NO: 1232542 - RNA, 19 nt, Artificial Sequence
  Description of Artificial Sequence: Synthetic oligonucleotide
  Sense strand starting at position 493 of SEQ ID NO: 917425
cuuagacuuguguauaaag

SEQ ID NO: 1232543 - RNA, 19 nt, Artificial Sequence
  Description of Artificial Sequence: Synthetic oligonucleotide
  Antisense strand to SEQ ID NO: 1232542
cuuuauacacaagucuaag

SEQ ID NO: 1232544 - RNA, 19 nt, Artificial Sequence
  Description of Artificial Sequence: Synthetic oligonucleotide
  Sense strand starting at position 495 of SEQ ID NO: 917425
uagacuuguguauaaagcu

SEQ ID NO: 1232545 - RNA, 19 nt, Artificial Sequence
  Description of Artificial Sequence: Synthetic oligonucleotide
  Antisense strand to SEQ ID NO: 1232544
agcuuuauacacaagucua

SEQ ID NO: 1232546 - RNA, 19 nt, Artificial Sequence
  Description of Artificial Sequence: Synthetic oligonucleotide
  Sense strand starting at position 507 of SEQ ID NO: 917425
uaaagcucugaguagaguu

SEQ ID NO: 1232547 - RNA, 19 nt, Artificial Sequence
  Description of Artificial Sequence: Synthetic oligonucleotide
  Antisense strand to SEQ ID NO: 1232546
aacucuacucagagcuuua

SEQ ID NO: 1232548 - RNA, 19 nt, Artificial Sequence
  Description of Artificial Sequence: Synthetic oligonucleotide
  Sense strand starting at position 549 of SEQ ID NO: 917425
gccguaauacugcuugguu

SEQ ID NO: 1232549 - RNA, 19 nt, Artificial Sequence
  Description of Artificial Sequence: Synthetic oligonucleotide
  Antisense strand to SEQ ID NO: 1232548
aaccaagcaguauuacggc

SEQ ID NO: 1232550 - RNA, 19 nt, Artificial Sequence
  Description of Artificial Sequence: Synthetic oligonucleotide
  Sense strand starting at position 573 of SEQ ID NO: 917425
agaauucuggugugaugau

SEQ ID NO: 1232551 - RNA, 19 nt, Artificial Sequence
  Description of Artificial Sequence: Synthetic oligonucleotide
  Antisense strand to SEQ ID NO: 1232550
aucaucacaccagaauucu

SEQ ID NO: 1232552 - RNA, 19 nt, Artificial Sequence
  Description of Artificial Sequence: Synthetic oligonucleotide
  Sense strand starting at position 580 of SEQ ID NO: 917425
uggugugaugauuacagau

SEQ ID NO: 1232553 - RNA, 19 nt, Artificial Sequence
  Description of Artificial Sequence: Synthetic oligonucleotide
  Antisense strand to SEQ ID NO: 1232552
aucuguaaucaucacacca

SEQ ID NO: 1232554 - RNA, 19 nt, Artificial Sequence
  Description of Artificial Sequence: Synthetic oligonucleotide
  Sense strand starting at position 745 of SEQ ID NO: 917425
uugcucauauacuuggaga

SEQ ID NO: 1232555 - RNA, 19 nt, Artificial Sequence
  Description of Artificial Sequence: Synthetic oligonucleotide
  Antisense strand to SEQ ID NO: 1232554
ucuccaaguauaugagcaa

SEQ ID NO: 1232556 - RNA, 19 nt, Artificial Sequence
  Description of Artificial Sequence: Synthetic oligonucleotide
  Sense strand starting at position 948 of SEQ ID NO: 917425
auaaacuggucucuaaagu

SEQ ID NO: 1232557 - RNA, 19 nt, Artificial Sequence
  Description of Artificial Sequence: Synthetic oligonucleotide
  Antisense strand to SEQ ID NO: 1232556
acuuuagagaccaguuuau

SEQ ID NO: 1232558 - RNA, 19 nt, Artificial Sequence
  Description of Artificial Sequence: Synthetic oligonucleotide
  Sense strand starting at position 974 of SEQ ID NO: 917425
ugagaaugagucugaauuc

SEQ ID NO: 1232559 - RNA, 19 nt, Artificial Sequence
  Description of Artificial Sequence: Synthetic oligonucleotide
  Antisense strand to SEQ ID NO: 1232558
gaauucagacucauucuca

SEQ ID NO: 1232560 - RNA, 19 nt, Artificial Sequence
  Description of Artificial Sequence: Synthetic oligonucleotide
  Sense strand starting at position 1046 of SEQ ID NO: 917425
ggaggucucgcuggaagag

SEQ ID NO: 1232561 - RNA, 19 nt, Artificial Sequence
  Description of Artificial Sequence: Synthetic oligonucleotide
  Antisense strand to SEQ ID NO: 1232560
cucuuccagcgagaccucc

SEQ ID NO: 1232562 - RNA, 19 nt, Artificial Sequence
  Description of Artificial Sequence: Synthetic oligonucleotide
  Sense strand starting at position 1047 of SEQ ID NO: 917425
gaggucucgcuggaagaga

SEQ ID NO: 1232563 - RNA, 19 nt, Artificial Sequence
  Description of Artificial Sequence: Synthetic oligonucleotide
  Antisense strand to SEQ ID NO: 1232562
ucucuuccagcgagaccuc

SEQ ID NO: 1232564 - RNA, 19 nt, Artificial Sequence
  Description of Artificial Sequence: Synthetic oligonucleotide
  Sense strand starting at position 1089 of SEQ ID NO: 917425
gagggaauguggguccaaa

SEQ ID NO: 1232565 - RNA, 19 nt, Artificial Sequence
  Description of Artificial Sequence: Synthetic oligonucleotide
  Antisense strand to SEQ ID NO: 1232564
uuuggacccacauucccuc

SEQ ID NO: 1232566 - RNA, 19 nt, Artificial Sequence
  Description of Artificial Sequence: Synthetic oligonucleotide
  Sense strand starting at position 1142 of SEQ ID NO: 917425
cagugaaaccgucacaaag

SEQ ID NO: 1232567 - RNA, 19 nt, Artificial Sequence
  Description of Artificial Sequence: Synthetic oligonucleotide
  Antisense strand to SEQ ID NO: 1232566
cuuugugacgguuucacug

SEQ ID NO: 1232568 - RNA, 19 nt, Artificial Sequence
  Description of Artificial Sequence: Synthetic oligonucleotide
  Sense strand starting at position 1173 of SEQ ID NO: 917425
aaacuugauccuggugcaa

SEQ ID NO: 1232569 - RNA, 19 nt, Artificial Sequence
  Description of Artificial Sequence: Synthetic oligonucleotide
  Antisense strand to SEQ ID NO: 1232568
uugcaccaggaucaaguuu

SEQ ID NO: 1232570 - RNA, 19 nt, Artificial Sequence
  Description of Artificial Sequence: Synthetic oligonucleotide
  Sense strand starting at position 1317 of SEQ ID NO: 917425
ugcaacguucuagaacaua

SEQ ID NO: 1232571 - RNA, 19 nt, Artificial Sequence
  Description of Artificial Sequence: Synthetic oligonucleotide
  Antisense strand to SEQ ID NO: 1232570
uauguucuagaacguugca

SEQ ID NO: 1232572 - RNA, 19 nt, Artificial Sequence
  Description of Artificial Sequence: Synthetic oligonucleotide
  Sense strand starting at position 2443 of SEQ ID NO: 917425
ccggguaugguccaccaaa

SEQ ID NO: 1232573 - RNA, 19 nt, Artificial Sequence
  Description of Artificial Sequence: Synthetic oligonucleotide
  Antisense strand to SEQ ID NO: 1232572
uuugguggaccauacccgg

SEQ ID NO: 1232574 - RNA, 19 nt, Artificial Sequence
  Description of Artificial Sequence: Synthetic oligonucleotide
  Sense strand starting at position 2463 of SEQ ID NO: 917425
gagccuucucuuuaagggu

SEQ ID NO: 1232575 - RNA, 19 nt, Artificial Sequence
  Description of Artificial Sequence: Synthetic oligonucleotide
  Antisense strand to SEQ ID NO: 1232574
acccuuaaagagaaggcuc

SEQ ID NO: 1232576 - RNA, 19 nt, Artificial Sequence
  Description of Artificial Sequence: Synthetic oligonucleotide
  Sense strand starting at position 2729 of SEQ ID NO: 917425
gucggauuuggugguuacu

SEQ ID NO: 1232577 - RNA, 19 nt, Artificial Sequence
  Description of Artificial Sequence: Synthetic oligonucleotide
  Antisense strand to SEQ ID NO: 1232576
aguaaccaccaaauccgac

SEQ ID NO: 1232578 - RNA, 19 nt, Artificial Sequence
  Description of Artificial Sequence: Synthetic oligonucleotide
  Sense strand starting at position 2739 of SEQ ID NO: 917425
gugguuacugucuaaaucu

SEQ ID NO: 1232579 - RNA, 19 nt, Artificial Sequence
  Description of Artificial Sequence: Synthetic oligonucleotide
  Antisense strand to SEQ ID NO: 1232578
agauuuagacaguaaccac

SEQ ID NO: 1232580 - RNA, 19 nt, Artificial Sequence
  Description of Artificial Sequence: Synthetic oligonucleotide
  Sense strand starting at position 2838 of SEQ ID NO: 917425
gagugucucccagacuaaa

SEQ ID NO: 1232581 - RNA, 19 nt, Artificial Sequence
  Description of Artificial Sequence: Synthetic oligonucleotide
  Antisense strand to SEQ ID NO: 1232580
uuuagucugggagacacuc

SEQ ID NO: 1232582 - RNA, 19 nt, Artificial Sequence
  Description of Artificial Sequence: Synthetic oligonucleotide
  Sense strand starting at position 2926 of SEQ ID NO: 917425
gcucaagagcucuacagau

SEQ ID NO: 1232583 - RNA, 19 nt, Artificial Sequence
  Description of Artificial Sequence: Synthetic oligonucleotide
  Antisense strand to SEQ ID NO: 1232582
aucuguagagcucuugagc

SEQ ID NO: 1232584 - RNA, 19 nt, Artificial Sequence
  Description of Artificial Sequence: Synthetic oligonucleotide
  Sense strand starting at position 3029 of SEQ ID NO: 917425
ggacauucagccugggaga

SEQ ID NO: 1232585 - RNA, 19 nt, Artificial Sequence
  Description of Artificial Sequence: Synthetic oligonucleotide
  Antisense strand to SEQ ID NO: 1232584
ucucccaggcugaaugucc

SEQ ID NO: 1232586 - RNA, 19 nt, Artificial Sequence
  Description of Artificial Sequence: Synthetic oligonucleotide
  Sense strand starting at position 3212 of SEQ ID NO: 917425
uuucccaugucauuggaga

SEQ ID NO: 1232587 - RNA, 19 nt, Artificial Sequence
  Description of Artificial Sequence: Synthetic oligonucleotide
  Antisense strand to SEQ ID NO: 1232586
ucuccaaugacaugggaaa

SEQ ID NO: 1232588 - RNA, 19 nt, Artificial Sequence
  Description of Artificial Sequence: Synthetic oligonucleotide
  Sense strand starting at position 3214 of SEQ ID NO: 917425
ucccaugucauuggagagu

SEQ ID NO: 1232589 - RNA, 19 nt, Artificial Sequence
  Description of Artificial Sequence: Synthetic oligonucleotide
  Antisense strand to SEQ ID NO: 1232588
acucuccaaugacauggga

SEQ ID NO: 1232590 - RNA, 19 nt, Artificial Sequence
  Description of Artificial Sequence: Synthetic oligonucleotide
  Sense strand starting at position 3338 of SEQ ID NO: 917425
ugcuguaaccuagaagaca

SEQ ID NO: 1232591 - RNA, 19 nt, Artificial Sequence
  Description of Artificial Sequence: Synthetic oligonucleotide
  Antisense strand to SEQ ID NO: 1232590
ugucuucuagguuacagca

SEQ ID NO: 1232592 - RNA, 19 nt, Artificial Sequence
  Description of Artificial Sequence: Synthetic oligonucleotide
  Sense strand starting at position 3364 of SEQ ID NO: 917425
cuaggaucauuaguagagu

SEQ ID NO: 1232593 - RNA, 19 nt, Artificial Sequence
  Description of Artificial Sequence: Synthetic oligonucleotide
  Antisense strand to SEQ ID NO: 1232592
acucuacuaaugauccuag

SEQ ID NO: 1232594 - RNA, 19 nt, Artificial Sequence
  Description of Artificial Sequence: Synthetic oligonucleotide
  Sense strand starting at position 3551 of SEQ ID NO: 917425
ggauuccuaccucagugau

SEQ ID NO: 1232595 - RNA, 19 nt, Artificial Sequence
  Description of Artificial Sequence: Synthetic oligonucleotide
  Antisense strand to SEQ ID NO: 1232594
aucacugagguaggaaucc

SEQ ID NO: 1232596 - RNA, 19 nt, Artificial Sequence
  Description of Artificial Sequence: Synthetic oligonucleotide
  Sense strand starting at position 3599 of SEQ ID NO: 917425
ccagaagguuccuuuaccu

SEQ ID NO: 1232597 - RNA, 19 nt, Artificial Sequence
  Description of Artificial Sequence: Synthetic oligonucleotide
  Antisense strand to SEQ ID NO: 1232596
agguaaaggaaccuucugg

SEQ ID NO: 1232598 - RNA, 19 nt, Artificial Sequence
  Description of Artificial Sequence: Synthetic oligonucleotide
  Sense strand starting at position 3639 of SEQ ID NO: 917425
guccaaauaccaggagacu

SEQ ID NO: 1232599 - RNA, 19 nt, Artificial Sequence
  Description of Artificial Sequence: Synthetic oligonucleotide
  Antisense strand to SEQ ID NO: 1232598
agucuccugguauuuggac

SEQ ID NO: 1232600 - RNA, 19 nt, Artificial Sequence
  Description of Artificial Sequence: Synthetic oligonucleotide
  Sense strand starting at position 3690 of SEQ ID NO: 917425
ggcucugagcgacauuaag

SEQ ID NO: 1232601 - RNA, 19 nt, Artificial Sequence
  Description of Artificial Sequence: Synthetic oligonucleotide
  Antisense strand to SEQ ID NO: 1232600
cuuaaugucgcucagagcc

SEQ ID NO: 1232602 - RNA, 19 nt, Artificial Sequence
  Description of Artificial Sequence: Synthetic oligonucleotide
  Sense strand starting at position 3756 of SEQ ID NO: 917425
gugaguacaguucagaagu

SEQ ID NO: 1232603 - RNA, 19 nt, Artificial Sequence
  Description of Artificial Sequence: Synthetic oligonucleotide
  Antisense strand to SEQ ID NO: 1232602
acuucugaacuguacucac

SEQ ID NO: 1232604 - RNA, 19 nt, Artificial Sequence
  Description of Artificial Sequence: Synthetic oligonucleotide
  Sense strand starting at position 3767 of SEQ ID NO: 917425
ucagaaguguucuuaacug

SEQ ID NO: 1232605 - RNA, 19 nt, Artificial Sequence
  Description of Artificial Sequence: Synthetic oligonucleotide
  Antisense strand to SEQ ID NO: 1232604
caguuaagaacacuucuga

SEQ ID NO: 1232606 - RNA, 19 nt, Artificial Sequence
  Description of Artificial Sequence: Synthetic oligonucleotide
  Sense strand starting at position 3771 of SEQ ID NO: 917425
aaguguucuuaacugagag

SEQ ID NO: 1232607 - RNA, 19 nt, Artificial Sequence
  Description of Artificial Sequence: Synthetic oligonucleotide
  Antisense strand to SEQ ID NO: 1232606
cucucaguuaagaacacuu

SEQ ID NO: 1232608 - RNA, 19 nt, Artificial Sequence
  Description of Artificial Sequence: Synthetic oligonucleotide
  Sense strand starting at position 3772 of SEQ ID NO: 917426
aguguucuuaacugagaga

SEQ ID NO: 1232609 - RNA, 19 nt, Artificial Sequence
  Description of Artificial Sequence: Synthetic oligonucleotide
  Antisense strand to SEQ ID NO: 1232608
ucucucaguuaagaacacu

SEQ ID NO: 1232610 - RNA, 19 nt, Artificial Sequence
  Description of Artificial Sequence: Synthetic oligonucleotide
  Sense strand starting at position 74 of SEQ ID NO: 917426
gaagcugcuccugagaauc

SEQ ID NO: 1232611 - RNA, 19 nt, Artificial Sequence
  Description of Artificial Sequence: Synthetic oligonucleotide
  Antisense strand to SEQ ID NO: 1232610
gauucucaggagcagcuuc

SEQ ID NO: 1232612 - RNA, 19 nt, Artificial Sequence
  Description of Artificial Sequence: Synthetic oligonucleotide
  Sense strand starting at position 113 of SEQ ID NO: 917426
ucagaaucuugaucucaug

SEQ ID NO: 1232613 - RNA, 19 nt, Artificial Sequence
  Description of Artificial Sequence: Synthetic oligonucleotide
  Antisense strand to SEQ ID NO: 1232612
caugagaucaagauucuga

SEQ ID NO: 1232614 - RNA, 19 nt, Artificial Sequence
  Description of Artificial Sequence: Synthetic oligonucleotide
  Sense strand starting at position 151 of SEQ ID NO: 917426
cuugcauuugaguguagua

SEQ ID NO: 1232615 - RNA, 19 nt, Artificial Sequence
  Description of Artificial Sequence: Synthetic oligonucleotide
  Antisense strand to SEQ ID NO: 1232614
uacuacacucaaaugcaag

SEQ ID NO: 1232616 - RNA, 19 nt, Artificial Sequence
  Description of Artificial Sequence: Synthetic oligonucleotide
  Sense strand starting at position 207 of SEQ ID NO: 917426
uuacucuaucgaggaaggu

SEQ ID NO: 1232617 - RNA, 19 nt, Artificial Sequence
  Description of Artificial Sequence: Synthetic oligonucleotide
  Antisense strand to SEQ ID NO: 1232616
accuuccucgauagaguaa

SEQ ID NO: 1232618 - RNA, 19 nt, Artificial Sequence
  Description of Artificial Sequence: Synthetic oligonucleotide
  Sense strand starting at position 227 of SEQ ID NO: 917426
acauguauuucugagauca

SEQ ID NO: 1232619 - RNA, 19 nt, Artificial Sequence
  Description of Artificial Sequence: Synthetic oligonucleotide
  Antisense strand to SEQ ID NO: 1232618
ugaucucagaaauacaugu

SEQ ID NO: 1232620 - RNA, 19 nt, Artificial Sequence
  Description of Artificial Sequence: Synthetic oligonucleotide
  Sense strand starting at position 229 of SEQ ID NO: 917426
auguauuucugagaucaca

SEQ ID NO: 1232621 - RNA, 19 nt, Artificial Sequence
  Description of Artificial Sequence: Synthetic oligonucleotide
  Antisense strand to SEQ ID NO: 1232620
ugugaucucagaaauacau

SEQ ID NO: 1232622 - RNA, 19 nt, Artificial Sequence
  Description of Artificial Sequence: Synthetic oligonucleotide
  Sense strand starting at position 242 of SEQ ID NO: 917426
aucacauuccuaggaaugu

SEQ ID NO: 1232623 - RNA, 19 nt, Artificial Sequence
  Description of Artificial Sequence: Synthetic oligonucleotide
  Antisense strand to SEQ ID NO: 1232622
acauuccuaggaaugugau

SEQ ID NO: 1232624 - RNA, 19 nt, Artificial Sequence
  Description of Artificial Sequence: Synthetic oligonucleotide
  Sense strand starting at position 259 of SEQ ID NO: 917426
guugacugucugcagagaa

SEQ ID NO: 1232625 - RNA, 19 nt, Artificial Sequence
  Description of Artificial Sequence: Synthetic oligonucleotide
  Antisense strand to SEQ ID NO: 1232624
uucucugcagacagucaac

SEQ ID NO: 1232626 - RNA, 19 nt, Artificial Sequence
  Description of Artificial Sequence: Synthetic oligonucleotide
  Sense strand starting at position 408 of SEQ ID NO: 917426
agaguaaguuggcuugaag

SEQ ID NO: 1232627 - RNA, 19 nt, Artificial Sequence
  Description of Artificial Sequence: Synthetic oligonucleotide
  Antisense strand to SEQ ID NO: 1232626
cuucaagccaacuuacucu

SEQ ID NO: 1232628 - RNA, 19 nt, Artificial Sequence
  Description of Artificial Sequence: Synthetic oligonucleotide
  Sense strand starting at position 411 of SEQ ID NO: 917426
guaaguuggcuugaaguga

SEQ ID NO: 1232629 - RNA, 19 nt, Artificial Sequence
  Description of Artificial Sequence: Synthetic oligonucleotide
  Antisense strand to SEQ ID NO: 1232628
ucacuucaagccaacuuac

SEQ ID NO: 1232630 - RNA, 19 nt, Artificial Sequence
  Description of Artificial Sequence: Synthetic oligonucleotide
  Sense strand starting at position 415 of SEQ ID NO: 917426
guuggcuugaagugaauuu

SEQ ID NO: 1232631 - RNA, 19 nt, Artificial Sequence
  Description of Artificial Sequence: Synthetic oligonucleotide
  Antisense strand to SEQ ID NO: 1232630
aaauucacuucaagccaac

SEQ ID NO: 1232632 - RNA, 19 nt, Artificial Sequence
  Description of Artificial Sequence: Synthetic oligonucleotide
  Sense strand starting at position 648 of SEQ ID NO: 917426
uuauauaugagcgagcaga

SEQ ID NO: 1232633 - RNA, 19 nt, Artificial Sequence
  Description of Artificial Sequence: Synthetic oligonucleotide
  Antisense strand to SEQ ID NO: 1232632
ucugcucgcucauauauaa

SEQ ID NO: 1232634 - RNA, 19 nt, Artificial Sequence
  Description of Artificial Sequence: Synthetic oligonucleotide
  Sense strand starting at position 866 of SEQ ID NO: 917426
gcugaauuccuagauccua

SEQ ID NO: 1232635 - RNA, 19 nt, Artificial Sequence
  Description of Artificial Sequence: Synthetic oligonucleotide
  Antisense strand to SEQ ID NO: 1232634
uaggaucuaggaauucagc

SEQ ID NO: 1232636 - RNA, 19 nt, Artificial Sequence
  Description of Artificial Sequence: Synthetic oligonucleotide
  Sense strand starting at position 874 of SEQ ID NO: 917426
ccuagauccuagucuagga

SEQ ID NO: 1232637 - RNA, 19 nt, Artificial Sequence
  Description of Artificial Sequence: Synthetic oligonucleotide
  Antisense strand to SEQ ID NO: 1232636
uccuagacuaggaucuagg

SEQ ID NO: 1232638 - RNA, 19 nt, Artificial Sequence
  Description of Artificial Sequence: Synthetic oligonucleotide
  Sense strand starting at position 997 of SEQ ID NO: 917426
ugaccuggcauucgaaaga

SEQ ID NO: 1232639 - RNA, 19 nt, Artificial Sequence
  Description of Artificial Sequence: Synthetic oligonucleotide
  Antisense strand to SEQ ID NO: 1232638
ucuuucgaaugccagguca

SEQ ID NO: 1232640 - RNA, 19 nt, Artificial Sequence
  Description of Artificial Sequence: Synthetic oligonucleotide
  Sense strand starting at position 1002 of SEQ ID NO: 917426
uggcauucgaaagacucau

SEQ ID NO: 1232641 - RNA, 19 nt, Artificial Sequence
  Description of Artificial Sequence: Synthetic oligonucleotide
  Antisense strand to SEQ ID NO: 1232640
augagucuuucgaaugcca

SEQ ID NO: 1232642 - RNA, 19 nt, Artificial Sequence
  Description of Artificial Sequence: Synthetic oligonucleotide
  Sense strand starting at position 1059 of SEQ ID NO: 917426
uagaaauaagcuggcagau

SEQ ID NO: 1232643 - RNA, 19 nt, Artificial Sequence
  Description of Artificial Sequence: Synthetic oligonucleotide
  Antisense strand to SEQ ID NO: 1232642
aucugccagcuuauuucua

SEQ ID NO: 1232644 - RNA, 19 nt, Artificial Sequence
  Description of Artificial Sequence: Synthetic oligonucleotide
  Sense strand starting at position 1352 of SEQ ID NO: 917426
gggugugucaaaugaaacu

SEQ ID NO: 1232645 - RNA, 19 nt, Artificial Sequence
  Description of Artificial Sequence: Synthetic oligonucleotide
  Antisense strand to SEQ ID NO: 1232644
aguuucauuugacacaccc

SEQ ID NO: 1232646 - RNA, 19 nt, Artificial Sequence
  Description of Artificial Sequence: Synthetic oligonucleotide
  Sense strand starting at position 1368 of SEQ ID NO: 917426
acugaaacauugccaugaa

SEQ ID NO: 1232647 - RNA, 19 nt, Artificial Sequence
  Description of Artificial Sequence: Synthetic oligonucleotide
  Antisense strand to SEQ ID NO: 1232646
uucauggcaauguuucagu

SEQ ID NO: 1232648 - RNA, 19 nt, Artificial Sequence
  Description of Artificial Sequence: Synthetic oligonucleotide
  Sense strand starting at position 1457 of SEQ ID NO: 917426
cacagaccuguccagugau

SEQ ID NO: 1232649 - RNA, 19 nt, Artificial Sequence
  Description of Artificial Sequence: Synthetic oligonucleotide
  Antisense strand to SEQ ID NO: 1232648
aucacuggacaggucugug

SEQ ID NO: 1232650 - RNA, 19 nt, Artificial Sequence
  Description of Artificial Sequence: Synthetic oligonucleotide
  Sense strand starting at position 1460 of SEQ ID NO: 917426
agaccuguccagugaucac

SEQ ID NO: 1232651 - RNA, 19 nt, Artificial Sequence
  Description of Artificial Sequence: Synthetic oligonucleotide
  Antisense strand to SEQ ID NO: 1232650
gugaucacuggacaggucu

SEQ ID NO: 1232652 - RNA, 19 nt, Artificial Sequence
  Description of Artificial Sequence: Synthetic oligonucleotide
  Sense strand starting at position 2076 of SEQ ID NO: 917426
gagagaugcauugagcugu

SEQ ID NO: 1232653 - RNA, 19 nt, Artificial Sequence
  Description of Artificial Sequence: Synthetic oligonucleotide
  Antisense strand to SEQ ID NO: 1232652
acagcucaaugcaucucuc

SEQ ID NO: 1232654 - RNA, 19 nt, Artificial Sequence
  Description of Artificial Sequence: Synthetic oligonucleotide
  Sense strand starting at position 2159 of SEQ ID NO: 917426
uagaaauacucacuguggu

SEQ ID NO: 1232655 - RNA, 19 nt, Artificial Sequence
  Description of Artificial Sequence: Synthetic oligonucleotide
  Antisense strand to SEQ ID NO: 1232654
accacagugaguauuucua

SEQ ID NO: 1232656 - RNA, 19 nt, Artificial Sequence
  Description of Artificial Sequence: Synthetic oligonucleotide
  Sense strand starting at position 2338 of SEQ ID NO: 917426
agcugugcugugucuauca

SEQ ID NO: 1232657 - RNA, 19 nt, Artificial Sequence
  Description of Artificial Sequence: Synthetic oligonucleotide
  Antisense strand to SEQ ID NO: 1232656
ugauagacacagcacagcu

SEQ ID NO: 1232658 - RNA, 19 nt, Artificial Sequence
  Description of Artificial Sequence: Synthetic oligonucleotide
  Sense strand starting at position 2346 of SEQ ID NO: 917426
ugugucuaucaggaauaau

SEQ ID NO: 1232659 - RNA, 19 nt, Artificial Sequence
  Description of Artificial Sequence: Synthetic oligonucleotide
  Antisense strand to SEQ ID NO: 1232658
auuauuccugauagacaca

SEQ ID NO: 1232660 - RNA, 19 nt, Artificial Sequence
  Description of Artificial Sequence: Synthetic oligonucleotide
  Sense strand starting at position 2565 of SEQ ID NO: 917426
ugagaauaccuaugugaau

SEQ ID NO: 1232661 - RNA, 19 nt, Artificial Sequence
  Description of Artificial Sequence: Synthetic oligonucleotide
  Antisense strand to SEQ ID NO: 1232660
auucacauagguauucuca

SEQ ID NO: 1232662 - RNA, 19 nt, Artificial Sequence
  Description of Artificial Sequence: Synthetic oligonucleotide
  Sense strand starting at position 2566 of SEQ ID NO: 917426
gagaauaccuaugugaauu

SEQ ID NO: 1232663 - RNA, 19 nt, Artificial Sequence
  Description of Artificial Sequence: Synthetic oligonucleotide
  Antisense strand to SEQ ID NO: 1232662
aauucacauagguauucuc

SEQ ID NO: 1232664 - RNA, 19 nt, Artificial Sequence
  Description of Artificial Sequence: Synthetic oligonucleotide
  Sense strand starting at position 2607 of SEQ ID NO: 917426
uuguaccucgaauaucaga

SEQ ID NO: 1232665 - RNA, 19 nt, Artificial Sequence
  Description of Artificial Sequence: Synthetic oligonucleotide
  Antisense strand to SEQ ID NO: 1232664
ucugauauucgagguacaa

SEQ ID NO: 1232666 - RNA, 19 nt, Artificial Sequence
  Description of Artificial Sequence: Synthetic oligonucleotide
  Sense strand starting at position 2618 of SEQ ID NO: 917426
auaucagaauucuugugau

SEQ ID NO: 1232667 - RNA, 19 nt, Artificial Sequence
  Description of Artificial Sequence: Synthetic oligonucleotide
  Antisense strand to SEQ ID NO: 1232666
aucacaagaauucugauau

SEQ ID NO: 1232668 - RNA, 19 nt, Artificial Sequence
  Description of Artificial Sequence: Synthetic oligonucleotide
  Sense strand starting at position 2693 of SEQ ID NO: 917426
guacucuuccaaggaagag

SEQ ID NO: 1232669 - RNA, 19 nt, Artificial Sequence
  Description of Artificial Sequence: Synthetic oligonucleotide
  Antisense strand to SEQ ID NO: 1232668
cucuuccuuggaagaguac

SEQ ID NO: 1232670 - RNA, 19 nt, Artificial Sequence
  Description of Artificial Sequence: Synthetic oligonucleotide
  Sense strand starting at position 2858 of SEQ ID NO: 917426
gagucacuuccuggacuca

SEQ ID NO: 1232671 - RNA, 19 nt, Artificial Sequence
  Description of Artificial Sequence: Synthetic oligonucleotide
  Antisense strand to SEQ ID NO: 1232670
ugaguccaggaagugacuc

SEQ ID NO: 1232672 - RNA, 19 nt, Artificial Sequence
  Description of Artificial Sequence: Synthetic oligonucleotide
  Sense strand starting at position 3059 of SEQ ID NO: 917426
cuuggaugaccuugguaca

SEQ ID NO: 1232673 - RNA, 19 nt, Artificial Sequence
  Description of Artificial Sequence: Synthetic oligonucleotide
  Antisense strand to SEQ ID NO: 1232672
uguaccaaggucauccaag

SEQ ID NO: 1232674 - RNA, 19 nt, Artificial Sequence
  Description of Artificial Sequence: Synthetic oligonucleotide
  Sense strand starting at position 3060 of SEQ ID NO: 917426
uuggaugaccuugguacau

SEQ ID NO: 1232675 - RNA, 19 nt, Artificial Sequence
  Description of Artificial Sequence: Synthetic oligonucleotide
  Antisense strand to SEQ ID NO: 1232674
auguaccaaggucauccaa

SEQ ID NO: 1232676 - RNA, 19 nt, Artificial Sequence
  Description of Artificial Sequence: Synthetic oligonucleotide
  Sense strand starting at position 3243 of SEQ ID NO: 917426
ugaacaaaucccugucaug

SEQ ID NO: 1232677 - RNA, 19 nt, Artificial Sequence
  Description of Artificial Sequence: Synthetic oligonucleotide
  Antisense strand to SEQ ID NO: 1232676
caugacagggauuuguuca

SEQ ID NO: 1232678 - RNA, 19 nt, Artificial Sequence
  Description of Artificial Sequence: Synthetic oligonucleotide
  Sense strand starting at position 3377 of SEQ ID NO: 917426
ggagcagaaucugcuuuga

SEQ ID NO: 1232679 - RNA, 19 nt, Artificial Sequence
  Description of Artificial Sequence: Synthetic oligonucleotide
  Antisense strand to SEQ ID NO: 1232678
ucaaagcagauucugcucc

SEQ ID NO: 1232680 - RNA, 19 nt, Artificial Sequence
  Description of Artificial Sequence: Synthetic oligonucleotide
  Sense strand starting at position 3738 of SEQ ID NO: 917426
uaaaucagucauugggcau

SEQ ID NO: 1232681 - RNA, 19 nt, Artificial Sequence
  Description of Artificial Sequence: Synthetic oligonucleotide
  Antisense strand to SEQ ID NO: 1232680
augcccaaugacugauuua

SEQ ID NO: 1232682 - RNA, 19 nt, Artificial Sequence
  Description of Artificial Sequence: Synthetic oligonucleotide
  Sense strand starting at position 3745 of SEQ ID NO: 917426
gucauugggcaugacuuaa

SEQ ID NO: 1232683 - RNA, 19 nt, Artificial Sequence
  Description of Artificial Sequence: Synthetic oligonucleotide
  Antisense strand to SEQ ID NO: 1232682
uuaagucaugcccaaugac

SEQ ID NO: 1232684 - RNA, 19 nt, Artificial Sequence
  Description of Artificial Sequence: Synthetic oligonucleotide
  Sense strand starting at position 3810 of SEQ ID NO: 917426
aagauauggcacgaucagu

SEQ ID NO: 1232685 - RNA, 19 nt, Artificial Sequence
  Description of Artificial Sequence: Synthetic oligonucleotide
  Antisense strand to SEQ ID NO: 1232684
acugaucgugccauaucuu

SEQ ID NO: 1232686 - RNA, 19 nt, Artificial Sequence
  Description of Artificial Sequence: Synthetic oligonucleotide
  Sense strand starting at position 3963 of SEQ ID NO: 917426
gagaccauguugucaacga

SEQ ID NO: 1232687 - RNA, 19 nt, Artificial Sequence
  Description of Artificial Sequence: Synthetic oligonucleotide
  Antisense strand to SEQ ID NO: 1232686
ucguugacaacauggucuc

SEQ ID NO: 1232688 - RNA, 19 nt, Artificial Sequence
  Description of Artificial Sequence: Synthetic oligonucleotide
  Sense strand starting at position 3968 of SEQ ID NO: 917427
cauguugucaacgaguaga

SEQ ID NO: 1232689 - RNA, 19 nt, Artificial Sequence
  Description of Artificial Sequence: Synthetic oligonucleotide
  Antisense strand to SEQ ID NO: 1232688
ucuacucguugacaacaug

SEQ ID NO: 1232690 - RNA, 19 nt, Artificial Sequence
  Description of Artificial Sequence: Synthetic oligonucleotide
  Sense strand starting at position 539 of SEQ ID NO: 917427
aaacgucuuagggaguagu

SEQ ID NO: 1232691 - RNA, 19 nt, Artificial Sequence
  Description of Artificial Sequence: Synthetic oligonucleotide
  Antisense strand to SEQ ID NO: 1232690
acuacucccuaagacguuu

SEQ ID NO: 1232692 - RNA, 19 nt, Artificial Sequence
  Description of Artificial Sequence: Synthetic oligonucleotide
  Sense strand starting at position 644 of SEQ ID NO: 917427
ugagacguccucuagacau

SEQ ID NO: 1232693 - RNA, 19 nt, Artificial Sequence
  Description of Artificial Sequence: Synthetic oligonucleotide
  Antisense strand to SEQ ID NO: 1232692
augucuagaggacgucuca

SEQ ID NO: 1232694 - RNA, 19 nt, Artificial Sequence
  Description of Artificial Sequence: Synthetic oligonucleotide
  Sense strand starting at position 692 of SEQ ID NO: 917427
ugaaguacuuacuuuagca

SEQ ID NO: 1232695 - RNA, 19 nt, Artificial Sequence
  Description of Artificial Sequence: Synthetic oligonucleotide
  Antisense strand to SEQ ID NO: 1232694
ugcuaaaguaaguacuuca

SEQ ID NO: 1232696 - RNA, 19 nt, Artificial Sequence
  Description of Artificial Sequence: Synthetic oligonucleotide
  Sense strand starting at position 773 of SEQ ID NO: 917427
aucucuagagucugagauc

SEQ ID NO: 1232697 - RNA, 19 nt, Artificial Sequence
  Description of Artificial Sequence: Synthetic oligonucleotide
  Antisense strand to SEQ ID NO: 1232696
gaucucagacucuagagau

SEQ ID NO: 1232698 - RNA, 19 nt, Artificial Sequence
  Description of Artificial Sequence: Synthetic oligonucleotide
  Sense strand starting at position 868 of SEQ ID NO: 917427
agauauuucugugaaugaa

SEQ ID NO: 1232699 - RNA, 19 nt, Artificial Sequence
  Description of Artificial Sequence: Synthetic oligonucleotide
  Antisense strand to SEQ ID NO: 1232698
uucauucacagaaauaucu

SEQ ID NO: 1232700 - RNA, 19 nt, Artificial Sequence
  Description of Artificial Sequence: Synthetic oligonucleotide
  Sense strand starting at position 1330 of SEQ ID NO: 917427
uguagaacugucuacacuu

SEQ ID NO: 1232701 - RNA, 19 nt, Artificial Sequence
  Description of Artificial Sequence: Synthetic oligonucleotide
  Antisense strand to SEQ ID NO: 1232700
aaguguagacaguucuaca

SEQ ID NO: 1232702 - RNA, 19 nt, Artificial Sequence
  Description of Artificial Sequence: Synthetic oligonucleotide
  Sense strand starting at position 1512 of SEQ ID NO: 917427
auugcuucucgggacagua

SEQ ID NO: 1232703 - RNA, 19 nt, Artificial Sequence
  Description of Artificial Sequence: Synthetic oligonucleotide
  Antisense strand to SEQ ID NO: 1232702
uacugucccgagaagcaau

SEQ ID NO: 1232704 - RNA, 19 nt, Artificial Sequence
  Description of Artificial Sequence: Synthetic oligonucleotide
  Sense strand starting at position 1710 of SEQ ID NO: 917427
gcaaguuucccucacugac

SEQ ID NO: 1232705 - RNA, 19 nt, Artificial Sequence
  Description of Artificial Sequence: Synthetic oligonucleotide
  Antisense strand to SEQ ID NO: 1232704
gucagugagggaaacuugc

SEQ ID NO: 1232706 - RNA, 19 nt, Artificial Sequence
  Description of Artificial Sequence: Synthetic oligonucleotide
  Sense strand starting at position 2125 of SEQ ID NO: 917427
gguguagugggugaacuuu

SEQ ID NO: 1232707 - RNA, 19 nt, Artificial Sequence
  Description of Artificial Sequence: Synthetic oligonucleotide
  Antisense strand to SEQ ID NO: 1232706
aaaguucacccacuacacc

SEQ ID NO: 1232708 - RNA, 19 nt, Artificial Sequence
  Description of Artificial Sequence: Synthetic oligonucleotide
  Sense strand starting at position 2206 of SEQ ID NO: 917427
ccuuucucugcagaugaaa

SEQ ID NO: 1232709 - RNA, 19 nt, Artificial Sequence
  Description of Artificial Sequence: Synthetic oligonucleotide
  Antisense strand to SEQ ID NO: 1232708
uuucaucugcagagaaagg

SEQ ID NO: 1232710 - RNA, 19 nt, Artificial Sequence
  Description of Artificial Sequence: Synthetic oligonucleotide
  Sense strand starting at position 2363 of SEQ ID NO: 917427
ugaugagcuuaaccacaga

SEQ ID NO: 1232711 - RNA, 19 nt, Artificial Sequence
  Description of Artificial Sequence: Synthetic oligonucleotide
  Antisense strand to SEQ ID NO: 1232710
ucugugguuaagcucauca

SEQ ID NO: 1232712 - RNA, 19 nt, Artificial Sequence
  Description of Artificial Sequence: Synthetic oligonucleotide
  Sense strand starting at position 2430 of SEQ ID NO: 917427
aucauuaaaugagucgaau

SEQ ID NO: 1232713 - RNA, 19 nt, Artificial Sequence
  Description of Artificial Sequence: Synthetic oligonucleotide
  Antisense strand to SEQ ID NO: 1232712
auucgacucauuuaaugau

SEQ ID NO: 1232714 - RNA, 19 nt, Artificial Sequence
  Description of Artificial Sequence: Synthetic oligonucleotide
  Sense strand starting at position 2442 of SEQ ID NO: 917427
gucgaauaggauuggaguu

SEQ ID NO: 1232715 - RNA, 19 nt, Artificial Sequence
  Description of Artificial Sequence: Synthetic oligonucleotide
  Antisense strand to SEQ ID NO: 1232714
aacuccaauccuauucgac

SEQ ID NO: 1232716 - RNA, 19 nt, Artificial Sequence
  Description of Artificial Sequence: Synthetic oligonucleotide
  Sense strand starting at position 2443 of SEQ ID NO: 917427
ucgaauaggauuggaguuu

SEQ ID NO: 1232717 - RNA, 19 nt, Artificial Sequence
  Description of Artificial Sequence: Synthetic oligonucleotide
  Antisense strand to SEQ ID NO: 1232716
aaacuccaauccuauucga

SEQ ID NO: 1232718 - RNA, 19 nt, Artificial Sequence
  Description of Artificial Sequence: Synthetic oligonucleotide
  Sense strand starting at position 2452 of SEQ ID NO: 917427
auuggaguuucugucauug

SEQ ID NO: 1232719 - RNA, 19 nt, Artificial Sequence
  Description of Artificial Sequence: Synthetic oligonucleotide
  Antisense strand to SEQ ID NO: 1232718
caaugacagaaacuccaau

SEQ ID NO: 1232720 - RNA, 19 nt, Artificial Sequence
  Description of Artificial Sequence: Synthetic oligonucleotide
  Sense strand starting at position 2463 of SEQ ID NO: 917427
ugucauugccagggagaca

SEQ ID NO: 1232721 - RNA, 19 nt, Artificial Sequence
  Description of Artificial Sequence: Synthetic oligonucleotide
  Antisense strand to SEQ ID NO: 1232720
ugucucccuggcaaugaca

SEQ ID NO: 1232722 - RNA, 19 nt, Artificial Sequence
  Description of Artificial Sequence: Synthetic oligonucleotide
  Sense strand starting at position 2474 of SEQ ID NO: 917427
gggagacagucagucauga

SEQ ID NO: 1232723 - RNA, 19 nt, Artificial Sequence
  Description of Artificial Sequence: Synthetic oligonucleotide
  Antisense strand to SEQ ID NO: 1232722
ucaugacugacugucuccc

SEQ ID NO: 1232724 - RNA, 19 nt, Artificial Sequence
  Description of Artificial Sequence: Synthetic oligonucleotide
  Sense strand starting at position 2476 of SEQ ID NO: 917427
gagacagucagucaugagu

SEQ ID NO: 1232725 - RNA, 19 nt, Artificial Sequence
  Description of Artificial Sequence: Synthetic oligonucleotide
  Antisense strand to SEQ ID NO: 1232724
acucaugacugacugucuc

SEQ ID NO: 1232726 - RNA, 19 nt, Artificial Sequence
  Description of Artificial Sequence: Synthetic oligonucleotide
  Sense strand starting at position 2510 of SEQ ID NO: 917427
ggcguagagagucauauau

SEQ ID NO: 1232727 - RNA, 19 nt, Artificial Sequence
  Description of Artificial Sequence: Synthetic oligonucleotide
  Antisense strand to SEQ ID NO: 1232726
auauaugacucucuacgcc

SEQ ID NO: 1232728 - RNA, 19 nt, Artificial Sequence
  Description of Artificial Sequence: Synthetic oligonucleotide
  Sense strand starting at position 2727 of SEQ ID NO: 917427
ggcugaacuccugggaagu

SEQ ID NO: 1232729 - RNA, 19 nt, Artificial Sequence
  Description of Artificial Sequence: Synthetic oligonucleotide
  Antisense strand to SEQ ID NO: 1232728
acuucccaggaguucagcc

SEQ ID NO: 1232730 - RNA, 19 nt, Artificial Sequence
  Description of Artificial Sequence: Synthetic oligonucleotide
  Sense strand starting at position 2728 of SEQ ID NO: 917427
gcugaacuccugggaagug

SEQ ID NO: 1232731 - RNA, 19 nt, Artificial Sequence
  Description of Artificial Sequence: Synthetic oligonucleotide
  Antisense strand to SEQ ID NO: 1232730
cacuucccaggaguucagc

SEQ ID NO: 1232732 - RNA, 19 nt, Artificial Sequence
  Description of Artificial Sequence: Synthetic oligonucleotide
  Sense strand starting at position 2807 of SEQ ID NO: 917427
agaccuauuaguggccaga

SEQ ID NO: 1232733 - RNA, 19 nt, Artificial Sequence
  Description of Artificial Sequence: Synthetic oligonucleotide
  Antisense strand to SEQ ID NO: 1232732
ucuggccacuaauaggucu

SEQ ID NO: 1232734 - RNA, 19 nt, Artificial Sequence
  Description of Artificial Sequence: Synthetic oligonucleotide
  Sense strand starting at position 2950 of SEQ ID NO: 917427
uuguucuccacguagagau

SEQ ID NO: 1232735 - RNA, 19 nt, Artificial Sequence
  Description of Artificial Sequence: Synthetic oligonucleotide
  Antisense strand to SEQ ID NO: 1232734
aucucuacguggagaacaa

SEQ ID NO: 1232736 - RNA, 19 nt, Artificial Sequence
  Description of Artificial Sequence: Synthetic oligonucleotide
  Sense strand starting at position 2998 of SEQ ID NO: 917427
cuccgugguacauaaguaa

SEQ ID NO: 1232737 - RNA, 19 nt, Artificial Sequence
  Description of Artificial Sequence: Synthetic oligonucleotide
  Antisense strand to SEQ ID NO: 1232736
uuacuuauguaccacggag

SEQ ID NO: 1232738 - RNA, 19 nt, Artificial Sequence
  Description of Artificial Sequence: Synthetic oligonucleotide
  Sense strand starting at position 3061 of SEQ ID NO: 917427
gggugugaaucucucuuau

SEQ ID NO: 1232739 - RNA, 19 nt, Artificial Sequence
  Description of Artificial Sequence: Synthetic oligonucleotide
  Antisense strand to SEQ ID NO: 1232738
auaagagagauucacaccc

SEQ ID NO: 1232740 - RNA, 19 nt, Artificial Sequence
  Description of Artificial Sequence: Synthetic oligonucleotide
  Sense strand starting at position 3115 of SEQ ID NO: 917427
gauggaaugagcuguguug

SEQ ID NO: 1232741 - RNA, 19 nt, Artificial Sequence
  Description of Artificial Sequence: Synthetic oligonucleotide
  Antisense strand to SEQ ID NO: 1232740
caacacagcucauuccauc

SEQ ID NO: 1232742 - RNA, 19 nt, Artificial Sequence
  Description of Artificial Sequence: Synthetic oligonucleotide
  Sense strand starting at position 3126 of SEQ ID NO: 917427
cuguguugucaagagggca

SEQ ID NO: 1232743 - RNA, 19 nt, Artificial Sequence
  Description of Artificial Sequence: Synthetic oligonucleotide
  Antisense strand to SEQ ID NO: 1232742
ugcccucuugacaacacag

SEQ ID NO: 1232744 - RNA, 19 nt, Artificial Sequence
  Description of Artificial Sequence: Synthetic oligonucleotide
  Sense strand starting at position 3209 of SEQ ID NO: 917427
ugccauucucaugaguuac

SEQ ID NO: 1232745 - RNA, 19 nt, Artificial Sequence
  Description of Artificial Sequence: Synthetic oligonucleotide
  Antisense strand to SEQ ID NO: 1232744
guaacucaugagaauggca

SEQ ID NO: 1232746 - RNA, 19 nt, Artificial Sequence
  Description of Artificial Sequence: Synthetic oligonucleotide
  Sense strand starting at position 3317 of SEQ ID NO: 917427
ugaaauuauugguuuguga

SEQ ID NO: 1232747 - RNA, 19 nt, Artificial Sequence
  Description of Artificial Sequence: Synthetic oligonucleotide
  Antisense strand to SEQ ID NO: 1232746
ucacaaaccaauaauuuca

SEQ ID NO: 1232748 - RNA, 19 nt, Artificial Sequence
  Description of Artificial Sequence: Synthetic oligonucleotide
  Sense strand starting at position 3319 of SEQ ID NO: 917427
aaauuauugguuugugaga

SEQ ID NO: 1232749 - RNA, 19 nt, Artificial Sequence
  Description of Artificial Sequence: Synthetic oligonucleotide
  Antisense strand to SEQ ID NO: 1232748
ucucacaaaccaauaauuu

SEQ ID NO: 1232750 - RNA, 19 nt, Artificial Sequence
  Description of Artificial Sequence: Synthetic oligonucleotide
  Sense strand starting at position 3320 of SEQ ID NO: 917427
aauuauugguuugugagau

SEQ ID NO: 1232751 - RNA, 19 nt, Artificial Sequence
  Description of Artificial Sequence: Synthetic oligonucleotide
  Antisense strand to SEQ ID NO: 1232750
aucucacaaaccaauaauu

SEQ ID NO: 1232752 - RNA, 19 nt, Artificial Sequence
  Description of Artificial Sequence: Synthetic oligonucleotide
  Sense strand starting at position 3326 of SEQ ID NO: 917427
ugguuugugagauaccagu

SEQ ID NO: 1232753 - RNA, 19 nt, Artificial Sequence
  Description of Artificial Sequence: Synthetic oligonucleotide
  Antisense strand to SEQ ID NO: 1232752
acugguaucucacaaacca

SEQ ID NO: 1232754 - RNA, 19 nt, Artificial Sequence
  Description of Artificial Sequence: Synthetic oligonucleotide
  Sense strand starting at position 3335 of SEQ ID NO: 917427
agauaccaguuguauuuaa

SEQ ID NO: 1232755 - RNA, 19 nt, Artificial Sequence
  Description of Artificial Sequence: Synthetic oligonucleotide
  Antisense strand to SEQ ID NO: 1232754
uuaaauacaacugguaucu

SEQ ID NO: 1232756 - RNA, 19 nt, Artificial Sequence
  Description of Artificial Sequence: Synthetic oligonucleotide
  Sense strand starting at position 3357 of SEQ ID NO: 917427
uuuaaugcacaaugaaaug

SEQ ID NO: 1232757 - RNA, 19 nt, Artificial Sequence
  Description of Artificial Sequence: Synthetic oligonucleotide
  Antisense strand to SEQ ID NO: 1232756
cauuucauugugcauuaaa

SEQ ID NO: 1232758 - RNA, 19 nt, Artificial Sequence
  Description of Artificial Sequence: Synthetic oligonucleotide
  Sense strand starting at position 3408 of SEQ ID NO: 917427
gaauaucacugguuguucu

SEQ ID NO: 1232759 - RNA, 19 nt, Artificial Sequence
  Description of Artificial Sequence: Synthetic oligonucleotide
  Antisense strand to SEQ ID NO: 1232758
agaacaaccagugauauuc

SEQ ID NO: 1232760 - RNA, 19 nt, Artificial Sequence
  Description of Artificial Sequence: Synthetic oligonucleotide
  Sense strand starting at position 3506 of SEQ ID NO: 917427
uuucuuugugcauaagauu

SEQ ID NO: 1232761 - RNA, 19 nt, Artificial Sequence
  Description of Artificial Sequence: Synthetic oligonucleotide
  Antisense strand to SEQ ID NO: 1232760
aaucuuaugcacaaagaaa

SEQ ID NO: 1232762 - RNA, 19 nt, Artificial Sequence
  Description of Artificial Sequence: Synthetic oligonucleotide
  Sense strand starting at position 3659 of SEQ ID NO: 917427
ugugauccuucugugagga

SEQ ID NO: 1232763 - RNA, 19 nt, Artificial Sequence
  Description of Artificial Sequence: Synthetic oligonucleotide
  Antisense strand to SEQ ID NO: 1232762
uccucacagaaggaucaca

SEQ ID NO: 1232764 - RNA, 19 nt, Artificial Sequence
  Description of Artificial Sequence: Synthetic oligonucleotide
  Sense strand starting at position 3880 of SEQ ID NO: 917427
gaccuaaggugauuggcau

SEQ ID NO: 1232765 - RNA, 19 nt, Artificial Sequence
  Description of Artificial Sequence: Synthetic oligonucleotide
  Antisense strand to SEQ ID NO: 1232764
augccaaucaccuuagguc

SEQ ID NO: 1232766 - RNA, 19 nt, Artificial Sequence
  Description of Artificial Sequence: Synthetic oligonucleotide
  Sense strand starting at position 3967 of SEQ ID NO: 917427
ucuaauacaguuugucuau

SEQ ID NO: 1232767 - RNA, 19 nt, Artificial Sequence
  Description of Artificial Sequence: Synthetic oligonucleotide
  Antisense strand to SEQ ID NO: 1232766
auagacaaacuguauuaga

SEQ ID NO: 1232768 - RNA, 19 nt, Artificial Sequence
  Description of Artificial Sequence: Synthetic oligonucleotide
  Sense strand starting at position 3968 of SEQ ID NO: 917428
cuaauacaguuugucuauu

SEQ ID NO: 1232769 - RNA, 19 nt, Artificial Sequence
  Description of Artificial Sequence: Synthetic oligonucleotide
  Antisense strand to SEQ ID NO: 1232768
aauagacaaacuguauuag

SEQ ID NO: 1232770 - RNA, 19 nt, Artificial Sequence
  Description of Artificial Sequence: Synthetic oligonucleotide
  Sense strand starting at position 514 of SEQ ID NO: 917428
gugggcuaccuauagugau

SEQ ID NO: 1232771 - RNA, 19 nt, Artificial Sequence
  Description of Artificial Sequence: Synthetic oligonucleotide
  Antisense strand to SEQ ID NO: 1232770
aucacuauagguagcccac

SEQ ID NO: 1232772 - RNA, 19 nt, Artificial Sequence
  Description of Artificial Sequence: Synthetic oligonucleotide
  Sense strand starting at position 528 of SEQ ID NO: 917428
gugauuuauuuccgaagag

SEQ ID NO: 1232773 - RNA, 19 nt, Artificial Sequence
  Description of Artificial Sequence: Synthetic oligonucleotide
  Antisense strand to SEQ ID NO: 1232772
cucuucggaaauaaaucac

SEQ ID NO: 1232774 - RNA, 19 nt, Artificial Sequence
  Description of Artificial Sequence: Synthetic oligonucleotide
  Sense strand starting at position 529 of SEQ ID NO: 917428
ugauuuauuuccgaagagu

SEQ ID NO: 1232775 - RNA, 19 nt, Artificial Sequence
  Description of Artificial Sequence: Synthetic oligonucleotide
  Antisense strand to SEQ ID NO: 1232774
acucuucggaaauaaauca

SEQ ID NO: 1232776 - RNA, 19 nt, Artificial Sequence
  Description of Artificial Sequence: Synthetic oligonucleotide
  Sense strand starting at position 622 of SEQ ID NO: 917428
aagcucuguugaucaaguu

SEQ ID NO: 1232777 - RNA, 19 nt, Artificial Sequence
  Description of Artificial Sequence: Synthetic oligonucleotide
  Antisense strand to SEQ ID NO: 1232776
aacuugaucaacagagcuu

SEQ ID NO: 1232778 - RNA, 19 nt, Artificial Sequence
  Description of Artificial Sequence: Synthetic oligonucleotide
  Sense strand starting at position 655 of SEQ ID NO: 917428
agaaaucaugcugacagca

SEQ ID NO: 1232779 - RNA, 19 nt, Artificial Sequence
  Description of Artificial Sequence: Synthetic oligonucleotide
  Antisense strand to SEQ ID NO: 1232778
ugcugucagcaugauuucu

SEQ ID NO: 1232780 - RNA, 19 nt, Artificial Sequence
  Description of Artificial Sequence: Synthetic oligonucleotide
  Sense strand starting at position 956 of SEQ ID NO: 917428
gugaauauacuauggacuu

SEQ ID NO: 1232781 - RNA, 19 nt, Artificial Sequence
  Description of Artificial Sequence: Synthetic oligonucleotide
  Antisense strand to SEQ ID NO: 1232780
aaguccauaguauauucac

SEQ ID NO: 1232782 - RNA, 19 nt, Artificial Sequence
  Description of Artificial Sequence: Synthetic oligonucleotide
  Sense strand starting at position 1130 of SEQ ID NO: 917428
ugcaguggcucaccuauuu

SEQ ID NO: 1232783 - RNA, 19 nt, Artificial Sequence
  Description of Artificial Sequence: Synthetic oligonucleotide
  Antisense strand to SEQ ID NO: 1232782
aaauaggugagccacugca

SEQ ID NO: 1232784 - RNA, 19 nt, Artificial Sequence
  Description of Artificial Sequence: Synthetic oligonucleotide
  Sense strand starting at position 1577 of SEQ ID NO: 917428
agcuuacauugucuauaua

SEQ ID NO: 1232785 - RNA, 19 nt, Artificial Sequence
  Description of Artificial Sequence: Synthetic oligonucleotide
  Antisense strand to SEQ ID NO: 1232784
uauauagacaauguaagcu

SEQ ID NO: 1232786 - RNA, 19 nt, Artificial Sequence
  Description of Artificial Sequence: Synthetic oligonucleotide
  Sense strand starting at position 1578 of SEQ ID NO: 917428
gcuuacauugucuauauac

SEQ ID NO: 1232787 - RNA, 19 nt, Artificial Sequence
  Description of Artificial Sequence: Synthetic oligonucleotide
  Antisense strand to SEQ ID NO: 1232786
guauauagacaauguaagc

SEQ ID NO: 1232788 - RNA, 19 nt, Artificial Sequence
  Description of Artificial Sequence: Synthetic oligonucleotide
  Sense strand starting at position 2024 of SEQ ID NO: 917428
agugcauauuuguaaagga

SEQ ID NO: 1232789 - RNA, 19 nt, Artificial Sequence
  Description of Artificial Sequence: Synthetic oligonucleotide
  Antisense strand to SEQ ID NO: 1232788
uccuuuacaaauaugcacu

SEQ ID NO: 1232790 - RNA, 19 nt, Artificial Sequence
  Description of Artificial Sequence: Synthetic oligonucleotide
  Sense strand starting at position 2099 of SEQ ID NO: 917428
guuauaacagcuugaucuu

SEQ ID NO: 1232791 - RNA, 19 nt, Artificial Sequence
  Description of Artificial Sequence: Synthetic oligonucleotide
  Antisense strand to SEQ ID NO: 1232790
aagaucaagcuguuauaac

SEQ ID NO: 1232792 - RNA, 19 nt, Artificial Sequence
  Description of Artificial Sequence: Synthetic oligonucleotide
  Sense strand starting at position 2146 of SEQ ID NO: 917428
acauuauguuaucuggaaa

SEQ ID NO: 1232793 - RNA, 19 nt, Artificial Sequence
  Description of Artificial Sequence: Synthetic oligonucleotide
  Antisense strand to SEQ ID NO: 1232792
uuuccagauaacauaaugu

SEQ ID NO: 1232794 - RNA, 19 nt, Artificial Sequence
  Description of Artificial Sequence: Synthetic oligonucleotide
  Sense strand starting at position 2343 of SEQ ID NO: 917428
auauaaugugccugacaua

SEQ ID NO: 1232795 - RNA, 19 nt, Artificial Sequence
  Description of Artificial Sequence: Synthetic oligonucleotide
  Antisense strand to SEQ ID NO: 1232794
uaugucaggcacauuauau

SEQ ID NO: 1232796 - RNA, 19 nt, Artificial Sequence
  Description of Artificial Sequence: Synthetic oligonucleotide
  Sense strand starting at position 2350 of SEQ ID NO: 917428
gugccugacauacgaaaga

SEQ ID NO: 1232797 - RNA, 19 nt, Artificial Sequence
  Description of Artificial Sequence: Synthetic oligonucleotide
  Antisense strand to SEQ ID NO: 1232796
ucuuucguaugucaggcac

SEQ ID NO: 1232798 - RNA, 19 nt, Artificial Sequence
  Description of Artificial Sequence: Synthetic oligonucleotide
  Sense strand starting at position 2538 of SEQ ID NO: 917428
gucaauaacgcauacauua

SEQ ID NO: 1232799 - RNA, 19 nt, Artificial Sequence
  Description of Artificial Sequence: Synthetic oligonucleotide
  Antisense strand to SEQ ID NO: 1232798
uaauguaugcguuauugac

SEQ ID NO: 1232800 - RNA, 19 nt, Artificial Sequence
  Description of Artificial Sequence: Synthetic oligonucleotide
  Sense strand starting at position 2779 of SEQ ID NO: 917428
ucaagauguuagucaagau

SEQ ID NO: 1232801 - RNA, 19 nt, Artificial Sequence
  Description of Artificial Sequence: Synthetic oligonucleotide
  Antisense strand to SEQ ID NO: 1232800
aucuugacuaacaucuuga

SEQ ID NO: 1232802 - RNA, 19 nt, Artificial Sequence
  Description of Artificial Sequence: Synthetic oligonucleotide
  Sense strand starting at position 2833 of SEQ ID NO: 917428
uggaaauguuaggagauuu

SEQ ID NO: 1232803 - RNA, 19 nt, Artificial Sequence
  Description of Artificial Sequence: Synthetic oligonucleotide
  Antisense strand to SEQ ID NO: 1232802
aaaucuccuaacauuucca

SEQ ID NO: 1232804 - RNA, 19 nt, Artificial Sequence
  Description of Artificial Sequence: Synthetic oligonucleotide
  Sense strand starting at position 2994 of SEQ ID NO: 917428
ggaauccucucagaggaga

SEQ ID NO: 1232805 - RNA, 19 nt, Artificial Sequence
  Description of Artificial Sequence: Synthetic oligonucleotide
  Antisense strand to SEQ ID NO: 1232804
ucuccucugagaggauucc

SEQ ID NO: 1232806 - RNA, 19 nt, Artificial Sequence
  Description of Artificial Sequence: Synthetic oligonucleotide
  Sense strand starting at position 3032 of SEQ ID NO: 917428
ccucaaauaucugaagaag

SEQ ID NO: 1232807 - RNA, 19 nt, Artificial Sequence
  Description of Artificial Sequence: Synthetic oligonucleotide
  Antisense strand to SEQ ID NO: 1232806
cuucuucagauauuugagg

SEQ ID NO: 1232808 - RNA, 19 nt, Artificial Sequence
  Description of Artificial Sequence: Synthetic oligonucleotide
  Sense strand starting at position 3124 of SEQ ID NO: 917428
ccaguuagcuaucuuggau

SEQ ID NO: 1232809 - RNA, 19 nt, Artificial Sequence
  Description of Artificial Sequence: Synthetic oligonucleotide
  Antisense strand to SEQ ID NO: 1232808
auccaagauagcuaacugg

SEQ ID NO: 1232810 - RNA, 19 nt, Artificial Sequence
  Description of Artificial Sequence: Synthetic oligonucleotide
  Sense strand starting at position 3127 of SEQ ID NO: 917428
guuagcuaucuuggauaua

SEQ ID NO: 1232811 - RNA, 19 nt, Artificial Sequence
  Description of Artificial Sequence: Synthetic oligonucleotide
  Antisense strand to SEQ ID NO: 1232810
uauauccaagauagcuaac

SEQ ID NO: 1232812 - RNA, 19 nt, Artificial Sequence
  Description of Artificial Sequence: Synthetic oligonucleotide
  Sense strand starting at position 3201 of SEQ ID NO: 917428
ugaagagccaguuaguaag

SEQ ID NO: 1232813 - RNA, 19 nt, Artificial Sequence
  Description of Artificial Sequence: Synthetic oligonucleotide
  Antisense strand to SEQ ID NO: 1232812
cuuacuaacuggcucuuca

SEQ ID NO: 1232814 - RNA, 19 nt, Artificial Sequence
  Description of Artificial Sequence: Synthetic oligonucleotide
  Sense strand starting at position 3211 of SEQ ID NO: 917428
guuaguaagcuggaagacu

SEQ ID NO: 1232815 - RNA, 19 nt, Artificial Sequence
  Description of Artificial Sequence: Synthetic oligonucleotide
  Antisense strand to SEQ ID NO: 1232814
agucuuccagcuuacuaac

SEQ ID NO: 1232816 - RNA, 19 nt, Artificial Sequence
  Description of Artificial Sequence: Synthetic oligonucleotide
  Sense strand starting at position 3220 of SEQ ID NO: 917428
cuggaagacugaguugagu

SEQ ID NO: 1232817 - RNA, 19 nt, Artificial Sequence
  Description of Artificial Sequence: Synthetic oligonucleotide
  Antisense strand to SEQ ID NO: 1232816
acucaacucagucuuccag

SEQ ID NO: 1232818 - RNA, 19 nt, Artificial Sequence
  Description of Artificial Sequence: Synthetic oligonucleotide
  Sense strand starting at position 3222 of SEQ ID NO: 917428
ggaagacugaguugaguaa

SEQ ID NO: 1232819 - RNA, 19 nt, Artificial Sequence
  Description of Artificial Sequence: Synthetic oligonucleotide
  Antisense strand to SEQ ID NO: 1232818
uuacucaacucagucuucc

SEQ ID NO: 1232820 - RNA, 19 nt, Artificial Sequence
  Description of Artificial Sequence: Synthetic oligonucleotide
  Sense strand starting at position 3397 of SEQ ID NO: 917428
cuagacaaaccgugacuaa

SEQ ID NO: 1232821 - RNA, 19 nt, Artificial Sequence
  Description of Artificial Sequence: Synthetic oligonucleotide
  Antisense strand to SEQ ID NO: 1232820
uuagucacgguuugucuag

SEQ ID NO: 1232822 - RNA, 19 nt, Artificial Sequence
  Description of Artificial Sequence: Synthetic oligonucleotide
  Sense strand starting at position 3400 of SEQ ID NO: 917428
gacaaaccgugacuaacuu

SEQ ID NO: 1232823 - RNA, 19 nt, Artificial Sequence
  Description of Artificial Sequence: Synthetic oligonucleotide
  Antisense strand to SEQ ID NO: 1232822
aaguuagucacgguuuguc

SEQ ID NO: 1232824 - RNA, 19 nt, Artificial Sequence
  Description of Artificial Sequence: Synthetic oligonucleotide
  Sense strand starting at position 3438 of SEQ ID NO: 917428
agucuuagauguuuccaga

SEQ ID NO: 1232825 - RNA, 19 nt, Artificial Sequence
  Description of Artificial Sequence: Synthetic oligonucleotide
  Antisense strand to SEQ ID NO: 1232824
ucuggaaacaucuaagacu

SEQ ID NO: 1232826 - RNA, 19 nt, Artificial Sequence
  Description of Artificial Sequence: Synthetic oligonucleotide
  Sense strand starting at position 3481 of SEQ ID NO: 917428
gguguauuagacuaguaau

SEQ ID NO: 1232827 - RNA, 19 nt, Artificial Sequence
  Description of Artificial Sequence: Synthetic oligonucleotide
  Antisense strand to SEQ ID NO: 1232826
auuacuagucuaauacacc

SEQ ID NO: 1232828 - RNA, 19 nt, Artificial Sequence
  Description of Artificial Sequence: Synthetic oligonucleotide
  Sense strand starting at position 3536 of SEQ ID NO: 917428
aaagcaaagucaguaugaa

SEQ ID NO: 1232829 - RNA, 19 nt, Artificial Sequence
  Description of Artificial Sequence: Synthetic oligonucleotide
  Antisense strand to SEQ ID NO: 1232828
uucauacugacuuugcuuu

SEQ ID NO: 1232830 - RNA, 19 nt, Artificial Sequence
  Description of Artificial Sequence: Synthetic oligonucleotide
  Sense strand starting at position 3537 of SEQ ID NO: 917428
aagcaaagucaguaugaac

SEQ ID NO: 1232831 - RNA, 19 nt, Artificial Sequence
  Description of Artificial Sequence: Synthetic oligonucleotide
  Antisense strand to SEQ ID NO: 1232830
guucauacugacuuugcuu

SEQ ID NO: 1232832 - RNA, 19 nt, Artificial Sequence
  Description of Artificial Sequence: Synthetic oligonucleotide
  Sense strand starting at position 3631 of SEQ ID NO: 917428
ucacucagagacugugaaa

SEQ ID NO: 1232833 - RNA, 19 nt, Artificial Sequence
  Description of Artificial Sequence: Synthetic oligonucleotide
  Antisense strand to SEQ ID NO: 1232832
uuucacagucucugaguga

SEQ ID NO: 1232834 - RNA, 19 nt, Artificial Sequence
  Description of Artificial Sequence: Synthetic oligonucleotide
  Sense strand starting at position 3634 of SEQ ID NO: 917428
cucagagacugugaaagaa

SEQ ID NO: 1232835 - RNA, 19 nt, Artificial Sequence
  Description of Artificial Sequence: Synthetic oligonucleotide
  Antisense strand to SEQ ID NO: 1232834
uucuuucacagucucugag

SEQ ID NO: 1232836 - RNA, 19 nt, Artificial Sequence
  Description of Artificial Sequence: Synthetic oligonucleotide
  Sense strand starting at position 3682 of SEQ ID NO: 917428
auaagaaagcacugaggua

SEQ ID NO: 1232837 - RNA, 19 nt, Artificial Sequence
  Description of Artificial Sequence: Synthetic oligonucleotide
  Antisense strand to SEQ ID NO: 1232836
uaccucagugcuuucuuau

SEQ ID NO: 1232838 - RNA, 19 nt, Artificial Sequence
  Description of Artificial Sequence: Synthetic oligonucleotide
  Sense strand starting at position 3703 of SEQ ID NO: 917428
cguagcaauagugagcaaa

SEQ ID NO: 1232839 - RNA, 19 nt, Artificial Sequence
  Description of Artificial Sequence: Synthetic oligonucleotide
  Antisense strand to SEQ ID NO: 1232838
uuugcucacuauugcuacg

SEQ ID NO: 1232840 - RNA, 19 nt, Artificial Sequence
  Description of Artificial Sequence: Synthetic oligonucleotide
  Sense strand starting at position 3705 of SEQ ID NO: 917428
uagcaauagugagcaaaua

SEQ ID NO: 1232841 - RNA, 19 nt, Artificial Sequence
  Description of Artificial Sequence: Synthetic oligonucleotide
  Antisense strand to SEQ ID NO: 1232840
uauuugcucacuauugcua

SEQ ID NO: 1232842 - RNA, 19 nt, Artificial Sequence
  Description of Artificial Sequence: Synthetic oligonucleotide
  Sense strand starting at position 3706 of SEQ ID NO: 917428
agcaauagugagcaaauaa

SEQ ID NO: 1232843 - RNA, 19 nt, Artificial Sequence
  Description of Artificial Sequence: Synthetic oligonucleotide
  Antisense strand to SEQ ID NO: 1232842
uuauuugcucacuauugcu

SEQ ID NO: 1232844 - RNA, 19 nt, Artificial Sequence
  Description of Artificial Sequence: Synthetic oligonucleotide
  Sense strand starting at position 3785 of SEQ ID NO: 917428
ucuuaaagauaucaugaga

SEQ ID NO: 1232845 - RNA, 19 nt, Artificial Sequence
  Description of Artificial Sequence: Synthetic oligonucleotide
  Antisense strand to SEQ ID NO: 1232844
ucucaugauaucuuuaaga

SEQ ID NO: 1232846 - RNA, 19 nt, Artificial Sequence
  Description of Artificial Sequence: Synthetic oligonucleotide
  Sense strand starting at position 3798 of SEQ ID NO: 917428
augagagauuauguucuuu

SEQ ID NO: 1232847 - RNA, 19 nt, Artificial Sequence
  Description of Artificial Sequence: Synthetic oligonucleotide
  Antisense strand to SEQ ID NO: 1232846
aaagaacauaaucucucau

SEQ ID NO: 1232848 - RNA, 19 nt, Artificial Sequence
  Description of Artificial Sequence: Synthetic oligonucleotide
  Sense strand starting at position 3915 of SEQ ID NO: 917429
auguacacuuuguuaagaa

SEQ ID NO: 1232849 - RNA, 19 nt, Artificial Sequence
  Description of Artificial Sequence: Synthetic oligonucleotide
  Antisense strand to SEQ ID NO: 1232848
uucuuaacaaaguguacau

SEQ ID NO: 1232850 - RNA, 19 nt, Artificial Sequence
  Description of Artificial Sequence: Synthetic oligonucleotide
  Sense strand starting at position 27 of SEQ ID NO: 917429
ucuggauugugcucuuuau

SEQ ID NO: 1232851 - RNA, 19 nt, Artificial Sequence
  Description of Artificial Sequence: Synthetic oligonucleotide
  Antisense strand to SEQ ID NO: 1232850
auaaagagcacaauccaga

SEQ ID NO: 1232852 - RNA, 19 nt, Artificial Sequence
  Description of Artificial Sequence: Synthetic oligonucleotide
  Sense strand starting at position 37 of SEQ ID NO: 917429
gcucuuuaucuacaaggua

SEQ ID NO: 1232853 - RNA, 19 nt, Artificial Sequence
  Description of Artificial Sequence: Synthetic oligonucleotide
  Antisense strand to SEQ ID NO: 1232852
uaccuuguagauaaagagc

SEQ ID NO: 1232854 - RNA, 19 nt, Artificial Sequence
  Description of Artificial Sequence: Synthetic oligonucleotide
  Sense strand starting at position 1006 of SEQ ID NO: 917429
uuaagucacgcuuaagaac

SEQ ID NO: 1232855 - RNA, 19 nt, Artificial Sequence
  Description of Artificial Sequence: Synthetic oligonucleotide
  Antisense strand to SEQ ID NO: 1232854
guucuuaagcgugacuuaa

SEQ ID NO: 1232856 - RNA, 19 nt, Artificial Sequence
  Description of Artificial Sequence: Synthetic oligonucleotide
  Sense strand starting at position 1015 of SEQ ID NO: 917429
gcuuaagaaccacggguua

SEQ ID NO: 1232857 - RNA, 19 nt, Artificial Sequence
  Description of Artificial Sequence: Synthetic oligonucleotide
  Antisense strand to SEQ ID NO: 1232856
uaacccgugguucuuaagc

SEQ ID NO: 1232858 - RNA, 19 nt, Artificial Sequence
  Description of Artificial Sequence: Synthetic oligonucleotide
  Sense strand starting at position 1017 of SEQ ID NO: 917429
uuaagaaccacggguuagu

SEQ ID NO: 1232859 - RNA, 19 nt, Artificial Sequence
  Description of Artificial Sequence: Synthetic oligonucleotide
  Antisense strand to SEQ ID NO: 1232858
acuaacccgugguucuuaa

SEQ ID NO: 1232860 - RNA, 19 nt, Artificial Sequence
  Description of Artificial Sequence: Synthetic oligonucleotide
  Sense strand starting at position 1027 of SEQ ID NO: 917429
cggguuagucacgcuucua

SEQ ID NO: 1232861 - RNA, 19 nt, Artificial Sequence
  Description of Artificial Sequence: Synthetic oligonucleotide
  Antisense strand to SEQ ID NO: 1232860
uagaagcgugacuaacccg

SEQ ID NO: 1232862 - RNA, 19 nt, Artificial Sequence
  Description of Artificial Sequence: Synthetic oligonucleotide
  Sense strand starting at position 1075 of SEQ ID NO: 917429
cuaacagucauguggguua

SEQ ID NO: 1232863 - RNA, 19 nt, Artificial Sequence
  Description of Artificial Sequence: Synthetic oligonucleotide
  Antisense strand to SEQ ID NO: 1232862
uaacccacaugacuguuag

SEQ ID NO: 1232864 - RNA, 19 nt, Artificial Sequence
  Description of Artificial Sequence: Synthetic oligonucleotide
  Sense strand starting at position 1077 of SEQ ID NO: 917429
aacagucauguggguuaaa

SEQ ID NO: 1232865 - RNA, 19 nt, Artificial Sequence
  Description of Artificial Sequence: Synthetic oligonucleotide
  Antisense strand to SEQ ID NO: 1232864
uuuaacccacaugacuguu

SEQ ID NO: 1232866 - RNA, 19 nt, Artificial Sequence
  Description of Artificial Sequence: Synthetic oligonucleotide
  Sense strand starting at position 1078 of SEQ ID NO: 917429
acagucauguggguuaaau

SEQ ID NO: 1232867 - RNA, 19 nt, Artificial Sequence
  Description of Artificial Sequence: Synthetic oligonucleotide
  Antisense strand to SEQ ID NO: 1232866
auuuaacccacaugacugu

SEQ ID NO: 1232868 - RNA, 19 nt, Artificial Sequence
  Description of Artificial Sequence: Synthetic oligonucleotide
  Sense strand starting at position 1080 of SEQ ID NO: 917429
agucauguggguuaaauua

SEQ ID NO: 1232869 - RNA, 19 nt, Artificial Sequence
  Description of Artificial Sequence: Synthetic oligonucleotide
  Antisense strand to SEQ ID NO: 1232868
uaauuuaacccacaugacu

SEQ ID NO: 1232870 - RNA, 19 nt, Artificial Sequence
  Description of Artificial Sequence: Synthetic oligonucleotide
  Sense strand starting at position 1090 of SEQ ID NO: 917429
guuaaauuagcagcucguu

SEQ ID NO: 1232871 - RNA, 19 nt, Artificial Sequence
  Description of Artificial Sequence: Synthetic oligonucleotide
  Antisense strand to SEQ ID NO: 1232870
aacgagcugcuaauuuaac

SEQ ID NO: 1232872 - RNA, 19 nt, Artificial Sequence
  Description of Artificial Sequence: Synthetic oligonucleotide
  Sense strand starting at position 1119 of SEQ ID NO: 917429
gaagcuaaggaaugccaua

SEQ ID NO: 1232873 - RNA, 19 nt, Artificial Sequence
  Description of Artificial Sequence: Synthetic oligonucleotide
  Antisense strand to SEQ ID NO: 1232872
uauggcauuccuuagcuuc

SEQ ID NO: 1232874 - RNA, 19 nt, Artificial Sequence
  Description of Artificial Sequence: Synthetic oligonucleotide
  Sense strand starting at position 1124 of SEQ ID NO: 917429
uaaggaaugccauaccgua

SEQ ID NO: 1232875 - RNA, 19 nt, Artificial Sequence
  Description of Artificial Sequence: Synthetic oligonucleotide
  Antisense strand to SEQ ID NO: 1232874
uacgguauggcauuccuua

SEQ ID NO: 1232876 - RNA, 19 nt, Artificial Sequence
  Description of Artificial Sequence: Synthetic oligonucleotide
  Sense strand starting at position 1239 of SEQ ID NO: 917429
ccucauguguuaguauuua

SEQ ID NO: 1232877 - RNA, 19 nt, Artificial Sequence
  Description of Artificial Sequence: Synthetic oligonucleotide
  Antisense strand to SEQ ID NO: 1232876
uaaauacuaacacaugagg

SEQ ID NO: 1232878 - RNA, 19 nt, Artificial Sequence
  Description of Artificial Sequence: Synthetic oligonucleotide
  Sense strand starting at position 1341 of SEQ ID NO: 917429
cugauagcgagucagaagu

SEQ ID NO: 1232879 - RNA, 19 nt, Artificial Sequence
  Description of Artificial Sequence: Synthetic oligonucleotide
  Antisense strand to SEQ ID NO: 1232878
acuucugacucgcuaucag

SEQ ID NO: 1232880 - RNA, 19 nt, Artificial Sequence
  Description of Artificial Sequence: Synthetic oligonucleotide
  Sense strand starting at position 1352 of SEQ ID NO: 917429
ucagaaguguuacuaucua

SEQ ID NO: 1232881 - RNA, 19 nt, Artificial Sequence
  Description of Artificial Sequence: Synthetic oligonucleotide
  Antisense strand to SEQ ID NO: 1232880
uagauaguaacacuucuga

SEQ ID NO: 1232882 - RNA, 19 nt, Artificial Sequence
  Description of Artificial Sequence: Synthetic oligonucleotide
  Sense strand starting at position 1378 of SEQ ID NO: 917429
cuccaugaucuuggaugaa

SEQ ID NO: 1232883 - RNA, 19 nt, Artificial Sequence
  Description of Artificial Sequence: Synthetic oligonucleotide
  Antisense strand to SEQ ID NO: 1232882
uucauccaagaucauggag

SEQ ID NO: 1232884 - RNA, 19 nt, Artificial Sequence
  Description of Artificial Sequence: Synthetic oligonucleotide
  Sense strand starting at position 1412 of SEQ ID NO: 917429
uauuuaagggcucguguaa

SEQ ID NO: 1232885 - RNA, 19 nt, Artificial Sequence
  Description of Artificial Sequence: Synthetic oligonucleotide
  Antisense strand to SEQ ID NO: 1232884
uuacacgagcccuuaaaua

SEQ ID NO: 1232886 - RNA, 19 nt, Artificial Sequence
  Description of Artificial Sequence: Synthetic oligonucleotide
  Sense strand starting at position 1425 of SEQ ID NO: 917429
guguaaucuuaccugugaa

SEQ ID NO: 1232887 - RNA, 19 nt, Artificial Sequence
  Description of Artificial Sequence: Synthetic oligonucleotide
  Antisense strand to SEQ ID NO: 1232886
uucacagguaagauuacac

SEQ ID NO: 1232888 - RNA, 19 nt, Artificial Sequence
  Description of Artificial Sequence: Synthetic oligonucleotide
  Sense strand starting at position 2246 of SEQ ID NO: 917429
aauggaguuacucguaguc

SEQ ID NO: 1232889 - RNA, 19 nt, Artificial Sequence
  Description of Artificial Sequence: Synthetic oligonucleotide
  Antisense strand to SEQ ID NO: 1232888
gacuacgaguaacuccauu

SEQ ID NO: 1232890 - RNA, 19 nt, Artificial Sequence
  Description of Artificial Sequence: Synthetic oligonucleotide
  Sense strand starting at position 2249 of SEQ ID NO: 917429
ggaguuacucguagucgag

SEQ ID NO: 1232891 - RNA, 19 nt, Artificial Sequence
  Description of Artificial Sequence: Synthetic oligonucleotide
  Antisense strand to SEQ ID NO: 1232890
cucgacuacgaguaacucc

SEQ ID NO: 1232892 - RNA, 19 nt, Artificial Sequence
  Description of Artificial Sequence: Synthetic oligonucleotide
  Sense strand starting at position 2487 of SEQ ID NO: 917429
agucucaucccuggcuaga

SEQ ID NO: 1232893 - RNA, 19 nt, Artificial Sequence
  Description of Artificial Sequence: Synthetic oligonucleotide
  Antisense strand to SEQ ID NO: 1232892
ucuagccagggaugagacu

SEQ ID NO: 1232894 - RNA, 19 nt, Artificial Sequence
  Description of Artificial Sequence: Synthetic oligonucleotide
  Sense strand starting at position 2489 of SEQ ID NO: 917429
ucucaucccuggcuagaga

SEQ ID NO: 1232895 - RNA, 19 nt, Artificial Sequence
  Description of Artificial Sequence: Synthetic oligonucleotide
  Antisense strand to SEQ ID NO: 1232894
ucucuagccagggaugaga

SEQ ID NO: 1232896 - RNA, 19 nt, Artificial Sequence
  Description of Artificial Sequence: Synthetic oligonucleotide
  Sense strand starting at position 2575 of SEQ ID NO: 917429
uugguuuguugaucauugu

SEQ ID NO: 1232897 - RNA, 19 nt, Artificial Sequence
  Description of Artificial Sequence: Synthetic oligonucleotide
  Antisense strand to SEQ ID NO: 1232896
acaaugaucaacaaaccaa

SEQ ID NO: 1232898 - RNA, 19 nt, Artificial Sequence
  Description of Artificial Sequence: Synthetic oligonucleotide
  Sense strand starting at position 2607 of SEQ ID NO: 917429
ggccuuugaugccuuaaca

SEQ ID NO: 1232899 - RNA, 19 nt, Artificial Sequence
  Description of Artificial Sequence: Synthetic oligonucleotide
  Antisense strand to SEQ ID NO: 1232898
uguuaaggcaucaaaggcc

SEQ ID NO: 1232900 - RNA, 19 nt, Artificial Sequence
  Description of Artificial Sequence: Synthetic oligonucleotide
  Sense strand starting at position 2706 of SEQ ID NO: 917429
ugaugaacugccugauuga

SEQ ID NO: 1232901 - RNA, 19 nt, Artificial Sequence
  Description of Artificial Sequence: Synthetic oligonucleotide
  Antisense strand to SEQ ID NO: 1232900
ucaaucaggcaguucauca

SEQ ID NO: 1232902 - RNA, 19 nt, Artificial Sequence
  Description of Artificial Sequence: Synthetic oligonucleotide
  Sense strand starting at position 2709 of SEQ ID NO: 917429
ugaacugccugauugagaa

SEQ ID NO: 1232903 - RNA, 19 nt, Artificial Sequence
  Description of Artificial Sequence: Synthetic oligonucleotide
  Antisense strand to SEQ ID NO: 1232902
uucucaaucaggcaguuca

SEQ ID NO: 1232904 - RNA, 19 nt, Artificial Sequence
  Description of Artificial Sequence: Synthetic oligonucleotide
  Sense strand starting at position 2751 of SEQ ID NO: 917429
gggagugccucucuacuau

SEQ ID NO: 1232905 - RNA, 19 nt, Artificial Sequence
  Description of Artificial Sequence: Synthetic oligonucleotide
  Antisense strand to SEQ ID NO: 1232904
auaguagagaggcacuccc

SEQ ID NO: 1232906 - RNA, 19 nt, Artificial Sequence
  Description of Artificial Sequence: Synthetic oligonucleotide
  Sense strand starting at position 2868 of SEQ ID NO: 917429
ugguaauagugggcgucaa

SEQ ID NO: 1232907 - RNA, 19 nt, Artificial Sequence
  Description of Artificial Sequence: Synthetic oligonucleotide
  Antisense strand to SEQ ID NO: 1232906
uugacgcccacuauuacca

SEQ ID NO: 1232908 - RNA, 19 nt, Artificial Sequence
  Description of Artificial Sequence: Synthetic oligonucleotide
  Sense strand starting at position 3031 of SEQ ID NO: 917429
ccgauaacgauauguugaa

SEQ ID NO: 1232909 - RNA, 19 nt, Artificial Sequence
  Description of Artificial Sequence: Synthetic oligonucleotide
  Antisense strand to SEQ ID NO: 1232908
uucaacauaucguuaucgg

SEQ ID NO: 1232910 - RNA, 19 nt, Artificial Sequence
  Description of Artificial Sequence: Synthetic oligonucleotide
  Sense strand starting at position 3051 of SEQ ID NO: 917429
auuauaaaucucugggucu

SEQ ID NO: 1232911 - RNA, 19 nt, Artificial Sequence
  Description of Artificial Sequence: Synthetic oligonucleotide
  Antisense strand to SEQ ID NO: 1232910
agacccagagauuuauaau

SEQ ID NO: 1232912 - RNA, 19 nt, Artificial Sequence
  Description of Artificial Sequence: Synthetic oligonucleotide
  Sense strand starting at position 3062 of SEQ ID NO: 917429
cugggucugccaugacaug

SEQ ID NO: 1232913 - RNA, 19 nt, Artificial Sequence
  Description of Artificial Sequence: Synthetic oligonucleotide
  Antisense strand to SEQ ID NO: 1232912
caugucauggcagacccag

SEQ ID NO: 1232914 - RNA, 19 nt, Artificial Sequence
  Description of Artificial Sequence: Synthetic oligonucleotide
  Sense strand starting at position 3107 of SEQ ID NO: 917429
ggcuuuguuagggaaagca

SEQ ID NO: 1232915 - RNA, 19 nt, Artificial Sequence
  Description of Artificial Sequence: Synthetic oligonucleotide
  Antisense strand to SEQ ID NO: 1232914
ugcuuucccuaacaaagcc

SEQ ID NO: 1232916 - RNA, 19 nt, Artificial Sequence
  Description of Artificial Sequence: Synthetic oligonucleotide
  Sense strand starting at position 3213 of SEQ ID NO: 917429
cauuguuguggauggcauu

SEQ ID NO: 1232917 - RNA, 19 nt, Artificial Sequence
  Description of Artificial Sequence: Synthetic oligonucleotide
  Antisense strand to SEQ ID NO: 1232916
aaugccauccacaacaaug

SEQ ID NO: 1232918 - RNA, 19 nt, Artificial Sequence
  Description of Artificial Sequence: Synthetic oligonucleotide
  Sense strand starting at position 3257 of SEQ ID NO: 917429
auguauuggaucugaagac

SEQ ID NO: 1232919 - RNA, 19 nt, Artificial Sequence
  Description of Artificial Sequence: Synthetic oligonucleotide
  Antisense strand to SEQ ID NO: 1232918
gucuucagauccaauacau

SEQ ID NO: 1232920 - RNA, 19 nt, Artificial Sequence
  Description of Artificial Sequence: Synthetic oligonucleotide
  Sense strand starting at position 3313 of SEQ ID NO: 917429
agcaguuugacuugcauga

SEQ ID NO: 1232921 - RNA, 19 nt, Artificial Sequence
  Description of Artificial Sequence: Synthetic oligonucleotide
  Antisense strand to SEQ ID NO: 1232920
ucaugcaagucaaacugcu

SEQ ID NO: 1232922 - RNA, 19 nt, Artificial Sequence
  Description of Artificial Sequence: Synthetic oligonucleotide
  Sense strand starting at position 3332 of SEQ ID NO: 917429
aaagaaagccgauguauua

SEQ ID NO: 1232923 - RNA, 19 nt, Artificial Sequence
  Description of Artificial Sequence: Synthetic oligonucleotide
  Antisense strand to SEQ ID NO: 1232922
uaauacaucggcuuucuuu

SEQ ID NO: 1232924 - RNA, 19 nt, Artificial Sequence
  Description of Artificial Sequence: Synthetic oligonucleotide
  Sense strand starting at position 3421 of SEQ ID NO: 917429
gacaucucgcaucaggaau

SEQ ID NO: 1232925 - RNA, 19 nt, Artificial Sequence
  Description of Artificial Sequence: Synthetic oligonucleotide
  Antisense strand to SEQ ID NO: 1232924
auuccugaugcgagauguc

SEQ ID NO: 1232926 - RNA, 19 nt, Artificial Sequence
  Description of Artificial Sequence: Synthetic oligonucleotide
  Sense strand starting at position 3834 of SEQ ID NO: 917429
ugacuuguaucuuccaguu

SEQ ID NO: 1232927 - RNA, 19 nt, Artificial Sequence
  Description of Artificial Sequence: Synthetic oligonucleotide
  Antisense strand to SEQ ID NO: 1232926
aacuggaagauacaaguca

SEQ ID NO: 1232928 - RNA, 19 nt, Artificial Sequence
  Description of Artificial Sequence: Synthetic oligonucleotide
  Sense strand starting at position 3905 of SEQ ID NO: 917430
cuaagaaacuuguaaggaa

SEQ ID NO: 1232929 - RNA, 19 nt, Artificial Sequence
  Description of Artificial Sequence: Synthetic oligonucleotide
  Antisense strand to SEQ ID NO: 1232928
uuccuuacaaguuucuuag

SEQ ID NO: 1232930 - RNA, 19 nt, Artificial Sequence
  Description of Artificial Sequence: Synthetic oligonucleotide
  Sense strand starting at position 9 of SEQ ID NO: 917430
ccaugucaacugcagugau

SEQ ID NO: 1232931 - RNA, 19 nt, Artificial Sequence
  Description of Artificial Sequence: Synthetic oligonucleotide
  Antisense strand to SEQ ID NO: 1232930
aucacugcaguugacaugg

SEQ ID NO: 1232932 - RNA, 19 nt, Artificial Sequence
  Description of Artificial Sequence: Synthetic oligonucleotide
  Sense strand starting at position 350 of SEQ ID NO: 917430
uccugcaauccucaugaga

SEQ ID NO: 1232933 - RNA, 19 nt, Artificial Sequence
  Description of Artificial Sequence: Synthetic oligonucleotide
  Antisense strand to SEQ ID NO: 1232932
ucucaugaggauugcagga

SEQ ID NO: 1232934 - RNA, 19 nt, Artificial Sequence
  Description of Artificial Sequence: Synthetic oligonucleotide
  Sense strand starting at position 365 of SEQ ID NO: 917430
gagaacgucguagaacuau

SEQ ID NO: 1232935 - RNA, 19 nt, Artificial Sequence
  Description of Artificial Sequence: Synthetic oligonucleotide
  Antisense strand to SEQ ID NO: 1232934
auaguucuacgacguucuc

SEQ ID NO: 1232936 - RNA, 19 nt, Artificial Sequence
  Description of Artificial Sequence: Synthetic oligonucleotide
  Sense strand starting at position 392 of SEQ ID NO: 917430
gcaguaggucuggagaaga

SEQ ID NO: 1232937 - RNA, 19 nt, Artificial Sequence
  Description of Artificial Sequence: Synthetic oligonucleotide
  Antisense strand to SEQ ID NO: 1232936
ucuucuccagaccuacugc

SEQ ID NO: 1232938 - RNA, 19 nt, Artificial Sequence
  Description of Artificial Sequence: Synthetic oligonucleotide
  Sense strand starting at position 508 of SEQ ID NO: 917430
aggagaguagcagagucau

SEQ ID NO: 1232939 - RNA, 19 nt, Artificial Sequence
  Description of Artificial Sequence: Synthetic oligonucleotide
  Antisense strand to SEQ ID NO: 1232938
augacucugcuacucuccu

SEQ ID NO: 1232940 - RNA, 19 nt, Artificial Sequence
  Description of Artificial Sequence: Synthetic oligonucleotide
  Sense strand starting at position 604 of SEQ ID NO: 917430
ugugaugagccacagauua

SEQ ID NO: 1232941 - RNA, 19 nt, Artificial Sequence
  Description of Artificial Sequence: Synthetic oligonucleotide
  Antisense strand to SEQ ID NO: 1232940
uaaucuguggcucaucaca

SEQ ID NO: 1232942 - RNA, 19 nt, Artificial Sequence
  Description of Artificial Sequence: Synthetic oligonucleotide
  Sense strand starting at position 733 of SEQ ID NO: 917430
uuaguuuaaugacuagcaa

SEQ ID NO: 1232943 - RNA, 19 nt, Artificial Sequence
  Description of Artificial Sequence: Synthetic oligonucleotide
  Antisense strand to SEQ ID NO: 1232942
uugcuagucauuaaacuaa

SEQ ID NO: 1232944 - RNA, 19 nt, Artificial Sequence
  Description of Artificial Sequence: Synthetic oligonucleotide
  Sense strand starting at position 847 of SEQ ID NO: 917430
uuuggaaugcuauaucuaa

SEQ ID NO: 1232945 - RNA, 19 nt, Artificial Sequence
  Description of Artificial Sequence: Synthetic oligonucleotide
  Antisense strand to SEQ ID NO: 1232944
uuagauauagcauuccaaa

SEQ ID NO: 1232946 - RNA, 19 nt, Artificial Sequence
  Description of Artificial Sequence: Synthetic oligonucleotide
  Sense strand starting at position 1029 of SEQ ID NO: 917430
guguauuccguaguucguu

SEQ ID NO: 1232947 - RNA, 19 nt, Artificial Sequence
  Description of Artificial Sequence: Synthetic oligonucleotide
  Antisense strand to SEQ ID NO: 1232946
aacgaacuacggaauacac

SEQ ID NO: 1232948 - RNA, 19 nt, Artificial Sequence
  Description of Artificial Sequence: Synthetic oligonucleotide
  Sense strand starting at position 1133 of SEQ ID NO: 917430
uuguguuugcuaguuguca

SEQ ID NO: 1232949 - RNA, 19 nt, Artificial Sequence
  Description of Artificial Sequence: Synthetic oligonucleotide
  Antisense strand to SEQ ID NO: 1232948
ugacaacuagcaaacacaa

SEQ ID NO: 1232950 - RNA, 19 nt, Artificial Sequence
  Description of Artificial Sequence: Synthetic oligonucleotide
  Sense strand starting at position 1410 of SEQ ID NO: 917430
guuuauuucuuagugucua

SEQ ID NO: 1232951 - RNA, 19 nt, Artificial Sequence
  Description of Artificial Sequence: Synthetic oligonucleotide
  Antisense strand to SEQ ID NO: 1232950
uagacacuaagaaauaaac

SEQ ID NO: 1232952 - RNA, 19 nt, Artificial Sequence
  Description of Artificial Sequence: Synthetic oligonucleotide
  Sense strand starting at position 1415 of SEQ ID NO: 917430
uuucuuagugucuauaaca

SEQ ID NO: 1232953 - RNA, 19 nt, Artificial Sequence
  Description of Artificial Sequence: Synthetic oligonucleotide
  Antisense strand to SEQ ID NO: 1232952
uguuauagacacuaagaaa

SEQ ID NO: 1232954 - RNA, 19 nt, Artificial Sequence
  Description of Artificial Sequence: Synthetic oligonucleotide
  Sense strand starting at position 1489 of SEQ ID NO: 917430
gaauuagaaguaggugauc

SEQ ID NO: 1232955 - RNA, 19 nt, Artificial Sequence
  Description of Artificial Sequence: Synthetic oligonucleotide
  Antisense strand to SEQ ID NO: 1232954
gaucaccuacuucuaauuc

SEQ ID NO: 1232956 - RNA, 19 nt, Artificial Sequence
  Description of Artificial Sequence: Synthetic oligonucleotide
  Sense strand starting at position 1491 of SEQ ID NO: 917430
auuagaaguaggugaucuu

SEQ ID NO: 1232957 - RNA, 19 nt, Artificial Sequence
  Description of Artificial Sequence: Synthetic oligonucleotide
  Antisense strand to SEQ ID NO: 1232956
aagaucaccuacuucuaau

SEQ ID NO: 1232958 - RNA, 19 nt, Artificial Sequence
  Description of Artificial Sequence: Synthetic oligonucleotide
  Sense strand starting at position 1494 of SEQ ID NO: 917430
agaaguaggugaucuuaaa

SEQ ID NO: 1232959 - RNA, 19 nt, Artificial Sequence
  Description of Artificial Sequence: Synthetic oligonucleotide
  Antisense strand to SEQ ID NO: 1232958
uuuaagaucaccuacuucu

SEQ ID NO: 1232960 - RNA, 19 nt, Artificial Sequence
  Description of Artificial Sequence: Synthetic oligonucleotide
  Sense strand starting at position 1685 of SEQ ID NO: 917430
uugauaugucauuauguug

SEQ ID NO: 1232961 - RNA, 19 nt, Artificial Sequence
  Description of Artificial Sequence: Synthetic oligonucleotide
  Antisense strand to SEQ ID NO: 1232960
caacauaaugacauaucaa

SEQ ID NO: 1232962 - RNA, 19 nt, Artificial Sequence
  Description of Artificial Sequence: Synthetic oligonucleotide
  Sense strand starting at position 1776 of SEQ ID NO: 917430
ccucuuaagcguuugguuu

SEQ ID NO: 1232963 - RNA, 19 nt, Artificial Sequence
  Description of Artificial Sequence: Synthetic oligonucleotide
  Antisense strand to SEQ ID NO: 1232962
aaaccaaacgcuuaagagg

SEQ ID NO: 1232964 - RNA, 19 nt, Artificial Sequence
  Description of Artificial Sequence: Synthetic oligonucleotide
  Sense strand starting at position 1835 of SEQ ID NO: 917430
cugagcacuuaccuuagau

SEQ ID NO: 1232965 - RNA, 19 nt, Artificial Sequence
  Description of Artificial Sequence: Synthetic oligonucleotide
  Antisense strand to SEQ ID NO: 1232964
aucuaagguaagugcucag

SEQ ID NO: 1232966 - RNA, 19 nt, Artificial Sequence
  Description of Artificial Sequence: Synthetic oligonucleotide
  Sense strand starting at position 1995 of SEQ ID NO: 917430
gaguuucgcccugucucau

SEQ ID NO: 1232967 - RNA, 19 nt, Artificial Sequence
  Description of Artificial Sequence: Synthetic oligonucleotide
  Antisense strand to SEQ ID NO: 1232966
augagacagggcgaaacuc

SEQ ID NO: 1232968 - RNA, 19 nt, Artificial Sequence
  Description of Artificial Sequence: Synthetic oligonucleotide
  Sense strand starting at position 2098 of SEQ ID NO: 917430
gcaccaauuccaggacaca

SEQ ID NO: 1232969 - RNA, 19 nt, Artificial Sequence
  Description of Artificial Sequence: Synthetic oligonucleotide
  Antisense strand to SEQ ID NO: 1232968
uguguccuggaauuggugc

SEQ ID NO: 1232970 - RNA, 19 nt, Artificial Sequence
  Description of Artificial Sequence: Synthetic oligonucleotide
  Sense strand starting at position 2206 of SEQ ID NO: 917430
acccuaaagcaugauaguu

SEQ ID NO: 1232971 - RNA, 19 nt, Artificial Sequence
  Description of Artificial Sequence: Synthetic oligonucleotide
  Antisense strand to SEQ ID NO: 1232970
aacuaucaugcuuuagggu

SEQ ID NO: 1232972 - RNA, 19 nt, Artificial Sequence
  Description of Artificial Sequence: Synthetic oligonucleotide
  Sense strand starting at position 2211 of SEQ ID NO: 917430
aaagcaugauaguuuaaug

SEQ ID NO: 1232973 - RNA, 19 nt, Artificial Sequence
  Description of Artificial Sequence: Synthetic oligonucleotide
  Antisense strand to SEQ ID NO: 1232972
cauuaaacuaucaugcuuu

SEQ ID NO: 1232974 - RNA, 19 nt, Artificial Sequence
  Description of Artificial Sequence: Synthetic oligonucleotide
  Sense strand starting at position 2280 of SEQ ID NO: 917430
uucuaagacugguuuccau

SEQ ID NO: 1232975 - RNA, 19 nt, Artificial Sequence
  Description of Artificial Sequence: Synthetic oligonucleotide
  Antisense strand to SEQ ID NO: 1232974
auggaaaccagucuuagaa

SEQ ID NO: 1232976 - RNA, 19 nt, Artificial Sequence
  Description of Artificial Sequence: Synthetic oligonucleotide
  Sense strand starting at position 2361 of SEQ ID NO: 917430
uugugacuauuaccuauau

SEQ ID NO: 1232977 - RNA, 19 nt, Artificial Sequence
  Description of Artificial Sequence: Synthetic oligonucleotide
  Antisense strand to SEQ ID NO: 1232976
auauagguaauagucacaa

SEQ ID NO: 1232978 - RNA, 19 nt, Artificial Sequence
  Description of Artificial Sequence: Synthetic oligonucleotide
  Sense strand starting at position 2362 of SEQ ID NO: 917430
ugugacuauuaccuauaua

SEQ ID NO: 1232979 - RNA, 19 nt, Artificial Sequence
  Description of Artificial Sequence: Synthetic oligonucleotide
  Antisense strand to SEQ ID NO: 1232978
uauauagguaauagucaca

SEQ ID NO: 1232980 - RNA, 19 nt, Artificial Sequence
  Description of Artificial Sequence: Synthetic oligonucleotide
  Sense strand starting at position 2391 of SEQ ID NO: 917430
ccaaaugaacggcauauua

SEQ ID NO: 1232981 - RNA, 19 nt, Artificial Sequence
  Description of Artificial Sequence: Synthetic oligonucleotide
  Antisense strand to SEQ ID NO: 1232980
uaauaugccguucauuugg

SEQ ID NO: 1232982 - RNA, 19 nt, Artificial Sequence
  Description of Artificial Sequence: Synthetic oligonucleotide
  Sense strand starting at position 2401 of SEQ ID NO: 917430
ggcauauuaccauguaaca

SEQ ID NO: 1232983 - RNA, 19 nt, Artificial Sequence
  Description of Artificial Sequence: Synthetic oligonucleotide
  Antisense strand to SEQ ID NO: 1232982
uguuacaugguaauaugcc

SEQ ID NO: 1232984 - RNA, 19 nt, Artificial Sequence
  Description of Artificial Sequence: Synthetic oligonucleotide
  Sense strand starting at position 2412 of SEQ ID NO: 917430
auguaacagugacucuuua

SEQ ID NO: 1232985 - RNA, 19 nt, Artificial Sequence
  Description of Artificial Sequence: Synthetic oligonucleotide
  Antisense strand to SEQ ID NO: 1232984
uaaagagucacuguuacau

SEQ ID NO: 1232986 - RNA, 19 nt, Artificial Sequence
  Description of Artificial Sequence: Synthetic oligonucleotide
  Sense strand starting at position 2640 of SEQ ID NO: 917430
gaguaauuaggucauucca

SEQ ID NO: 1232987 - RNA, 19 nt, Artificial Sequence
  Description of Artificial Sequence: Synthetic oligonucleotide
  Antisense strand to SEQ ID NO: 1232986
uggaaugaccuaauuacuc

SEQ ID NO: 1232988 - RNA, 19 nt, Artificial Sequence
  Description of Artificial Sequence: Synthetic oligonucleotide
  Sense strand starting at position 2642 of SEQ ID NO: 917430
guaauuaggucauuccauu

SEQ ID NO: 1232989 - RNA, 19 nt, Artificial Sequence
  Description of Artificial Sequence: Synthetic oligonucleotide
  Antisense strand to SEQ ID NO: 1232988
aauggaaugaccuaauuac

SEQ ID NO: 1232990 - RNA, 19 nt, Artificial Sequence
  Description of Artificial Sequence: Synthetic oligonucleotide
  Sense strand starting at position 2940 of SEQ ID NO: 917430
cuaccugggcgaugaaauu

SEQ ID NO: 1232991 - RNA, 19 nt, Artificial Sequence
  Description of Artificial Sequence: Synthetic oligonucleotide
  Antisense strand to SEQ ID NO: 1232990
aauuucaucgcccagguag

SEQ ID NO: 1232992 - RNA, 19 nt, Artificial Sequence
  Description of Artificial Sequence: Synthetic oligonucleotide
  Sense strand starting at position 2965 of SEQ ID NO: 917430
acaucaaauccuggugaua

SEQ ID NO: 1232993 - RNA, 19 nt, Artificial Sequence
  Description of Artificial Sequence: Synthetic oligonucleotide
  Antisense strand to SEQ ID NO: 1232992
uaucaccaggauuugaugu

SEQ ID NO: 1232994 - RNA, 19 nt, Artificial Sequence
  Description of Artificial Sequence: Synthetic oligonucleotide
  Sense strand starting at position 3184 of SEQ ID NO: 917430
agcugcaggccuuaaauua

SEQ ID NO: 1232995 - RNA, 19 nt, Artificial Sequence
  Description of Artificial Sequence: Synthetic oligonucleotide
  Antisense strand to SEQ ID NO: 1232994
uaauuuaaggccugcagcu

SEQ ID NO: 1232996 - RNA, 19 nt, Artificial Sequence
  Description of Artificial Sequence: Synthetic oligonucleotide
  Sense strand starting at position 3275 of SEQ ID NO: 917430
uaguacuucuacuuuggga

SEQ ID NO: 1232997 - RNA, 19 nt, Artificial Sequence
  Description of Artificial Sequence: Synthetic oligonucleotide
  Antisense strand to SEQ ID NO: 1232996
ucccaaaguagaaguacua

SEQ ID NO: 1232998 - RNA, 19 nt, Artificial Sequence
  Description of Artificial Sequence: Synthetic oligonucleotide
  Sense strand starting at position 3277 of SEQ ID NO: 917430
guacuucuacuuugggaau

SEQ ID NO: 1232999 - RNA, 19 nt, Artificial Sequence
  Description of Artificial Sequence: Synthetic oligonucleotide
  Antisense strand to SEQ ID NO: 1232998
auucccaaaguagaaguac

SEQ ID NO: 1233000 - RNA, 19 nt, Artificial Sequence
  Description of Artificial Sequence: Synthetic oligonucleotide
  Sense strand starting at position 3438 of SEQ ID NO: 917430
aaaugucaugcauguaaag

SEQ ID NO: 1233001 - RNA, 19 nt, Artificial Sequence
  Description of Artificial Sequence: Synthetic oligonucleotide
  Antisense strand to SEQ ID NO: 1233000
cuuuacaugcaugacauuu

SEQ ID NO: 1233002 - RNA, 19 nt, Artificial Sequence
  Description of Artificial Sequence: Synthetic oligonucleotide
  Sense strand starting at position 3440 of SEQ ID NO: 917430
augucaugcauguaaaggu

SEQ ID NO: 1233003 - RNA, 19 nt, Artificial Sequence
  Description of Artificial Sequence: Synthetic oligonucleotide
  Antisense strand to SEQ ID NO: 1233002
accuuuacaugcaugacau

SEQ ID NO: 1233004 - RNA, 19 nt, Artificial Sequence
  Description of Artificial Sequence: Synthetic oligonucleotide
  Sense strand starting at position 3447 of SEQ ID NO: 917430
gcauguaaagguuacaauu

SEQ ID NO: 1233005 - RNA, 19 nt, Artificial Sequence
  Description of Artificial Sequence: Synthetic oligonucleotide
  Antisense strand to SEQ ID NO: 1233004
aauuguaaccuuuacaugc

SEQ ID NO: 1233006 - RNA, 19 nt, Artificial Sequence
  Description of Artificial Sequence: Synthetic oligonucleotide
  Sense strand starting at position 3610 of SEQ ID NO: 917430
uguuuaguagggcagaaga

SEQ ID NO: 1233007 - RNA, 19 nt, Artificial Sequence
  Description of Artificial Sequence: Synthetic oligonucleotide
  Antisense strand to SEQ ID NO: 1233006
ucuucugcccuacuaaaca

SEQ ID NO: 1233008 - RNA, 19 nt, Artificial Sequence
  Description of Artificial Sequence: Synthetic oligonucleotide
  Sense strand starting at position 3872 of SEQ ID NO: 917431
gaaaguccuuaggccuaau

SEQ ID NO: 1233009 - RNA, 19 nt, Artificial Sequence
  Description of Artificial Sequence: Synthetic oligonucleotide
  Antisense strand to SEQ ID NO: 1233008
auuaggccuaaggacuuuc

SEQ ID NO: 1233010 - RNA, 19 nt, Artificial Sequence
  Description of Artificial Sequence: Synthetic oligonucleotide
  Sense strand starting at position 106 of SEQ ID NO: 917431
gggagaaauaaguguucuc

SEQ ID NO: 1233011 - RNA, 19 nt, Artificial Sequence
  Description of Artificial Sequence: Synthetic oligonucleotide
  Antisense strand to SEQ ID NO: 1233010
gagaacacuuauuucuccc

SEQ ID NO: 1233012 - RNA, 19 nt, Artificial Sequence
  Description of Artificial Sequence: Synthetic oligonucleotide
  Sense strand starting at position 109 of SEQ ID NO: 917431
agaaauaaguguucucuuu

SEQ ID NO: 1233013 - RNA, 19 nt, Artificial Sequence
  Description of Artificial Sequence: Synthetic oligonucleotide
  Antisense strand to SEQ ID NO: 1233012
aaagagaacacuuauuucu

SEQ ID NO: 1233014 - RNA, 19 nt, Artificial Sequence
  Description of Artificial Sequence: Synthetic oligonucleotide
  Sense strand starting at position 116 of SEQ ID NO: 917431
aguguucucuuuccaggau

SEQ ID NO: 1233015 - RNA, 19 nt, Artificial Sequence
  Description of Artificial Sequence: Synthetic oligonucleotide
  Antisense strand to SEQ ID NO: 1233014
auccuggaaagagaacacu

SEQ ID NO: 1233016 - RNA, 19 nt, Artificial Sequence
  Description of Artificial Sequence: Synthetic oligonucleotide
  Sense strand starting at position 320 of SEQ ID NO: 917431
ugagaagucucguccugag

SEQ ID NO: 1233017 - RNA, 19 nt, Artificial Sequence
  Description of Artificial Sequence: Synthetic oligonucleotide
  Antisense strand to SEQ ID NO: 1233016
cucaggacgagacuucuca

SEQ ID NO: 1233018 - RNA, 19 nt, Artificial Sequence
  Description of Artificial Sequence: Synthetic oligonucleotide
  Sense strand starting at position 324 of SEQ ID NO: 917431
aagucucguccugagaagu

SEQ ID NO: 1233019 - RNA, 19 nt, Artificial Sequence
  Description of Artificial Sequence: Synthetic oligonucleotide
  Antisense strand to SEQ ID NO: 1233018
acuucucaggacgagacuu

SEQ ID NO: 1233020 - RNA, 19 nt, Artificial Sequence
  Description of Artificial Sequence: Synthetic oligonucleotide
  Sense strand starting at position 334 of SEQ ID NO: 917431
cugagaagucccgacuaau

SEQ ID NO: 1233021 - RNA, 19 nt, Artificial Sequence
  Description of Artificial Sequence: Synthetic oligonucleotide
  Antisense strand to SEQ ID NO: 1233020
auuagucgggacuucucag

SEQ ID NO: 1233022 - RNA, 19 nt, Artificial Sequence
  Description of Artificial Sequence: Synthetic oligonucleotide
  Sense strand starting at position 337 of SEQ ID NO: 917431
agaagucccgacuaaucca

SEQ ID NO: 1233023 - RNA, 19 nt, Artificial Sequence
  Description of Artificial Sequence: Synthetic oligonucleotide
  Antisense strand to SEQ ID NO: 1233022
uggauuagucgggacuucu

SEQ ID NO: 1233024 - RNA, 19 nt, Artificial Sequence
  Description of Artificial Sequence: Synthetic oligonucleotide
  Sense strand starting at position 388 of SEQ ID NO: 917431
agcccaaucuagcagacau

SEQ ID NO: 1233025 - RNA, 19 nt, Artificial Sequence
  Description of Artificial Sequence: Synthetic oligonucleotide
  Antisense strand to SEQ ID NO: 1233024
augucugcuagauugggcu

SEQ ID NO: 1233026 - RNA, 19 nt, Artificial Sequence
  Description of Artificial Sequence: Synthetic oligonucleotide
  Sense strand starting at position 545 of SEQ ID NO: 917431
auaggaguagcaugcuaau

SEQ ID NO: 1233027 - RNA, 19 nt, Artificial Sequence
  Description of Artificial Sequence: Synthetic oligonucleotide
  Antisense strand to SEQ ID NO: 1233026
auuagcaugcuacuccuau

SEQ ID NO: 1233028 - RNA, 19 nt, Artificial Sequence
  Description of Artificial Sequence: Synthetic oligonucleotide
  Sense strand starting at position 548 of SEQ ID NO: 917431
ggaguagcaugcuaauaaa

SEQ ID NO: 1233029 - RNA, 19 nt, Artificial Sequence
  Description of Artificial Sequence: Synthetic oligonucleotide
  Antisense strand to SEQ ID NO: 1233028
uuuauuagcaugcuacucc

SEQ ID NO: 1233030 - RNA, 19 nt, Artificial Sequence
  Description of Artificial Sequence: Synthetic oligonucleotide
  Sense strand starting at position 867 of SEQ ID NO: 917431
ggaggcauuccggaagguu

SEQ ID NO: 1233031 - RNA, 19 nt, Artificial Sequence
  Description of Artificial Sequence: Synthetic oligonucleotide
  Antisense strand to SEQ ID NO: 1233030
aaccuuccggaaugccucc

SEQ ID NO: 1233032 - RNA, 19 nt, Artificial Sequence
  Description of Artificial Sequence: Synthetic oligonucleotide
  Sense strand starting at position 875 of SEQ ID NO: 917431
uccggaagguuucugaaga

SEQ ID NO: 1233033 - RNA, 19 nt, Artificial Sequence
  Description of Artificial Sequence: Synthetic oligonucleotide
  Antisense strand to SEQ ID NO: 1233032
ucuucagaaaccuuccgga

SEQ ID NO: 1233034 - RNA, 19 nt, Artificial Sequence
  Description of Artificial Sequence: Synthetic oligonucleotide
  Sense strand starting at position 876 of SEQ ID NO: 917431
ccggaagguuucugaagag

SEQ ID NO: 1233035 - RNA, 19 nt, Artificial Sequence
  Description of Artificial Sequence: Synthetic oligonucleotide
  Antisense strand to SEQ ID NO: 1233034
cucuucagaaaccuuccgg

SEQ ID NO: 1233036 - RNA, 19 nt, Artificial Sequence
  Description of Artificial Sequence: Synthetic oligonucleotide
  Sense strand starting at position 923 of SEQ ID NO: 917431
ggguuuacuuuccaacucu

SEQ ID NO: 1233037 - RNA, 19 nt, Artificial Sequence
  Description of Artificial Sequence: Synthetic oligonucleotide
  Antisense strand to SEQ ID NO: 1233036
agaguuggaaaguaaaccc

SEQ ID NO: 1233038 - RNA, 19 nt, Artificial Sequence
  Description of Artificial Sequence: Synthetic oligonucleotide
  Sense strand starting at position 1019 of SEQ ID NO: 917431
cuaagucugacgugguaag

SEQ ID NO: 1233039 - RNA, 19 nt, Artificial Sequence
  Description of Artificial Sequence: Synthetic oligonucleotide
  Antisense strand to SEQ ID NO: 1233038
cuuaccacgucagacuuag

SEQ ID NO: 1233040 - RNA, 19 nt, Artificial Sequence
  Description of Artificial Sequence: Synthetic oligonucleotide
  Sense strand starting at position 1336 of SEQ ID NO: 917431
cugccuuaggagugugauu

SEQ ID NO: 1233041 - RNA, 19 nt, Artificial Sequence
  Description of Artificial Sequence: Synthetic oligonucleotide
  Antisense strand to SEQ ID NO: 1233040
aaucacacuccuaaggcag

SEQ ID NO: 1233042 - RNA, 19 nt, Artificial Sequence
  Description of Artificial Sequence: Synthetic oligonucleotide
  Sense strand starting at position 1378 of SEQ ID NO: 917431
ccacccuuuggcugacaga

SEQ ID NO: 1233043 - RNA, 19 nt, Artificial Sequence
  Description of Artificial Sequence: Synthetic oligonucleotide
  Antisense strand to SEQ ID NO: 1233042
ucugucagccaaagggugg

SEQ ID NO: 1233044 - RNA, 19 nt, Artificial Sequence
  Description of Artificial Sequence: Synthetic oligonucleotide
  Sense strand starting at position 1379 of SEQ ID NO: 917431
cacccuuuggcugacagau

SEQ ID NO: 1233045 - RNA, 19 nt, Artificial Sequence
  Description of Artificial Sequence: Synthetic oligonucleotide
  Antisense strand to SEQ ID NO: 1233044
aucugucagccaaagggug

SEQ ID NO: 1233046 - RNA, 19 nt, Artificial Sequence
  Description of Artificial Sequence: Synthetic oligonucleotide
  Sense strand starting at position 1385 of SEQ ID NO: 917431
uuggcugacagauggagaa

SEQ ID NO: 1233047 - RNA, 19 nt, Artificial Sequence
  Description of Artificial Sequence: Synthetic oligonucleotide
  Antisense strand to SEQ ID NO: 1233046
uucuccaucugucagccaa

SEQ ID NO: 1233048 - RNA, 19 nt, Artificial Sequence
  Description of Artificial Sequence: Synthetic oligonucleotide
  Sense strand starting at position 2136 of SEQ ID NO: 917431
uagggacugccuuaugagu

SEQ ID NO: 1233049 - RNA, 19 nt, Artificial Sequence
  Description of Artificial Sequence: Synthetic oligonucleotide
  Antisense strand to SEQ ID NO: 1233048
acucauaaggcagucccua

SEQ ID NO: 1233050 - RNA, 19 nt, Artificial Sequence
  Description of Artificial Sequence: Synthetic oligonucleotide
  Sense strand starting at position 2149 of SEQ ID NO: 917431
augaguugcacucgcugau

SEQ ID NO: 1233051 - RNA, 19 nt, Artificial Sequence
  Description of Artificial Sequence: Synthetic oligonucleotide
  Antisense strand to SEQ ID NO: 1233050
aucagcgagugcaacucau

SEQ ID NO: 1233052 - RNA, 19 nt, Artificial Sequence
  Description of Artificial Sequence: Synthetic oligonucleotide
  Sense strand starting at position 2153 of SEQ ID NO: 917431
guugcacucgcugauggaa

SEQ ID NO: 1233053 - RNA, 19 nt, Artificial Sequence
  Description of Artificial Sequence: Synthetic oligonucleotide
  Antisense strand to SEQ ID NO: 1233052
uuccaucagcgagugcaac

SEQ ID NO: 1233054 - RNA, 19 nt, Artificial Sequence
  Description of Artificial Sequence: Synthetic oligonucleotide
  Sense strand starting at position 2167 of SEQ ID NO: 917431
uggaaaucucgggaugcag

SEQ ID NO: 1233055 - RNA, 19 nt, Artificial Sequence
  Description of Artificial Sequence: Synthetic oligonucleotide
  Antisense strand to SEQ ID NO: 1233054
cugcaucccgagauuucca

SEQ ID NO: 1233056 - RNA, 19 nt, Artificial Sequence
  Description of Artificial Sequence: Synthetic oligonucleotide
  Sense strand starting at position 2865 of SEQ ID NO: 917431
guuucuuuccuccgggcua

SEQ ID NO: 1233057 - RNA, 19 nt, Artificial Sequence
  Description of Artificial Sequence: Synthetic oligonucleotide
  Antisense strand to SEQ ID NO: 1233056
uagcccggaggaaagaaac

SEQ ID NO: 1233058 - RNA, 19 nt, Artificial Sequence
  Description of Artificial Sequence: Synthetic oligonucleotide
  Sense strand starting at position 3210 of SEQ ID NO: 917431
cucaacuugcuuugugaag

SEQ ID NO: 1233059 - RNA, 19 nt, Artificial Sequence
  Description of Artificial Sequence: Synthetic oligonucleotide
  Antisense strand to SEQ ID NO: 1233058
cuucacaaagcaaguugag

SEQ ID NO: 1233060 - RNA, 19 nt, Artificial Sequence
  Description of Artificial Sequence: Synthetic oligonucleotide
  Sense strand starting at position 3211 of SEQ ID NO: 917431
ucaacuugcuuugugaaga

SEQ ID NO: 1233061 - RNA, 19 nt, Artificial Sequence
  Description of Artificial Sequence: Synthetic oligonucleotide
  Antisense strand to SEQ ID NO: 1233060
ucuucacaaagcaaguuga

SEQ ID NO: 1233062 - RNA, 19 nt, Artificial Sequence
  Description of Artificial Sequence: Synthetic oligonucleotide
  Sense strand starting at position 3216 of SEQ ID NO: 917431
uugcuuugugaagaucuuu

SEQ ID NO: 1233063 - RNA, 19 nt, Artificial Sequence
  Description of Artificial Sequence: Synthetic oligonucleotide
  Antisense strand to SEQ ID NO: 1233062
aaagaucuucacaaagcaa

SEQ ID NO: 1233064 - RNA, 19 nt, Artificial Sequence
  Description of Artificial Sequence: Synthetic oligonucleotide
  Sense strand starting at position 3248 of SEQ ID NO: 917431
cgguucgauucugcaaacu

SEQ ID NO: 1233065 - RNA, 19 nt, Artificial Sequence
  Description of Artificial Sequence: Synthetic oligonucleotide
  Antisense strand to SEQ ID NO: 1233064
aguuugcagaaucgaaccg

SEQ ID NO: 1233066 - RNA, 19 nt, Artificial Sequence
  Description of Artificial Sequence: Synthetic oligonucleotide
  Sense strand starting at position 3258 of SEQ ID NO: 917431
cugcaaacuucucaaggga

SEQ ID NO: 1233067 - RNA, 19 nt, Artificial Sequence
  Description of Artificial Sequence: Synthetic oligonucleotide
  Antisense strand to SEQ ID NO: 1233066
ucccuugagaaguuugcag

SEQ ID NO: 1233068 - RNA, 19 nt, Artificial Sequence
  Description of Artificial Sequence: Synthetic oligonucleotide
  Sense strand starting at position 3506 of SEQ ID NO: 917431
guggaugaucugugucccu

SEQ ID NO: 1233069 - RNA, 19 nt, Artificial Sequence
  Description of Artificial Sequence: Synthetic oligonucleotide
  Antisense strand to SEQ ID NO: 1233068
agggacacagaucauccac

SEQ ID NO: 1233070 - RNA, 19 nt, Artificial Sequence
  Description of Artificial Sequence: Synthetic oligonucleotide
  Sense strand starting at position 3535 of SEQ ID NO: 917431
auauuuggguguggugauu

SEQ ID NO: 1233071 - RNA, 19 nt, Artificial Sequence
  Description of Artificial Sequence: Synthetic oligonucleotide
  Antisense strand to SEQ ID NO: 1233070
aaucaccacacccaaauau

SEQ ID NO: 1233072 - RNA, 19 nt, Artificial Sequence
  Description of Artificial Sequence: Synthetic oligonucleotide
  Sense strand starting at position 3544 of SEQ ID NO: 917431
uguggugauuuaucggauu

SEQ ID NO: 1233073 - RNA, 19 nt, Artificial Sequence
  Description of Artificial Sequence: Synthetic oligonucleotide
  Antisense strand to SEQ ID NO: 1233072
aauccgauaaaucaccaca

SEQ ID NO: 1233074 - RNA, 19 nt, Artificial Sequence
  Description of Artificial Sequence: Synthetic oligonucleotide
  Sense strand starting at position 3547 of SEQ ID NO: 917431
ggugauuuaucggauucca

SEQ ID NO: 1233075 - RNA, 19 nt, Artificial Sequence
  Description of Artificial Sequence: Synthetic oligonucleotide
  Antisense strand to SEQ ID NO: 1233074
uggaauccgauaaaucacc

SEQ ID NO: 1233076 - RNA, 19 nt, Artificial Sequence
  Description of Artificial Sequence: Synthetic oligonucleotide
  Sense strand starting at position 3557 of SEQ ID NO: 917431
cggauuccagcaggaaagu

SEQ ID NO: 1233077 - RNA, 19 nt, Artificial Sequence
  Description of Artificial Sequence: Synthetic oligonucleotide
  Antisense strand to SEQ ID NO: 1233076
acuuuccugcuggaauccg

SEQ ID NO: 1233078 - RNA, 19 nt, Artificial Sequence
  Description of Artificial Sequence: Synthetic oligonucleotide
  Sense strand starting at position 3592 of SEQ ID NO: 917431
uggccuuagugguuuagac

SEQ ID NO: 1233079 - RNA, 19 nt, Artificial Sequence
  Description of Artificial Sequence: Synthetic oligonucleotide
  Antisense strand to SEQ ID NO: 1233078
gucuaaaccacuaaggcca

SEQ ID NO: 1233080 - RNA, 19 nt, Artificial Sequence
  Description of Artificial Sequence: Synthetic oligonucleotide
  Sense strand starting at position 3594 of SEQ ID NO: 917431
gccuuagugguuuagacag

SEQ ID NO: 1233081 - RNA, 19 nt, Artificial Sequence
  Description of Artificial Sequence: Synthetic oligonucleotide
  Antisense strand to SEQ ID NO: 1233080
cugucuaaaccacuaaggc

SEQ ID NO: 1233082 - RNA, 19 nt, Artificial Sequence
  Description of Artificial Sequence: Synthetic oligonucleotide
  Sense strand starting at position 3962 of SEQ ID NO: 917431
gccauuggaugcuugugua

SEQ ID NO: 1233083 - RNA, 19 nt, Artificial Sequence
  Description of Artificial Sequence: Synthetic oligonucleotide
  Antisense strand to SEQ ID NO: 1233082
uacacaagcauccaauggc

SEQ ID NO: 1233084 - RNA, 19 nt, Artificial Sequence
  Description of Artificial Sequence: Synthetic oligonucleotide
  Sense strand starting at position 3972 of SEQ ID NO: 917431
gcuuguguaugccugguua

SEQ ID NO: 1233085 - RNA, 19 nt, Artificial Sequence
  Description of Artificial Sequence: Synthetic oligonucleotide
  Antisense strand to SEQ ID NO: 1233084
uaaccaggcauacacaagc

SEQ ID NO: 1233086 - RNA, 19 nt, Artificial Sequence
  Description of Artificial Sequence: Synthetic oligonucleotide
  Sense strand starting at position 3974 of SEQ ID NO: 917431
uuguguaugccugguuaau

SEQ ID NO: 1233087 - RNA, 19 nt, Artificial Sequence
  Description of Artificial Sequence: Synthetic oligonucleotide
  Antisense strand to SEQ ID NO: 1233086
auuaaccaggcauacacaa

SEQ ID NO: 1233088 - RNA, 19 nt, Artificial Sequence
  Description of Artificial Sequence: Synthetic oligonucleotide
  Sense strand starting at position 3976 of SEQ ID NO: 917432
guguaugccugguuaaugu

SEQ ID NO: 1233089 - RNA, 19 nt, Artificial Sequence
  Description of Artificial Sequence: Synthetic oligonucleotide
  Antisense strand to SEQ ID NO: 1233088
acauuaaccaggcauacac

SEQ ID NO: 1233090 - RNA, 19 nt, Artificial Sequence
  Description of Artificial Sequence: Synthetic oligonucleotide
  Sense strand starting at position 409 of SEQ ID NO: 917432
auucgucacagcugggaua

SEQ ID NO: 1233091 - RNA, 19 nt, Artificial Sequence
  Description of Artificial Sequence: Synthetic oligonucleotide
  Antisense strand to SEQ ID NO: 1233090
uaucccagcugugacgaau

SEQ ID NO: 1233092 - RNA, 19 nt, Artificial Sequence
  Description of Artificial Sequence: Synthetic oligonucleotide
  Sense strand starting at position 437 of SEQ ID NO: 917432
gucagauccuaggucagau

SEQ ID NO: 1233093 - RNA, 19 nt, Artificial Sequence
  Description of Artificial Sequence: Synthetic oligonucleotide
  Antisense strand to SEQ ID NO: 1233092
aucugaccuaggaucugac

SEQ ID NO: 1233094 - RNA, 19 nt, Artificial Sequence
  Description of Artificial Sequence: Synthetic oligonucleotide
  Sense strand starting at position 1268 of SEQ ID NO: 917432
ggacaaacacuuugcagaa

SEQ ID NO: 1233095 - RNA, 19 nt, Artificial Sequence
  Description of Artificial Sequence: Synthetic oligonucleotide
  Antisense strand to SEQ ID NO: 1233094
uucugcaaaguguuugucc

SEQ ID NO: 1233096 - RNA, 19 nt, Artificial Sequence
  Description of Artificial Sequence: Synthetic oligonucleotide
  Sense strand starting at position 1430 of SEQ ID NO: 917432
ugagcacuugcccacaaau

SEQ ID NO: 1233097 - RNA, 19 nt, Artificial Sequence
  Description of Artificial Sequence: Synthetic oligonucleotide
  Antisense strand to SEQ ID NO: 1233096
auuugugggcaagugcuca

SEQ ID NO: 1233098 - RNA, 19 nt, Artificial Sequence
  Description of Artificial Sequence: Synthetic oligonucleotide
  Sense strand starting at position 1867 of SEQ ID NO: 917432
ggagaugaaugagaucuaa

SEQ ID NO: 1233099 - RNA, 19 nt, Artificial Sequence
  Description of Artificial Sequence: Synthetic oligonucleotide
  Antisense strand to SEQ ID NO: 1233098
uuagaucucauucaucucc

SEQ ID NO: 1233100 - RNA, 19 nt, Artificial Sequence
  Description of Artificial Sequence: Synthetic oligonucleotide
  Sense strand starting at position 2021 of SEQ ID NO: 917432
ggcuuagcgcgccuucaua

SEQ ID NO: 1233101 - RNA, 19 nt, Artificial Sequence
  Description of Artificial Sequence: Synthetic oligonucleotide
  Antisense strand to SEQ ID NO: 1233100
uaugaaggcgcgcuaagcc

SEQ ID NO: 1233102 - RNA, 19 nt, Artificial Sequence
  Description of Artificial Sequence: Synthetic oligonucleotide
  Sense strand starting at position 2098 of SEQ ID NO: 917432
acagaaauguuauccuuga

SEQ ID NO: 1233103 - RNA, 19 nt, Artificial Sequence
  Description of Artificial Sequence: Synthetic oligonucleotide
  Antisense strand to SEQ ID NO: 1233102
ucaaggauaacauuucugu

SEQ ID NO: 1233104 - RNA, 19 nt, Artificial Sequence
  Description of Artificial Sequence: Synthetic oligonucleotide
  Sense strand starting at position 2099 of SEQ ID NO: 917432
cagaaauguuauccuugag

SEQ ID NO: 1233105 - RNA, 19 nt, Artificial Sequence
  Description of Artificial Sequence: Synthetic oligonucleotide
  Antisense strand to SEQ ID NO: 1233104
cucaaggauaacauuucug

SEQ ID NO: 1233106 - RNA, 19 nt, Artificial Sequence
  Description of Artificial Sequence: Synthetic oligonucleotide
  Sense strand starting at position 2102 of SEQ ID NO: 917432
aaauguuauccuugaggug

SEQ ID NO: 1233107 - RNA, 19 nt, Artificial Sequence
  Description of Artificial Sequence: Synthetic oligonucleotide
  Antisense strand to SEQ ID NO: 1233106
caccucaaggauaacauuu

SEQ ID NO: 1233108 - RNA, 19 nt, Artificial Sequence
  Description of Artificial Sequence: Synthetic oligonucleotide
  Sense strand starting at position 2151 of SEQ ID NO: 917432
accgaaacucccugaugaa

SEQ ID NO: 1233109 - RNA, 19 nt, Artificial Sequence
  Description of Artificial Sequence: Synthetic oligonucleotide
  Antisense strand to SEQ ID NO: 1233108
uucaucagggaguuucggu

SEQ ID NO: 1233110 - RNA, 19 nt, Artificial Sequence
  Description of Artificial Sequence: Synthetic oligonucleotide
  Sense strand starting at position 2325 of SEQ ID NO: 917432
augagagccuuucuuaaug

SEQ ID NO: 1233111 - RNA, 19 nt, Artificial Sequence
  Description of Artificial Sequence: Synthetic oligonucleotide
  Antisense strand to SEQ ID NO: 1233110
cauuaagaaaggcucucau

SEQ ID NO: 1233112 - RNA, 19 nt, Artificial Sequence
  Description of Artificial Sequence: Synthetic oligonucleotide
  Sense strand starting at position 2336 of SEQ ID NO: 917432
ucuuaaugcccuggcaaga

SEQ ID NO: 1233113 - RNA, 19 nt, Artificial Sequence
  Description of Artificial Sequence: Synthetic oligonucleotide
  Antisense strand to SEQ ID NO: 1233112
ucuugccagggcauuaaga

SEQ ID NO: 1233114 - RNA, 19 nt, Artificial Sequence
  Description of Artificial Sequence: Synthetic oligonucleotide
  Sense strand starting at position 2361 of SEQ ID NO: 917432
agcguuuaagccgccaaau

SEQ ID NO: 1233115 - RNA, 19 nt, Artificial Sequence
  Description of Artificial Sequence: Synthetic oligonucleotide
  Antisense strand to SEQ ID NO: 1233114
auuuggcggcuuaaacgcu

SEQ ID NO: 1233116 - RNA, 19 nt, Artificial Sequence
  Description of Artificial Sequence: Synthetic oligonucleotide
  Sense strand starting at position 2362 of SEQ ID NO: 917432
gcguuuaagccgccaaaua

SEQ ID NO: 1233117 - RNA, 19 nt, Artificial Sequence
  Description of Artificial Sequence: Synthetic oligonucleotide
  Antisense strand to SEQ ID NO: 1233116
uauuuggcggcuuaaacgc

SEQ ID NO: 1233118 - RNA, 19 nt, Artificial Sequence
  Description of Artificial Sequence: Synthetic oligonucleotide
  Sense strand starting at position 2528 of SEQ ID NO: 917432
gcguucugacuuucugcaa

SEQ ID NO: 1233119 - RNA, 19 nt, Artificial Sequence
  Description of Artificial Sequence: Synthetic oligonucleotide
  Antisense strand to SEQ ID NO: 1233118
uugcagaaagucagaacgc

SEQ ID NO: 1233120 - RNA, 19 nt, Artificial Sequence
  Description of Artificial Sequence: Synthetic oligonucleotide
  Sense strand starting at position 2701 of SEQ ID NO: 917432
auuacugaagucugaaagu

SEQ ID NO: 1233121 - RNA, 19 nt, Artificial Sequence
  Description of Artificial Sequence: Synthetic oligonucleotide
  Antisense strand to SEQ ID NO: 1233120
acuuucagacuucaguaau

SEQ ID NO: 1233122 - RNA, 19 nt, Artificial Sequence
  Description of Artificial Sequence: Synthetic oligonucleotide
  Sense strand starting at position 2810 of SEQ ID NO: 917432
aggaaagaggcuuguaaau

SEQ ID NO: 1233123 - RNA, 19 nt, Artificial Sequence
  Description of Artificial Sequence: Synthetic oligonucleotide
  Antisense strand to SEQ ID NO: 1233122
auuuacaagccucuuuccu

SEQ ID NO: 1233124 - RNA, 19 nt, Artificial Sequence
  Description of Artificial Sequence: Synthetic oligonucleotide
  Sense strand starting at position 2851 of SEQ ID NO: 917432
gagaaccuuugcuugucau

SEQ ID NO: 1233125 - RNA, 19 nt, Artificial Sequence
  Description of Artificial Sequence: Synthetic oligonucleotide
  Antisense strand to SEQ ID NO: 1233124
augacaagcaaagguucuc

SEQ ID NO: 1233126 - RNA, 19 nt, Artificial Sequence
  Description of Artificial Sequence: Synthetic oligonucleotide
  Sense strand starting at position 2887 of SEQ ID NO: 917432
ggcagcaaauugcuaauua

SEQ ID NO: 1233127 - RNA, 19 nt, Artificial Sequence
  Description of Artificial Sequence: Synthetic oligonucleotide
  Antisense strand to SEQ ID NO: 1233126
uaauuagcaauuugcugcc

SEQ ID NO: 1233128 - RNA, 19 nt, Artificial Sequence
  Description of Artificial Sequence: Synthetic oligonucleotide
  Sense strand starting at position 2959 of SEQ ID NO: 917432
ucauuuacuuguuucugca

SEQ ID NO: 1233129 - RNA, 19 nt, Artificial Sequence
  Description of Artificial Sequence: Synthetic oligonucleotide
  Antisense strand to SEQ ID NO: 1233128
ugcagaaacaaguaaauga

SEQ ID NO: 1233130 - RNA, 19 nt, Artificial Sequence
  Description of Artificial Sequence: Synthetic oligonucleotide
  Sense strand starting at position 2963 of SEQ ID NO: 917432
uuacuuguuucugcaaaug

SEQ ID NO: 1233131 - RNA, 19 nt, Artificial Sequence
  Description of Artificial Sequence: Synthetic oligonucleotide
  Antisense strand to SEQ ID NO: 1233130
cauuugcagaaacaaguaa

SEQ ID NO: 1233132 - RNA, 19 nt, Artificial Sequence
  Description of Artificial Sequence: Synthetic oligonucleotide
  Sense strand starting at position 2988 of SEQ ID NO: 917432
gcacauuucugugcuggca

SEQ ID NO: 1233133 - RNA, 19 nt, Artificial Sequence
  Description of Artificial Sequence: Synthetic oligonucleotide
  Antisense strand to SEQ ID NO: 1233132
ugccagcacagaaaugugc

SEQ ID NO: 1233134 - RNA, 19 nt, Artificial Sequence
  Description of Artificial Sequence: Synthetic oligonucleotide
  Sense strand starting at position 3017 of SEQ ID NO: 917432
gcauuccaguccucagacu

SEQ ID NO: 1233135 - RNA, 19 nt, Artificial Sequence
  Description of Artificial Sequence: Synthetic oligonucleotide
  Antisense strand to SEQ ID NO: 1233134
agucugaggacuggaaugc

SEQ ID NO: 1233136 - RNA, 19 nt, Artificial Sequence
  Description of Artificial Sequence: Synthetic oligonucleotide
  Sense strand starting at position 3181 of SEQ ID NO: 917432
gggaguucaguguauugug

SEQ ID NO: 1233137 - RNA, 19 nt, Artificial Sequence
  Description of Artificial Sequence: Synthetic oligonucleotide
  Antisense strand to SEQ ID NO: 1233136
cacaauacacugaacuccc

SEQ ID NO: 1233138 - RNA, 19 nt, Artificial Sequence
  Description of Artificial Sequence: Synthetic oligonucleotide
  Sense strand starting at position 3215 of SEQ ID NO: 917432
gguuguuucucucuugaga

SEQ ID NO: 1233139 - RNA, 19 nt, Artificial Sequence
  Description of Artificial Sequence: Synthetic oligonucleotide
  Antisense strand to SEQ ID NO: 1233138
ucucaagagagaaacaacc

SEQ ID NO: 1233140 - RNA, 19 nt, Artificial Sequence
  Description of Artificial Sequence: Synthetic oligonucleotide
  Sense strand starting at position 3218 of SEQ ID NO: 917432
uguuucucucuugagaagu

SEQ ID NO: 1233141 - RNA, 19 nt, Artificial Sequence
  Description of Artificial Sequence: Synthetic oligonucleotide
  Antisense strand to SEQ ID NO: 1233140
acuucucaagagagaaaca

SEQ ID NO: 1233142 - RNA, 19 nt, Artificial Sequence
  Description of Artificial Sequence: Synthetic oligonucleotide
  Sense strand starting at position 3279 of SEQ ID NO: 917432
ugugaauuguacccuguga

SEQ ID NO: 1233143 - RNA, 19 nt, Artificial Sequence
  Description of Artificial Sequence: Synthetic oligonucleotide
  Antisense strand to SEQ ID NO: 1233142
ucacaggguacaauucaca

SEQ ID NO: 1233144 - RNA, 19 nt, Artificial Sequence
  Description of Artificial Sequence: Synthetic oligonucleotide
  Sense strand starting at position 3281 of SEQ ID NO: 917432
ugaauuguacccugugagu

SEQ ID NO: 1233145 - RNA, 19 nt, Artificial Sequence
  Description of Artificial Sequence: Synthetic oligonucleotide
  Antisense strand to SEQ ID NO: 1233144
acucacaggguacaauuca

SEQ ID NO: 1233146 - RNA, 19 nt, Artificial Sequence
  Description of Artificial Sequence: Synthetic oligonucleotide
  Sense strand starting at position 3338 of SEQ ID NO: 917432
uacaaugcuuggguuguaa

SEQ ID NO: 1233147 - RNA, 19 nt, Artificial Sequence
  Description of Artificial Sequence: Synthetic oligonucleotide
  Antisense strand to SEQ ID NO: 1233146
uuacaacccaagcauugua

SEQ ID NO: 1233148 - RNA, 19 nt, Artificial Sequence
  Description of Artificial Sequence: Synthetic oligonucleotide
  Sense strand starting at position 3340 of SEQ ID NO: 917432
caaugcuuggguuguaaug

SEQ ID NO: 1233149 - RNA, 19 nt, Artificial Sequence
  Description of Artificial Sequence: Synthetic oligonucleotide
  Antisense strand to SEQ ID NO: 1233148
cauuacaacccaagcauug

SEQ ID NO: 1233150 - RNA, 19 nt, Artificial Sequence
  Description of Artificial Sequence: Synthetic oligonucleotide
  Sense strand starting at position 3347 of SEQ ID NO: 917432
uggguuguaauguaugcaa

SEQ ID NO: 1233151 - RNA, 19 nt, Artificial Sequence
  Description of Artificial Sequence: Synthetic oligonucleotide
  Antisense strand to SEQ ID NO: 1233150
uugcauacauuacaaccca

SEQ ID NO: 1233152 - RNA, 19 nt, Artificial Sequence
  Description of Artificial Sequence: Synthetic oligonucleotide
  Sense strand starting at position 3402 of SEQ ID NO: 917432
uggucaggcaguuaaacua

SEQ ID NO: 1233153 - RNA, 19 nt, Artificial Sequence
  Description of Artificial Sequence: Synthetic oligonucleotide
  Antisense strand to SEQ ID NO: 1233152
uaguuuaacugccugacca

SEQ ID NO: 1233154 - RNA, 19 nt, Artificial Sequence
  Description of Artificial Sequence: Synthetic oligonucleotide
  Sense strand starting at position 3595 of SEQ ID NO: 917432
acuagaagaugacaacauu

SEQ ID NO: 1233155 - RNA, 19 nt, Artificial Sequence
  Description of Artificial Sequence: Synthetic oligonucleotide
  Antisense strand to SEQ ID NO: 1233154
aauguugucaucuucuagu

SEQ ID NO: 1233156 - RNA, 19 nt, Artificial Sequence
  Description of Artificial Sequence: Synthetic oligonucleotide
  Sense strand starting at position 3675 of SEQ ID NO: 917432
uguuacauggcauauaaua

SEQ ID NO: 1233157 - RNA, 19 nt, Artificial Sequence
  Description of Artificial Sequence: Synthetic oligonucleotide
  Antisense strand to SEQ ID NO: 1233156
uauuauaugccauguaaca

SEQ ID NO: 1233158 - RNA, 19 nt, Artificial Sequence
  Description of Artificial Sequence: Synthetic oligonucleotide
  Sense strand starting at position 3716 of SEQ ID NO: 917432
agaaucugcuuucuaaagu

SEQ ID NO: 1233159 - RNA, 19 nt, Artificial Sequence
  Description of Artificial Sequence: Synthetic oligonucleotide
  Antisense strand to SEQ ID NO: 1233158
acuuuagaaagcagauucu

SEQ ID NO: 1233160 - RNA, 19 nt, Artificial Sequence
  Description of Artificial Sequence: Synthetic oligonucleotide
  Sense strand starting at position 3731 of SEQ ID NO: 917432
aaguuugaauuguccagaa

SEQ ID NO: 1233161 - RNA, 19 nt, Artificial Sequence
  Description of Artificial Sequence: Synthetic oligonucleotide
  Antisense strand to SEQ ID NO: 1233160
uucuggacaauucaaacuu

SEQ ID NO: 1233162 - RNA, 19 nt, Artificial Sequence
  Description of Artificial Sequence: Synthetic oligonucleotide
  Sense strand starting at position 3823 of SEQ ID NO: 917432
gugugcagauacucucaua

SEQ ID NO: 1233163 - RNA, 19 nt, Artificial Sequence
  Description of Artificial Sequence: Synthetic oligonucleotide
  Antisense strand to SEQ ID NO: 1233162
uaugagaguaucugcacac

SEQ ID NO: 1233164 - RNA, 19 nt, Artificial Sequence
  Description of Artificial Sequence: Synthetic oligonucleotide
  Sense strand starting at position 3891 of SEQ ID NO: 917432
caucuuuggcucuagugga

SEQ ID NO: 1233165 - RNA, 19 nt, Artificial Sequence
  Description of Artificial Sequence: Synthetic oligonucleotide
  Antisense strand to SEQ ID NO: 1233164
uccacuagagccaaagaug

SEQ ID NO: 1233166 - RNA, 19 nt, Artificial Sequence
  Description of Artificial Sequence: Synthetic oligonucleotide
  Sense strand starting at position 3906 of SEQ ID NO: 917432
uggaacgauuguguugauu

SEQ ID NO: 1233167 - RNA, 19 nt, Artificial Sequence
  Description of Artificial Sequence: Synthetic oligonucleotide
  Antisense strand to SEQ ID NO: 1233166
aaucaacacaaucguucca

SEQ ID NO: 1233168 - RNA, 19 nt, Artificial Sequence
  Description of Artificial Sequence: Synthetic oligonucleotide
  Sense strand starting at position 3978 of SEQ ID NO: 917433
gucauccugcuagaaguaa

SEQ ID NO: 1233169 - RNA, 19 nt, Artificial Sequence
  Description of Artificial Sequence: Synthetic oligonucleotide
  Antisense strand to SEQ ID NO: 1233168
uuacuucuagcaggaugac

SEQ ID NO: 1233170 - RNA, 19 nt, Artificial Sequence
  Description of Artificial Sequence: Synthetic oligonucleotide
  Sense strand starting at position 153 of SEQ ID NO: 917433
gugcguacugcuccaacaa

SEQ ID NO: 1233171 - RNA, 19 nt, Artificial Sequence
  Description of Artificial Sequence: Synthetic oligonucleotide
  Antisense strand to SEQ ID NO: 1233170
uuguuggagcaguacgcac

SEQ ID NO: 1233172 - RNA, 19 nt, Artificial Sequence
  Description of Artificial Sequence: Synthetic oligonucleotide
  Sense strand starting at position 191 of SEQ ID NO: 917433
aagcgcauuuguuccacau

SEQ ID NO: 1233173 - RNA, 19 nt, Artificial Sequence
  Description of Artificial Sequence: Synthetic oligonucleotide
  Antisense strand to SEQ ID NO: 1233172
auguggaacaaaugcgcuu

SEQ ID NO: 1233174 - RNA, 19 nt, Artificial Sequence
  Description of Artificial Sequence: Synthetic oligonucleotide
  Sense strand starting at position 258 of SEQ ID NO: 917433
uggguaugcaacuguacua

SEQ ID NO: 1233175 - RNA, 19 nt, Artificial Sequence
  Description of Artificial Sequence: Synthetic oligonucleotide
  Antisense strand to SEQ ID NO: 1233174
uaguacaguugcauaccca

SEQ ID NO: 1233176 - RNA, 19 nt, Artificial Sequence
  Description of Artificial Sequence: Synthetic oligonucleotide
  Sense strand starting at position 268 of SEQ ID NO: 917433
acuguacuacauugagauu

SEQ ID NO: 1233177 - RNA, 19 nt, Artificial Sequence
  Description of Artificial Sequence: Synthetic oligonucleotide
  Antisense strand to SEQ ID NO: 1233176
aaucucaauguaguacagu

SEQ ID NO: 1233178 - RNA, 19 nt, Artificial Sequence
  Description of Artificial Sequence: Synthetic oligonucleotide
  Sense strand starting at position 271 of SEQ ID NO: 917433
guacuacauugagauuuaa

SEQ ID NO: 1233179 - RNA, 19 nt, Artificial Sequence
  Description of Artificial Sequence: Synthetic oligonucleotide
  Antisense strand to SEQ ID NO: 1233178
uuaaaucucaauguaguac

SEQ ID NO: 1233180 - RNA, 19 nt, Artificial Sequence
  Description of Artificial Sequence: Synthetic oligonucleotide
  Sense strand starting at position 364 of SEQ ID NO: 917433
ugaugaccaucugaagaua

SEQ ID NO: 1233181 - RNA, 19 nt, Artificial Sequence
  Description of Artificial Sequence: Synthetic oligonucleotide
  Antisense strand to SEQ ID NO: 1233180
uaucuucagauggucauca

SEQ ID NO: 1233182 - RNA, 19 nt, Artificial Sequence
  Description of Artificial Sequence: Synthetic oligonucleotide
  Sense strand starting at position 1027 of SEQ ID NO: 917433
aguagucugcaggguguaa

SEQ ID NO: 1233183 - RNA, 19 nt, Artificial Sequence
  Description of Artificial Sequence: Synthetic oligonucleotide
  Antisense strand to SEQ ID NO: 1233182
uuacacccugcagacuacu

SEQ ID NO: 1233184 - RNA, 19 nt, Artificial Sequence
  Description of Artificial Sequence: Synthetic oligonucleotide
  Sense strand starting at position 1029 of SEQ ID NO: 917433
uagucugcaggguguaaua

SEQ ID NO: 1233185 - RNA, 19 nt, Artificial Sequence
  Description of Artificial Sequence: Synthetic oligonucleotide
  Antisense strand to SEQ ID NO: 1233184
uauuacacccugcagacua

SEQ ID NO: 1233186 - RNA, 19 nt, Artificial Sequence
  Description of Artificial Sequence: Synthetic oligonucleotide
  Sense strand starting at position 1031 of SEQ ID NO: 917433
gucugcaggguguaauauu

SEQ ID NO: 1233187 - RNA, 19 nt, Artificial Sequence
  Description of Artificial Sequence: Synthetic oligonucleotide
  Antisense strand to SEQ ID NO: 1233186
aauauuacacccugcagac

SEQ ID NO: 1233188 - RNA, 19 nt, Artificial Sequence
  Description of Artificial Sequence: Synthetic oligonucleotide
  Sense strand starting at position 1197 of SEQ ID NO: 917433
gaguacuaguguuuguguu

SEQ ID NO: 1233189 - RNA, 19 nt, Artificial Sequence
  Description of Artificial Sequence: Synthetic oligonucleotide
  Antisense strand to SEQ ID NO: 1233188
aacacaaacacuaguacuc

SEQ ID NO: 1233190 - RNA, 19 nt, Artificial Sequence
  Description of Artificial Sequence: Synthetic oligonucleotide
  Sense strand starting at position 1201 of SEQ ID NO: 917433
acuaguguuuguguuggca

SEQ ID NO: 1233191 - RNA, 19 nt, Artificial Sequence
  Description of Artificial Sequence: Synthetic oligonucleotide
  Antisense strand to SEQ ID NO: 1233190
ugccaacacaaacacuagu

SEQ ID NO: 1233192 - RNA, 19 nt, Artificial Sequence
  Description of Artificial Sequence: Synthetic oligonucleotide
  Sense strand starting at position 1262 of SEQ ID NO: 917433
ggaccacgugagugagaaa

SEQ ID NO: 1233193 - RNA, 19 nt, Artificial Sequence
  Description of Artificial Sequence: Synthetic oligonucleotide
  Antisense strand to SEQ ID NO: 1233192
uuucucacucacguggucc

SEQ ID NO: 1233194 - RNA, 19 nt, Artificial Sequence
  Description of Artificial Sequence: Synthetic oligonucleotide
  Sense strand starting at position 1283 of SEQ ID NO: 917433
agucacuauauguguaaag

SEQ ID NO: 1233195 - RNA, 19 nt, Artificial Sequence
  Description of Artificial Sequence: Synthetic oligonucleotide
  Antisense strand to SEQ ID NO: 1233194
cuuuacacauauagugacu

SEQ ID NO: 1233196 - RNA, 19 nt, Artificial Sequence
  Description of Artificial Sequence: Synthetic oligonucleotide
  Sense strand starting at position 1284 of SEQ ID NO: 917433
gucacuauauguguaaagu

SEQ ID NO: 1233197 - RNA, 19 nt, Artificial Sequence
  Description of Artificial Sequence: Synthetic oligonucleotide
  Antisense strand to SEQ ID NO: 1233196
acuuuacacauauagugac

SEQ ID NO: 1233198 - RNA, 19 nt, Artificial Sequence
  Description of Artificial Sequence: Synthetic oligonucleotide
  Sense strand starting at position 1285 of SEQ ID NO: 917433
ucacuauauguguaaagua

SEQ ID NO: 1233199 - RNA, 19 nt, Artificial Sequence
  Description of Artificial Sequence: Synthetic oligonucleotide
  Antisense strand to SEQ ID NO: 1233198
uacuuuacacauauaguga

SEQ ID NO: 1233200 - RNA, 19 nt, Artificial Sequence
  Description of Artificial Sequence: Synthetic oligonucleotide
  Sense strand starting at position 1304 of SEQ ID NO: 917433
uuguguaaagaacguuaaa

SEQ ID NO: 1233201 - RNA, 19 nt, Artificial Sequence
  Description of Artificial Sequence: Synthetic oligonucleotide
  Antisense strand to SEQ ID NO: 1233200
uuuaacguucuuuacacaa

SEQ ID NO: 1233202 - RNA, 19 nt, Artificial Sequence
  Description of Artificial Sequence: Synthetic oligonucleotide
  Sense strand starting at position 1314 of SEQ ID NO: 917433
aacguuaaauagcuugauu

SEQ ID NO: 1233203 - RNA, 19 nt, Artificial Sequence
  Description of Artificial Sequence: Synthetic oligonucleotide
  Antisense strand to SEQ ID NO: 1233202
aaucaagcuauuuaacguu

SEQ ID NO: 1233204 - RNA, 19 nt, Artificial Sequence
  Description of Artificial Sequence: Synthetic oligonucleotide
  Sense strand starting at position 1316 of SEQ ID NO: 917433
cguuaaauagcuugauucu

SEQ ID NO: 1233205 - RNA, 19 nt, Artificial Sequence
  Description of Artificial Sequence: Synthetic oligonucleotide
  Antisense strand to SEQ ID NO: 1233204
agaaucaagcuauuuaacg

SEQ ID NO: 1233206 - RNA, 19 nt, Artificial Sequence
  Description of Artificial Sequence: Synthetic oligonucleotide
  Sense strand starting at position 1317 of SEQ ID NO: 917433
guuaaauagcuugauucua

SEQ ID NO: 1233207 - RNA, 19 nt, Artificial Sequence
  Description of Artificial Sequence: Synthetic oligonucleotide
  Antisense strand to SEQ ID NO: 1233206
uagaaucaagcuauuuaac

SEQ ID NO: 1233208 - RNA, 19 nt, Artificial Sequence
  Description of Artificial Sequence: Synthetic oligonucleotide
  Sense strand starting at position 1322 of SEQ ID NO: 917433
auagcuugauucuaagaga

SEQ ID NO: 1233209 - RNA, 19 nt, Artificial Sequence
  Description of Artificial Sequence: Synthetic oligonucleotide
  Antisense strand to SEQ ID NO: 1233208
ucucuuagaaucaagcuau

SEQ ID NO: 1233210 - RNA, 19 nt, Artificial Sequence
  Description of Artificial Sequence: Synthetic oligonucleotide
  Sense strand starting at position 1325 of SEQ ID NO: 917433
gcuugauucuaagagaaac

SEQ ID NO: 1233211 - RNA, 19 nt, Artificial Sequence
  Description of Artificial Sequence: Synthetic oligonucleotide
  Antisense strand to SEQ ID NO: 1233210
guuucucuuagaaucaagc

SEQ ID NO: 1233212 - RNA, 19 nt, Artificial Sequence
  Description of Artificial Sequence: Synthetic oligonucleotide
  Sense strand starting at position 1335 of SEQ ID NO: 917433
aagagaaacuguuuagguu

SEQ ID NO: 1233213 - RNA, 19 nt, Artificial Sequence
  Description of Artificial Sequence: Synthetic oligonucleotide
  Antisense strand to SEQ ID NO: 1233212
aaccuaaacaguuucucuu

SEQ ID NO: 1233214 - RNA, 19 nt, Artificial Sequence
  Description of Artificial Sequence: Synthetic oligonucleotide
  Sense strand starting at position 1339 of SEQ ID NO: 917433
gaaacuguuuagguuuaca

SEQ ID NO: 1233215 - RNA, 19 nt, Artificial Sequence
  Description of Artificial Sequence: Synthetic oligonucleotide
  Antisense strand to SEQ ID NO: 1233214
uguaaaccuaaacaguuuc

SEQ ID NO: 1233216 - RNA, 19 nt, Artificial Sequence
  Description of Artificial Sequence: Synthetic oligonucleotide
  Sense strand starting at position 1378 of SEQ ID NO: 917433
cacauauuguaugugacga

SEQ ID NO: 1233217 - RNA, 19 nt, Artificial Sequence
  Description of Artificial Sequence: Synthetic oligonucleotide
  Antisense strand to SEQ ID NO: 1233216
ucgucacauacaauaugug

SEQ ID NO: 1233218 - RNA, 19 nt, Artificial Sequence
  Description of Artificial Sequence: Synthetic oligonucleotide
  Sense strand starting at position 1379 of SEQ ID NO: 917433
acauauuguaugugacgaa

SEQ ID NO: 1233219 - RNA, 19 nt, Artificial Sequence
  Description of Artificial Sequence: Synthetic oligonucleotide
  Antisense strand to SEQ ID NO: 1233218
uucgucacauacaauaugu

SEQ ID NO: 1233220 - RNA, 19 nt, Artificial Sequence
  Description of Artificial Sequence: Synthetic oligonucleotide
  Sense strand starting at position 1383 of SEQ ID NO: 917433
auuguaugugacgaaagca

SEQ ID NO: 1233221 - RNA, 19 nt, Artificial Sequence
  Description of Artificial Sequence: Synthetic oligonucleotide
  Antisense strand to SEQ ID NO: 1233220
ugcuuucgucacauacaau

SEQ ID NO: 1233222 - RNA, 19 nt, Artificial Sequence
  Description of Artificial Sequence: Synthetic oligonucleotide
  Sense strand starting at position 1399 of SEQ ID NO: 917433
gcauaucacguauaaauua

SEQ ID NO: 1233223 - RNA, 19 nt, Artificial Sequence
  Description of Artificial Sequence: Synthetic oligonucleotide
  Antisense strand to SEQ ID NO: 1233222
uaauuuauacgugauaugc

SEQ ID NO: 1233224 - RNA, 19 nt, Artificial Sequence
  Description of Artificial Sequence: Synthetic oligonucleotide
  Sense strand starting at position 1424 of SEQ ID NO: 917433
guauuaugagcucaaucug

SEQ ID NO: 1233225 - RNA, 19 nt, Artificial Sequence
  Description of Artificial Sequence: Synthetic oligonucleotide
  Antisense strand to SEQ ID NO: 1233224
cagauugagcucauaauac

SEQ ID NO: 1233226 - RNA, 19 nt, Artificial Sequence
  Description of Artificial Sequence: Synthetic oligonucleotide
  Sense strand starting at position 1430 of SEQ ID NO: 917433
ugagcucaaucuguuaauu

SEQ ID NO: 1233227 - RNA, 19 nt, Artificial Sequence
  Description of Artificial Sequence: Synthetic oligonucleotide
  Antisense strand to SEQ ID NO: 1233226
aauuaacagauugagcuca

SEQ ID NO: 1233228 - RNA, 19 nt, Artificial Sequence
  Description of Artificial Sequence: Synthetic oligonucleotide
  Sense strand starting at position 1448 of SEQ ID NO: 917433
uuagguucuuauucuuaag

SEQ ID NO: 1233229 - RNA, 19 nt, Artificial Sequence
  Description of Artificial Sequence: Synthetic oligonucleotide
  Antisense strand to SEQ ID NO: 1233228
cuuaagaauaagaaccuaa

SEQ ID NO: 1233230 - RNA, 19 nt, Artificial Sequence
  Description of Artificial Sequence: Synthetic oligonucleotide
  Sense strand starting at position 1470 of SEQ ID NO: 917433
ugcugucucuguuuauaac

SEQ ID NO: 1233231 - RNA, 19 nt, Artificial Sequence
  Description of Artificial Sequence: Synthetic oligonucleotide
  Antisense strand to SEQ ID NO: 1233230
guuauaaacagagacagca

SEQ ID NO: 1233232 - RNA, 19 nt, Artificial Sequence
  Description of Artificial Sequence: Synthetic oligonucleotide
  Sense strand starting at position 1527 of SEQ ID NO: 917433
gguuguacaugggucuaaa

SEQ ID NO: 1233233 - RNA, 19 nt, Artificial Sequence
  Description of Artificial Sequence: Synthetic oligonucleotide
  Antisense strand to SEQ ID NO: 1233232
uuuagacccauguacaacc

SEQ ID NO: 1233234 - RNA, 19 nt, Artificial Sequence
  Description of Artificial Sequence: Synthetic oligonucleotide
  Sense strand starting at position 1555 of SEQ ID NO: 917433
cgacaaggguuccuaggaa

SEQ ID NO: 1233235 - RNA, 19 nt, Artificial Sequence
  Description of Artificial Sequence: Synthetic oligonucleotide
  Antisense strand to SEQ ID NO: 1233234
uuccuaggaacccuugucg

SEQ ID NO: 1233236 - RNA, 19 nt, Artificial Sequence
  Description of Artificial Sequence: Synthetic oligonucleotide
  Sense strand starting at position 1559 of SEQ ID NO: 917433
aaggguuccuaggaauaaa

SEQ ID NO: 1233237 - RNA, 19 nt, Artificial Sequence
  Description of Artificial Sequence: Synthetic oligonucleotide
  Antisense strand to SEQ ID NO: 1233236
uuuauuccuaggaacccuu

SEQ ID NO: 1233238 - RNA, 19 nt, Artificial Sequence
  Description of Artificial Sequence: Synthetic oligonucleotide
  Sense strand starting at position 2115 of SEQ ID NO: 917433
ggugaguagcugugcgaau

SEQ ID NO: 1233239 - RNA, 19 nt, Artificial Sequence
  Description of Artificial Sequence: Synthetic oligonucleotide
  Antisense strand to SEQ ID NO: 1233238
auucgcacagcuacucacc

SEQ ID NO: 1233240 - RNA, 19 nt, Artificial Sequence
  Description of Artificial Sequence: Synthetic oligonucleotide
  Sense strand starting at position 2116 of SEQ ID NO: 917433
gugaguagcugugcgaauu

SEQ ID NO: 1233241 - RNA, 19 nt, Artificial Sequence
  Description of Artificial Sequence: Synthetic oligonucleotide
  Antisense strand to SEQ ID NO: 1233240
aauucgcacagcuacucac

SEQ ID NO: 1233242 - RNA, 19 nt, Artificial Sequence
  Description of Artificial Sequence: Synthetic oligonucleotide
  Sense strand starting at position 2117 of SEQ ID NO: 917433
ugaguagcugugcgaauuc

SEQ ID NO: 1233243 - RNA, 19 nt, Artificial Sequence
  Description of Artificial Sequence: Synthetic oligonucleotide
  Antisense strand to SEQ ID NO: 1233242
gaauucgcacagcuacuca

SEQ ID NO: 1233244 - RNA, 19 nt, Artificial Sequence
  Description of Artificial Sequence: Synthetic oligonucleotide
  Sense strand starting at position 2126 of SEQ ID NO: 917433
gugcgaauucgguucucua

SEQ ID NO: 1233245 - RNA, 19 nt, Artificial Sequence
  Description of Artificial Sequence: Synthetic oligonucleotide
  Antisense strand to SEQ ID NO: 1233244
uagagaaccgaauucgcac

SEQ ID NO: 1233246 - RNA, 19 nt, Artificial Sequence
  Description of Artificial Sequence: Synthetic oligonucleotide
  Sense strand starting at position 2130 of SEQ ID NO: 917433
gaauucgguucucuaggga

SEQ ID NO: 1233247 - RNA, 19 nt, Artificial Sequence
  Description of Artificial Sequence: Synthetic oligonucleotide
  Antisense strand to SEQ ID NO: 1233246
ucccuagagaaccgaauuc

SEQ ID NO: 1233248 - RNA, 19 nt, Artificial Sequence
  Description of Artificial Sequence: Synthetic oligonucleotide
  Sense strand starting at position 2270 of SEQ ID NO: 917433
gccaguucgccuccgcaaa

SEQ ID NO: 1233249 - RNA, 19 nt, Artificial Sequence
  Description of Artificial Sequence: Synthetic oligonucleotide
  Antisense strand to SEQ ID NO: 1233248
uuugcggaggcgaacuggc

SEQ ID NO: 1233250 - RNA, 19 nt, Artificial Sequence
  Description of Artificial Sequence: Synthetic oligonucleotide
  Sense strand starting at position 2270 of SEQ ID NO: 917434
gccaguucgccuccgcaaa

SEQ ID NO: 1233251 - RNA, 19 nt, Artificial Sequence
  Description of Artificial Sequence: Synthetic oligonucleotide
  Antisense strand to SEQ ID NO: 1233250
uuugcggaggcgaacuggc

SEQ ID NO: 1233252 - RNA, 19 nt, Artificial Sequence
  Description of Artificial Sequence: Synthetic oligonucleotide
  Sense strand starting at position 92 of SEQ ID NO: 917434
uccaguuguuucuuaauaa

SEQ ID NO: 1233253 - RNA, 19 nt, Artificial Sequence
  Description of Artificial Sequence: Synthetic oligonucleotide
  Antisense strand to SEQ ID NO: 1233252
uuauuaagaaacaacugga

SEQ ID NO: 1233254 - RNA, 19 nt, Artificial Sequence
  Description of Artificial Sequence: Synthetic oligonucleotide
  Sense strand starting at position 130 of SEQ ID NO: 917434
guugccauccugcaaacau

SEQ ID NO: 1233255 - RNA, 19 nt, Artificial Sequence
  Description of Artificial Sequence: Synthetic oligonucleotide
  Antisense strand to SEQ ID NO: 1233254
auguuugcaggauggcaac

SEQ ID NO: 1233256 - RNA, 19 nt, Artificial Sequence
  Description of Artificial Sequence: Synthetic oligonucleotide
  Sense strand starting at position 200 of SEQ ID NO: 917434
acacuauagucugcaguga

SEQ ID NO: 1233257 - RNA, 19 nt, Artificial Sequence
  Description of Artificial Sequence: Synthetic oligonucleotide
  Antisense strand to SEQ ID NO: 1233256
ucacugcagacuauagugu

SEQ ID NO: 1233258 - RNA, 19 nt, Artificial Sequence
  Description of Artificial Sequence: Synthetic oligonucleotide
  Sense strand starting at position 201 of SEQ ID NO: 917434
cacuauagucugcagugau

SEQ ID NO: 1233259 - RNA, 19 nt, Artificial Sequence
  Description of Artificial Sequence: Synthetic oligonucleotide
  Antisense strand to SEQ ID NO: 1233258
aucacugcagacuauagug

SEQ ID NO: 1233260 - RNA, 19 nt, Artificial Sequence
  Description of Artificial Sequence: Synthetic oligonucleotide
  Sense strand starting at position 205 of SEQ ID NO: 917434
auagucugcagugauaaag

SEQ ID NO: 1233261 - RNA, 19 nt, Artificial Sequence
  Description of Artificial Sequence: Synthetic oligonucleotide
  Antisense strand to SEQ ID NO: 1233260
cuuuaucacugcagacuau

SEQ ID NO: 1233262 - RNA, 19 nt, Artificial Sequence
  Description of Artificial Sequence: Synthetic oligonucleotide
  Sense strand starting at position 223 of SEQ ID NO: 917434
ggaacagagugcuuugcaa

SEQ ID NO: 1233263 - RNA, 19 nt, Artificial Sequence
  Description of Artificial Sequence: Synthetic oligonucleotide
  Antisense strand to SEQ ID NO: 1233262
uugcaaagcacucuguucc

SEQ ID NO: 1233264 - RNA, 19 nt, Artificial Sequence
  Description of Artificial Sequence: Synthetic oligonucleotide
  Sense strand starting at position 241 of SEQ ID NO: 917434
agcauuaacaaguggguua

SEQ ID NO: 1233265 - RNA, 19 nt, Artificial Sequence
  Description of Artificial Sequence: Synthetic oligonucleotide
  Antisense strand to SEQ ID NO: 1233264
uaacccacuuguuaaugcu

SEQ ID NO: 1233266 - RNA, 19 nt, Artificial Sequence
  Description of Artificial Sequence: Synthetic oligonucleotide
  Sense strand starting at position 242 of SEQ ID NO: 917434
gcauuaacaaguggguuaa

SEQ ID NO: 1233267 - RNA, 19 nt, Artificial Sequence
  Description of Artificial Sequence: Synthetic oligonucleotide
  Antisense strand to SEQ ID NO: 1233266
uuaacccacuuguuaaugc

SEQ ID NO: 1233268 - RNA, 19 nt, Artificial Sequence
  Description of Artificial Sequence: Synthetic oligonucleotide
  Sense strand starting at position 243 of SEQ ID NO: 917434
cauuaacaaguggguuaaa

SEQ ID NO: 1233269 - RNA, 19 nt, Artificial Sequence
  Description of Artificial Sequence: Synthetic oligonucleotide
  Antisense strand to SEQ ID NO: 1233268
uuuaacccacuuguuaaug

SEQ ID NO: 1233270 - RNA, 19 nt, Artificial Sequence
  Description of Artificial Sequence: Synthetic oligonucleotide
  Sense strand starting at position 463 of SEQ ID NO: 917434
ucugccauuugucucuaga

SEQ ID NO: 1233271 - RNA, 19 nt, Artificial Sequence
  Description of Artificial Sequence: Synthetic oligonucleotide
  Antisense strand to SEQ ID NO: 1233270
ucuagagacaaauggcaga

SEQ ID NO: 1233272 - RNA, 19 nt, Artificial Sequence
  Description of Artificial Sequence: Synthetic oligonucleotide
  Sense strand starting at position 519 of SEQ ID NO: 917434
uguguacuuguugaaugaa

SEQ ID NO: 1233273 - RNA, 19 nt, Artificial Sequence
  Description of Artificial Sequence: Synthetic oligonucleotide
  Antisense strand to SEQ ID NO: 1233272
uucauucaacaaguacaca

SEQ ID NO: 1233274 - RNA, 19 nt, Artificial Sequence
  Description of Artificial Sequence: Synthetic oligonucleotide
  Sense strand starting at position 607 of SEQ ID NO: 917434
ggugauuucuguuaaaguu

SEQ ID NO: 1233275 - RNA, 19 nt, Artificial Sequence
  Description of Artificial Sequence: Synthetic oligonucleotide
  Antisense strand to SEQ ID NO: 1233274
aacuuuaacagaaaucacc

SEQ ID NO: 1233276 - RNA, 19 nt, Artificial Sequence
  Description of Artificial Sequence: Synthetic oligonucleotide
  Sense strand starting at position 688 of SEQ ID NO: 917434
cuaguaauaggaugcuaac

SEQ ID NO: 1233277 - RNA, 19 nt, Artificial Sequence
  Description of Artificial Sequence: Synthetic oligonucleotide
  Antisense strand to SEQ ID NO: 1233276
guuagcauccuauuacuag

SEQ ID NO: 1233278 - RNA, 19 nt, Artificial Sequence
  Description of Artificial Sequence: Synthetic oligonucleotide
  Sense strand starting at position 934 of SEQ ID NO: 917434
uggcauaagggcugagagu

SEQ ID NO: 1233279 - RNA, 19 nt, Artificial Sequence
  Description of Artificial Sequence: Synthetic oligonucleotide
  Antisense strand to SEQ ID NO: 1233278
acucucagcccuuaugcca

SEQ ID NO: 1233280 - RNA, 19 nt, Artificial Sequence
  Description of Artificial Sequence: Synthetic oligonucleotide
  Sense strand starting at position 935 of SEQ ID NO: 917434
ggcauaagggcugagaguu

SEQ ID NO: 1233281 - RNA, 19 nt, Artificial Sequence
  Description of Artificial Sequence: Synthetic oligonucleotide
  Antisense strand to SEQ ID NO: 1233280
aacucucagcccuuaugcc

SEQ ID NO: 1233282 - RNA, 19 nt, Artificial Sequence
  Description of Artificial Sequence: Synthetic oligonucleotide
  Sense strand starting at position 941 of SEQ ID NO: 917434
agggcugagaguuauuagu

SEQ ID NO: 1233283 - RNA, 19 nt, Artificial Sequence
  Description of Artificial Sequence: Synthetic oligonucleotide
  Antisense strand to SEQ ID NO: 1233282
acuaauaacucucagcccu

SEQ ID NO: 1233284 - RNA, 19 nt, Artificial Sequence
  Description of Artificial Sequence: Synthetic oligonucleotide
  Sense strand starting at position 943 of SEQ ID NO: 917434
ggcugagaguuauuaguga

SEQ ID NO: 1233285 - RNA, 19 nt, Artificial Sequence
  Description of Artificial Sequence: Synthetic oligonucleotide
  Antisense strand to SEQ ID NO: 1233284
ucacuaauaacucucagcc

SEQ ID NO: 1233286 - RNA, 19 nt, Artificial Sequence
  Description of Artificial Sequence: Synthetic oligonucleotide
  Sense strand starting at position 969 of SEQ ID NO: 917434
ggaccaucaugagagcauu

SEQ ID NO: 1233287 - RNA, 19 nt, Artificial Sequence
  Description of Artificial Sequence: Synthetic oligonucleotide
  Antisense strand to SEQ ID NO: 1233286
aaugcucucaugauggucc

SEQ ID NO: 1233288 - RNA, 19 nt, Artificial Sequence
  Description of Artificial Sequence: Synthetic oligonucleotide
  Sense strand starting at position 1073 of SEQ ID NO: 917434
agugaugaguuguuugauu

SEQ ID NO: 1233289 - RNA, 19 nt, Artificial Sequence
  Description of Artificial Sequence: Synthetic oligonucleotide
  Antisense strand to SEQ ID NO: 1233288
aaucaaacaacucaucacu

SEQ ID NO: 1233290 - RNA, 19 nt, Artificial Sequence
  Description of Artificial Sequence: Synthetic oligonucleotide
  Sense strand starting at position 1127 of SEQ ID NO: 917434
aaguauuaagguggaugau

SEQ ID NO: 1233291 - RNA, 19 nt, Artificial Sequence
  Description of Artificial Sequence: Synthetic oligonucleotide
  Antisense strand to SEQ ID NO: 1233290
aucauccaccuuaauacuu

SEQ ID NO: 1233292 - RNA, 19 nt, Artificial Sequence
  Description of Artificial Sequence: Synthetic oligonucleotide
  Sense strand starting at position 1154 of SEQ ID NO: 917434
cucugaaaggcuuacugua

SEQ ID NO: 1233293 - RNA, 19 nt, Artificial Sequence
  Description of Artificial Sequence: Synthetic oligonucleotide
  Antisense strand to SEQ ID NO: 1233292
uacaguaagccuuucagag

SEQ ID NO: 1233294 - RNA, 19 nt, Artificial Sequence
  Description of Artificial Sequence: Synthetic oligonucleotide
  Sense strand starting at position 1162 of SEQ ID NO: 917434
ggcuuacuguaacuccaua

SEQ ID NO: 1233295 - RNA, 19 nt, Artificial Sequence
  Description of Artificial Sequence: Synthetic oligonucleotide
  Antisense strand to SEQ ID NO: 1233294
uauggaguuacaguaagcc

SEQ ID NO: 1233296 - RNA, 19 nt, Artificial Sequence
  Description of Artificial Sequence: Synthetic oligonucleotide
  Sense strand starting at position 1185 of SEQ ID NO: 917434
uugauucuugaaugaaacc

SEQ ID NO: 1233297 - RNA, 19 nt, Artificial Sequence
  Description of Artificial Sequence: Synthetic oligonucleotide
  Antisense strand to SEQ ID NO: 1233296
gguuucauucaagaaucaa

SEQ ID NO: 1233298 - RNA, 19 nt, Artificial Sequence
  Description of Artificial Sequence: Synthetic oligonucleotide
  Sense strand starting at position 1373 of SEQ ID NO: 917434
cagaaaggguccuacauaa

SEQ ID NO: 1233299 - RNA, 19 nt, Artificial Sequence
  Description of Artificial Sequence: Synthetic oligonucleotide
  Antisense strand to SEQ ID NO: 1233298
uuauguaggacccuuucug

SEQ ID NO: 1233300 - RNA, 19 nt, Artificial Sequence
  Description of Artificial Sequence: Synthetic oligonucleotide
  Sense strand starting at position 1460 of SEQ ID NO: 917434
cagugcuaaccagauguca

SEQ ID NO: 1233301 - RNA, 19 nt, Artificial Sequence
  Description of Artificial Sequence: Synthetic oligonucleotide
  Antisense strand to SEQ ID NO: 1233300
ugacaucugguuagcacug

SEQ ID NO: 1233302 - RNA, 19 nt, Artificial Sequence
  Description of Artificial Sequence: Synthetic oligonucleotide
  Sense strand starting at position 1489 of SEQ ID NO: 917434
ugcugucagccucaaguuu

SEQ ID NO: 1233303 - RNA, 19 nt, Artificial Sequence
  Description of Artificial Sequence: Synthetic oligonucleotide
  Antisense strand to SEQ ID NO: 1233302
aaacuugaggcugacagca

SEQ ID NO: 1233304 - RNA, 19 nt, Artificial Sequence
  Description of Artificial Sequence: Synthetic oligonucleotide
  Sense strand starting at position 1600 of SEQ ID NO: 917434
gacaguucguugguuccua

SEQ ID NO: 1233305 - RNA, 19 nt, Artificial Sequence
  Description of Artificial Sequence: Synthetic oligonucleotide
  Antisense strand to SEQ ID NO: 1233304
uaggaaccaacgaacuguc

SEQ ID NO: 1233306 - RNA, 19 nt, Artificial Sequence
  Description of Artificial Sequence: Synthetic oligonucleotide
  Sense strand starting at position 1693 of SEQ ID NO: 917434
uggcacuauuuaugggaaa

SEQ ID NO: 1233307 - RNA, 19 nt, Artificial Sequence
  Description of Artificial Sequence: Synthetic oligonucleotide
  Antisense strand to SEQ ID NO: 1233306
uuucccauaaauagugcca

SEQ ID NO: 1233308 - RNA, 19 nt, Artificial Sequence
  Description of Artificial Sequence: Synthetic oligonucleotide
  Sense strand starting at position 1694 of SEQ ID NO: 917434
ggcacuauuuaugggaaag

SEQ ID NO: 1233309 - RNA, 19 nt, Artificial Sequence
  Description of Artificial Sequence: Synthetic oligonucleotide
  Antisense strand to SEQ ID NO: 1233308
cuuucccauaaauagugcc

SEQ ID NO: 1233310 - RNA, 19 nt, Artificial Sequence
  Description of Artificial Sequence: Synthetic oligonucleotide
  Sense strand starting at position 2118 of SEQ ID NO: 917434
uccgcagucggagcgauua

SEQ ID NO: 1233311 - RNA, 19 nt, Artificial Sequence
  Description of Artificial Sequence: Synthetic oligonucleotide
  Antisense strand to SEQ ID NO: 1233310
uaaucgcuccgacugcgga

SEQ ID NO: 1233312 - RNA, 19 nt, Artificial Sequence
  Description of Artificial Sequence: Synthetic oligonucleotide
  Sense strand starting at position 2120 of SEQ ID NO: 917434
cgcagucggagcgauuaga

SEQ ID NO: 1233313 - RNA, 19 nt, Artificial Sequence
  Description of Artificial Sequence: Synthetic oligonucleotide
  Antisense strand to SEQ ID NO: 1233312
ucuaaucgcuccgacugcg

SEQ ID NO: 1233314 - RNA, 19 nt, Artificial Sequence
  Description of Artificial Sequence: Synthetic oligonucleotide
  Sense strand starting at position 3696 of SEQ ID NO: 917434
ucauguucucauugguaau

SEQ ID NO: 1233315 - RNA, 19 nt, Artificial Sequence
  Description of Artificial Sequence: Synthetic oligonucleotide
  Antisense strand to SEQ ID NO: 1233314
auuaccaaugagaacauga

SEQ ID NO: 1233316 - RNA, 19 nt, Artificial Sequence
  Description of Artificial Sequence: Synthetic oligonucleotide
  Sense strand starting at position 3702 of SEQ ID NO: 917434
ucucauugguaauagagaa

SEQ ID NO: 1233317 - RNA, 19 nt, Artificial Sequence
  Description of Artificial Sequence: Synthetic oligonucleotide
  Antisense strand to SEQ ID NO: 1233316
uucucuauuaccaaugaga

SEQ ID NO: 1233318 - RNA, 19 nt, Artificial Sequence
  Description of Artificial Sequence: Synthetic oligonucleotide
  Sense strand starting at position 3800 of SEQ ID NO: 917434
ggagacaaguguuuacuua

SEQ ID NO: 1233319 - RNA, 19 nt, Artificial Sequence
  Description of Artificial Sequence: Synthetic oligonucleotide
  Antisense strand to SEQ ID NO: 1233318
uaaguaaacacuugucucc

SEQ ID NO: 1233320 - RNA, 19 nt, Artificial Sequence
  Description of Artificial Sequence: Synthetic oligonucleotide
  Sense strand starting at position 3801 of SEQ ID NO: 917434
gagacaaguguuuacuuau

SEQ ID NO: 1233321 - RNA, 19 nt, Artificial Sequence
  Description of Artificial Sequence: Synthetic oligonucleotide
  Antisense strand to SEQ ID NO: 1233320
auaaguaaacacuugucuc

SEQ ID NO: 1233322 - RNA, 19 nt, Artificial Sequence
  Description of Artificial Sequence: Synthetic oligonucleotide
  Sense strand starting at position 3848 of SEQ ID NO: 917434
uuaccaucauuguuuguca

SEQ ID NO: 1233323 - RNA, 19 nt, Artificial Sequence
  Description of Artificial Sequence: Synthetic oligonucleotide
  Antisense strand to SEQ ID NO: 1233322
ugacaaacaaugaugguaa

SEQ ID NO: 1233324 - RNA, 19 nt, Artificial Sequence
  Description of Artificial Sequence: Synthetic oligonucleotide
  Sense strand starting at position 3850 of SEQ ID NO: 917434
accaucauuguuugucaca

SEQ ID NO: 1233325 - RNA, 19 nt, Artificial Sequence
  Description of Artificial Sequence: Synthetic oligonucleotide
  Antisense strand to SEQ ID NO: 1233324
ugugacaaacaaugauggu

SEQ ID NO: 1233326 - RNA, 19 nt, Artificial Sequence
  Description of Artificial Sequence: Synthetic oligonucleotide
  Sense strand starting at position 3851 of SEQ ID NO: 917434
ccaucauuguuugucacaa

SEQ ID NO: 1233327 - RNA, 19 nt, Artificial Sequence
  Description of Artificial Sequence: Synthetic oligonucleotide
  Antisense strand to SEQ ID NO: 1233326
uugugacaaacaaugaugg

SEQ ID NO: 1233328 - RNA, 19 nt, Artificial Sequence
  Description of Artificial Sequence: Synthetic oligonucleotide
  Sense strand starting at position 3961 of SEQ ID NO: 917434
auucuaagagcucgugaug

SEQ ID NO: 1233329 - RNA, 19 nt, Artificial Sequence
  Description of Artificial Sequence: Synthetic oligonucleotide
  Antisense strand to SEQ ID NO: 1233328
caucacgagcucuuagaau

SEQ ID NO: 1233330 - RNA, 19 nt, Artificial Sequence
  Description of Artificial Sequence: Synthetic oligonucleotide
  Sense strand starting at position 3979 of SEQ ID NO: 917435
gcgggcaaugaguacaaua

SEQ ID NO: 1233331 - RNA, 19 nt, Artificial Sequence
  Description of Artificial Sequence: Synthetic oligonucleotide
  Antisense strand to SEQ ID NO: 1233330
uauuguacucauugcccgc

SEQ ID NO: 1233332 - RNA, 19 nt, Artificial Sequence
  Description of Artificial Sequence: Synthetic oligonucleotide
  Sense strand starting at position 46 of SEQ ID NO: 917435
agugaugaguuguuugauu

SEQ ID NO: 1233333 - RNA, 19 nt, Artificial Sequence
  Description of Artificial Sequence: Synthetic oligonucleotide
  Antisense strand to SEQ ID NO: 1233332
aaucaaacaacucaucacu

SEQ ID NO: 1233334 - RNA, 19 nt, Artificial Sequence
  Description of Artificial Sequence: Synthetic oligonucleotide
  Sense strand starting at position 100 of SEQ ID NO: 917435
aaguauuaagguggaugau

SEQ ID NO: 1233335 - RNA, 19 nt, Artificial Sequence
  Description of Artificial Sequence: Synthetic oligonucleotide
  Antisense strand to SEQ ID NO: 1233334
aucauccaccuuaauacuu

SEQ ID NO: 1233336 - RNA, 19 nt, Artificial Sequence
  Description of Artificial Sequence: Synthetic oligonucleotide
  Sense strand starting at position 127 of SEQ ID NO: 917435
cucugaaaggcuuacugua

SEQ ID NO: 1233337 - RNA, 19 nt, Artificial Sequence
  Description of Artificial Sequence: Synthetic oligonucleotide
  Antisense strand to SEQ ID NO: 1233336
uacaguaagccuuucagag

SEQ ID NO: 1233338 - RNA, 19 nt, Artificial Sequence
  Description of Artificial Sequence: Synthetic oligonucleotide
  Sense strand starting at position 135 of SEQ ID NO: 917435
ggcuuacuguaacuccaua

SEQ ID NO: 1233339 - RNA, 19 nt, Artificial Sequence
  Description of Artificial Sequence: Synthetic oligonucleotide
  Antisense strand to SEQ ID NO: 1233338
uauggaguuacaguaagcc

SEQ ID NO: 1233340 - RNA, 19 nt, Artificial Sequence
  Description of Artificial Sequence: Synthetic oligonucleotide
  Sense strand starting at position 158 of SEQ ID NO: 917435
uugauucuugaaugaaacc

SEQ ID NO: 1233341 - RNA, 19 nt, Artificial Sequence
  Description of Artificial Sequence: Synthetic oligonucleotide
  Antisense strand to SEQ ID NO: 1233340
gguuucauucaagaaucaa

SEQ ID NO: 1233342 - RNA, 19 nt, Artificial Sequence
  Description of Artificial Sequence: Synthetic oligonucleotide
  Sense strand starting at position 346 of SEQ ID NO: 917435
cagaaaggguccuacauaa

SEQ ID NO: 1233343 - RNA, 19 nt, Artificial Sequence
  Description of Artificial Sequence: Synthetic oligonucleotide
  Antisense strand to SEQ ID NO: 1233342
uuauguaggacccuuucug

SEQ ID NO: 1233344 - RNA, 19 nt, Artificial Sequence
  Description of Artificial Sequence: Synthetic oligonucleotide
  Sense strand starting at position 433 of SEQ ID NO: 917435
cagugcuaaccagauguca

SEQ ID NO: 1233345 - RNA, 19 nt, Artificial Sequence
  Description of Artificial Sequence: Synthetic oligonucleotide
  Antisense strand to SEQ ID NO: 1233344
ugacaucugguuagcacug

SEQ ID NO: 1233346 - RNA, 19 nt, Artificial Sequence
  Description of Artificial Sequence: Synthetic oligonucleotide
  Sense strand starting at position 462 of SEQ ID NO: 917435
ugcugucagccucaaguuu

SEQ ID NO: 1233347 - RNA, 19 nt, Artificial Sequence
  Description of Artificial Sequence: Synthetic oligonucleotide
  Antisense strand to SEQ ID NO: 1233346
aaacuugaggcugacagca

SEQ ID NO: 1233348 - RNA, 19 nt, Artificial Sequence
  Description of Artificial Sequence: Synthetic oligonucleotide
  Sense strand starting at position 666 of SEQ ID NO: 917435
uggcacuauuuaugggaaa

SEQ ID NO: 1233349 - RNA, 19 nt, Artificial Sequence
  Description of Artificial Sequence: Synthetic oligonucleotide
  Antisense strand to SEQ ID NO: 1233348
uuucccauaaauagugcca

SEQ ID NO: 1233350 - RNA, 19 nt, Artificial Sequence
  Description of Artificial Sequence: Synthetic oligonucleotide
  Sense strand starting at position 667 of SEQ ID NO: 917435
ggcacuauuuaugggaaag

SEQ ID NO: 1233351 - RNA, 19 nt, Artificial Sequence
  Description of Artificial Sequence: Synthetic oligonucleotide
  Antisense strand to SEQ ID NO: 1233350
cuuucccauaaauagugcc

SEQ ID NO: 1233352 - RNA, 19 nt, Artificial Sequence
  Description of Artificial Sequence: Synthetic oligonucleotide
  Sense strand starting at position 1091 of SEQ ID NO: 917435
uccgcagucggagcgauua

SEQ ID NO: 1233353 - RNA, 19 nt, Artificial Sequence
  Description of Artificial Sequence: Synthetic oligonucleotide
  Antisense strand to SEQ ID NO: 1233352
uaaucgcuccgacugcgga

SEQ ID NO: 1233354 - RNA, 19 nt, Artificial Sequence
  Description of Artificial Sequence: Synthetic oligonucleotide
  Sense strand starting at position 1093 of SEQ ID NO: 917435
cgcagucggagcgauuaga

SEQ ID NO: 1233355 - RNA, 19 nt, Artificial Sequence
  Description of Artificial Sequence: Synthetic oligonucleotide
  Antisense strand to SEQ ID NO: 1233354
ucuaaucgcuccgacugcg

SEQ ID NO: 1233356 - RNA, 19 nt, Artificial Sequence
  Description of Artificial Sequence: Synthetic oligonucleotide
  Sense strand starting at position 2669 of SEQ ID NO: 917435
ucauguucucauugguaau

SEQ ID NO: 1233357 - RNA, 19 nt, Artificial Sequence
  Description of Artificial Sequence: Synthetic oligonucleotide
  Antisense strand to SEQ ID NO: 1233356
auuaccaaugagaacauga

SEQ ID NO: 1233358 - RNA, 19 nt, Artificial Sequence
  Description of Artificial Sequence: Synthetic oligonucleotide
  Sense strand starting at position 2675 of SEQ ID NO: 917435
ucucauugguaauagagaa

SEQ ID NO: 1233359 - RNA, 19 nt, Artificial Sequence
  Description of Artificial Sequence: Synthetic oligonucleotide
  Antisense strand to SEQ ID NO: 1233358
uucucuauuaccaaugaga

SEQ ID NO: 1233360 - RNA, 19 nt, Artificial Sequence
  Description of Artificial Sequence: Synthetic oligonucleotide
  Sense strand starting at position 2773 of SEQ ID NO: 917435
ggagacaaguguuuacuua

SEQ ID NO: 1233361 - RNA, 19 nt, Artificial Sequence
  Description of Artificial Sequence: Synthetic oligonucleotide
  Antisense strand to SEQ ID NO: 1233360
uaaguaaacacuugucucc

SEQ ID NO: 1233362 - RNA, 19 nt, Artificial Sequence
  Description of Artificial Sequence: Synthetic oligonucleotide
  Sense strand starting at position 2774 of SEQ ID NO: 917435
gagacaaguguuuacuuau

SEQ ID NO: 1233363 - RNA, 19 nt, Artificial Sequence
  Description of Artificial Sequence: Synthetic oligonucleotide
  Antisense strand to SEQ ID NO: 1233362
auaaguaaacacuugucuc

SEQ ID NO: 1233364 - RNA, 19 nt, Artificial Sequence
  Description of Artificial Sequence: Synthetic oligonucleotide
  Sense strand starting at position 2821 of SEQ ID NO: 917435
uuaccaucauuguuuguca

SEQ ID NO: 1233365 - RNA, 19 nt, Artificial Sequence
  Description of Artificial Sequence: Synthetic oligonucleotide
  Antisense strand to SEQ ID NO: 1233364
ugacaaacaaugaugguaa

SEQ ID NO: 1233366 - RNA, 19 nt, Artificial Sequence
  Description of Artificial Sequence: Synthetic oligonucleotide
  Sense strand starting at position 2823 of SEQ ID NO: 917435
accaucauuguuugucaca

SEQ ID NO: 1233367 - RNA, 19 nt, Artificial Sequence
  Description of Artificial Sequence: Synthetic oligonucleotide
  Antisense strand to SEQ ID NO: 1233366
ugugacaaacaaugauggu

SEQ ID NO: 1233368 - RNA, 19 nt, Artificial Sequence
  Description of Artificial Sequence: Synthetic oligonucleotide
  Sense strand starting at position 2824 of SEQ ID NO: 917435
ccaucauuguuugucacaa

SEQ ID NO: 1233369 - RNA, 19 nt, Artificial Sequence
  Description of Artificial Sequence: Synthetic oligonucleotide
  Antisense strand to SEQ ID NO: 1233368
uugugacaaacaaugaugg

SEQ ID NO: 1233370 - RNA, 19 nt, Artificial Sequence
  Description of Artificial Sequence: Synthetic oligonucleotide
  Sense strand starting at position 2934 of SEQ ID NO: 917435
auucuaagagcucgugaug

SEQ ID NO: 1233371 - RNA, 19 nt, Artificial Sequence
  Description of Artificial Sequence: Synthetic oligonucleotide
  Antisense strand to SEQ ID NO: 1233370
caucacgagcucuuagaau

SEQ ID NO: 1233372 - RNA, 19 nt, Artificial Sequence
  Description of Artificial Sequence: Synthetic oligonucleotide
  Sense strand starting at position 2952 of SEQ ID NO: 917435
gcgggcaaugaguacaaua

SEQ ID NO: 1233373 - RNA, 19 nt, Artificial Sequence
  Description of Artificial Sequence: Synthetic oligonucleotide
  Antisense strand to SEQ ID NO: 1233372
uauuguacucauugcccgc

SEQ ID NO: 1233374 - RNA, 19 nt, Artificial Sequence
  Description of Artificial Sequence: Synthetic oligonucleotide
  Sense strand starting at position 3195 of SEQ ID NO: 917435
auuuaaucgaguuguguuc

SEQ ID NO: 1233375 - RNA, 19 nt, Artificial Sequence
  Description of Artificial Sequence: Synthetic oligonucleotide
  Antisense strand to SEQ ID NO: 1233374
gaacacaacucgauuaaau

SEQ ID NO: 1233376 - RNA, 19 nt, Artificial Sequence
  Description of Artificial Sequence: Synthetic oligonucleotide
  Sense strand starting at position 3201 of SEQ ID NO: 917435
ucgaguuguguucaaugaa

SEQ ID NO: 1233377 - RNA, 19 nt, Artificial Sequence
  Description of Artificial Sequence: Synthetic oligonucleotide
  Antisense strand to SEQ ID NO: 1233376
uucauugaacacaacucga

SEQ ID NO: 1233378 - RNA, 19 nt, Artificial Sequence
  Description of Artificial Sequence: Synthetic oligonucleotide
  Sense strand starting at position 3247 of SEQ ID NO: 917435
uuaacacaaucagaggaaa

SEQ ID NO: 1233379 - RNA, 19 nt, Artificial Sequence
  Description of Artificial Sequence: Synthetic oligonucleotide
  Antisense strand to SEQ ID NO: 1233378
uuuccucugauuguguuaa

SEQ ID NO: 1233380 - RNA, 19 nt, Artificial Sequence
  Description of Artificial Sequence: Synthetic oligonucleotide
  Sense strand starting at position 3268 of SEQ ID NO: 917435
cugagauuauauuaugaga

SEQ ID NO: 1233381 - RNA, 19 nt, Artificial Sequence
  Description of Artificial Sequence: Synthetic oligonucleotide
  Antisense strand to SEQ ID NO: 1233380
ucucauaauauaaucucag

SEQ ID NO: 1233382 - RNA, 19 nt, Artificial Sequence
  Description of Artificial Sequence: Synthetic oligonucleotide
  Sense strand starting at position 3302 of SEQ ID NO: 917435
gguucucauccucagauga

SEQ ID NO: 1233383 - RNA, 19 nt, Artificial Sequence
  Description of Artificial Sequence: Synthetic oligonucleotide
  Antisense strand to SEQ ID NO: 1233382
ucaucugaggaugagaacc

SEQ ID NO: 1233384 - RNA, 19 nt, Artificial Sequence
  Description of Artificial Sequence: Synthetic oligonucleotide
  Sense strand starting at position 3317 of SEQ ID NO: 917435
augauauacuaucuaguga

SEQ ID NO: 1233385 - RNA, 19 nt, Artificial Sequence
  Description of Artificial Sequence: Synthetic oligonucleotide
  Antisense strand to SEQ ID NO: 1233384
ucacuagauaguauaucau

SEQ ID NO: 1233386 - RNA, 19 nt, Artificial Sequence
  Description of Artificial Sequence: Synthetic oligonucleotide
  Sense strand starting at position 3330 of SEQ ID NO: 917435
uagugaaaguccuugcuag

SEQ ID NO: 1233387 - RNA, 19 nt, Artificial Sequence
  Description of Artificial Sequence: Synthetic oligonucleotide
  Antisense strand to SEQ ID NO: 1233386
cuagcaaggacuuucacua

SEQ ID NO: 1233388 - RNA, 19 nt, Artificial Sequence
  Description of Artificial Sequence: Synthetic oligonucleotide
  Sense strand starting at position 3437 of SEQ ID NO: 917435
gugucuuccugcucagaaa

SEQ ID NO: 1233389 - RNA, 19 nt, Artificial Sequence
  Description of Artificial Sequence: Synthetic oligonucleotide
  Antisense strand to SEQ ID NO: 1233388
uuucugagcaggaagacac

SEQ ID NO: 1233390 - RNA, 19 nt, Artificial Sequence
  Description of Artificial Sequence: Synthetic oligonucleotide
  Sense strand starting at position 3438 of SEQ ID NO: 917435
ugucuuccugcucagaaac

SEQ ID NO: 1233391 - RNA, 19 nt, Artificial Sequence
  Description of Artificial Sequence: Synthetic oligonucleotide
  Antisense strand to SEQ ID NO: 1233390
guuucugagcaggaagaca

SEQ ID NO: 1233392 - RNA, 19 nt, Artificial Sequence
  Description of Artificial Sequence: Synthetic oligonucleotide
  Sense strand starting at position 3455 of SEQ ID NO: 917435
acacuuguaucuucucagu

SEQ ID NO: 1233393 - RNA, 19 nt, Artificial Sequence
  Description of Artificial Sequence: Synthetic oligonucleotide
  Antisense strand to SEQ ID NO: 1233392
acugagaagauacaagugu

SEQ ID NO: 1233394 - RNA, 19 nt, Artificial Sequence
  Description of Artificial Sequence: Synthetic oligonucleotide
  Sense strand starting at position 3460 of SEQ ID NO: 917435
uguaucuucucaguuguua

SEQ ID NO: 1233395 - RNA, 19 nt, Artificial Sequence
  Description of Artificial Sequence: Synthetic oligonucleotide
  Antisense strand to SEQ ID NO: 1233394
uaacaacugagaagauaca

SEQ ID NO: 1233396 - RNA, 19 nt, Artificial Sequence
  Description of Artificial Sequence: Synthetic oligonucleotide
  Sense strand starting at position 3468 of SEQ ID NO: 917435
cucaguuguuaaucuacau

SEQ ID NO: 1233397 - RNA, 19 nt, Artificial Sequence
  Description of Artificial Sequence: Synthetic oligonucleotide
  Antisense strand to SEQ ID NO: 1233396
auguagauuaacaacugag

SEQ ID NO: 1233398 - RNA, 19 nt, Artificial Sequence
  Description of Artificial Sequence: Synthetic oligonucleotide
  Sense strand starting at position 3472 of SEQ ID NO: 917435
guuguuaaucuacaucucu

SEQ ID NO: 1233399 - RNA, 19 nt, Artificial Sequence
  Description of Artificial Sequence: Synthetic oligonucleotide
  Antisense strand to SEQ ID NO: 1233398
agagauguagauuaacaac

SEQ ID NO: 1233400 - RNA, 19 nt, Artificial Sequence
  Description of Artificial Sequence: Synthetic oligonucleotide
  Sense strand starting at position 3506 of SEQ ID NO: 917435
gguggauguucugcauuua

SEQ ID NO: 1233401 - RNA, 19 nt, Artificial Sequence
  Description of Artificial Sequence: Synthetic oligonucleotide
  Antisense strand to SEQ ID NO: 1233400
uaaaugcagaacauccacc

SEQ ID NO: 1233402 - RNA, 19 nt, Artificial Sequence
  Description of Artificial Sequence: Synthetic oligonucleotide
  Sense strand starting at position 3640 of SEQ ID NO: 917435
uuccaaguuucgguauauc

SEQ ID NO: 1233403 - RNA, 19 nt, Artificial Sequence
  Description of Artificial Sequence: Synthetic oligonucleotide
  Antisense strand to SEQ ID NO: 1233402
gauauaccgaaacuuggaa

SEQ ID NO: 1233404 - RNA, 19 nt, Artificial Sequence
  Description of Artificial Sequence: Synthetic oligonucleotide
  Sense strand starting at position 3643 of SEQ ID NO: 917435
caaguuucgguauaucuuu

SEQ ID NO: 1233405 - RNA, 19 nt, Artificial Sequence
  Description of Artificial Sequence: Synthetic oligonucleotide
  Antisense strand to SEQ ID NO: 1233404
aaagauauaccgaaacuug

SEQ ID NO: 1233406 - RNA, 19 nt, Artificial Sequence
  Description of Artificial Sequence: Synthetic oligonucleotide
  Sense strand starting at position 3648 of SEQ ID NO: 917435
uucgguauaucuuuaggau

SEQ ID NO: 1233407 - RNA, 19 nt, Artificial Sequence
  Description of Artificial Sequence: Synthetic oligonucleotide
  Antisense strand to SEQ ID NO: 1233406
auccuaaagauauaccgaa

SEQ ID NO: 1233408 - RNA, 19 nt, Artificial Sequence
  Description of Artificial Sequence: Synthetic oligonucleotide
  Sense strand starting at position 3649 of SEQ ID NO: 917435
ucgguauaucuuuaggauu

SEQ ID NO: 1233409 - RNA, 19 nt, Artificial Sequence
  Description of Artificial Sequence: Synthetic oligonucleotide
  Antisense strand to SEQ ID NO: 1233408
aauccuaaagauauaccga

SEQ ID NO: 1233410 - RNA, 19 nt, Artificial Sequence
  Description of Artificial Sequence: Synthetic oligonucleotide
  Sense strand starting at position 3777 of SEQ ID NO: 917436
gcaguaucucccugcaaca

SEQ ID NO: 1233411 - RNA, 19 nt, Artificial Sequence
  Description of Artificial Sequence: Synthetic oligonucleotide
  Antisense strand to SEQ ID NO: 1233410
uguugcagggagauacugc

SEQ ID NO: 1233412 - RNA, 19 nt, Artificial Sequence
  Description of Artificial Sequence: Synthetic oligonucleotide
  Sense strand starting at position 169 of SEQ ID NO: 917436
agcaguuagcuauauggaa

SEQ ID NO: 1233413 - RNA, 19 nt, Artificial Sequence
  Description of Artificial Sequence: Synthetic oligonucleotide
  Antisense strand to SEQ ID NO: 1233412
uuccauauagcuaacugcu

SEQ ID NO: 1233414 - RNA, 19 nt, Artificial Sequence
  Description of Artificial Sequence: Synthetic oligonucleotide
  Sense strand starting at position 173 of SEQ ID NO: 917436
guuagcuauauggaagcau

SEQ ID NO: 1233415 - RNA, 19 nt, Artificial Sequence
  Description of Artificial Sequence: Synthetic oligonucleotide
  Antisense strand to SEQ ID NO: 1233414
augcuuccauauagcuaac

SEQ ID NO: 1233416 - RNA, 19 nt, Artificial Sequence
  Description of Artificial Sequence: Synthetic oligonucleotide
  Sense strand starting at position 177 of SEQ ID NO: 917436
gcuauauggaagcauaugu

SEQ ID NO: 1233417 - RNA, 19 nt, Artificial Sequence
  Description of Artificial Sequence: Synthetic oligonucleotide
  Antisense strand to SEQ ID NO: 1233416
acauaugcuuccauauagc

SEQ ID NO: 1233418 - RNA, 19 nt, Artificial Sequence
  Description of Artificial Sequence: Synthetic oligonucleotide
  Sense strand starting at position 191 of SEQ ID NO: 917436
uauguugacuugucagaag

SEQ ID NO: 1233419 - RNA, 19 nt, Artificial Sequence
  Description of Artificial Sequence: Synthetic oligonucleotide
  Antisense strand to SEQ ID NO: 1233418
cuucugacaagucaacaua

SEQ ID NO: 1233420 - RNA, 19 nt, Artificial Sequence
  Description of Artificial Sequence: Synthetic oligonucleotide
  Sense strand starting at position 261 of SEQ ID NO: 917436
ggacuaucuuaacugacuu

SEQ ID NO: 1233421 - RNA, 19 nt, Artificial Sequence
  Description of Artificial Sequence: Synthetic oligonucleotide
  Antisense strand to SEQ ID NO: 1233420
aagucaguuaagauagucc

SEQ ID NO: 1233422 - RNA, 19 nt, Artificial Sequence
  Description of Artificial Sequence: Synthetic oligonucleotide
  Sense strand starting at position 323 of SEQ ID NO: 917436
gaauuaggguccuauuuau

SEQ ID NO: 1233423 - RNA, 19 nt, Artificial Sequence
  Description of Artificial Sequence: Synthetic oligonucleotide
  Antisense strand to SEQ ID NO: 1233422
auaaauaggacccuaauuc

SEQ ID NO: 1233424 - RNA, 19 nt, Artificial Sequence
  Description of Artificial Sequence: Synthetic oligonucleotide
  Sense strand starting at position 419 of SEQ ID NO: 917436
gaguuucuacguuagaaau

SEQ ID NO: 1233425 - RNA, 19 nt, Artificial Sequence
  Description of Artificial Sequence: Synthetic oligonucleotide
  Antisense strand to SEQ ID NO: 1233424
auuucuaacguagaaacuc

SEQ ID NO: 1233426 - RNA, 19 nt, Artificial Sequence
  Description of Artificial Sequence: Synthetic oligonucleotide
  Sense strand starting at position 547 of SEQ ID NO: 917436
agggaaauguucuuaauau

SEQ ID NO: 1233427 - RNA, 19 nt, Artificial Sequence
  Description of Artificial Sequence: Synthetic oligonucleotide
  Antisense strand to SEQ ID NO: 1233426
auauuaagaacauuucccu

SEQ ID NO: 1233428 - RNA, 19 nt, Artificial Sequence
  Description of Artificial Sequence: Synthetic oligonucleotide
  Sense strand starting at position 661 of SEQ ID NO: 917436
gacuuagaaugacuauugu

SEQ ID NO: 1233429 - RNA, 19 nt, Artificial Sequence
  Description of Artificial Sequence: Synthetic oligonucleotide
  Antisense strand to SEQ ID NO: 1233428
acaauagucauucuaaguc

SEQ ID NO: 1233430 - RNA, 19 nt, Artificial Sequence
  Description of Artificial Sequence: Synthetic oligonucleotide
  Sense strand starting at position 670 of SEQ ID NO: 917436
ugacuauuguguuuccaaa

SEQ ID NO: 1233431 - RNA, 19 nt, Artificial Sequence
  Description of Artificial Sequence: Synthetic oligonucleotide
  Antisense strand to SEQ ID NO: 1233430
uuuggaaacacaauaguca

SEQ ID NO: 1233432 - RNA, 19 nt, Artificial Sequence
  Description of Artificial Sequence: Synthetic oligonucleotide
  Sense strand starting at position 746 of SEQ ID NO: 917436
gugucuauaccagagcuua

SEQ ID NO: 1233433 - RNA, 19 nt, Artificial Sequence
  Description of Artificial Sequence: Synthetic oligonucleotide
  Antisense strand to SEQ ID NO: 1233432
uaagcucugguauagacac

SEQ ID NO: 1233434 - RNA, 19 nt, Artificial Sequence
  Description of Artificial Sequence: Synthetic oligonucleotide
  Sense strand starting at position 757 of SEQ ID NO: 917436
agagcuuaacaaugacuau

SEQ ID NO: 1233435 - RNA, 19 nt, Artificial Sequence
  Description of Artificial Sequence: Synthetic oligonucleotide
  Antisense strand to SEQ ID NO: 1233434
auagucauuguuaagcucu

SEQ ID NO: 1233436 - RNA, 19 nt, Artificial Sequence
  Description of Artificial Sequence: Synthetic oligonucleotide
  Sense strand starting at position 782 of SEQ ID NO: 917436
cagagacuauuggugauca

SEQ ID NO: 1233437 - RNA, 19 nt, Artificial Sequence
  Description of Artificial Sequence: Synthetic oligonucleotide
  Antisense strand to SEQ ID NO: 1233436
ugaucaccaauagucucug

SEQ ID NO: 1233438 - RNA, 19 nt, Artificial Sequence
  Description of Artificial Sequence: Synthetic oligonucleotide
  Sense strand starting at position 955 of SEQ ID NO: 917436
augggcagaugaucucauu

SEQ ID NO: 1233439 - RNA, 19 nt, Artificial Sequence
  Description of Artificial Sequence: Synthetic oligonucleotide
  Antisense strand to SEQ ID NO: 1233438
aaugagaucaucugcccau

SEQ ID NO: 1233440 - RNA, 19 nt, Artificial Sequence
  Description of Artificial Sequence: Synthetic oligonucleotide
  Sense strand starting at position 1240 of SEQ ID NO: 917436
gaaauaacuugguuuguau

SEQ ID NO: 1233441 - RNA, 19 nt, Artificial Sequence
  Description of Artificial Sequence: Synthetic oligonucleotide
  Antisense strand to SEQ ID NO: 1233440
auacaaaccaaguuauuuc

SEQ ID NO: 1233442 - RNA, 19 nt, Artificial Sequence
  Description of Artificial Sequence: Synthetic oligonucleotide
  Sense strand starting at position 1334 of SEQ ID NO: 917436
uuuaaugagcaaugcuaau

SEQ ID NO: 1233443 - RNA, 19 nt, Artificial Sequence
  Description of Artificial Sequence: Synthetic oligonucleotide
  Antisense strand to SEQ ID NO: 1233442
auuagcauugcucauuaaa

SEQ ID NO: 1233444 - RNA, 19 nt, Artificial Sequence
  Description of Artificial Sequence: Synthetic oligonucleotide
  Sense strand starting at position 1418 of SEQ ID NO: 917436
gugggauguggacagucaa

SEQ ID NO: 1233445 - RNA, 19 nt, Artificial Sequence
  Description of Artificial Sequence: Synthetic oligonucleotide
  Antisense strand to SEQ ID NO: 1233444
uugacuguccacaucccac

SEQ ID NO: 1233446 - RNA, 19 nt, Artificial Sequence
  Description of Artificial Sequence: Synthetic oligonucleotide
  Sense strand starting at position 1576 of SEQ ID NO: 917436
uuuccuuaaguauguggaa

SEQ ID NO: 1233447 - RNA, 19 nt, Artificial Sequence
  Description of Artificial Sequence: Synthetic oligonucleotide
  Antisense strand to SEQ ID NO: 1233446
uuccacauacuuaaggaaa

SEQ ID NO: 1233448 - RNA, 19 nt, Artificial Sequence
  Description of Artificial Sequence: Synthetic oligonucleotide
  Sense strand starting at position 1578 of SEQ ID NO: 917436
uccuuaaguauguggaaga

SEQ ID NO: 1233449 - RNA, 19 nt, Artificial Sequence
  Description of Artificial Sequence: Synthetic oligonucleotide
  Antisense strand to SEQ ID NO: 1233448
ucuuccacauacuuaagga

SEQ ID NO: 1233450 - RNA, 19 nt, Artificial Sequence
  Description of Artificial Sequence: Synthetic oligonucleotide
  Sense strand starting at position 1611 of SEQ ID NO: 917436
ccacauucgcaaugacaac

SEQ ID NO: 1233451 - RNA, 19 nt, Artificial Sequence
  Description of Artificial Sequence: Synthetic oligonucleotide
  Antisense strand to SEQ ID NO: 1233450
guugucauugcgaaugugg

SEQ ID NO: 1233452 - RNA, 19 nt, Artificial Sequence
  Description of Artificial Sequence: Synthetic oligonucleotide
  Sense strand starting at position 1712 of SEQ ID NO: 917436
guaacuuacagugguuaag

SEQ ID NO: 1233453 - RNA, 19 nt, Artificial Sequence
  Description of Artificial Sequence: Synthetic oligonucleotide
  Antisense strand to SEQ ID NO: 1233452
cuuaaccacuguaaguuac

SEQ ID NO: 1233454 - RNA, 19 nt, Artificial Sequence
  Description of Artificial Sequence: Synthetic oligonucleotide
  Sense strand starting at position 2114 of SEQ ID NO: 917436
aguuauuguggcuaugaca

SEQ ID NO: 1233455 - RNA, 19 nt, Artificial Sequence
  Description of Artificial Sequence: Synthetic oligonucleotide
  Antisense strand to SEQ ID NO: 1233454
ugucauagccacaauaacu

SEQ ID NO: 1233456 - RNA, 19 nt, Artificial Sequence
  Description of Artificial Sequence: Synthetic oligonucleotide
  Sense strand starting at position 2122 of SEQ ID NO: 917436
uggcuaugacagcaagauc

SEQ ID NO: 1233457 - RNA, 19 nt, Artificial Sequence
  Description of Artificial Sequence: Synthetic oligonucleotide
  Antisense strand to SEQ ID NO: 1233456
gaucuugcugucauagcca

SEQ ID NO: 1233458 - RNA, 19 nt, Artificial Sequence
  Description of Artificial Sequence: Synthetic oligonucleotide
  Sense strand starting at position 2161 of SEQ ID NO: 917436
cgucuauugcaagaaagaa

SEQ ID NO: 1233459 - RNA, 19 nt, Artificial Sequence
  Description of Artificial Sequence: Synthetic oligonucleotide
  Antisense strand to SEQ ID NO: 1233458
uucuuucuugcaauagacg

SEQ ID NO: 1233460 - RNA, 19 nt, Artificial Sequence
  Description of Artificial Sequence: Synthetic oligonucleotide
  Sense strand starting at position 2351 of SEQ ID NO: 917436
agaauuguaacaggaagca

SEQ ID NO: 1233461 - RNA, 19 nt, Artificial Sequence
  Description of Artificial Sequence: Synthetic oligonucleotide
  Antisense strand to SEQ ID NO: 1233460
ugcuuccuguuacaauucu

SEQ ID NO: 1233462 - RNA, 19 nt, Artificial Sequence
  Description of Artificial Sequence: Synthetic oligonucleotide
  Sense strand starting at position 2433 of SEQ ID NO: 917436
ccaauuaucucaguggauu

SEQ ID NO: 1233463 - RNA, 19 nt, Artificial Sequence
  Description of Artificial Sequence: Synthetic oligonucleotide
  Antisense strand to SEQ ID NO: 1233462
aauccacugagauaauugg

SEQ ID NO: 1233464 - RNA, 19 nt, Artificial Sequence
  Description of Artificial Sequence: Synthetic oligonucleotide
  Sense strand starting at position 2480 of SEQ ID NO: 917436
ucaagaggcucagugauga

SEQ ID NO: 1233465 - RNA, 19 nt, Artificial Sequence
  Description of Artificial Sequence: Synthetic oligonucleotide
  Antisense strand to SEQ ID NO: 1233464
ucaucacugagccucuuga

SEQ ID NO: 1233466 - RNA, 19 nt, Artificial Sequence
  Description of Artificial Sequence: Synthetic oligonucleotide
  Sense strand starting at position 2488 of SEQ ID NO: 917436
cucagugaugaccgaaaua

SEQ ID NO: 1233467 - RNA, 19 nt, Artificial Sequence
  Description of Artificial Sequence: Synthetic oligonucleotide
  Antisense strand to SEQ ID NO: 1233466
uauuucggucaucacugag

SEQ ID NO: 1233468 - RNA, 19 nt, Artificial Sequence
  Description of Artificial Sequence: Synthetic oligonucleotide
  Sense strand starting at position 2730 of SEQ ID NO: 917436
ugaaucaauguacgauacu

SEQ ID NO: 1233469 - RNA, 19 nt, Artificial Sequence
  Description of Artificial Sequence: Synthetic oligonucleotide
  Antisense strand to SEQ ID NO: 1233468
aguaucguacauugauuca

SEQ ID NO: 1233470 - RNA, 19 nt, Artificial Sequence
  Description of Artificial Sequence: Synthetic oligonucleotide
  Sense strand starting at position 2795 of SEQ ID NO: 917436
ggacacuucuuucugcaua

SEQ ID NO: 1233471 - RNA, 19 nt, Artificial Sequence
  Description of Artificial Sequence: Synthetic oligonucleotide
  Antisense strand to SEQ ID NO: 1233470
uaugcagaaagaagugucc

SEQ ID NO: 1233472 - RNA, 19 nt, Artificial Sequence
  Description of Artificial Sequence: Synthetic oligonucleotide
  Sense strand starting at position 2914 of SEQ ID NO: 917436
gagcaaaccuguucugaau

SEQ ID NO: 1233473 - RNA, 19 nt, Artificial Sequence
  Description of Artificial Sequence: Synthetic oligonucleotide
  Antisense strand to SEQ ID NO: 1233472
auucagaacagguuugcuc

SEQ ID NO: 1233474 - RNA, 19 nt, Artificial Sequence
  Description of Artificial Sequence: Synthetic oligonucleotide
  Sense strand starting at position 3032 of SEQ ID NO: 917436
acccuuacagacugucauu

SEQ ID NO: 1233475 - RNA, 19 nt, Artificial Sequence
  Description of Artificial Sequence: Synthetic oligonucleotide
  Antisense strand to SEQ ID NO: 1233474
aaugacagucuguaagggu

SEQ ID NO: 1233476 - RNA, 19 nt, Artificial Sequence
  Description of Artificial Sequence: Synthetic oligonucleotide
  Sense strand starting at position 3147 of SEQ ID NO: 917436
ucuucuacugaaugaaugu

SEQ ID NO: 1233477 - RNA, 19 nt, Artificial Sequence
  Description of Artificial Sequence: Synthetic oligonucleotide
  Antisense strand to SEQ ID NO: 1233476
acauucauucaguagaaga

SEQ ID NO: 1233478 - RNA, 19 nt, Artificial Sequence
  Description of Artificial Sequence: Synthetic oligonucleotide
  Sense strand starting at position 3213 of SEQ ID NO: 917436
auaaguugagggugacuaa

SEQ ID NO: 1233479 - RNA, 19 nt, Artificial Sequence
  Description of Artificial Sequence: Synthetic oligonucleotide
  Antisense strand to SEQ ID NO: 1233478
uuagucacccucaacuuau

SEQ ID NO: 1233480 - RNA, 19 nt, Artificial Sequence
  Description of Artificial Sequence: Synthetic oligonucleotide
  Sense strand starting at position 3504 of SEQ ID NO: 917436
uugaucaucuuugcuuaga

SEQ ID NO: 1233481 - RNA, 19 nt, Artificial Sequence
  Description of Artificial Sequence: Synthetic oligonucleotide
  Antisense strand to SEQ ID NO: 1233480
ucuaagcaaagaugaucaa

SEQ ID NO: 1233482 - RNA, 19 nt, Artificial Sequence
  Description of Artificial Sequence: Synthetic oligonucleotide
  Sense strand starting at position 3505 of SEQ ID NO: 917436
ugaucaucuuugcuuagac

SEQ ID NO: 1233483 - RNA, 19 nt, Artificial Sequence
  Description of Artificial Sequence: Synthetic oligonucleotide
  Antisense strand to SEQ ID NO: 1233482
gucuaagcaaagaugauca

SEQ ID NO: 1233484 - RNA, 19 nt, Artificial Sequence
  Description of Artificial Sequence: Synthetic oligonucleotide
  Sense strand starting at position 3548 of SEQ ID NO: 917436
auagacaugucucuacaca

SEQ ID NO: 1233485 - RNA, 19 nt, Artificial Sequence
  Description of Artificial Sequence: Synthetic oligonucleotide
  Antisense strand to SEQ ID NO: 1233484
uguguagagacaugucuau

SEQ ID NO: 1233486 - RNA, 19 nt, Artificial Sequence
  Description of Artificial Sequence: Synthetic oligonucleotide
  Sense strand starting at position 3808 of SEQ ID NO: 917436
uuggcaaguugacuaauau

SEQ ID NO: 1233487 - RNA, 19 nt, Artificial Sequence
  Description of Artificial Sequence: Synthetic oligonucleotide
  Antisense strand to SEQ ID NO: 1233486
auauuagucaacuugccaa

SEQ ID NO: 1233488 - RNA, 19 nt, Artificial Sequence
  Description of Artificial Sequence: Synthetic oligonucleotide
  Sense strand starting at position 3809 of SEQ ID NO: 917436
uggcaaguugacuaauauu

SEQ ID NO: 1233489 - RNA, 19 nt, Artificial Sequence
  Description of Artificial Sequence: Synthetic oligonucleotide
  Antisense strand to SEQ ID NO: 1233488
aauauuagucaacuugcca

SEQ ID NO: 1233490 - RNA, 19 nt, Artificial Sequence
  Description of Artificial Sequence: Synthetic oligonucleotide
  Sense strand starting at position 3905 of SEQ ID NO: 917436
uucuguuaacucugaagac

SEQ ID NO: 1233491 - RNA, 19 nt, Artificial Sequence
  Description of Artificial Sequence: Synthetic oligonucleotide
  Antisense strand to SEQ ID NO: 1233490
gucuucagaguuaacagaa

SEQ ID NO: 1233492 - RNA, 19 nt, Artificial Sequence
  Description of Artificial Sequence: Synthetic oligonucleotide
  Sense strand starting at position 3905 of SEQ ID NO: 917437
uucuguuaacucugaagac

SEQ ID NO: 1233493 - RNA, 19 nt, Artificial Sequence
  Description of Artificial Sequence: Synthetic oligonucleotide
  Antisense strand to SEQ ID NO: 1233492
gucuucagaguuaacagaa

SEQ ID NO: 1233494 - RNA, 19 nt, Artificial Sequence
  Description of Artificial Sequence: Synthetic oligonucleotide
  Sense strand starting at position 40 of SEQ ID NO: 917437
ccuaauugaucacugggua

SEQ ID NO: 1233495 - RNA, 19 nt, Artificial Sequence
  Description of Artificial Sequence: Synthetic oligonucleotide
  Antisense strand to SEQ ID NO: 1233494
uacccagugaucaauuagg

SEQ ID NO: 1233496 - RNA, 19 nt, Artificial Sequence
  Description of Artificial Sequence: Synthetic oligonucleotide
  Sense strand starting at position 226 of SEQ ID NO: 917437
gaggaauugugagcuaagg

SEQ ID NO: 1233497 - RNA, 19 nt, Artificial Sequence
  Description of Artificial Sequence: Synthetic oligonucleotide
  Antisense strand to SEQ ID NO: 1233496
ccuuagcucacaauuccuc

SEQ ID NO: 1233498 - RNA, 19 nt, Artificial Sequence
  Description of Artificial Sequence: Synthetic oligonucleotide
  Sense strand starting at position 382 of SEQ ID NO: 917437
uuuagauuacucuguagga

SEQ ID NO: 1233499 - RNA, 19 nt, Artificial Sequence
  Description of Artificial Sequence: Synthetic oligonucleotide
  Antisense strand to SEQ ID NO: 1233498
uccuacagaguaaucuaaa

SEQ ID NO: 1233500 - RNA, 19 nt, Artificial Sequence
  Description of Artificial Sequence: Synthetic oligonucleotide
  Sense strand starting at position 383 of SEQ ID NO: 917437
uuagauuacucuguaggaa

SEQ ID NO: 1233501 - RNA, 19 nt, Artificial Sequence
  Description of Artificial Sequence: Synthetic oligonucleotide
  Antisense strand to SEQ ID NO: 1233500
uuccuacagaguaaucuaa

SEQ ID NO: 1233502 - RNA, 19 nt, Artificial Sequence
  Description of Artificial Sequence: Synthetic oligonucleotide
  Sense strand starting at position 597 of SEQ ID NO: 917437
agguucuaauguuugacaa

SEQ ID NO: 1233503 - RNA, 19 nt, Artificial Sequence
  Description of Artificial Sequence: Synthetic oligonucleotide
  Antisense strand to SEQ ID NO: 1233502
uugucaaacauuagaaccu

SEQ ID NO: 1233504 - RNA, 19 nt, Artificial Sequence
  Description of Artificial Sequence: Synthetic oligonucleotide
  Sense strand starting at position 598 of SEQ ID NO: 917437
gguucuaauguuugacaaa

SEQ ID NO: 1233505 - RNA, 19 nt, Artificial Sequence
  Description of Artificial Sequence: Synthetic oligonucleotide
  Antisense strand to SEQ ID NO: 1233504
uuugucaaacauuagaacc

SEQ ID NO: 1233506 - RNA, 19 nt, Artificial Sequence
  Description of Artificial Sequence: Synthetic oligonucleotide
  Sense strand starting at position 936 of SEQ ID NO: 917437
uggcaaaucaguuggacau

SEQ ID NO: 1233507 - RNA, 19 nt, Artificial Sequence
  Description of Artificial Sequence: Synthetic oligonucleotide
  Antisense strand to SEQ ID NO: 1233506
auguccaacugauuugcca

SEQ ID NO: 1233508 - RNA, 19 nt, Artificial Sequence
  Description of Artificial Sequence: Synthetic oligonucleotide
  Sense strand starting at position 937 of SEQ ID NO: 917437
ggcaaaucaguuggacauu

SEQ ID NO: 1233509 - RNA, 19 nt, Artificial Sequence
  Description of Artificial Sequence: Synthetic oligonucleotide
  Antisense strand to SEQ ID NO: 1233508
aauguccaacugauuugcc

SEQ ID NO: 1233510 - RNA, 19 nt, Artificial Sequence
  Description of Artificial Sequence: Synthetic oligonucleotide
  Sense strand starting at position 968 of SEQ ID NO: 917437
ggcuucuggaaggauuacu

SEQ ID NO: 1233511 - RNA, 19 nt, Artificial Sequence
  Description of Artificial Sequence: Synthetic oligonucleotide
  Antisense strand to SEQ ID NO: 1233510
aguaauccuuccagaagcc

SEQ ID NO: 1233512 - RNA, 19 nt, Artificial Sequence
  Description of Artificial Sequence: Synthetic oligonucleotide
  Sense strand starting at position 979 of SEQ ID NO: 917437
ggauuacuccaaggugauu

SEQ ID NO: 1233513 - RNA, 19 nt, Artificial Sequence
  Description of Artificial Sequence: Synthetic oligonucleotide
  Antisense strand to SEQ ID NO: 1233512
aaucaccuuggaguaaucc

SEQ ID NO: 1233514 - RNA, 19 nt, Artificial Sequence
  Description of Artificial Sequence: Synthetic oligonucleotide
  Sense strand starting at position 1000 of SEQ ID NO: 917437
aguaguuagagguauagau

SEQ ID NO: 1233515 - RNA, 19 nt, Artificial Sequence
  Description of Artificial Sequence: Synthetic oligonucleotide
  Antisense strand to SEQ ID NO: 1233514
aucuauaccucuaacuacu

SEQ ID NO: 1233516 - RNA, 19 nt, Artificial Sequence
  Description of Artificial Sequence: Synthetic oligonucleotide
  Sense strand starting at position 1015 of SEQ ID NO: 917437
agauaaucuuaccucaggu

SEQ ID NO: 1233517 - RNA, 19 nt, Artificial Sequence
  Description of Artificial Sequence: Synthetic oligonucleotide
  Antisense strand to SEQ ID NO: 1233516
accugagguaagauuaucu

SEQ ID NO: 1233518 - RNA, 19 nt, Artificial Sequence
  Description of Artificial Sequence: Synthetic oligonucleotide
  Sense strand starting at position 1059 of SEQ ID NO: 917437
caagauauuggaggcaguu

SEQ ID NO: 1233519 - RNA, 19 nt, Artificial Sequence
  Description of Artificial Sequence: Synthetic oligonucleotide
  Antisense strand to SEQ ID NO: 1233518
aacugccuccaauaucuug

SEQ ID NO: 1233520 - RNA, 19 nt, Artificial Sequence
  Description of Artificial Sequence: Synthetic oligonucleotide
  Sense strand starting at position 1212 of SEQ ID NO: 917437
ccgcuuuaugugcccuaga

SEQ ID NO: 1233521 - RNA, 19 nt, Artificial Sequence
  Description of Artificial Sequence: Synthetic oligonucleotide
  Antisense strand to SEQ ID NO: 1233520
ucuagggcacauaaagcgg

SEQ ID NO: 1233522 - RNA, 19 nt, Artificial Sequence
  Description of Artificial Sequence: Synthetic oligonucleotide
  Sense strand starting at position 1215 of SEQ ID NO: 917437
cuuuaugugcccuagaaau

SEQ ID NO: 1233523 - RNA, 19 nt, Artificial Sequence
  Description of Artificial Sequence: Synthetic oligonucleotide
  Antisense strand to SEQ ID NO: 1233522
auuucuagggcacauaaag

SEQ ID NO: 1233524 - RNA, 19 nt, Artificial Sequence
  Description of Artificial Sequence: Synthetic oligonucleotide
  Sense strand starting at position 1235 of SEQ ID NO: 917437
ucuugauuuccacguugca

SEQ ID NO: 1233525 - RNA, 19 nt, Artificial Sequence
  Description of Artificial Sequence: Synthetic oligonucleotide
  Antisense strand to SEQ ID NO: 1233524
ugcaacguggaaaucaaga

SEQ ID NO: 1233526 - RNA, 19 nt, Artificial Sequence
  Description of Artificial Sequence: Synthetic oligonucleotide
  Sense strand starting at position 1307 of SEQ ID NO: 917437
ccacacuuaggauguuauu

SEQ ID NO: 1233527 - RNA, 19 nt, Artificial Sequence
  Description of Artificial Sequence: Synthetic oligonucleotide
  Antisense strand to SEQ ID NO: 1233526
aauaacauccuaagugugg

SEQ ID NO: 1233528 - RNA, 19 nt, Artificial Sequence
  Description of Artificial Sequence: Synthetic oligonucleotide
  Sense strand starting at position 1815 of SEQ ID NO: 917437
ucuuauagggauugagcca

SEQ ID NO: 1233529 - RNA, 19 nt, Artificial Sequence
  Description of Artificial Sequence: Synthetic oligonucleotide
  Antisense strand to SEQ ID NO: 1233528
uggcucaaucccuauaaga

SEQ ID NO: 1233530 - RNA, 19 nt, Artificial Sequence
  Description of Artificial Sequence: Synthetic oligonucleotide
  Sense strand starting at position 1878 of SEQ ID NO: 917437
caugaagguuuguuggaua

SEQ ID NO: 1233531 - RNA, 19 nt, Artificial Sequence
  Description of Artificial Sequence: Synthetic oligonucleotide
  Antisense strand to SEQ ID NO: 1233530
uauccaacaaaccuucaug

SEQ ID NO: 1233532 - RNA, 19 nt, Artificial Sequence
  Description of Artificial Sequence: Synthetic oligonucleotide
  Sense strand starting at position 2313 of SEQ ID NO: 917437
gucauaguaacagaguacu

SEQ ID NO: 1233533 - RNA, 19 nt, Artificial Sequence
  Description of Artificial Sequence: Synthetic oligonucleotide
  Antisense strand to SEQ ID NO: 1233532
aguacucuguuacuaugac

SEQ ID NO: 1233534 - RNA, 19 nt, Artificial Sequence
  Description of Artificial Sequence: Synthetic oligonucleotide
  Sense strand starting at position 2319 of SEQ ID NO: 917437
guaacagaguacuuuauag

SEQ ID NO: 1233535 - RNA, 19 nt, Artificial Sequence
  Description of Artificial Sequence: Synthetic oligonucleotide
  Antisense strand to SEQ ID NO: 1233534
cuauaaaguacucuguuac

SEQ ID NO: 1233536 - RNA, 19 nt, Artificial Sequence
  Description of Artificial Sequence: Synthetic oligonucleotide
  Sense strand starting at position 2327 of SEQ ID NO: 917437
guacuuuauagauggagac

SEQ ID NO: 1233537 - RNA, 19 nt, Artificial Sequence
  Description of Artificial Sequence: Synthetic oligonucleotide
  Antisense strand to SEQ ID NO: 1233536
gucuccaucuauaaaguac

SEQ ID NO: 1233538 - RNA, 19 nt, Artificial Sequence
  Description of Artificial Sequence: Synthetic oligonucleotide
  Sense strand starting at position 2474 of SEQ ID NO: 917437
guaaaugucaaauagucga

SEQ ID NO: 1233539 - RNA, 19 nt, Artificial Sequence
  Description of Artificial Sequence: Synthetic oligonucleotide
  Antisense strand to SEQ ID NO: 1233538
ucgacuauuugacauuuac

SEQ ID NO: 1233540 - RNA, 19 nt, Artificial Sequence
  Description of Artificial Sequence: Synthetic oligonucleotide
  Sense strand starting at position 2501 of SEQ ID NO: 917437
ugggcagaacgcuguauuu

SEQ ID NO: 1233541 - RNA, 19 nt, Artificial Sequence
  Description of Artificial Sequence: Synthetic oligonucleotide
  Antisense strand to SEQ ID NO: 1233540
aaauacagcguucugccca

SEQ ID NO: 1233542 - RNA, 19 nt, Artificial Sequence
  Description of Artificial Sequence: Synthetic oligonucleotide
  Sense strand starting at position 2551 of SEQ ID NO: 917437
agaagagauuguccuguuu

SEQ ID NO: 1233543 - RNA, 19 nt, Artificial Sequence
  Description of Artificial Sequence: Synthetic oligonucleotide
  Antisense strand to SEQ ID NO: 1233542
aaacaggacaaucucuucu

SEQ ID NO: 1233544 - RNA, 19 nt, Artificial Sequence
  Description of Artificial Sequence: Synthetic oligonucleotide
  Sense strand starting at position 2572 of SEQ ID NO: 917437
aggaguuuauaacccaguu

SEQ ID NO: 1233545 - RNA, 19 nt, Artificial Sequence
  Description of Artificial Sequence: Synthetic oligonucleotide
  Antisense strand to SEQ ID NO: 1233544
aacuggguuauaaacuccu

SEQ ID NO: 1233546 - RNA, 19 nt, Artificial Sequence
  Description of Artificial Sequence: Synthetic oligonucleotide
  Sense strand starting at position 2584 of SEQ ID NO: 917437
cccaguuauugaguuagga

SEQ ID NO: 1233547 - RNA, 19 nt, Artificial Sequence
  Description of Artificial Sequence: Synthetic oligonucleotide
  Antisense strand to SEQ ID NO: 1233546
uccuaacucaauaacuggg

SEQ ID NO: 1233548 - RNA, 19 nt, Artificial Sequence
  Description of Artificial Sequence: Synthetic oligonucleotide
  Sense strand starting at position 2727 of SEQ ID NO: 917437
cgacuuaaggguugaggaa

SEQ ID NO: 1233549 - RNA, 19 nt, Artificial Sequence
  Description of Artificial Sequence: Synthetic oligonucleotide
  Antisense strand to SEQ ID NO: 1233548
uuccucaacccuuaagucg

SEQ ID NO: 1233550 - RNA, 19 nt, Artificial Sequence
  Description of Artificial Sequence: Synthetic oligonucleotide
  Sense strand starting at position 2739 of SEQ ID NO: 917437
ugaggaaauugagugcuuu

SEQ ID NO: 1233551 - RNA, 19 nt, Artificial Sequence
  Description of Artificial Sequence: Synthetic oligonucleotide
  Antisense strand to SEQ ID NO: 1233550
aaagcacucaauuuccuca

SEQ ID NO: 1233552 - RNA, 19 nt, Artificial Sequence
  Description of Artificial Sequence: Synthetic oligonucleotide
  Sense strand starting at position 2740 of SEQ ID NO: 917437
gaggaaauugagugcuuua

SEQ ID NO: 1233553 - RNA, 19 nt, Artificial Sequence
  Description of Artificial Sequence: Synthetic oligonucleotide
  Antisense strand to SEQ ID NO: 1233552
uaaagcacucaauuuccuc

SEQ ID NO: 1233554 - RNA, 19 nt, Artificial Sequence
  Description of Artificial Sequence: Synthetic oligonucleotide
  Sense strand starting at position 2743 of SEQ ID NO: 917437
gaaauugagugcuuuagau

SEQ ID NO: 1233555 - RNA, 19 nt, Artificial Sequence
  Description of Artificial Sequence: Synthetic oligonucleotide
  Antisense strand to SEQ ID NO: 1233554
aucuaaagcacucaauuuc

SEQ ID NO: 1233556 - RNA, 19 nt, Artificial Sequence
  Description of Artificial Sequence: Synthetic oligonucleotide
  Sense strand starting at position 2745 of SEQ ID NO: 917437
aauugagugcuuuagauaa

SEQ ID NO: 1233557 - RNA, 19 nt, Artificial Sequence
  Description of Artificial Sequence: Synthetic oligonucleotide
  Antisense strand to SEQ ID NO: 1233556
uuaucuaaagcacucaauu

SEQ ID NO: 1233558 - RNA, 19 nt, Artificial Sequence
  Description of Artificial Sequence: Synthetic oligonucleotide
  Sense strand starting at position 2749 of SEQ ID NO: 917437
gagugcuuuagauaagguu

SEQ ID NO: 1233559 - RNA, 19 nt, Artificial Sequence
  Description of Artificial Sequence: Synthetic oligonucleotide
  Antisense strand to SEQ ID NO: 1233558
aaccuuaucuaaagcacuc

SEQ ID NO: 1233560 - RNA, 19 nt, Artificial Sequence
  Description of Artificial Sequence: Synthetic oligonucleotide
  Sense strand starting at position 2948 of SEQ ID NO: 917437
ugcaaauucugauucugga

SEQ ID NO: 1233561 - RNA, 19 nt, Artificial Sequence
  Description of Artificial Sequence: Synthetic oligonucleotide
  Antisense strand to SEQ ID NO: 1233560
uccagaaucagaauuugca

SEQ ID NO: 1233562 - RNA, 19 nt, Artificial Sequence
  Description of Artificial Sequence: Synthetic oligonucleotide
  Sense strand starting at position 3076 of SEQ ID NO: 917437
guacccauauuggugacaa

SEQ ID NO: 1233563 - RNA, 19 nt, Artificial Sequence
  Description of Artificial Sequence: Synthetic oligonucleotide
  Antisense strand to SEQ ID NO: 1233562
uugucaccaauauggguac

SEQ ID NO: 1233564 - RNA, 19 nt, Artificial Sequence
  Description of Artificial Sequence: Synthetic oligonucleotide
  Sense strand starting at position 3097 of SEQ ID NO: 917437
gaacuuaccggucacaacu

SEQ ID NO: 1233565 - RNA, 19 nt, Artificial Sequence
  Description of Artificial Sequence: Synthetic oligonucleotide
  Antisense strand to SEQ ID NO: 1233564
aguugugaccgguaaguuc

SEQ ID NO: 1233566 - RNA, 19 nt, Artificial Sequence
  Description of Artificial Sequence: Synthetic oligonucleotide
  Sense strand starting at position 3217 of SEQ ID NO: 917437
gagcuaauagagugaaaug

SEQ ID NO: 1233567 - RNA, 19 nt, Artificial Sequence
  Description of Artificial Sequence: Synthetic oligonucleotide
  Antisense strand to SEQ ID NO: 1233566
cauuucacucuauuagcuc

SEQ ID NO: 1233568 - RNA, 19 nt, Artificial Sequence
  Description of Artificial Sequence: Synthetic oligonucleotide
  Sense strand starting at position 3302 of SEQ ID NO: 917437
gggcaaccgugauuuguac

SEQ ID NO: 1233569 - RNA, 19 nt, Artificial Sequence
  Description of Artificial Sequence: Synthetic oligonucleotide
  Antisense strand to SEQ ID NO: 1233568
guacaaaucacgguugccc

SEQ ID NO: 1233570 - RNA, 19 nt, Artificial Sequence
  Description of Artificial Sequence: Synthetic oligonucleotide
  Sense strand starting at position 3309 of SEQ ID NO: 917437
cgugauuuguacuuguuga

SEQ ID NO: 1233571 - RNA, 19 nt, Artificial Sequence
  Description of Artificial Sequence: Synthetic oligonucleotide
  Antisense strand to SEQ ID NO: 1233570
ucaacaaguacaaaucacg

SEQ ID NO: 1233572 - RNA, 19 nt, Artificial Sequence
  Description of Artificial Sequence: Synthetic oligonucleotide
  Sense strand starting at position 3821 of SEQ ID NO: 917438
cuaggauugaacggcaaau

SEQ ID NO: 1233573 - RNA, 19 nt, Artificial Sequence
  Description of Artificial Sequence: Synthetic oligonucleotide
  Antisense strand to SEQ ID NO: 1233572
auuugccguucaauccuag

SEQ ID NO: 1233574 - RNA, 19 nt, Artificial Sequence
  Description of Artificial Sequence: Synthetic oligonucleotide
  Sense strand starting at position 43 of SEQ ID NO: 917438
gcaauucuggcaugaccua

SEQ ID NO: 1233575 - RNA, 19 nt, Artificial Sequence
  Description of Artificial Sequence: Synthetic oligonucleotide
  Antisense strand to SEQ ID NO: 1233574
uaggucaugccagaauugc

SEQ ID NO: 1233576 - RNA, 19 nt, Artificial Sequence
  Description of Artificial Sequence: Synthetic oligonucleotide
  Sense strand starting at position 55 of SEQ ID NO: 917438
ugaccuaaguaccaaagau

SEQ ID NO: 1233577 - RNA, 19 nt, Artificial Sequence
  Description of Artificial Sequence: Synthetic oligonucleotide
  Antisense strand to SEQ ID NO: 1233576
aucuuugguacuuagguca

SEQ ID NO: 1233578 - RNA, 19 nt, Artificial Sequence
  Description of Artificial Sequence: Synthetic oligonucleotide
  Sense strand starting at position 375 of SEQ ID NO: 917438
cggccaagaucuguucuua

SEQ ID NO: 1233579 - RNA, 19 nt, Artificial Sequence
  Description of Artificial Sequence: Synthetic oligonucleotide
  Antisense strand to SEQ ID NO: 1233578
uaagaacagaucuuggccg

SEQ ID NO: 1233580 - RNA, 19 nt, Artificial Sequence
  Description of Artificial Sequence: Synthetic oligonucleotide
  Sense strand starting at position 379 of SEQ ID NO: 917438
caagaucuguucuuaagag

SEQ ID NO: 1233581 - RNA, 19 nt, Artificial Sequence
  Description of Artificial Sequence: Synthetic oligonucleotide
  Antisense strand to SEQ ID NO: 1233580
cucuuaagaacagaucuug

SEQ ID NO: 1233582 - RNA, 19 nt, Artificial Sequence
  Description of Artificial Sequence: Synthetic oligonucleotide
  Sense strand starting at position 380 of SEQ ID NO: 917438
aagaucuguucuuaagaga

SEQ ID NO: 1233583 - RNA, 19 nt, Artificial Sequence
  Description of Artificial Sequence: Synthetic oligonucleotide
  Antisense strand to SEQ ID NO: 1233582
ucucuuaagaacagaucuu

SEQ ID NO: 1233584 - RNA, 19 nt, Artificial Sequence
  Description of Artificial Sequence: Synthetic oligonucleotide
  Sense strand starting at position 545 of SEQ ID NO: 917438
augucaaucucaguugcaa

SEQ ID NO: 1233585 - RNA, 19 nt, Artificial Sequence
  Description of Artificial Sequence: Synthetic oligonucleotide
  Antisense strand to SEQ ID NO: 1233584
uugcaacugagauugacau

SEQ ID NO: 1233586 - RNA, 19 nt, Artificial Sequence
  Description of Artificial Sequence: Synthetic oligonucleotide
  Sense strand starting at position 676 of SEQ ID NO: 917438
gggauuggaucugcuggaa

SEQ ID NO: 1233587 - RNA, 19 nt, Artificial Sequence
  Description of Artificial Sequence: Synthetic oligonucleotide
  Antisense strand to SEQ ID NO: 1233586
uuccagcagauccaauccc

SEQ ID NO: 1233588 - RNA, 19 nt, Artificial Sequence
  Description of Artificial Sequence: Synthetic oligonucleotide
  Sense strand starting at position 679 of SEQ ID NO: 917438
auuggaucugcuggaaaug

SEQ ID NO: 1233589 - RNA, 19 nt, Artificial Sequence
  Description of Artificial Sequence: Synthetic oligonucleotide
  Antisense strand to SEQ ID NO: 1233588
cauuuccagcagauccaau

SEQ ID NO: 1233590 - RNA, 19 nt, Artificial Sequence
  Description of Artificial Sequence: Synthetic oligonucleotide
  Sense strand starting at position 695 of SEQ ID NO: 917438
augcuaaacacgggucaua

SEQ ID NO: 1233591 - RNA, 19 nt, Artificial Sequence
  Description of Artificial Sequence: Synthetic oligonucleotide
  Antisense strand to SEQ ID NO: 1233590
uaugacccguguuuagcau

SEQ ID NO: 1233592 - RNA, 19 nt, Artificial Sequence
  Description of Artificial Sequence: Synthetic oligonucleotide
  Sense strand starting at position 727 of SEQ ID NO: 917438
caaggaugcugcucaggua

SEQ ID NO: 1233593 - RNA, 19 nt, Artificial Sequence
  Description of Artificial Sequence: Synthetic oligonucleotide
  Antisense strand to SEQ ID NO: 1233592
uaccugagcagcauccuug

SEQ ID NO: 1233594 - RNA, 19 nt, Artificial Sequence
  Description of Artificial Sequence: Synthetic oligonucleotide
  Sense strand starting at position 728 of SEQ ID NO: 917438
aaggaugcugcucagguau

SEQ ID NO: 1233595 - RNA, 19 nt, Artificial Sequence
  Description of Artificial Sequence: Synthetic oligonucleotide
  Antisense strand to SEQ ID NO: 1233594
auaccugagcagcauccuu

SEQ ID NO: 1233596 - RNA, 19 nt, Artificial Sequence
  Description of Artificial Sequence: Synthetic oligonucleotide
  Sense strand starting at position 736 of SEQ ID NO: 917438
ugcucagguauuugguauu

SEQ ID NO: 1233597 - RNA, 19 nt, Artificial Sequence
  Description of Artificial Sequence: Synthetic oligonucleotide
  Antisense strand to SEQ ID NO: 1233596
aauaccaaauaccugagca

SEQ ID NO: 1233598 - RNA, 19 nt, Artificial Sequence
  Description of Artificial Sequence: Synthetic oligonucleotide
  Sense strand starting at position 739 of SEQ ID NO: 917438
ucagguauuugguauuuga

SEQ ID NO: 1233599 - RNA, 19 nt, Artificial Sequence
  Description of Artificial Sequence: Synthetic oligonucleotide
  Antisense strand to SEQ ID NO: 1233598
ucaaauaccaaauaccuga

SEQ ID NO: 1233600 - RNA, 19 nt, Artificial Sequence
  Description of Artificial Sequence: Synthetic oligonucleotide
  Sense strand starting at position 746 of SEQ ID NO: 917438
uuugguauuugaugaucaa

SEQ ID NO: 1233601 - RNA, 19 nt, Artificial Sequence
  Description of Artificial Sequence: Synthetic oligonucleotide
  Antisense strand to SEQ ID NO: 1233600
uugaucaucaaauaccaaa

SEQ ID NO: 1233602 - RNA, 19 nt, Artificial Sequence
  Description of Artificial Sequence: Synthetic oligonucleotide
  Sense strand starting at position 808 of SEQ ID NO: 917438
acaggugggacuuguuuga

SEQ ID NO: 1233603 - RNA, 19 nt, Artificial Sequence
  Description of Artificial Sequence: Synthetic oligonucleotide
  Antisense strand to SEQ ID NO: 1233602
ucaaacaagucccaccugu

SEQ ID NO: 1233604 - RNA, 19 nt, Artificial Sequence
  Description of Artificial Sequence: Synthetic oligonucleotide
  Sense strand starting at position 849 of SEQ ID NO: 917438
ccaggaaucugccugcaga

SEQ ID NO: 1233605 - RNA, 19 nt, Artificial Sequence
  Description of Artificial Sequence: Synthetic oligonucleotide
  Antisense strand to SEQ ID NO: 1233604
ucugcaggcagauuccugg

SEQ ID NO: 1233606 - RNA, 19 nt, Artificial Sequence
  Description of Artificial Sequence: Synthetic oligonucleotide
  Sense strand starting at position 897 of SEQ ID NO: 917438
agggaaguugcaggucuuu

SEQ ID NO: 1233607 - RNA, 19 nt, Artificial Sequence
  Description of Artificial Sequence: Synthetic oligonucleotide
  Antisense strand to SEQ ID NO: 1233606
aaagaccugcaacuucccu

SEQ ID NO: 1233608 - RNA, 19 nt, Artificial Sequence
  Description of Artificial Sequence: Synthetic oligonucleotide
  Sense strand starting at position 924 of SEQ ID NO: 917438
ggcacaacuggcuacaauu

SEQ ID NO: 1233609 - RNA, 19 nt, Artificial Sequence
  Description of Artificial Sequence: Synthetic oligonucleotide
  Antisense strand to SEQ ID NO: 1233608
aauuguagccaguugugcc

SEQ ID NO: 1233610 - RNA, 19 nt, Artificial Sequence
  Description of Artificial Sequence: Synthetic oligonucleotide
  Sense strand starting at position 1197 of SEQ ID NO: 917438
ugggcuuccucaucuuuaa

SEQ ID NO: 1233611 - RNA, 19 nt, Artificial Sequence
  Description of Artificial Sequence: Synthetic oligonucleotide
  Antisense strand to SEQ ID NO: 1233610
uuaaagaugaggaagccca

SEQ ID NO: 1233612 - RNA, 19 nt, Artificial Sequence
  Description of Artificial Sequence: Synthetic oligonucleotide
  Sense strand starting at position 1281 of SEQ ID NO: 917438
gccuuaguuccagggugau

SEQ ID NO: 1233613 - RNA, 19 nt, Artificial Sequence
  Description of Artificial Sequence: Synthetic oligonucleotide
  Antisense strand to SEQ ID NO: 1233612
aucacccuggaacuaaggc

SEQ ID NO: 1233614 - RNA, 19 nt, Artificial Sequence
  Description of Artificial Sequence: Synthetic oligonucleotide
  Sense strand starting at position 1284 of SEQ ID NO: 917438
uuaguuccagggugauuaa

SEQ ID NO: 1233615 - RNA, 19 nt, Artificial Sequence
  Description of Artificial Sequence: Synthetic oligonucleotide
  Antisense strand to SEQ ID NO: 1233614
uuaaucacccuggaacuaa

SEQ ID NO: 1233616 - RNA, 19 nt, Artificial Sequence
  Description of Artificial Sequence: Synthetic oligonucleotide
  Sense strand starting at position 1285 of SEQ ID NO: 917438
uaguuccagggugauuaau

SEQ ID NO: 1233617 - RNA, 19 nt, Artificial Sequence
  Description of Artificial Sequence: Synthetic oligonucleotide
  Antisense strand to SEQ ID NO: 1233616
auuaaucacccuggaacua

SEQ ID NO: 1233618 - RNA, 19 nt, Artificial Sequence
  Description of Artificial Sequence: Synthetic oligonucleotide
  Sense strand starting at position 1287 of SEQ ID NO: 917438
guuccagggugauuaauuc

SEQ ID NO: 1233619 - RNA, 19 nt, Artificial Sequence
  Description of Artificial Sequence: Synthetic oligonucleotide
  Antisense strand to SEQ ID NO: 1233618
gaauuaaucacccuggaac

SEQ ID NO: 1233620 - RNA, 19 nt, Artificial Sequence
  Description of Artificial Sequence: Synthetic oligonucleotide
  Sense strand starting at position 1291 of SEQ ID NO: 917438
cagggugauuaauucggaa

SEQ ID NO: 1233621 - RNA, 19 nt, Artificial Sequence
  Description of Artificial Sequence: Synthetic oligonucleotide
  Antisense strand to SEQ ID NO: 1233620
uuccgaauuaaucacccug

SEQ ID NO: 1233622 - RNA, 19 nt, Artificial Sequence
  Description of Artificial Sequence: Synthetic oligonucleotide
  Sense strand starting at position 1393 of SEQ ID NO: 917438
cacagaaggugccucaaau

SEQ ID NO: 1233623 - RNA, 19 nt, Artificial Sequence
  Description of Artificial Sequence: Synthetic oligonucleotide
  Antisense strand to SEQ ID NO: 1233622
auuugaggcaccuucugug

SEQ ID NO: 1233624 - RNA, 19 nt, Artificial Sequence
  Description of Artificial Sequence: Synthetic oligonucleotide
  Sense strand starting at position 1869 of SEQ ID NO: 917438
cgcguagcuccgagucuuu

SEQ ID NO: 1233625 - RNA, 19 nt, Artificial Sequence
  Description of Artificial Sequence: Synthetic oligonucleotide
  Antisense strand to SEQ ID NO: 1233624
aaagacucggagcuacgcg

SEQ ID NO: 1233626 - RNA, 19 nt, Artificial Sequence
  Description of Artificial Sequence: Synthetic oligonucleotide
  Sense strand starting at position 2258 of SEQ ID NO: 917438
gugcauuucuaagaagucu

SEQ ID NO: 1233627 - RNA, 19 nt, Artificial Sequence
  Description of Artificial Sequence: Synthetic oligonucleotide
  Antisense strand to SEQ ID NO: 1233626
agacuucuuagaaaugcac

SEQ ID NO: 1233628 - RNA, 19 nt, Artificial Sequence
  Description of Artificial Sequence: Synthetic oligonucleotide
  Sense strand starting at position 2421 of SEQ ID NO: 917438
gugggugugagugaggauu

SEQ ID NO: 1233629 - RNA, 19 nt, Artificial Sequence
  Description of Artificial Sequence: Synthetic oligonucleotide
  Antisense strand to SEQ ID NO: 1233628
aauccucacucacacccac

SEQ ID NO: 1233630 - RNA, 19 nt, Artificial Sequence
  Description of Artificial Sequence: Synthetic oligonucleotide
  Sense strand starting at position 2427 of SEQ ID NO: 917438
gugagugaggauugugugu

SEQ ID NO: 1233631 - RNA, 19 nt, Artificial Sequence
  Description of Artificial Sequence: Synthetic oligonucleotide
  Antisense strand to SEQ ID NO: 1233630
acacacaauccucacucac

SEQ ID NO: 1233632 - RNA, 19 nt, Artificial Sequence
  Description of Artificial Sequence: Synthetic oligonucleotide
  Sense strand starting at position 2458 of SEQ ID NO: 917438
gugaaugaggauugagugu

SEQ ID NO: 1233633 - RNA, 19 nt, Artificial Sequence
  Description of Artificial Sequence: Synthetic oligonucleotide
  Antisense strand to SEQ ID NO: 1233632
acacucaauccucauucac

SEQ ID NO: 1233634 - RNA, 19 nt, Artificial Sequence
  Description of Artificial Sequence: Synthetic oligonucleotide
  Sense strand starting at position 2464 of SEQ ID NO: 917438
gaggauugagugugagcau

SEQ ID NO: 1233635 - RNA, 19 nt, Artificial Sequence
  Description of Artificial Sequence: Synthetic oligonucleotide
  Antisense strand to SEQ ID NO: 1233634
augcucacacucaauccuc

SEQ ID NO: 1233636 - RNA, 19 nt, Artificial Sequence
  Description of Artificial Sequence: Synthetic oligonucleotide
  Sense strand starting at position 2499 of SEQ ID NO: 917438
auaguuugcaugugagaau

SEQ ID NO: 1233637 - RNA, 19 nt, Artificial Sequence
  Description of Artificial Sequence: Synthetic oligonucleotide
  Antisense strand to SEQ ID NO: 1233636
auucucacaugcaaacuau

SEQ ID NO: 1233638 - RNA, 19 nt, Artificial Sequence
  Description of Artificial Sequence: Synthetic oligonucleotide
  Sense strand starting at position 2510 of SEQ ID NO: 917438
gugagaauguaugugugau

SEQ ID NO: 1233639 - RNA, 19 nt, Artificial Sequence
  Description of Artificial Sequence: Synthetic oligonucleotide
  Antisense strand to SEQ ID NO: 1233638
aucacacauacauucucac

SEQ ID NO: 1233640 - RNA, 19 nt, Artificial Sequence
  Description of Artificial Sequence: Synthetic oligonucleotide
  Sense strand starting at position 2511 of SEQ ID NO: 917438
ugagaauguaugugugaug

SEQ ID NO: 1233641 - RNA, 19 nt, Artificial Sequence
  Description of Artificial Sequence: Synthetic oligonucleotide
  Antisense strand to SEQ ID NO: 1233640
caucacacauacauucuca

SEQ ID NO: 1233642 - RNA, 19 nt, Artificial Sequence
  Description of Artificial Sequence: Synthetic oligonucleotide
  Sense strand starting at position 2512 of SEQ ID NO: 917438
gagaauguaugugugaugu

SEQ ID NO: 1233643 - RNA, 19 nt, Artificial Sequence
  Description of Artificial Sequence: Synthetic oligonucleotide
  Antisense strand to SEQ ID NO: 1233642
acaucacacauacauucuc

SEQ ID NO: 1233644 - RNA, 19 nt, Artificial Sequence
  Description of Artificial Sequence: Synthetic oligonucleotide
  Sense strand starting at position 2633 of SEQ ID NO: 917438
uccuuucuuuaagaggaca

SEQ ID NO: 1233645 - RNA, 19 nt, Artificial Sequence
  Description of Artificial Sequence: Synthetic oligonucleotide
  Antisense strand to SEQ ID NO: 1233644
uguccucuuaaagaaagga

SEQ ID NO: 1233646 - RNA, 19 nt, Artificial Sequence
  Description of Artificial Sequence: Synthetic oligonucleotide
  Sense strand starting at position 2709 of SEQ ID NO: 917438
uagucauacugcucaaggu

SEQ ID NO: 1233647 - RNA, 19 nt, Artificial Sequence
  Description of Artificial Sequence: Synthetic oligonucleotide
  Antisense strand to SEQ ID NO: 1233646
accuugagcaguaugacua

SEQ ID NO: 1233648 - RNA, 19 nt, Artificial Sequence
  Description of Artificial Sequence: Synthetic oligonucleotide
  Sense strand starting at position 2710 of SEQ ID NO: 917438
agucauacugcucaaggua

SEQ ID NO: 1233649 - RNA, 19 nt, Artificial Sequence
  Description of Artificial Sequence: Synthetic oligonucleotide
  Antisense strand to SEQ ID NO: 1233648
uaccuugagcaguaugacu

SEQ ID NO: 1233650 - RNA, 19 nt, Artificial Sequence
  Description of Artificial Sequence: Synthetic oligonucleotide
  Sense strand starting at position 3878 of SEQ ID NO: 917438
agcaaugucuuggaaacca

SEQ ID NO: 1233651 - RNA, 19 nt, Artificial Sequence
  Description of Artificial Sequence: Synthetic oligonucleotide
  Antisense strand to SEQ ID NO: 1233650
ugguuuccaagacauugcu

SEQ ID NO: 1233652 - RNA, 19 nt, Artificial Sequence
  Description of Artificial Sequence: Synthetic oligonucleotide
  Sense strand starting at position 3912 of SEQ ID NO: 917439
agugauagaucggauuaag

SEQ ID NO: 1233653 - RNA, 19 nt, Artificial Sequence
  Description of Artificial Sequence: Synthetic oligonucleotide
  Antisense strand to SEQ ID NO: 1233652
cuuaauccgaucuaucacu

SEQ ID NO: 1233654 - RNA, 19 nt, Artificial Sequence
  Description of Artificial Sequence: Synthetic oligonucleotide
  Sense strand starting at position 110 of SEQ ID NO: 917439
aaaguuuaucaggguccua

SEQ ID NO: 1233655 - RNA, 19 nt, Artificial Sequence
  Description of Artificial Sequence: Synthetic oligonucleotide
  Antisense strand to SEQ ID NO: 1233654
uaggacccugauaaacuuu

SEQ ID NO: 1233656 - RNA, 19 nt, Artificial Sequence
  Description of Artificial Sequence: Synthetic oligonucleotide
  Sense strand starting at position 187 of SEQ ID NO: 917439
cacaacugucagugacaga

SEQ ID NO: 1233657 - RNA, 19 nt, Artificial Sequence
  Description of Artificial Sequence: Synthetic oligonucleotide
  Antisense strand to SEQ ID NO: 1233656
ucugucacugacaguugug

SEQ ID NO: 1233658 - RNA, 19 nt, Artificial Sequence
  Description of Artificial Sequence: Synthetic oligonucleotide
  Sense strand starting at position 192 of SEQ ID NO: 917439
cugucagugacagaggauu

SEQ ID NO: 1233659 - RNA, 19 nt, Artificial Sequence
  Description of Artificial Sequence: Synthetic oligonucleotide
  Antisense strand to SEQ ID NO: 1233658
aauccucugucacugacag

SEQ ID NO: 1233660 - RNA, 19 nt, Artificial Sequence
  Description of Artificial Sequence: Synthetic oligonucleotide
  Sense strand starting at position 252 of SEQ ID NO: 917439
aaccguuaaucugaguauu

SEQ ID NO: 1233661 - RNA, 19 nt, Artificial Sequence
  Description of Artificial Sequence: Synthetic oligonucleotide
  Antisense strand to SEQ ID NO: 1233660
aauacucagauuaacgguu

SEQ ID NO: 1233662 - RNA, 19 nt, Artificial Sequence
  Description of Artificial Sequence: Synthetic oligonucleotide
  Sense strand starting at position 254 of SEQ ID NO: 917439
ccguuaaucugaguauuuc

SEQ ID NO: 1233663 - RNA, 19 nt, Artificial Sequence
  Description of Artificial Sequence: Synthetic oligonucleotide
  Antisense strand to SEQ ID NO: 1233662
gaaauacucagauuaacgg

SEQ ID NO: 1233664 - RNA, 19 nt, Artificial Sequence
  Description of Artificial Sequence: Synthetic oligonucleotide
  Sense strand starting at position 385 of SEQ ID NO: 917439
ccucaaugcgcuuauuucu

SEQ ID NO: 1233665 - RNA, 19 nt, Artificial Sequence
  Description of Artificial Sequence: Synthetic oligonucleotide
  Antisense strand to SEQ ID NO: 1233664
agaaauaagcgcauugagg

SEQ ID NO: 1233666 - RNA, 19 nt, Artificial Sequence
  Description of Artificial Sequence: Synthetic oligonucleotide
  Sense strand starting at position 865 of SEQ ID NO: 917439
aaacgaugauggguacuaa

SEQ ID NO: 1233667 - RNA, 19 nt, Artificial Sequence
  Description of Artificial Sequence: Synthetic oligonucleotide
  Antisense strand to SEQ ID NO: 1233666
uuaguacccaucaucguuu

SEQ ID NO: 1233668 - RNA, 19 nt, Artificial Sequence
  Description of Artificial Sequence: Synthetic oligonucleotide
  Sense strand starting at position 869 of SEQ ID NO: 917439
gaugauggguacuaacaga

SEQ ID NO: 1233669 - RNA, 19 nt, Artificial Sequence
  Description of Artificial Sequence: Synthetic oligonucleotide
  Antisense strand to SEQ ID NO: 1233668
ucuguuaguacccaucauc

SEQ ID NO: 1233670 - RNA, 19 nt, Artificial Sequence
  Description of Artificial Sequence: Synthetic oligonucleotide
  Sense strand starting at position 926 of SEQ ID NO: 917439
guagcucuggcuuggagaa

SEQ ID NO: 1233671 - RNA, 19 nt, Artificial Sequence
  Description of Artificial Sequence: Synthetic oligonucleotide
  Antisense strand to SEQ ID NO: 1233670
uucuccaagccagagcuac

SEQ ID NO: 1233672 - RNA, 19 nt, Artificial Sequence
  Description of Artificial Sequence: Synthetic oligonucleotide
  Sense strand starting at position 928 of SEQ ID NO: 917439
agcucuggcuuggagaaga

SEQ ID NO: 1233673 - RNA, 19 nt, Artificial Sequence
  Description of Artificial Sequence: Synthetic oligonucleotide
  Antisense strand to SEQ ID NO: 1233672
ucuucuccaagccagagcu

SEQ ID NO: 1233674 - RNA, 19 nt, Artificial Sequence
  Description of Artificial Sequence: Synthetic oligonucleotide
  Sense strand starting at position 1188 of SEQ ID NO: 917439
cgaacugcugcgggaagau

SEQ ID NO: 1233675 - RNA, 19 nt, Artificial Sequence
  Description of Artificial Sequence: Synthetic oligonucleotide
  Antisense strand to SEQ ID NO: 1233674
aucuucccgcagcaguucg

SEQ ID NO: 1233676 - RNA, 19 nt, Artificial Sequence
  Description of Artificial Sequence: Synthetic oligonucleotide
  Sense strand starting at position 1208 of SEQ ID NO: 917439
ccagcuucuggcuaaagga

SEQ ID NO: 1233677 - RNA, 19 nt, Artificial Sequence
  Description of Artificial Sequence: Synthetic oligonucleotide
  Antisense strand to SEQ ID NO: 1233676
uccuuuagccagaagcugg

SEQ ID NO: 1233678 - RNA, 19 nt, Artificial Sequence
  Description of Artificial Sequence: Synthetic oligonucleotide
  Sense strand starting at position 1289 of SEQ ID NO: 917439
aaaucaguuucgccgccaa

SEQ ID NO: 1233679 - RNA, 19 nt, Artificial Sequence
  Description of Artificial Sequence: Synthetic oligonucleotide
  Antisense strand to SEQ ID NO: 1233678
uuggcggcgaaacugauuu

SEQ ID NO: 1233680 - RNA, 19 nt, Artificial Sequence
  Description of Artificial Sequence: Synthetic oligonucleotide
  Sense strand starting at position 2198 of SEQ ID NO: 917439
gcugguaaugucagugguu

SEQ ID NO: 1233681 - RNA, 19 nt, Artificial Sequence
  Description of Artificial Sequence: Synthetic oligonucleotide
  Antisense strand to SEQ ID NO: 1233680
aaccacugacauuaccagc

SEQ ID NO: 1233682 - RNA, 19 nt, Artificial Sequence
  Description of Artificial Sequence: Synthetic oligonucleotide
  Sense strand starting at position 2199 of SEQ ID NO: 917439
cugguaaugucagugguug

SEQ ID NO: 1233683 - RNA, 19 nt, Artificial Sequence
  Description of Artificial Sequence: Synthetic oligonucleotide
  Antisense strand to SEQ ID NO: 1233682
caaccacugacauuaccag

SEQ ID NO: 1233684 - RNA, 19 nt, Artificial Sequence
  Description of Artificial Sequence: Synthetic oligonucleotide
  Sense strand starting at position 2673 of SEQ ID NO: 917439
ggugacacaugccucuauu

SEQ ID NO: 1233685 - RNA, 19 nt, Artificial Sequence
  Description of Artificial Sequence: Synthetic oligonucleotide
  Antisense strand to SEQ ID NO: 1233684
aauagaggcaugugucacc

SEQ ID NO: 1233686 - RNA, 19 nt, Artificial Sequence
  Description of Artificial Sequence: Synthetic oligonucleotide
  Sense strand starting at position 2857 of SEQ ID NO: 917439
cccuccacacaguguaauu

SEQ ID NO: 1233687 - RNA, 19 nt, Artificial Sequence
  Description of Artificial Sequence: Synthetic oligonucleotide
  Antisense strand to SEQ ID NO: 1233686
aauuacacuguguggaggg

SEQ ID NO: 1233688 - RNA, 19 nt, Artificial Sequence
  Description of Artificial Sequence: Synthetic oligonucleotide
  Sense strand starting at position 2887 of SEQ ID NO: 917439
cuuuaagccuuguuuagau

SEQ ID NO: 1233689 - RNA, 19 nt, Artificial Sequence
  Description of Artificial Sequence: Synthetic oligonucleotide
  Antisense strand to SEQ ID NO: 1233688
aucuaaacaaggcuuaaag

SEQ ID NO: 1233690 - RNA, 19 nt, Artificial Sequence
  Description of Artificial Sequence: Synthetic oligonucleotide
  Sense strand starting at position 2902 of SEQ ID NO: 917439
agaugugcuguuggauuau

SEQ ID NO: 1233691 - RNA, 19 nt, Artificial Sequence
  Description of Artificial Sequence: Synthetic oligonucleotide
  Antisense strand to SEQ ID NO: 1233690
auaauccaacagcacaucu

SEQ ID NO: 1233692 - RNA, 19 nt, Artificial Sequence
  Description of Artificial Sequence: Synthetic oligonucleotide
  Sense strand starting at position 3230 of SEQ ID NO: 917439
ggaugugcuauuggauaau

SEQ ID NO: 1233693 - RNA, 19 nt, Artificial Sequence
  Description of Artificial Sequence: Synthetic oligonucleotide
  Antisense strand to SEQ ID NO: 1233692
auuauccaauagcacaucc

SEQ ID NO: 1233694 - RNA, 19 nt, Artificial Sequence
  Description of Artificial Sequence: Synthetic oligonucleotide
  Sense strand starting at position 3233 of SEQ ID NO: 917439
ugugcuauuggauaauuac

SEQ ID NO: 1233695 - RNA, 19 nt, Artificial Sequence
  Description of Artificial Sequence: Synthetic oligonucleotide
  Antisense strand to SEQ ID NO: 1233694
guaauuauccaauagcaca

SEQ ID NO: 1233696 - RNA, 19 nt, Artificial Sequence
  Description of Artificial Sequence: Synthetic oligonucleotide
  Sense strand starting at position 3236 of SEQ ID NO: 917439
gcuauuggauaauuaccua

SEQ ID NO: 1233697 - RNA, 19 nt, Artificial Sequence
  Description of Artificial Sequence: Synthetic oligonucleotide
  Antisense strand to SEQ ID NO: 1233696
uagguaauuauccaauagc

SEQ ID NO: 1233698 - RNA, 19 nt, Artificial Sequence
  Description of Artificial Sequence: Synthetic oligonucleotide
  Sense strand starting at position 3248 of SEQ ID NO: 917439
uuaccuacguuauuuaagu

SEQ ID NO: 1233699 - RNA, 19 nt, Artificial Sequence
  Description of Artificial Sequence: Synthetic oligonucleotide
  Antisense strand to SEQ ID NO: 1233698
acuuaaauaacguagguaa

SEQ ID NO: 1233700 - RNA, 19 nt, Artificial Sequence
  Description of Artificial Sequence: Synthetic oligonucleotide
  Sense strand starting at position 3266 of SEQ ID NO: 917439
ugauuuaauugguguuagu

SEQ ID NO: 1233701 - RNA, 19 nt, Artificial Sequence
  Description of Artificial Sequence: Synthetic oligonucleotide
  Antisense strand to SEQ ID NO: 1233700
acuaacaccaauuaaauca

SEQ ID NO: 1233702 - RNA, 19 nt, Artificial Sequence
  Description of Artificial Sequence: Synthetic oligonucleotide
  Sense strand starting at position 3344 of SEQ ID NO: 917439
aucagagugccugguacau

SEQ ID NO: 1233703 - RNA, 19 nt, Artificial Sequence
  Description of Artificial Sequence: Synthetic oligonucleotide
  Antisense strand to SEQ ID NO: 1233702
auguaccaggcacucugau

SEQ ID NO: 1233704 - RNA, 19 nt, Artificial Sequence
  Description of Artificial Sequence: Synthetic oligonucleotide
  Sense strand starting at position 3395 of SEQ ID NO: 917439
gggcuucuggacuguaauc

SEQ ID NO: 1233705 - RNA, 19 nt, Artificial Sequence
  Description of Artificial Sequence: Synthetic oligonucleotide
  Antisense strand to SEQ ID NO: 1233704
gauuacaguccagaagccc

SEQ ID NO: 1233706 - RNA, 19 nt, Artificial Sequence
  Description of Artificial Sequence: Synthetic oligonucleotide
  Sense strand starting at position 3397 of SEQ ID NO: 917439
gcuucuggacuguaaucga

SEQ ID NO: 1233707 - RNA, 19 nt, Artificial Sequence
  Description of Artificial Sequence: Synthetic oligonucleotide
  Antisense strand to SEQ ID NO: 1233706
ucgauuacaguccagaagc

SEQ ID NO: 1233708 - RNA, 19 nt, Artificial Sequence
  Description of Artificial Sequence: Synthetic oligonucleotide
  Sense strand starting at position 3400 of SEQ ID NO: 917439
ucuggacuguaaucgaguu

SEQ ID NO: 1233709 - RNA, 19 nt, Artificial Sequence
  Description of Artificial Sequence: Synthetic oligonucleotide
  Antisense strand to SEQ ID NO: 1233708
aacucgauuacaguccaga

SEQ ID NO: 1233710 - RNA, 19 nt, Artificial Sequence
  Description of Artificial Sequence: Synthetic oligonucleotide
  Sense strand starting at position 3401 of SEQ ID NO: 917439
cuggacuguaaucgaguua

SEQ ID NO: 1233711 - RNA, 19 nt, Artificial Sequence
  Description of Artificial Sequence: Synthetic oligonucleotide
  Antisense strand to SEQ ID NO: 1233710
uaacucgauuacaguccag

SEQ ID NO: 1233712 - RNA, 19 nt, Artificial Sequence
  Description of Artificial Sequence: Synthetic oligonucleotide
  Sense strand starting at position 3684 of SEQ ID NO: 917439
ucgaguugaaccugggcaa

SEQ ID NO: 1233713 - RNA, 19 nt, Artificial Sequence
  Description of Artificial Sequence: Synthetic oligonucleotide
  Antisense strand to SEQ ID NO: 1233712
uugcccagguucaacucga

SEQ ID NO: 1233714 - RNA, 19 nt, Artificial Sequence
  Description of Artificial Sequence: Synthetic oligonucleotide
  Sense strand starting at position 3696 of SEQ ID NO: 917439
ugggcaacacagugaugua

SEQ ID NO: 1233715 - RNA, 19 nt, Artificial Sequence
  Description of Artificial Sequence: Synthetic oligonucleotide
  Antisense strand to SEQ ID NO: 1233714
uacaucacuguguugccca

SEQ ID NO: 1233716 - RNA, 19 nt, Artificial Sequence
  Description of Artificial Sequence: Synthetic oligonucleotide
  Sense strand starting at position 3697 of SEQ ID NO: 917439
gggcaacacagugauguaa

SEQ ID NO: 1233717 - RNA, 19 nt, Artificial Sequence
  Description of Artificial Sequence: Synthetic oligonucleotide
  Antisense strand to SEQ ID NO: 1233716
uuacaucacuguguugccc

SEQ ID NO: 1233718 - RNA, 19 nt, Artificial Sequence
  Description of Artificial Sequence: Synthetic oligonucleotide
  Sense strand starting at position 3917 of SEQ ID NO: 917439
gggaguacugauuggucau

SEQ ID NO: 1233719 - RNA, 19 nt, Artificial Sequence
  Description of Artificial Sequence: Synthetic oligonucleotide
  Antisense strand to SEQ ID NO: 1233718
augaccaaucaguacuccc

SEQ ID NO: 1233720 - RNA, 19 nt, Artificial Sequence
  Description of Artificial Sequence: Synthetic oligonucleotide
  Sense strand starting at position 3918 of SEQ ID NO: 917439
ggaguacugauuggucaug

SEQ ID NO: 1233721 - RNA, 19 nt, Artificial Sequence
  Description of Artificial Sequence: Synthetic oligonucleotide
  Antisense strand to SEQ ID NO: 1233720
caugaccaaucaguacucc

SEQ ID NO: 1233722 - RNA, 19 nt, Artificial Sequence
  Description of Artificial Sequence: Synthetic oligonucleotide
  Sense strand starting at position 3920 of SEQ ID NO: 917439
aguacugauuggucauguu

SEQ ID NO: 1233723 - RNA, 19 nt, Artificial Sequence
  Description of Artificial Sequence: Synthetic oligonucleotide
  Antisense strand to SEQ ID NO: 1233722
aacaugaccaaucaguacu

SEQ ID NO: 1233724 - RNA, 19 nt, Artificial Sequence
  Description of Artificial Sequence: Synthetic oligonucleotide
  Sense strand starting at position 3923 of SEQ ID NO: 917439
acugauuggucauguugga

SEQ ID NO: 1233725 - RNA, 19 nt, Artificial Sequence
  Description of Artificial Sequence: Synthetic oligonucleotide
  Antisense strand to SEQ ID NO: 1233724
uccaacaugaccaaucagu

SEQ ID NO: 1233726 - RNA, 19 nt, Artificial Sequence
  Description of Artificial Sequence: Synthetic oligonucleotide
  Sense strand starting at position 3928 of SEQ ID NO: 917439
uuggucauguuggagauga

SEQ ID NO: 1233727 - RNA, 19 nt, Artificial Sequence
  Description of Artificial Sequence: Synthetic oligonucleotide
  Antisense strand to SEQ ID NO: 1233726
ucaucuccaacaugaccaa

SEQ ID NO: 1233728 - RNA, 19 nt, Artificial Sequence
  Description of Artificial Sequence: Synthetic oligonucleotide
  Sense strand starting at position 3957 of SEQ ID NO: 917440
agucuaaacuguccucuua

SEQ ID NO: 1233729 - RNA, 19 nt, Artificial Sequence
  Description of Artificial Sequence: Synthetic oligonucleotide
  Antisense strand to SEQ ID NO: 1233728
uaagaggacaguuuagacu

SEQ ID NO: 1233730 - RNA, 19 nt, Artificial Sequence
  Description of Artificial Sequence: Synthetic oligonucleotide
  Sense strand starting at position 24 of SEQ ID NO: 917440
aaauguuagcugggcuagu

SEQ ID NO: 1233731 - RNA, 19 nt, Artificial Sequence
  Description of Artificial Sequence: Synthetic oligonucleotide
  Antisense strand to SEQ ID NO: 1233730
acuagcccagcuaacauuu

SEQ ID NO: 1233732 - RNA, 19 nt, Artificial Sequence
  Description of Artificial Sequence: Synthetic oligonucleotide
  Sense strand starting at position 163 of SEQ ID NO: 917440
aacauuaucuagguauggu

SEQ ID NO: 1233733 - RNA, 19 nt, Artificial Sequence
  Description of Artificial Sequence: Synthetic oligonucleotide
  Antisense strand to SEQ ID NO: 1233732
accauaccuagauaauguu

SEQ ID NO: 1233734 - RNA, 19 nt, Artificial Sequence
  Description of Artificial Sequence: Synthetic oligonucleotide
  Sense strand starting at position 403 of SEQ ID NO: 917440
uaggauauaugcuaaguua

SEQ ID NO: 1233735 - RNA, 19 nt, Artificial Sequence
  Description of Artificial Sequence: Synthetic oligonucleotide
  Antisense strand to SEQ ID NO: 1233734
uaacuuagcauauauccua

SEQ ID NO: 1233736 - RNA, 19 nt, Artificial Sequence
  Description of Artificial Sequence: Synthetic oligonucleotide
  Sense strand starting at position 444 of SEQ ID NO: 917440
uuacaugguugcuuaguau

SEQ ID NO: 1233737 - RNA, 19 nt, Artificial Sequence
  Description of Artificial Sequence: Synthetic oligonucleotide
  Antisense strand to SEQ ID NO: 1233736
auacuaagcaaccauguaa

SEQ ID NO: 1233738 - RNA, 19 nt, Artificial Sequence
  Description of Artificial Sequence: Synthetic oligonucleotide
  Sense strand starting at position 447 of SEQ ID NO: 917440
caugguugcuuaguauuua

SEQ ID NO: 1233739 - RNA, 19 nt, Artificial Sequence
  Description of Artificial Sequence: Synthetic oligonucleotide
  Antisense strand to SEQ ID NO: 1233738
uaaauacuaagcaaccaug

SEQ ID NO: 1233740 - RNA, 19 nt, Artificial Sequence
  Description of Artificial Sequence: Synthetic oligonucleotide
  Sense strand starting at position 448 of SEQ ID NO: 917440
augguugcuuaguauuuau

SEQ ID NO: 1233741 - RNA, 19 nt, Artificial Sequence
  Description of Artificial Sequence: Synthetic oligonucleotide
  Antisense strand to SEQ ID NO: 1233740
auaaauacuaagcaaccau

SEQ ID NO: 1233742 - RNA, 19 nt, Artificial Sequence
  Description of Artificial Sequence: Synthetic oligonucleotide
  Sense strand starting at position 494 of SEQ ID NO: 917440
gcuguaaagggagguaauu

SEQ ID NO: 1233743 - RNA, 19 nt, Artificial Sequence
  Description of Artificial Sequence: Synthetic oligonucleotide
  Antisense strand to SEQ ID NO: 1233742
aauuaccucccuuuacagc

SEQ ID NO: 1233744 - RNA, 19 nt, Artificial Sequence
  Description of Artificial Sequence: Synthetic oligonucleotide
  Sense strand starting at position 538 of SEQ ID NO: 917440
uuugaacgcuuuccaaguu

SEQ ID NO: 1233745 - RNA, 19 nt, Artificial Sequence
  Description of Artificial Sequence: Synthetic oligonucleotide
  Antisense strand to SEQ ID NO: 1233744
aacuuggaaagcguucaaa

SEQ ID NO: 1233746 - RNA, 19 nt, Artificial Sequence
  Description of Artificial Sequence: Synthetic oligonucleotide
  Sense strand starting at position 689 of SEQ ID NO: 917440
gcuagaauuagacauccgu

SEQ ID NO: 1233747 - RNA, 19 nt, Artificial Sequence
  Description of Artificial Sequence: Synthetic oligonucleotide
  Antisense strand to SEQ ID NO: 1233746
acggaugucuaauucuagc

SEQ ID NO: 1233748 - RNA, 19 nt, Artificial Sequence
  Description of Artificial Sequence: Synthetic oligonucleotide
  Sense strand starting at position 852 of SEQ ID NO: 917440
agccguuucucuuauuuaa

SEQ ID NO: 1233749 - RNA, 19 nt, Artificial Sequence
  Description of Artificial Sequence: Synthetic oligonucleotide
  Antisense strand to SEQ ID NO: 1233748
uuaaauaagagaaacggcu

SEQ ID NO: 1233750 - RNA, 19 nt, Artificial Sequence
  Description of Artificial Sequence: Synthetic oligonucleotide
  Sense strand starting at position 866 of SEQ ID NO: 917440
uuuaauucuugguaaguuc

SEQ ID NO: 1233751 - RNA, 19 nt, Artificial Sequence
  Description of Artificial Sequence: Synthetic oligonucleotide
  Antisense strand to SEQ ID NO: 1233750
gaacuuaccaagaauuaaa

SEQ ID NO: 1233752 - RNA, 19 nt, Artificial Sequence
  Description of Artificial Sequence: Synthetic oligonucleotide
  Sense strand starting at position 965 of SEQ ID NO: 917440
uuuauuguuccuugcugga

SEQ ID NO: 1233753 - RNA, 19 nt, Artificial Sequence
  Description of Artificial Sequence: Synthetic oligonucleotide
  Antisense strand to SEQ ID NO: 1233752
uccagcaaggaacaauaaa

SEQ ID NO: 1233754 - RNA, 19 nt, Artificial Sequence
  Description of Artificial Sequence: Synthetic oligonucleotide
  Sense strand starting at position 1105 of SEQ ID NO: 917440
ucgaaauuaucaucucguu

SEQ ID NO: 1233755 - RNA, 19 nt, Artificial Sequence
  Description of Artificial Sequence: Synthetic oligonucleotide
  Antisense strand to SEQ ID NO: 1233754
aacgagaugauaauuucga

SEQ ID NO: 1233756 - RNA, 19 nt, Artificial Sequence
  Description of Artificial Sequence: Synthetic oligonucleotide
  Sense strand starting at position 1244 of SEQ ID NO: 917440
gugccaacauuguuugcua

SEQ ID NO: 1233757 - RNA, 19 nt, Artificial Sequence
  Description of Artificial Sequence: Synthetic oligonucleotide
  Antisense strand to SEQ ID NO: 1233756
uagcaaacaauguuggcac

SEQ ID NO: 1233758 - RNA, 19 nt, Artificial Sequence
  Description of Artificial Sequence: Synthetic oligonucleotide
  Sense strand starting at position 1257 of SEQ ID NO: 917440
uugcuacucuugcgcagaa

SEQ ID NO: 1233759 - RNA, 19 nt, Artificial Sequence
  Description of Artificial Sequence: Synthetic oligonucleotide
  Antisense strand to SEQ ID NO: 1233758
uucugcgcaagaguagcaa

SEQ ID NO: 1233760 - RNA, 19 nt, Artificial Sequence
  Description of Artificial Sequence: Synthetic oligonucleotide
  Sense strand starting at position 1259 of SEQ ID NO: 917440
gcuacucuugcgcagaaca

SEQ ID NO: 1233761 - RNA, 19 nt, Artificial Sequence
  Description of Artificial Sequence: Synthetic oligonucleotide
  Antisense strand to SEQ ID NO: 1233760
uguucugcgcaagaguagc

SEQ ID NO: 1233762 - RNA, 19 nt, Artificial Sequence
  Description of Artificial Sequence: Synthetic oligonucleotide
  Sense strand starting at position 1291 of SEQ ID NO: 917440
cugcaacugcuuuacauga

SEQ ID NO: 1233763 - RNA, 19 nt, Artificial Sequence
  Description of Artificial Sequence: Synthetic oligonucleotide
  Antisense strand to SEQ ID NO: 1233762
ucauguaaagcaguugcag

SEQ ID NO: 1233764 - RNA, 19 nt, Artificial Sequence
  Description of Artificial Sequence: Synthetic oligonucleotide
  Sense strand starting at position 1293 of SEQ ID NO: 917440
gcaacugcuuuacaugaaa

SEQ ID NO: 1233765 - RNA, 19 nt, Artificial Sequence
  Description of Artificial Sequence: Synthetic oligonucleotide
  Antisense strand to SEQ ID NO: 1233764
uuucauguaaagcaguugc

SEQ ID NO: 1233766 - RNA, 19 nt, Artificial Sequence
  Description of Artificial Sequence: Synthetic oligonucleotide
  Sense strand starting at position 1346 of SEQ ID NO: 917440
auuaacuuuccaggcaagu

SEQ ID NO: 1233767 - RNA, 19 nt, Artificial Sequence
  Description of Artificial Sequence: Synthetic oligonucleotide
  Antisense strand to SEQ ID NO: 1233766
acuugccuggaaaguuaau

SEQ ID NO: 1233768 - RNA, 19 nt, Artificial Sequence
  Description of Artificial Sequence: Synthetic oligonucleotide
  Sense strand starting at position 2729 of SEQ ID NO: 917440
aaagaaccguacuaugagu

SEQ ID NO: 1233769 - RNA, 19 nt, Artificial Sequence
  Description of Artificial Sequence: Synthetic oligonucleotide
  Antisense strand to SEQ ID NO: 1233768
acucauaguacgguucuuu

SEQ ID NO: 1233770 - RNA, 19 nt, Artificial Sequence
  Description of Artificial Sequence: Synthetic oligonucleotide
  Sense strand starting at position 2734 of SEQ ID NO: 917440
accguacuaugaguagaaa

SEQ ID NO: 1233771 - RNA, 19 nt, Artificial Sequence
  Description of Artificial Sequence: Synthetic oligonucleotide
  Antisense strand to SEQ ID NO: 1233770
uuucuacucauaguacggu

SEQ ID NO: 1233772 - RNA, 19 nt, Artificial Sequence
  Description of Artificial Sequence: Synthetic oligonucleotide
  Sense strand starting at position 2735 of SEQ ID NO: 917440
ccguacuaugaguagaaau

SEQ ID NO: 1233773 - RNA, 19 nt, Artificial Sequence
  Description of Artificial Sequence: Synthetic oligonucleotide
  Antisense strand to SEQ ID NO: 1233772
auuucuacucauaguacgg

SEQ ID NO: 1233774 - RNA, 19 nt, Artificial Sequence
  Description of Artificial Sequence: Synthetic oligonucleotide
  Sense strand starting at position 2828 of SEQ ID NO: 917440
ggcaguguuuguguucaag

SEQ ID NO: 1233775 - RNA, 19 nt, Artificial Sequence
  Description of Artificial Sequence: Synthetic oligonucleotide
  Antisense strand to SEQ ID NO: 1233774
cuugaacacaaacacugcc

SEQ ID NO: 1233776 - RNA, 19 nt, Artificial Sequence
  Description of Artificial Sequence: Synthetic oligonucleotide
  Sense strand starting at position 2831 of SEQ ID NO: 917440
aguguuuguguucaagcau

SEQ ID NO: 1233777 - RNA, 19 nt, Artificial Sequence
  Description of Artificial Sequence: Synthetic oligonucleotide
  Antisense strand to SEQ ID NO: 1233776
augcuugaacacaaacacu

SEQ ID NO: 1233778 - RNA, 19 nt, Artificial Sequence
  Description of Artificial Sequence: Synthetic oligonucleotide
  Sense strand starting at position 3610 of SEQ ID NO: 917440
acuugcaucuguugaugca

SEQ ID NO: 1233779 - RNA, 19 nt, Artificial Sequence
  Description of Artificial Sequence: Synthetic oligonucleotide
  Antisense strand to SEQ ID NO: 1233778
ugcaucaacagaugcaagu

SEQ ID NO: 1233780 - RNA, 19 nt, Artificial Sequence
  Description of Artificial Sequence: Synthetic oligonucleotide
  Sense strand starting at position 3611 of SEQ ID NO: 917440
cuugcaucuguugaugcaa

SEQ ID NO: 1233781 - RNA, 19 nt, Artificial Sequence
  Description of Artificial Sequence: Synthetic oligonucleotide
  Antisense strand to SEQ ID NO: 1233780
uugcaucaacagaugcaag

SEQ ID NO: 1233782 - RNA, 19 nt, Artificial Sequence
  Description of Artificial Sequence: Synthetic oligonucleotide
  Sense strand starting at position 3630 of SEQ ID NO: 917440
agugcuacuccaggaaucu

SEQ ID NO: 1233783 - RNA, 19 nt, Artificial Sequence
  Description of Artificial Sequence: Synthetic oligonucleotide
  Antisense strand to SEQ ID NO: 1233782
agauuccuggaguagcacu

SEQ ID NO: 1233784 - RNA, 19 nt, Artificial Sequence
  Description of Artificial Sequence: Synthetic oligonucleotide
  Sense strand starting at position 3631 of SEQ ID NO: 917440
gugcuacuccaggaaucuu

SEQ ID NO: 1233785 - RNA, 19 nt, Artificial Sequence
  Description of Artificial Sequence: Synthetic oligonucleotide
  Antisense strand to SEQ ID NO: 1233784
aagauuccuggaguagcac

SEQ ID NO: 1233786 - RNA, 19 nt, Artificial Sequence
  Description of Artificial Sequence: Synthetic oligonucleotide
  Sense strand starting at position 3720 of SEQ ID NO: 917440
ugagauaacugcccuguua

SEQ ID NO: 1233787 - RNA, 19 nt, Artificial Sequence
  Description of Artificial Sequence: Synthetic oligonucleotide
  Antisense strand to SEQ ID NO: 1233786
uaacagggcaguuaucuca

SEQ ID NO: 1233788 - RNA, 19 nt, Artificial Sequence
  Description of Artificial Sequence: Synthetic oligonucleotide
  Sense strand starting at position 3722 of SEQ ID NO: 917440
agauaacugcccuguuaca

SEQ ID NO: 1233789 - RNA, 19 nt, Artificial Sequence
  Description of Artificial Sequence: Synthetic oligonucleotide
  Antisense strand to SEQ ID NO: 1233788
uguaacagggcaguuaucu

SEQ ID NO: 1233790 - RNA, 19 nt, Artificial Sequence
  Description of Artificial Sequence: Synthetic oligonucleotide
  Sense strand starting at position 3920 of SEQ ID NO: 917440
ccugaauucuggccauaaa

SEQ ID NO: 1233791 - RNA, 19 nt, Artificial Sequence
  Description of Artificial Sequence: Synthetic oligonucleotide
  Antisense strand to SEQ ID NO: 1233790
uuuauggccagaauucagg

SEQ ID NO: 1233792 - RNA, 19 nt, Artificial Sequence
  Description of Artificial Sequence: Synthetic oligonucleotide
  Sense strand starting at position 3975 of SEQ ID NO: 917440
uggaaugcuugccuuucua

SEQ ID NO: 1233793 - RNA, 19 nt, Artificial Sequence
  Description of Artificial Sequence: Synthetic oligonucleotide
  Antisense strand to SEQ ID NO: 1233792
uagaaaggcaagcauucca

SEQ ID NO: 1233794 - RNA, 19 nt, Artificial Sequence
  Description of Artificial Sequence: Synthetic oligonucleotide
  Sense strand starting at position 3975 of SEQ ID NO: 917441
uggaaugcuugccuuucua

SEQ ID NO: 1233795 - RNA, 19 nt, Artificial Sequence
  Description of Artificial Sequence: Synthetic oligonucleotide
  Antisense strand to SEQ ID NO: 1233794
uagaaaggcaagcauucca

SEQ ID NO: 1233796 - RNA, 19 nt, Artificial Sequence
  Description of Artificial Sequence: Synthetic oligonucleotide
  Sense strand starting at position 2 of SEQ ID NO: 917441
uggauacuaucucuuugca

SEQ ID NO: 1233797 - RNA, 19 nt, Artificial Sequence
  Description of Artificial Sequence: Synthetic oligonucleotide
  Antisense strand to SEQ ID NO: 1233796
ugcaaagagauaguaucca

SEQ ID NO: 1233798 - RNA, 19 nt, Artificial Sequence
  Description of Artificial Sequence: Synthetic oligonucleotide
  Sense strand starting at position 326 of SEQ ID NO: 917441
uuucuagagucccugaaag

SEQ ID NO: 1233799 - RNA, 19 nt, Artificial Sequence
  Description of Artificial Sequence: Synthetic oligonucleotide
  Antisense strand to SEQ ID NO: 1233798
cuuucagggacucuagaaa

SEQ ID NO: 1233800 - RNA, 19 nt, Artificial Sequence
  Description of Artificial Sequence: Synthetic oligonucleotide
  Sense strand starting at position 328 of SEQ ID NO: 917441
ucuagagucccugaaagcu

SEQ ID NO: 1233801 - RNA, 19 nt, Artificial Sequence
  Description of Artificial Sequence: Synthetic oligonucleotide
  Antisense strand to SEQ ID NO: 1233800
agcuuucagggacucuaga

SEQ ID NO: 1233802 - RNA, 19 nt, Artificial Sequence
  Description of Artificial Sequence: Synthetic oligonucleotide
  Sense strand starting at position 639 of SEQ ID NO: 917441
ugaggugaguucccaguaa

SEQ ID NO: 1233803 - RNA, 19 nt, Artificial Sequence
  Description of Artificial Sequence: Synthetic oligonucleotide
  Antisense strand to SEQ ID NO: 1233802
uuacugggaacucaccuca

SEQ ID NO: 1233804 - RNA, 19 nt, Artificial Sequence
  Description of Artificial Sequence: Synthetic oligonucleotide
  Sense strand starting at position 643 of SEQ ID NO: 917441
gugaguucccaguaaaggc

SEQ ID NO: 1233805 - RNA, 19 nt, Artificial Sequence
  Description of Artificial Sequence: Synthetic oligonucleotide
  Antisense strand to SEQ ID NO: 1233804
gccuuuacugggaacucac

SEQ ID NO: 1233806 - RNA, 19 nt, Artificial Sequence
  Description of Artificial Sequence: Synthetic oligonucleotide
  Sense strand starting at position 659 of SEQ ID NO: 917441
ggccauuagguuugggauu

SEQ ID NO: 1233807 - RNA, 19 nt, Artificial Sequence
  Description of Artificial Sequence: Synthetic oligonucleotide
  Antisense strand to SEQ ID NO: 1233806
aaucccaaaccuaauggcc

SEQ ID NO: 1233808 - RNA, 19 nt, Artificial Sequence
  Description of Artificial Sequence: Synthetic oligonucleotide
  Sense strand starting at position 738 of SEQ ID NO: 917441
cucaaagcccgguauacau

SEQ ID NO: 1233809 - RNA, 19 nt, Artificial Sequence
  Description of Artificial Sequence: Synthetic oligonucleotide
  Antisense strand to SEQ ID NO: 1233808
auguauaccgggcuuugag

SEQ ID NO: 1233810 - RNA, 19 nt, Artificial Sequence
  Description of Artificial Sequence: Synthetic oligonucleotide
  Sense strand starting at position 840 of SEQ ID NO: 917441
ucagaaauauugcuaucag

SEQ ID NO: 1233811 - RNA, 19 nt, Artificial Sequence
  Description of Artificial Sequence: Synthetic oligonucleotide
  Antisense strand to SEQ ID NO: 1233810
cugauagcaauauuucuga

SEQ ID NO: 1233812 - RNA, 19 nt, Artificial Sequence
  Description of Artificial Sequence: Synthetic oligonucleotide
  Sense strand starting at position 1027 of SEQ ID NO: 917441
ggagaaagaucaucugucu

SEQ ID NO: 1233813 - RNA, 19 nt, Artificial Sequence
  Description of Artificial Sequence: Synthetic oligonucleotide
  Antisense strand to SEQ ID NO: 1233812
agacagaugaucuuucucc

SEQ ID NO: 1233814 - RNA, 19 nt, Artificial Sequence
  Description of Artificial Sequence: Synthetic oligonucleotide
  Sense strand starting at position 1041 of SEQ ID NO: 917441
ugucucaucccagaggcua

SEQ ID NO: 1233815 - RNA, 19 nt, Artificial Sequence
  Description of Artificial Sequence: Synthetic oligonucleotide
  Antisense strand to SEQ ID NO: 1233814
uagccucugggaugagaca

SEQ ID NO: 1233816 - RNA, 19 nt, Artificial Sequence
  Description of Artificial Sequence: Synthetic oligonucleotide
  Sense strand starting at position 1094 of SEQ ID NO: 917441
uggaguaaauguuuaaaca

SEQ ID NO: 1233817 - RNA, 19 nt, Artificial Sequence
  Description of Artificial Sequence: Synthetic oligonucleotide
  Antisense strand to SEQ ID NO: 1233816
uguuuaaacauuuacucca

SEQ ID NO: 1233818 - RNA, 19 nt, Artificial Sequence
  Description of Artificial Sequence: Synthetic oligonucleotide
  Sense strand starting at position 1138 of SEQ ID NO: 917441
guaagcacuuucucagaga

SEQ ID NO: 1233819 - RNA, 19 nt, Artificial Sequence
  Description of Artificial Sequence: Synthetic oligonucleotide
  Antisense strand to SEQ ID NO: 1233818
ucucugagaaagugcuuac

SEQ ID NO: 1233820 - RNA, 19 nt, Artificial Sequence
  Description of Artificial Sequence: Synthetic oligonucleotide
  Sense strand starting at position 1163 of SEQ ID NO: 917441
uuuacuuuggaguagagua

SEQ ID NO: 1233821 - RNA, 19 nt, Artificial Sequence
  Description of Artificial Sequence: Synthetic oligonucleotide
  Antisense strand to SEQ ID NO: 1233820
uacucuacuccaaaguaaa

SEQ ID NO: 1233822 - RNA, 19 nt, Artificial Sequence
  Description of Artificial Sequence: Synthetic oligonucleotide
  Sense strand starting at position 1171 of SEQ ID NO: 917441
ggaguagaguacucuguaa

SEQ ID NO: 1233823 - RNA, 19 nt, Artificial Sequence
  Description of Artificial Sequence: Synthetic oligonucleotide
  Antisense strand to SEQ ID NO: 1233822
uuacagaguacucuacucc

SEQ ID NO: 1233824 - RNA, 19 nt, Artificial Sequence
  Description of Artificial Sequence: Synthetic oligonucleotide
  Sense strand starting at position 1173 of SEQ ID NO: 917441
aguagaguacucuguaaca

SEQ ID NO: 1233825 - RNA, 19 nt, Artificial Sequence
  Description of Artificial Sequence: Synthetic oligonucleotide
  Antisense strand to SEQ ID NO: 1233824
uguuacagaguacucuacu

SEQ ID NO: 1233826 - RNA, 19 nt, Artificial Sequence
  Description of Artificial Sequence: Synthetic oligonucleotide
  Sense strand starting at position 1245 of SEQ ID NO: 917441
gccgccuuugagucuuuga

SEQ ID NO: 1233827 - RNA, 19 nt, Artificial Sequence
  Description of Artificial Sequence: Synthetic oligonucleotide
  Antisense strand to SEQ ID NO: 1233826
ucaaagacucaaaggcggc

SEQ ID NO: 1233828 - RNA, 19 nt, Artificial Sequence
  Description of Artificial Sequence: Synthetic oligonucleotide
  Sense strand starting at position 1248 of SEQ ID NO: 917441
gccuuugagucuuugaaau

SEQ ID NO: 1233829 - RNA, 19 nt, Artificial Sequence
  Description of Artificial Sequence: Synthetic oligonucleotide
  Antisense strand to SEQ ID NO: 1233828
auuucaaagacucaaaggc

SEQ ID NO: 1233830 - RNA, 19 nt, Artificial Sequence
  Description of Artificial Sequence: Synthetic oligonucleotide
  Sense strand starting at position 1285 of SEQ ID NO: 917441
uugguuagccaaugaucac

SEQ ID NO: 1233831 - RNA, 19 nt, Artificial Sequence
  Description of Artificial Sequence: Synthetic oligonucleotide
  Antisense strand to SEQ ID NO: 1233830
gugaucauuggcuaaccaa

SEQ ID NO: 1233832 - RNA, 19 nt, Artificial Sequence
  Description of Artificial Sequence: Synthetic oligonucleotide
  Sense strand starting at position 1672 of SEQ ID NO: 917441
gucgaacucgaccaaauua

SEQ ID NO: 1233833 - RNA, 19 nt, Artificial Sequence
  Description of Artificial Sequence: Synthetic oligonucleotide
  Antisense strand to SEQ ID NO: 1233832
uaauuuggucgaguucgac

SEQ ID NO: 1233834 - RNA, 19 nt, Artificial Sequence
  Description of Artificial Sequence: Synthetic oligonucleotide
  Sense strand starting at position 2209 of SEQ ID NO: 917441
auuucugaauccgaauauc

SEQ ID NO: 1233835 - RNA, 19 nt, Artificial Sequence
  Description of Artificial Sequence: Synthetic oligonucleotide
  Antisense strand to SEQ ID NO: 1233834
gauauucggauucagaaau

SEQ ID NO: 1233836 - RNA, 19 nt, Artificial Sequence
  Description of Artificial Sequence: Synthetic oligonucleotide
  Sense strand starting at position 2212 of SEQ ID NO: 917441
ucugaauccgaauauccuu

SEQ ID NO: 1233837 - RNA, 19 nt, Artificial Sequence
  Description of Artificial Sequence: Synthetic oligonucleotide
  Antisense strand to SEQ ID NO: 1233836
aaggauauucggauucaga

SEQ ID NO: 1233838 - RNA, 19 nt, Artificial Sequence
  Description of Artificial Sequence: Synthetic oligonucleotide
  Sense strand starting at position 2220 of SEQ ID NO: 917441
cgaauauccuuucucauag

SEQ ID NO: 1233839 - RNA, 19 nt, Artificial Sequence
  Description of Artificial Sequence: Synthetic oligonucleotide
  Antisense strand to SEQ ID NO: 1233838
cuaugagaaaggauauucg

SEQ ID NO: 1233840 - RNA, 19 nt, Artificial Sequence
  Description of Artificial Sequence: Synthetic oligonucleotide
  Sense strand starting at position 2352 of SEQ ID NO: 917441
gagugcucaaugcagaguu

SEQ ID NO: 1233841 - RNA, 19 nt, Artificial Sequence
  Description of Artificial Sequence: Synthetic oligonucleotide
  Antisense strand to SEQ ID NO: 1233840
aacucugcauugagcacuc

SEQ ID NO: 1233842 - RNA, 19 nt, Artificial Sequence
  Description of Artificial Sequence: Synthetic oligonucleotide
  Sense strand starting at position 2424 of SEQ ID NO: 917441
uugggcaaaucguuaaauu

SEQ ID NO: 1233843 - RNA, 19 nt, Artificial Sequence
  Description of Artificial Sequence: Synthetic oligonucleotide
  Antisense strand to SEQ ID NO: 1233842
aauuuaacgauuugcccaa

SEQ ID NO: 1233844 - RNA, 19 nt, Artificial Sequence
  Description of Artificial Sequence: Synthetic oligonucleotide
  Sense strand starting at position 2488 of SEQ ID NO: 917441
cuuacaggguugucuaauu

SEQ ID NO: 1233845 - RNA, 19 nt, Artificial Sequence
  Description of Artificial Sequence: Synthetic oligonucleotide
  Antisense strand to SEQ ID NO: 1233844
aauuagacaacccuguaag

SEQ ID NO: 1233846 - RNA, 19 nt, Artificial Sequence
  Description of Artificial Sequence: Synthetic oligonucleotide
  Sense strand starting at position 2493 of SEQ ID NO: 917441
aggguugucuaauuaaaca

SEQ ID NO: 1233847 - RNA, 19 nt, Artificial Sequence
  Description of Artificial Sequence: Synthetic oligonucleotide
  Antisense strand to SEQ ID NO: 1233846
uguuuaauuagacaacccu

SEQ ID NO: 1233848 - RNA, 19 nt, Artificial Sequence
  Description of Artificial Sequence: Synthetic oligonucleotide
  Sense strand starting at position 2547 of SEQ ID NO: 917441
ggaggaguugucagugcuc

SEQ ID NO: 1233849 - RNA, 19 nt, Artificial Sequence
  Description of Artificial Sequence: Synthetic oligonucleotide
  Antisense strand to SEQ ID NO: 1233848
gagcacugacaacuccucc

SEQ ID NO: 1233850 - RNA, 19 nt, Artificial Sequence
  Description of Artificial Sequence: Synthetic oligonucleotide
  Sense strand starting at position 2556 of SEQ ID NO: 917441
gucagugcucuccaacaca

SEQ ID NO: 1233851 - RNA, 19 nt, Artificial Sequence
  Description of Artificial Sequence: Synthetic oligonucleotide
  Antisense strand to SEQ ID NO: 1233850
uguguuggagagcacugac

SEQ ID NO: 1233852 - RNA, 19 nt, Artificial Sequence
  Description of Artificial Sequence: Synthetic oligonucleotide
  Sense strand starting at position 2733 of SEQ ID NO: 917441
ggccuuacucuggauuggu

SEQ ID NO: 1233853 - RNA, 19 nt, Artificial Sequence
  Description of Artificial Sequence: Synthetic oligonucleotide
  Antisense strand to SEQ ID NO: 1233852
accaauccagaguaaggcc

SEQ ID NO: 1233854 - RNA, 19 nt, Artificial Sequence
  Description of Artificial Sequence: Synthetic oligonucleotide
  Sense strand starting at position 2767 of SEQ ID NO: 917441
gcaguaauucuaugauugg

SEQ ID NO: 1233855 - RNA, 19 nt, Artificial Sequence
  Description of Artificial Sequence: Synthetic oligonucleotide
  Antisense strand to SEQ ID NO: 1233854
ccaaucauagaauuacugc

SEQ ID NO: 1233856 - RNA, 19 nt, Artificial Sequence
  Description of Artificial Sequence: Synthetic oligonucleotide
  Sense strand starting at position 2797 of SEQ ID NO: 917441
agucuuauuuaggagucaa

SEQ ID NO: 1233857 - RNA, 19 nt, Artificial Sequence
  Description of Artificial Sequence: Synthetic oligonucleotide
  Antisense strand to SEQ ID NO: 1233856
uugacuccuaaauaagacu

SEQ ID NO: 1233858 - RNA, 19 nt, Artificial Sequence
  Description of Artificial Sequence: Synthetic oligonucleotide
  Sense strand starting at position 2827 of SEQ ID NO: 917441
ggcuaaagccaugaaugau

SEQ ID NO: 1233859 - RNA, 19 nt, Artificial Sequence
  Description of Artificial Sequence: Synthetic oligonucleotide
  Antisense strand to SEQ ID NO: 1233858
aucauucauggcuuuagcc

SEQ ID NO: 1233860 - RNA, 19 nt, Artificial Sequence
  Description of Artificial Sequence: Synthetic oligonucleotide
  Sense strand starting at position 2884 of SEQ ID NO: 917441
uuuagacagugccuaaauu

SEQ ID NO: 1233861 - RNA, 19 nt, Artificial Sequence
  Description of Artificial Sequence: Synthetic oligonucleotide
  Antisense strand to SEQ ID NO: 1233860
aauuuaggcacugucuaaa

SEQ ID NO: 1233862 - RNA, 19 nt, Artificial Sequence
  Description of Artificial Sequence: Synthetic oligonucleotide
  Sense strand starting at position 2943 of SEQ ID NO: 917441
ugucuugaucaugguuaca

SEQ ID NO: 1233863 - RNA, 19 nt, Artificial Sequence
  Description of Artificial Sequence: Synthetic oligonucleotide
  Antisense strand to SEQ ID NO: 1233862
uguaaccaugaucaagaca

SEQ ID NO: 1233864 - RNA, 19 nt, Artificial Sequence
  Description of Artificial Sequence: Synthetic oligonucleotide
  Sense strand starting at position 2945 of SEQ ID NO: 917441
ucuugaucaugguuacaga

SEQ ID NO: 1233865 - RNA, 19 nt, Artificial Sequence
  Description of Artificial Sequence: Synthetic oligonucleotide
  Antisense strand to SEQ ID NO: 1233864
ucuguaaccaugaucaaga

SEQ ID NO: 1233866 - RNA, 19 nt, Artificial Sequence
  Description of Artificial Sequence: Synthetic oligonucleotide
  Sense strand starting at position 2981 of SEQ ID NO: 917441
ugguguuccgugaaauugu

SEQ ID NO: 1233867 - RNA, 19 nt, Artificial Sequence
  Description of Artificial Sequence: Synthetic oligonucleotide
  Antisense strand to SEQ ID NO: 1233866
acaauuucacggaacacca

SEQ ID NO: 1233868 - RNA, 19 nt, Artificial Sequence
  Description of Artificial Sequence: Synthetic oligonucleotide
  Sense strand starting at position 3109 of SEQ ID NO: 917441
uuaaaugacaguuguguca

SEQ ID NO: 1233869 - RNA, 19 nt, Artificial Sequence
  Description of Artificial Sequence: Synthetic oligonucleotide
  Antisense strand to SEQ ID NO: 1233868
ugacacaacugucauuuaa

SEQ ID NO: 1233870 - RNA, 19 nt, Artificial Sequence
  Description of Artificial Sequence: Synthetic oligonucleotide
  Sense strand starting at position 3116 of SEQ ID NO: 917441
acaguugugucacugaaug

SEQ ID NO: 1233871 - RNA, 19 nt, Artificial Sequence
  Description of Artificial Sequence: Synthetic oligonucleotide
  Antisense strand to SEQ ID NO: 1233870
cauucagugacacaacugu

SEQ ID NO: 1233872 - RNA, 19 nt, Artificial Sequence
  Description of Artificial Sequence: Synthetic oligonucleotide
  Sense strand starting at position 3118 of SEQ ID NO: 917441
aguugugucacugaaugca

SEQ ID NO: 1233873 - RNA, 19 nt, Artificial Sequence
  Description of Artificial Sequence: Synthetic oligonucleotide
  Antisense strand to SEQ ID NO: 1233872
ugcauucagugacacaacu

SEQ ID NO: 1233874 - RNA, 19 nt, Artificial Sequence
  Description of Artificial Sequence: Synthetic oligonucleotide
  Sense strand starting at position 3168 of SEQ ID NO: 917441
gauacuuaguagcugguaa

SEQ ID NO: 1233875 - RNA, 19 nt, Artificial Sequence
  Description of Artificial Sequence: Synthetic oligonucleotide
  Antisense strand to SEQ ID NO: 1233874
uuaccagcuacuaaguauc

SEQ ID NO: 1233876 - RNA, 19 nt, Artificial Sequence
  Description of Artificial Sequence: Synthetic oligonucleotide
  Sense strand starting at position 3168 of SEQ ID NO: 917442
gauacuuaguagcugguaa

SEQ ID NO: 1233877 - RNA, 19 nt, Artificial Sequence
  Description of Artificial Sequence: Synthetic oligonucleotide
  Antisense strand to SEQ ID NO: 1233876
uuaccagcuacuaaguauc

SEQ ID NO: 1233878 - RNA, 19 nt, Artificial Sequence
  Description of Artificial Sequence: Synthetic oligonucleotide
  Sense strand starting at position 32 of SEQ ID NO: 917442
auuguaacucccugaaguc

SEQ ID NO: 1233879 - RNA, 19 nt, Artificial Sequence
  Description of Artificial Sequence: Synthetic oligonucleotide
  Antisense strand to SEQ ID NO: 1233878
gacuucagggaguuacaau

SEQ ID NO: 1233880 - RNA, 19 nt, Artificial Sequence
  Description of Artificial Sequence: Synthetic oligonucleotide
  Sense strand starting at position 33 of SEQ ID NO: 917442
uuguaacucccugaaguca

SEQ ID NO: 1233881 - RNA, 19 nt, Artificial Sequence
  Description of Artificial Sequence: Synthetic oligonucleotide
  Antisense strand to SEQ ID NO: 1233880
ugacuucagggaguuacaa

SEQ ID NO: 1233882 - RNA, 19 nt, Artificial Sequence
  Description of Artificial Sequence: Synthetic oligonucleotide
  Sense strand starting at position 41 of SEQ ID NO: 917442
cccugaagucaacagucuu

SEQ ID NO: 1233883 - RNA, 19 nt, Artificial Sequence
  Description of Artificial Sequence: Synthetic oligonucleotide
  Antisense strand to SEQ ID NO: 1233882
aagacuguugacuucaggg

SEQ ID NO: 1233884 - RNA, 19 nt, Artificial Sequence
  Description of Artificial Sequence: Synthetic oligonucleotide
  Sense strand starting at position 149 of SEQ ID NO: 917442
ggaguacauuucugaucua

SEQ ID NO: 1233885 - RNA, 19 nt, Artificial Sequence
  Description of Artificial Sequence: Synthetic oligonucleotide
  Antisense strand to SEQ ID NO: 1233884
uagaucagaaauguacucc

SEQ ID NO: 1233886 - RNA, 19 nt, Artificial Sequence
  Description of Artificial Sequence: Synthetic oligonucleotide
  Sense strand starting at position 316 of SEQ ID NO: 917442
guucgugugacuuaaauaa

SEQ ID NO: 1233887 - RNA, 19 nt, Artificial Sequence
  Description of Artificial Sequence: Synthetic oligonucleotide
  Antisense strand to SEQ ID NO: 1233886
uuauuuaagucacacgaac

SEQ ID NO: 1233888 - RNA, 19 nt, Artificial Sequence
  Description of Artificial Sequence: Synthetic oligonucleotide
  Sense strand starting at position 352 of SEQ ID NO: 917442
acaggaggguguguucaua

SEQ ID NO: 1233889 - RNA, 19 nt, Artificial Sequence
  Description of Artificial Sequence: Synthetic oligonucleotide
  Antisense strand to SEQ ID NO: 1233888
uaugaacacacccuccugu

SEQ ID NO: 1233890 - RNA, 19 nt, Artificial Sequence
  Description of Artificial Sequence: Synthetic oligonucleotide
  Sense strand starting at position 425 of SEQ ID NO: 917442
guaucaugguuuccuauua

SEQ ID NO: 1233891 - RNA, 19 nt, Artificial Sequence
  Description of Artificial Sequence: Synthetic oligonucleotide
  Antisense strand to SEQ ID NO: 1233890
uaauaggaaaccaugauac

SEQ ID NO: 1233892 - RNA, 19 nt, Artificial Sequence
  Description of Artificial Sequence: Synthetic oligonucleotide
  Sense strand starting at position 546 of SEQ ID NO: 917442
caauucuacuagucgaaug

SEQ ID NO: 1233893 - RNA, 19 nt, Artificial Sequence
  Description of Artificial Sequence: Synthetic oligonucleotide
  Antisense strand to SEQ ID NO: 1233892
cauucgacuaguagaauug

SEQ ID NO: 1233894 - RNA, 19 nt, Artificial Sequence
  Description of Artificial Sequence: Synthetic oligonucleotide
  Sense strand starting at position 548 of SEQ ID NO: 917442
auucuacuagucgaaugua

SEQ ID NO: 1233895 - RNA, 19 nt, Artificial Sequence
  Description of Artificial Sequence: Synthetic oligonucleotide
  Antisense strand to SEQ ID NO: 1233894
uacauucgacuaguagaau

SEQ ID NO: 1233896 - RNA, 19 nt, Artificial Sequence
  Description of Artificial Sequence: Synthetic oligonucleotide
  Sense strand starting at position 551 of SEQ ID NO: 917442
cuacuagucgaauguaagu

SEQ ID NO: 1233897 - RNA, 19 nt, Artificial Sequence
  Description of Artificial Sequence: Synthetic oligonucleotide
  Antisense strand to SEQ ID NO: 1233896
acuuacauucgacuaguag

SEQ ID NO: 1233898 - RNA, 19 nt, Artificial Sequence
  Description of Artificial Sequence: Synthetic oligonucleotide
  Sense strand starting at position 553 of SEQ ID NO: 917442
acuagucgaauguaaguaa

SEQ ID NO: 1233899 - RNA, 19 nt, Artificial Sequence
  Description of Artificial Sequence: Synthetic oligonucleotide
  Antisense strand to SEQ ID NO: 1233898
uuacuuacauucgacuagu

SEQ ID NO: 1233900 - RNA, 19 nt, Artificial Sequence
  Description of Artificial Sequence: Synthetic oligonucleotide
  Sense strand starting at position 556 of SEQ ID NO: 917442
agucgaauguaaguaagau

SEQ ID NO: 1233901 - RNA, 19 nt, Artificial Sequence
  Description of Artificial Sequence: Synthetic oligonucleotide
  Antisense strand to SEQ ID NO: 1233900
aucuuacuuacauucgacu

SEQ ID NO: 1233902 - RNA, 19 nt, Artificial Sequence
  Description of Artificial Sequence: Synthetic oligonucleotide
  Sense strand starting at position 557 of SEQ ID NO: 917442
gucgaauguaaguaagaua

SEQ ID NO: 1233903 - RNA, 19 nt, Artificial Sequence
  Description of Artificial Sequence: Synthetic oligonucleotide
  Antisense strand to SEQ ID NO: 1233902
uaucuuacuuacauucgac

SEQ ID NO: 1233904 - RNA, 19 nt, Artificial Sequence
  Description of Artificial Sequence: Synthetic oligonucleotide
  Sense strand starting at position 595 of SEQ ID NO: 917442
agauacaccugggauugaa

SEQ ID NO: 1233905 - RNA, 19 nt, Artificial Sequence
  Description of Artificial Sequence: Synthetic oligonucleotide
  Antisense strand to SEQ ID NO: 1233904
uucaaucccagguguaucu

SEQ ID NO: 1233906 - RNA, 19 nt, Artificial Sequence
  Description of Artificial Sequence: Synthetic oligonucleotide
  Sense strand starting at position 627 of SEQ ID NO: 917442
gguaacuaugucuggacua

SEQ ID NO: 1233907 - RNA, 19 nt, Artificial Sequence
  Description of Artificial Sequence: Synthetic oligonucleotide
  Antisense strand to SEQ ID NO: 1233906
uaguccagacauaguuacc

SEQ ID NO: 1233908 - RNA, 19 nt, Artificial Sequence
  Description of Artificial Sequence: Synthetic oligonucleotide
  Sense strand starting at position 669 of SEQ ID NO: 917442
cggugaugacgugaguauu

SEQ ID NO: 1233909 - RNA, 19 nt, Artificial Sequence
  Description of Artificial Sequence: Synthetic oligonucleotide
  Antisense strand to SEQ ID NO: 1233908
aauacucacgucaucaccg

SEQ ID NO: 1233910 - RNA, 19 nt, Artificial Sequence
  Description of Artificial Sequence: Synthetic oligonucleotide
  Sense strand starting at position 686 of SEQ ID NO: 917442
uugggaaauguagguuauu

SEQ ID NO: 1233911 - RNA, 19 nt, Artificial Sequence
  Description of Artificial Sequence: Synthetic oligonucleotide
  Antisense strand to SEQ ID NO: 1233910
aauaaccuacauuucccaa

SEQ ID NO: 1233912 - RNA, 19 nt, Artificial Sequence
  Description of Artificial Sequence: Synthetic oligonucleotide
  Sense strand starting at position 722 of SEQ ID NO: 917442
aaggcacaugucugacuau

SEQ ID NO: 1233913 - RNA, 19 nt, Artificial Sequence
  Description of Artificial Sequence: Synthetic oligonucleotide
  Antisense strand to SEQ ID NO: 1233912
auagucagacaugugccuu

SEQ ID NO: 1233914 - RNA, 19 nt, Artificial Sequence
  Description of Artificial Sequence: Synthetic oligonucleotide
  Sense strand starting at position 734 of SEQ ID NO: 917442
ugacuauccuagucacaca

SEQ ID NO: 1233915 - RNA, 19 nt, Artificial Sequence
  Description of Artificial Sequence: Synthetic oligonucleotide
  Antisense strand to SEQ ID NO: 1233914
ugugugacuaggauaguca

SEQ ID NO: 1233916 - RNA, 19 nt, Artificial Sequence
  Description of Artificial Sequence: Synthetic oligonucleotide
  Sense strand starting at position 925 of SEQ ID NO: 917442
cugagaauacggugucuug

SEQ ID NO: 1233917 - RNA, 19 nt, Artificial Sequence
  Description of Artificial Sequence: Synthetic oligonucleotide
  Antisense strand to SEQ ID NO: 1233916
caagacaccguauucucag

SEQ ID NO: 1233918 - RNA, 19 nt, Artificial Sequence
  Description of Artificial Sequence: Synthetic oligonucleotide
  Sense strand starting at position 952 of SEQ ID NO: 917442
ggaagaacuuccucucauu

SEQ ID NO: 1233919 - RNA, 19 nt, Artificial Sequence
  Description of Artificial Sequence: Synthetic oligonucleotide
  Antisense strand to SEQ ID NO: 1233918
aaugagaggaaguucuucc

SEQ ID NO: 1233920 - RNA, 19 nt, Artificial Sequence
  Description of Artificial Sequence: Synthetic oligonucleotide
  Sense strand starting at position 2587 of SEQ ID NO: 917442
cccaaagcgcccuaggauu

SEQ ID NO: 1233921 - RNA, 19 nt, Artificial Sequence
  Description of Artificial Sequence: Synthetic oligonucleotide
  Antisense strand to SEQ ID NO: 1233920
aauccuagggcgcuuuggg

SEQ ID NO: 1233922 - RNA, 19 nt, Artificial Sequence
  Description of Artificial Sequence: Synthetic oligonucleotide
  Sense strand starting at position 2652 of SEQ ID NO: 917442
augucuuuguuauuggauu

SEQ ID NO: 1233923 - RNA, 19 nt, Artificial Sequence
  Description of Artificial Sequence: Synthetic oligonucleotide
  Antisense strand to SEQ ID NO: 1233922
aauccaauaacaaagacau

SEQ ID NO: 1233924 - RNA, 19 nt, Artificial Sequence
  Description of Artificial Sequence: Synthetic oligonucleotide
  Sense strand starting at position 2700 of SEQ ID NO: 917442
auaccuuauccuugccagu

SEQ ID NO: 1233925 - RNA, 19 nt, Artificial Sequence
  Description of Artificial Sequence: Synthetic oligonucleotide
  Antisense strand to SEQ ID NO: 1233924
acuggcaaggauaagguau

SEQ ID NO: 1233926 - RNA, 19 nt, Artificial Sequence
  Description of Artificial Sequence: Synthetic oligonucleotide
  Sense strand starting at position 2905 of SEQ ID NO: 917442
cgagaaucauaaucuuuaa

SEQ ID NO: 1233927 - RNA, 19 nt, Artificial Sequence
  Description of Artificial Sequence: Synthetic oligonucleotide
  Antisense strand to SEQ ID NO: 1233926
uuaaagauuaugauucucg

SEQ ID NO: 1233928 - RNA, 19 nt, Artificial Sequence
  Description of Artificial Sequence: Synthetic oligonucleotide
  Sense strand starting at position 3021 of SEQ ID NO: 917442
guguccguggucuuugaau

SEQ ID NO: 1233929 - RNA, 19 nt, Artificial Sequence
  Description of Artificial Sequence: Synthetic oligonucleotide
  Antisense strand to SEQ ID NO: 1233928
auucaaagaccacggacac

SEQ ID NO: 1233930 - RNA, 19 nt, Artificial Sequence
  Description of Artificial Sequence: Synthetic oligonucleotide
  Sense strand starting at position 3062 of SEQ ID NO: 917442
auaucagcugcugaacuau

SEQ ID NO: 1233931 - RNA, 19 nt, Artificial Sequence
  Description of Artificial Sequence: Synthetic oligonucleotide
  Antisense strand to SEQ ID NO: 1233930
auaguucagcagcugauau

SEQ ID NO: 1233932 - RNA, 19 nt, Artificial Sequence
  Description of Artificial Sequence: Synthetic oligonucleotide
  Sense strand starting at position 3072 of SEQ ID NO: 917442
cugaacuauucccuuggaa

SEQ ID NO: 1233933 - RNA, 19 nt, Artificial Sequence
  Description of Artificial Sequence: Synthetic oligonucleotide
  Antisense strand to SEQ ID NO: 1233932
uuccaagggaauaguucag

SEQ ID NO: 1233934 - RNA, 19 nt, Artificial Sequence
  Description of Artificial Sequence: Synthetic oligonucleotide
  Sense strand starting at position 3160 of SEQ ID NO: 917442
gcuguugucauuuguuugu

SEQ ID NO: 1233935 - RNA, 19 nt, Artificial Sequence
  Description of Artificial Sequence: Synthetic oligonucleotide
  Antisense strand to SEQ ID NO: 1233934
acaaacaaaugacaacagc

SEQ ID NO: 1233936 - RNA, 19 nt, Artificial Sequence
  Description of Artificial Sequence: Synthetic oligonucleotide
  Sense strand starting at position 3313 of SEQ ID NO: 917442
uugugucaucacgccuagu

SEQ ID NO: 1233937 - RNA, 19 nt, Artificial Sequence
  Description of Artificial Sequence: Synthetic oligonucleotide
  Antisense strand to SEQ ID NO: 1233936
acuaggcgugaugacacaa

SEQ ID NO: 1233938 - RNA, 19 nt, Artificial Sequence
  Description of Artificial Sequence: Synthetic oligonucleotide
  Sense strand starting at position 3314 of SEQ ID NO: 917442
ugugucaucacgccuaguu

SEQ ID NO: 1233939 - RNA, 19 nt, Artificial Sequence
  Description of Artificial Sequence: Synthetic oligonucleotide
  Antisense strand to SEQ ID NO: 1233938
aacuaggcgugaugacaca

SEQ ID NO: 1233940 - RNA, 19 nt, Artificial Sequence
  Description of Artificial Sequence: Synthetic oligonucleotide
  Sense strand starting at position 3315 of SEQ ID NO: 917442
gugucaucacgccuaguua

SEQ ID NO: 1233941 - RNA, 19 nt, Artificial Sequence
  Description of Artificial Sequence: Synthetic oligonucleotide
  Antisense strand to SEQ ID NO: 1233940
uaacuaggcgugaugacac

SEQ ID NO: 1233942 - RNA, 19 nt, Artificial Sequence
  Description of Artificial Sequence: Synthetic oligonucleotide
  Sense strand starting at position 3316 of SEQ ID NO: 917442
ugucaucacgccuaguuaa

SEQ ID NO: 1233943 - RNA, 19 nt, Artificial Sequence
  Description of Artificial Sequence: Synthetic oligonucleotide
  Antisense strand to SEQ ID NO: 1233942
uuaacuaggcgugaugaca

SEQ ID NO: 1233944 - RNA, 19 nt, Artificial Sequence
  Description of Artificial Sequence: Synthetic oligonucleotide
  Sense strand starting at position 3616 of SEQ ID NO: 917442
aagcgaucgccucacuuua

SEQ ID NO: 1233945 - RNA, 19 nt, Artificial Sequence
  Description of Artificial Sequence: Synthetic oligonucleotide
  Antisense strand to SEQ ID NO: 1233944
uaaagugaggcgaucgcuu

SEQ ID NO: 1233946 - RNA, 19 nt, Artificial Sequence
  Description of Artificial Sequence: Synthetic oligonucleotide
  Sense strand starting at position 3681 of SEQ ID NO: 917442
uuuguaaugugcuuugaac

SEQ ID NO: 1233947 - RNA, 19 nt, Artificial Sequence
  Description of Artificial Sequence: Synthetic oligonucleotide
  Antisense strand to SEQ ID NO: 1233946
guucaaagcacauuacaaa

SEQ ID NO: 1233948 - RNA, 19 nt, Artificial Sequence
  Description of Artificial Sequence: Synthetic oligonucleotide
  Sense strand starting at position 3683 of SEQ ID NO: 917442
uguaaugugcuuugaacag

SEQ ID NO: 1233949 - RNA, 19 nt, Artificial Sequence
  Description of Artificial Sequence: Synthetic oligonucleotide
  Antisense strand to SEQ ID NO: 1233948
cuguucaaagcacauuaca

SEQ ID NO: 1233950 - RNA, 19 nt, Artificial Sequence
  Description of Artificial Sequence: Synthetic oligonucleotide
  Sense strand starting at position 3693 of SEQ ID NO: 917442
uuugaacagugcuugacau

SEQ ID NO: 1233951 - RNA, 19 nt, Artificial Sequence
  Description of Artificial Sequence: Synthetic oligonucleotide
  Antisense strand to SEQ ID NO: 1233950
augucaagcacuguucaaa

SEQ ID NO: 1233952 - RNA, 19 nt, Artificial Sequence
  Description of Artificial Sequence: Synthetic oligonucleotide
  Sense strand starting at position 3695 of SEQ ID NO: 917442
ugaacagugcuugacauca

SEQ ID NO: 1233953 - RNA, 19 nt, Artificial Sequence
  Description of Artificial Sequence: Synthetic oligonucleotide
  Antisense strand to SEQ ID NO: 1233952
ugaugucaagcacuguuca

SEQ ID NO: 1233954 - RNA, 19 nt, Artificial Sequence
  Description of Artificial Sequence: Synthetic oligonucleotide
  Sense strand starting at position 3700 of SEQ ID NO: 917442
agugcuugacaucauagua

SEQ ID NO: 1233955 - RNA, 19 nt, Artificial Sequence
  Description of Artificial Sequence: Synthetic oligonucleotide
  Antisense strand to SEQ ID NO: 1233954
uacuaugaugucaagcacu

SEQ ID NO: 1233956 - RNA, 19 nt, Artificial Sequence
  Description of Artificial Sequence: Synthetic oligonucleotide
  Sense strand starting at position 3883 of SEQ ID NO: 917443
aaaugaucugggcguggua

SEQ ID NO: 1233957 - RNA, 19 nt, Artificial Sequence
  Description of Artificial Sequence: Synthetic oligonucleotide
  Antisense strand to SEQ ID NO: 1233956
uaccacgcccagaucauuu

SEQ ID NO: 1233958 - RNA, 19 nt, Artificial Sequence
  Description of Artificial Sequence: Synthetic oligonucleotide
  Sense strand starting at position 230 of SEQ ID NO: 917443
uugcccauuugucuugaaa

SEQ ID NO: 1233959 - RNA, 19 nt, Artificial Sequence
  Description of Artificial Sequence: Synthetic oligonucleotide
  Antisense strand to SEQ ID NO: 1233958
uuucaagacaaaugggcaa

SEQ ID NO: 1233960 - RNA, 19 nt, Artificial Sequence
  Description of Artificial Sequence: Synthetic oligonucleotide
  Sense strand starting at position 268 of SEQ ID NO: 917443
gagcaaaggucucuucuug

SEQ ID NO: 1233961 - RNA, 19 nt, Artificial Sequence
  Description of Artificial Sequence: Synthetic oligonucleotide
  Antisense strand to SEQ ID NO: 1233960
caagaagagaccuuugcuc

SEQ ID NO: 1233962 - RNA, 19 nt, Artificial Sequence
  Description of Artificial Sequence: Synthetic oligonucleotide
  Sense strand starting at position 613 of SEQ ID NO: 917443
ugcugaugagauugucauu

SEQ ID NO: 1233963 - RNA, 19 nt, Artificial Sequence
  Description of Artificial Sequence: Synthetic oligonucleotide
  Antisense strand to SEQ ID NO: 1233962
aaugacaaucucaucagca

SEQ ID NO: 1233964 - RNA, 19 nt, Artificial Sequence
  Description of Artificial Sequence: Synthetic oligonucleotide
  Sense strand starting at position 616 of SEQ ID NO: 917443
ugaugagauugucauuuaa

SEQ ID NO: 1233965 - RNA, 19 nt, Artificial Sequence
  Description of Artificial Sequence: Synthetic oligonucleotide
  Antisense strand to SEQ ID NO: 1233964
uuaaaugacaaucucauca

SEQ ID NO: 1233966 - RNA, 19 nt, Artificial Sequence
  Description of Artificial Sequence: Synthetic oligonucleotide
  Sense strand starting at position 709 of SEQ ID NO: 917443
ggagauauuccagaucguc

SEQ ID NO: 1233967 - RNA, 19 nt, Artificial Sequence
  Description of Artificial Sequence: Synthetic oligonucleotide
  Antisense strand to SEQ ID NO: 1233966
gacgaucuggaauaucucc

SEQ ID NO: 1233968 - RNA, 19 nt, Artificial Sequence
  Description of Artificial Sequence: Synthetic oligonucleotide
  Sense strand starting at position 853 of SEQ ID NO: 917443
gcaaacuaaccgcauuaua

SEQ ID NO: 1233969 - RNA, 19 nt, Artificial Sequence
  Description of Artificial Sequence: Synthetic oligonucleotide
  Antisense strand to SEQ ID NO: 1233968
uauaaugcgguuaguuugc

SEQ ID NO: 1233970 - RNA, 19 nt, Artificial Sequence
  Description of Artificial Sequence: Synthetic oligonucleotide
  Sense strand starting at position 906 of SEQ ID NO: 917443
agggaauugccaugcagaa

SEQ ID NO: 1233971 - RNA, 19 nt, Artificial Sequence
  Description of Artificial Sequence: Synthetic oligonucleotide
  Antisense strand to SEQ ID NO: 1233970
uucugcauggcaauucccu

SEQ ID NO: 1233972 - RNA, 19 nt, Artificial Sequence
  Description of Artificial Sequence: Synthetic oligonucleotide
  Sense strand starting at position 1009 of SEQ ID NO: 917443
cuucuaucucauugcagga

SEQ ID NO: 1233973 - RNA, 19 nt, Artificial Sequence
  Description of Artificial Sequence: Synthetic oligonucleotide
  Antisense strand to SEQ ID NO: 1233972
uccugcaaugagauagaag

SEQ ID NO: 1233974 - RNA, 19 nt, Artificial Sequence
  Description of Artificial Sequence: Synthetic oligonucleotide
  Sense strand starting at position 1024 of SEQ ID NO: 917443
aggaacagaucuucucuuu

SEQ ID NO: 1233975 - RNA, 19 nt, Artificial Sequence
  Description of Artificial Sequence: Synthetic oligonucleotide
  Antisense strand to SEQ ID NO: 1233974
aaagagaagaucuguuccu

SEQ ID NO: 1233976 - RNA, 19 nt, Artificial Sequence
  Description of Artificial Sequence: Synthetic oligonucleotide
  Sense strand starting at position 1082 of SEQ ID NO: 917443
agacgucuccagcaacaga

SEQ ID NO: 1233977 - RNA, 19 nt, Artificial Sequence
  Description of Artificial Sequence: Synthetic oligonucleotide
  Antisense strand to SEQ ID NO: 1233976
ucuguugcuggagacgucu

SEQ ID NO: 1233978 - RNA, 19 nt, Artificial Sequence
  Description of Artificial Sequence: Synthetic oligonucleotide
  Sense strand starting at position 1256 of SEQ ID NO: 917443
guggauuccuuccucccua

SEQ ID NO: 1233979 - RNA, 19 nt, Artificial Sequence
  Description of Artificial Sequence: Synthetic oligonucleotide
  Antisense strand to SEQ ID NO: 1233978
uagggaggaaggaauccac

SEQ ID NO: 1233980 - RNA, 19 nt, Artificial Sequence
  Description of Artificial Sequence: Synthetic oligonucleotide
  Sense strand starting at position 1299 of SEQ ID NO: 917443
gacgccagucaauaauuau

SEQ ID NO: 1233981 - RNA, 19 nt, Artificial Sequence
  Description of Artificial Sequence: Synthetic oligonucleotide
  Antisense strand to SEQ ID NO: 1233980
auaauuauugacuggcguc

SEQ ID NO: 1233982 - RNA, 19 nt, Artificial Sequence
  Description of Artificial Sequence: Synthetic oligonucleotide
  Sense strand starting at position 1524 of SEQ ID NO: 917443
gaagcaagugcauguuaga

SEQ ID NO: 1233983 - RNA, 19 nt, Artificial Sequence
  Description of Artificial Sequence: Synthetic oligonucleotide
  Antisense strand to SEQ ID NO: 1233982
ucuaacaugcacuugcuuc

SEQ ID NO: 1233984 - RNA, 19 nt, Artificial Sequence
  Description of Artificial Sequence: Synthetic oligonucleotide
  Sense strand starting at position 1531 of SEQ ID NO: 917443
gugcauguuagagaaacaa

SEQ ID NO: 1233985 - RNA, 19 nt, Artificial Sequence
  Description of Artificial Sequence: Synthetic oligonucleotide
  Antisense strand to SEQ ID NO: 1233984
uuguuucucuaacaugcac

SEQ ID NO: 1233986 - RNA, 19 nt, Artificial Sequence
  Description of Artificial Sequence: Synthetic oligonucleotide
  Sense strand starting at position 1969 of SEQ ID NO: 917443
gggcgaguugucugaggga

SEQ ID NO: 1233987 - RNA, 19 nt, Artificial Sequence
  Description of Artificial Sequence: Synthetic oligonucleotide
  Antisense strand to SEQ ID NO: 1233986
ucccucagacaacucgccc

SEQ ID NO: 1233988 - RNA, 19 nt, Artificial Sequence
  Description of Artificial Sequence: Synthetic oligonucleotide
  Sense strand starting at position 2057 of SEQ ID NO: 917443
ccuggugcacucugaaaga

SEQ ID NO: 1233989 - RNA, 19 nt, Artificial Sequence
  Description of Artificial Sequence: Synthetic oligonucleotide
  Antisense strand to SEQ ID NO: 1233988
ucuuucagagugcaccagg

SEQ ID NO: 1233990 - RNA, 19 nt, Artificial Sequence
  Description of Artificial Sequence: Synthetic oligonucleotide
  Sense strand starting at position 2089 of SEQ ID NO: 917443
gcugaucugcaguagcaaa

SEQ ID NO: 1233991 - RNA, 19 nt, Artificial Sequence
  Description of Artificial Sequence: Synthetic oligonucleotide
  Antisense strand to SEQ ID NO: 1233990
uuugcuacugcagaucagc

SEQ ID NO: 1233992 - RNA, 19 nt, Artificial Sequence
  Description of Artificial Sequence: Synthetic oligonucleotide
  Sense strand starting at position 2189 of SEQ ID NO: 917443
gcugacgaucuacauagau

SEQ ID NO: 1233993 - RNA, 19 nt, Artificial Sequence
  Description of Artificial Sequence: Synthetic oligonucleotide
  Antisense strand to SEQ ID NO: 1233992
aucuauguagaucgucagc

SEQ ID NO: 1233994 - RNA, 19 nt, Artificial Sequence
  Description of Artificial Sequence: Synthetic oligonucleotide
  Sense strand starting at position 2333 of SEQ ID NO: 917443
uucccaauggcuugaauaa

SEQ ID NO: 1233995 - RNA, 19 nt, Artificial Sequence
  Description of Artificial Sequence: Synthetic oligonucleotide
  Antisense strand to SEQ ID NO: 1233994
uuauucaagccauugggaa

SEQ ID NO: 1233996 - RNA, 19 nt, Artificial Sequence
  Description of Artificial Sequence: Synthetic oligonucleotide
  Sense strand starting at position 2376 of SEQ ID NO: 917443
acagcaauuugagguaauu

SEQ ID NO: 1233997 - RNA, 19 nt, Artificial Sequence
  Description of Artificial Sequence: Synthetic oligonucleotide
  Antisense strand to SEQ ID NO: 1233996
aauuaccucaaauugcugu

SEQ ID NO: 1233998 - RNA, 19 nt, Artificial Sequence
  Description of Artificial Sequence: Synthetic oligonucleotide
  Sense strand starting at position 2617 of SEQ ID NO: 917443
gucauugagaguuagguuc

SEQ ID NO: 1233999 - RNA, 19 nt, Artificial Sequence
  Description of Artificial Sequence: Synthetic oligonucleotide
  Antisense strand to SEQ ID NO: 1233998
gaaccuaacucucaaugac

SEQ ID NO: 1234000 - RNA, 19 nt, Artificial Sequence
  Description of Artificial Sequence: Synthetic oligonucleotide
  Sense strand starting at position 2624 of SEQ ID NO: 917443
agaguuagguucuuugaua

SEQ ID NO: 1234001 - RNA, 19 nt, Artificial Sequence
  Description of Artificial Sequence: Synthetic oligonucleotide
  Antisense strand to SEQ ID NO: 1234000
uaucaaagaaccuaacucu

SEQ ID NO: 1234002 - RNA, 19 nt, Artificial Sequence
  Description of Artificial Sequence: Synthetic oligonucleotide
  Sense strand starting at position 2625 of SEQ ID NO: 917443
gaguuagguucuuugauau

SEQ ID NO: 1234003 - RNA, 19 nt, Artificial Sequence
  Description of Artificial Sequence: Synthetic oligonucleotide
  Antisense strand to SEQ ID NO: 1234002
auaucaaagaaccuaacuc

SEQ ID NO: 1234004 - RNA, 19 nt, Artificial Sequence
  Description of Artificial Sequence: Synthetic oligonucleotide
  Sense strand starting at position 2654 of SEQ ID NO: 917443
uuauuuaacucuggagggu

SEQ ID NO: 1234005 - RNA, 19 nt, Artificial Sequence
  Description of Artificial Sequence: Synthetic oligonucleotide
  Antisense strand to SEQ ID NO: 1234004
acccuccagaguuaaauaa

SEQ ID NO: 1234006 - RNA, 19 nt, Artificial Sequence
  Description of Artificial Sequence: Synthetic oligonucleotide
  Sense strand starting at position 2687 of SEQ ID NO: 917443
gcugaaguccuugauucca

SEQ ID NO: 1234007 - RNA, 19 nt, Artificial Sequence
  Description of Artificial Sequence: Synthetic oligonucleotide
  Antisense strand to SEQ ID NO: 1234006
uggaaucaaggacuucagc

SEQ ID NO: 1234008 - RNA, 19 nt, Artificial Sequence
  Description of Artificial Sequence: Synthetic oligonucleotide
  Sense strand starting at position 2707 of SEQ ID NO: 917443
ucccgaaagcuuuaacuga

SEQ ID NO: 1234009 - RNA, 19 nt, Artificial Sequence
  Description of Artificial Sequence: Synthetic oligonucleotide
  Antisense strand to SEQ ID NO: 1234008
ucaguuaaagcuuucggga

SEQ ID NO: 1234010 - RNA, 19 nt, Artificial Sequence
  Description of Artificial Sequence: Synthetic oligonucleotide
  Sense strand starting at position 2767 of SEQ ID NO: 917443
gaugauuugugagugcugu

SEQ ID NO: 1234011 - RNA, 19 nt, Artificial Sequence
  Description of Artificial Sequence: Synthetic oligonucleotide
  Antisense strand to SEQ ID NO: 1234010
acagcacucacaaaucauc

SEQ ID NO: 1234012 - RNA, 19 nt, Artificial Sequence
  Description of Artificial Sequence: Synthetic oligonucleotide
  Sense strand starting at position 2768 of SEQ ID NO: 917443
augauuugugagugcuguu

SEQ ID NO: 1234013 - RNA, 19 nt, Artificial Sequence
  Description of Artificial Sequence: Synthetic oligonucleotide
  Antisense strand to SEQ ID NO: 1234012
aacagcacucacaaaucau

SEQ ID NO: 1234014 - RNA, 19 nt, Artificial Sequence
  Description of Artificial Sequence: Synthetic oligonucleotide
  Sense strand starting at position 2943 of SEQ ID NO: 917443
cucuaaagcucagcgagaa

SEQ ID NO: 1234015 - RNA, 19 nt, Artificial Sequence
  Description of Artificial Sequence: Synthetic oligonucleotide
  Antisense strand to SEQ ID NO: 1234014
uucucgcugagcuuuagag

SEQ ID NO: 1234016 - RNA, 19 nt, Artificial Sequence
  Description of Artificial Sequence: Synthetic oligonucleotide
  Sense strand starting at position 3102 of SEQ ID NO: 917443
aucaccuucugggauggaa

SEQ ID NO: 1234017 - RNA, 19 nt, Artificial Sequence
  Description of Artificial Sequence: Synthetic oligonucleotide
  Antisense strand to SEQ ID NO: 1234016
uuccaucccagaaggugau

SEQ ID NO: 1234018 - RNA, 19 nt, Artificial Sequence
  Description of Artificial Sequence: Synthetic oligonucleotide
  Sense strand starting at position 3382 of SEQ ID NO: 917443
gcaaauguucaaggaagug

SEQ ID NO: 1234019 - RNA, 19 nt, Artificial Sequence
  Description of Artificial Sequence: Synthetic oligonucleotide
  Antisense strand to SEQ ID NO: 1234018
cacuuccuugaacauuugc

SEQ ID NO: 1234020 - RNA, 19 nt, Artificial Sequence
  Description of Artificial Sequence: Synthetic oligonucleotide
  Sense strand starting at position 3469 of SEQ ID NO: 917443
uagggaaggucuuaaagau

SEQ ID NO: 1234021 - RNA, 19 nt, Artificial Sequence
  Description of Artificial Sequence: Synthetic oligonucleotide
  Antisense strand to SEQ ID NO: 1234020
aucuuuaagaccuucccua

SEQ ID NO: 1234022 - RNA, 19 nt, Artificial Sequence
  Description of Artificial Sequence: Synthetic oligonucleotide
  Sense strand starting at position 3478 of SEQ ID NO: 917443
ucuuaaagauguuuacaag

SEQ ID NO: 1234023 - RNA, 19 nt, Artificial Sequence
  Description of Artificial Sequence: Synthetic oligonucleotide
  Antisense strand to SEQ ID NO: 1234022
cuuguaaacaucuuuaaga

SEQ ID NO: 1234024 - RNA, 19 nt, Artificial Sequence
  Description of Artificial Sequence: Synthetic oligonucleotide
  Sense strand starting at position 3587 of SEQ ID NO: 917443
guuguauuccucuggugaa

SEQ ID NO: 1234025 - RNA, 19 nt, Artificial Sequence
  Description of Artificial Sequence: Synthetic oligonucleotide
  Antisense strand to SEQ ID NO: 1234024
uucaccagaggaauacaac

SEQ ID NO: 1234026 - RNA, 19 nt, Artificial Sequence
  Description of Artificial Sequence: Synthetic oligonucleotide
  Sense strand starting at position 3687 of SEQ ID NO: 917443
guguguacacuagagagau

SEQ ID NO: 1234027 - RNA, 19 nt, Artificial Sequence
  Description of Artificial Sequence: Synthetic oligonucleotide
  Antisense strand to SEQ ID NO: 1234026
aucucucuaguguacacac

SEQ ID NO: 1234028 - RNA, 19 nt, Artificial Sequence
  Description of Artificial Sequence: Synthetic oligonucleotide
  Sense strand starting at position 3822 of SEQ ID NO: 917443
aaagaaaugcuaugcaguu

SEQ ID NO: 1234029 - RNA, 19 nt, Artificial Sequence
  Description of Artificial Sequence: Synthetic oligonucleotide
  Antisense strand to SEQ ID NO: 1234028
aacugcauagcauuucuuu

SEQ ID NO: 1234030 - RNA, 19 nt, Artificial Sequence
  Description of Artificial Sequence: Synthetic oligonucleotide
  Sense strand starting at position 3828 of SEQ ID NO: 917443
augcuaugcaguugagaac

SEQ ID NO: 1234031 - RNA, 19 nt, Artificial Sequence
  Description of Artificial Sequence: Synthetic oligonucleotide
  Antisense strand to SEQ ID NO: 1234030
guucucaacugcauagcau

SEQ ID NO: 1234032 - RNA, 19 nt, Artificial Sequence
  Description of Artificial Sequence: Synthetic oligonucleotide
  Sense strand starting at position 3835 of SEQ ID NO: 917443
gcaguugagaacugcagau

SEQ ID NO: 1234033 - RNA, 19 nt, Artificial Sequence
  Description of Artificial Sequence: Synthetic oligonucleotide
  Antisense strand to SEQ ID NO: 1234032
aucugcaguucucaacugc

SEQ ID NO: 1234034 - RNA, 19 nt, Artificial Sequence
  Description of Artificial Sequence: Synthetic oligonucleotide
  Sense strand starting at position 3958 of SEQ ID NO: 917443
ccuuauggugucugugauu

SEQ ID NO: 1234035 - RNA, 19 nt, Artificial Sequence
  Description of Artificial Sequence: Synthetic oligonucleotide
  Antisense strand to SEQ ID NO: 1234034
aaucacagacaccauaagg

SEQ ID NO: 1234036 - RNA, 19 nt, Artificial Sequence
  Description of Artificial Sequence: Synthetic oligonucleotide
  Sense strand starting at position 3963 of SEQ ID NO: 917443
uggugucugugauuaauag

SEQ ID NO: 1234037 - RNA, 19 nt, Artificial Sequence
  Description of Artificial Sequence: Synthetic oligonucleotide
  Antisense strand to SEQ ID NO: 1234036
cuauuaaucacagacacca

SEQ ID NO: 1234038 - RNA, 19 nt, Artificial Sequence
  Description of Artificial Sequence: Synthetic oligonucleotide
  Sense strand starting at position 3963 of SEQ ID NO: 917444
uggugucugugauuaauag

SEQ ID NO: 1234039 - RNA, 19 nt, Artificial Sequence
  Description of Artificial Sequence: Synthetic oligonucleotide
  Antisense strand to SEQ ID NO: 1234038
cuauuaaucacagacacca

SEQ ID NO: 1234040 - RNA, 19 nt, Artificial Sequence
  Description of Artificial Sequence: Synthetic oligonucleotide
  Sense strand starting at position 62 of SEQ ID NO: 917444
ugaaauaguucugcacgau

SEQ ID NO: 1234041 - RNA, 19 nt, Artificial Sequence
  Description of Artificial Sequence: Synthetic oligonucleotide
  Antisense strand to SEQ ID NO: 1234040
aucgugcagaacuauuuca

SEQ ID NO: 1234042 - RNA, 19 nt, Artificial Sequence
  Description of Artificial Sequence: Synthetic oligonucleotide
  Sense strand starting at position 63 of SEQ ID NO: 917444
gaaauaguucugcacgaug

SEQ ID NO: 1234043 - RNA, 19 nt, Artificial Sequence
  Description of Artificial Sequence: Synthetic oligonucleotide
  Antisense strand to SEQ ID NO: 1234042
caucgugcagaacuauuuc

SEQ ID NO: 1234044 - RNA, 19 nt, Artificial Sequence
  Description of Artificial Sequence: Synthetic oligonucleotide
  Sense strand starting at position 65 of SEQ ID NO: 917444
aauaguucugcacgaugga

SEQ ID NO: 1234045 - RNA, 19 nt, Artificial Sequence
  Description of Artificial Sequence: Synthetic oligonucleotide
  Antisense strand to SEQ ID NO: 1234044
uccaucgugcagaacuauu

SEQ ID NO: 1234046 - RNA, 19 nt, Artificial Sequence
  Description of Artificial Sequence: Synthetic oligonucleotide
  Sense strand starting at position 66 of SEQ ID NO: 917444
auaguucugcacgauggau

SEQ ID NO: 1234047 - RNA, 19 nt, Artificial Sequence
  Description of Artificial Sequence: Synthetic oligonucleotide
  Antisense strand to SEQ ID NO: 1234046
auccaucgugcagaacuau

SEQ ID NO: 1234048 - RNA, 19 nt, Artificial Sequence
  Description of Artificial Sequence: Synthetic oligonucleotide
  Sense strand starting at position 87 of SEQ ID NO: 917444
caaagaacucagcgaaggu

SEQ ID NO: 1234049 - RNA, 19 nt, Artificial Sequence
  Description of Artificial Sequence: Synthetic oligonucleotide
  Antisense strand to SEQ ID NO: 1234048
accuucgcugaguucuuug

SEQ ID NO: 1234050 - RNA, 19 nt, Artificial Sequence
  Description of Artificial Sequence: Synthetic oligonucleotide
  Sense strand starting at position 126 of SEQ ID NO: 917444
ucccgaugccuagaguuua

SEQ ID NO: 1234051 - RNA, 19 nt, Artificial Sequence
  Description of Artificial Sequence: Synthetic oligonucleotide
  Antisense strand to SEQ ID NO: 1234050
uaaacucuaggcaucggga

SEQ ID NO: 1234052 - RNA, 19 nt, Artificial Sequence
  Description of Artificial Sequence: Synthetic oligonucleotide
  Sense strand starting at position 223 of SEQ ID NO: 917444
gucuauuugcaacgguaau

SEQ ID NO: 1234053 - RNA, 19 nt, Artificial Sequence
  Description of Artificial Sequence: Synthetic oligonucleotide
  Antisense strand to SEQ ID NO: 1234052
auuaccguugcaaauagac

SEQ ID NO: 1234054 - RNA, 19 nt, Artificial Sequence
  Description of Artificial Sequence: Synthetic oligonucleotide
  Sense strand starting at position 244 of SEQ ID NO: 917444
caagguuugcacggaacua

SEQ ID NO: 1234055 - RNA, 19 nt, Artificial Sequence
  Description of Artificial Sequence: Synthetic oligonucleotide
  Antisense strand to SEQ ID NO: 1234054
uaguuccgugcaaaccuug

SEQ ID NO: 1234056 - RNA, 19 nt, Artificial Sequence
  Description of Artificial Sequence: Synthetic oligonucleotide
  Sense strand starting at position 285 of SEQ ID NO: 917444
uuuggaguugcuuauuaca

SEQ ID NO: 1234057 - RNA, 19 nt, Artificial Sequence
  Description of Artificial Sequence: Synthetic oligonucleotide
  Antisense strand to SEQ ID NO: 1234056
uguaauaagcaacuccaaa

SEQ ID NO: 1234058 - RNA, 19 nt, Artificial Sequence
  Description of Artificial Sequence: Synthetic oligonucleotide
  Sense strand starting at position 287 of SEQ ID NO: 917444
uggaguugcuuauuacauu

SEQ ID NO: 1234059 - RNA, 19 nt, Artificial Sequence
  Description of Artificial Sequence: Synthetic oligonucleotide
  Antisense strand to SEQ ID NO: 1234058
aauguaauaagcaacucca

SEQ ID NO: 1234060 - RNA, 19 nt, Artificial Sequence
  Description of Artificial Sequence: Synthetic oligonucleotide
  Sense strand starting at position 393 of SEQ ID NO: 917444
gaagaacuguaagcgacuu

SEQ ID NO: 1234061 - RNA, 19 nt, Artificial Sequence
  Description of Artificial Sequence: Synthetic oligonucleotide
  Antisense strand to SEQ ID NO: 1234060
aagucgcuuacaguucuuc

SEQ ID NO: 1234062 - RNA, 19 nt, Artificial Sequence
  Description of Artificial Sequence: Synthetic oligonucleotide
  Sense strand starting at position 410 of SEQ ID NO: 917444
uuaggucaguuguuuaaua

SEQ ID NO: 1234063 - RNA, 19 nt, Artificial Sequence
  Description of Artificial Sequence: Synthetic oligonucleotide
  Antisense strand to SEQ ID NO: 1234062
uauuaaacaacugaccuaa

SEQ ID NO: 1234064 - RNA, 19 nt, Artificial Sequence
  Description of Artificial Sequence: Synthetic oligonucleotide
  Sense strand starting at position 411 of SEQ ID NO: 917444
uaggucaguuguuuaauau

SEQ ID NO: 1234065 - RNA, 19 nt, Artificial Sequence
  Description of Artificial Sequence: Synthetic oligonucleotide
  Antisense strand to SEQ ID NO: 1234064
auauuaaacaacugaccua

SEQ ID NO: 1234066 - RNA, 19 nt, Artificial Sequence
  Description of Artificial Sequence: Synthetic oligonucleotide
  Sense strand starting at position 412 of SEQ ID NO: 917444
aggucaguuguuuaauauc

SEQ ID NO: 1234067 - RNA, 19 nt, Artificial Sequence
  Description of Artificial Sequence: Synthetic oligonucleotide
  Antisense strand to SEQ ID NO: 1234066
gauauuaaacaacugaccu

SEQ ID NO: 1234068 - RNA, 19 nt, Artificial Sequence
  Description of Artificial Sequence: Synthetic oligonucleotide
  Sense strand starting at position 796 of SEQ ID NO: 917444
uggagaccuugcuccugau

SEQ ID NO: 1234069 - RNA, 19 nt, Artificial Sequence
  Description of Artificial Sequence: Synthetic oligonucleotide
  Antisense strand to SEQ ID NO: 1234068
aucaggagcaaggucucca

SEQ ID NO: 1234070 - RNA, 19 nt, Artificial Sequence
  Description of Artificial Sequence: Synthetic oligonucleotide
  Sense strand starting at position 1053 of SEQ ID NO: 917444
aguucuccgcuggaucaaa

SEQ ID NO: 1234071 - RNA, 19 nt, Artificial Sequence
  Description of Artificial Sequence: Synthetic oligonucleotide
  Antisense strand to SEQ ID NO: 1234070
uuugauccagcggagaacu

SEQ ID NO: 1234072 - RNA, 19 nt, Artificial Sequence
  Description of Artificial Sequence: Synthetic oligonucleotide
  Sense strand starting at position 1153 of SEQ ID NO: 917444
cugaaagcccauugcaaau

SEQ ID NO: 1234073 - RNA, 19 nt, Artificial Sequence
  Description of Artificial Sequence: Synthetic oligonucleotide
  Antisense strand to SEQ ID NO: 1234072
auuugcaaugggcuuucag

SEQ ID NO: 1234074 - RNA, 19 nt, Artificial Sequence
  Description of Artificial Sequence: Synthetic oligonucleotide
  Sense strand starting at position 1183 of SEQ ID NO: 917444
aguauuaaacuccagcguu

SEQ ID NO: 1234075 - RNA, 19 nt, Artificial Sequence
  Description of Artificial Sequence: Synthetic oligonucleotide
  Antisense strand to SEQ ID NO: 1234074
aacgcuggaguuuaauacu

SEQ ID NO: 1234076 - RNA, 19 nt, Artificial Sequence
  Description of Artificial Sequence: Synthetic oligonucleotide
  Sense strand starting at position 1235 of SEQ ID NO: 917444
cgaagagcuuccucucaac

SEQ ID NO: 1234077 - RNA, 19 nt, Artificial Sequence
  Description of Artificial Sequence: Synthetic oligonucleotide
  Antisense strand to SEQ ID NO: 1234076
guugagaggaagcucuucg

SEQ ID NO: 1234078 - RNA, 19 nt, Artificial Sequence
  Description of Artificial Sequence: Synthetic oligonucleotide
  Sense strand starting at position 1379 of SEQ ID NO: 917444
cgcugaacauucucagauu

SEQ ID NO: 1234079 - RNA, 19 nt, Artificial Sequence
  Description of Artificial Sequence: Synthetic oligonucleotide
  Antisense strand to SEQ ID NO: 1234078
aaucugagaauguucagcg

SEQ ID NO: 1234080 - RNA, 19 nt, Artificial Sequence
  Description of Artificial Sequence: Synthetic oligonucleotide
  Sense strand starting at position 1767 of SEQ ID NO: 917444
uugcaaaguaaacgauaga

SEQ ID NO: 1234081 - RNA, 19 nt, Artificial Sequence
  Description of Artificial Sequence: Synthetic oligonucleotide
  Antisense strand to SEQ ID NO: 1234080
ucuaucguuuacuuugcaa

SEQ ID NO: 1234082 - RNA, 19 nt, Artificial Sequence
  Description of Artificial Sequence: Synthetic oligonucleotide
  Sense strand starting at position 3312 of SEQ ID NO: 917444
ggaugucacauucguagga

SEQ ID NO: 1234083 - RNA, 19 nt, Artificial Sequence
  Description of Artificial Sequence: Synthetic oligonucleotide
  Antisense strand to SEQ ID NO: 1234082
uccuacgaaugugacaucc

SEQ ID NO: 1234084 - RNA, 19 nt, Artificial Sequence
  Description of Artificial Sequence: Synthetic oligonucleotide
  Sense strand starting at position 3313 of SEQ ID NO: 917444
gaugucacauucguaggaa

SEQ ID NO: 1234085 - RNA, 19 nt, Artificial Sequence
  Description of Artificial Sequence: Synthetic oligonucleotide
  Antisense strand to SEQ ID NO: 1234084
uuccuacgaaugugacauc

SEQ ID NO: 1234086 - RNA, 19 nt, Artificial Sequence
  Description of Artificial Sequence: Synthetic oligonucleotide
  Sense strand starting at position 3316 of SEQ ID NO: 917444
gucacauucguaggaagag

SEQ ID NO: 1234087 - RNA, 19 nt, Artificial Sequence
  Description of Artificial Sequence: Synthetic oligonucleotide
  Antisense strand to SEQ ID NO: 1234086
cucuuccuacgaaugugac

SEQ ID NO: 1234088 - RNA, 19 nt, Artificial Sequence
  Description of Artificial Sequence: Synthetic oligonucleotide
  Sense strand starting at position 3343 of SEQ ID NO: 917444
cuuggaccauguguguaau

SEQ ID NO: 1234089 - RNA, 19 nt, Artificial Sequence
  Description of Artificial Sequence: Synthetic oligonucleotide
  Antisense strand to SEQ ID NO: 1234088
auuacacacaugguccaag

SEQ ID NO: 1234090 - RNA, 19 nt, Artificial Sequence
  Description of Artificial Sequence: Synthetic oligonucleotide
  Sense strand starting at position 3379 of SEQ ID NO: 917444
caauucucggauugggaaa

SEQ ID NO: 1234091 - RNA, 19 nt, Artificial Sequence
  Description of Artificial Sequence: Synthetic oligonucleotide
  Antisense strand to SEQ ID NO: 1234090
uuucccaauccgagaauug

SEQ ID NO: 1234092 - RNA, 19 nt, Artificial Sequence
  Description of Artificial Sequence: Synthetic oligonucleotide
  Sense strand starting at position 3434 of SEQ ID NO: 917444
gcugguggucaggaacaga

SEQ ID NO: 1234093 - RNA, 19 nt, Artificial Sequence
  Description of Artificial Sequence: Synthetic oligonucleotide
  Antisense strand to SEQ ID NO: 1234092
ucuguuccugaccaccagc

SEQ ID NO: 1234094 - RNA, 19 nt, Artificial Sequence
  Description of Artificial Sequence: Synthetic oligonucleotide
  Sense strand starting at position 3653 of SEQ ID NO: 917444
gagggaauguuugugaaua

SEQ ID NO: 1234095 - RNA, 19 nt, Artificial Sequence
  Description of Artificial Sequence: Synthetic oligonucleotide
  Antisense strand to SEQ ID NO: 1234094
uauucacaaacauucccuc

SEQ ID NO: 1234096 - RNA, 19 nt, Artificial Sequence
  Description of Artificial Sequence: Synthetic oligonucleotide
  Sense strand starting at position 3669 of SEQ ID NO: 917444
auacaucugguguguacua

SEQ ID NO: 1234097 - RNA, 19 nt, Artificial Sequence
  Description of Artificial Sequence: Synthetic oligonucleotide
  Antisense strand to SEQ ID NO: 1234096
uaguacacaccagauguau

SEQ ID NO: 1234098 - RNA, 19 nt, Artificial Sequence
  Description of Artificial Sequence: Synthetic oligonucleotide
  Sense strand starting at position 3670 of SEQ ID NO: 917444
uacaucugguguguacuaa

SEQ ID NO: 1234099 - RNA, 19 nt, Artificial Sequence
  Description of Artificial Sequence: Synthetic oligonucleotide
  Antisense strand to SEQ ID NO: 1234098
uuaguacacaccagaugua

SEQ ID NO: 1234100 - RNA, 19 nt, Artificial Sequence
  Description of Artificial Sequence: Synthetic oligonucleotide
  Sense strand starting at position 3671 of SEQ ID NO: 917444
acaucugguguguacuaaa

SEQ ID NO: 1234101 - RNA, 19 nt, Artificial Sequence
  Description of Artificial Sequence: Synthetic oligonucleotide
  Antisense strand to SEQ ID NO: 1234100
uuuaguacacaccagaugu

SEQ ID NO: 1234102 - RNA, 19 nt, Artificial Sequence
  Description of Artificial Sequence: Synthetic oligonucleotide
  Sense strand starting at position 3732 of SEQ ID NO: 917444
gaguuucuugaagagucau

SEQ ID NO: 1234103 - RNA, 19 nt, Artificial Sequence
  Description of Artificial Sequence: Synthetic oligonucleotide
  Antisense strand to SEQ ID NO: 1234102
augacucuucaagaaacuc

SEQ ID NO: 1234104 - RNA, 19 nt, Artificial Sequence
  Description of Artificial Sequence: Synthetic oligonucleotide
  Sense strand starting at position 3738 of SEQ ID NO: 917444
cuugaagagucaucugcua

SEQ ID NO: 1234105 - RNA, 19 nt, Artificial Sequence
  Description of Artificial Sequence: Synthetic oligonucleotide
  Antisense strand to SEQ ID NO: 1234104
uagcagaugacucuucaag

SEQ ID NO: 1234106 - RNA, 19 nt, Artificial Sequence
  Description of Artificial Sequence: Synthetic oligonucleotide
  Sense strand starting at position 3761 of SEQ ID NO: 917444
ccacuagagucaucucuac

SEQ ID NO: 1234107 - RNA, 19 nt, Artificial Sequence
  Description of Artificial Sequence: Synthetic oligonucleotide
  Antisense strand to SEQ ID NO: 1234106
guagagaugacucuagugg

SEQ ID NO: 1234108 - RNA, 19 nt, Artificial Sequence
  Description of Artificial Sequence: Synthetic oligonucleotide
  Sense strand starting at position 3767 of SEQ ID NO: 917444
gagucaucucuacaguaag

SEQ ID NO: 1234109 - RNA, 19 nt, Artificial Sequence
  Description of Artificial Sequence: Synthetic oligonucleotide
  Antisense strand to SEQ ID NO: 1234108
cuuacuguagagaugacuc

SEQ ID NO: 1234110 - RNA, 19 nt, Artificial Sequence
  Description of Artificial Sequence: Synthetic oligonucleotide
  Sense strand starting at position 3770 of SEQ ID NO: 917444
ucaucucuacaguaaguau

SEQ ID NO: 1234111 - RNA, 19 nt, Artificial Sequence
  Description of Artificial Sequence: Synthetic oligonucleotide
  Antisense strand to SEQ ID NO: 1234110
auacuuacuguagagauga

SEQ ID NO: 1234112 - RNA, 19 nt, Artificial Sequence
  Description of Artificial Sequence: Synthetic oligonucleotide
  Sense strand starting at position 3792 of SEQ ID NO: 917444
ugggucuuuccaugaaacc

SEQ ID NO: 1234113 - RNA, 19 nt, Artificial Sequence
  Description of Artificial Sequence: Synthetic oligonucleotide
  Antisense strand to SEQ ID NO: 1234112
gguuucauggaaagaccca

SEQ ID NO: 1234114 - RNA, 19 nt, Artificial Sequence
  Description of Artificial Sequence: Synthetic oligonucleotide
  Sense strand starting at position 3886 of SEQ ID NO: 917444
guucaucccggguauaaga

SEQ ID NO: 1234115 - RNA, 19 nt, Artificial Sequence
  Description of Artificial Sequence: Synthetic oligonucleotide
  Antisense strand to SEQ ID NO: 1234114
ucuuauacccgggaugaac

SEQ ID NO: 1234116 - RNA, 19 nt, Artificial Sequence
  Description of Artificial Sequence: Synthetic oligonucleotide
  Sense strand starting at position 3961 of SEQ ID NO: 917444
cuuugauaacuauguaguu

SEQ ID NO: 1234117 - RNA, 19 nt, Artificial Sequence
  Description of Artificial Sequence: Synthetic oligonucleotide
  Antisense strand to SEQ ID NO: 1234116
aacuacauaguuaucaaag

SEQ ID NO: 1234118 - RNA, 19 nt, Artificial Sequence
  Description of Artificial Sequence: Synthetic oligonucleotide
  Sense strand starting at position 3978 of SEQ ID NO: 917445
uuaguuucuccauguaaau

SEQ ID NO: 1234119 - RNA, 19 nt, Artificial Sequence
  Description of Artificial Sequence: Synthetic oligonucleotide
  Antisense strand to SEQ ID NO: 1234118
auuuacauggagaaacuaa

SEQ ID NO: 1234120 - RNA, 19 nt, Artificial Sequence
  Description of Artificial Sequence: Synthetic oligonucleotide
  Sense strand starting at position 45 of SEQ ID NO: 917445
uuacguuauagaugaggug

SEQ ID NO: 1234121 - RNA, 19 nt, Artificial Sequence
  Description of Artificial Sequence: Synthetic oligonucleotide
  Antisense strand to SEQ ID NO: 1234120
caccucaucuauaacguaa

SEQ ID NO: 1234122 - RNA, 19 nt, Artificial Sequence
  Description of Artificial Sequence: Synthetic oligonucleotide
  Sense strand starting at position 196 of SEQ ID NO: 917445
cacggaaugucaucacaua

SEQ ID NO: 1234123 - RNA, 19 nt, Artificial Sequence
  Description of Artificial Sequence: Synthetic oligonucleotide
  Antisense strand to SEQ ID NO: 1234122
uaugugaugacauuccgug

SEQ ID NO: 1234124 - RNA, 19 nt, Artificial Sequence
  Description of Artificial Sequence: Synthetic oligonucleotide
  Sense strand starting at position 423 of SEQ ID NO: 917445
augacaguuaugcaaggua

SEQ ID NO: 1234125 - RNA, 19 nt, Artificial Sequence
  Description of Artificial Sequence: Synthetic oligonucleotide
  Antisense strand to SEQ ID NO: 1234124
uaccuugcauaacugucau

SEQ ID NO: 1234126 - RNA, 19 nt, Artificial Sequence
  Description of Artificial Sequence: Synthetic oligonucleotide
  Sense strand starting at position 426 of SEQ ID NO: 917445
acaguuaugcaagguaaac

SEQ ID NO: 1234127 - RNA, 19 nt, Artificial Sequence
  Description of Artificial Sequence: Synthetic oligonucleotide
  Antisense strand to SEQ ID NO: 1234126
guuuaccuugcauaacugu

SEQ ID NO: 1234128 - RNA, 19 nt, Artificial Sequence
  Description of Artificial Sequence: Synthetic oligonucleotide
  Sense strand starting at position 779 of SEQ ID NO: 917445
aagggaaaguuagaagauu

SEQ ID NO: 1234129 - RNA, 19 nt, Artificial Sequence
  Description of Artificial Sequence: Synthetic oligonucleotide
  Antisense strand to SEQ ID NO: 1234128
aaucuucuaacuuucccuu

SEQ ID NO: 1234130 - RNA, 19 nt, Artificial Sequence
  Description of Artificial Sequence: Synthetic oligonucleotide
  Sense strand starting at position 839 of SEQ ID NO: 917445
gugugcugaguuuauaaac

SEQ ID NO: 1234131 - RNA, 19 nt, Artificial Sequence
  Description of Artificial Sequence: Synthetic oligonucleotide
  Antisense strand to SEQ ID NO: 1234130
guuuauaaacucagcacac

SEQ ID NO: 1234132 - RNA, 19 nt, Artificial Sequence
  Description of Artificial Sequence: Synthetic oligonucleotide
  Sense strand starting at position 1015 of SEQ ID NO: 917445
uuguaaauccuguaugaau

SEQ ID NO: 1234133 - RNA, 19 nt, Artificial Sequence
  Description of Artificial Sequence: Synthetic oligonucleotide
  Antisense strand to SEQ ID NO: 1234132
auucauacaggauuuacaa

SEQ ID NO: 1234134 - RNA, 19 nt, Artificial Sequence
  Description of Artificial Sequence: Synthetic oligonucleotide
  Sense strand starting at position 1056 of SEQ ID NO: 917445
aggaaacaguuucuaaucu

SEQ ID NO: 1234135 - RNA, 19 nt, Artificial Sequence
  Description of Artificial Sequence: Synthetic oligonucleotide
  Antisense strand to SEQ ID NO: 1234134
agauuagaaacuguuuccu

SEQ ID NO: 1234136 - RNA, 19 nt, Artificial Sequence
  Description of Artificial Sequence: Synthetic oligonucleotide
  Sense strand starting at position 1121 of SEQ ID NO: 917445
aucugauacagugguaaag

SEQ ID NO: 1234137 - RNA, 19 nt, Artificial Sequence
  Description of Artificial Sequence: Synthetic oligonucleotide
  Antisense strand to SEQ ID NO: 1234136
cuuuaccacuguaucagau

SEQ ID NO: 1234138 - RNA, 19 nt, Artificial Sequence
  Description of Artificial Sequence: Synthetic oligonucleotide
  Sense strand starting at position 1260 of SEQ ID NO: 917445
cgcauuuggaagugauccu

SEQ ID NO: 1234139 - RNA, 19 nt, Artificial Sequence
  Description of Artificial Sequence: Synthetic oligonucleotide
  Antisense strand to SEQ ID NO: 1234138
aggaucacuuccaaaugcg

SEQ ID NO: 1234140 - RNA, 19 nt, Artificial Sequence
  Description of Artificial Sequence: Synthetic oligonucleotide
  Sense strand starting at position 1378 of SEQ ID NO: 917445
agacuaaaugucugcuucu

SEQ ID NO: 1234141 - RNA, 19 nt, Artificial Sequence
  Description of Artificial Sequence: Synthetic oligonucleotide
  Antisense strand to SEQ ID NO: 1234140
agaagcagacauuuagucu

SEQ ID NO: 1234142 - RNA, 19 nt, Artificial Sequence
  Description of Artificial Sequence: Synthetic oligonucleotide
  Sense strand starting at position 1421 of SEQ ID NO: 917445
guguuaguugugccaguaa

SEQ ID NO: 1234143 - RNA, 19 nt, Artificial Sequence
  Description of Artificial Sequence: Synthetic oligonucleotide
  Antisense strand to SEQ ID NO: 1234142
uuacuggcacaacuaacac

SEQ ID NO: 1234144 - RNA, 19 nt, Artificial Sequence
  Description of Artificial Sequence: Synthetic oligonucleotide
  Sense strand starting at position 1432 of SEQ ID NO: 917445
gccaguaagcaagaaugaa

SEQ ID NO: 1234145 - RNA, 19 nt, Artificial Sequence
  Description of Artificial Sequence: Synthetic oligonucleotide
  Antisense strand to SEQ ID NO: 1234144
uucauucuugcuuacuggc

SEQ ID NO: 1234146 - RNA, 19 nt, Artificial Sequence
  Description of Artificial Sequence: Synthetic oligonucleotide
  Sense strand starting at position 1444 of SEQ ID NO: 917445
gaaugaaauugaguauccu

SEQ ID NO: 1234147 - RNA, 19 nt, Artificial Sequence
  Description of Artificial Sequence: Synthetic oligonucleotide
  Antisense strand to SEQ ID NO: 1234146
aggauacucaauuucauuc

SEQ ID NO: 1234148 - RNA, 19 nt, Artificial Sequence
  Description of Artificial Sequence: Synthetic oligonucleotide
  Sense strand starting at position 1576 of SEQ ID NO: 917445
gagacucuuccugacguua

SEQ ID NO: 1234149 - RNA, 19 nt, Artificial Sequence
  Description of Artificial Sequence: Synthetic oligonucleotide
  Antisense strand to SEQ ID NO: 1234148
uaacgucaggaagagucuc

SEQ ID NO: 1234150 - RNA, 19 nt, Artificial Sequence
  Description of Artificial Sequence: Synthetic oligonucleotide
  Sense strand starting at position 1892 of SEQ ID NO: 917445
ugcugaaugcaguaaguaa

SEQ ID NO: 1234151 - RNA, 19 nt, Artificial Sequence
  Description of Artificial Sequence: Synthetic oligonucleotide
  Antisense strand to SEQ ID NO: 1234150
uuacuuacugcauucagca

SEQ ID NO: 1234152 - RNA, 19 nt, Artificial Sequence
  Description of Artificial Sequence: Synthetic oligonucleotide
  Sense strand starting at position 1903 of SEQ ID NO: 917445
guaaguaaacaagauguuu

SEQ ID NO: 1234153 - RNA, 19 nt, Artificial Sequence
  Description of Artificial Sequence: Synthetic oligonucleotide
  Antisense strand to SEQ ID NO: 1234152
aaacaucuuguuuacuuac

SEQ ID NO: 1234154 - RNA, 19 nt, Artificial Sequence
  Description of Artificial Sequence: Synthetic oligonucleotide
  Sense strand starting at position 1918 of SEQ ID NO: 917445
guuuaacagagcugagauu

SEQ ID NO: 1234155 - RNA, 19 nt, Artificial Sequence
  Description of Artificial Sequence: Synthetic oligonucleotide
  Antisense strand to SEQ ID NO: 1234154
aaucucagcucuguuaaac

SEQ ID NO: 1234156 - RNA, 19 nt, Artificial Sequence
  Description of Artificial Sequence: Synthetic oligonucleotide
  Sense strand starting at position 1927 of SEQ ID NO: 917445
agcugagauugaucacucu

SEQ ID NO: 1234157 - RNA, 19 nt, Artificial Sequence
  Description of Artificial Sequence: Synthetic oligonucleotide
  Antisense strand to SEQ ID NO: 1234156
agagugaucaaucucagcu

SEQ ID NO: 1234158 - RNA, 19 nt, Artificial Sequence
  Description of Artificial Sequence: Synthetic oligonucleotide
  Sense strand starting at position 2057 of SEQ ID NO: 917445
ggcguaaauaaagagacuu

SEQ ID NO: 1234159 - RNA, 19 nt, Artificial Sequence
  Description of Artificial Sequence: Synthetic oligonucleotide
  Antisense strand to SEQ ID NO: 1234158
aagucucuuuauuuacgcc

SEQ ID NO: 1234160 - RNA, 19 nt, Artificial Sequence
  Description of Artificial Sequence: Synthetic oligonucleotide
  Sense strand starting at position 2218 of SEQ ID NO: 917445
ccaaauauagugcaaguga

SEQ ID NO: 1234161 - RNA, 19 nt, Artificial Sequence
  Description of Artificial Sequence: Synthetic oligonucleotide
  Antisense strand to SEQ ID NO: 1234160
ucacuugcacuauauuugg

SEQ ID NO: 1234162 - RNA, 19 nt, Artificial Sequence
  Description of Artificial Sequence: Synthetic oligonucleotide
  Sense strand starting at position 2373 of SEQ ID NO: 917445
aagaaugcugccuauagag

SEQ ID NO: 1234163 - RNA, 19 nt, Artificial Sequence
  Description of Artificial Sequence: Synthetic oligonucleotide
  Antisense strand to SEQ ID NO: 1234162
cucuauaggcagcauucuu

SEQ ID NO: 1234164 - RNA, 19 nt, Artificial Sequence
  Description of Artificial Sequence: Synthetic oligonucleotide
  Sense strand starting at position 2375 of SEQ ID NO: 917445
gaaugcugccuauagagua

SEQ ID NO: 1234165 - RNA, 19 nt, Artificial Sequence
  Description of Artificial Sequence: Synthetic oligonucleotide
  Antisense strand to SEQ ID NO: 1234164
uacucuauaggcagcauuc

SEQ ID NO: 1234166 - RNA, 19 nt, Artificial Sequence
  Description of Artificial Sequence: Synthetic oligonucleotide
  Sense strand starting at position 2437 of SEQ ID NO: 917445
aguugaaauugugcacuaa

SEQ ID NO: 1234167 - RNA, 19 nt, Artificial Sequence
  Description of Artificial Sequence: Synthetic oligonucleotide
  Antisense strand to SEQ ID NO: 1234166
uuagugcacaauuucaacu

SEQ ID NO: 1234168 - RNA, 19 nt, Artificial Sequence
  Description of Artificial Sequence: Synthetic oligonucleotide
  Sense strand starting at position 2438 of SEQ ID NO: 917445
guugaaauugugcacuaac

SEQ ID NO: 1234169 - RNA, 19 nt, Artificial Sequence
  Description of Artificial Sequence: Synthetic oligonucleotide
  Antisense strand to SEQ ID NO: 1234168
guuagugcacaauuucaac

SEQ ID NO: 1234170 - RNA, 19 nt, Artificial Sequence
  Description of Artificial Sequence: Synthetic oligonucleotide
  Sense strand starting at position 2441 of SEQ ID NO: 917445
gaaauugugcacuaacuag

SEQ ID NO: 1234171 - RNA, 19 nt, Artificial Sequence
  Description of Artificial Sequence: Synthetic oligonucleotide
  Antisense strand to SEQ ID NO: 1234170
cuaguuagugcacaauuuc

SEQ ID NO: 1234172 - RNA, 19 nt, Artificial Sequence
  Description of Artificial Sequence: Synthetic oligonucleotide
  Sense strand starting at position 2447 of SEQ ID NO: 917445
gugcacuaacuagauugua

SEQ ID NO: 1234173 - RNA, 19 nt, Artificial Sequence
  Description of Artificial Sequence: Synthetic oligonucleotide
  Antisense strand to SEQ ID NO: 1234172
uacaaucuaguuagugcac

SEQ ID NO: 1234174 - RNA, 19 nt, Artificial Sequence
  Description of Artificial Sequence: Synthetic oligonucleotide
  Sense strand starting at position 2708 of SEQ ID NO: 917445
ugauaaaguucuguuuauc

SEQ ID NO: 1234175 - RNA, 19 nt, Artificial Sequence
  Description of Artificial Sequence: Synthetic oligonucleotide
  Antisense strand to SEQ ID NO: 1234174
gauaaacagaacuuuauca

SEQ ID NO: 1234176 - RNA, 19 nt, Artificial Sequence
  Description of Artificial Sequence: Synthetic oligonucleotide
  Sense strand starting at position 2901 of SEQ ID NO: 917445
uuauuacucuugucagauu

SEQ ID NO: 1234177 - RNA, 19 nt, Artificial Sequence
  Description of Artificial Sequence: Synthetic oligonucleotide
  Antisense strand to SEQ ID NO: 1234176
aaucugacaagaguaauaa

SEQ ID NO: 1234178 - RNA, 19 nt, Artificial Sequence
  Description of Artificial Sequence: Synthetic oligonucleotide
  Sense strand starting at position 3055 of SEQ ID NO: 917445
agaggccuucuauguaaua

SEQ ID NO: 1234179 - RNA, 19 nt, Artificial Sequence
  Description of Artificial Sequence: Synthetic oligonucleotide
  Antisense strand to SEQ ID NO: 1234178
uauuacauagaaggccucu

SEQ ID NO: 1234180 - RNA, 19 nt, Artificial Sequence
  Description of Artificial Sequence: Synthetic oligonucleotide
  Sense strand starting at position 3056 of SEQ ID NO: 917445
gaggccuucuauguaauag

SEQ ID NO: 1234181 - RNA, 19 nt, Artificial Sequence
  Description of Artificial Sequence: Synthetic oligonucleotide
  Antisense strand to SEQ ID NO: 1234180
cuauuacauagaaggccuc

SEQ ID NO: 1234182 - RNA, 19 nt, Artificial Sequence
  Description of Artificial Sequence: Synthetic oligonucleotide
  Sense strand starting at position 3204 of SEQ ID NO: 917445
gugguauauuggcucuaaa

SEQ ID NO: 1234183 - RNA, 19 nt, Artificial Sequence
  Description of Artificial Sequence: Synthetic oligonucleotide
  Antisense strand to SEQ ID NO: 1234182
uuuagagccaauauaccac

SEQ ID NO: 1234184 - RNA, 19 nt, Artificial Sequence
  Description of Artificial Sequence: Synthetic oligonucleotide
  Sense strand starting at position 3207 of SEQ ID NO: 917445
guauauuggcucuaaacac

SEQ ID NO: 1234185 - RNA, 19 nt, Artificial Sequence
  Description of Artificial Sequence: Synthetic oligonucleotide
  Antisense strand to SEQ ID NO: 1234184
guguuuagagccaauauac

SEQ ID NO: 1234186 - RNA, 19 nt, Artificial Sequence
  Description of Artificial Sequence: Synthetic oligonucleotide
  Sense strand starting at position 3390 of SEQ ID NO: 917445
ugaagaguauaagugaagu

SEQ ID NO: 1234187 - RNA, 19 nt, Artificial Sequence
  Description of Artificial Sequence: Synthetic oligonucleotide
  Antisense strand to SEQ ID NO: 1234186
acuucacuuauacucuuca

SEQ ID NO: 1234188 - RNA, 19 nt, Artificial Sequence
  Description of Artificial Sequence: Synthetic oligonucleotide
  Sense strand starting at position 3418 of SEQ ID NO: 917445
auaauuaguguuuggcaca

SEQ ID NO: 1234189 - RNA, 19 nt, Artificial Sequence
  Description of Artificial Sequence: Synthetic oligonucleotide
  Antisense strand to SEQ ID NO: 1234188
ugugccaaacacuaauuau

SEQ ID NO: 1234190 - RNA, 19 nt, Artificial Sequence
  Description of Artificial Sequence: Synthetic oligonucleotide
  Sense strand starting at position 3682 of SEQ ID NO: 917445
uucuuuguagauugacaca

SEQ ID NO: 1234191 - RNA, 19 nt, Artificial Sequence
  Description of Artificial Sequence: Synthetic oligonucleotide
  Antisense strand to SEQ ID NO: 1234190
ugugucaaucuacaaagaa

SEQ ID NO: 1234192 - RNA, 19 nt, Artificial Sequence
  Description of Artificial Sequence: Synthetic oligonucleotide
  Sense strand starting at position 3694 of SEQ ID NO: 917445
ugacacauguuucucucau

SEQ ID NO: 1234193 - RNA, 19 nt, Artificial Sequence
  Description of Artificial Sequence: Synthetic oligonucleotide
  Antisense strand to SEQ ID NO: 1234192
augagagaaacauguguca

SEQ ID NO: 1234194 - RNA, 19 nt, Artificial Sequence
  Description of Artificial Sequence: Synthetic oligonucleotide
  Sense strand starting at position 3835 of SEQ ID NO: 917445
gggcaauugcaguaauuac

SEQ ID NO: 1234195 - RNA, 19 nt, Artificial Sequence
  Description of Artificial Sequence: Synthetic oligonucleotide
  Antisense strand to SEQ ID NO: 1234194
guaauuacugcaauugccc

SEQ ID NO: 1234196 - RNA, 19 nt, Artificial Sequence
  Description of Artificial Sequence: Synthetic oligonucleotide
  Sense strand starting at position 3845 of SEQ ID NO: 917445
aguaauuacuggucaauuc

SEQ ID NO: 1234197 - RNA, 19 nt, Artificial Sequence
  Description of Artificial Sequence: Synthetic oligonucleotide
  Antisense strand to SEQ ID NO: 1234196
gaauugaccaguaauuacu

SEQ ID NO: 1234198 - RNA, 19 nt, Artificial Sequence
  Description of Artificial Sequence: Synthetic oligonucleotide
  Sense strand starting at position 3922 of SEQ ID NO: 917446
ucaguuguucuauaagcuu

SEQ ID NO: 1234199 - RNA, 19 nt, Artificial Sequence
  Description of Artificial Sequence: Synthetic oligonucleotide
  Antisense strand to SEQ ID NO: 1234198
aagcuuauagaacaacuga

SEQ ID NO: 1234200 - RNA, 19 nt, Artificial Sequence
  Description of Artificial Sequence: Synthetic oligonucleotide
  Sense strand starting at position 27 of SEQ ID NO: 917446
ugauaaacaugaguuuguu

SEQ ID NO: 1234201 - RNA, 19 nt, Artificial Sequence
  Description of Artificial Sequence: Synthetic oligonucleotide
  Antisense strand to SEQ ID NO: 1234200
aacaaacucauguuuauca

SEQ ID NO: 1234202 - RNA, 19 nt, Artificial Sequence
  Description of Artificial Sequence: Synthetic oligonucleotide
  Sense strand starting at position 70 of SEQ ID NO: 917446
ucuuaagcauaguuugaaa

SEQ ID NO: 1234203 - RNA, 19 nt, Artificial Sequence
  Description of Artificial Sequence: Synthetic oligonucleotide
  Antisense strand to SEQ ID NO: 1234202
uuucaaacuaugcuuaaga

SEQ ID NO: 1234204 - RNA, 19 nt, Artificial Sequence
  Description of Artificial Sequence: Synthetic oligonucleotide
  Sense strand starting at position 200 of SEQ ID NO: 917446
cugucuugccaucacugaa

SEQ ID NO: 1234205 - RNA, 19 nt, Artificial Sequence
  Description of Artificial Sequence: Synthetic oligonucleotide
  Antisense strand to SEQ ID NO: 1234204
uucagugauggcaagacag

SEQ ID NO: 1234206 - RNA, 19 nt, Artificial Sequence
  Description of Artificial Sequence: Synthetic oligonucleotide
  Sense strand starting at position 218 of SEQ ID NO: 917446
aggugacuauuaccacuaa

SEQ ID NO: 1234207 - RNA, 19 nt, Artificial Sequence
  Description of Artificial Sequence: Synthetic oligonucleotide
  Antisense strand to SEQ ID NO: 1234206
uuagugguaauagucaccu

SEQ ID NO: 1234208 - RNA, 19 nt, Artificial Sequence
  Description of Artificial Sequence: Synthetic oligonucleotide
  Sense strand starting at position 248 of SEQ ID NO: 917446
cggauacaguacuugaaau

SEQ ID NO: 1234209 - RNA, 19 nt, Artificial Sequence
  Description of Artificial Sequence: Synthetic oligonucleotide
  Antisense strand to SEQ ID NO: 1234208
auuucaaguacuguauccg

SEQ ID NO: 1234210 - RNA, 19 nt, Artificial Sequence
  Description of Artificial Sequence: Synthetic oligonucleotide
  Sense strand starting at position 431 of SEQ ID NO: 917446
uggaguugagaaugucuuu

SEQ ID NO: 1234211 - RNA, 19 nt, Artificial Sequence
  Description of Artificial Sequence: Synthetic oligonucleotide
  Antisense strand to SEQ ID NO: 1234210
aaagacauucucaacucca

SEQ ID NO: 1234212 - RNA, 19 nt, Artificial Sequence
  Description of Artificial Sequence: Synthetic oligonucleotide
  Sense strand starting at position 554 of SEQ ID NO: 917446
gcuuguaguagucacauuu

SEQ ID NO: 1234213 - RNA, 19 nt, Artificial Sequence
  Description of Artificial Sequence: Synthetic oligonucleotide
  Antisense strand to SEQ ID NO: 1234212
aaaugugacuacuacaagc

SEQ ID NO: 1234214 - RNA, 19 nt, Artificial Sequence
  Description of Artificial Sequence: Synthetic oligonucleotide
  Sense strand starting at position 621 of SEQ ID NO: 917446
gaggcagcauuauuaaaug

SEQ ID NO: 1234215 - RNA, 19 nt, Artificial Sequence
  Description of Artificial Sequence: Synthetic oligonucleotide
  Antisense strand to SEQ ID NO: 1234214
cauuuaauaaugcugccuc

SEQ ID NO: 1234216 - RNA, 19 nt, Artificial Sequence
  Description of Artificial Sequence: Synthetic oligonucleotide
  Sense strand starting at position 778 of SEQ ID NO: 917446
uguuucucacuguaaacua

SEQ ID NO: 1234217 - RNA, 19 nt, Artificial Sequence
  Description of Artificial Sequence: Synthetic oligonucleotide
  Antisense strand to SEQ ID NO: 1234216
uaguuuacagugagaaaca

SEQ ID NO: 1234218 - RNA, 19 nt, Artificial Sequence
  Description of Artificial Sequence: Synthetic oligonucleotide
  Sense strand starting at position 789 of SEQ ID NO: 917446
guaaacuacuggguaaaga

SEQ ID NO: 1234219 - RNA, 19 nt, Artificial Sequence
  Description of Artificial Sequence: Synthetic oligonucleotide
  Antisense strand to SEQ ID NO: 1234218
ucuuuacccaguaguuuac

SEQ ID NO: 1234220 - RNA, 19 nt, Artificial Sequence
  Description of Artificial Sequence: Synthetic oligonucleotide
  Sense strand starting at position 835 of SEQ ID NO: 917446
cgauuuguauccuuuguag

SEQ ID NO: 1234221 - RNA, 19 nt, Artificial Sequence
  Description of Artificial Sequence: Synthetic oligonucleotide
  Antisense strand to SEQ ID NO: 1234220
cuacaaaggauacaaaucg

SEQ ID NO: 1234222 - RNA, 19 nt, Artificial Sequence
  Description of Artificial Sequence: Synthetic oligonucleotide
  Sense strand starting at position 837 of SEQ ID NO: 917446
auuuguauccuuuguaggu

SEQ ID NO: 1234223 - RNA, 19 nt, Artificial Sequence
  Description of Artificial Sequence: Synthetic oligonucleotide
  Antisense strand to SEQ ID NO: 1234222
accuacaaaggauacaaau

SEQ ID NO: 1234224 - RNA, 19 nt, Artificial Sequence
  Description of Artificial Sequence: Synthetic oligonucleotide
  Sense strand starting at position 885 of SEQ ID NO: 917446
gaaauaagucaacguagua

SEQ ID NO: 1234225 - RNA, 19 nt, Artificial Sequence
  Description of Artificial Sequence: Synthetic oligonucleotide
  Antisense strand to SEQ ID NO: 1234224
uacuacguugacuuauuuc

SEQ ID NO: 1234226 - RNA, 19 nt, Artificial Sequence
  Description of Artificial Sequence: Synthetic oligonucleotide
  Sense strand starting at position 1263 of SEQ ID NO: 917446
cggcgcuggcgaguuuaaa

SEQ ID NO: 1234227 - RNA, 19 nt, Artificial Sequence
  Description of Artificial Sequence: Synthetic oligonucleotide
  Antisense strand to SEQ ID NO: 1234226
uuuaaacucgccagcgccg

SEQ ID NO: 1234228 - RNA, 19 nt, Artificial Sequence
  Description of Artificial Sequence: Synthetic oligonucleotide
  Sense strand starting at position 2366 of SEQ ID NO: 917446
ugagauuucuugccagcac

SEQ ID NO: 1234229 - RNA, 19 nt, Artificial Sequence
  Description of Artificial Sequence: Synthetic oligonucleotide
  Antisense strand to SEQ ID NO: 1234228
gugcuggcaagaaaucuca

SEQ ID NO: 1234230 - RNA, 19 nt, Artificial Sequence
  Description of Artificial Sequence: Synthetic oligonucleotide
  Sense strand starting at position 2407 of SEQ ID NO: 917446
uugucagcccaacaagaau

SEQ ID NO: 1234231 - RNA, 19 nt, Artificial Sequence
  Description of Artificial Sequence: Synthetic oligonucleotide
  Antisense strand to SEQ ID NO: 1234230
auucuuguugggcugacaa

SEQ ID NO: 1234232 - RNA, 19 nt, Artificial Sequence
  Description of Artificial Sequence: Synthetic oligonucleotide
  Sense strand starting at position 2512 of SEQ ID NO: 917446
cccuguuuguuccugauuu

SEQ ID NO: 1234233 - RNA, 19 nt, Artificial Sequence
  Description of Artificial Sequence: Synthetic oligonucleotide
  Antisense strand to SEQ ID NO: 1234232
aaaucaggaacaaacaggg

SEQ ID NO: 1234234 - RNA, 19 nt, Artificial Sequence
  Description of Artificial Sequence: Synthetic oligonucleotide
  Sense strand starting at position 2516 of SEQ ID NO: 917446
guuuguuccugauuugcuu

SEQ ID NO: 1234235 - RNA, 19 nt, Artificial Sequence
  Description of Artificial Sequence: Synthetic oligonucleotide
  Antisense strand to SEQ ID NO: 1234234
aagcaaaucaggaacaaac

SEQ ID NO: 1234236 - RNA, 19 nt, Artificial Sequence
  Description of Artificial Sequence: Synthetic oligonucleotide
  Sense strand starting at position 2646 of SEQ ID NO: 917446
ucauguaauuauguggauu

SEQ ID NO: 1234237 - RNA, 19 nt, Artificial Sequence
  Description of Artificial Sequence: Synthetic oligonucleotide
  Antisense strand to SEQ ID NO: 1234236
aauccacauaauuacauga

SEQ ID NO: 1234238 - RNA, 19 nt, Artificial Sequence
  Description of Artificial Sequence: Synthetic oligonucleotide
  Sense strand starting at position 2649 of SEQ ID NO: 917446
uguaauuauguggauugua

SEQ ID NO: 1234239 - RNA, 19 nt, Artificial Sequence
  Description of Artificial Sequence: Synthetic oligonucleotide
  Antisense strand to SEQ ID NO: 1234238
uacaauccacauaauuaca

SEQ ID NO: 1234240 - RNA, 19 nt, Artificial Sequence
  Description of Artificial Sequence: Synthetic oligonucleotide
  Sense strand starting at position 2892 of SEQ ID NO: 917446
cccguaguuccucacagaa

SEQ ID NO: 1234241 - RNA, 19 nt, Artificial Sequence
  Description of Artificial Sequence: Synthetic oligonucleotide
  Antisense strand to SEQ ID NO: 1234240
uucugugaggaacuacggg

SEQ ID NO: 1234242 - RNA, 19 nt, Artificial Sequence
  Description of Artificial Sequence: Synthetic oligonucleotide
  Sense strand starting at position 2927 of SEQ ID NO: 917446
gggugaacguggaauaaag

SEQ ID NO: 1234243 - RNA, 19 nt, Artificial Sequence
  Description of Artificial Sequence: Synthetic oligonucleotide
  Antisense strand to SEQ ID NO: 1234242
cuuuauuccacguucaccc

SEQ ID NO: 1234244 - RNA, 19 nt, Artificial Sequence
  Description of Artificial Sequence: Synthetic oligonucleotide
  Sense strand starting at position 3117 of SEQ ID NO: 917446
guaguugaacggugauuug

SEQ ID NO: 1234245 - RNA, 19 nt, Artificial Sequence
  Description of Artificial Sequence: Synthetic oligonucleotide
  Antisense strand to SEQ ID NO: 1234244
caaaucaccguucaacuac

SEQ ID NO: 1234246 - RNA, 19 nt, Artificial Sequence
  Description of Artificial Sequence: Synthetic oligonucleotide
  Sense strand starting at position 3120 of SEQ ID NO: 917446
guugaacggugauuuguuu

SEQ ID NO: 1234247 - RNA, 19 nt, Artificial Sequence
  Description of Artificial Sequence: Synthetic oligonucleotide
  Antisense strand to SEQ ID NO: 1234246
aaacaaaucaccguucaac

SEQ ID NO: 1234248 - RNA, 19 nt, Artificial Sequence
  Description of Artificial Sequence: Synthetic oligonucleotide
  Sense strand starting at position 3240 of SEQ ID NO: 917446
ugagauuguccugggugag

SEQ ID NO: 1234249 - RNA, 19 nt, Artificial Sequence
  Description of Artificial Sequence: Synthetic oligonucleotide
  Antisense strand to SEQ ID NO: 1234248
cucacccaggacaaucuca

SEQ ID NO: 1234250 - RNA, 19 nt, Artificial Sequence
  Description of Artificial Sequence: Synthetic oligonucleotide
  Sense strand starting at position 3241 of SEQ ID NO: 917446
gagauuguccugggugaga

SEQ ID NO: 1234251 - RNA, 19 nt, Artificial Sequence
  Description of Artificial Sequence: Synthetic oligonucleotide
  Antisense strand to SEQ ID NO: 1234250
ucucacccaggacaaucuc

SEQ ID NO: 1234252 - RNA, 19 nt, Artificial Sequence
  Description of Artificial Sequence: Synthetic oligonucleotide
  Sense strand starting at position 3243 of SEQ ID NO: 917446
gauuguccugggugagaaa

SEQ ID NO: 1234253 - RNA, 19 nt, Artificial Sequence
  Description of Artificial Sequence: Synthetic oligonucleotide
  Antisense strand to SEQ ID NO: 1234252
uuucucacccaggacaauc

SEQ ID NO: 1234254 - RNA, 19 nt, Artificial Sequence
  Description of Artificial Sequence: Synthetic oligonucleotide
  Sense strand starting at position 3279 of SEQ ID NO: 917446
accgguaagggcuacagau

SEQ ID NO: 1234255 - RNA, 19 nt, Artificial Sequence
  Description of Artificial Sequence: Synthetic oligonucleotide
  Antisense strand to SEQ ID NO: 1234254
aucuguagcccuuaccggu

SEQ ID NO: 1234256 - RNA, 19 nt, Artificial Sequence
  Description of Artificial Sequence: Synthetic oligonucleotide
  Sense strand starting at position 3281 of SEQ ID NO: 917446
cgguaagggcuacagauua

SEQ ID NO: 1234257 - RNA, 19 nt, Artificial Sequence
  Description of Artificial Sequence: Synthetic oligonucleotide
  Antisense strand to SEQ ID NO: 1234256
uaaucuguagcccuuaccg

SEQ ID NO: 1234258 - RNA, 19 nt, Artificial Sequence
  Description of Artificial Sequence: Synthetic oligonucleotide
  Sense strand starting at position 3305 of SEQ ID NO: 917446
uaaggauuaggcuggaugu

SEQ ID NO: 1234259 - RNA, 19 nt, Artificial Sequence
  Description of Artificial Sequence: Synthetic oligonucleotide
  Antisense strand to SEQ ID NO: 1234258
acauccagccuaauccuua

SEQ ID NO: 1234260 - RNA, 19 nt, Artificial Sequence
  Description of Artificial Sequence: Synthetic oligonucleotide
  Sense strand starting at position 3343 of SEQ ID NO: 917446
cuaauuagguccucagaau

SEQ ID NO: 1234261 - RNA, 19 nt, Artificial Sequence
  Description of Artificial Sequence: Synthetic oligonucleotide
  Antisense strand to SEQ ID NO: 1234260
auucugaggaccuaauuag

SEQ ID NO: 1234262 - RNA, 19 nt, Artificial Sequence
  Description of Artificial Sequence: Synthetic oligonucleotide
  Sense strand starting at position 3436 of SEQ ID NO: 917446
cucguauaugagcauaaug

SEQ ID NO: 1234263 - RNA, 19 nt, Artificial Sequence
  Description of Artificial Sequence: Synthetic oligonucleotide
  Antisense strand to SEQ ID NO: 1234262
cauuaugcucauauacgag

SEQ ID NO: 1234264 - RNA, 19 nt, Artificial Sequence
  Description of Artificial Sequence: Synthetic oligonucleotide
  Sense strand starting at position 3553 of SEQ ID NO: 917446
uuggcaggccuuugauuua

SEQ ID NO: 1234265 - RNA, 19 nt, Artificial Sequence
  Description of Artificial Sequence: Synthetic oligonucleotide
  Antisense strand to SEQ ID NO: 1234264
uaaaucaaaggccugccaa

SEQ ID NO: 1234266 - RNA, 19 nt, Artificial Sequence
  Description of Artificial Sequence: Synthetic oligonucleotide
  Sense strand starting at position 3593 of SEQ ID NO: 917446
uucuguacguucucauuua

SEQ ID NO: 1234267 - RNA, 19 nt, Artificial Sequence
  Description of Artificial Sequence: Synthetic oligonucleotide
  Antisense strand to SEQ ID NO: 1234266
uaaaugagaacguacagaa

SEQ ID NO: 1234268 - RNA, 19 nt, Artificial Sequence
  Description of Artificial Sequence: Synthetic oligonucleotide
  Sense strand starting at position 3685 of SEQ ID NO: 917446
ucauguauuccucaaggcu

SEQ ID NO: 1234269 - RNA, 19 nt, Artificial Sequence
  Description of Artificial Sequence: Synthetic oligonucleotide
  Antisense strand to SEQ ID NO: 1234268
agccuugaggaauacauga

SEQ ID NO: 1234270 - RNA, 19 nt, Artificial Sequence
  Description of Artificial Sequence: Synthetic oligonucleotide
  Sense strand starting at position 3691 of SEQ ID NO: 917446
auuccucaaggcuaguaua

SEQ ID NO: 1234271 - RNA, 19 nt, Artificial Sequence
  Description of Artificial Sequence: Synthetic oligonucleotide
  Antisense strand to SEQ ID NO: 1234270
uauacuagccuugaggaau

SEQ ID NO: 1234272 - RNA, 19 nt, Artificial Sequence
  Description of Artificial Sequence: Synthetic oligonucleotide
  Sense strand starting at position 3718 of SEQ ID NO: 917446
auccauuacgcucaagaac

SEQ ID NO: 1234273 - RNA, 19 nt, Artificial Sequence
  Description of Artificial Sequence: Synthetic oligonucleotide
  Antisense strand to SEQ ID NO: 1234272
guucuugagcguaauggau

SEQ ID NO: 1234274 - RNA, 19 nt, Artificial Sequence
  Description of Artificial Sequence: Synthetic oligonucleotide
  Sense strand starting at position 3740 of SEQ ID NO: 917446
aagaucuggugaguuccaa

SEQ ID NO: 1234275 - RNA, 19 nt, Artificial Sequence
  Description of Artificial Sequence: Synthetic oligonucleotide
  Antisense strand to SEQ ID NO: 1234274
uuggaacucaccagaucuu

SEQ ID NO: 1234276 - RNA, 19 nt, Artificial Sequence
  Description of Artificial Sequence: Synthetic oligonucleotide
  Sense strand starting at position 3822 of SEQ ID NO: 917446
gacuguccugguuaaugga

SEQ ID NO: 1234277 - RNA, 19 nt, Artificial Sequence
  Description of Artificial Sequence: Synthetic oligonucleotide
  Antisense strand to SEQ ID NO: 1234276
uccauuaaccaggacaguc

SEQ ID NO: 1234278 - RNA, 19 nt, Artificial Sequence
  Description of Artificial Sequence: Synthetic oligonucleotide
  Sense strand starting at position 3950 of SEQ ID NO: 917446
agacucagagguugugauu

SEQ ID NO: 1234279 - RNA, 19 nt, Artificial Sequence
  Description of Artificial Sequence: Synthetic oligonucleotide
  Antisense strand to SEQ ID NO: 1234278
aaucacaaccucugagucu

SEQ ID NO: 1234280 - RNA, 19 nt, Artificial Sequence
  Description of Artificial Sequence: Synthetic oligonucleotide
  Sense strand starting at position 3950 of SEQ ID NO: 917447
agacucagagguugugauu

SEQ ID NO: 1234281 - RNA, 19 nt, Artificial Sequence
  Description of Artificial Sequence: Synthetic oligonucleotide
  Antisense strand to SEQ ID NO: 1234280
aaucacaaccucugagucu

SEQ ID NO: 1234282 - RNA, 19 nt, Artificial Sequence
  Description of Artificial Sequence: Synthetic oligonucleotide
  Sense strand starting at position 44 of SEQ ID NO: 917447
ugcccuaauccuggaagga

SEQ ID NO: 1234283 - RNA, 19 nt, Artificial Sequence
  Description of Artificial Sequence: Synthetic oligonucleotide
  Antisense strand to SEQ ID NO: 1234282
uccuuccaggauuagggca

SEQ ID NO: 1234284 - RNA, 19 nt, Artificial Sequence
  Description of Artificial Sequence: Synthetic oligonucleotide
  Sense strand starting at position 137 of SEQ ID NO: 917447
aguagugaaaccugguaga

SEQ ID NO: 1234285 - RNA, 19 nt, Artificial Sequence
  Description of Artificial Sequence: Synthetic oligonucleotide
  Antisense strand to SEQ ID NO: 1234284
ucuaccagguuucacuacu

SEQ ID NO: 1234286 - RNA, 19 nt, Artificial Sequence
  Description of Artificial Sequence: Synthetic oligonucleotide
  Sense strand starting at position 214 of SEQ ID NO: 917447
agguuugacaaauggcaga

SEQ ID NO: 1234287 - RNA, 19 nt, Artificial Sequence
  Description of Artificial Sequence: Synthetic oligonucleotide
  Antisense strand to SEQ ID NO: 1234286
ucugccauuugucaaaccu

SEQ ID NO: 1234288 - RNA, 19 nt, Artificial Sequence
  Description of Artificial Sequence: Synthetic oligonucleotide
  Sense strand starting at position 317 of SEQ ID NO: 917447
ucuagauuguaggcagaaa

SEQ ID NO: 1234289 - RNA, 19 nt, Artificial Sequence
  Description of Artificial Sequence: Synthetic oligonucleotide
  Antisense strand to SEQ ID NO: 1234288
uuucugccuacaaucuaga

SEQ ID NO: 1234290 - RNA, 19 nt, Artificial Sequence
  Description of Artificial Sequence: Synthetic oligonucleotide
  Sense strand starting at position 530 of SEQ ID NO: 917447
uucuuuacucauggaagac

SEQ ID NO: 1234291 - RNA, 19 nt, Artificial Sequence
  Description of Artificial Sequence: Synthetic oligonucleotide
  Antisense strand to SEQ ID NO: 1234290
gucuuccaugaguaaagaa

SEQ ID NO: 1234292 - RNA, 19 nt, Artificial Sequence
  Description of Artificial Sequence: Synthetic oligonucleotide
  Sense strand starting at position 564 of SEQ ID NO: 917447
ccgacuauuuacgcaagca

SEQ ID NO: 1234293 - RNA, 19 nt, Artificial Sequence
  Description of Artificial Sequence: Synthetic oligonucleotide
  Antisense strand to SEQ ID NO: 1234292
ugcuugcguaaauagucgg

SEQ ID NO: 1234294 - RNA, 19 nt, Artificial Sequence
  Description of Artificial Sequence: Synthetic oligonucleotide
  Sense strand starting at position 565 of SEQ ID NO: 917447
cgacuauuuacgcaagcac

SEQ ID NO: 1234295 - RNA, 19 nt, Artificial Sequence
  Description of Artificial Sequence: Synthetic oligonucleotide
  Antisense strand to SEQ ID NO: 1234294
gugcuugcguaaauagucg

SEQ ID NO: 1234296 - RNA, 19 nt, Artificial Sequence
  Description of Artificial Sequence: Synthetic oligonucleotide
  Sense strand starting at position 598 of SEQ ID NO: 917447
ccuggagcaguuuacaaga

SEQ ID NO: 1234297 - RNA, 19 nt, Artificial Sequence
  Description of Artificial Sequence: Synthetic oligonucleotide
  Antisense strand to SEQ ID NO: 1234296
ucuuguaaacugcuccagg

SEQ ID NO: 1234298 - RNA, 19 nt, Artificial Sequence
  Description of Artificial Sequence: Synthetic oligonucleotide
  Sense strand starting at position 795 of SEQ ID NO: 917447
ucugaaucaugaguggacu

SEQ ID NO: 1234299 - RNA, 19 nt, Artificial Sequence
  Description of Artificial Sequence: Synthetic oligonucleotide
  Antisense strand to SEQ ID NO: 1234298
aguccacucaugauucaga

SEQ ID NO: 1234300 - RNA, 19 nt, Artificial Sequence
  Description of Artificial Sequence: Synthetic oligonucleotide
  Sense strand starting at position 796 of SEQ ID NO: 917447
cugaaucaugaguggacua

SEQ ID NO: 1234301 - RNA, 19 nt, Artificial Sequence
  Description of Artificial Sequence: Synthetic oligonucleotide
  Antisense strand to SEQ ID NO: 1234300
uaguccacucaugauucag

SEQ ID NO: 1234302 - RNA, 19 nt, Artificial Sequence
  Description of Artificial Sequence: Synthetic oligonucleotide
  Sense strand starting at position 797 of SEQ ID NO: 917447
ugaaucaugaguggacuau

SEQ ID NO: 1234303 - RNA, 19 nt, Artificial Sequence
  Description of Artificial Sequence: Synthetic oligonucleotide
  Antisense strand to SEQ ID NO: 1234302
auaguccacucaugauuca

SEQ ID NO: 1234304 - RNA, 19 nt, Artificial Sequence
  Description of Artificial Sequence: Synthetic oligonucleotide
  Sense strand starting at position 897 of SEQ ID NO: 917447
cgcuguauuugguuuauaa

SEQ ID NO: 1234305 - RNA, 19 nt, Artificial Sequence
  Description of Artificial Sequence: Synthetic oligonucleotide
  Antisense strand to SEQ ID NO: 1234304
uuauaaaccaaauacagcg

SEQ ID NO: 1234306 - RNA, 19 nt, Artificial Sequence
  Description of Artificial Sequence: Synthetic oligonucleotide
  Sense strand starting at position 1108 of SEQ ID NO: 917447
ccuugaugccuggagguaa

SEQ ID NO: 1234307 - RNA, 19 nt, Artificial Sequence
  Description of Artificial Sequence: Synthetic oligonucleotide
  Antisense strand to SEQ ID NO: 1234306
uuaccuccaggcaucaagg

SEQ ID NO: 1234308 - RNA, 19 nt, Artificial Sequence
  Description of Artificial Sequence: Synthetic oligonucleotide
  Sense strand starting at position 1112 of SEQ ID NO: 917447
gaugccuggagguaagauu

SEQ ID NO: 1234309 - RNA, 19 nt, Artificial Sequence
  Description of Artificial Sequence: Synthetic oligonucleotide
  Antisense strand to SEQ ID NO: 1234308
aaucuuaccuccaggcauc

SEQ ID NO: 1234310 - RNA, 19 nt, Artificial Sequence
  Description of Artificial Sequence: Synthetic oligonucleotide
  Sense strand starting at position 1482 of SEQ ID NO: 917447
guaggugucacagaugaaa

SEQ ID NO: 1234311 - RNA, 19 nt, Artificial Sequence
  Description of Artificial Sequence: Synthetic oligonucleotide
  Antisense strand to SEQ ID NO: 1234310
uuucaucugugacaccuac

SEQ ID NO: 1234312 - RNA, 19 nt, Artificial Sequence
  Description of Artificial Sequence: Synthetic oligonucleotide
  Sense strand starting at position 1493 of SEQ ID NO: 917447
agaugaaacucguccagaa

SEQ ID NO: 1234313 - RNA, 19 nt, Artificial Sequence
  Description of Artificial Sequence: Synthetic oligonucleotide
  Antisense strand to SEQ ID NO: 1234312
uucuggacgaguuucaucu

SEQ ID NO: 1234314 - RNA, 19 nt, Artificial Sequence
  Description of Artificial Sequence: Synthetic oligonucleotide
  Sense strand starting at position 1621 of SEQ ID NO: 917447
cucuucuugggucagaaau

SEQ ID NO: 1234315 - RNA, 19 nt, Artificial Sequence
  Description of Artificial Sequence: Synthetic oligonucleotide
  Antisense strand to SEQ ID NO: 1234314
auuucugacccaagaagag

SEQ ID NO: 1234316 - RNA, 19 nt, Artificial Sequence
  Description of Artificial Sequence: Synthetic oligonucleotide
  Sense strand starting at position 1627 of SEQ ID NO: 917447
uugggucagaaaugcaauu

SEQ ID NO: 1234317 - RNA, 19 nt, Artificial Sequence
  Description of Artificial Sequence: Synthetic oligonucleotide
  Antisense strand to SEQ ID NO: 1234316
aauugcauuucugacccaa

SEQ ID NO: 1234318 - RNA, 19 nt, Artificial Sequence
  Description of Artificial Sequence: Synthetic oligonucleotide
  Sense strand starting at position 1629 of SEQ ID NO: 917447
gggucagaaaugcaauucu

SEQ ID NO: 1234319 - RNA, 19 nt, Artificial Sequence
  Description of Artificial Sequence: Synthetic oligonucleotide
  Antisense strand to SEQ ID NO: 1234318
agaauugcauuucugaccc

SEQ ID NO: 1234320 - RNA, 19 nt, Artificial Sequence
  Description of Artificial Sequence: Synthetic oligonucleotide
  Sense strand starting at position 1864 of SEQ ID NO: 917447
ggccucucccaggauaaua

SEQ ID NO: 1234321 - RNA, 19 nt, Artificial Sequence
  Description of Artificial Sequence: Synthetic oligonucleotide
  Antisense strand to SEQ ID NO: 1234320
uauuauccugggagaggcc

SEQ ID NO: 1234322 - RNA, 19 nt, Artificial Sequence
  Description of Artificial Sequence: Synthetic oligonucleotide
  Sense strand starting at position 1878 of SEQ ID NO: 917447
uaauacucaccuggagagu

SEQ ID NO: 1234323 - RNA, 19 nt, Artificial Sequence
  Description of Artificial Sequence: Synthetic oligonucleotide
  Antisense strand to SEQ ID NO: 1234322
acucuccaggugaguauua

SEQ ID NO: 1234324 - RNA, 19 nt, Artificial Sequence
  Description of Artificial Sequence: Synthetic oligonucleotide
  Sense strand starting at position 2002 of SEQ ID NO: 917447
uacagacucuuggcaguaa

SEQ ID NO: 1234325 - RNA, 19 nt, Artificial Sequence
  Description of Artificial Sequence: Synthetic oligonucleotide
  Antisense strand to SEQ ID NO: 1234324
uuacugccaagagucugua

SEQ ID NO: 1234326 - RNA, 19 nt, Artificial Sequence
  Description of Artificial Sequence: Synthetic oligonucleotide
  Sense strand starting at position 2006 of SEQ ID NO: 917447
gacucuuggcaguaacuaa

SEQ ID NO: 1234327 - RNA, 19 nt, Artificial Sequence
  Description of Artificial Sequence: Synthetic oligonucleotide
  Antisense strand to SEQ ID NO: 1234326
uuaguuacugccaagaguc

SEQ ID NO: 1234328 - RNA, 19 nt, Artificial Sequence
  Description of Artificial Sequence: Synthetic oligonucleotide
  Sense strand starting at position 2075 of SEQ ID NO: 917447
aggaacuucuaguuaagac

SEQ ID NO: 1234329 - RNA, 19 nt, Artificial Sequence
  Description of Artificial Sequence: Synthetic oligonucleotide
  Antisense strand to SEQ ID NO: 1234328
gucuuaacuagaaguuccu

SEQ ID NO: 1234330 - RNA, 19 nt, Artificial Sequence
  Description of Artificial Sequence: Synthetic oligonucleotide
  Sense strand starting at position 2151 of SEQ ID NO: 917447
guacucaaccaguauguga

SEQ ID NO: 1234331 - RNA, 19 nt, Artificial Sequence
  Description of Artificial Sequence: Synthetic oligonucleotide
  Antisense strand to SEQ ID NO: 1234330
ucacauacugguugaguac

SEQ ID NO: 1234332 - RNA, 19 nt, Artificial Sequence
  Description of Artificial Sequence: Synthetic oligonucleotide
  Sense strand starting at position 2253 of SEQ ID NO: 917447
gagucaguuccagaaucca

SEQ ID NO: 1234333 - RNA, 19 nt, Artificial Sequence
  Description of Artificial Sequence: Synthetic oligonucleotide
  Antisense strand to SEQ ID NO: 1234332
uggauucuggaacugacuc

SEQ ID NO: 1234334 - RNA, 19 nt, Artificial Sequence
  Description of Artificial Sequence: Synthetic oligonucleotide
  Sense strand starting at position 2516 of SEQ ID NO: 917447
acuguugcucagcagagaa

SEQ ID NO: 1234335 - RNA, 19 nt, Artificial Sequence
  Description of Artificial Sequence: Synthetic oligonucleotide
  Antisense strand to SEQ ID NO: 1234334
uucucugcugagcaacagu

SEQ ID NO: 1234336 - RNA, 19 nt, Artificial Sequence
  Description of Artificial Sequence: Synthetic oligonucleotide
  Sense strand starting at position 2634 of SEQ ID NO: 917447
aucaguaaugggcauggua

SEQ ID NO: 1234337 - RNA, 19 nt, Artificial Sequence
  Description of Artificial Sequence: Synthetic oligonucleotide
  Antisense strand to SEQ ID NO: 1234336
uaccaugcccauuacugau

SEQ ID NO: 1234338 - RNA, 19 nt, Artificial Sequence
  Description of Artificial Sequence: Synthetic oligonucleotide
  Sense strand starting at position 2803 of SEQ ID NO: 917447
gugaucagagagugguaca

SEQ ID NO: 1234339 - RNA, 19 nt, Artificial Sequence
  Description of Artificial Sequence: Synthetic oligonucleotide
  Antisense strand to SEQ ID NO: 1234338
uguaccacucucugaucac

SEQ ID NO: 1234340 - RNA, 19 nt, Artificial Sequence
  Description of Artificial Sequence: Synthetic oligonucleotide
  Sense strand starting at position 3193 of SEQ ID NO: 917447
aagucauggcacugggaca

SEQ ID NO: 1234341 - RNA, 19 nt, Artificial Sequence
  Description of Artificial Sequence: Synthetic oligonucleotide
  Antisense strand to SEQ ID NO: 1234340
ugucccagugccaugacuu

SEQ ID NO: 1234342 - RNA, 19 nt, Artificial Sequence
  Description of Artificial Sequence: Synthetic oligonucleotide
  Sense strand starting at position 3258 of SEQ ID NO: 917447
agcagagagucagcacaua

SEQ ID NO: 1234343 - RNA, 19 nt, Artificial Sequence
  Description of Artificial Sequence: Synthetic oligonucleotide
  Antisense strand to SEQ ID NO: 1234342
uaugugcugacucucugcu

SEQ ID NO: 1234344 - RNA, 19 nt, Artificial Sequence
  Description of Artificial Sequence: Synthetic oligonucleotide
  Sense strand starting at position 3293 of SEQ ID NO: 917447
cccagaucuuuggugauau

SEQ ID NO: 1234345 - RNA, 19 nt, Artificial Sequence
  Description of Artificial Sequence: Synthetic oligonucleotide
  Antisense strand to SEQ ID NO: 1234344
auaucaccaaagaucuggg

SEQ ID NO: 1234346 - RNA, 19 nt, Artificial Sequence
  Description of Artificial Sequence: Synthetic oligonucleotide
  Sense strand starting at position 3295 of SEQ ID NO: 917447
cagaucuuuggugauaucu

SEQ ID NO: 1234347 - RNA, 19 nt, Artificial Sequence
  Description of Artificial Sequence: Synthetic oligonucleotide
  Antisense strand to SEQ ID NO: 1234346
agauaucaccaaagaucug

SEQ ID NO: 1234348 - RNA, 19 nt, Artificial Sequence
  Description of Artificial Sequence: Synthetic oligonucleotide
  Sense strand starting at position 3309 of SEQ ID NO: 917447
uaucucuuugguggagaua

SEQ ID NO: 1234349 - RNA, 19 nt, Artificial Sequence
  Description of Artificial Sequence: Synthetic oligonucleotide
  Antisense strand to SEQ ID NO: 1234348
uaucuccaccaaagagaua

SEQ ID NO: 1234350 - RNA, 19 nt, Artificial Sequence
  Description of Artificial Sequence: Synthetic oligonucleotide
  Sense strand starting at position 3409 of SEQ ID NO: 917447
uccauaagucccuaaggcu

SEQ ID NO: 1234351 - RNA, 19 nt, Artificial Sequence
  Description of Artificial Sequence: Synthetic oligonucleotide
  Antisense strand to SEQ ID NO: 1234350
agccuuagggacuuaugga

SEQ ID NO: 1234352 - RNA, 19 nt, Artificial Sequence
  Description of Artificial Sequence: Synthetic oligonucleotide
  Sense strand starting at position 3505 of SEQ ID NO: 917447
agaaauccauaagaacaga

SEQ ID NO: 1234353 - RNA, 19 nt, Artificial Sequence
  Description of Artificial Sequence: Synthetic oligonucleotide
  Antisense strand to SEQ ID NO: 1234352
ucuguucuuauggauuucu

SEQ ID NO: 1234354 - RNA, 19 nt, Artificial Sequence
  Description of Artificial Sequence: Synthetic oligonucleotide
  Sense strand starting at position 3607 of SEQ ID NO: 917447
ucuaucucccaagagugua

SEQ ID NO: 1234355 - RNA, 19 nt, Artificial Sequence
  Description of Artificial Sequence: Synthetic oligonucleotide
  Antisense strand to SEQ ID NO: 1234354
uacacucuugggagauaga

SEQ ID NO: 1234356 - RNA, 19 nt, Artificial Sequence
  Description of Artificial Sequence: Synthetic oligonucleotide
  Sense strand starting at position 3617 of SEQ ID NO: 917447
aagaguguacgaggaucaa

SEQ ID NO: 1234357 - RNA, 19 nt, Artificial Sequence
  Description of Artificial Sequence: Synthetic oligonucleotide
  Antisense strand to SEQ ID NO: 1234356
uugauccucguacacucuu

SEQ ID NO: 1234358 - RNA, 19 nt, Artificial Sequence
  Description of Artificial Sequence: Synthetic oligonucleotide
  Sense strand starting at position 3737 of SEQ ID NO: 917447
ugaugugaggauugagacu

SEQ ID NO: 1234359 - RNA, 19 nt, Artificial Sequence
  Description of Artificial Sequence: Synthetic oligonucleotide
  Antisense strand to SEQ ID NO: 1234358
agucucaauccucacauca

SEQ ID NO: 1234360 - RNA, 19 nt, Artificial Sequence
  Description of Artificial Sequence: Synthetic oligonucleotide
  Sense strand starting at position 3926 of SEQ ID NO: 917448
gcaauucuagaaugcauga

SEQ ID NO: 1234361 - RNA, 19 nt, Artificial Sequence
  Description of Artificial Sequence: Synthetic oligonucleotide
  Antisense strand to SEQ ID NO: 1234360
ucaugcauucuagaauugc

SEQ ID NO: 1234362 - RNA, 19 nt, Artificial Sequence
  Description of Artificial Sequence: Synthetic oligonucleotide
  Sense strand starting at position 27 of SEQ ID NO: 917448
guuugaauugcuuacuaca

SEQ ID NO: 1234363 - RNA, 19 nt, Artificial Sequence
  Description of Artificial Sequence: Synthetic oligonucleotide
  Antisense strand to SEQ ID NO: 1234362
uguaguaagcaauucaaac

SEQ ID NO: 1234364 - RNA, 19 nt, Artificial Sequence
  Description of Artificial Sequence: Synthetic oligonucleotide
  Sense strand starting at position 111 of SEQ ID NO: 917448
guguaauuccaccacucag

SEQ ID NO: 1234365 - RNA, 19 nt, Artificial Sequence
  Description of Artificial Sequence: Synthetic oligonucleotide
  Antisense strand to SEQ ID NO: 1234364
cugagugguggaauuacac

SEQ ID NO: 1234366 - RNA, 19 nt, Artificial Sequence
  Description of Artificial Sequence: Synthetic oligonucleotide
  Sense strand starting at position 127 of SEQ ID NO: 917448
caggguaagcccuauuaac

SEQ ID NO: 1234367 - RNA, 19 nt, Artificial Sequence
  Description of Artificial Sequence: Synthetic oligonucleotide
  Antisense strand to SEQ ID NO: 1234366
guuaauagggcuuacccug

SEQ ID NO: 1234368 - RNA, 19 nt, Artificial Sequence
  Description of Artificial Sequence: Synthetic oligonucleotide
  Sense strand starting at position 152 of SEQ ID NO: 917448
guacauacccuuuaagugu

SEQ ID NO: 1234369 - RNA, 19 nt, Artificial Sequence
  Description of Artificial Sequence: Synthetic oligonucleotide
  Antisense strand to SEQ ID NO: 1234368
acacuuaaaggguauguac

SEQ ID NO: 1234370 - RNA, 19 nt, Artificial Sequence
  Description of Artificial Sequence: Synthetic oligonucleotide
  Sense strand starting at position 187 of SEQ ID NO: 917448
acgacaucauugucaccaa

SEQ ID NO: 1234371 - RNA, 19 nt, Artificial Sequence
  Description of Artificial Sequence: Synthetic oligonucleotide
  Antisense strand to SEQ ID NO: 1234370
uuggugacaaugaugucgu

SEQ ID NO: 1234372 - RNA, 19 nt, Artificial Sequence
  Description of Artificial Sequence: Synthetic oligonucleotide
  Sense strand starting at position 230 of SEQ ID NO: 917448
cugugaucacaguaacaug

SEQ ID NO: 1234373 - RNA, 19 nt, Artificial Sequence
  Description of Artificial Sequence: Synthetic oligonucleotide
  Antisense strand to SEQ ID NO: 1234372
cauguuacugugaucacag

SEQ ID NO: 1234374 - RNA, 19 nt, Artificial Sequence
  Description of Artificial Sequence: Synthetic oligonucleotide
  Sense strand starting at position 374 of SEQ ID NO: 917448
gugaguuguuauuuauguc

SEQ ID NO: 1234375 - RNA, 19 nt, Artificial Sequence
  Description of Artificial Sequence: Synthetic oligonucleotide
  Antisense strand to SEQ ID NO: 1234374
gacauaaauaacaacucac

SEQ ID NO: 1234376 - RNA, 19 nt, Artificial Sequence
  Description of Artificial Sequence: Synthetic oligonucleotide
  Sense strand starting at position 474 of SEQ ID NO: 917448
caguuuccucaggagucaa

SEQ ID NO: 1234377 - RNA, 19 nt, Artificial Sequence
  Description of Artificial Sequence: Synthetic oligonucleotide
  Antisense strand to SEQ ID NO: 1234376
uugacuccugaggaaacug

SEQ ID NO: 1234378 - RNA, 19 nt, Artificial Sequence
  Description of Artificial Sequence: Synthetic oligonucleotide
  Sense strand starting at position 707 of SEQ ID NO: 917448
agguuccucuaucuugaaa

SEQ ID NO: 1234379 - RNA, 19 nt, Artificial Sequence
  Description of Artificial Sequence: Synthetic oligonucleotide
  Antisense strand to SEQ ID NO: 1234378
uuucaagauagaggaaccu

SEQ ID NO: 1234380 - RNA, 19 nt, Artificial Sequence
  Description of Artificial Sequence: Synthetic oligonucleotide
  Sense strand starting at position 778 of SEQ ID NO: 917448
ucagaaagcuugcucuuaa

SEQ ID NO: 1234381 - RNA, 19 nt, Artificial Sequence
  Description of Artificial Sequence: Synthetic oligonucleotide
  Antisense strand to SEQ ID NO: 1234380
uuaagagcaagcuuucuga

SEQ ID NO: 1234382 - RNA, 19 nt, Artificial Sequence
  Description of Artificial Sequence: Synthetic oligonucleotide
  Sense strand starting at position 801 of SEQ ID NO: 917448
agaugaaauuaaguuugca

SEQ ID NO: 1234383 - RNA, 19 nt, Artificial Sequence
  Description of Artificial Sequence: Synthetic oligonucleotide
  Antisense strand to SEQ ID NO: 1234382
ugcaaacuuaauuucaucu

SEQ ID NO: 1234384 - RNA, 19 nt, Artificial Sequence
  Description of Artificial Sequence: Synthetic oligonucleotide
  Sense strand starting at position 1342 of SEQ ID NO: 917448
cuacuaaauuguguuucua

SEQ ID NO: 1234385 - RNA, 19 nt, Artificial Sequence
  Description of Artificial Sequence: Synthetic oligonucleotide
  Antisense strand to SEQ ID NO: 1234384
uagaaacacaauuuaguag

SEQ ID NO: 1234386 - RNA, 19 nt, Artificial Sequence
  Description of Artificial Sequence: Synthetic oligonucleotide
  Sense strand starting at position 1409 of SEQ ID NO: 917448
aacgucaagggcuaagauu

SEQ ID NO: 1234387 - RNA, 19 nt, Artificial Sequence
  Description of Artificial Sequence: Synthetic oligonucleotide
  Antisense strand to SEQ ID NO: 1234386
aaucuuagcccuugacguu

SEQ ID NO: 1234388 - RNA, 19 nt, Artificial Sequence
  Description of Artificial Sequence: Synthetic oligonucleotide
  Sense strand starting at position 1466 of SEQ ID NO: 917448
gaguaauugaugugaugca

SEQ ID NO: 1234389 - RNA, 19 nt, Artificial Sequence
  Description of Artificial Sequence: Synthetic oligonucleotide
  Antisense strand to SEQ ID NO: 1234388
ugcaucacaucaauuacuc

SEQ ID NO: 1234390 - RNA, 19 nt, Artificial Sequence
  Description of Artificial Sequence: Synthetic oligonucleotide
  Sense strand starting at position 1579 of SEQ ID NO: 917448
gccuccucucccgagauaa

SEQ ID NO: 1234391 - RNA, 19 nt, Artificial Sequence
  Description of Artificial Sequence: Synthetic oligonucleotide
  Antisense strand to SEQ ID NO: 1234390
uuaucucgggagaggaggc

SEQ ID NO: 1234392 - RNA, 19 nt, Artificial Sequence
  Description of Artificial Sequence: Synthetic oligonucleotide
  Sense strand starting at position 1581 of SEQ ID NO: 917448
cuccucucccgagauaaau

SEQ ID NO: 1234393 - RNA, 19 nt, Artificial Sequence
  Description of Artificial Sequence: Synthetic oligonucleotide
  Antisense strand to SEQ ID NO: 1234392
auuuaucucgggagaggag

SEQ ID NO: 1234394 - RNA, 19 nt, Artificial Sequence
  Description of Artificial Sequence: Synthetic oligonucleotide
  Sense strand starting at position 1882 of SEQ ID NO: 917448
gugcuccuggcagauaauu

SEQ ID NO: 1234395 - RNA, 19 nt, Artificial Sequence
  Description of Artificial Sequence: Synthetic oligonucleotide
  Antisense strand to SEQ ID NO: 1234394
aauuaucugccaggagcac

SEQ ID NO: 1234396 - RNA, 19 nt, Artificial Sequence
  Description of Artificial Sequence: Synthetic oligonucleotide
  Sense strand starting at position 1884 of SEQ ID NO: 917448
gcuccuggcagauaauuga

SEQ ID NO: 1234397 - RNA, 19 nt, Artificial Sequence
  Description of Artificial Sequence: Synthetic oligonucleotide
  Antisense strand to SEQ ID NO: 1234396
ucaauuaucugccaggagc

SEQ ID NO: 1234398 - RNA, 19 nt, Artificial Sequence
  Description of Artificial Sequence: Synthetic oligonucleotide
  Sense strand starting at position 2335 of SEQ ID NO: 917448
gucuuuccaguuuaaaugu

SEQ ID NO: 1234399 - RNA, 19 nt, Artificial Sequence
  Description of Artificial Sequence: Synthetic oligonucleotide
  Antisense strand to SEQ ID NO: 1234398
acauuuaaacuggaaagac

SEQ ID NO: 1234400 - RNA, 19 nt, Artificial Sequence
  Description of Artificial Sequence: Synthetic oligonucleotide
  Sense strand starting at position 2741 of SEQ ID NO: 917448
gggcgugauuucgucucaa

SEQ ID NO: 1234401 - RNA, 19 nt, Artificial Sequence
  Description of Artificial Sequence: Synthetic oligonucleotide
  Antisense strand to SEQ ID NO: 1234400
uugagacgaaaucacgccc

SEQ ID NO: 1234402 - RNA, 19 nt, Artificial Sequence
  Description of Artificial Sequence: Synthetic oligonucleotide
  Sense strand starting at position 2862 of SEQ ID NO: 917448
ucgugacugcugcuaugua

SEQ ID NO: 1234403 - RNA, 19 nt, Artificial Sequence
  Description of Artificial Sequence: Synthetic oligonucleotide
  Antisense strand to SEQ ID NO: 1234402
uacauagcagcagucacga

SEQ ID NO: 1234404 - RNA, 19 nt, Artificial Sequence
  Description of Artificial Sequence: Synthetic oligonucleotide
  Sense strand starting at position 2917 of SEQ ID NO: 917448
agaccuauugggcgucaga

SEQ ID NO: 1234405 - RNA, 19 nt, Artificial Sequence
  Description of Artificial Sequence: Synthetic oligonucleotide
  Antisense strand to SEQ ID NO: 1234404
ucugacgcccaauaggucu

SEQ ID NO: 1234406 - RNA, 19 nt, Artificial Sequence
  Description of Artificial Sequence: Synthetic oligonucleotide
  Sense strand starting at position 2941 of SEQ ID NO: 917448
ggaggauccuuccucggau

SEQ ID NO: 1234407 - RNA, 19 nt, Artificial Sequence
  Description of Artificial Sequence: Synthetic oligonucleotide
  Antisense strand to SEQ ID NO: 1234406
auccgaggaaggauccucc

SEQ ID NO: 1234408 - RNA, 19 nt, Artificial Sequence
  Description of Artificial Sequence: Synthetic oligonucleotide
  Sense strand starting at position 2992 of SEQ ID NO: 917448
gcuguaaguguggugguua

SEQ ID NO: 1234409 - RNA, 19 nt, Artificial Sequence
  Description of Artificial Sequence: Synthetic oligonucleotide
  Antisense strand to SEQ ID NO: 1234408
uaaccaccacacuuacagc

SEQ ID NO: 1234410 - RNA, 19 nt, Artificial Sequence
  Description of Artificial Sequence: Synthetic oligonucleotide
  Sense strand starting at position 3004 of SEQ ID NO: 917448
gugguuauuguggaugacu

SEQ ID NO: 1234411 - RNA, 19 nt, Artificial Sequence
  Description of Artificial Sequence: Synthetic oligonucleotide
  Antisense strand to SEQ ID NO: 1234410
agucauccacaauaaccac

SEQ ID NO: 1234412 - RNA, 19 nt, Artificial Sequence
  Description of Artificial Sequence: Synthetic oligonucleotide
  Sense strand starting at position 3178 of SEQ ID NO: 917448
ugugauacucuacaguucu

SEQ ID NO: 1234413 - RNA, 19 nt, Artificial Sequence
  Description of Artificial Sequence: Synthetic oligonucleotide
  Antisense strand to SEQ ID NO: 1234412
agaacuguagaguaucaca

SEQ ID NO: 1234414 - RNA, 19 nt, Artificial Sequence
  Description of Artificial Sequence: Synthetic oligonucleotide
  Sense strand starting at position 3230 of SEQ ID NO: 917448
gggaucauucugcauuacu

SEQ ID NO: 1234415 - RNA, 19 nt, Artificial Sequence
  Description of Artificial Sequence: Synthetic oligonucleotide
  Antisense strand to SEQ ID NO: 1234414
aguaaugcagaaugauccc

SEQ ID NO: 1234416 - RNA, 19 nt, Artificial Sequence
  Description of Artificial Sequence: Synthetic oligonucleotide
  Sense strand starting at position 3264 of SEQ ID NO: 917448
gucuuaauagaguguaaua

SEQ ID NO: 1234417 - RNA, 19 nt, Artificial Sequence
  Description of Artificial Sequence: Synthetic oligonucleotide
  Antisense strand to SEQ ID NO: 1234416
uauuacacucuauuaagac

SEQ ID NO: 1234418 - RNA, 19 nt, Artificial Sequence
  Description of Artificial Sequence: Synthetic oligonucleotide
  Sense strand starting at position 3333 of SEQ ID NO: 917448
aucaauaucugugcgggaa

SEQ ID NO: 1234419 - RNA, 19 nt, Artificial Sequence
  Description of Artificial Sequence: Synthetic oligonucleotide
  Antisense strand to SEQ ID NO: 1234418
uucccgcacagauauugau

SEQ ID NO: 1234420 - RNA, 19 nt, Artificial Sequence
  Description of Artificial Sequence: Synthetic oligonucleotide
  Sense strand starting at position 3353 of SEQ ID NO: 917448
ugguuugcucaccaaugua

SEQ ID NO: 1234421 - RNA, 19 nt, Artificial Sequence
  Description of Artificial Sequence: Synthetic oligonucleotide
  Antisense strand to SEQ ID NO: 1234420
uacauuggugagcaaacca

SEQ ID NO: 1234422 - RNA, 19 nt, Artificial Sequence
  Description of Artificial Sequence: Synthetic oligonucleotide
  Sense strand starting at position 3356 of SEQ ID NO: 917448
uuugcucaccaauguaaga

SEQ ID NO: 1234423 - RNA, 19 nt, Artificial Sequence
  Description of Artificial Sequence: Synthetic oligonucleotide
  Antisense strand to SEQ ID NO: 1234422
ucuuacauuggugagcaaa

SEQ ID NO: 1234424 - RNA, 19 nt, Artificial Sequence
  Description of Artificial Sequence: Synthetic oligonucleotide
  Sense strand starting at position 3410 of SEQ ID NO: 917448
ugugaauugaggcagcuuu

SEQ ID NO: 1234425 - RNA, 19 nt, Artificial Sequence
  Description of Artificial Sequence: Synthetic oligonucleotide
  Antisense strand to SEQ ID NO: 1234424
aaagcugccucaauucaca

SEQ ID NO: 1234426 - RNA, 19 nt, Artificial Sequence
  Description of Artificial Sequence: Synthetic oligonucleotide
  Sense strand starting at position 3427 of SEQ ID NO: 917448
uugagcauuucguccugaa

SEQ ID NO: 1234427 - RNA, 19 nt, Artificial Sequence
  Description of Artificial Sequence: Synthetic oligonucleotide
  Antisense strand to SEQ ID NO: 1234426
uucaggacgaaaugcucaa

SEQ ID NO: 1234428 - RNA, 19 nt, Artificial Sequence
  Description of Artificial Sequence: Synthetic oligonucleotide
  Sense strand starting at position 3461 of SEQ ID NO: 917448
uuuccauugcuccagaggu

SEQ ID NO: 1234429 - RNA, 19 nt, Artificial Sequence
  Description of Artificial Sequence: Synthetic oligonucleotide
  Antisense strand to SEQ ID NO: 1234428
accucuggagcaauggaaa

SEQ ID NO: 1234430 - RNA, 19 nt, Artificial Sequence
  Description of Artificial Sequence: Synthetic oligonucleotide
  Sense strand starting at position 3469 of SEQ ID NO: 917448
gcuccagaggucuagacua

SEQ ID NO: 1234431 - RNA, 19 nt, Artificial Sequence
  Description of Artificial Sequence: Synthetic oligonucleotide
  Antisense strand to SEQ ID NO: 1234430
uagucuagaccucuggagc

SEQ ID NO: 1234432 - RNA, 19 nt, Artificial Sequence
  Description of Artificial Sequence: Synthetic oligonucleotide
  Sense strand starting at position 3587 of SEQ ID NO: 917448
ucaucacuacuguguugaa

SEQ ID NO: 1234433 - RNA, 19 nt, Artificial Sequence
  Description of Artificial Sequence: Synthetic oligonucleotide
  Antisense strand to SEQ ID NO: 1234432
uucaacacaguagugauga

SEQ ID NO: 1234434 - RNA, 19 nt, Artificial Sequence
  Description of Artificial Sequence: Synthetic oligonucleotide
  Sense strand starting at position 3634 of SEQ ID NO: 917448
cuguaucuagaauaugagu

SEQ ID NO: 1234435 - RNA, 19 nt, Artificial Sequence
  Description of Artificial Sequence: Synthetic oligonucleotide
  Antisense strand to SEQ ID NO: 1234434
acucauauucuagauacag

SEQ ID NO: 1234436 - RNA, 19 nt, Artificial Sequence
  Description of Artificial Sequence: Synthetic oligonucleotide
  Sense strand starting at position 3642 of SEQ ID NO: 917448
agaauaugaguccaagcuu

SEQ ID NO: 1234437 - RNA, 19 nt, Artificial Sequence
  Description of Artificial Sequence: Synthetic oligonucleotide
  Antisense strand to SEQ ID NO: 1234436
aagcuuggacucauauucu

SEQ ID NO: 1234438 - RNA, 19 nt, Artificial Sequence
  Description of Artificial Sequence: Synthetic oligonucleotide
  Sense strand starting at position 3650 of SEQ ID NO: 917448
aguccaagcuuccuaagaa

SEQ ID NO: 1234439 - RNA, 19 nt, Artificial Sequence
  Description of Artificial Sequence: Synthetic oligonucleotide
  Antisense strand to SEQ ID NO: 1234438
uucuuaggaagcuuggacu

SEQ ID NO: 1234440 - RNA, 19 nt, Artificial Sequence
  Description of Artificial Sequence: Synthetic oligonucleotide
  Sense strand starting at position 3907 of SEQ ID NO: 917448
cgaggauugccugagcuug

SEQ ID NO: 1234441 - RNA, 19 nt, Artificial Sequence
  Description of Artificial Sequence: Synthetic oligonucleotide
  Antisense strand to SEQ ID NO: 1234440
caagcucaggcaauccucg

SEQ ID NO: 1234442 - RNA, 19 nt, Artificial Sequence
  Description of Artificial Sequence: Synthetic oligonucleotide
  Sense strand starting at position 3907 of SEQ ID NO: 917449
cgaggauugccugagcuug

SEQ ID NO: 1234443 - RNA, 19 nt, Artificial Sequence
  Description of Artificial Sequence: Synthetic oligonucleotide
  Antisense strand to SEQ ID NO: 1234442
caagcucaggcaauccucg

SEQ ID NO: 1234444 - RNA, 19 nt, Artificial Sequence
  Description of Artificial Sequence: Synthetic oligonucleotide
  Sense strand starting at position 2020 of SEQ ID NO: 917449
aggaauucagacggaguga

SEQ ID NO: 1234445 - RNA, 19 nt, Artificial Sequence
  Description of Artificial Sequence: Synthetic oligonucleotide
  Antisense strand to SEQ ID NO: 1234444
ucacuccgucugaauuccu

SEQ ID NO: 1234446 - RNA, 19 nt, Artificial Sequence
  Description of Artificial Sequence: Synthetic oligonucleotide
  Sense strand starting at position 2144 of SEQ ID NO: 917449
gguggaaaguuucuccuga

SEQ ID NO: 1234447 - RNA, 19 nt, Artificial Sequence
  Description of Artificial Sequence: Synthetic oligonucleotide
  Antisense strand to SEQ ID NO: 1234446
ucaggagaaacuuuccacc

SEQ ID NO: 1234448 - RNA, 19 nt, Artificial Sequence
  Description of Artificial Sequence: Synthetic oligonucleotide
  Sense strand starting at position 2145 of SEQ ID NO: 917449
guggaaaguuucuccugau

SEQ ID NO: 1234449 - RNA, 19 nt, Artificial Sequence
  Description of Artificial Sequence: Synthetic oligonucleotide
  Antisense strand to SEQ ID NO: 1234448
aucaggagaaacuuuccac

SEQ ID NO: 1234450 - RNA, 19 nt, Artificial Sequence
  Description of Artificial Sequence: Synthetic oligonucleotide
  Sense strand starting at position 2146 of SEQ ID NO: 917449
uggaaaguuucuccugaug

SEQ ID NO: 1234451 - RNA, 19 nt, Artificial Sequence
  Description of Artificial Sequence: Synthetic oligonucleotide
  Antisense strand to SEQ ID NO: 1234450
caucaggagaaacuuucca

SEQ ID NO: 1234452 - RNA, 19 nt, Artificial Sequence
  Description of Artificial Sequence: Synthetic oligonucleotide
  Sense strand starting at position 2148 of SEQ ID NO: 917449
gaaaguuucuccugaugca

SEQ ID NO: 1234453 - RNA, 19 nt, Artificial Sequence
  Description of Artificial Sequence: Synthetic oligonucleotide
  Antisense strand to SEQ ID NO: 1234452
ugcaucaggagaaacuuuc

SEQ ID NO: 1234454 - RNA, 19 nt, Artificial Sequence
  Description of Artificial Sequence: Synthetic oligonucleotide
  Sense strand starting at position 2151 of SEQ ID NO: 917449
aguuucuccugaugcacaa

SEQ ID NO: 1234455 - RNA, 19 nt, Artificial Sequence
  Description of Artificial Sequence: Synthetic oligonucleotide
  Antisense strand to SEQ ID NO: 1234454
uugugcaucaggagaaacu

SEQ ID NO: 1234456 - RNA, 19 nt, Artificial Sequence
  Description of Artificial Sequence: Synthetic oligonucleotide
  Sense strand starting at position 2709 of SEQ ID NO: 917449
ccgggcugccauuaaauga

SEQ ID NO: 1234457 - RNA, 19 nt, Artificial Sequence
  Description of Artificial Sequence: Synthetic oligonucleotide
  Antisense strand to SEQ ID NO: 1234456
ucauuuaauggcagcccgg

SEQ ID NO: 1234458 - RNA, 19 nt, Artificial Sequence
  Description of Artificial Sequence: Synthetic oligonucleotide
  Sense strand starting at position 2981 of SEQ ID NO: 917449
ccgcgcguuccgaaugauu

SEQ ID NO: 1234459 - RNA, 19 nt, Artificial Sequence
  Description of Artificial Sequence: Synthetic oligonucleotide
  Antisense strand to SEQ ID NO: 1234458
aaucauucggaacgcgcgg

SEQ ID NO: 1234460 - RNA, 19 nt, Artificial Sequence
  Description of Artificial Sequence: Synthetic oligonucleotide
  Sense strand starting at position 2983 of SEQ ID NO: 917449
gcgcguuccgaaugauuaa

SEQ ID NO: 1234461 - RNA, 19 nt, Artificial Sequence
  Description of Artificial Sequence: Synthetic oligonucleotide
  Antisense strand to SEQ ID NO: 1234460
uuaaucauucggaacgcgc

SEQ ID NO: 1234462 - RNA, 19 nt, Artificial Sequence
  Description of Artificial Sequence: Synthetic oligonucleotide
  Sense strand starting at position 2984 of SEQ ID NO: 917449
cgcguuccgaaugauuaac

SEQ ID NO: 1234463 - RNA, 19 nt, Artificial Sequence
  Description of Artificial Sequence: Synthetic oligonucleotide
  Antisense strand to SEQ ID NO: 1234462
guuaaucauucggaacgcg

SEQ ID NO: 1234464 - RNA, 19 nt, Artificial Sequence
  Description of Artificial Sequence: Synthetic oligonucleotide
  Sense strand starting at position 2995 of SEQ ID NO: 917449
ugauuaacgauuggguuga

SEQ ID NO: 1234465 - RNA, 19 nt, Artificial Sequence
  Description of Artificial Sequence: Synthetic oligonucleotide
  Antisense strand to SEQ ID NO: 1234464
ucaacccaaucguuaauca

SEQ ID NO: 1234466 - RNA, 19 nt, Artificial Sequence
  Description of Artificial Sequence: Synthetic oligonucleotide
  Sense strand starting at position 2996 of SEQ ID NO: 917449
gauuaacgauuggguugaa

SEQ ID NO: 1234467 - RNA, 19 nt, Artificial Sequence
  Description of Artificial Sequence: Synthetic oligonucleotide
  Antisense strand to SEQ ID NO: 1234466
uucaacccaaucguuaauc

SEQ ID NO: 1234468 - RNA, 19 nt, Artificial Sequence
  Description of Artificial Sequence: Synthetic oligonucleotide
  Sense strand starting at position 2997 of SEQ ID NO: 917449
auuaacgauuggguugaaa

SEQ ID NO: 1234469 - RNA, 19 nt, Artificial Sequence
  Description of Artificial Sequence: Synthetic oligonucleotide
  Antisense strand to SEQ ID NO: 1234468
uuucaacccaaucguuaau

SEQ ID NO: 1234470 - RNA, 19 nt, Artificial Sequence
  Description of Artificial Sequence: Synthetic oligonucleotide
  Sense strand starting at position 3248 of SEQ ID NO: 917449
gcagguucucugcaaggau

SEQ ID NO: 1234471 - RNA, 19 nt, Artificial Sequence
  Description of Artificial Sequence: Synthetic oligonucleotide
  Antisense strand to SEQ ID NO: 1234470
auccuugcagagaaccugc

SEQ ID NO: 1234472 - RNA, 19 nt, Artificial Sequence
  Description of Artificial Sequence: Synthetic oligonucleotide
  Sense strand starting at position 3389 of SEQ ID NO: 917449
gggaguauuugugugggca

SEQ ID NO: 1234473 - RNA, 19 nt, Artificial Sequence
  Description of Artificial Sequence: Synthetic oligonucleotide
  Antisense strand to SEQ ID NO: 1234472
ugcccacacaaauacuccc

SEQ ID NO: 1234474 - RNA, 19 nt, Artificial Sequence
  Description of Artificial Sequence: Synthetic oligonucleotide
  Sense strand starting at position 3390 of SEQ ID NO: 917449
ggaguauuugugugggcau

SEQ ID NO: 1234475 - RNA, 19 nt, Artificial Sequence
  Description of Artificial Sequence: Synthetic oligonucleotide
  Antisense strand to SEQ ID NO: 1234474
augcccacacaaauacucc

SEQ ID NO: 1234476 - RNA, 19 nt, Artificial Sequence
  Description of Artificial Sequence: Synthetic oligonucleotide
  Sense strand starting at position 3391 of SEQ ID NO: 917449
gaguauuugugugggcaug

SEQ ID NO: 1234477 - RNA, 19 nt, Artificial Sequence
  Description of Artificial Sequence: Synthetic oligonucleotide
  Antisense strand to SEQ ID NO: 1234476
caugcccacacaaauacuc

SEQ ID NO: 1234478 - RNA, 19 nt, Artificial Sequence
  Description of Artificial Sequence: Synthetic oligonucleotide
  Sense strand starting at position 3409 of SEQ ID NO: 917449
ggcuccauagcuucguuua

SEQ ID NO: 1234479 - RNA, 19 nt, Artificial Sequence
  Description of Artificial Sequence: Synthetic oligonucleotide
  Antisense strand to SEQ ID NO: 1234478
uaaacgaagcuauggagcc

SEQ ID NO: 1234480 - RNA, 19 nt, Artificial Sequence
  Description of Artificial Sequence: Synthetic oligonucleotide
  Sense strand starting at position 3411 of SEQ ID NO: 917449
cuccauagcuucguuuagu

SEQ ID NO: 1234481 - RNA, 19 nt, Artificial Sequence
  Description of Artificial Sequence: Synthetic oligonucleotide
  Antisense strand to SEQ ID NO: 1234480
acuaaacgaagcuauggag

SEQ ID NO: 1234482 - RNA, 19 nt, Artificial Sequence
  Description of Artificial Sequence: Synthetic oligonucleotide
  Sense strand starting at position 3412 of SEQ ID NO: 917449
uccauagcuucguuuagua

SEQ ID NO: 1234483 - RNA, 19 nt, Artificial Sequence
  Description of Artificial Sequence: Synthetic oligonucleotide
  Antisense strand to SEQ ID NO: 1234482
uacuaaacgaagcuaugga

SEQ ID NO: 1234484 - RNA, 19 nt, Artificial Sequence
  Description of Artificial Sequence: Synthetic oligonucleotide
  Sense strand starting at position 3422 of SEQ ID NO: 917449
cguuuaguaucagcccuaa

SEQ ID NO: 1234485 - RNA, 19 nt, Artificial Sequence
  Description of Artificial Sequence: Synthetic oligonucleotide
  Antisense strand to SEQ ID NO: 1234484
uuagggcugauacuaaacg

SEQ ID NO: 1234486 - RNA, 19 nt, Artificial Sequence
  Description of Artificial Sequence: Synthetic oligonucleotide
  Sense strand starting at position 3451 of SEQ ID NO: 917449
ggaggagucuuucaaugag

SEQ ID NO: 1234487 - RNA, 19 nt, Artificial Sequence
  Description of Artificial Sequence: Synthetic oligonucleotide
  Antisense strand to SEQ ID NO: 1234486
cucauugaaagacuccucc

SEQ ID NO: 1234488 - RNA, 19 nt, Artificial Sequence
  Description of Artificial Sequence: Synthetic oligonucleotide
  Sense strand starting at position 3503 of SEQ ID NO: 917449
ggaucuucuuccucuggaa

SEQ ID NO: 1234489 - RNA, 19 nt, Artificial Sequence
  Description of Artificial Sequence: Synthetic oligonucleotide
  Antisense strand to SEQ ID NO: 1234488
uuccagaggaagaagaucc

SEQ ID NO: 1234490 - RNA, 19 nt, Artificial Sequence
  Description of Artificial Sequence: Synthetic oligonucleotide
  Sense strand starting at position 3559 of SEQ ID NO: 917449
ucuggaaucuaguuccuga

SEQ ID NO: 1234491 - RNA, 19 nt, Artificial Sequence
  Description of Artificial Sequence: Synthetic oligonucleotide
  Antisense strand to SEQ ID NO: 1234490
ucaggaacuagauuccaga

SEQ ID NO: 1234492 - RNA, 19 nt, Artificial Sequence
  Description of Artificial Sequence: Synthetic oligonucleotide
  Sense strand starting at position 3562 of SEQ ID NO: 917449
ggaaucuaguuccugaaca

SEQ ID NO: 1234493 - RNA, 19 nt, Artificial Sequence
  Description of Artificial Sequence: Synthetic oligonucleotide
  Antisense strand to SEQ ID NO: 1234492
uguucaggaacuagauucc

SEQ ID NO: 1234494 - RNA, 19 nt, Artificial Sequence
  Description of Artificial Sequence: Synthetic oligonucleotide
  Sense strand starting at position 3636 of SEQ ID NO: 917449
gagugaauuucccacgagc

SEQ ID NO: 1234495 - RNA, 19 nt, Artificial Sequence
  Description of Artificial Sequence: Synthetic oligonucleotide
  Antisense strand to SEQ ID NO: 1234494
gcucgugggaaauucacuc

SEQ ID NO: 1234496 - RNA, 19 nt, Artificial Sequence
  Description of Artificial Sequence: Synthetic oligonucleotide
  Sense strand starting at position 3638 of SEQ ID NO: 917449
gugaauuucccacgagcug

SEQ ID NO: 1234497 - RNA, 19 nt, Artificial Sequence
  Description of Artificial Sequence: Synthetic oligonucleotide
  Antisense strand to SEQ ID NO: 1234496
cagcucgugggaaauucac

SEQ ID NO: 1234498 - RNA, 19 nt, Artificial Sequence
  Description of Artificial Sequence: Synthetic oligonucleotide
  Sense strand starting at position 3649 of SEQ ID NO: 917449
acgagcugguugccuaaga

SEQ ID NO: 1234499 - RNA, 19 nt, Artificial Sequence
  Description of Artificial Sequence: Synthetic oligonucleotide
  Antisense strand to SEQ ID NO: 1234498
ucuuaggcaaccagcucgu

SEQ ID NO: 1234500 - RNA, 19 nt, Artificial Sequence
  Description of Artificial Sequence: Synthetic oligonucleotide
  Sense strand starting at position 3650 of SEQ ID NO: 917449
cgagcugguugccuaagaa

SEQ ID NO: 1234501 - RNA, 19 nt, Artificial Sequence
  Description of Artificial Sequence: Synthetic oligonucleotide
  Antisense strand to SEQ ID NO: 1234500
uucuuaggcaaccagcucg

SEQ ID NO: 1234502 - RNA, 19 nt, Artificial Sequence
  Description of Artificial Sequence: Synthetic oligonucleotide
  Sense strand starting at position 3743 of SEQ ID NO: 917449
gccggucugcgucaugcaa

SEQ ID NO: 1234503 - RNA, 19 nt, Artificial Sequence
  Description of Artificial Sequence: Synthetic oligonucleotide
  Antisense strand to SEQ ID NO: 1234502
uugcaugacgcagaccggc

SEQ ID NO: 1234504 - RNA, 19 nt, Artificial Sequence
  Description of Artificial Sequence: Synthetic oligonucleotide
  Sense strand starting at position 3770 of SEQ ID NO: 917449
ccuggcucguggaaagagu

SEQ ID NO: 1234505 - RNA, 19 nt, Artificial Sequence
  Description of Artificial Sequence: Synthetic oligonucleotide
  Antisense strand to SEQ ID NO: 1234504
acucuuuccacgagccagg

SEQ ID NO: 1234506 - RNA, 19 nt, Artificial Sequence
  Description of Artificial Sequence: Synthetic oligonucleotide
  Sense strand starting at position 3819 of SEQ ID NO: 917449
accucaaaguggcuuugau

SEQ ID NO: 1234507 - RNA, 19 nt, Artificial Sequence
  Description of Artificial Sequence: Synthetic oligonucleotide
  Antisense strand to SEQ ID NO: 1234506
aucaaagccacuuugaggu

SEQ ID NO: 1234508 - RNA, 19 nt, Artificial Sequence
  Description of Artificial Sequence: Synthetic oligonucleotide
  Sense strand starting at position 3829 of SEQ ID NO: 917449
ggcuuugauuugggaacgu

SEQ ID NO: 1234509 - RNA, 19 nt, Artificial Sequence
  Description of Artificial Sequence: Synthetic oligonucleotide
  Antisense strand to SEQ ID NO: 1234508
acguucccaaaucaaagcc

SEQ ID NO: 1234510 - RNA, 19 nt, Artificial Sequence
  Description of Artificial Sequence: Synthetic oligonucleotide
  Sense strand starting at position 3864 of SEQ ID NO: 917449
cgcagucucaaguagcaua

SEQ ID NO: 1234511 - RNA, 19 nt, Artificial Sequence
  Description of Artificial Sequence: Synthetic oligonucleotide
  Antisense strand to SEQ ID NO: 1234510
uaugcuacuugagacugcg

SEQ ID NO: 1234512 - RNA, 19 nt, Artificial Sequence
  Description of Artificial Sequence: Synthetic oligonucleotide
  Sense strand starting at position 3875 of SEQ ID NO: 917449
guagcauagcgcucacacu

SEQ ID NO: 1234513 - RNA, 19 nt, Artificial Sequence
  Description of Artificial Sequence: Synthetic oligonucleotide
  Antisense strand to SEQ ID NO: 1234512
agugugagcgcuaugcuac

SEQ ID NO: 1234514 - RNA, 19 nt, Artificial Sequence
  Description of Artificial Sequence: Synthetic oligonucleotide
  Sense strand starting at position 3895 of SEQ ID NO: 917449
ccguuuccaccagacugau

SEQ ID NO: 1234515 - RNA, 19 nt, Artificial Sequence
  Description of Artificial Sequence: Synthetic oligonucleotide
  Antisense strand to SEQ ID NO: 1234514
aucagucugguggaaacgg

SEQ ID NO: 1234516 - RNA, 19 nt, Artificial Sequence
  Description of Artificial Sequence: Synthetic oligonucleotide
  Sense strand starting at position 3910 of SEQ ID NO: 917449
ugaucugaaagugguccaa

SEQ ID NO: 1234517 - RNA, 19 nt, Artificial Sequence
  Description of Artificial Sequence: Synthetic oligonucleotide
  Antisense strand to SEQ ID NO: 1234516
uuggaccacuuucagauca

SEQ ID NO: 1234518 - RNA, 19 nt, Artificial Sequence
  Description of Artificial Sequence: Synthetic oligonucleotide
  Sense strand starting at position 3912 of SEQ ID NO: 917449
aucugaaagugguccaaag

SEQ ID NO: 1234519 - RNA, 19 nt, Artificial Sequence
  Description of Artificial Sequence: Synthetic oligonucleotide
  Antisense strand to SEQ ID NO: 1234518
cuuuggaccacuuucagau

SEQ ID NO: 1234520 - RNA, 19 nt, Artificial Sequence
  Description of Artificial Sequence: Synthetic oligonucleotide
  Sense strand starting at position 3978 of SEQ ID NO: 917449
cugagaugagagugcuugu

SEQ ID NO: 1234521 - RNA, 19 nt, Artificial Sequence
  Description of Artificial Sequence: Synthetic oligonucleotide
  Antisense strand to SEQ ID NO: 1234520
acaagcacucucaucucag

SEQ ID NO: 1234522 - RNA, 19 nt, Artificial Sequence
  Description of Artificial Sequence: Synthetic oligonucleotide
  Sense strand starting at position 3981 of SEQ ID NO: 917450
agaugagagugcuugugga

SEQ ID NO: 1234523 - RNA, 19 nt, Artificial Sequence
  Description of Artificial Sequence: Synthetic oligonucleotide
  Antisense strand to SEQ ID NO: 1234522
uccacaagcacucucaucu

SEQ ID NO: 1234524 - RNA, 19 nt, Artificial Sequence
  Description of Artificial Sequence: Synthetic oligonucleotide
  Sense strand starting at position 10 of SEQ ID NO: 917450
aauugcgauucugaaauag

SEQ ID NO: 1234525 - RNA, 19 nt, Artificial Sequence
  Description of Artificial Sequence: Synthetic oligonucleotide
  Antisense strand to SEQ ID NO: 1234524
cuauuucagaaucgcaauu

SEQ ID NO: 1234526 - RNA, 19 nt, Artificial Sequence
  Description of Artificial Sequence: Synthetic oligonucleotide
  Sense strand starting at position 14 of SEQ ID NO: 917450
gcgauucugaaauaguuuc

SEQ ID NO: 1234527 - RNA, 19 nt, Artificial Sequence
  Description of Artificial Sequence: Synthetic oligonucleotide
  Antisense strand to SEQ ID NO: 1234526
gaaacuauuucagaaucgc

SEQ ID NO: 1234528 - RNA, 19 nt, Artificial Sequence
  Description of Artificial Sequence: Synthetic oligonucleotide
  Sense strand starting at position 77 of SEQ ID NO: 917450
gagucuaaagucgacucaa

SEQ ID NO: 1234529 - RNA, 19 nt, Artificial Sequence
  Description of Artificial Sequence: Synthetic oligonucleotide
  Antisense strand to SEQ ID NO: 1234528
uugagucgacuuuagacuc

SEQ ID NO: 1234530 - RNA, 19 nt, Artificial Sequence
  Description of Artificial Sequence: Synthetic oligonucleotide
  Sense strand starting at position 217 of SEQ ID NO: 917450
uuuguaaacugugucagaa

SEQ ID NO: 1234531 - RNA, 19 nt, Artificial Sequence
  Description of Artificial Sequence: Synthetic oligonucleotide
  Antisense strand to SEQ ID NO: 1234530
uucugacacaguuuacaaa

SEQ ID NO: 1234532 - RNA, 19 nt, Artificial Sequence
  Description of Artificial Sequence: Synthetic oligonucleotide
  Sense strand starting at position 219 of SEQ ID NO: 917450
uguaaacugugucagaaau

SEQ ID NO: 1234533 - RNA, 19 nt, Artificial Sequence
  Description of Artificial Sequence: Synthetic oligonucleotide
  Antisense strand to SEQ ID NO: 1234532
auuucugacacaguuuaca

SEQ ID NO: 1234534 - RNA, 19 nt, Artificial Sequence
  Description of Artificial Sequence: Synthetic oligonucleotide
  Sense strand starting at position 253 of SEQ ID NO: 917450
cagggagacuucuaguagu

SEQ ID NO: 1234535 - RNA, 19 nt, Artificial Sequence
  Description of Artificial Sequence: Synthetic oligonucleotide
  Antisense strand to SEQ ID NO: 1234534
acuacuagaagucucccug

SEQ ID NO: 1234536 - RNA, 19 nt, Artificial Sequence
  Description of Artificial Sequence: Synthetic oligonucleotide
  Sense strand starting at position 256 of SEQ ID NO: 917450
ggagacuucuaguaguuug

SEQ ID NO: 1234537 - RNA, 19 nt, Artificial Sequence
  Description of Artificial Sequence: Synthetic oligonucleotide
  Antisense strand to SEQ ID NO: 1234536
caaacuacuagaagucucc

SEQ ID NO: 1234538 - RNA, 19 nt, Artificial Sequence
  Description of Artificial Sequence: Synthetic oligonucleotide
  Sense strand starting at position 325 of SEQ ID NO: 917450
aaauauuucuuguuugcgu

SEQ ID NO: 1234539 - RNA, 19 nt, Artificial Sequence
  Description of Artificial Sequence: Synthetic oligonucleotide
  Antisense strand to SEQ ID NO: 1234538
acgcaaacaagaaauauuu

SEQ ID NO: 1234540 - RNA, 19 nt, Artificial Sequence
  Description of Artificial Sequence: Synthetic oligonucleotide
  Sense strand starting at position 340 of SEQ ID NO: 917450
gcguuucuugcccuugaga

SEQ ID NO: 1234541 - RNA, 19 nt, Artificial Sequence
  Description of Artificial Sequence: Synthetic oligonucleotide
  Antisense strand to SEQ ID NO: 1234540
ucucaagggcaagaaacgc

SEQ ID NO: 1234542 - RNA, 19 nt, Artificial Sequence
  Description of Artificial Sequence: Synthetic oligonucleotide
  Sense strand starting at position 342 of SEQ ID NO: 917450
guuucuugcccuugagaaa

SEQ ID NO: 1234543 - RNA, 19 nt, Artificial Sequence
  Description of Artificial Sequence: Synthetic oligonucleotide
  Antisense strand to SEQ ID NO: 1234542
uuucucaagggcaagaaac

SEQ ID NO: 1234544 - RNA, 19 nt, Artificial Sequence
  Description of Artificial Sequence: Synthetic oligonucleotide
  Sense strand starting at position 343 of SEQ ID NO: 917450
uuucuugcccuugagaaag

SEQ ID NO: 1234545 - RNA, 19 nt, Artificial Sequence
  Description of Artificial Sequence: Synthetic oligonucleotide
  Antisense strand to SEQ ID NO: 1234544
cuuucucaagggcaagaaa

SEQ ID NO: 1234546 - RNA, 19 nt, Artificial Sequence
  Description of Artificial Sequence: Synthetic oligonucleotide
  Sense strand starting at position 375 of SEQ ID NO: 917450
auuugcaaauggcgugaua

SEQ ID NO: 1234547 - RNA, 19 nt, Artificial Sequence
  Description of Artificial Sequence: Synthetic oligonucleotide
  Antisense strand to SEQ ID NO: 1234546
uaucacgccauuugcaaau

SEQ ID NO: 1234548 - RNA, 19 nt, Artificial Sequence
  Description of Artificial Sequence: Synthetic oligonucleotide
  Sense strand starting at position 377 of SEQ ID NO: 917450
uugcaaauggcgugauaaa

SEQ ID NO: 1234549 - RNA, 19 nt, Artificial Sequence
  Description of Artificial Sequence: Synthetic oligonucleotide
  Antisense strand to SEQ ID NO: 1234548
uuuaucacgccauuugcaa

SEQ ID NO: 1234550 - RNA, 19 nt, Artificial Sequence
  Description of Artificial Sequence: Synthetic oligonucleotide
  Sense strand starting at position 378 of SEQ ID NO: 917450
ugcaaauggcgugauaaac

SEQ ID NO: 1234551 - RNA, 19 nt, Artificial Sequence
  Description of Artificial Sequence: Synthetic oligonucleotide
  Antisense strand to SEQ ID NO: 1234550
guuuaucacgccauuugca

SEQ ID NO: 1234552 - RNA, 19 nt, Artificial Sequence
  Description of Artificial Sequence: Synthetic oligonucleotide
  Sense strand starting at position 405 of SEQ ID NO: 917450
ccgugaucaucucacacaa

SEQ ID NO: 1234553 - RNA, 19 nt, Artificial Sequence
  Description of Artificial Sequence: Synthetic oligonucleotide
  Antisense strand to SEQ ID NO: 1234552
uugugugagaugaucacgg

SEQ ID NO: 1234554 - RNA, 19 nt, Artificial Sequence
  Description of Artificial Sequence: Synthetic oligonucleotide
  Sense strand starting at position 438 of SEQ ID NO: 917450
gccggucacuggucaagaa

SEQ ID NO: 1234555 - RNA, 19 nt, Artificial Sequence
  Description of Artificial Sequence: Synthetic oligonucleotide
  Antisense strand to SEQ ID NO: 1234554
uucuugaccagugaccggc

SEQ ID NO: 1234556 - RNA, 19 nt, Artificial Sequence
  Description of Artificial Sequence: Synthetic oligonucleotide
  Sense strand starting at position 439 of SEQ ID NO: 917450
ccggucacuggucaagaau

SEQ ID NO: 1234557 - RNA, 19 nt, Artificial Sequence
  Description of Artificial Sequence: Synthetic oligonucleotide
  Antisense strand to SEQ ID NO: 1234556
auucuugaccagugaccgg

SEQ ID NO: 1234558 - RNA, 19 nt, Artificial Sequence
  Description of Artificial Sequence: Synthetic oligonucleotide
  Sense strand starting at position 455 of SEQ ID NO: 917450
aauggaucugguugggagu

SEQ ID NO: 1234559 - RNA, 19 nt, Artificial Sequence
  Description of Artificial Sequence: Synthetic oligonucleotide
  Antisense strand to SEQ ID NO: 1234558
acucccaaccagauccauu

SEQ ID NO: 1234560 - RNA, 19 nt, Artificial Sequence
  Description of Artificial Sequence: Synthetic oligonucleotide
  Sense strand starting at position 468 of SEQ ID NO: 917450
gggaguucugcuugagaga

SEQ ID NO: 1234561 - RNA, 19 nt, Artificial Sequence
  Description of Artificial Sequence: Synthetic oligonucleotide
  Antisense strand to SEQ ID NO: 1234560
ucucucaagcagaacuccc

SEQ ID NO: 1234562 - RNA, 19 nt, Artificial Sequence
  Description of Artificial Sequence: Synthetic oligonucleotide
  Sense strand starting at position 469 of SEQ ID NO: 917450
ggaguucugcuugagagaa

SEQ ID NO: 1234563 - RNA, 19 nt, Artificial Sequence
  Description of Artificial Sequence: Synthetic oligonucleotide
  Antisense strand to SEQ ID NO: 1234562
uucucucaagcagaacucc

SEQ ID NO: 1234564 - RNA, 19 nt, Artificial Sequence
  Description of Artificial Sequence: Synthetic oligonucleotide
  Sense strand starting at position 471 of SEQ ID NO: 917450
aguucugcuugagagaaca

SEQ ID NO: 1234565 - RNA, 19 nt, Artificial Sequence
  Description of Artificial Sequence: Synthetic oligonucleotide
  Antisense strand to SEQ ID NO: 1234564
uguucucucaagcagaacu

SEQ ID NO: 1234566 - RNA, 19 nt, Artificial Sequence
  Description of Artificial Sequence: Synthetic oligonucleotide
  Sense strand starting at position 834 of SEQ ID NO: 917450
uuucgaguuggcugccgaa

SEQ ID NO: 1234567 - RNA, 19 nt, Artificial Sequence
  Description of Artificial Sequence: Synthetic oligonucleotide
  Antisense strand to SEQ ID NO: 1234566
uucggcagccaacucgaaa

SEQ ID NO: 1234568 - RNA, 19 nt, Artificial Sequence
  Description of Artificial Sequence: Synthetic oligonucleotide
  Sense strand starting at position 1020 of SEQ ID NO: 917450
agcgcucguaccuauacau

SEQ ID NO: 1234569 - RNA, 19 nt, Artificial Sequence
  Description of Artificial Sequence: Synthetic oligonucleotide
  Antisense strand to SEQ ID NO: 1234568
auguauagguacgagcgcu

SEQ ID NO: 1234570 - RNA, 19 nt, Artificial Sequence
  Description of Artificial Sequence: Synthetic oligonucleotide
  Sense strand starting at position 1194 of SEQ ID NO: 917450
ugcaguugcacgggaucau

SEQ ID NO: 1234571 - RNA, 19 nt, Artificial Sequence
  Description of Artificial Sequence: Synthetic oligonucleotide
  Antisense strand to SEQ ID NO: 1234570
augaucccgugcaacugca

SEQ ID NO: 1234572 - RNA, 19 nt, Artificial Sequence
  Description of Artificial Sequence: Synthetic oligonucleotide
  Sense strand starting at position 1363 of SEQ ID NO: 917450
cgacgagaucucugccauu

SEQ ID NO: 1234573 - RNA, 19 nt, Artificial Sequence
  Description of Artificial Sequence: Synthetic oligonucleotide
  Antisense strand to SEQ ID NO: 1234572
aauggcagagaucucgucg

SEQ ID NO: 1234574 - RNA, 19 nt, Artificial Sequence
  Description of Artificial Sequence: Synthetic oligonucleotide
  Sense strand starting at position 1635 of SEQ ID NO: 917450
aggcgaacuuguccuucuu

SEQ ID NO: 1234575 - RNA, 19 nt, Artificial Sequence
  Description of Artificial Sequence: Synthetic oligonucleotide
  Antisense strand to SEQ ID NO: 1234574
aagaaggacaaguucgccu

SEQ ID NO: 1234576 - RNA, 19 nt, Artificial Sequence
  Description of Artificial Sequence: Synthetic oligonucleotide
  Sense strand starting at position 1637 of SEQ ID NO: 917450
gcgaacuuguccuucuuga

SEQ ID NO: 1234577 - RNA, 19 nt, Artificial Sequence
  Description of Artificial Sequence: Synthetic oligonucleotide
  Antisense strand to SEQ ID NO: 1234576
ucaagaaggacaaguucgc

SEQ ID NO: 1234578 - RNA, 19 nt, Artificial Sequence
  Description of Artificial Sequence: Synthetic oligonucleotide
  Sense strand starting at position 1800 of SEQ ID NO: 917450
ugaucuccgaguugugcau

SEQ ID NO: 1234579 - RNA, 19 nt, Artificial Sequence
  Description of Artificial Sequence: Synthetic oligonucleotide
  Antisense strand to SEQ ID NO: 1234578
augcacaacucggagauca

SEQ ID NO: 1234580 - RNA, 19 nt, Artificial Sequence
  Description of Artificial Sequence: Synthetic oligonucleotide
  Sense strand starting at position 2128 of SEQ ID NO: 917450
gcagguugucucugggaca

SEQ ID NO: 1234581 - RNA, 19 nt, Artificial Sequence
  Description of Artificial Sequence: Synthetic oligonucleotide
  Antisense strand to SEQ ID NO: 1234580
ugucccagagacaaccugc

SEQ ID NO: 1234582 - RNA, 19 nt, Artificial Sequence
  Description of Artificial Sequence: Synthetic oligonucleotide
  Sense strand starting at position 2181 of SEQ ID NO: 917450
ggcaguuugcccuuuacgu

SEQ ID NO: 1234583 - RNA, 19 nt, Artificial Sequence
  Description of Artificial Sequence: Synthetic oligonucleotide
  Antisense strand to SEQ ID NO: 1234582
acguaaagggcaaacugcc

SEQ ID NO: 1234584 - RNA, 19 nt, Artificial Sequence
  Description of Artificial Sequence: Synthetic oligonucleotide
  Sense strand starting at position 2182 of SEQ ID NO: 917450
gcaguuugcccuuuacguu

SEQ ID NO: 1234585 - RNA, 19 nt, Artificial Sequence
  Description of Artificial Sequence: Synthetic oligonucleotide
  Antisense strand to SEQ ID NO: 1234584
aacguaaagggcaaacugc

SEQ ID NO: 1234586 - RNA, 19 nt, Artificial Sequence
  Description of Artificial Sequence: Synthetic oligonucleotide
  Sense strand starting at position 2280 of SEQ ID NO: 917450
cucggucguucucucuuaa

SEQ ID NO: 1234587 - RNA, 19 nt, Artificial Sequence
  Description of Artificial Sequence: Synthetic oligonucleotide
  Antisense strand to SEQ ID NO: 1234586
uuaagagagaacgaccgag

SEQ ID NO: 1234588 - RNA, 19 nt, Artificial Sequence
  Description of Artificial Sequence: Synthetic oligonucleotide
  Sense strand starting at position 2325 of SEQ ID NO: 917450
cgcggagacuccucgaagu

SEQ ID NO: 1234589 - RNA, 19 nt, Artificial Sequence
  Description of Artificial Sequence: Synthetic oligonucleotide
  Antisense strand to SEQ ID NO: 1234588
acuucgaggagucuccgcg

SEQ ID NO: 1234590 - RNA, 19 nt, Artificial Sequence
  Description of Artificial Sequence: Synthetic oligonucleotide
  Sense strand starting at position 2327 of SEQ ID NO: 917450
cggagacuccucgaaguug

SEQ ID NO: 1234591 - RNA, 19 nt, Artificial Sequence
  Description of Artificial Sequence: Synthetic oligonucleotide
  Antisense strand to SEQ ID NO: 1234590
caacuucgaggagucuccg

SEQ ID NO: 1234592 - RNA, 19 nt, Artificial Sequence
  Description of Artificial Sequence: Synthetic oligonucleotide
  Sense strand starting at position 2411 of SEQ ID NO: 917450
ggguucuccucggugacuu

SEQ ID NO: 1234593 - RNA, 19 nt, Artificial Sequence
  Description of Artificial Sequence: Synthetic oligonucleotide
  Antisense strand to SEQ ID NO: 1234592
aagucaccgaggagaaccc

SEQ ID NO: 1234594 - RNA, 19 nt, Artificial Sequence
  Description of Artificial Sequence: Synthetic oligonucleotide
  Sense strand starting at position 2412 of SEQ ID NO: 917450
gguucuccucggugacuuu

SEQ ID NO: 1234595 - RNA, 19 nt, Artificial Sequence
  Description of Artificial Sequence: Synthetic oligonucleotide
  Antisense strand to SEQ ID NO: 1234594
aaagucaccgaggagaacc

SEQ ID NO: 1234596 - RNA, 19 nt, Artificial Sequence
  Description of Artificial Sequence: Synthetic oligonucleotide
  Sense strand starting at position 2419 of SEQ ID NO: 917450
cucggugacuuucucauuu

SEQ ID NO: 1234597 - RNA, 19 nt, Artificial Sequence
  Description of Artificial Sequence: Synthetic oligonucleotide
  Antisense strand to SEQ ID NO: 1234596
aaaugagaaagucaccgag

SEQ ID NO: 1234598 - RNA, 19 nt, Artificial Sequence
  Description of Artificial Sequence: Synthetic oligonucleotide
  Sense strand starting at position 2421 of SEQ ID NO: 917450
cggugacuuucucauuuga

SEQ ID NO: 1234599 - RNA, 19 nt, Artificial Sequence
  Description of Artificial Sequence: Synthetic oligonucleotide
  Antisense strand to SEQ ID NO: 1234598
ucaaaugagaaagucaccg

SEQ ID NO: 1234600 - RNA, 19 nt, Artificial Sequence
  Description of Artificial Sequence: Synthetic oligonucleotide
  Sense strand starting at position 2536 of SEQ ID NO: 917450
gagcgcagcaauggauaua

SEQ ID NO: 1234601 - RNA, 19 nt, Artificial Sequence
  Description of Artificial Sequence: Synthetic oligonucleotide
  Antisense strand to SEQ ID NO: 1234600
uauauccauugcugcgcuc

SEQ ID NO: 1234602 - RNA, 19 nt, Artificial Sequence
  Description of Artificial Sequence: Synthetic oligonucleotide
  Sense strand starting at position 2539 of SEQ ID NO: 917451
cgcagcaauggauauaaau

SEQ ID NO: 1234603 - RNA, 19 nt, Artificial Sequence
  Description of Artificial Sequence: Synthetic oligonucleotide
  Antisense strand to SEQ ID NO: 1234602
auuuauauccauugcugcg

SEQ ID NO: 1234604 - RNA, 19 nt, Artificial Sequence
  Description of Artificial Sequence: Synthetic oligonucleotide
  Sense strand starting at position 10 of SEQ ID NO: 917451
acacccuugugaguuauaa

SEQ ID NO: 1234605 - RNA, 19 nt, Artificial Sequence
  Description of Artificial Sequence: Synthetic oligonucleotide
  Antisense strand to SEQ ID NO: 1234604
uuauaacucacaagggugu

SEQ ID NO: 1234606 - RNA, 19 nt, Artificial Sequence
  Description of Artificial Sequence: Synthetic oligonucleotide
  Sense strand starting at position 86 of SEQ ID NO: 917451
guuaucuaccuguaaacug

SEQ ID NO: 1234607 - RNA, 19 nt, Artificial Sequence
  Description of Artificial Sequence: Synthetic oligonucleotide
  Antisense strand to SEQ ID NO: 1234606
caguuuacagguagauaac

SEQ ID NO: 1234608 - RNA, 19 nt, Artificial Sequence
  Description of Artificial Sequence: Synthetic oligonucleotide
  Sense strand starting at position 181 of SEQ ID NO: 917451
cuggguguuagugagaacu

SEQ ID NO: 1234609 - RNA, 19 nt, Artificial Sequence
  Description of Artificial Sequence: Synthetic oligonucleotide
  Antisense strand to SEQ ID NO: 1234608
aguucucacuaacacccag

SEQ ID NO: 1234610 - RNA, 19 nt, Artificial Sequence
  Description of Artificial Sequence: Synthetic oligonucleotide
  Sense strand starting at position 643 of SEQ ID NO: 917451
gagucuucucuuugacuag

SEQ ID NO: 1234611 - RNA, 19 nt, Artificial Sequence
  Description of Artificial Sequence: Synthetic oligonucleotide
  Antisense strand to SEQ ID NO: 1234610
cuagucaaagagaagacuc

SEQ ID NO: 1234612 - RNA, 19 nt, Artificial Sequence
  Description of Artificial Sequence: Synthetic oligonucleotide
  Sense strand starting at position 878 of SEQ ID NO: 917451
gggugaauacauggagguu

SEQ ID NO: 1234613 - RNA, 19 nt, Artificial Sequence
  Description of Artificial Sequence: Synthetic oligonucleotide
  Antisense strand to SEQ ID NO: 1234612
aaccuccauguauucaccc

SEQ ID NO: 1234614 - RNA, 19 nt, Artificial Sequence
  Description of Artificial Sequence: Synthetic oligonucleotide
  Sense strand starting at position 963 of SEQ ID NO: 917451
ucucauggaugucuagauu

SEQ ID NO: 1234615 - RNA, 19 nt, Artificial Sequence
  Description of Artificial Sequence: Synthetic oligonucleotide
  Antisense strand to SEQ ID NO: 1234614
aaucuagacauccaugaga

SEQ ID NO: 1234616 - RNA, 19 nt, Artificial Sequence
  Description of Artificial Sequence: Synthetic oligonucleotide
  Sense strand starting at position 1056 of SEQ ID NO: 917451
acaauuguaugguccugaa

SEQ ID NO: 1234617 - RNA, 19 nt, Artificial Sequence
  Description of Artificial Sequence: Synthetic oligonucleotide
  Antisense strand to SEQ ID NO: 1234616
uucaggaccauacaauugu

SEQ ID NO: 1234618 - RNA, 19 nt, Artificial Sequence
  Description of Artificial Sequence: Synthetic oligonucleotide
  Sense strand starting at position 1095 of SEQ ID NO: 917451
agaguaaucaggugggaca

SEQ ID NO: 1234619 - RNA, 19 nt, Artificial Sequence
  Description of Artificial Sequence: Synthetic oligonucleotide
  Antisense strand to SEQ ID NO: 1234618
ugucccaccugauuacucu

SEQ ID NO: 1234620 - RNA, 19 nt, Artificial Sequence
  Description of Artificial Sequence: Synthetic oligonucleotide
  Sense strand starting at position 1096 of SEQ ID NO: 917451
gaguaaucaggugggacaa

SEQ ID NO: 1234621 - RNA, 19 nt, Artificial Sequence
  Description of Artificial Sequence: Synthetic oligonucleotide
  Antisense strand to SEQ ID NO: 1234620
uugucccaccugauuacuc

SEQ ID NO: 1234622 - RNA, 19 nt, Artificial Sequence
  Description of Artificial Sequence: Synthetic oligonucleotide
  Sense strand starting at position 1162 of SEQ ID NO: 917451
gcugaaucaguuuagcaaa

SEQ ID NO: 1234623 - RNA, 19 nt, Artificial Sequence
  Description of Artificial Sequence: Synthetic oligonucleotide
  Antisense strand to SEQ ID NO: 1234622
uuugcuaaacugauucagc

SEQ ID NO: 1234624 - RNA, 19 nt, Artificial Sequence
  Description of Artificial Sequence: Synthetic oligonucleotide
  Sense strand starting at position 1164 of SEQ ID NO: 917451
ugaaucaguuuagcaaaga

SEQ ID NO: 1234625 - RNA, 19 nt, Artificial Sequence
  Description of Artificial Sequence: Synthetic oligonucleotide
  Antisense strand to SEQ ID NO: 1234624
ucuuugcuaaacugauuca

SEQ ID NO: 1234626 - RNA, 19 nt, Artificial Sequence
  Description of Artificial Sequence: Synthetic oligonucleotide
  Sense strand starting at position 1286 of SEQ ID NO: 917451
augagacaccaugguagua

SEQ ID NO: 1234627 - RNA, 19 nt, Artificial Sequence
  Description of Artificial Sequence: Synthetic oligonucleotide
  Antisense strand to SEQ ID NO: 1234626
uacuaccauggugucucau

SEQ ID NO: 1234628 - RNA, 19 nt, Artificial Sequence
  Description of Artificial Sequence: Synthetic oligonucleotide
  Sense strand starting at position 1362 of SEQ ID NO: 917451
aacgguaugagcugagaua

SEQ ID NO: 1234629 - RNA, 19 nt, Artificial Sequence
  Description of Artificial Sequence: Synthetic oligonucleotide
  Antisense strand to SEQ ID NO: 1234628
uaucucagcucauaccguu

SEQ ID NO: 1234630 - RNA, 19 nt, Artificial Sequence
  Description of Artificial Sequence: Synthetic oligonucleotide
  Sense strand starting at position 1363 of SEQ ID NO: 917451
acgguaugagcugagauaa

SEQ ID NO: 1234631 - RNA, 19 nt, Artificial Sequence
  Description of Artificial Sequence: Synthetic oligonucleotide
  Antisense strand to SEQ ID NO: 1234630
uuaucucagcucauaccgu

SEQ ID NO: 1234632 - RNA, 19 nt, Artificial Sequence
  Description of Artificial Sequence: Synthetic oligonucleotide
  Sense strand starting at position 1397 of SEQ ID NO: 917451
auguuagucugauuaugac

SEQ ID NO: 1234633 - RNA, 19 nt, Artificial Sequence
  Description of Artificial Sequence: Synthetic oligonucleotide
  Antisense strand to SEQ ID NO: 1234632
gucauaaucagacuaacau

SEQ ID NO: 1234634 - RNA, 19 nt, Artificial Sequence
  Description of Artificial Sequence: Synthetic oligonucleotide
  Sense strand starting at position 1406 of SEQ ID NO: 917451
ugauuaugacauuguagau

SEQ ID NO: 1234635 - RNA, 19 nt, Artificial Sequence
  Description of Artificial Sequence: Synthetic oligonucleotide
  Antisense strand to SEQ ID NO: 1234634
aucuacaaugucauaauca

SEQ ID NO: 1234636 - RNA, 19 nt, Artificial Sequence
  Description of Artificial Sequence: Synthetic oligonucleotide
  Sense strand starting at position 1588 of SEQ ID NO: 917451
gggugaauacacgaagguu

SEQ ID NO: 1234637 - RNA, 19 nt, Artificial Sequence
  Description of Artificial Sequence: Synthetic oligonucleotide
  Antisense strand to SEQ ID NO: 1234636
aaccuucguguauucaccc

SEQ ID NO: 1234638 - RNA, 19 nt, Artificial Sequence
  Description of Artificial Sequence: Synthetic oligonucleotide
  Sense strand starting at position 1606 of SEQ ID NO: 917451
ucaugauauucuucccagu

SEQ ID NO: 1234639 - RNA, 19 nt, Artificial Sequence
  Description of Artificial Sequence: Synthetic oligonucleotide
  Antisense strand to SEQ ID NO: 1234638
acugggaagaauaucauga

SEQ ID NO: 1234640 - RNA, 19 nt, Artificial Sequence
  Description of Artificial Sequence: Synthetic oligonucleotide
  Sense strand starting at position 1608 of SEQ ID NO: 917451
augauauucuucccaguua

SEQ ID NO: 1234641 - RNA, 19 nt, Artificial Sequence
  Description of Artificial Sequence: Synthetic oligonucleotide
  Antisense strand to SEQ ID NO: 1234640
uaacugggaagaauaucau

SEQ ID NO: 1234642 - RNA, 19 nt, Artificial Sequence
  Description of Artificial Sequence: Synthetic oligonucleotide
  Sense strand starting at position 1757 of SEQ ID NO: 917451
auucauguagguugggaau

SEQ ID NO: 1234643 - RNA, 19 nt, Artificial Sequence
  Description of Artificial Sequence: Synthetic oligonucleotide
  Antisense strand to SEQ ID NO: 1234642
auucccaaccuacaugaau

SEQ ID NO: 1234644 - RNA, 19 nt, Artificial Sequence
  Description of Artificial Sequence: Synthetic oligonucleotide
  Sense strand starting at position 1824 of SEQ ID NO: 917451
ucucuuucugcugagacau

SEQ ID NO: 1234645 - RNA, 19 nt, Artificial Sequence
  Description of Artificial Sequence: Synthetic oligonucleotide
  Antisense strand to SEQ ID NO: 1234644
augucucagcagaaagaga

SEQ ID NO: 1234646 - RNA, 19 nt, Artificial Sequence
  Description of Artificial Sequence: Synthetic oligonucleotide
  Sense strand starting at position 2342 of SEQ ID NO: 917451
aucugcucccauggaaaga

SEQ ID NO: 1234647 - RNA, 19 nt, Artificial Sequence
  Description of Artificial Sequence: Synthetic oligonucleotide
  Antisense strand to SEQ ID NO: 1234646
ucuuuccaugggagcagau

SEQ ID NO: 1234648 - RNA, 19 nt, Artificial Sequence
  Description of Artificial Sequence: Synthetic oligonucleotide
  Sense strand starting at position 2361 of SEQ ID NO: 917451
ggcguauuugaaggaugcu

SEQ ID NO: 1234649 - RNA, 19 nt, Artificial Sequence
  Description of Artificial Sequence: Synthetic oligonucleotide
  Antisense strand to SEQ ID NO: 1234648
agcauccuucaaauacgcc

SEQ ID NO: 1234650 - RNA, 19 nt, Artificial Sequence
  Description of Artificial Sequence: Synthetic oligonucleotide
  Sense strand starting at position 2379 of SEQ ID NO: 917451
uggagaggugguugaauua

SEQ ID NO: 1234651 - RNA, 19 nt, Artificial Sequence
  Description of Artificial Sequence: Synthetic oligonucleotide
  Antisense strand to SEQ ID NO: 1234650
uaauucaaccaccucucca

SEQ ID NO: 1234652 - RNA, 19 nt, Artificial Sequence
  Description of Artificial Sequence: Synthetic oligonucleotide
  Sense strand starting at position 2442 of SEQ ID NO: 917451
ucuuaaaggucccuugaag

SEQ ID NO: 1234653 - RNA, 19 nt, Artificial Sequence
  Description of Artificial Sequence: Synthetic oligonucleotide
  Antisense strand to SEQ ID NO: 1234652
cuucaagggaccuuuaaga

SEQ ID NO: 1234654 - RNA, 19 nt, Artificial Sequence
  Description of Artificial Sequence: Synthetic oligonucleotide
  Sense strand starting at position 2520 of SEQ ID NO: 917451
cucaaaguuccaggaucau

SEQ ID NO: 1234655 - RNA, 19 nt, Artificial Sequence
  Description of Artificial Sequence: Synthetic oligonucleotide
  Antisense strand to SEQ ID NO: 1234654
augauccuggaacuuugag

SEQ ID NO: 1234656 - RNA, 19 nt, Artificial Sequence
  Description of Artificial Sequence: Synthetic oligonucleotide
  Sense strand starting at position 2625 of SEQ ID NO: 917451
gugagacuuuaaucacgag

SEQ ID NO: 1234657 - RNA, 19 nt, Artificial Sequence
  Description of Artificial Sequence: Synthetic oligonucleotide
  Antisense strand to SEQ ID NO: 1234656
cucgugauuaaagucucac

SEQ ID NO: 1234658 - RNA, 19 nt, Artificial Sequence
  Description of Artificial Sequence: Synthetic oligonucleotide
  Sense strand starting at position 2693 of SEQ ID NO: 917451
cuagacuuucuagagcuuu

SEQ ID NO: 1234659 - RNA, 19 nt, Artificial Sequence
  Description of Artificial Sequence: Synthetic oligonucleotide
  Antisense strand to SEQ ID NO: 1234658
aaagcucuagaaagucuag

SEQ ID NO: 1234660 - RNA, 19 nt, Artificial Sequence
  Description of Artificial Sequence: Synthetic oligonucleotide
  Sense strand starting at position 2923 of SEQ ID NO: 917451
auagaacuucccugagacu

SEQ ID NO: 1234661 - RNA, 19 nt, Artificial Sequence
  Description of Artificial Sequence: Synthetic oligonucleotide
  Antisense strand to SEQ ID NO: 1234660
agucucagggaaguucuau

SEQ ID NO: 1234662 - RNA, 19 nt, Artificial Sequence
  Description of Artificial Sequence: Synthetic oligonucleotide
  Sense strand starting at position 3191 of SEQ ID NO: 917451
cccucaacacgugggauua

SEQ ID NO: 1234663 - RNA, 19 nt, Artificial Sequence
  Description of Artificial Sequence: Synthetic oligonucleotide
  Antisense strand to SEQ ID NO: 1234662
uaaucccacguguugaggg

SEQ ID NO: 1234664 - RNA, 19 nt, Artificial Sequence
  Description of Artificial Sequence: Synthetic oligonucleotide
  Sense strand starting at position 3224 of SEQ ID NO: 917451
caagaugaugcuuggguga

SEQ ID NO: 1234665 - RNA, 19 nt, Artificial Sequence
  Description of Artificial Sequence: Synthetic oligonucleotide
  Antisense strand to SEQ ID NO: 1234664
ucacccaagcaucaucuug

SEQ ID NO: 1234666 - RNA, 19 nt, Artificial Sequence
  Description of Artificial Sequence: Synthetic oligonucleotide
  Sense strand starting at position 3489 of SEQ ID NO: 917451
cacuaagcaugguugacau

SEQ ID NO: 1234667 - RNA, 19 nt, Artificial Sequence
  Description of Artificial Sequence: Synthetic oligonucleotide
  Antisense strand to SEQ ID NO: 1234666
augucaaccaugcuuagug

SEQ ID NO: 1234668 - RNA, 19 nt, Artificial Sequence
  Description of Artificial Sequence: Synthetic oligonucleotide
  Sense strand starting at position 3499 of SEQ ID NO: 917451
gguugacauuuacagaaac

SEQ ID NO: 1234669 - RNA, 19 nt, Artificial Sequence
  Description of Artificial Sequence: Synthetic oligonucleotide
  Antisense strand to SEQ ID NO: 1234668
guuucuguaaaugucaacc

SEQ ID NO: 1234670 - RNA, 19 nt, Artificial Sequence
  Description of Artificial Sequence: Synthetic oligonucleotide
  Sense strand starting at position 3538 of SEQ ID NO: 917451
cucugaguuaaugaauggu

SEQ ID NO: 1234671 - RNA, 19 nt, Artificial Sequence
  Description of Artificial Sequence: Synthetic oligonucleotide
  Antisense strand to SEQ ID NO: 1234670
accauucauuaacucagag

SEQ ID NO: 1234672 - RNA, 19 nt, Artificial Sequence
  Description of Artificial Sequence: Synthetic oligonucleotide
  Sense strand starting at position 3541 of SEQ ID NO: 917451
ugaguuaaugaauggucca

SEQ ID NO: 1234673 - RNA, 19 nt, Artificial Sequence
  Description of Artificial Sequence: Synthetic oligonucleotide
  Antisense strand to SEQ ID NO: 1234672
uggaccauucauuaacuca

SEQ ID NO: 1234674 - RNA, 19 nt, Artificial Sequence
  Description of Artificial Sequence: Synthetic oligonucleotide
  Sense strand starting at position 3544 of SEQ ID NO: 917451
guuaaugaaugguccaagu

SEQ ID NO: 1234675 - RNA, 19 nt, Artificial Sequence
  Description of Artificial Sequence: Synthetic oligonucleotide
  Antisense strand to SEQ ID NO: 1234674
acuuggaccauucauuaac

SEQ ID NO: 1234676 - RNA, 19 nt, Artificial Sequence
  Description of Artificial Sequence: Synthetic oligonucleotide
  Sense strand starting at position 3629 of SEQ ID NO: 917451
gccuaagaggcugaaugua

SEQ ID NO: 1234677 - RNA, 19 nt, Artificial Sequence
  Description of Artificial Sequence: Synthetic oligonucleotide
  Antisense strand to SEQ ID NO: 1234676
uacauucagccucuuaggc

SEQ ID NO: 1234678 - RNA, 19 nt, Artificial Sequence
  Description of Artificial Sequence: Synthetic oligonucleotide
  Sense strand starting at position 3802 of SEQ ID NO: 917451
cgaggccucguugagaaga

SEQ ID NO: 1234679 - RNA, 19 nt, Artificial Sequence
  Description of Artificial Sequence: Synthetic oligonucleotide
  Antisense strand to SEQ ID NO: 1234678
ucuucucaacgaggccucg

SEQ ID NO: 1234680 - RNA, 19 nt, Artificial Sequence
  Description of Artificial Sequence: Synthetic oligonucleotide
  Sense strand starting at position 3827 of SEQ ID NO: 917451
agaggagccucgcugauuu

SEQ ID NO: 1234681 - RNA, 19 nt, Artificial Sequence
  Description of Artificial Sequence: Synthetic oligonucleotide
  Antisense strand to SEQ ID NO: 1234680
aaaucagcgaggcuccucu

SEQ ID NO: 1234682 - RNA, 19 nt, Artificial Sequence
  Description of Artificial Sequence: Synthetic oligonucleotide
  Sense strand starting at position 3837 of SEQ ID NO: 917452
cgcugauuuggucgaggaa

SEQ ID NO: 1234683 - RNA, 19 nt, Artificial Sequence
  Description of Artificial Sequence: Synthetic oligonucleotide
  Antisense strand to SEQ ID NO: 1234682
uuccucgaccaaaucagcg

SEQ ID NO: 1234684 - RNA, 19 nt, Artificial Sequence
  Description of Artificial Sequence: Synthetic oligonucleotide
  Sense strand starting at position 24 of SEQ ID NO: 917452
ugaguacugaugcacguua

SEQ ID NO: 1234685 - RNA, 19 nt, Artificial Sequence
  Description of Artificial Sequence: Synthetic oligonucleotide
  Antisense strand to SEQ ID NO: 1234684
uaacgugcaucaguacuca

SEQ ID NO: 1234686 - RNA, 19 nt, Artificial Sequence
  Description of Artificial Sequence: Synthetic oligonucleotide
  Sense strand starting at position 37 of SEQ ID NO: 917452
acguuaagcccucagaaca

SEQ ID NO: 1234687 - RNA, 19 nt, Artificial Sequence
  Description of Artificial Sequence: Synthetic oligonucleotide
  Antisense strand to SEQ ID NO: 1234686
uguucugagggcuuaacgu

SEQ ID NO: 1234688 - RNA, 19 nt, Artificial Sequence
  Description of Artificial Sequence: Synthetic oligonucleotide
  Sense strand starting at position 72 of SEQ ID NO: 917452
cagaguuugguagaugcua

SEQ ID NO: 1234689 - RNA, 19 nt, Artificial Sequence
  Description of Artificial Sequence: Synthetic oligonucleotide
  Antisense strand to SEQ ID NO: 1234688
uagcaucuaccaaacucug

SEQ ID NO: 1234690 - RNA, 19 nt, Artificial Sequence
  Description of Artificial Sequence: Synthetic oligonucleotide
  Sense strand starting at position 80 of SEQ ID NO: 917452
gguagaugcuaccuaacau

SEQ ID NO: 1234691 - RNA, 19 nt, Artificial Sequence
  Description of Artificial Sequence: Synthetic oligonucleotide
  Antisense strand to SEQ ID NO: 1234690
auguuagguagcaucuacc

SEQ ID NO: 1234692 - RNA, 19 nt, Artificial Sequence
  Description of Artificial Sequence: Synthetic oligonucleotide
  Sense strand starting at position 113 of SEQ ID NO: 917452
auucuagaacuauguagag

SEQ ID NO: 1234693 - RNA, 19 nt, Artificial Sequence
  Description of Artificial Sequence: Synthetic oligonucleotide
  Antisense strand to SEQ ID NO: 1234692
cucuacauaguucuagaau

SEQ ID NO: 1234694 - RNA, 19 nt, Artificial Sequence
  Description of Artificial Sequence: Synthetic oligonucleotide
  Sense strand starting at position 185 of SEQ ID NO: 917452
uccugaaauccagaguccu

SEQ ID NO: 1234695 - RNA, 19 nt, Artificial Sequence
  Description of Artificial Sequence: Synthetic oligonucleotide
  Antisense strand to SEQ ID NO: 1234694
aggacucuggauuucagga

SEQ ID NO: 1234696 - RNA, 19 nt, Artificial Sequence
  Description of Artificial Sequence: Synthetic oligonucleotide
  Sense strand starting at position 196 of SEQ ID NO: 917452
agaguccuccugcagagau

SEQ ID NO: 1234697 - RNA, 19 nt, Artificial Sequence
  Description of Artificial Sequence: Synthetic oligonucleotide
  Antisense strand to SEQ ID NO: 1234696
aucucugcaggaggacucu

SEQ ID NO: 1234698 - RNA, 19 nt, Artificial Sequence
  Description of Artificial Sequence: Synthetic oligonucleotide
  Sense strand starting at position 557 of SEQ ID NO: 917452
agaugagaauuaggauaug

SEQ ID NO: 1234699 - RNA, 19 nt, Artificial Sequence
  Description of Artificial Sequence: Synthetic oligonucleotide
  Antisense strand to SEQ ID NO: 1234698
cauauccuaauucucaucu

SEQ ID NO: 1234700 - RNA, 19 nt, Artificial Sequence
  Description of Artificial Sequence: Synthetic oligonucleotide
  Sense strand starting at position 563 of SEQ ID NO: 917452
gaauuaggauaugggauaa

SEQ ID NO: 1234701 - RNA, 19 nt, Artificial Sequence
  Description of Artificial Sequence: Synthetic oligonucleotide
  Antisense strand to SEQ ID NO: 1234700
uuaucccauauccuaauuc

SEQ ID NO: 1234702 - RNA, 19 nt, Artificial Sequence
  Description of Artificial Sequence: Synthetic oligonucleotide
  Sense strand starting at position 711 of SEQ ID NO: 917452
aggagaauuuguugggaaa

SEQ ID NO: 1234703 - RNA, 19 nt, Artificial Sequence
  Description of Artificial Sequence: Synthetic oligonucleotide
  Antisense strand to SEQ ID NO: 1234702
uuucccaacaaauucuccu

SEQ ID NO: 1234704 - RNA, 19 nt, Artificial Sequence
  Description of Artificial Sequence: Synthetic oligonucleotide
  Sense strand starting at position 713 of SEQ ID NO: 917452
gagaauuuguugggaaagg

SEQ ID NO: 1234705 - RNA, 19 nt, Artificial Sequence
  Description of Artificial Sequence: Synthetic oligonucleotide
  Antisense strand to SEQ ID NO: 1234704
ccuuucccaacaaauucuc

SEQ ID NO: 1234706 - RNA, 19 nt, Artificial Sequence
  Description of Artificial Sequence: Synthetic oligonucleotide
  Sense strand starting at position 714 of SEQ ID NO: 917452
agaauuuguugggaaaggu

SEQ ID NO: 1234707 - RNA, 19 nt, Artificial Sequence
  Description of Artificial Sequence: Synthetic oligonucleotide
  Antisense strand to SEQ ID NO: 1234706
accuuucccaacaaauucu

SEQ ID NO: 1234708 - RNA, 19 nt, Artificial Sequence
  Description of Artificial Sequence: Synthetic oligonucleotide
  Sense strand starting at position 746 of SEQ ID NO: 917452
gagugagauuucuccgccu

SEQ ID NO: 1234709 - RNA, 19 nt, Artificial Sequence
  Description of Artificial Sequence: Synthetic oligonucleotide
  Antisense strand to SEQ ID NO: 1234708
aggcggagaaaucucacuc

SEQ ID NO: 1234710 - RNA, 19 nt, Artificial Sequence
  Description of Artificial Sequence: Synthetic oligonucleotide
  Sense strand starting at position 749 of SEQ ID NO: 917452
ugagauuucuccgccuguu

SEQ ID NO: 1234711 - RNA, 19 nt, Artificial Sequence
  Description of Artificial Sequence: Synthetic oligonucleotide
  Antisense strand to SEQ ID NO: 1234710
aacaggcggagaaaucuca

SEQ ID NO: 1234712 - RNA, 19 nt, Artificial Sequence
  Description of Artificial Sequence: Synthetic oligonucleotide
  Sense strand starting at position 785 of SEQ ID NO: 917452
agagcaaaucgcuggguga

SEQ ID NO: 1234713 - RNA, 19 nt, Artificial Sequence
  Description of Artificial Sequence: Synthetic oligonucleotide
  Antisense strand to SEQ ID NO: 1234712
ucacccagcgauuugcucu

SEQ ID NO: 1234714 - RNA, 19 nt, Artificial Sequence
  Description of Artificial Sequence: Synthetic oligonucleotide
  Sense strand starting at position 1050 of SEQ ID NO: 917452
gcucaagcucuguaaccuu

SEQ ID NO: 1234715 - RNA, 19 nt, Artificial Sequence
  Description of Artificial Sequence: Synthetic oligonucleotide
  Antisense strand to SEQ ID NO: 1234714
aagguuacagagcuugagc

SEQ ID NO: 1234716 - RNA, 19 nt, Artificial Sequence
  Description of Artificial Sequence: Synthetic oligonucleotide
  Sense strand starting at position 1262 of SEQ ID NO: 917452
ggacgagacuccgcuggua

SEQ ID NO: 1234717 - RNA, 19 nt, Artificial Sequence
  Description of Artificial Sequence: Synthetic oligonucleotide
  Antisense strand to SEQ ID NO: 1234716
uaccagcggagucucgucc

SEQ ID NO: 1234718 - RNA, 19 nt, Artificial Sequence
  Description of Artificial Sequence: Synthetic oligonucleotide
  Sense strand starting at position 1703 of SEQ ID NO: 917452
ggacucaaauccucccgau

SEQ ID NO: 1234719 - RNA, 19 nt, Artificial Sequence
  Description of Artificial Sequence: Synthetic oligonucleotide
  Antisense strand to SEQ ID NO: 1234718
aucgggaggauuugagucc

SEQ ID NO: 1234720 - RNA, 19 nt, Artificial Sequence
  Description of Artificial Sequence: Synthetic oligonucleotide
  Sense strand starting at position 1717 of SEQ ID NO: 917452
ccgauauucuaccuaacag

SEQ ID NO: 1234721 - RNA, 19 nt, Artificial Sequence
  Description of Artificial Sequence: Synthetic oligonucleotide
  Antisense strand to SEQ ID NO: 1234720
cuguuagguagaauaucgg

SEQ ID NO: 1234722 - RNA, 19 nt, Artificial Sequence
  Description of Artificial Sequence: Synthetic oligonucleotide
  Sense strand starting at position 2645 of SEQ ID NO: 917452
gcaagucuugaguagacug

SEQ ID NO: 1234723 - RNA, 19 nt, Artificial Sequence
  Description of Artificial Sequence: Synthetic oligonucleotide
  Antisense strand to SEQ ID NO: 1234722
cagucuacucaagacuugc

SEQ ID NO: 1234724 - RNA, 19 nt, Artificial Sequence
  Description of Artificial Sequence: Synthetic oligonucleotide
  Sense strand starting at position 2784 of SEQ ID NO: 917452
ugcuccauguucccugaua

SEQ ID NO: 1234725 - RNA, 19 nt, Artificial Sequence
  Description of Artificial Sequence: Synthetic oligonucleotide
  Antisense strand to SEQ ID NO: 1234724
uaucagggaacauggagca

SEQ ID NO: 1234726 - RNA, 19 nt, Artificial Sequence
  Description of Artificial Sequence: Synthetic oligonucleotide
  Sense strand starting at position 2785 of SEQ ID NO: 917452
gcuccauguucccugauag

SEQ ID NO: 1234727 - RNA, 19 nt, Artificial Sequence
  Description of Artificial Sequence: Synthetic oligonucleotide
  Antisense strand to SEQ ID NO: 1234726
cuaucagggaacauggagc

SEQ ID NO: 1234728 - RNA, 19 nt, Artificial Sequence
  Description of Artificial Sequence: Synthetic oligonucleotide
  Sense strand starting at position 2831 of SEQ ID NO: 917452
gcaugcuuucuaccagugu

SEQ ID NO: 1234729 - RNA, 19 nt, Artificial Sequence
  Description of Artificial Sequence: Synthetic oligonucleotide
  Antisense strand to SEQ ID NO: 1234728
acacugguagaaagcaugc

SEQ ID NO: 1234730 - RNA, 19 nt, Artificial Sequence
  Description of Artificial Sequence: Synthetic oligonucleotide
  Sense strand starting at position 3090 of SEQ ID NO: 917452
cggcgugagccuccuguaa

SEQ ID NO: 1234731 - RNA, 19 nt, Artificial Sequence
  Description of Artificial Sequence: Synthetic oligonucleotide
  Antisense strand to SEQ ID NO: 1234730
uuacaggaggcucacgccg

SEQ ID NO: 1234732 - RNA, 19 nt, Artificial Sequence
  Description of Artificial Sequence: Synthetic oligonucleotide
  Sense strand starting at position 3094 of SEQ ID NO: 917452
gugagccuccuguaaguaa

SEQ ID NO: 1234733 - RNA, 19 nt, Artificial Sequence
  Description of Artificial Sequence: Synthetic oligonucleotide
  Antisense strand to SEQ ID NO: 1234732
uuacuuacaggaggcucac

SEQ ID NO: 1234734 - RNA, 19 nt, Artificial Sequence
  Description of Artificial Sequence: Synthetic oligonucleotide
  Sense strand starting at position 3098 of SEQ ID NO: 917452
gccuccuguaaguaaugga

SEQ ID NO: 1234735 - RNA, 19 nt, Artificial Sequence
  Description of Artificial Sequence: Synthetic oligonucleotide
  Antisense strand to SEQ ID NO: 1234734
uccauuacuuacaggaggc

SEQ ID NO: 1234736 - RNA, 19 nt, Artificial Sequence
  Description of Artificial Sequence: Synthetic oligonucleotide
  Sense strand starting at position 3165 of SEQ ID NO: 917452
gugccacucgaauguaaga

SEQ ID NO: 1234737 - RNA, 19 nt, Artificial Sequence
  Description of Artificial Sequence: Synthetic oligonucleotide
  Antisense strand to SEQ ID NO: 1234736
ucuuacauucgaguggcac

SEQ ID NO: 1234738 - RNA, 19 nt, Artificial Sequence
  Description of Artificial Sequence: Synthetic oligonucleotide
  Sense strand starting at position 3172 of SEQ ID NO: 917452
ucgaauguaagaugucagu

SEQ ID NO: 1234739 - RNA, 19 nt, Artificial Sequence
  Description of Artificial Sequence: Synthetic oligonucleotide
  Antisense strand to SEQ ID NO: 1234738
acugacaucuuacauucga

SEQ ID NO: 1234740 - RNA, 19 nt, Artificial Sequence
  Description of Artificial Sequence: Synthetic oligonucleotide
  Sense strand starting at position 3178 of SEQ ID NO: 917452
guaagaugucaguacaagc

SEQ ID NO: 1234741 - RNA, 19 nt, Artificial Sequence
  Description of Artificial Sequence: Synthetic oligonucleotide
  Antisense strand to SEQ ID NO: 1234740
gcuuguacugacaucuuac

SEQ ID NO: 1234742 - RNA, 19 nt, Artificial Sequence
  Description of Artificial Sequence: Synthetic oligonucleotide
  Sense strand starting at position 3231 of SEQ ID NO: 917452
aucagaacuccguguacuu

SEQ ID NO: 1234743 - RNA, 19 nt, Artificial Sequence
  Description of Artificial Sequence: Synthetic oligonucleotide
  Antisense strand to SEQ ID NO: 1234742
aaguacacggaguucugau

SEQ ID NO: 1234744 - RNA, 19 nt, Artificial Sequence
  Description of Artificial Sequence: Synthetic oligonucleotide
  Sense strand starting at position 3320 of SEQ ID NO: 917452
augauaauuaucugugggu

SEQ ID NO: 1234745 - RNA, 19 nt, Artificial Sequence
  Description of Artificial Sequence: Synthetic oligonucleotide
  Antisense strand to SEQ ID NO: 1234744
acccacagauaauuaucau

SEQ ID NO: 1234746 - RNA, 19 nt, Artificial Sequence
  Description of Artificial Sequence: Synthetic oligonucleotide
  Sense strand starting at position 3340 of SEQ ID NO: 917452
guggaaauaugggcaaauu

SEQ ID NO: 1234747 - RNA, 19 nt, Artificial Sequence
  Description of Artificial Sequence: Synthetic oligonucleotide
  Antisense strand to SEQ ID NO: 1234746
aauuugcccauauuuccac

SEQ ID NO: 1234748 - RNA, 19 nt, Artificial Sequence
  Description of Artificial Sequence: Synthetic oligonucleotide
  Sense strand starting at position 3478 of SEQ ID NO: 917452
aggcuaauaucauugacug

SEQ ID NO: 1234749 - RNA, 19 nt, Artificial Sequence
  Description of Artificial Sequence: Synthetic oligonucleotide
  Antisense strand to SEQ ID NO: 1234748
cagucaaugauauuagccu

SEQ ID NO: 1234750 - RNA, 19 nt, Artificial Sequence
  Description of Artificial Sequence: Synthetic oligonucleotide
  Sense strand starting at position 3479 of SEQ ID NO: 917452
ggcuaauaucauugacugu

SEQ ID NO: 1234751 - RNA, 19 nt, Artificial Sequence
  Description of Artificial Sequence: Synthetic oligonucleotide
  Antisense strand to SEQ ID NO: 1234750
acagucaaugauauuagcc

SEQ ID NO: 1234752 - RNA, 19 nt, Artificial Sequence
  Description of Artificial Sequence: Synthetic oligonucleotide
  Sense strand starting at position 3688 of SEQ ID NO: 917452
gguuauuucugccuacuug

SEQ ID NO: 1234753 - RNA, 19 nt, Artificial Sequence
  Description of Artificial Sequence: Synthetic oligonucleotide
  Antisense strand to SEQ ID NO: 1234752
caaguaggcagaaauaacc

SEQ ID NO: 1234754 - RNA, 19 nt, Artificial Sequence
  Description of Artificial Sequence: Synthetic oligonucleotide
  Sense strand starting at position 3765 of SEQ ID NO: 917452
gaaacuauguccuugggaa

SEQ ID NO: 1234755 - RNA, 19 nt, Artificial Sequence
  Description of Artificial Sequence: Synthetic oligonucleotide
  Antisense strand to SEQ ID NO: 1234754
uucccaaggacauaguuuc

SEQ ID NO: 1234756 - RNA, 19 nt, Artificial Sequence
  Description of Artificial Sequence: Synthetic oligonucleotide
  Sense strand starting at position 3767 of SEQ ID NO: 917452
aacuauguccuugggaaac

SEQ ID NO: 1234757 - RNA, 19 nt, Artificial Sequence
  Description of Artificial Sequence: Synthetic oligonucleotide
  Antisense strand to SEQ ID NO: 1234756
guuucccaaggacauaguu

SEQ ID NO: 1234758 - RNA, 19 nt, Artificial Sequence
  Description of Artificial Sequence: Synthetic oligonucleotide
  Sense strand starting at position 3805 of SEQ ID NO: 917452
auggauuucuguggaguga

SEQ ID NO: 1234759 - RNA, 19 nt, Artificial Sequence
  Description of Artificial Sequence: Synthetic oligonucleotide
  Antisense strand to SEQ ID NO: 1234758
ucacuccacagaaauccau

SEQ ID NO: 1234760 - RNA, 19 nt, Artificial Sequence
  Description of Artificial Sequence: Synthetic oligonucleotide
  Sense strand starting at position 3942 of SEQ ID NO: 917452
ucugcauuggguggagaau

SEQ ID NO: 1234761 - RNA, 19 nt, Artificial Sequence
  Description of Artificial Sequence: Synthetic oligonucleotide
  Antisense strand to SEQ ID NO: 1234760
auucuccacccaaugcaga

SEQ ID NO: 1234762 - RNA, 19 nt, Artificial Sequence
  Description of Artificial Sequence: Synthetic oligonucleotide
  Sense strand starting at position 3943 of SEQ ID NO: 917453
cugcauuggguggagaauu

SEQ ID NO: 1234763 - RNA, 19 nt, Artificial Sequence
  Description of Artificial Sequence: Synthetic oligonucleotide
  Antisense strand to SEQ ID NO: 1234762
aauucuccacccaaugcag

SEQ ID NO: 1234764 - RNA, 19 nt, Artificial Sequence
  Description of Artificial Sequence: Synthetic oligonucleotide
  Sense strand starting at position 68 of SEQ ID NO: 917453
ggcaucucacaaugagaau

SEQ ID NO: 1234765 - RNA, 19 nt, Artificial Sequence
  Description of Artificial Sequence: Synthetic oligonucleotide
  Antisense strand to SEQ ID NO: 1234764
auucucauugugagaugcc

SEQ ID NO: 1234766 - RNA, 19 nt, Artificial Sequence
  Description of Artificial Sequence: Synthetic oligonucleotide
  Sense strand starting at position 87 of SEQ ID NO: 917453
guaccacagugguuuacaa

SEQ ID NO: 1234767 - RNA, 19 nt, Artificial Sequence
  Description of Artificial Sequence: Synthetic oligonucleotide
  Antisense strand to SEQ ID NO: 1234766
uuguaaaccacugugguac

SEQ ID NO: 1234768 - RNA, 19 nt, Artificial Sequence
  Description of Artificial Sequence: Synthetic oligonucleotide
  Sense strand starting at position 242 of SEQ ID NO: 917453
augaaugaguaucugagua

SEQ ID NO: 1234769 - RNA, 19 nt, Artificial Sequence
  Description of Artificial Sequence: Synthetic oligonucleotide
  Antisense strand to SEQ ID NO: 1234768
uacucagauacucauucau

SEQ ID NO: 1234770 - RNA, 19 nt, Artificial Sequence
  Description of Artificial Sequence: Synthetic oligonucleotide
  Sense strand starting at position 246 of SEQ ID NO: 917453
augaguaucugaguaaaca

SEQ ID NO: 1234771 - RNA, 19 nt, Artificial Sequence
  Description of Artificial Sequence: Synthetic oligonucleotide
  Antisense strand to SEQ ID NO: 1234770
uguuuacucagauacucau

SEQ ID NO: 1234772 - RNA, 19 nt, Artificial Sequence
  Description of Artificial Sequence: Synthetic oligonucleotide
  Sense strand starting at position 289 of SEQ ID NO: 917453
guacuauuguagcuacaaa

SEQ ID NO: 1234773 - RNA, 19 nt, Artificial Sequence
  Description of Artificial Sequence: Synthetic oligonucleotide
  Antisense strand to SEQ ID NO: 1234772
uuuguagcuacaauaguac

SEQ ID NO: 1234774 - RNA, 19 nt, Artificial Sequence
  Description of Artificial Sequence: Synthetic oligonucleotide
  Sense strand starting at position 409 of SEQ ID NO: 917453
cuagcacaucuccauguau

SEQ ID NO: 1234775 - RNA, 19 nt, Artificial Sequence
  Description of Artificial Sequence: Synthetic oligonucleotide
  Antisense strand to SEQ ID NO: 1234774
auacauggagaugugcuag

SEQ ID NO: 1234776 - RNA, 19 nt, Artificial Sequence
  Description of Artificial Sequence: Synthetic oligonucleotide
  Sense strand starting at position 411 of SEQ ID NO: 917453
agcacaucuccauguauga

SEQ ID NO: 1234777 - RNA, 19 nt, Artificial Sequence
  Description of Artificial Sequence: Synthetic oligonucleotide
  Antisense strand to SEQ ID NO: 1234776
ucauacauggagaugugcu

SEQ ID NO: 1234778 - RNA, 19 nt, Artificial Sequence
  Description of Artificial Sequence: Synthetic oligonucleotide
  Sense strand starting at position 462 of SEQ ID NO: 917453
ucucuaguccuuugugaaa

SEQ ID NO: 1234779 - RNA, 19 nt, Artificial Sequence
  Description of Artificial Sequence: Synthetic oligonucleotide
  Antisense strand to SEQ ID NO: 1234778
uuucacaaaggacuagaga

SEQ ID NO: 1234780 - RNA, 19 nt, Artificial Sequence
  Description of Artificial Sequence: Synthetic oligonucleotide
  Sense strand starting at position 498 of SEQ ID NO: 917453
aguagaacugucugcauuu

SEQ ID NO: 1234781 - RNA, 19 nt, Artificial Sequence
  Description of Artificial Sequence: Synthetic oligonucleotide
  Antisense strand to SEQ ID NO: 1234780
aaaugcagacaguucuacu

SEQ ID NO: 1234782 - RNA, 19 nt, Artificial Sequence
  Description of Artificial Sequence: Synthetic oligonucleotide
  Sense strand starting at position 518 of SEQ ID NO: 917453
uagugcugggccuaauauu

SEQ ID NO: 1234783 - RNA, 19 nt, Artificial Sequence
  Description of Artificial Sequence: Synthetic oligonucleotide
  Antisense strand to SEQ ID NO: 1234782
aauauuaggcccagcacua

SEQ ID NO: 1234784 - RNA, 19 nt, Artificial Sequence
  Description of Artificial Sequence: Synthetic oligonucleotide
  Sense strand starting at position 612 of SEQ ID NO: 917453
auucguuucguggauccaa

SEQ ID NO: 1234785 - RNA, 19 nt, Artificial Sequence
  Description of Artificial Sequence: Synthetic oligonucleotide
  Antisense strand to SEQ ID NO: 1234784
uuggauccacgaaacgaau

SEQ ID NO: 1234786 - RNA, 19 nt, Artificial Sequence
  Description of Artificial Sequence: Synthetic oligonucleotide
  Sense strand starting at position 625 of SEQ ID NO: 917453
auccaaaucugguucugua

SEQ ID NO: 1234787 - RNA, 19 nt, Artificial Sequence
  Description of Artificial Sequence: Synthetic oligonucleotide
  Antisense strand to SEQ ID NO: 1234786
uacagaaccagauuuggau

SEQ ID NO: 1234788 - RNA, 19 nt, Artificial Sequence
  Description of Artificial Sequence: Synthetic oligonucleotide
  Sense strand starting at position 1103 of SEQ ID NO: 917453
aaagcagagcauuaaggua

SEQ ID NO: 1234789 - RNA, 19 nt, Artificial Sequence
  Description of Artificial Sequence: Synthetic oligonucleotide
  Antisense strand to SEQ ID NO: 1234788
uaccuuaaugcucugcuuu

SEQ ID NO: 1234790 - RNA, 19 nt, Artificial Sequence
  Description of Artificial Sequence: Synthetic oligonucleotide
  Sense strand starting at position 1115 of SEQ ID NO: 917453
uaagguauuaaguagguga

SEQ ID NO: 1234791 - RNA, 19 nt, Artificial Sequence
  Description of Artificial Sequence: Synthetic oligonucleotide
  Antisense strand to SEQ ID NO: 1234790
ucaccuacuuaauaccuua

SEQ ID NO: 1234792 - RNA, 19 nt, Artificial Sequence
  Description of Artificial Sequence: Synthetic oligonucleotide
  Sense strand starting at position 1117 of SEQ ID NO: 917453
agguauuaaguaggugaua

SEQ ID NO: 1234793 - RNA, 19 nt, Artificial Sequence
  Description of Artificial Sequence: Synthetic oligonucleotide
  Antisense strand to SEQ ID NO: 1234792
uaucaccuacuuaauaccu

SEQ ID NO: 1234794 - RNA, 19 nt, Artificial Sequence
  Description of Artificial Sequence: Synthetic oligonucleotide
  Sense strand starting at position 1118 of SEQ ID NO: 917453
gguauuaaguaggugauag

SEQ ID NO: 1234795 - RNA, 19 nt, Artificial Sequence
  Description of Artificial Sequence: Synthetic oligonucleotide
  Antisense strand to SEQ ID NO: 1234794
cuaucaccuacuuaauacc

SEQ ID NO: 1234796 - RNA, 19 nt, Artificial Sequence
  Description of Artificial Sequence: Synthetic oligonucleotide
  Sense strand starting at position 1119 of SEQ ID NO: 917453
guauuaaguaggugauagu

SEQ ID NO: 1234797 - RNA, 19 nt, Artificial Sequence
  Description of Artificial Sequence: Synthetic oligonucleotide
  Antisense strand to SEQ ID NO: 1234796
acuaucaccuacuuaauac

SEQ ID NO: 1234798 - RNA, 19 nt, Artificial Sequence
  Description of Artificial Sequence: Synthetic oligonucleotide
  Sense strand starting at position 1120 of SEQ ID NO: 917453
uauuaaguaggugauaguu

SEQ ID NO: 1234799 - RNA, 19 nt, Artificial Sequence
  Description of Artificial Sequence: Synthetic oligonucleotide
  Antisense strand to SEQ ID NO: 1234798
aacuaucaccuacuuaaua

SEQ ID NO: 1234800 - RNA, 19 nt, Artificial Sequence
  Description of Artificial Sequence: Synthetic oligonucleotide
  Sense strand starting at position 1129 of SEQ ID NO: 917453
ggugauaguuuauucccua

SEQ ID NO: 1234801 - RNA, 19 nt, Artificial Sequence
  Description of Artificial Sequence: Synthetic oligonucleotide
  Antisense strand to SEQ ID NO: 1234800
uagggaauaaacuaucacc

SEQ ID NO: 1234802 - RNA, 19 nt, Artificial Sequence
  Description of Artificial Sequence: Synthetic oligonucleotide
  Sense strand starting at position 1130 of SEQ ID NO: 917453
gugauaguuuauucccuaa

SEQ ID NO: 1234803 - RNA, 19 nt, Artificial Sequence
  Description of Artificial Sequence: Synthetic oligonucleotide
  Antisense strand to SEQ ID NO: 1234802
uuagggaauaaacuaucac

SEQ ID NO: 1234804 - RNA, 19 nt, Artificial Sequence
  Description of Artificial Sequence: Synthetic oligonucleotide
  Sense strand starting at position 1176 of SEQ ID NO: 917453
guggauugacaccgacaga

SEQ ID NO: 1234805 - RNA, 19 nt, Artificial Sequence
  Description of Artificial Sequence: Synthetic oligonucleotide
  Antisense strand to SEQ ID NO: 1234804
ucugucggugucaauccac

SEQ ID NO: 1234806 - RNA, 19 nt, Artificial Sequence
  Description of Artificial Sequence: Synthetic oligonucleotide
  Sense strand starting at position 2373 of SEQ ID NO: 917453
uccugacugaagugggaau

SEQ ID NO: 1234807 - RNA, 19 nt, Artificial Sequence
  Description of Artificial Sequence: Synthetic oligonucleotide
  Antisense strand to SEQ ID NO: 1234806
auucccacuucagucagga

SEQ ID NO: 1234808 - RNA, 19 nt, Artificial Sequence
  Description of Artificial Sequence: Synthetic oligonucleotide
  Sense strand starting at position 2402 of SEQ ID NO: 917453
acacgugaacuuuagcaga

SEQ ID NO: 1234809 - RNA, 19 nt, Artificial Sequence
  Description of Artificial Sequence: Synthetic oligonucleotide
  Antisense strand to SEQ ID NO: 1234808
ucugcuaaaguucacgugu

SEQ ID NO: 1234810 - RNA, 19 nt, Artificial Sequence
  Description of Artificial Sequence: Synthetic oligonucleotide
  Sense strand starting at position 2404 of SEQ ID NO: 917453
acgugaacuuuagcagaua

SEQ ID NO: 1234811 - RNA, 19 nt, Artificial Sequence
  Description of Artificial Sequence: Synthetic oligonucleotide
  Antisense strand to SEQ ID NO: 1234810
uaucugcuaaaguucacgu

SEQ ID NO: 1234812 - RNA, 19 nt, Artificial Sequence
  Description of Artificial Sequence: Synthetic oligonucleotide
  Sense strand starting at position 2457 of SEQ ID NO: 917453
acuggaagaugauauaauu

SEQ ID NO: 1234813 - RNA, 19 nt, Artificial Sequence
  Description of Artificial Sequence: Synthetic oligonucleotide
  Antisense strand to SEQ ID NO: 1234812
aauuauaucaucuuccagu

SEQ ID NO: 1234814 - RNA, 19 nt, Artificial Sequence
  Description of Artificial Sequence: Synthetic oligonucleotide
  Sense strand starting at position 2556 of SEQ ID NO: 917453
ggcucaguagcagaaugua

SEQ ID NO: 1234815 - RNA, 19 nt, Artificial Sequence
  Description of Artificial Sequence: Synthetic oligonucleotide
  Antisense strand to SEQ ID NO: 1234814
uacauucugcuacugagcc

SEQ ID NO: 1234816 - RNA, 19 nt, Artificial Sequence
  Description of Artificial Sequence: Synthetic oligonucleotide
  Sense strand starting at position 2565 of SEQ ID NO: 917453
gcagaauguaggugacaga

SEQ ID NO: 1234817 - RNA, 19 nt, Artificial Sequence
  Description of Artificial Sequence: Synthetic oligonucleotide
  Antisense strand to SEQ ID NO: 1234816
ucugucaccuacauucugc

SEQ ID NO: 1234818 - RNA, 19 nt, Artificial Sequence
  Description of Artificial Sequence: Synthetic oligonucleotide
  Sense strand starting at position 2925 of SEQ ID NO: 917453
aauagagaauguuaggaga

SEQ ID NO: 1234819 - RNA, 19 nt, Artificial Sequence
  Description of Artificial Sequence: Synthetic oligonucleotide
  Antisense strand to SEQ ID NO: 1234818
ucuccuaacauucucuauu

SEQ ID NO: 1234820 - RNA, 19 nt, Artificial Sequence
  Description of Artificial Sequence: Synthetic oligonucleotide
  Sense strand starting at position 3035 of SEQ ID NO: 917453
cagagauuagcagguggaa

SEQ ID NO: 1234821 - RNA, 19 nt, Artificial Sequence
  Description of Artificial Sequence: Synthetic oligonucleotide
  Antisense strand to SEQ ID NO: 1234820
uuccaccugcuaaucucug

SEQ ID NO: 1234822 - RNA, 19 nt, Artificial Sequence
  Description of Artificial Sequence: Synthetic oligonucleotide
  Sense strand starting at position 3037 of SEQ ID NO: 917453
gagauuagcagguggaaua

SEQ ID NO: 1234823 - RNA, 19 nt, Artificial Sequence
  Description of Artificial Sequence: Synthetic oligonucleotide
  Antisense strand to SEQ ID NO: 1234822
uauuccaccugcuaaucuc

SEQ ID NO: 1234824 - RNA, 19 nt, Artificial Sequence
  Description of Artificial Sequence: Synthetic oligonucleotide
  Sense strand starting at position 3038 of SEQ ID NO: 917453
agauuagcagguggaauau

SEQ ID NO: 1234825 - RNA, 19 nt, Artificial Sequence
  Description of Artificial Sequence: Synthetic oligonucleotide
  Antisense strand to SEQ ID NO: 1234824
auauuccaccugcuaaucu

SEQ ID NO: 1234826 - RNA, 19 nt, Artificial Sequence
  Description of Artificial Sequence: Synthetic oligonucleotide
  Sense strand starting at position 3114 of SEQ ID NO: 917453
guacaaaugagucgaaagu

SEQ ID NO: 1234827 - RNA, 19 nt, Artificial Sequence
  Description of Artificial Sequence: Synthetic oligonucleotide
  Antisense strand to SEQ ID NO: 1234826
acuuucgacucauuuguac

SEQ ID NO: 1234828 - RNA, 19 nt, Artificial Sequence
  Description of Artificial Sequence: Synthetic oligonucleotide
  Sense strand starting at position 3172 of SEQ ID NO: 917453
gcaucagaaagcugaagua

SEQ ID NO: 1234829 - RNA, 19 nt, Artificial Sequence
  Description of Artificial Sequence: Synthetic oligonucleotide
  Antisense strand to SEQ ID NO: 1234828
uacuucagcuuucugaugc

SEQ ID NO: 1234830 - RNA, 19 nt, Artificial Sequence
  Description of Artificial Sequence: Synthetic oligonucleotide
  Sense strand starting at position 3223 of SEQ ID NO: 917453
aguggugcuagagauaaac

SEQ ID NO: 1234831 - RNA, 19 nt, Artificial Sequence
  Description of Artificial Sequence: Synthetic oligonucleotide
  Antisense strand to SEQ ID NO: 1234830
guuuaucucuagcaccacu

SEQ ID NO: 1234832 - RNA, 19 nt, Artificial Sequence
  Description of Artificial Sequence: Synthetic oligonucleotide
  Sense strand starting at position 3388 of SEQ ID NO: 917453
agccaaccuggucaauuaa

SEQ ID NO: 1234833 - RNA, 19 nt, Artificial Sequence
  Description of Artificial Sequence: Synthetic oligonucleotide
  Antisense strand to SEQ ID NO: 1234832
uuaauugaccagguuggcu

SEQ ID NO: 1234834 - RNA, 19 nt, Artificial Sequence
  Description of Artificial Sequence: Synthetic oligonucleotide
  Sense strand starting at position 3638 of SEQ ID NO: 917453
aagggaugcagucagcaga

SEQ ID NO: 1234835 - RNA, 19 nt, Artificial Sequence
  Description of Artificial Sequence: Synthetic oligonucleotide
  Antisense strand to SEQ ID NO: 1234834
ucugcugacugcaucccuu

SEQ ID NO: 1234836 - RNA, 19 nt, Artificial Sequence
  Description of Artificial Sequence: Synthetic oligonucleotide
  Sense strand starting at position 3770 of SEQ ID NO: 917453
agagaauuauugguacagu

SEQ ID NO: 1234837 - RNA, 19 nt, Artificial Sequence
  Description of Artificial Sequence: Synthetic oligonucleotide
  Antisense strand to SEQ ID NO: 1234836
acuguaccaauaauucucu

SEQ ID NO: 1234838 - RNA, 19 nt, Artificial Sequence
  Description of Artificial Sequence: Synthetic oligonucleotide
  Sense strand starting at position 3773 of SEQ ID NO: 917453
gaauuauugguacaguucu

SEQ ID NO: 1234839 - RNA, 19 nt, Artificial Sequence
  Description of Artificial Sequence: Synthetic oligonucleotide
  Antisense strand to SEQ ID NO: 1234838
agaacuguaccaauaauuc

SEQ ID NO: 1234840 - RNA, 19 nt, Artificial Sequence
  Description of Artificial Sequence: Synthetic oligonucleotide
  Sense strand starting at position 3946 of SEQ ID NO: 917453
cuauuacgauuccuaugaa

SEQ ID NO: 1234841 - RNA, 19 nt, Artificial Sequence
  Description of Artificial Sequence: Synthetic oligonucleotide
  Antisense strand to SEQ ID NO: 1234840
uucauaggaaucguaauag

SEQ ID NO: 1234842 - RNA, 19 nt, Artificial Sequence
  Description of Artificial Sequence: Synthetic oligonucleotide
  Sense strand starting at position 3949 of SEQ ID NO: 917454
uuacgauuccuaugaaaca

SEQ ID NO: 1234843 - RNA, 19 nt, Artificial Sequence
  Description of Artificial Sequence: Synthetic oligonucleotide
  Antisense strand to SEQ ID NO: 1234842
uguuucauaggaaucguaa

SEQ ID NO: 1234844 - RNA, 19 nt, Artificial Sequence
  Description of Artificial Sequence: Synthetic oligonucleotide
  Sense strand starting at position 195 of SEQ ID NO: 917454
auaggcaagcuuuauuauu

SEQ ID NO: 1234845 - RNA, 19 nt, Artificial Sequence
  Description of Artificial Sequence: Synthetic oligonucleotide
  Antisense strand to SEQ ID NO: 1234844
aauaauaaagcuugccuau

SEQ ID NO: 1234846 - RNA, 19 nt, Artificial Sequence
  Description of Artificial Sequence: Synthetic oligonucleotide
  Sense strand starting at position 529 of SEQ ID NO: 917454
cugcacucccggugggaau

SEQ ID NO: 1234847 - RNA, 19 nt, Artificial Sequence
  Description of Artificial Sequence: Synthetic oligonucleotide
  Antisense strand to SEQ ID NO: 1234846
auucccaccgggagugcag

SEQ ID NO: 1234848 - RNA, 19 nt, Artificial Sequence
  Description of Artificial Sequence: Synthetic oligonucleotide
  Sense strand starting at position 676 of SEQ ID NO: 917454
cuguguucucaauauagaa

SEQ ID NO: 1234849 - RNA, 19 nt, Artificial Sequence
  Description of Artificial Sequence: Synthetic oligonucleotide
  Antisense strand to SEQ ID NO: 1234848
uucuauauugagaacacag

SEQ ID NO: 1234850 - RNA, 19 nt, Artificial Sequence
  Description of Artificial Sequence: Synthetic oligonucleotide
  Sense strand starting at position 688 of SEQ ID NO: 917454
uauagaaaucgccaggcaa

SEQ ID NO: 1234851 - RNA, 19 nt, Artificial Sequence
  Description of Artificial Sequence: Synthetic oligonucleotide
  Antisense strand to SEQ ID NO: 1234850
uugccuggcgauuucuaua

SEQ ID NO: 1234852 - RNA, 19 nt, Artificial Sequence
  Description of Artificial Sequence: Synthetic oligonucleotide
  Sense strand starting at position 690 of SEQ ID NO: 917454
uagaaaucgccaggcaacu

SEQ ID NO: 1234853 - RNA, 19 nt, Artificial Sequence
  Description of Artificial Sequence: Synthetic oligonucleotide
  Antisense strand to SEQ ID NO: 1234852
aguugccuggcgauuucua

SEQ ID NO: 1234854 - RNA, 19 nt, Artificial Sequence
  Description of Artificial Sequence: Synthetic oligonucleotide
  Sense strand starting at position 966 of SEQ ID NO: 917454
gagacaagaucuguuucua

SEQ ID NO: 1234855 - RNA, 19 nt, Artificial Sequence
  Description of Artificial Sequence: Synthetic oligonucleotide
  Antisense strand to SEQ ID NO: 1234854
uagaaacagaucuugucuc

SEQ ID NO: 1234856 - RNA, 19 nt, Artificial Sequence
  Description of Artificial Sequence: Synthetic oligonucleotide
  Sense strand starting at position 989 of SEQ ID NO: 917454
auccuauuguauccaugua

SEQ ID NO: 1234857 - RNA, 19 nt, Artificial Sequence
  Description of Artificial Sequence: Synthetic oligonucleotide
  Antisense strand to SEQ ID NO: 1234856
uacauggauacaauaggau

SEQ ID NO: 1234858 - RNA, 19 nt, Artificial Sequence
  Description of Artificial Sequence: Synthetic oligonucleotide
  Sense strand starting at position 1076 of SEQ ID NO: 917454
uagaguuuauggcuuccua

SEQ ID NO: 1234859 - RNA, 19 nt, Artificial Sequence
  Description of Artificial Sequence: Synthetic oligonucleotide
  Antisense strand to SEQ ID NO: 1234858
uaggaagccauaaacucua

SEQ ID NO: 1234860 - RNA, 19 nt, Artificial Sequence
  Description of Artificial Sequence: Synthetic oligonucleotide
  Sense strand starting at position 1130 of SEQ ID NO: 917454
guccaaauaguccaauacu

SEQ ID NO: 1234861 - RNA, 19 nt, Artificial Sequence
  Description of Artificial Sequence: Synthetic oligonucleotide
  Antisense strand to SEQ ID NO: 1234860
aguauuggacuauuuggac

SEQ ID NO: 1234862 - RNA, 19 nt, Artificial Sequence
  Description of Artificial Sequence: Synthetic oligonucleotide
  Sense strand starting at position 1221 of SEQ ID NO: 917454
agcaaauacuggguaaugu

SEQ ID NO: 1234863 - RNA, 19 nt, Artificial Sequence
  Description of Artificial Sequence: Synthetic oligonucleotide
  Antisense strand to SEQ ID NO: 1234862
acauuacccaguauuugcu

SEQ ID NO: 1234864 - RNA, 19 nt, Artificial Sequence
  Description of Artificial Sequence: Synthetic oligonucleotide
  Sense strand starting at position 1230 of SEQ ID NO: 917454
uggguaaugucacuuuaga

SEQ ID NO: 1234865 - RNA, 19 nt, Artificial Sequence
  Description of Artificial Sequence: Synthetic oligonucleotide
  Antisense strand to SEQ ID NO: 1234864
ucuaaagugacauuaccca

SEQ ID NO: 1234866 - RNA, 19 nt, Artificial Sequence
  Description of Artificial Sequence: Synthetic oligonucleotide
  Sense strand starting at position 1407 of SEQ ID NO: 917454
guaacaauaucagcagcaa

SEQ ID NO: 1234867 - RNA, 19 nt, Artificial Sequence
  Description of Artificial Sequence: Synthetic oligonucleotide
  Antisense strand to SEQ ID NO: 1234866
uugcugcugauauuguuac

SEQ ID NO: 1234868 - RNA, 19 nt, Artificial Sequence
  Description of Artificial Sequence: Synthetic oligonucleotide
  Sense strand starting at position 1457 of SEQ ID NO: 917454
caggcuugauucuuaugau

SEQ ID NO: 1234869 - RNA, 19 nt, Artificial Sequence
  Description of Artificial Sequence: Synthetic oligonucleotide
  Antisense strand to SEQ ID NO: 1234868
aucauaagaaucaagccug

SEQ ID NO: 1234870 - RNA, 19 nt, Artificial Sequence
  Description of Artificial Sequence: Synthetic oligonucleotide
  Sense strand starting at position 1492 of SEQ ID NO: 917454
gcaacugugccauaaacaa

SEQ ID NO: 1234871 - RNA, 19 nt, Artificial Sequence
  Description of Artificial Sequence: Synthetic oligonucleotide
  Antisense strand to SEQ ID NO: 1234870
uuguuuauggcacaguugc

SEQ ID NO: 1234872 - RNA, 19 nt, Artificial Sequence
  Description of Artificial Sequence: Synthetic oligonucleotide
  Sense strand starting at position 1564 of SEQ ID NO: 917454
uuacuagaagagugagcuu

SEQ ID NO: 1234873 - RNA, 19 nt, Artificial Sequence
  Description of Artificial Sequence: Synthetic oligonucleotide
  Antisense strand to SEQ ID NO: 1234872
aagcucacucuucuaguaa

SEQ ID NO: 1234874 - RNA, 19 nt, Artificial Sequence
  Description of Artificial Sequence: Synthetic oligonucleotide
  Sense strand starting at position 1722 of SEQ ID NO: 917454
agagcugaaucggcaacau

SEQ ID NO: 1234875 - RNA, 19 nt, Artificial Sequence
  Description of Artificial Sequence: Synthetic oligonucleotide
  Antisense strand to SEQ ID NO: 1234874
auguugccgauucagcucu

SEQ ID NO: 1234876 - RNA, 19 nt, Artificial Sequence
  Description of Artificial Sequence: Synthetic oligonucleotide
  Sense strand starting at position 2067 of SEQ ID NO: 917454
aggagagaauucuaaacua

SEQ ID NO: 1234877 - RNA, 19 nt, Artificial Sequence
  Description of Artificial Sequence: Synthetic oligonucleotide
  Antisense strand to SEQ ID NO: 1234876
uaguuuagaauucucuccu

SEQ ID NO: 1234878 - RNA, 19 nt, Artificial Sequence
  Description of Artificial Sequence: Synthetic oligonucleotide
  Sense strand starting at position 2162 of SEQ ID NO: 917454
ggagaaauggugugugcug

SEQ ID NO: 1234879 - RNA, 19 nt, Artificial Sequence
  Description of Artificial Sequence: Synthetic oligonucleotide
  Antisense strand to SEQ ID NO: 1234878
cagcacacaccauuucucc

SEQ ID NO: 1234880 - RNA, 19 nt, Artificial Sequence
  Description of Artificial Sequence: Synthetic oligonucleotide
  Sense strand starting at position 2296 of SEQ ID NO: 917454
cacacugugguaugacaaa

SEQ ID NO: 1234881 - RNA, 19 nt, Artificial Sequence
  Description of Artificial Sequence: Synthetic oligonucleotide
  Antisense strand to SEQ ID NO: 1234880
uuugucauaccacagugug

SEQ ID NO: 1234882 - RNA, 19 nt, Artificial Sequence
  Description of Artificial Sequence: Synthetic oligonucleotide
  Sense strand starting at position 2427 of SEQ ID NO: 917454
guaaguucucuccagguaa

SEQ ID NO: 1234883 - RNA, 19 nt, Artificial Sequence
  Description of Artificial Sequence: Synthetic oligonucleotide
  Antisense strand to SEQ ID NO: 1234882
uuaccuggagagaacuuac

SEQ ID NO: 1234884 - RNA, 19 nt, Artificial Sequence
  Description of Artificial Sequence: Synthetic oligonucleotide
  Sense strand starting at position 2443 of SEQ ID NO: 917454
uaauauauucuggguuguu

SEQ ID NO: 1234885 - RNA, 19 nt, Artificial Sequence
  Description of Artificial Sequence: Synthetic oligonucleotide
  Antisense strand to SEQ ID NO: 1234884
aacaacccagaauauauua

SEQ ID NO: 1234886 - RNA, 19 nt, Artificial Sequence
  Description of Artificial Sequence: Synthetic oligonucleotide
  Sense strand starting at position 2545 of SEQ ID NO: 917454
gagugagcuuccuuccauu

SEQ ID NO: 1234887 - RNA, 19 nt, Artificial Sequence
  Description of Artificial Sequence: Synthetic oligonucleotide
  Antisense strand to SEQ ID NO: 1234886
aauggaaggaagcucacuc

SEQ ID NO: 1234888 - RNA, 19 nt, Artificial Sequence
  Description of Artificial Sequence: Synthetic oligonucleotide
  Sense strand starting at position 2595 of SEQ ID NO: 917454
cuuuaugaacaaugaggua

SEQ ID NO: 1234889 - RNA, 19 nt, Artificial Sequence
  Description of Artificial Sequence: Synthetic oligonucleotide
  Antisense strand to SEQ ID NO: 1234888
uaccucauuguucauaaag

SEQ ID NO: 1234890 - RNA, 19 nt, Artificial Sequence
  Description of Artificial Sequence: Synthetic oligonucleotide
  Sense strand starting at position 2607 of SEQ ID NO: 917454
ugagguaauauauacgcaa

SEQ ID NO: 1234891 - RNA, 19 nt, Artificial Sequence
  Description of Artificial Sequence: Synthetic oligonucleotide
  Antisense strand to SEQ ID NO: 1234890
uugcguauauauuaccuca

SEQ ID NO: 1234892 - RNA, 19 nt, Artificial Sequence
  Description of Artificial Sequence: Synthetic oligonucleotide
  Sense strand starting at position 2610 of SEQ ID NO: 917454
gguaauauauacgcaaagu

SEQ ID NO: 1234893 - RNA, 19 nt, Artificial Sequence
  Description of Artificial Sequence: Synthetic oligonucleotide
  Antisense strand to SEQ ID NO: 1234892
acuuugcguauauauuacc

SEQ ID NO: 1234894 - RNA, 19 nt, Artificial Sequence
  Description of Artificial Sequence: Synthetic oligonucleotide
  Sense strand starting at position 2640 of SEQ ID NO: 917454
agucaucucuuaguaaaug

SEQ ID NO: 1234895 - RNA, 19 nt, Artificial Sequence
  Description of Artificial Sequence: Synthetic oligonucleotide
  Antisense strand to SEQ ID NO: 1234894
cauuuacuaagagaugacu

SEQ ID NO: 1234896 - RNA, 19 nt, Artificial Sequence
  Description of Artificial Sequence: Synthetic oligonucleotide
  Sense strand starting at position 2649 of SEQ ID NO: 917454
uuaguaaauguggguuuaa

SEQ ID NO: 1234897 - RNA, 19 nt, Artificial Sequence
  Description of Artificial Sequence: Synthetic oligonucleotide
  Antisense strand to SEQ ID NO: 1234896
uuaaacccacauuuacuaa

SEQ ID NO: 1234898 - RNA, 19 nt, Artificial Sequence
  Description of Artificial Sequence: Synthetic oligonucleotide
  Sense strand starting at position 2650 of SEQ ID NO: 917454
uaguaaauguggguuuaag

SEQ ID NO: 1234899 - RNA, 19 nt, Artificial Sequence
  Description of Artificial Sequence: Synthetic oligonucleotide
  Antisense strand to SEQ ID NO: 1234898
cuuaaacccacauuuacua

SEQ ID NO: 1234900 - RNA, 19 nt, Artificial Sequence
  Description of Artificial Sequence: Synthetic oligonucleotide
  Sense strand starting at position 2948 of SEQ ID NO: 917454
uuauauuagccaugcauag

SEQ ID NO: 1234901 - RNA, 19 nt, Artificial Sequence
  Description of Artificial Sequence: Synthetic oligonucleotide
  Antisense strand to SEQ ID NO: 1234900
cuaugcauggcuaauauaa

SEQ ID NO: 1234902 - RNA, 19 nt, Artificial Sequence
  Description of Artificial Sequence: Synthetic oligonucleotide
  Sense strand starting at position 3145 of SEQ ID NO: 917454
cugucauccuaguuacuca

SEQ ID NO: 1234903 - RNA, 19 nt, Artificial Sequence
  Description of Artificial Sequence: Synthetic oligonucleotide
  Antisense strand to SEQ ID NO: 1234902
ugaguaacuaggaugacag

SEQ ID NO: 1234904 - RNA, 19 nt, Artificial Sequence
  Description of Artificial Sequence: Synthetic oligonucleotide
  Sense strand starting at position 3368 of SEQ ID NO: 917454
cuuuauagugaugagcuuu

SEQ ID NO: 1234905 - RNA, 19 nt, Artificial Sequence
  Description of Artificial Sequence: Synthetic oligonucleotide
  Antisense strand to SEQ ID NO: 1234904
aaagcucaucacuauaaag

SEQ ID NO: 1234906 - RNA, 19 nt, Artificial Sequence
  Description of Artificial Sequence: Synthetic oligonucleotide
  Sense strand starting at position 3486 of SEQ ID NO: 917454
ggauaacugcagcaccaau

SEQ ID NO: 1234907 - RNA, 19 nt, Artificial Sequence
  Description of Artificial Sequence: Synthetic oligonucleotide
  Antisense strand to SEQ ID NO: 1234906
auuggugcugcaguuaucc

SEQ ID NO: 1234908 - RNA, 19 nt, Artificial Sequence
  Description of Artificial Sequence: Synthetic oligonucleotide
  Sense strand starting at position 3531 of SEQ ID NO: 917454
aacauauugcaguguuuag

SEQ ID NO: 1234909 - RNA, 19 nt, Artificial Sequence
  Description of Artificial Sequence: Synthetic oligonucleotide
  Antisense strand to SEQ ID NO: 1234908
cuaaacacugcaauauguu

SEQ ID NO: 1234910 - RNA, 19 nt, Artificial Sequence
  Description of Artificial Sequence: Synthetic oligonucleotide
  Sense strand starting at position 3580 of SEQ ID NO: 917454
aaauguuagccgucacgcu

SEQ ID NO: 1234911 - RNA, 19 nt, Artificial Sequence
  Description of Artificial Sequence: Synthetic oligonucleotide
  Antisense strand to SEQ ID NO: 1234910
agcgugacggcuaacauuu

SEQ ID NO: 1234912 - RNA, 19 nt, Artificial Sequence
  Description of Artificial Sequence: Synthetic oligonucleotide
  Sense strand starting at position 3636 of SEQ ID NO: 917454
acaugcuaguucccagaga

SEQ ID NO: 1234913 - RNA, 19 nt, Artificial Sequence
  Description of Artificial Sequence: Synthetic oligonucleotide
  Antisense strand to SEQ ID NO: 1234912
ucucugggaacuagcaugu

SEQ ID NO: 1234914 - RNA, 19 nt, Artificial Sequence
  Description of Artificial Sequence: Synthetic oligonucleotide
  Sense strand starting at position 3676 of SEQ ID NO: 917454
uggaaagcuguaugauuag

SEQ ID NO: 1234915 - RNA, 19 nt, Artificial Sequence
  Description of Artificial Sequence: Synthetic oligonucleotide
  Antisense strand to SEQ ID NO: 1234914
cuaaucauacagcuuucca

SEQ ID NO: 1234916 - RNA, 19 nt, Artificial Sequence
  Description of Artificial Sequence: Synthetic oligonucleotide
  Sense strand starting at position 3679 of SEQ ID NO: 917454
aaagcuguaugauuaguaa

SEQ ID NO: 1234917 - RNA, 19 nt, Artificial Sequence
  Description of Artificial Sequence: Synthetic oligonucleotide
  Antisense strand to SEQ ID NO: 1234916
uuacuaaucauacagcuuu

SEQ ID NO: 1234918 - RNA, 19 nt, Artificial Sequence
  Description of Artificial Sequence: Synthetic oligonucleotide
  Sense strand starting at position 3682 of SEQ ID NO: 917454
gcuguaugauuaguaauaa

SEQ ID NO: 1234919 - RNA, 19 nt, Artificial Sequence
  Description of Artificial Sequence: Synthetic oligonucleotide
  Antisense strand to SEQ ID NO: 1234918
uuauuacuaaucauacagc

SEQ ID NO: 1234920 - RNA, 19 nt, Artificial Sequence
  Description of Artificial Sequence: Synthetic oligonucleotide
  Sense strand starting at position 3763 of SEQ ID NO: 917454
ucuauugaucuggagcauc

SEQ ID NO: 1234921 - RNA, 19 nt, Artificial Sequence
  Description of Artificial Sequence: Synthetic oligonucleotide
  Antisense strand to SEQ ID NO: 1234920
gaugcuccagaucaauaga

SEQ ID NO: 1234922 - RNA, 19 nt, Artificial Sequence
  Description of Artificial Sequence: Synthetic oligonucleotide
  Sense strand starting at position 3815 of SEQ ID NO: 917454
ggaaacucauagccuuagu

SEQ ID NO: 1234923 - RNA, 19 nt, Artificial Sequence
  Description of Artificial Sequence: Synthetic oligonucleotide
  Antisense strand to SEQ ID NO: 1234922
acuaaggcuaugaguuucc

SEQ ID NO: 1234924 - RNA, 19 nt, Artificial Sequence
  Description of Artificial Sequence: Synthetic oligonucleotide
  Sense strand starting at position 3815 of SEQ ID NO: 917452
ggaaacucauagccuuagu

SEQ ID NO: 1234925 - RNA, 19 nt, Artificial Sequence
  Description of Artificial Sequence: Synthetic oligonucleotide
  Antisense strand to SEQ ID NO: 1234924
acuaaggcuaugaguuucc

SEQ ID NO: 1234926 - RNA, 19 nt, Artificial Sequence
  Description of Artificial Sequence: Synthetic oligonucleotide
  Sense strand starting at position 3943 of SEQ ID NO: 917455
cugcauuggguggagaauu

SEQ ID NO: 1234927 - RNA, 19 nt, Artificial Sequence
  Description of Artificial Sequence: Synthetic oligonucleotide
  Antisense strand to SEQ ID NO: 1234926
aauucuccacccaaugcag

SEQ ID NO: 1234928 - RNA, 19 nt, Artificial Sequence
  Description of Artificial Sequence: Synthetic oligonucleotide
  Sense strand starting at position 100 of SEQ ID NO: 917455
guggguguugauggaaaca

SEQ ID NO: 1234929 - RNA, 19 nt, Artificial Sequence
  Description of Artificial Sequence: Synthetic oligonucleotide
  Antisense strand to SEQ ID NO: 1234928
uguuuccaucaacacccac

SEQ ID NO: 1234930 - RNA, 19 nt, Artificial Sequence
  Description of Artificial Sequence: Synthetic oligonucleotide
  Sense strand starting at position 233 of SEQ ID NO: 917455
gcuaacauuaccgaggguu

SEQ ID NO: 1234931 - RNA, 19 nt, Artificial Sequence
  Description of Artificial Sequence: Synthetic oligonucleotide
  Antisense strand to SEQ ID NO: 1234930
aacccucgguaauguuagc

SEQ ID NO: 1234932 - RNA, 19 nt, Artificial Sequence
  Description of Artificial Sequence: Synthetic oligonucleotide
  Sense strand starting at position 236 of SEQ ID NO: 917455
aacauuaccgaggguuacu

SEQ ID NO: 1234933 - RNA, 19 nt, Artificial Sequence
  Description of Artificial Sequence: Synthetic oligonucleotide
  Antisense strand to SEQ ID NO: 1234932
aguaacccucgguaauguu

SEQ ID NO: 1234934 - RNA, 19 nt, Artificial Sequence
  Description of Artificial Sequence: Synthetic oligonucleotide
  Sense strand starting at position 337 of SEQ ID NO: 917455
uuauaugggcuaugaggaa

SEQ ID NO: 1234935 - RNA, 19 nt, Artificial Sequence
  Description of Artificial Sequence: Synthetic oligonucleotide
  Antisense strand to SEQ ID NO: 1234934
uuccucauagcccauauaa

SEQ ID NO: 1234936 - RNA, 19 nt, Artificial Sequence
  Description of Artificial Sequence: Synthetic oligonucleotide
  Sense strand starting at position 381 of SEQ ID NO: 917455
gggaguaguggcuaacaca

SEQ ID NO: 1234937 - RNA, 19 nt, Artificial Sequence
  Description of Artificial Sequence: Synthetic oligonucleotide
  Antisense strand to SEQ ID NO: 1234936
uguguuagccacuacuccc

SEQ ID NO: 1234938 - RNA, 19 nt, Artificial Sequence
  Description of Artificial Sequence: Synthetic oligonucleotide
  Sense strand starting at position 407 of SEQ ID NO: 917455
gcguauuucagguggaaag

SEQ ID NO: 1234939 - RNA, 19 nt, Artificial Sequence
  Description of Artificial Sequence: Synthetic oligonucleotide
  Antisense strand to SEQ ID NO: 1234938
cuuuccaccugaaauacgc

SEQ ID NO: 1234940 - RNA, 19 nt, Artificial Sequence
  Description of Artificial Sequence: Synthetic oligonucleotide
  Sense strand starting at position 454 of SEQ ID NO: 917455
uguuaucuuguugaaugau

SEQ ID NO: 1234941 - RNA, 19 nt, Artificial Sequence
  Description of Artificial Sequence: Synthetic oligonucleotide
  Antisense strand to SEQ ID NO: 1234940
aucauucaacaagauaaca

SEQ ID NO: 1234942 - RNA, 19 nt, Artificial Sequence
  Description of Artificial Sequence: Synthetic oligonucleotide
  Sense strand starting at position 487 of SEQ ID NO: 917455
cuuauauucuggcuaagau

SEQ ID NO: 1234943 - RNA, 19 nt, Artificial Sequence
  Description of Artificial Sequence: Synthetic oligonucleotide
  Antisense strand to SEQ ID NO: 1234942
aucuuagccagaauauaag

SEQ ID NO: 1234944 - RNA, 19 nt, Artificial Sequence
  Description of Artificial Sequence: Synthetic oligonucleotide
  Sense strand starting at position 488 of SEQ ID NO: 917455
uuauauucuggcuaagauu

SEQ ID NO: 1234945 - RNA, 19 nt, Artificial Sequence
  Description of Artificial Sequence: Synthetic oligonucleotide
  Antisense strand to SEQ ID NO: 1234944
aaucuuagccagaauauaa

SEQ ID NO: 1234946 - RNA, 19 nt, Artificial Sequence
  Description of Artificial Sequence: Synthetic oligonucleotide
  Sense strand starting at position 613 of SEQ ID NO: 917455
ugaacauacuugccuagau

SEQ ID NO: 1234947 - RNA, 19 nt, Artificial Sequence
  Description of Artificial Sequence: Synthetic oligonucleotide
  Antisense strand to SEQ ID NO: 1234946
aucuaggcaaguauguuca

SEQ ID NO: 1234948 - RNA, 19 nt, Artificial Sequence
  Description of Artificial Sequence: Synthetic oligonucleotide
  Sense strand starting at position 820 of SEQ ID NO: 917455
gugacauagcagcaguaga

SEQ ID NO: 1234949 - RNA, 19 nt, Artificial Sequence
  Description of Artificial Sequence: Synthetic oligonucleotide
  Antisense strand to SEQ ID NO: 1234948
ucuacugcugcuaugucac

SEQ ID NO: 1234950 - RNA, 19 nt, Artificial Sequence
  Description of Artificial Sequence: Synthetic oligonucleotide
  Sense strand starting at position 1113 of SEQ ID NO: 917455
aauccagagugauugcaca

SEQ ID NO: 1234951 - RNA, 19 nt, Artificial Sequence
  Description of Artificial Sequence: Synthetic oligonucleotide
  Antisense strand to SEQ ID NO: 1234950
ugugcaaucacucuggauu

SEQ ID NO: 1234952 - RNA, 19 nt, Artificial Sequence
  Description of Artificial Sequence: Synthetic oligonucleotide
  Sense strand starting at position 1197 of SEQ ID NO: 917455
gaauguuaggacuggaagu

SEQ ID NO: 1234953 - RNA, 19 nt, Artificial Sequence
  Description of Artificial Sequence: Synthetic oligonucleotide
  Antisense strand to SEQ ID NO: 1234952
acuuccaguccuaacauuc

SEQ ID NO: 1234954 - RNA, 19 nt, Artificial Sequence
  Description of Artificial Sequence: Synthetic oligonucleotide
  Sense strand starting at position 1399 of SEQ ID NO: 917455
gguuauucuggcuaacacu

SEQ ID NO: 1234955 - RNA, 19 nt, Artificial Sequence
  Description of Artificial Sequence: Synthetic oligonucleotide
  Antisense strand to SEQ ID NO: 1234954
aguguuagccagaauaacc

SEQ ID NO: 1234956 - RNA, 19 nt, Artificial Sequence
  Description of Artificial Sequence: Synthetic oligonucleotide
  Sense strand starting at position 1435 of SEQ ID NO: 917455
ugugauuaucccuaccuga

SEQ ID NO: 1234957 - RNA, 19 nt, Artificial Sequence
  Description of Artificial Sequence: Synthetic oligonucleotide
  Antisense strand to SEQ ID NO: 1234956
ucagguagggauaaucaca

SEQ ID NO: 1234958 - RNA, 19 nt, Artificial Sequence
  Description of Artificial Sequence: Synthetic oligonucleotide
  Sense strand starting at position 1654 of SEQ ID NO: 917455
augaaagucugagucugaa

SEQ ID NO: 1234959 - RNA, 19 nt, Artificial Sequence
  Description of Artificial Sequence: Synthetic oligonucleotide
  Antisense strand to SEQ ID NO: 1234958
uucagacucagacuuucau

SEQ ID NO: 1234960 - RNA, 19 nt, Artificial Sequence
  Description of Artificial Sequence: Synthetic oligonucleotide
  Sense strand starting at position 1657 of SEQ ID NO: 917455
aaagucugagucugaaaga

SEQ ID NO: 1234961 - RNA, 19 nt, Artificial Sequence
  Description of Artificial Sequence: Synthetic oligonucleotide
  Antisense strand to SEQ ID NO: 1234960
ucuuucagacucagacuuu

SEQ ID NO: 1234962 - RNA, 19 nt, Artificial Sequence
  Description of Artificial Sequence: Synthetic oligonucleotide
  Sense strand starting at position 1667 of SEQ ID NO: 917455
ucugaaagaacguguagau

SEQ ID NO: 1234963 - RNA, 19 nt, Artificial Sequence
  Description of Artificial Sequence: Synthetic oligonucleotide
  Antisense strand to SEQ ID NO: 1234962
aucuacacguucuuucaga

SEQ ID NO: 1234964 - RNA, 19 nt, Artificial Sequence
  Description of Artificial Sequence: Synthetic oligonucleotide
  Sense strand starting at position 1680 of SEQ ID NO: 917455
guagaugauaucuggcaug

SEQ ID NO: 1234965 - RNA, 19 nt, Artificial Sequence
  Description of Artificial Sequence: Synthetic oligonucleotide
  Antisense strand to SEQ ID NO: 1234964
caugccagauaucaucuac

SEQ ID NO: 1234966 - RNA, 19 nt, Artificial Sequence
  Description of Artificial Sequence: Synthetic oligonucleotide
  Sense strand starting at position 1686 of SEQ ID NO: 917455
gauaucuggcaugaugguu

SEQ ID NO: 1234967 - RNA, 19 nt, Artificial Sequence
  Description of Artificial Sequence: Synthetic oligonucleotide
  Antisense strand to SEQ ID NO: 1234966
aaccaucaugccagauauc

SEQ ID NO: 1234968 - RNA, 19 nt, Artificial Sequence
  Description of Artificial Sequence: Synthetic oligonucleotide
  Sense strand starting at position 2118 of SEQ ID NO: 917455
aguugagaucccuauucuc

SEQ ID NO: 1234969 - RNA, 19 nt, Artificial Sequence
  Description of Artificial Sequence: Synthetic oligonucleotide
  Antisense strand to SEQ ID NO: 1234968
gagaauagggaucucaacu

SEQ ID NO: 1234970 - RNA, 19 nt, Artificial Sequence
  Description of Artificial Sequence: Synthetic oligonucleotide
  Sense strand starting at position 2159 of SEQ ID NO: 917455
ggaguugggucacucaaga

SEQ ID NO: 1234971 - RNA, 19 nt, Artificial Sequence
  Description of Artificial Sequence: Synthetic oligonucleotide
  Antisense strand to SEQ ID NO: 1234970
ucuugagugacccaacucc

SEQ ID NO: 1234972 - RNA, 19 nt, Artificial Sequence
  Description of Artificial Sequence: Synthetic oligonucleotide
  Sense strand starting at position 2307 of SEQ ID NO: 917455
ugcuaucuaccagaguuag

SEQ ID NO: 1234973 - RNA, 19 nt, Artificial Sequence
  Description of Artificial Sequence: Synthetic oligonucleotide
  Antisense strand to SEQ ID NO: 1234972
cuaacucugguagauagca

SEQ ID NO: 1234974 - RNA, 19 nt, Artificial Sequence
  Description of Artificial Sequence: Synthetic oligonucleotide
  Sense strand starting at position 2528 of SEQ ID NO: 917455
gugauugguggauggaaau

SEQ ID NO: 1234975 - RNA, 19 nt, Artificial Sequence
  Description of Artificial Sequence: Synthetic oligonucleotide
  Antisense strand to SEQ ID NO: 1234974
auuuccauccaccaaucac

SEQ ID NO: 1234976 - RNA, 19 nt, Artificial Sequence
  Description of Artificial Sequence: Synthetic oligonucleotide
  Sense strand starting at position 2672 of SEQ ID NO: 917455
ggcugaaacugguuggaac

SEQ ID NO: 1234977 - RNA, 19 nt, Artificial Sequence
  Description of Artificial Sequence: Synthetic oligonucleotide
  Antisense strand to SEQ ID NO: 1234976
guuccaaccaguuucagcc

SEQ ID NO: 1234978 - RNA, 19 nt, Artificial Sequence
  Description of Artificial Sequence: Synthetic oligonucleotide
  Sense strand starting at position 2774 of SEQ ID NO: 917455
cugaauuugccaugcaacu

SEQ ID NO: 1234979 - RNA, 19 nt, Artificial Sequence
  Description of Artificial Sequence: Synthetic oligonucleotide
  Antisense strand to SEQ ID NO: 1234978
aguugcauggcaaauucag

SEQ ID NO: 1234980 - RNA, 19 nt, Artificial Sequence
  Description of Artificial Sequence: Synthetic oligonucleotide
  Sense strand starting at position 3264 of SEQ ID NO: 917455
uuagacaucuuucugguga

SEQ ID NO: 1234981 - RNA, 19 nt, Artificial Sequence
  Description of Artificial Sequence: Synthetic oligonucleotide
  Antisense strand to SEQ ID NO: 1234980
ucaccagaaagaugucuaa

SEQ ID NO: 1234982 - RNA, 19 nt, Artificial Sequence
  Description of Artificial Sequence: Synthetic oligonucleotide
  Sense strand starting at position 3354 of SEQ ID NO: 917455
cacccugugguuuaggauu

SEQ ID NO: 1234983 - RNA, 19 nt, Artificial Sequence
  Description of Artificial Sequence: Synthetic oligonucleotide
  Antisense strand to SEQ ID NO: 1234982
aauccuaaaccacagggug

SEQ ID NO: 1234984 - RNA, 19 nt, Artificial Sequence
  Description of Artificial Sequence: Synthetic oligonucleotide
  Sense strand starting at position 3360 of SEQ ID NO: 917455
gugguuuaggauuauggau

SEQ ID NO: 1234985 - RNA, 19 nt, Artificial Sequence
  Description of Artificial Sequence: Synthetic oligonucleotide
  Antisense strand to SEQ ID NO: 1234984
auccauaauccuaaaccac

SEQ ID NO: 1234986 - RNA, 19 nt, Artificial Sequence
  Description of Artificial Sequence: Synthetic oligonucleotide
  Sense strand starting at position 3385 of SEQ ID NO: 917455
cccaaccuugucuaggauu

SEQ ID NO: 1234987 - RNA, 19 nt, Artificial Sequence
  Description of Artificial Sequence: Synthetic oligonucleotide
  Antisense strand to SEQ ID NO: 1234986
aauccuagacaagguuggg

SEQ ID NO: 1234988 - RNA, 19 nt, Artificial Sequence
  Description of Artificial Sequence: Synthetic oligonucleotide
  Sense strand starting at position 3428 of SEQ ID NO: 917455
ggauucuggucaguucaga

SEQ ID NO: 1234989 - RNA, 19 nt, Artificial Sequence
  Description of Artificial Sequence: Synthetic oligonucleotide
  Antisense strand to SEQ ID NO: 1234988
ucugaacugaccagaaucc

SEQ ID NO: 1234990 - RNA, 19 nt, Artificial Sequence
  Description of Artificial Sequence: Synthetic oligonucleotide
  Sense strand starting at position 3499 of SEQ ID NO: 917455
agcuacagccacuaagaua

SEQ ID NO: 1234991 - RNA, 19 nt, Artificial Sequence
  Description of Artificial Sequence: Synthetic oligonucleotide
  Antisense strand to SEQ ID NO: 1234990
uaucuuaguggcuguagcu

SEQ ID NO: 1234992 - RNA, 19 nt, Artificial Sequence
  Description of Artificial Sequence: Synthetic oligonucleotide
  Sense strand starting at position 3512 of SEQ ID NO: 917455
aagauaaucuagucugguu

SEQ ID NO: 1234993 - RNA, 19 nt, Artificial Sequence
  Description of Artificial Sequence: Synthetic oligonucleotide
  Antisense strand to SEQ ID NO: 1234992
aaccagacuagauuaucuu

SEQ ID NO: 1234994 - RNA, 19 nt, Artificial Sequence
  Description of Artificial Sequence: Synthetic oligonucleotide
  Sense strand starting at position 3578 of SEQ ID NO: 917455
uggcuuaacagaggucaaa

SEQ ID NO: 1234995 - RNA, 19 nt, Artificial Sequence
  Description of Artificial Sequence: Synthetic oligonucleotide
  Antisense strand to SEQ ID NO: 1234994
uuugaccucuguuaagcca

SEQ ID NO: 1234996 - RNA, 19 nt, Artificial Sequence
  Description of Artificial Sequence: Synthetic oligonucleotide
  Sense strand starting at position 3733 of SEQ ID NO: 917455
uucuucuguccuuaaagag

SEQ ID NO: 1234997 - RNA, 19 nt, Artificial Sequence
  Description of Artificial Sequence: Synthetic oligonucleotide
  Antisense strand to SEQ ID NO: 1234996
cucuuuaaggacagaagaa

SEQ ID NO: 1234998 - RNA, 19 nt, Artificial Sequence
  Description of Artificial Sequence: Synthetic oligonucleotide
  Sense strand starting at position 3743 of SEQ ID NO: 917455
cuuaaagaguuaccaugua

SEQ ID NO: 1234999 - RNA, 19 nt, Artificial Sequence
  Description of Artificial Sequence: Synthetic oligonucleotide
  Antisense strand to SEQ ID NO: 1234998
uacaugguaacucuuuaag

SEQ ID NO: 1235000 - RNA, 19 nt, Artificial Sequence
  Description of Artificial Sequence: Synthetic oligonucleotide
  Sense strand starting at position 3748 of SEQ ID NO: 917455
agaguuaccauguagucuu

SEQ ID NO: 1235001 - RNA, 19 nt, Artificial Sequence
  Description of Artificial Sequence: Synthetic oligonucleotide
  Antisense strand to SEQ ID NO: 1235000
aagacuacaugguaacucu

SEQ ID NO: 1235002 - RNA, 19 nt, Artificial Sequence
  Description of Artificial Sequence: Synthetic oligonucleotide
  Sense strand starting at position 3819 of SEQ ID NO: 917455
ucugcugguguugaaauaa

SEQ ID NO: 1235003 - RNA, 19 nt, Artificial Sequence
  Description of Artificial Sequence: Synthetic oligonucleotide
  Antisense strand to SEQ ID NO: 1235002
uuauuucaacaccagcaga

SEQ ID NO: 1235004 - RNA, 19 nt, Artificial Sequence
  Description of Artificial Sequence: Synthetic oligonucleotide
  Sense strand starting at position 3865 of SEQ ID NO: 917455
ucagguuacuggcuaaaga

SEQ ID NO: 1235005 - RNA, 19 nt, Artificial Sequence
  Description of Artificial Sequence: Synthetic oligonucleotide
  Antisense strand to SEQ ID NO: 1235004
ucuuuagccaguaaccuga

SEQ ID NO: 1235006 - RNA, 19 nt, Artificial Sequence
  Description of Artificial Sequence: Synthetic oligonucleotide
  Sense strand starting at position 3933 of SEQ ID NO: 917456
ugcucaucagggcaaauaa

SEQ ID NO: 1235007 - RNA, 19 nt, Artificial Sequence
  Description of Artificial Sequence: Synthetic oligonucleotide
  Antisense strand to SEQ ID NO: 1235006
uuauuugcccugaugagca

SEQ ID NO: 1235008 - RNA, 19 nt, Artificial Sequence
  Description of Artificial Sequence: Synthetic oligonucleotide
  Sense strand starting at position 265 of SEQ ID NO: 917456
guggguguugauggaaaca

SEQ ID NO: 1235009 - RNA, 19 nt, Artificial Sequence
  Description of Artificial Sequence: Synthetic oligonucleotide
  Antisense strand to SEQ ID NO: 1235008
uguuuccaucaacacccac

SEQ ID NO: 1235010 - RNA, 19 nt, Artificial Sequence
  Description of Artificial Sequence: Synthetic oligonucleotide
  Sense strand starting at position 398 of SEQ ID NO: 917456
gcuaacauuaccgaggguu

SEQ ID NO: 1235011 - RNA, 19 nt, Artificial Sequence
  Description of Artificial Sequence: Synthetic oligonucleotide
  Antisense strand to SEQ ID NO: 1235010
aacccucgguaauguuagc

SEQ ID NO: 1235012 - RNA, 19 nt, Artificial Sequence
  Description of Artificial Sequence: Synthetic oligonucleotide
  Sense strand starting at position 401 of SEQ ID NO: 917456
aacauuaccgaggguuacu

SEQ ID NO: 1235013 - RNA, 19 nt, Artificial Sequence
  Description of Artificial Sequence: Synthetic oligonucleotide
  Antisense strand to SEQ ID NO: 1235012
aguaacccucgguaauguu

SEQ ID NO: 1235014 - RNA, 19 nt, Artificial Sequence
  Description of Artificial Sequence: Synthetic oligonucleotide
  Sense strand starting at position 502 of SEQ ID NO: 917456
uuauaugggcuaugaggaa

SEQ ID NO: 1235015 - RNA, 19 nt, Artificial Sequence
  Description of Artificial Sequence: Synthetic oligonucleotide
  Antisense strand to SEQ ID NO: 1235014
uuccucauagcccauauaa

SEQ ID NO: 1235016 - RNA, 19 nt, Artificial Sequence
  Description of Artificial Sequence: Synthetic oligonucleotide
  Sense strand starting at position 546 of SEQ ID NO: 917456
gggaguaguggcuaacaca

SEQ ID NO: 1235017 - RNA, 19 nt, Artificial Sequence
  Description of Artificial Sequence: Synthetic oligonucleotide
  Antisense strand to SEQ ID NO: 1235016
uguguuagccacuacuccc

SEQ ID NO: 1235018 - RNA, 19 nt, Artificial Sequence
  Description of Artificial Sequence: Synthetic oligonucleotide
  Sense strand starting at position 572 of SEQ ID NO: 917456
gcguauuucagguggaaag

SEQ ID NO: 1235019 - RNA, 19 nt, Artificial Sequence
  Description of Artificial Sequence: Synthetic oligonucleotide
  Antisense strand to SEQ ID NO: 1235018
cuuuccaccugaaauacgc

SEQ ID NO: 1235020 - RNA, 19 nt, Artificial Sequence
  Description of Artificial Sequence: Synthetic oligonucleotide
  Sense strand starting at position 619 of SEQ ID NO: 917456
uguuaucuuguugaaugau

SEQ ID NO: 1235021 - RNA, 19 nt, Artificial Sequence
  Description of Artificial Sequence: Synthetic oligonucleotide
  Antisense strand to SEQ ID NO: 1235020
aucauucaacaagauaaca

SEQ ID NO: 1235022 - RNA, 19 nt, Artificial Sequence
  Description of Artificial Sequence: Synthetic oligonucleotide
  Sense strand starting at position 652 of SEQ ID NO: 917456
cuuauauucuggcuaagau

SEQ ID NO: 1235023 - RNA, 19 nt, Artificial Sequence
  Description of Artificial Sequence: Synthetic oligonucleotide
  Antisense strand to SEQ ID NO: 1235022
aucuuagccagaauauaag

SEQ ID NO: 1235024 - RNA, 19 nt, Artificial Sequence
  Description of Artificial Sequence: Synthetic oligonucleotide
  Sense strand starting at position 653 of SEQ ID NO: 917456
uuauauucuggcuaagauu

SEQ ID NO: 1235025 - RNA, 19 nt, Artificial Sequence
  Description of Artificial Sequence: Synthetic oligonucleotide
  Antisense strand to SEQ ID NO: 1235024
aaucuuagccagaauauaa

SEQ ID NO: 1235026 - RNA, 19 nt, Artificial Sequence
  Description of Artificial Sequence: Synthetic oligonucleotide
  Sense strand starting at position 778 of SEQ ID NO: 917456
ugaacauacuugccuagau

SEQ ID NO: 1235027 - RNA, 19 nt, Artificial Sequence
  Description of Artificial Sequence: Synthetic oligonucleotide
  Antisense strand to SEQ ID NO: 1235026
aucuaggcaaguauguuca

SEQ ID NO: 1235028 - RNA, 19 nt, Artificial Sequence
  Description of Artificial Sequence: Synthetic oligonucleotide
  Sense strand starting at position 985 of SEQ ID NO: 917456
gugacauagcagcaguaga

SEQ ID NO: 1235029 - RNA, 19 nt, Artificial Sequence
  Description of Artificial Sequence: Synthetic oligonucleotide
  Antisense strand to SEQ ID NO: 1235028
ucuacugcugcuaugucac

SEQ ID NO: 1235030 - RNA, 19 nt, Artificial Sequence
  Description of Artificial Sequence: Synthetic oligonucleotide
  Sense strand starting at position 1155 of SEQ ID NO: 917456
gggcuuaauucucuugaca

SEQ ID NO: 1235031 - RNA, 19 nt, Artificial Sequence
  Description of Artificial Sequence: Synthetic oligonucleotide
  Antisense strand to SEQ ID NO: 1235030
ugucaagagaauuaagccc

SEQ ID NO: 1235032 - RNA, 19 nt, Artificial Sequence
  Description of Artificial Sequence: Synthetic oligonucleotide
  Sense strand starting at position 1278 of SEQ ID NO: 917456
aauccagagugauugcaca

SEQ ID NO: 1235033 - RNA, 19 nt, Artificial Sequence
  Description of Artificial Sequence: Synthetic oligonucleotide
  Antisense strand to SEQ ID NO: 1235032
ugugcaaucacucuggauu

SEQ ID NO: 1235034 - RNA, 19 nt, Artificial Sequence
  Description of Artificial Sequence: Synthetic oligonucleotide
  Sense strand starting at position 1322 of SEQ ID NO: 917456
uugagaaggcuggguuacu

SEQ ID NO: 1235035 - RNA, 19 nt, Artificial Sequence
  Description of Artificial Sequence: Synthetic oligonucleotide
  Antisense strand to SEQ ID NO: 1235034
aguaacccagccuucucaa

SEQ ID NO: 1235036 - RNA, 19 nt, Artificial Sequence
  Description of Artificial Sequence: Synthetic oligonucleotide
  Sense strand starting at position 1362 of SEQ ID NO: 917456
gaauguuaggacuggaagu

SEQ ID NO: 1235037 - RNA, 19 nt, Artificial Sequence
  Description of Artificial Sequence: Synthetic oligonucleotide
  Antisense strand to SEQ ID NO: 1235036
acuuccaguccuaacauuc

SEQ ID NO: 1235038 - RNA, 19 nt, Artificial Sequence
  Description of Artificial Sequence: Synthetic oligonucleotide
  Sense strand starting at position 1564 of SEQ ID NO: 917456
gguuauucuggcuaacacu

SEQ ID NO: 1235039 - RNA, 19 nt, Artificial Sequence
  Description of Artificial Sequence: Synthetic oligonucleotide
  Antisense strand to SEQ ID NO: 1235038
aguguuagccagaauaacc

SEQ ID NO: 1235040 - RNA, 19 nt, Artificial Sequence
  Description of Artificial Sequence: Synthetic oligonucleotide
  Sense strand starting at position 1600 of SEQ ID NO: 917456
ugugauuaucccuaccuga

SEQ ID NO: 1235041 - RNA, 19 nt, Artificial Sequence
  Description of Artificial Sequence: Synthetic oligonucleotide
  Antisense strand to SEQ ID NO: 1235040
ucagguagggauaaucaca

SEQ ID NO: 1235042 - RNA, 19 nt, Artificial Sequence
  Description of Artificial Sequence: Synthetic oligonucleotide
  Sense strand starting at position 1819 of SEQ ID NO: 917456
augaaagucugagucugaa

SEQ ID NO: 1235043 - RNA, 19 nt, Artificial Sequence
  Description of Artificial Sequence: Synthetic oligonucleotide
  Antisense strand to SEQ ID NO: 1235042
uucagacucagacuuucau

SEQ ID NO: 1235044 - RNA, 19 nt, Artificial Sequence
  Description of Artificial Sequence: Synthetic oligonucleotide
  Sense strand starting at position 1822 of SEQ ID NO: 917456
aaagucugagucugaaaga

SEQ ID NO: 1235045 - RNA, 19 nt, Artificial Sequence
  Description of Artificial Sequence: Synthetic oligonucleotide
  Antisense strand to SEQ ID NO: 1235044
ucuuucagacucagacuuu

SEQ ID NO: 1235046 - RNA, 19 nt, Artificial Sequence
  Description of Artificial Sequence: Synthetic oligonucleotide
  Sense strand starting at position 1832 of SEQ ID NO: 917456
ucugaaagaacguguagau

SEQ ID NO: 1235047 - RNA, 19 nt, Artificial Sequence
  Description of Artificial Sequence: Synthetic oligonucleotide
  Antisense strand to SEQ ID NO: 1235046
aucuacacguucuuucaga

SEQ ID NO: 1235048 - RNA, 19 nt, Artificial Sequence
  Description of Artificial Sequence: Synthetic oligonucleotide
  Sense strand starting at position 1844 of SEQ ID NO: 917456
uguagaugauaucuggcau

SEQ ID NO: 1235049 - RNA, 19 nt, Artificial Sequence
  Description of Artificial Sequence: Synthetic oligonucleotide
  Antisense strand to SEQ ID NO: 1235048
augccagauaucaucuaca

SEQ ID NO: 1235050 - RNA, 19 nt, Artificial Sequence
  Description of Artificial Sequence: Synthetic oligonucleotide
  Sense strand starting at position 1845 of SEQ ID NO: 917456
guagaugauaucuggcaug

SEQ ID NO: 1235051 - RNA, 19 nt, Artificial Sequence
  Description of Artificial Sequence: Synthetic oligonucleotide
  Antisense strand to SEQ ID NO: 1235050
caugccagauaucaucuac

SEQ ID NO: 1235052 - RNA, 19 nt, Artificial Sequence
  Description of Artificial Sequence: Synthetic oligonucleotide
  Sense strand starting at position 1851 of SEQ ID NO: 917456
gauaucuggcaugaugguu

SEQ ID NO: 1235053 - RNA, 19 nt, Artificial Sequence
  Description of Artificial Sequence: Synthetic oligonucleotide
  Antisense strand to SEQ ID NO: 1235052
aaccaucaugccagauauc

SEQ ID NO: 1235054 - RNA, 19 nt, Artificial Sequence
  Description of Artificial Sequence: Synthetic oligonucleotide
  Sense strand starting at position 2283 of SEQ ID NO: 917456
aguugagaucccuauucuc

SEQ ID NO: 1235055 - RNA, 19 nt, Artificial Sequence
  Description of Artificial Sequence: Synthetic oligonucleotide
  Antisense strand to SEQ ID NO: 1235054
gagaauagggaucucaacu

SEQ ID NO: 1235056 - RNA, 19 nt, Artificial Sequence
  Description of Artificial Sequence: Synthetic oligonucleotide
  Sense strand starting at position 2324 of SEQ ID NO: 917456
ggaguugggucacucaaga

SEQ ID NO: 1235057 - RNA, 19 nt, Artificial Sequence
  Description of Artificial Sequence: Synthetic oligonucleotide
  Antisense strand to SEQ ID NO: 1235056
ucuugagugacccaacucc

SEQ ID NO: 1235058 - RNA, 19 nt, Artificial Sequence
  Description of Artificial Sequence: Synthetic oligonucleotide
  Sense strand starting at position 2472 of SEQ ID NO: 917456
ugcuaucuaccagaguuag

SEQ ID NO: 1235059 - RNA, 19 nt, Artificial Sequence
  Description of Artificial Sequence: Synthetic oligonucleotide
  Antisense strand to SEQ ID NO: 1235058
cuaacucugguagauagca

SEQ ID NO: 1235060 - RNA, 19 nt, Artificial Sequence
  Description of Artificial Sequence: Synthetic oligonucleotide
  Sense strand starting at position 2693 of SEQ ID NO: 917456
gugauugguggauggaaau

SEQ ID NO: 1235061 - RNA, 19 nt, Artificial Sequence
  Description of Artificial Sequence: Synthetic oligonucleotide
  Antisense strand to SEQ ID NO: 1235060
auuuccauccaccaaucac

SEQ ID NO: 1235062 - RNA, 19 nt, Artificial Sequence
  Description of Artificial Sequence: Synthetic oligonucleotide
  Sense strand starting at position 2837 of SEQ ID NO: 917456
ggcugaaacugguuggaac

SEQ ID NO: 1235063 - RNA, 19 nt, Artificial Sequence
  Description of Artificial Sequence: Synthetic oligonucleotide
  Antisense strand to SEQ ID NO: 1235062
guuccaaccaguuucagcc

SEQ ID NO: 1235064 - RNA, 19 nt, Artificial Sequence
  Description of Artificial Sequence: Synthetic oligonucleotide
  Sense strand starting at position 2939 of SEQ ID NO: 917456
cugaauuugccaugcaacu

SEQ ID NO: 1235065 - RNA, 19 nt, Artificial Sequence
  Description of Artificial Sequence: Synthetic oligonucleotide
  Antisense strand to SEQ ID NO: 1235064
aguugcauggcaaauucag

SEQ ID NO: 1235066 - RNA, 19 nt, Artificial Sequence
  Description of Artificial Sequence: Synthetic oligonucleotide
  Sense strand starting at position 3429 of SEQ ID NO: 917456
uuagacaucuuucugguga

SEQ ID NO: 1235067 - RNA, 19 nt, Artificial Sequence
  Description of Artificial Sequence: Synthetic oligonucleotide
  Antisense strand to SEQ ID NO: 1235066
ucaccagaaagaugucuaa

SEQ ID NO: 1235068 - RNA, 19 nt, Artificial Sequence
  Description of Artificial Sequence: Synthetic oligonucleotide
  Sense strand starting at position 3519 of SEQ ID NO: 917456
cacccugugguuuaggauu

SEQ ID NO: 1235069 - RNA, 19 nt, Artificial Sequence
  Description of Artificial Sequence: Synthetic oligonucleotide
  Antisense strand to SEQ ID NO: 1235068
aauccuaaaccacagggug

SEQ ID NO: 1235070 - RNA, 19 nt, Artificial Sequence
  Description of Artificial Sequence: Synthetic oligonucleotide
  Sense strand starting at position 3525 of SEQ ID NO: 917456
gugguuuaggauuauggau

SEQ ID NO: 1235071 - RNA, 19 nt, Artificial Sequence
  Description of Artificial Sequence: Synthetic oligonucleotide
  Antisense strand to SEQ ID NO: 1235070
auccauaauccuaaaccac

SEQ ID NO: 1235072 - RNA, 19 nt, Artificial Sequence
  Description of Artificial Sequence: Synthetic oligonucleotide
  Sense strand starting at position 3550 of SEQ ID NO: 917456
cccaaccuugucuaggauu

SEQ ID NO: 1235073 - RNA, 19 nt, Artificial Sequence
  Description of Artificial Sequence: Synthetic oligonucleotide
  Antisense strand to SEQ ID NO: 1235072
aauccuagacaagguuggg

SEQ ID NO: 1235074 - RNA, 19 nt, Artificial Sequence
  Description of Artificial Sequence: Synthetic oligonucleotide
  Sense strand starting at position 3593 of SEQ ID NO: 917456
ggauucuggucaguucaga

SEQ ID NO: 1235075 - RNA, 19 nt, Artificial Sequence
  Description of Artificial Sequence: Synthetic oligonucleotide
  Antisense strand to SEQ ID NO: 1235074
ucugaacugaccagaaucc

SEQ ID NO: 1235076 - RNA, 19 nt, Artificial Sequence
  Description of Artificial Sequence: Synthetic oligonucleotide
  Sense strand starting at position 3664 of SEQ ID NO: 917456
agcuacagccacuaagaua

SEQ ID NO: 1235077 - RNA, 19 nt, Artificial Sequence
  Description of Artificial Sequence: Synthetic oligonucleotide
  Antisense strand to SEQ ID NO: 1235076
uaucuuaguggcuguagcu

SEQ ID NO: 1235078 - RNA, 19 nt, Artificial Sequence
  Description of Artificial Sequence: Synthetic oligonucleotide
  Sense strand starting at position 3677 of SEQ ID NO: 917456
aagauaaucuagucugguu

SEQ ID NO: 1235079 - RNA, 19 nt, Artificial Sequence
  Description of Artificial Sequence: Synthetic oligonucleotide
  Antisense strand to SEQ ID NO: 1235078
aaccagacuagauuaucuu

SEQ ID NO: 1235080 - RNA, 19 nt, Artificial Sequence
  Description of Artificial Sequence: Synthetic oligonucleotide
  Sense strand starting at position 3743 of SEQ ID NO: 917456
uggcuuaacagaggucaaa

SEQ ID NO: 1235081 - RNA, 19 nt, Artificial Sequence
  Description of Artificial Sequence: Synthetic oligonucleotide
  Antisense strand to SEQ ID NO: 1235080
uuugaccucuguuaagcca

SEQ ID NO: 1235082 - RNA, 19 nt, Artificial Sequence
  Description of Artificial Sequence: Synthetic oligonucleotide
  Sense strand starting at position 3898 of SEQ ID NO: 917456
uucuucuguccuuaaagag

SEQ ID NO: 1235083 - RNA, 19 nt, Artificial Sequence
  Description of Artificial Sequence: Synthetic oligonucleotide
  Antisense strand to SEQ ID NO: 1235082
cucuuuaaggacagaagaa

SEQ ID NO: 1235084 - RNA, 19 nt, Artificial Sequence
  Description of Artificial Sequence: Synthetic oligonucleotide
  Sense strand starting at position 3908 of SEQ ID NO: 917456
cuuaaagaguuaccaugua

SEQ ID NO: 1235085 - RNA, 19 nt, Artificial Sequence
  Description of Artificial Sequence: Synthetic oligonucleotide
  Antisense strand to SEQ ID NO: 1235084
uacaugguaacucuuuaag

SEQ ID NO: 1235086 - RNA, 19 nt, Artificial Sequence
  Description of Artificial Sequence: Synthetic oligonucleotide
  Sense strand starting at position 3913 of SEQ ID NO: 917455
agaguuaccauguagucuu

SEQ ID NO: 1235087 - RNA, 19 nt, Artificial Sequence
  Description of Artificial Sequence: Synthetic oligonucleotide
  Antisense strand to SEQ ID NO: 1235086
aagacuacaugguaacucu

SEQ ID NO: 1235088 - RNA, 19 nt, Artificial Sequence
  Description of Artificial Sequence: Synthetic oligonucleotide
  Sense strand starting at position 3933 of SEQ ID NO: 917457
ugcucaucagggcaaauaa

SEQ ID NO: 1235089 - RNA, 19 nt, Artificial Sequence
  Description of Artificial Sequence: Synthetic oligonucleotide
  Antisense strand to SEQ ID NO: 1235088
uuauuugcccugaugagca

SEQ ID NO: 1235090 - RNA, 19 nt, Artificial Sequence
  Description of Artificial Sequence: Synthetic oligonucleotide
  Sense strand starting at position 175 of SEQ ID NO: 917457
auguauugagaucauguuu

SEQ ID NO: 1235091 - RNA, 19 nt, Artificial Sequence
  Description of Artificial Sequence: Synthetic oligonucleotide
  Antisense strand to SEQ ID NO: 1235090
aaacaugaucucaauacau

SEQ ID NO: 1235092 - RNA, 19 nt, Artificial Sequence
  Description of Artificial Sequence: Synthetic oligonucleotide
  Sense strand starting at position 180 of SEQ ID NO: 917457
uugagaucauguuuaucca

SEQ ID NO: 1235093 - RNA, 19 nt, Artificial Sequence
  Description of Artificial Sequence: Synthetic oligonucleotide
  Antisense strand to SEQ ID NO: 1235092
uggauaaacaugaucucaa

SEQ ID NO: 1235094 - RNA, 19 nt, Artificial Sequence
  Description of Artificial Sequence: Synthetic oligonucleotide
  Sense strand starting at position 181 of SEQ ID NO: 917457
ugagaucauguuuauccau

SEQ ID NO: 1235095 - RNA, 19 nt, Artificial Sequence
  Description of Artificial Sequence: Synthetic oligonucleotide
  Antisense strand to SEQ ID NO: 1235094
auggauaaacaugaucuca

SEQ ID NO: 1235096 - RNA, 19 nt, Artificial Sequence
  Description of Artificial Sequence: Synthetic oligonucleotide
  Sense strand starting at position 183 of SEQ ID NO: 917457
agaucauguuuauccauca

SEQ ID NO: 1235097 - RNA, 19 nt, Artificial Sequence
  Description of Artificial Sequence: Synthetic oligonucleotide
  Antisense strand to SEQ ID NO: 1235096
ugauggauaaacaugaucu

SEQ ID NO: 1235098 - RNA, 19 nt, Artificial Sequence
  Description of Artificial Sequence: Synthetic oligonucleotide
  Sense strand starting at position 314 of SEQ ID NO: 917457
guagauugcaugcaaguca

SEQ ID NO: 1235099 - RNA, 19 nt, Artificial Sequence
  Description of Artificial Sequence: Synthetic oligonucleotide
  Antisense strand to SEQ ID NO: 1235098
ugacuugcaugcaaucuac

SEQ ID NO: 1235100 - RNA, 19 nt, Artificial Sequence
  Description of Artificial Sequence: Synthetic oligonucleotide
  Sense strand starting at position 329 of SEQ ID NO: 917457
gucauacuguuagcuagaa

SEQ ID NO: 1235101 - RNA, 19 nt, Artificial Sequence
  Description of Artificial Sequence: Synthetic oligonucleotide
  Antisense strand to SEQ ID NO: 1235100
uucuagcuaacaguaugac

SEQ ID NO: 1235102 - RNA, 19 nt, Artificial Sequence
  Description of Artificial Sequence: Synthetic oligonucleotide
  Sense strand starting at position 366 of SEQ ID NO: 917457
uuuaaucaguagguuacua

SEQ ID NO: 1235103 - RNA, 19 nt, Artificial Sequence
  Description of Artificial Sequence: Synthetic oligonucleotide
  Antisense strand to SEQ ID NO: 1235102
uaguaaccuacugauuaaa

SEQ ID NO: 1235104 - RNA, 19 nt, Artificial Sequence
  Description of Artificial Sequence: Synthetic oligonucleotide
  Sense strand starting at position 940 of SEQ ID NO: 917457
uuccaagugucaucaucuu

SEQ ID NO: 1235105 - RNA, 19 nt, Artificial Sequence
  Description of Artificial Sequence: Synthetic oligonucleotide
  Antisense strand to SEQ ID NO: 1235104
aagaugaugacacuuggaa

SEQ ID NO: 1235106 - RNA, 19 nt, Artificial Sequence
  Description of Artificial Sequence: Synthetic oligonucleotide
  Sense strand starting at position 1126 of SEQ ID NO: 917457
cugauauguuagucuuaca

SEQ ID NO: 1235107 - RNA, 19 nt, Artificial Sequence
  Description of Artificial Sequence: Synthetic oligonucleotide
  Antisense strand to SEQ ID NO: 1235106
uguaagacuaacauaucag

SEQ ID NO: 1235108 - RNA, 19 nt, Artificial Sequence
  Description of Artificial Sequence: Synthetic oligonucleotide
  Sense strand starting at position 1154 of SEQ ID NO: 917457
aucguauauagcgaucuua

SEQ ID NO: 1235109 - RNA, 19 nt, Artificial Sequence
  Description of Artificial Sequence: Synthetic oligonucleotide
  Antisense strand to SEQ ID NO: 1235108
uaagaucgcuauauacgau

SEQ ID NO: 1235110 - RNA, 19 nt, Artificial Sequence
  Description of Artificial Sequence: Synthetic oligonucleotide
  Sense strand starting at position 1191 of SEQ ID NO: 917457
ggucuaugauggcauuuaa

SEQ ID NO: 1235111 - RNA, 19 nt, Artificial Sequence
  Description of Artificial Sequence: Synthetic oligonucleotide
  Antisense strand to SEQ ID NO: 1235110
uuaaaugccaucauagacc

SEQ ID NO: 1235112 - RNA, 19 nt, Artificial Sequence
  Description of Artificial Sequence: Synthetic oligonucleotide
  Sense strand starting at position 1650 of SEQ ID NO: 917457
gaguaaagccauggagauc

SEQ ID NO: 1235113 - RNA, 19 nt, Artificial Sequence
  Description of Artificial Sequence: Synthetic oligonucleotide
  Antisense strand to SEQ ID NO: 1235112
gaucuccauggcuuuacuc

SEQ ID NO: 1235114 - RNA, 19 nt, Artificial Sequence
  Description of Artificial Sequence: Synthetic oligonucleotide
  Sense strand starting at position 1692 of SEQ ID NO: 917457
uggcuuucuguugaauuga

SEQ ID NO: 1235115 - RNA, 19 nt, Artificial Sequence
  Description of Artificial Sequence: Synthetic oligonucleotide
  Antisense strand to SEQ ID NO: 1235114
ucaauucaacagaaagcca

SEQ ID NO: 1235116 - RNA, 19 nt, Artificial Sequence
  Description of Artificial Sequence: Synthetic oligonucleotide
  Sense strand starting at position 1940 of SEQ ID NO: 917457
augauuuccuuccaggacu

SEQ ID NO: 1235117 - RNA, 19 nt, Artificial Sequence
  Description of Artificial Sequence: Synthetic oligonucleotide
  Antisense strand to SEQ ID NO: 1235116
aguccuggaaggaaaucau

SEQ ID NO: 1235118 - RNA, 19 nt, Artificial Sequence
  Description of Artificial Sequence: Synthetic oligonucleotide
  Sense strand starting at position 2466 of SEQ ID NO: 917457
gggcucacacuugacuaua

SEQ ID NO: 1235119 - RNA, 19 nt, Artificial Sequence
  Description of Artificial Sequence: Synthetic oligonucleotide
  Antisense strand to SEQ ID NO: 1235118
uauagucaagugugagccc

SEQ ID NO: 1235120 - RNA, 19 nt, Artificial Sequence
  Description of Artificial Sequence: Synthetic oligonucleotide
  Sense strand starting at position 2744 of SEQ ID NO: 917457
acauaauuccagugguucu

SEQ ID NO: 1235121 - RNA, 19 nt, Artificial Sequence
  Description of Artificial Sequence: Synthetic oligonucleotide
  Antisense strand to SEQ ID NO: 1235120
agaaccacuggaauuaugu

SEQ ID NO: 1235122 - RNA, 19 nt, Artificial Sequence
  Description of Artificial Sequence: Synthetic oligonucleotide
  Sense strand starting at position 2889 of SEQ ID NO: 917457
aaguaauacggauguuguu

SEQ ID NO: 1235123 - RNA, 19 nt, Artificial Sequence
  Description of Artificial Sequence: Synthetic oligonucleotide
  Antisense strand to SEQ ID NO: 1235122
aacaacauccguauuacuu

SEQ ID NO: 1235124 - RNA, 19 nt, Artificial Sequence
  Description of Artificial Sequence: Synthetic oligonucleotide
  Sense strand starting at position 2898 of SEQ ID NO: 917457
ggauguuguuggucuggga

SEQ ID NO: 1235125 - RNA, 19 nt, Artificial Sequence
  Description of Artificial Sequence: Synthetic oligonucleotide
  Antisense strand to SEQ ID NO: 1235124
ucccagaccaacaacaucc

SEQ ID NO: 1235126 - RNA, 19 nt, Artificial Sequence
  Description of Artificial Sequence: Synthetic oligonucleotide
  Sense strand starting at position 2980 of SEQ ID NO: 917457
guguaccuucucuauguau

SEQ ID NO: 1235127 - RNA, 19 nt, Artificial Sequence
  Description of Artificial Sequence: Synthetic oligonucleotide
  Antisense strand to SEQ ID NO: 1235126
auacauagagaagguacac

SEQ ID NO: 1235128 - RNA, 19 nt, Artificial Sequence
  Description of Artificial Sequence: Synthetic oligonucleotide
  Sense strand starting at position 3025 of SEQ ID NO: 917457
guacacauaucuccaaugu

SEQ ID NO: 1235129 - RNA, 19 nt, Artificial Sequence
  Description of Artificial Sequence: Synthetic oligonucleotide
  Antisense strand to SEQ ID NO: 1235128
acauuggagauauguguac

SEQ ID NO: 1235130 - RNA, 19 nt, Artificial Sequence
  Description of Artificial Sequence: Synthetic oligonucleotide
  Sense strand starting at position 3029 of SEQ ID NO: 917457
acauaucuccaauguaugu

SEQ ID NO: 1235131 - RNA, 19 nt, Artificial Sequence
  Description of Artificial Sequence: Synthetic oligonucleotide
  Antisense strand to SEQ ID NO: 1235130
acauacauuggagauaugu

SEQ ID NO: 1235132 - RNA, 19 nt, Artificial Sequence
  Description of Artificial Sequence: Synthetic oligonucleotide
  Sense strand starting at position 3049 of SEQ ID NO: 917457
cucgucuaaucccuuaaag

SEQ ID NO: 1235133 - RNA, 19 nt, Artificial Sequence
  Description of Artificial Sequence: Synthetic oligonucleotide
  Antisense strand to SEQ ID NO: 1235132
cuuuaagggauuagacgag

SEQ ID NO: 1235134 - RNA, 19 nt, Artificial Sequence
  Description of Artificial Sequence: Synthetic oligonucleotide
  Sense strand starting at position 3051 of SEQ ID NO: 917457
cgucuaaucccuuaaaguc

SEQ ID NO: 1235135 - RNA, 19 nt, Artificial Sequence
  Description of Artificial Sequence: Synthetic oligonucleotide
  Antisense strand to SEQ ID NO: 1235134
gacuuuaagggauuagacg

SEQ ID NO: 1235136 - RNA, 19 nt, Artificial Sequence
  Description of Artificial Sequence: Synthetic oligonucleotide
  Sense strand starting at position 3177 of SEQ ID NO: 917457
cuaauugauugccuacuga

SEQ ID NO: 1235137 - RNA, 19 nt, Artificial Sequence
  Description of Artificial Sequence: Synthetic oligonucleotide
  Antisense strand to SEQ ID NO: 1235136
ucaguaggcaaucaauuag

SEQ ID NO: 1235138 - RNA, 19 nt, Artificial Sequence
  Description of Artificial Sequence: Synthetic oligonucleotide
  Sense strand starting at position 3192 of SEQ ID NO: 917457
cugauuucuugguuuccuu

SEQ ID NO: 1235139 - RNA, 19 nt, Artificial Sequence
  Description of Artificial Sequence: Synthetic oligonucleotide
  Antisense strand to SEQ ID NO: 1235138
aaggaaaccaagaaaucag

SEQ ID NO: 1235140 - RNA, 19 nt, Artificial Sequence
  Description of Artificial Sequence: Synthetic oligonucleotide
  Sense strand starting at position 3199 of SEQ ID NO: 917457
cuugguuuccuugacuauu

SEQ ID NO: 1235141 - RNA, 19 nt, Artificial Sequence
  Description of Artificial Sequence: Synthetic oligonucleotide
  Antisense strand to SEQ ID NO: 1235140
aauagucaaggaaaccaag

SEQ ID NO: 1235142 - RNA, 19 nt, Artificial Sequence
  Description of Artificial Sequence: Synthetic oligonucleotide
  Sense strand starting at position 3497 of SEQ ID NO: 917457
gagccuuugcagugcauuu

SEQ ID NO: 1235143 - RNA, 19 nt, Artificial Sequence
  Description of Artificial Sequence: Synthetic oligonucleotide
  Antisense strand to SEQ ID NO: 1235142
aaaugcacugcaaaggcuc

SEQ ID NO: 1235144 - RNA, 19 nt, Artificial Sequence
  Description of Artificial Sequence: Synthetic oligonucleotide
  Sense strand starting at position 3516 of SEQ ID NO: 917457
agcuaaugccaauagagau

SEQ ID NO: 1235145 - RNA, 19 nt, Artificial Sequence
  Description of Artificial Sequence: Synthetic oligonucleotide
  Antisense strand to SEQ ID NO: 1235144
aucucuauuggcauuagcu

SEQ ID NO: 1235146 - RNA, 19 nt, Artificial Sequence
  Description of Artificial Sequence: Synthetic oligonucleotide
  Sense strand starting at position 3522 of SEQ ID NO: 917457
ugccaauagagaugcagua

SEQ ID NO: 1235147 - RNA, 19 nt, Artificial Sequence
  Description of Artificial Sequence: Synthetic oligonucleotide
  Antisense strand to SEQ ID NO: 1235146
uacugcaucucuauuggca

SEQ ID NO: 1235148 - RNA, 19 nt, Artificial Sequence
  Description of Artificial Sequence: Synthetic oligonucleotide
  Sense strand starting at position 3568 of SEQ ID NO: 917457
ucccuuaagcaggauguaa

SEQ ID NO: 1235149 - RNA, 19 nt, Artificial Sequence
  Description of Artificial Sequence: Synthetic oligonucleotide
  Antisense strand to SEQ ID NO: 1235148
uuacauccugcuuaaggga

SEQ ID NO: 1235150 - RNA, 19 nt, Artificial Sequence
  Description of Artificial Sequence: Synthetic oligonucleotide
  Sense strand starting at position 3576 of SEQ ID NO: 917457
gcaggauguaagcaugaga

SEQ ID NO: 1235151 - RNA, 19 nt, Artificial Sequence
  Description of Artificial Sequence: Synthetic oligonucleotide
  Antisense strand to SEQ ID NO: 1235150
ucucaugcuuacauccugc

SEQ ID NO: 1235152 - RNA, 19 nt, Artificial Sequence
  Description of Artificial Sequence: Synthetic oligonucleotide
  Sense strand starting at position 3584 of SEQ ID NO: 917457
uaagcaugagauuguagaa

SEQ ID NO: 1235153 - RNA, 19 nt, Artificial Sequence
  Description of Artificial Sequence: Synthetic oligonucleotide
  Antisense strand to SEQ ID NO: 1235152
uucuacaaucucaugcuua

SEQ ID NO: 1235154 - RNA, 19 nt, Artificial Sequence
  Description of Artificial Sequence: Synthetic oligonucleotide
  Sense strand starting at position 3641 of SEQ ID NO: 917457
gguagacaguucuuguuaa

SEQ ID NO: 1235155 - RNA, 19 nt, Artificial Sequence
  Description of Artificial Sequence: Synthetic oligonucleotide
  Antisense strand to SEQ ID NO: 1235154
uuaacaagaacugucuacc

SEQ ID NO: 1235156 - RNA, 19 nt, Artificial Sequence
  Description of Artificial Sequence: Synthetic oligonucleotide
  Sense strand starting at position 3709 of SEQ ID NO: 917457
ccuugacaaucaguguauu

SEQ ID NO: 1235157 - RNA, 19 nt, Artificial Sequence
  Description of Artificial Sequence: Synthetic oligonucleotide
  Antisense strand to SEQ ID NO: 1235156
aauacacugauugucaagg

SEQ ID NO: 1235158 - RNA, 19 nt, Artificial Sequence
  Description of Artificial Sequence: Synthetic oligonucleotide
  Sense strand starting at position 3731 of SEQ ID NO: 917457
agguucuugucuucuggga

SEQ ID NO: 1235159 - RNA, 19 nt, Artificial Sequence
  Description of Artificial Sequence: Synthetic oligonucleotide
  Antisense strand to SEQ ID NO: 1235158
ucccagaagacaagaaccu

SEQ ID NO: 1235160 - RNA, 19 nt, Artificial Sequence
  Description of Artificial Sequence: Synthetic oligonucleotide
  Sense strand starting at position 3738 of SEQ ID NO: 917457
ugucuucugggagagaucu

SEQ ID NO: 1235161 - RNA, 19 nt, Artificial Sequence
  Description of Artificial Sequence: Synthetic oligonucleotide
  Antisense strand to SEQ ID NO: 1235160
agaucucucccagaagaca

SEQ ID NO: 1235162 - RNA, 19 nt, Artificial Sequence
  Description of Artificial Sequence: Synthetic oligonucleotide
  Sense strand starting at position 3763 of SEQ ID NO: 917457
uaaauuauucugggaagug

SEQ ID NO: 1235163 - RNA, 19 nt, Artificial Sequence
  Description of Artificial Sequence: Synthetic oligonucleotide
  Antisense strand to SEQ ID NO: 1235162
cacuucccagaauaauuua

SEQ ID NO: 1235164 - RNA, 19 nt, Artificial Sequence
  Description of Artificial Sequence: Synthetic oligonucleotide
  Sense strand starting at position 3799 of SEQ ID NO: 917457
agaggaaggagugguuauu

SEQ ID NO: 1235165 - RNA, 19 nt, Artificial Sequence
  Description of Artificial Sequence: Synthetic oligonucleotide
  Antisense strand to SEQ ID NO: 1235164
aauaaccacuccuuccucu

SEQ ID NO: 1235166 - RNA, 19 nt, Artificial Sequence
  Description of Artificial Sequence: Synthetic oligonucleotide
  Sense strand starting at position 3862 of SEQ ID NO: 917457
ugacuuaaucucuguuaga

SEQ ID NO: 1235167 - RNA, 19 nt, Artificial Sequence
  Description of Artificial Sequence: Synthetic oligonucleotide
  Antisense strand to SEQ ID NO: 1235166
ucuaacagagauuaaguca

SEQ ID NO: 1235168 - RNA, 19 nt, Artificial Sequence
  Description of Artificial Sequence: Synthetic oligonucleotide
  Sense strand starting at position 3863 of SEQ ID NO: 917458
gacuuaaucucuguuagag

SEQ ID NO: 1235169 - RNA, 19 nt, Artificial Sequence
  Description of Artificial Sequence: Synthetic oligonucleotide
  Antisense strand to SEQ ID NO: 1235168
cucuaacagagauuaaguc

SEQ ID NO: 1235170 - RNA, 19 nt, Artificial Sequence
  Description of Artificial Sequence: Synthetic oligonucleotide
  Sense strand starting at position 210 of SEQ ID NO: 917458
cuagcaauuuaguucgauu

SEQ ID NO: 1235171 - RNA, 19 nt, Artificial Sequence
  Description of Artificial Sequence: Synthetic oligonucleotide
  Antisense strand to SEQ ID NO: 1235170
aaucgaacuaaauugcuag

SEQ ID NO: 1235172 - RNA, 19 nt, Artificial Sequence
  Description of Artificial Sequence: Synthetic oligonucleotide
  Sense strand starting at position 414 of SEQ ID NO: 917458
cauucuagcuucuuaggga

SEQ ID NO: 1235173 - RNA, 19 nt, Artificial Sequence
  Description of Artificial Sequence: Synthetic oligonucleotide
  Antisense strand to SEQ ID NO: 1235172
ucccuaagaagcuagaaug

SEQ ID NO: 1235174 - RNA, 19 nt, Artificial Sequence
  Description of Artificial Sequence: Synthetic oligonucleotide
  Sense strand starting at position 532 of SEQ ID NO: 917458
ccaaauuaagucuacgauu

SEQ ID NO: 1235175 - RNA, 19 nt, Artificial Sequence
  Description of Artificial Sequence: Synthetic oligonucleotide
  Antisense strand to SEQ ID NO: 1235174
aaucguagacuuaauuugg

SEQ ID NO: 1235176 - RNA, 19 nt, Artificial Sequence
  Description of Artificial Sequence: Synthetic oligonucleotide
  Sense strand starting at position 689 of SEQ ID NO: 917458
gaacgcaaauucguuaaau

SEQ ID NO: 1235177 - RNA, 19 nt, Artificial Sequence
  Description of Artificial Sequence: Synthetic oligonucleotide
  Antisense strand to SEQ ID NO: 1235176
auuuaacgaauuugcguuc

SEQ ID NO: 1235178 - RNA, 19 nt, Artificial Sequence
  Description of Artificial Sequence: Synthetic oligonucleotide
  Sense strand starting at position 691 of SEQ ID NO: 917458
acgcaaauucguuaaauua

SEQ ID NO: 1235179 - RNA, 19 nt, Artificial Sequence
  Description of Artificial Sequence: Synthetic oligonucleotide
  Antisense strand to SEQ ID NO: 1235178
uaauuuaacgaauuugcgu

SEQ ID NO: 1235180 - RNA, 19 nt, Artificial Sequence
  Description of Artificial Sequence: Synthetic oligonucleotide
  Sense strand starting at position 730 of SEQ ID NO: 917458
cgaggauccucgguggacu

SEQ ID NO: 1235181 - RNA, 19 nt, Artificial Sequence
  Description of Artificial Sequence: Synthetic oligonucleotide
  Antisense strand to SEQ ID NO: 1235180
aguccaccgaggauccucg

SEQ ID NO: 1235182 - RNA, 19 nt, Artificial Sequence
  Description of Artificial Sequence: Synthetic oligonucleotide
  Sense strand starting at position 731 of SEQ ID NO: 917458
gaggauccucgguggacua

SEQ ID NO: 1235183 - RNA, 19 nt, Artificial Sequence
  Description of Artificial Sequence: Synthetic oligonucleotide
  Antisense strand to SEQ ID NO: 1235182
uaguccaccgaggauccuc

SEQ ID NO: 1235184 - RNA, 19 nt, Artificial Sequence
  Description of Artificial Sequence: Synthetic oligonucleotide
  Sense strand starting at position 752 of SEQ ID NO: 917458
agcgcacuuccuuacaauu

SEQ ID NO: 1235185 - RNA, 19 nt, Artificial Sequence
  Description of Artificial Sequence: Synthetic oligonucleotide
  Antisense strand to SEQ ID NO: 1235184
aauuguaaggaagugcgcu

SEQ ID NO: 1235186 - RNA, 19 nt, Artificial Sequence
  Description of Artificial Sequence: Synthetic oligonucleotide
  Sense strand starting at position 828 of SEQ ID NO: 917458
ugcgcauuccaagagaaac

SEQ ID NO: 1235187 - RNA, 19 nt, Artificial Sequence
  Description of Artificial Sequence: Synthetic oligonucleotide
  Antisense strand to SEQ ID NO: 1235186
guuucucuuggaaugcgca

SEQ ID NO: 1235188 - RNA, 19 nt, Artificial Sequence
  Description of Artificial Sequence: Synthetic oligonucleotide
  Sense strand starting at position 849 of SEQ ID NO: 917458
uucucaggcccagaauuaa

SEQ ID NO: 1235189 - RNA, 19 nt, Artificial Sequence
  Description of Artificial Sequence: Synthetic oligonucleotide
  Antisense strand to SEQ ID NO: 1235188
uuaauucugggccugagaa

SEQ ID NO: 1235190 - RNA, 19 nt, Artificial Sequence
  Description of Artificial Sequence: Synthetic oligonucleotide
  Sense strand starting at position 859 of SEQ ID NO: 917458
cagaauuaagucggaggga

SEQ ID NO: 1235191 - RNA, 19 nt, Artificial Sequence
  Description of Artificial Sequence: Synthetic oligonucleotide
  Antisense strand to SEQ ID NO: 1235190
ucccuccgacuuaauucug

SEQ ID NO: 1235192 - RNA, 19 nt, Artificial Sequence
  Description of Artificial Sequence: Synthetic oligonucleotide
  Sense strand starting at position 889 of SEQ ID NO: 917458
gcucaaucccuaggaagca

SEQ ID NO: 1235193 - RNA, 19 nt, Artificial Sequence
  Description of Artificial Sequence: Synthetic oligonucleotide
  Antisense strand to SEQ ID NO: 1235192
ugcuuccuagggauugagc

SEQ ID NO: 1235194 - RNA, 19 nt, Artificial Sequence
  Description of Artificial Sequence: Synthetic oligonucleotide
  Sense strand starting at position 975 of SEQ ID NO: 917458
ggccuucuugcagagaaag

SEQ ID NO: 1235195 - RNA, 19 nt, Artificial Sequence
  Description of Artificial Sequence: Synthetic oligonucleotide
  Antisense strand to SEQ ID NO: 1235194
cuuucucugcaagaaggcc

SEQ ID NO: 1235196 - RNA, 19 nt, Artificial Sequence
  Description of Artificial Sequence: Synthetic oligonucleotide
  Sense strand starting at position 1081 of SEQ ID NO: 917458
ggcggcgagaaugaucaau

SEQ ID NO: 1235197 - RNA, 19 nt, Artificial Sequence
  Description of Artificial Sequence: Synthetic oligonucleotide
  Antisense strand to SEQ ID NO: 1235196
auugaucauucucgccgcc

SEQ ID NO: 1235198 - RNA, 19 nt, Artificial Sequence
  Description of Artificial Sequence: Synthetic oligonucleotide
  Sense strand starting at position 1083 of SEQ ID NO: 917458
cggcgagaaugaucaauag

SEQ ID NO: 1235199 - RNA, 19 nt, Artificial Sequence
  Description of Artificial Sequence: Synthetic oligonucleotide
  Antisense strand to SEQ ID NO: 1235198
cuauugaucauucucgccg

SEQ ID NO: 1235200 - RNA, 19 nt, Artificial Sequence
  Description of Artificial Sequence: Synthetic oligonucleotide
  Sense strand starting at position 1109 of SEQ ID NO: 917458
ccgaaaggacuccgcgaua

SEQ ID NO: 1235201 - RNA, 19 nt, Artificial Sequence
  Description of Artificial Sequence: Synthetic oligonucleotide
  Antisense strand to SEQ ID NO: 1235200
uaucgcggaguccuuucgg

SEQ ID NO: 1235202 - RNA, 19 nt, Artificial Sequence
  Description of Artificial Sequence: Synthetic oligonucleotide
  Sense strand starting at position 1112 of SEQ ID NO: 917458
aaaggacuccgcgauagga

SEQ ID NO: 1235203 - RNA, 19 nt, Artificial Sequence
  Description of Artificial Sequence: Synthetic oligonucleotide
  Antisense strand to SEQ ID NO: 1235202
uccuaucgcggaguccuuu

SEQ ID NO: 1235204 - RNA, 19 nt, Artificial Sequence
  Description of Artificial Sequence: Synthetic oligonucleotide
  Sense strand starting at position 1114 of SEQ ID NO: 917458
aggacuccgcgauaggaau

SEQ ID NO: 1235205 - RNA, 19 nt, Artificial Sequence
  Description of Artificial Sequence: Synthetic oligonucleotide
  Antisense strand to SEQ ID NO: 1235204
auuccuaucgcggaguccu

SEQ ID NO: 1235206 - RNA, 19 nt, Artificial Sequence
  Description of Artificial Sequence: Synthetic oligonucleotide
  Sense strand starting at position 1137 of SEQ ID NO: 917458
cgggaaggauucccuccau

SEQ ID NO: 1235207 - RNA, 19 nt, Artificial Sequence
  Description of Artificial Sequence: Synthetic oligonucleotide
  Antisense strand to SEQ ID NO: 1235206
auggagggaauccuucccg

SEQ ID NO: 1235208 - RNA, 19 nt, Artificial Sequence
  Description of Artificial Sequence: Synthetic oligonucleotide
  Sense strand starting at position 1157 of SEQ ID NO: 917458
cuaacaguccauggguuaa

SEQ ID NO: 1235209 - RNA, 19 nt, Artificial Sequence
  Description of Artificial Sequence: Synthetic oligonucleotide
  Antisense strand to SEQ ID NO: 1235208
uuaacccauggacuguuag

SEQ ID NO: 1235210 - RNA, 19 nt, Artificial Sequence
  Description of Artificial Sequence: Synthetic oligonucleotide
  Sense strand starting at position 1159 of SEQ ID NO: 917458
aacaguccauggguuaaga

SEQ ID NO: 1235211 - RNA, 19 nt, Artificial Sequence
  Description of Artificial Sequence: Synthetic oligonucleotide
  Antisense strand to SEQ ID NO: 1235210
ucuuaacccauggacuguu

SEQ ID NO: 1235212 - RNA, 19 nt, Artificial Sequence
  Description of Artificial Sequence: Synthetic oligonucleotide
  Sense strand starting at position 1170 of SEQ ID NO: 917458
gguuaagaggccgaagcuu

SEQ ID NO: 1235213 - RNA, 19 nt, Artificial Sequence
  Description of Artificial Sequence: Synthetic oligonucleotide
  Antisense strand to SEQ ID NO: 1235212
aagcuucggccucuuaacc

SEQ ID NO: 1235214 - RNA, 19 nt, Artificial Sequence
  Description of Artificial Sequence: Synthetic oligonucleotide
  Sense strand starting at position 1178 of SEQ ID NO: 917458
ggccgaagcuucccuaaau

SEQ ID NO: 1235215 - RNA, 19 nt, Artificial Sequence
  Description of Artificial Sequence: Synthetic oligonucleotide
  Antisense strand to SEQ ID NO: 1235214
auuuagggaagcuucggcc

SEQ ID NO: 1235216 - RNA, 19 nt, Artificial Sequence
  Description of Artificial Sequence: Synthetic oligonucleotide
  Sense strand starting at position 1179 of SEQ ID NO: 917458
gccgaagcuucccuaaaua

SEQ ID NO: 1235217 - RNA, 19 nt, Artificial Sequence
  Description of Artificial Sequence: Synthetic oligonucleotide
  Antisense strand to SEQ ID NO: 1235216
uauuuagggaagcuucggc

SEQ ID NO: 1235218 - RNA, 19 nt, Artificial Sequence
  Description of Artificial Sequence: Synthetic oligonucleotide
  Sense strand starting at position 1969 of SEQ ID NO: 917458
ucucuuucucuccagcgaa

SEQ ID NO: 1235219 - RNA, 19 nt, Artificial Sequence
  Description of Artificial Sequence: Synthetic oligonucleotide
  Antisense strand to SEQ ID NO: 1235218
uucgcuggagagaaagaga

SEQ ID NO: 1235220 - RNA, 19 nt, Artificial Sequence
  Description of Artificial Sequence: Synthetic oligonucleotide
  Sense strand starting at position 2120 of SEQ ID NO: 917458
uugugacuucuguauccag

SEQ ID NO: 1235221 - RNA, 19 nt, Artificial Sequence
  Description of Artificial Sequence: Synthetic oligonucleotide
  Antisense strand to SEQ ID NO: 1235220
cuggauacagaagucacaa

SEQ ID NO: 1235222 - RNA, 19 nt, Artificial Sequence
  Description of Artificial Sequence: Synthetic oligonucleotide
  Sense strand starting at position 2193 of SEQ ID NO: 917458
guguguaaagucuauauca

SEQ ID NO: 1235223 - RNA, 19 nt, Artificial Sequence
  Description of Artificial Sequence: Synthetic oligonucleotide
  Antisense strand to SEQ ID NO: 1235222
ugauauagacuuuacacac

SEQ ID NO: 1235224 - RNA, 19 nt, Artificial Sequence
  Description of Artificial Sequence: Synthetic oligonucleotide
  Sense strand starting at position 2195 of SEQ ID NO: 917458
guguaaagucuauaucacu

SEQ ID NO: 1235225 - RNA, 19 nt, Artificial Sequence
  Description of Artificial Sequence: Synthetic oligonucleotide
  Antisense strand to SEQ ID NO: 1235224
agugauauagacuuuacac

SEQ ID NO: 1235226 - RNA, 19 nt, Artificial Sequence
  Description of Artificial Sequence: Synthetic oligonucleotide
  Sense strand starting at position 2638 of SEQ ID NO: 917458
ucuugaaagcuugaccuca

SEQ ID NO: 1235227 - RNA, 19 nt, Artificial Sequence
  Description of Artificial Sequence: Synthetic oligonucleotide
  Antisense strand to SEQ ID NO: 1235226
ugaggucaagcuuucaaga

SEQ ID NO: 1235228 - RNA, 19 nt, Artificial Sequence
  Description of Artificial Sequence: Synthetic oligonucleotide
  Sense strand starting at position 2751 of SEQ ID NO: 917458
uggccuuaggaccaguuaa

SEQ ID NO: 1235229 - RNA, 19 nt, Artificial Sequence
  Description of Artificial Sequence: Synthetic oligonucleotide
  Antisense strand to SEQ ID NO: 1235228
uuaacugguccuaaggcca

SEQ ID NO: 1235230 - RNA, 19 nt, Artificial Sequence
  Description of Artificial Sequence: Synthetic oligonucleotide
  Sense strand starting at position 2796 of SEQ ID NO: 917458
agcagucagucaucccaaa

SEQ ID NO: 1235231 - RNA, 19 nt, Artificial Sequence
  Description of Artificial Sequence: Synthetic oligonucleotide
  Antisense strand to SEQ ID NO: 1235230
uuugggaugacugacugcu

SEQ ID NO: 1235232 - RNA, 19 nt, Artificial Sequence
  Description of Artificial Sequence: Synthetic oligonucleotide
  Sense strand starting at position 2830 of SEQ ID NO: 917458
ggaauauauuaauacagug

SEQ ID NO: 1235233 - RNA, 19 nt, Artificial Sequence
  Description of Artificial Sequence: Synthetic oligonucleotide
  Antisense strand to SEQ ID NO: 1235232
cacuguauuaauauauucc

SEQ ID NO: 1235234 - RNA, 19 nt, Artificial Sequence
  Description of Artificial Sequence: Synthetic oligonucleotide
  Sense strand starting at position 3144 of SEQ ID NO: 917458
acucauauuuccguuccau

SEQ ID NO: 1235235 - RNA, 19 nt, Artificial Sequence
  Description of Artificial Sequence: Synthetic oligonucleotide
  Antisense strand to SEQ ID NO: 1235234
auggaacggaaauaugagu

SEQ ID NO: 1235236 - RNA, 19 nt, Artificial Sequence
  Description of Artificial Sequence: Synthetic oligonucleotide
  Sense strand starting at position 3165 of SEQ ID NO: 917458
ugugaaauuguaugucaau

SEQ ID NO: 1235237 - RNA, 19 nt, Artificial Sequence
  Description of Artificial Sequence: Synthetic oligonucleotide
  Antisense strand to SEQ ID NO: 1235236
auugacauacaauuucaca

SEQ ID NO: 1235238 - RNA, 19 nt, Artificial Sequence
  Description of Artificial Sequence: Synthetic oligonucleotide
  Sense strand starting at position 3166 of SEQ ID NO: 917458
gugaaauuguaugucaaua

SEQ ID NO: 1235239 - RNA, 19 nt, Artificial Sequence
  Description of Artificial Sequence: Synthetic oligonucleotide
  Antisense strand to SEQ ID NO: 1235238
uauugacauacaauuucac

SEQ ID NO: 1235240 - RNA, 19 nt, Artificial Sequence
  Description of Artificial Sequence: Synthetic oligonucleotide
  Sense strand starting at position 3198 of SEQ ID NO: 917458
gcaaauauuggccaggcuu

SEQ ID NO: 1235241 - RNA, 19 nt, Artificial Sequence
  Description of Artificial Sequence: Synthetic oligonucleotide
  Antisense strand to SEQ ID NO: 1235240
aagccuggccaauauuugc

SEQ ID NO: 1235242 - RNA, 19 nt, Artificial Sequence
  Description of Artificial Sequence: Synthetic oligonucleotide
  Sense strand starting at position 3599 of SEQ ID NO: 917458
cauaaagaugaauguguuu

SEQ ID NO: 1235243 - RNA, 19 nt, Artificial Sequence
  Description of Artificial Sequence: Synthetic oligonucleotide
  Antisense strand to SEQ ID NO: 1235242
aaacacauucaucuuuaug

SEQ ID NO: 1235244 - RNA, 19 nt, Artificial Sequence
  Description of Artificial Sequence: Synthetic oligonucleotide
  Sense strand starting at position 3840 of SEQ ID NO: 917458
auguaauaagugcaagacu

SEQ ID NO: 1235245 - RNA, 19 nt, Artificial Sequence
  Description of Artificial Sequence: Synthetic oligonucleotide
  Antisense strand to SEQ ID NO: 1235244
agucuugcacuuauuacau

SEQ ID NO: 1235246 - RNA, 19 nt, Artificial Sequence
  Description of Artificial Sequence: Synthetic oligonucleotide
  Sense strand starting at position 3858 of SEQ ID NO: 917458
uuguaugcugaagaccaua

SEQ ID NO: 1235247 - RNA, 19 nt, Artificial Sequence
  Description of Artificial Sequence: Synthetic oligonucleotide
  Antisense strand to SEQ ID NO: 1235246
uauggucuucagcauacaa

SEQ ID NO: 1235248 - RNA, 19 nt, Artificial Sequence
  Description of Artificial Sequence: Synthetic oligonucleotide
  Sense strand starting at position 3955 of SEQ ID NO: 917459
ggaagauggcaguacuucu

SEQ ID NO: 1235249 - RNA, 19 nt, Artificial Sequence
  Description of Artificial Sequence: Synthetic oligonucleotide
  Antisense strand to SEQ ID NO: 1235248
agaaguacugccaucuucc

SEQ ID NO: 1235250 - RNA, 19 nt, Artificial Sequence
  Description of Artificial Sequence: Synthetic oligonucleotide
  Sense strand starting at position 199 of SEQ ID NO: 917459
uuaagugucaaucaagugu

SEQ ID NO: 1235251 - RNA, 19 nt, Artificial Sequence
  Description of Artificial Sequence: Synthetic oligonucleotide
  Antisense strand to SEQ ID NO: 1235250
acacuugauugacacuuaa

SEQ ID NO: 1235252 - RNA, 19 nt, Artificial Sequence
  Description of Artificial Sequence: Synthetic oligonucleotide
  Sense strand starting at position 206 of SEQ ID NO: 917459
ucaaucaaguguccugaaa

SEQ ID NO: 1235253 - RNA, 19 nt, Artificial Sequence
  Description of Artificial Sequence: Synthetic oligonucleotide
  Antisense strand to SEQ ID NO: 1235252
uuucaggacacuugauuga

SEQ ID NO: 1235254 - RNA, 19 nt, Artificial Sequence
  Description of Artificial Sequence: Synthetic oligonucleotide
  Sense strand starting at position 498 of SEQ ID NO: 917459
cuagcaauuuaguucgauu

SEQ ID NO: 1235255 - RNA, 19 nt, Artificial Sequence
  Description of Artificial Sequence: Synthetic oligonucleotide
  Antisense strand to SEQ ID NO: 1235254
aaucgaacuaaauugcuag

SEQ ID NO: 1235256 - RNA, 19 nt, Artificial Sequence
  Description of Artificial Sequence: Synthetic oligonucleotide
  Sense strand starting at position 702 of SEQ ID NO: 917459
cauucuagcuucuuaggga

SEQ ID NO: 1235257 - RNA, 19 nt, Artificial Sequence
  Description of Artificial Sequence: Synthetic oligonucleotide
  Antisense strand to SEQ ID NO: 1235256
ucccuaagaagcuagaaug

SEQ ID NO: 1235258 - RNA, 19 nt, Artificial Sequence
  Description of Artificial Sequence: Synthetic oligonucleotide
  Sense strand starting at position 820 of SEQ ID NO: 917459
ccaaauuaagucuacgauu

SEQ ID NO: 1235259 - RNA, 19 nt, Artificial Sequence
  Description of Artificial Sequence: Synthetic oligonucleotide
  Antisense strand to SEQ ID NO: 1235258
aaucguagacuuaauuugg

SEQ ID NO: 1235260 - RNA, 19 nt, Artificial Sequence
  Description of Artificial Sequence: Synthetic oligonucleotide
  Sense strand starting at position 977 of SEQ ID NO: 917459
gaacgcaaauucguuaaau

SEQ ID NO: 1235261 - RNA, 19 nt, Artificial Sequence
  Description of Artificial Sequence: Synthetic oligonucleotide
  Antisense strand to SEQ ID NO: 1235260
auuuaacgaauuugcguuc

SEQ ID NO: 1235262 - RNA, 19 nt, Artificial Sequence
  Description of Artificial Sequence: Synthetic oligonucleotide
  Sense strand starting at position 979 of SEQ ID NO: 917459
acgcaaauucguuaaauua

SEQ ID NO: 1235263 - RNA, 19 nt, Artificial Sequence
  Description of Artificial Sequence: Synthetic oligonucleotide
  Antisense strand to SEQ ID NO: 1235262
uaauuuaacgaauuugcgu

SEQ ID NO: 1235264 - RNA, 19 nt, Artificial Sequence
  Description of Artificial Sequence: Synthetic oligonucleotide
  Sense strand starting at position 1018 of SEQ ID NO: 917459
cgaggauccucgguggacu

SEQ ID NO: 1235265 - RNA, 19 nt, Artificial Sequence
  Description of Artificial Sequence: Synthetic oligonucleotide
  Antisense strand to SEQ ID NO: 1235264
aguccaccgaggauccucg

SEQ ID NO: 1235266 - RNA, 19 nt, Artificial Sequence
  Description of Artificial Sequence: Synthetic oligonucleotide
  Sense strand starting at position 1019 of SEQ ID NO: 917459
gaggauccucgguggacua

SEQ ID NO: 1235267 - RNA, 19 nt, Artificial Sequence
  Description of Artificial Sequence: Synthetic oligonucleotide
  Antisense strand to SEQ ID NO: 1235266
uaguccaccgaggauccuc

SEQ ID NO: 1235268 - RNA, 19 nt, Artificial Sequence
  Description of Artificial Sequence: Synthetic oligonucleotide
  Sense strand starting at position 1040 of SEQ ID NO: 917459
agcgcacuuccuuacaauu

SEQ ID NO: 1235269 - RNA, 19 nt, Artificial Sequence
  Description of Artificial Sequence: Synthetic oligonucleotide
  Antisense strand to SEQ ID NO: 1235268
aauuguaaggaagugcgcu

SEQ ID NO: 1235270 - RNA, 19 nt, Artificial Sequence
  Description of Artificial Sequence: Synthetic oligonucleotide
  Sense strand starting at position 1116 of SEQ ID NO: 917459
ugcgcauuccaagagaaac

SEQ ID NO: 1235271 - RNA, 19 nt, Artificial Sequence
  Description of Artificial Sequence: Synthetic oligonucleotide
  Antisense strand to SEQ ID NO: 1235270
guuucucuuggaaugcgca

SEQ ID NO: 1235272 - RNA, 19 nt, Artificial Sequence
  Description of Artificial Sequence: Synthetic oligonucleotide
  Sense strand starting at position 1137 of SEQ ID NO: 917459
uucucaggcccagaauuaa

SEQ ID NO: 1235273 - RNA, 19 nt, Artificial Sequence
  Description of Artificial Sequence: Synthetic oligonucleotide
  Antisense strand to SEQ ID NO: 1235272
uuaauucugggccugagaa

SEQ ID NO: 1235274 - RNA, 19 nt, Artificial Sequence
  Description of Artificial Sequence: Synthetic oligonucleotide
  Sense strand starting at position 1147 of SEQ ID NO: 917459
cagaauuaagucggaggga

SEQ ID NO: 1235275 - RNA, 19 nt, Artificial Sequence
  Description of Artificial Sequence: Synthetic oligonucleotide
  Antisense strand to SEQ ID NO: 1235274
ucccuccgacuuaauucug

SEQ ID NO: 1235276 - RNA, 19 nt, Artificial Sequence
  Description of Artificial Sequence: Synthetic oligonucleotide
  Sense strand starting at position 1177 of SEQ ID NO: 917459
gcucaaucccuaggaagca

SEQ ID NO: 1235277 - RNA, 19 nt, Artificial Sequence
  Description of Artificial Sequence: Synthetic oligonucleotide
  Antisense strand to SEQ ID NO: 1235276
ugcuuccuagggauugagc

SEQ ID NO: 1235278 - RNA, 19 nt, Artificial Sequence
  Description of Artificial Sequence: Synthetic oligonucleotide
  Sense strand starting at position 1199 of SEQ ID NO: 917459
aagaauguauuguaaagag

SEQ ID NO: 1235279 - RNA, 19 nt, Artificial Sequence
  Description of Artificial Sequence: Synthetic oligonucleotide
  Antisense strand to SEQ ID NO: 1235278
cucuuuacaauacauucuu

SEQ ID NO: 1235280 - RNA, 19 nt, Artificial Sequence
  Description of Artificial Sequence: Synthetic oligonucleotide
  Sense strand starting at position 1263 of SEQ ID NO: 917459
ggccuucuugcagagaaag

SEQ ID NO: 1235281 - RNA, 19 nt, Artificial Sequence
  Description of Artificial Sequence: Synthetic oligonucleotide
  Antisense strand to SEQ ID NO: 1235280
cuuucucugcaagaaggcc

SEQ ID NO: 1235282 - RNA, 19 nt, Artificial Sequence
  Description of Artificial Sequence: Synthetic oligonucleotide
  Sense strand starting at position 1369 of SEQ ID NO: 917459
ggcggcgagaaugaucaau

SEQ ID NO: 1235283 - RNA, 19 nt, Artificial Sequence
  Description of Artificial Sequence: Synthetic oligonucleotide
  Antisense strand to SEQ ID NO: 1235282
auugaucauucucgccgcc

SEQ ID NO: 1235284 - RNA, 19 nt, Artificial Sequence
  Description of Artificial Sequence: Synthetic oligonucleotide
  Sense strand starting at position 1371 of SEQ ID NO: 917459
cggcgagaaugaucaauag

SEQ ID NO: 1235285 - RNA, 19 nt, Artificial Sequence
  Description of Artificial Sequence: Synthetic oligonucleotide
  Antisense strand to SEQ ID NO: 1235284
cuauugaucauucucgccg

SEQ ID NO: 1235286 - RNA, 19 nt, Artificial Sequence
  Description of Artificial Sequence: Synthetic oligonucleotide
  Sense strand starting at position 1397 of SEQ ID NO: 917459
ccgaaaggacuccgcgaua

SEQ ID NO: 1235287 - RNA, 19 nt, Artificial Sequence
  Description of Artificial Sequence: Synthetic oligonucleotide
  Antisense strand to SEQ ID NO: 1235286
uaucgcggaguccuuucgg

SEQ ID NO: 1235288 - RNA, 19 nt, Artificial Sequence
  Description of Artificial Sequence: Synthetic oligonucleotide
  Sense strand starting at position 1400 of SEQ ID NO: 917459
aaaggacuccgcgauagga

SEQ ID NO: 1235289 - RNA, 19 nt, Artificial Sequence
  Description of Artificial Sequence: Synthetic oligonucleotide
  Antisense strand to SEQ ID NO: 1235288
uccuaucgcggaguccuuu

SEQ ID NO: 1235290 - RNA, 19 nt, Artificial Sequence
  Description of Artificial Sequence: Synthetic oligonucleotide
  Sense strand starting at position 1402 of SEQ ID NO: 917459
aggacuccgcgauaggaau

SEQ ID NO: 1235291 - RNA, 19 nt, Artificial Sequence
  Description of Artificial Sequence: Synthetic oligonucleotide
  Antisense strand to SEQ ID NO: 1235290
auuccuaucgcggaguccu

SEQ ID NO: 1235292 - RNA, 19 nt, Artificial Sequence
  Description of Artificial Sequence: Synthetic oligonucleotide
  Sense strand starting at position 1425 of SEQ ID NO: 917459
cgggaaggauucccuccau

SEQ ID NO: 1235293 - RNA, 19 nt, Artificial Sequence
  Description of Artificial Sequence: Synthetic oligonucleotide
  Antisense strand to SEQ ID NO: 1235292
auggagggaauccuucccg

SEQ ID NO: 1235294 - RNA, 19 nt, Artificial Sequence
  Description of Artificial Sequence: Synthetic oligonucleotide
  Sense strand starting at position 1445 of SEQ ID NO: 917459
cuaacaguccauggguuaa

SEQ ID NO: 1235295 - RNA, 19 nt, Artificial Sequence
  Description of Artificial Sequence: Synthetic oligonucleotide
  Antisense strand to SEQ ID NO: 1235294
uuaacccauggacuguuag

SEQ ID NO: 1235296 - RNA, 19 nt, Artificial Sequence
  Description of Artificial Sequence: Synthetic oligonucleotide
  Sense strand starting at position 1447 of SEQ ID NO: 917459
aacaguccauggguuaaga

SEQ ID NO: 1235297 - RNA, 19 nt, Artificial Sequence
  Description of Artificial Sequence: Synthetic oligonucleotide
  Antisense strand to SEQ ID NO: 1235296
ucuuaacccauggacuguu

SEQ ID NO: 1235298 - RNA, 19 nt, Artificial Sequence
  Description of Artificial Sequence: Synthetic oligonucleotide
  Sense strand starting at position 1458 of SEQ ID NO: 917459
gguuaagaggccgaagcuu

SEQ ID NO: 1235299 - RNA, 19 nt, Artificial Sequence
  Description of Artificial Sequence: Synthetic oligonucleotide
  Antisense strand to SEQ ID NO: 1235298
aagcuucggccucuuaacc

SEQ ID NO: 1235300 - RNA, 19 nt, Artificial Sequence
  Description of Artificial Sequence: Synthetic oligonucleotide
  Sense strand starting at position 1466 of SEQ ID NO: 917459
ggccgaagcuucccuaaau

SEQ ID NO: 1235301 - RNA, 19 nt, Artificial Sequence
  Description of Artificial Sequence: Synthetic oligonucleotide
  Antisense strand to SEQ ID NO: 1235300
auuuagggaagcuucggcc

SEQ ID NO: 1235302 - RNA, 19 nt, Artificial Sequence
  Description of Artificial Sequence: Synthetic oligonucleotide
  Sense strand starting at position 1467 of SEQ ID NO: 917459
gccgaagcuucccuaaaua

SEQ ID NO: 1235303 - RNA, 19 nt, Artificial Sequence
  Description of Artificial Sequence: Synthetic oligonucleotide
  Antisense strand to SEQ ID NO: 1235302
uauuuagggaagcuucggc

SEQ ID NO: 1235304 - RNA, 19 nt, Artificial Sequence
  Description of Artificial Sequence: Synthetic oligonucleotide
  Sense strand starting at position 2257 of SEQ ID NO: 917459
ucucuuucucuccagcgaa

SEQ ID NO: 1235305 - RNA, 19 nt, Artificial Sequence
  Description of Artificial Sequence: Synthetic oligonucleotide
  Antisense strand to SEQ ID NO: 1235304
uucgcuggagagaaagaga

SEQ ID NO: 1235306 - RNA, 19 nt, Artificial Sequence
  Description of Artificial Sequence: Synthetic oligonucleotide
  Sense strand starting at position 2408 of SEQ ID NO: 917459
uugugacuucuguauccag

SEQ ID NO: 1235307 - RNA, 19 nt, Artificial Sequence
  Description of Artificial Sequence: Synthetic oligonucleotide
  Antisense strand to SEQ ID NO: 1235306
cuggauacagaagucacaa

SEQ ID NO: 1235308 - RNA, 19 nt, Artificial Sequence
  Description of Artificial Sequence: Synthetic oligonucleotide
  Sense strand starting at position 2481 of SEQ ID NO: 917459
guguguaaagucuauauca

SEQ ID NO: 1235309 - RNA, 19 nt, Artificial Sequence
  Description of Artificial Sequence: Synthetic oligonucleotide
  Antisense strand to SEQ ID NO: 1235308
ugauauagacuuuacacac

SEQ ID NO: 1235310 - RNA, 19 nt, Artificial Sequence
  Description of Artificial Sequence: Synthetic oligonucleotide
  Sense strand starting at position 2483 of SEQ ID NO: 917459
guguaaagucuauaucacu

SEQ ID NO: 1235311 - RNA, 19 nt, Artificial Sequence
  Description of Artificial Sequence: Synthetic oligonucleotide
  Antisense strand to SEQ ID NO: 1235310
agugauauagacuuuacac

SEQ ID NO: 1235312 - RNA, 19 nt, Artificial Sequence
  Description of Artificial Sequence: Synthetic oligonucleotide
  Sense strand starting at position 2926 of SEQ ID NO: 917459
ucuugaaagcuugaccuca

SEQ ID NO: 1235313 - RNA, 19 nt, Artificial Sequence
  Description of Artificial Sequence: Synthetic oligonucleotide
  Antisense strand to SEQ ID NO: 1235312
ugaggucaagcuuucaaga

SEQ ID NO: 1235314 - RNA, 19 nt, Artificial Sequence
  Description of Artificial Sequence: Synthetic oligonucleotide
  Sense strand starting at position 3039 of SEQ ID NO: 917459
uggccuuaggaccaguuaa

SEQ ID NO: 1235315 - RNA, 19 nt, Artificial Sequence
  Description of Artificial Sequence: Synthetic oligonucleotide
  Antisense strand to SEQ ID NO: 1235314
uuaacugguccuaaggcca

SEQ ID NO: 1235316 - RNA, 19 nt, Artificial Sequence
  Description of Artificial Sequence: Synthetic oligonucleotide
  Sense strand starting at position 3084 of SEQ ID NO: 917459
agcagucagucaucccaaa

SEQ ID NO: 1235317 - RNA, 19 nt, Artificial Sequence
  Description of Artificial Sequence: Synthetic oligonucleotide
  Antisense strand to SEQ ID NO: 1235316
uuugggaugacugacugcu

SEQ ID NO: 1235318 - RNA, 19 nt, Artificial Sequence
  Description of Artificial Sequence: Synthetic oligonucleotide
  Sense strand starting at position 3118 of SEQ ID NO: 917459
ggaauauauuaauacagug

SEQ ID NO: 1235319 - RNA, 19 nt, Artificial Sequence
  Description of Artificial Sequence: Synthetic oligonucleotide
  Antisense strand to SEQ ID NO: 1235318
cacuguauuaauauauucc

SEQ ID NO: 1235320 - RNA, 19 nt, Artificial Sequence
  Description of Artificial Sequence: Synthetic oligonucleotide
  Sense strand starting at position 3432 of SEQ ID NO: 917459
acucauauuuccguuccau

SEQ ID NO: 1235321 - RNA, 19 nt, Artificial Sequence
  Description of Artificial Sequence: Synthetic oligonucleotide
  Antisense strand to SEQ ID NO: 1235320
auggaacggaaauaugagu

SEQ ID NO: 1235322 - RNA, 19 nt, Artificial Sequence
  Description of Artificial Sequence: Synthetic oligonucleotide
  Sense strand starting at position 3453 of SEQ ID NO: 917459
ugugaaauuguaugucaau

SEQ ID NO: 1235323 - RNA, 19 nt, Artificial Sequence
  Description of Artificial Sequence: Synthetic oligonucleotide
  Antisense strand to SEQ ID NO: 1235322
auugacauacaauuucaca

SEQ ID NO: 1235324 - RNA, 19 nt, Artificial Sequence
  Description of Artificial Sequence: Synthetic oligonucleotide
  Sense strand starting at position 3454 of SEQ ID NO: 917459
gugaaauuguaugucaaua

SEQ ID NO: 1235325 - RNA, 19 nt, Artificial Sequence
  Description of Artificial Sequence: Synthetic oligonucleotide
  Antisense strand to SEQ ID NO: 1235324
uauugacauacaauuucac

SEQ ID NO: 1235326 - RNA, 19 nt, Artificial Sequence
  Description of Artificial Sequence: Synthetic oligonucleotide
  Sense strand starting at position 3486 of SEQ ID NO: 917459
gcaaauauuggccaggcuu

SEQ ID NO: 1235327 - RNA, 19 nt, Artificial Sequence
  Description of Artificial Sequence: Synthetic oligonucleotide
  Antisense strand to SEQ ID NO: 1235326
aagccuggccaauauuugc

SEQ ID NO: 1235328 - RNA, 19 nt, Artificial Sequence
  Description of Artificial Sequence: Synthetic oligonucleotide
  Sense strand starting at position 3887 of SEQ ID NO: 917459
cauaaagaugaauguguuu

SEQ ID NO: 1235329 - RNA, 19 nt, Artificial Sequence
  Description of Artificial Sequence: Synthetic oligonucleotide
  Antisense strand to SEQ ID NO: 1235328
aaacacauucaucuuuaug

SEQ ID NO: 1235330 - RNA, 19 nt, Artificial Sequence
  Description of Artificial Sequence: Synthetic oligonucleotide
  Sense strand starting at position 3887 of SEQ ID NO: 917460
cauaaagaugaauguguuu

SEQ ID NO: 1235331 - RNA, 19 nt, Artificial Sequence
  Description of Artificial Sequence: Synthetic oligonucleotide
  Antisense strand to SEQ ID NO: 1235330
aaacacauucaucuuuaug

SEQ ID NO: 1235332 - RNA, 19 nt, Artificial Sequence
  Description of Artificial Sequence: Synthetic oligonucleotide
  Sense strand starting at position 380 of SEQ ID NO: 917460
gggcauugccuguaaucug

SEQ ID NO: 1235333 - RNA, 19 nt, Artificial Sequence
  Description of Artificial Sequence: Synthetic oligonucleotide
  Antisense strand to SEQ ID NO: 1235332
cagauuacaggcaaugccc

SEQ ID NO: 1235334 - RNA, 19 nt, Artificial Sequence
  Description of Artificial Sequence: Synthetic oligonucleotide
  Sense strand starting at position 542 of SEQ ID NO: 917460
uguaaacuuucggugcaga

SEQ ID NO: 1235335 - RNA, 19 nt, Artificial Sequence
  Description of Artificial Sequence: Synthetic oligonucleotide
  Antisense strand to SEQ ID NO: 1235334
ucugcaccgaaaguuuaca

SEQ ID NO: 1235336 - RNA, 19 nt, Artificial Sequence
  Description of Artificial Sequence: Synthetic oligonucleotide
  Sense strand starting at position 555 of SEQ ID NO: 917460
ugcagauuugcuugcaguc

SEQ ID NO: 1235337 - RNA, 19 nt, Artificial Sequence
  Description of Artificial Sequence: Synthetic oligonucleotide
  Antisense strand to SEQ ID NO: 1235336
gacugcaagcaaaucugca

SEQ ID NO: 1235338 - RNA, 19 nt, Artificial Sequence
  Description of Artificial Sequence: Synthetic oligonucleotide
  Sense strand starting at position 624 of SEQ ID NO: 917460
gugauuucugccgauccga

SEQ ID NO: 1235339 - RNA, 19 nt, Artificial Sequence
  Description of Artificial Sequence: Synthetic oligonucleotide
  Antisense strand to SEQ ID NO: 1235338
ucggaucggcagaaaucac

SEQ ID NO: 1235340 - RNA, 19 nt, Artificial Sequence
  Description of Artificial Sequence: Synthetic oligonucleotide
  Sense strand starting at position 736 of SEQ ID NO: 917460
cauuaagaacaguguguga

SEQ ID NO: 1235341 - RNA, 19 nt, Artificial Sequence
  Description of Artificial Sequence: Synthetic oligonucleotide
  Antisense strand to SEQ ID NO: 1235340
ucacacacuguucuuaaug

SEQ ID NO: 1235342 - RNA, 19 nt, Artificial Sequence
  Description of Artificial Sequence: Synthetic oligonucleotide
  Sense strand starting at position 738 of SEQ ID NO: 917460
uuaagaacagugugugauc

SEQ ID NO: 1235343 - RNA, 19 nt, Artificial Sequence
  Description of Artificial Sequence: Synthetic oligonucleotide
  Antisense strand to SEQ ID NO: 1235342
gaucacacacuguucuuaa

SEQ ID NO: 1235344 - RNA, 19 nt, Artificial Sequence
  Description of Artificial Sequence: Synthetic oligonucleotide
  Sense strand starting at position 743 of SEQ ID NO: 917460
aacagugugugaucagacu

SEQ ID NO: 1235345 - RNA, 19 nt, Artificial Sequence
  Description of Artificial Sequence: Synthetic oligonucleotide
  Antisense strand to SEQ ID NO: 1235344
agucugaucacacacuguu

SEQ ID NO: 1235346 - RNA, 19 nt, Artificial Sequence
  Description of Artificial Sequence: Synthetic oligonucleotide
  Sense strand starting at position 749 of SEQ ID NO: 917460
gugugaucagacugaggau

SEQ ID NO: 1235347 - RNA, 19 nt, Artificial Sequence
  Description of Artificial Sequence: Synthetic oligonucleotide
  Antisense strand to SEQ ID NO: 1235346
auccucagucugaucacac

SEQ ID NO: 1235348 - RNA, 19 nt, Artificial Sequence
  Description of Artificial Sequence: Synthetic oligonucleotide
  Sense strand starting at position 1670 of SEQ ID NO: 917460
ccgugaucgcggcuuugca

SEQ ID NO: 1235349 - RNA, 19 nt, Artificial Sequence
  Description of Artificial Sequence: Synthetic oligonucleotide
  Antisense strand to SEQ ID NO: 1235348
ugcaaagccgcgaucacgg

SEQ ID NO: 1235350 - RNA, 19 nt, Artificial Sequence
  Description of Artificial Sequence: Synthetic oligonucleotide
  Sense strand starting at position 1717 of SEQ ID NO: 917460
uucugcgaugugcaaauaa

SEQ ID NO: 1235351 - RNA, 19 nt, Artificial Sequence
  Description of Artificial Sequence: Synthetic oligonucleotide
  Antisense strand to SEQ ID NO: 1235350
uuauuugcacaucgcagaa

SEQ ID NO: 1235352 - RNA, 19 nt, Artificial Sequence
  Description of Artificial Sequence: Synthetic oligonucleotide
  Sense strand starting at position 1795 of SEQ ID NO: 917460
cgagcaaucggcgggagaa

SEQ ID NO: 1235353 - RNA, 19 nt, Artificial Sequence
  Description of Artificial Sequence: Synthetic oligonucleotide
  Antisense strand to SEQ ID NO: 1235352
uucucccgccgauugcucg

SEQ ID NO: 1235354 - RNA, 19 nt, Artificial Sequence
  Description of Artificial Sequence: Synthetic oligonucleotide
  Sense strand starting at position 1796 of SEQ ID NO: 917460
gagcaaucggcgggagaaa

SEQ ID NO: 1235355 - RNA, 19 nt, Artificial Sequence
  Description of Artificial Sequence: Synthetic oligonucleotide
  Antisense strand to SEQ ID NO: 1235354
uuucucccgccgauugcuc

SEQ ID NO: 1235356 - RNA, 19 nt, Artificial Sequence
  Description of Artificial Sequence: Synthetic oligonucleotide
  Sense strand starting at position 1897 of SEQ ID NO: 917460
cgcggaguauuuccucuuu

SEQ ID NO: 1235357 - RNA, 19 nt, Artificial Sequence
  Description of Artificial Sequence: Synthetic oligonucleotide
  Antisense strand to SEQ ID NO: 1235356
aaagaggaaauacuccgcg

SEQ ID NO: 1235358 - RNA, 19 nt, Artificial Sequence
  Description of Artificial Sequence: Synthetic oligonucleotide
  Sense strand starting at position 2350 of SEQ ID NO: 917460
gcaguaaauggcgucaugu

SEQ ID NO: 1235359 - RNA, 19 nt, Artificial Sequence
  Description of Artificial Sequence: Synthetic oligonucleotide
  Antisense strand to SEQ ID NO: 1235358
acaugacgccauuuacugc

SEQ ID NO: 1235360 - RNA, 19 nt, Artificial Sequence
  Description of Artificial Sequence: Synthetic oligonucleotide
  Sense strand starting at position 2391 of SEQ ID NO: 917460
guuguugucccagaggaua

SEQ ID NO: 1235361 - RNA, 19 nt, Artificial Sequence
  Description of Artificial Sequence: Synthetic oligonucleotide
  Antisense strand to SEQ ID NO: 1235360
uauccucugggacaacaac

SEQ ID NO: 1235362 - RNA, 19 nt, Artificial Sequence
  Description of Artificial Sequence: Synthetic oligonucleotide
  Sense strand starting at position 2393 of SEQ ID NO: 917460
uguugucccagaggauaua

SEQ ID NO: 1235363 - RNA, 19 nt, Artificial Sequence
  Description of Artificial Sequence: Synthetic oligonucleotide
  Antisense strand to SEQ ID NO: 1235362
uauauccucugggacaaca

SEQ ID NO: 1235364 - RNA, 19 nt, Artificial Sequence
  Description of Artificial Sequence: Synthetic oligonucleotide
  Sense strand starting at position 2394 of SEQ ID NO: 917460
guugucccagaggauauau

SEQ ID NO: 1235365 - RNA, 19 nt, Artificial Sequence
  Description of Artificial Sequence: Synthetic oligonucleotide
  Antisense strand to SEQ ID NO: 1235364
auauauccucugggacaac

SEQ ID NO: 1235366 - RNA, 19 nt, Artificial Sequence
  Description of Artificial Sequence: Synthetic oligonucleotide
  Sense strand starting at position 2596 of SEQ ID NO: 917460
agggucaguuuaucuaguu

SEQ ID NO: 1235367 - RNA, 19 nt, Artificial Sequence
  Description of Artificial Sequence: Synthetic oligonucleotide
  Antisense strand to SEQ ID NO: 1235366
aacuagauaaacugacccu

SEQ ID NO: 1235368 - RNA, 19 nt, Artificial Sequence
  Description of Artificial Sequence: Synthetic oligonucleotide
  Sense strand starting at position 2597 of SEQ ID NO: 917460
gggucaguuuaucuaguuu

SEQ ID NO: 1235369 - RNA, 19 nt, Artificial Sequence
  Description of Artificial Sequence: Synthetic oligonucleotide
  Antisense strand to SEQ ID NO: 1235368
aaacuagauaaacugaccc

SEQ ID NO: 1235370 - RNA, 19 nt, Artificial Sequence
  Description of Artificial Sequence: Synthetic oligonucleotide
  Sense strand starting at position 2634 of SEQ ID NO: 917460
aagguuugcccagaggcaa

SEQ ID NO: 1235371 - RNA, 19 nt, Artificial Sequence
  Description of Artificial Sequence: Synthetic oligonucleotide
  Antisense strand to SEQ ID NO: 1235370
uugccucugggcaaaccuu

SEQ ID NO: 1235372 - RNA, 19 nt, Artificial Sequence
  Description of Artificial Sequence: Synthetic oligonucleotide
  Sense strand starting at position 2665 of SEQ ID NO: 917460
agaggcucgagcugacuua

SEQ ID NO: 1235373 - RNA, 19 nt, Artificial Sequence
  Description of Artificial Sequence: Synthetic oligonucleotide
  Antisense strand to SEQ ID NO: 1235372
uaagucagcucgagccucu

SEQ ID NO: 1235374 - RNA, 19 nt, Artificial Sequence
  Description of Artificial Sequence: Synthetic oligonucleotide
  Sense strand starting at position 2908 of SEQ ID NO: 917460
gggcuauugguuuauucuu

SEQ ID NO: 1235375 - RNA, 19 nt, Artificial Sequence
  Description of Artificial Sequence: Synthetic oligonucleotide
  Antisense strand to SEQ ID NO: 1235374
aagaauaaaccaauagccc

SEQ ID NO: 1235376 - RNA, 19 nt, Artificial Sequence
  Description of Artificial Sequence: Synthetic oligonucleotide
  Sense strand starting at position 2914 of SEQ ID NO: 917460
uugguuuauucuuugucua

SEQ ID NO: 1235377 - RNA, 19 nt, Artificial Sequence
  Description of Artificial Sequence: Synthetic oligonucleotide
  Antisense strand to SEQ ID NO: 1235376
uagacaaagaauaaaccaa

SEQ ID NO: 1235378 - RNA, 19 nt, Artificial Sequence
  Description of Artificial Sequence: Synthetic oligonucleotide
  Sense strand starting at position 2915 of SEQ ID NO: 917460
ugguuuauucuuugucuac

SEQ ID NO: 1235379 - RNA, 19 nt, Artificial Sequence
  Description of Artificial Sequence: Synthetic oligonucleotide
  Antisense strand to SEQ ID NO: 1235378
guagacaaagaauaaacca

SEQ ID NO: 1235380 - RNA, 19 nt, Artificial Sequence
  Description of Artificial Sequence: Synthetic oligonucleotide
  Sense strand starting at position 2916 of SEQ ID NO: 917460
gguuuauucuuugucuacu

SEQ ID NO: 1235381 - RNA, 19 nt, Artificial Sequence
  Description of Artificial Sequence: Synthetic oligonucleotide
  Antisense strand to SEQ ID NO: 1235380
aguagacaaagaauaaacc

SEQ ID NO: 1235382 - RNA, 19 nt, Artificial Sequence
  Description of Artificial Sequence: Synthetic oligonucleotide
  Sense strand starting at position 2924 of SEQ ID NO: 917460
cuuugucuacuggauuaac

SEQ ID NO: 1235383 - RNA, 19 nt, Artificial Sequence
  Description of Artificial Sequence: Synthetic oligonucleotide
  Antisense strand to SEQ ID NO: 1235382
guuaauccaguagacaaag

SEQ ID NO: 1235384 - RNA, 19 nt, Artificial Sequence
  Description of Artificial Sequence: Synthetic oligonucleotide
  Sense strand starting at position 2988 of SEQ ID NO: 917460
gagccuuguacgggaggaa

SEQ ID NO: 1235385 - RNA, 19 nt, Artificial Sequence
  Description of Artificial Sequence: Synthetic oligonucleotide
  Antisense strand to SEQ ID NO: 1235384
uuccucccguacaaggcuc

SEQ ID NO: 1235386 - RNA, 19 nt, Artificial Sequence
  Description of Artificial Sequence: Synthetic oligonucleotide
  Sense strand starting at position 3058 of SEQ ID NO: 917460
uuugauugugucgacuugu

SEQ ID NO: 1235387 - RNA, 19 nt, Artificial Sequence
  Description of Artificial Sequence: Synthetic oligonucleotide
  Antisense strand to SEQ ID NO: 1235386
acaagucgacacaaucaaa

SEQ ID NO: 1235388 - RNA, 19 nt, Artificial Sequence
  Description of Artificial Sequence: Synthetic oligonucleotide
  Sense strand starting at position 3063 of SEQ ID NO: 917460
uugugucgacuuguaguuu

SEQ ID NO: 1235389 - RNA, 19 nt, Artificial Sequence
  Description of Artificial Sequence: Synthetic oligonucleotide
  Antisense strand to SEQ ID NO: 1235388
aaacuacaagucgacacaa

SEQ ID NO: 1235390 - RNA, 19 nt, Artificial Sequence
  Description of Artificial Sequence: Synthetic oligonucleotide
  Sense strand starting at position 3137 of SEQ ID NO: 917460
ugaagagcuuccuuacuau

SEQ ID NO: 1235391 - RNA, 19 nt, Artificial Sequence
  Description of Artificial Sequence: Synthetic oligonucleotide
  Antisense strand to SEQ ID NO: 1235390
auaguaaggaagcucuuca

SEQ ID NO: 1235392 - RNA, 19 nt, Artificial Sequence
  Description of Artificial Sequence: Synthetic oligonucleotide
  Sense strand starting at position 3171 of SEQ ID NO: 917460
agcuaaagucuacagucua

SEQ ID NO: 1235393 - RNA, 19 nt, Artificial Sequence
  Description of Artificial Sequence: Synthetic oligonucleotide
  Antisense strand to SEQ ID NO: 1235392
uagacuguagacuuuagcu

SEQ ID NO: 1235394 - RNA, 19 nt, Artificial Sequence
  Description of Artificial Sequence: Synthetic oligonucleotide
  Sense strand starting at position 3224 of SEQ ID NO: 917460
aagauuacucagggcgaca

SEQ ID NO: 1235395 - RNA, 19 nt, Artificial Sequence
  Description of Artificial Sequence: Synthetic oligonucleotide
  Antisense strand to SEQ ID NO: 1235394
ugucgcccugaguaaucuu

SEQ ID NO: 1235396 - RNA, 19 nt, Artificial Sequence
  Description of Artificial Sequence: Synthetic oligonucleotide
  Sense strand starting at position 3440 of SEQ ID NO: 917460
auacauaugcacuguccua

SEQ ID NO: 1235397 - RNA, 19 nt, Artificial Sequence
  Description of Artificial Sequence: Synthetic oligonucleotide
  Antisense strand to SEQ ID NO: 1235396
uaggacagugcauauguau

SEQ ID NO: 1235398 - RNA, 19 nt, Artificial Sequence
  Description of Artificial Sequence: Synthetic oligonucleotide
  Sense strand starting at position 3544 of SEQ ID NO: 917460
gcauucugucgagcgacuu

SEQ ID NO: 1235399 - RNA, 19 nt, Artificial Sequence
  Description of Artificial Sequence: Synthetic oligonucleotide
  Antisense strand to SEQ ID NO: 1235398
aagucgcucgacagaaugc

SEQ ID NO: 1235400 - RNA, 19 nt, Artificial Sequence
  Description of Artificial Sequence: Synthetic oligonucleotide
  Sense strand starting at position 3550 of SEQ ID NO: 917460
ugucgagcgacuuacagaa

SEQ ID NO: 1235401 - RNA, 19 nt, Artificial Sequence
  Description of Artificial Sequence: Synthetic oligonucleotide
  Antisense strand to SEQ ID NO: 1235400
uucuguaagucgcucgaca

SEQ ID NO: 1235402 - RNA, 19 nt, Artificial Sequence
  Description of Artificial Sequence: Synthetic oligonucleotide
  Sense strand starting at position 3573 of SEQ ID NO: 917460
uuuacuuuacagggaagua

SEQ ID NO: 1235403 - RNA, 19 nt, Artificial Sequence
  Description of Artificial Sequence: Synthetic oligonucleotide
  Antisense strand to SEQ ID NO: 1235402
uacuucccuguaaaguaaa

SEQ ID NO: 1235404 - RNA, 19 nt, Artificial Sequence
  Description of Artificial Sequence: Synthetic oligonucleotide
  Sense strand starting at position 3742 of SEQ ID NO: 917460
cugagcuccugcucuagaa

SEQ ID NO: 1235405 - RNA, 19 nt, Artificial Sequence
  Description of Artificial Sequence: Synthetic oligonucleotide
  Antisense strand to SEQ ID NO: 1235404
uucuagagcaggagcucag

SEQ ID NO: 1235406 - RNA, 19 nt, Artificial Sequence
  Description of Artificial Sequence: Synthetic oligonucleotide
  Sense strand starting at position 3744 of SEQ ID NO: 917460
gagcuccugcucuagaaug

SEQ ID NO: 1235407 - RNA, 19 nt, Artificial Sequence
  Description of Artificial Sequence: Synthetic oligonucleotide
  Antisense strand to SEQ ID NO: 1235406
cauucuagagcaggagcuc

SEQ ID NO: 1235408 - RNA, 19 nt, Artificial Sequence
  Description of Artificial Sequence: Synthetic oligonucleotide
  Sense strand starting at position 3797 of SEQ ID NO: 917460
cccugacuucuccauguuu

SEQ ID NO: 1235409 - RNA, 19 nt, Artificial Sequence
  Description of Artificial Sequence: Synthetic oligonucleotide
  Antisense strand to SEQ ID NO: 1235408
aaacauggagaagucaggg

SEQ ID NO: 1235410 - RNA, 19 nt, Artificial Sequence
  Description of Artificial Sequence: Synthetic oligonucleotide
  Sense strand starting at position 3826 of SEQ ID NO: 917461
cuccucuuucucuagggau

SEQ ID NO: 1235411 - RNA, 19 nt, Artificial Sequence
  Description of Artificial Sequence: Synthetic oligonucleotide
  Antisense strand to SEQ ID NO: 1235410
aucccuagagaaagaggag

SEQ ID NO: 1235412 - RNA, 19 nt, Artificial Sequence
  Description of Artificial Sequence: Synthetic oligonucleotide
  Sense strand starting at position 173 of SEQ ID NO: 917461
gcuggacagcuuuggagaa

SEQ ID NO: 1235413 - RNA, 19 nt, Artificial Sequence
  Description of Artificial Sequence: Synthetic oligonucleotide
  Antisense strand to SEQ ID NO: 1235412
uucuccaaagcuguccagc

SEQ ID NO: 1235414 - RNA, 19 nt, Artificial Sequence
  Description of Artificial Sequence: Synthetic oligonucleotide
  Sense strand starting at position 205 of SEQ ID NO: 917461
gaaugaguauaucugacca

SEQ ID NO: 1235415 - RNA, 19 nt, Artificial Sequence
  Description of Artificial Sequence: Synthetic oligonucleotide
  Antisense strand to SEQ ID NO: 1235414
uggucagauauacucauuc

SEQ ID NO: 1235416 - RNA, 19 nt, Artificial Sequence
  Description of Artificial Sequence: Synthetic oligonucleotide
  Sense strand starting at position 311 of SEQ ID NO: 917461
gaagaagugcugcaguuga

SEQ ID NO: 1235417 - RNA, 19 nt, Artificial Sequence
  Description of Artificial Sequence: Synthetic oligonucleotide
  Antisense strand to SEQ ID NO: 1235416
ucaacugcagcacuucuuc

SEQ ID NO: 1235418 - RNA, 19 nt, Artificial Sequence
  Description of Artificial Sequence: Synthetic oligonucleotide
  Sense strand starting at position 330 of SEQ ID NO: 917461
ucaugaguuccaggaauua

SEQ ID NO: 1235419 - RNA, 19 nt, Artificial Sequence
  Description of Artificial Sequence: Synthetic oligonucleotide
  Antisense strand to SEQ ID NO: 1235418
uaauuccuggaacucauga

SEQ ID NO: 1235420 - RNA, 19 nt, Artificial Sequence
  Description of Artificial Sequence: Synthetic oligonucleotide
  Sense strand starting at position 339 of SEQ ID NO: 917461
ccaggaauuauguaugguu

SEQ ID NO: 1235421 - RNA, 19 nt, Artificial Sequence
  Description of Artificial Sequence: Synthetic oligonucleotide
  Antisense strand to SEQ ID NO: 1235420
aaccauacauaauuccugg

SEQ ID NO: 1235422 - RNA, 19 nt, Artificial Sequence
  Description of Artificial Sequence: Synthetic oligonucleotide
  Sense strand starting at position 341 of SEQ ID NO: 917461
aggaauuauguaugguugu

SEQ ID NO: 1235423 - RNA, 19 nt, Artificial Sequence
  Description of Artificial Sequence: Synthetic oligonucleotide
  Antisense strand to SEQ ID NO: 1235422
acaaccauacauaauuccu

SEQ ID NO: 1235424 - RNA, 19 nt, Artificial Sequence
  Description of Artificial Sequence: Synthetic oligonucleotide
  Sense strand starting at position 479 of SEQ ID NO: 917461
ugaacuccaucgucuauaa

SEQ ID NO: 1235425 - RNA, 19 nt, Artificial Sequence
  Description of Artificial Sequence: Synthetic oligonucleotide
  Antisense strand to SEQ ID NO: 1235424
uuauagacgauggaguuca

SEQ ID NO: 1235426 - RNA, 19 nt, Artificial Sequence
  Description of Artificial Sequence: Synthetic oligonucleotide
  Sense strand starting at position 598 of SEQ ID NO: 917461
gugauuauauaguuaucac

SEQ ID NO: 1235427 - RNA, 19 nt, Artificial Sequence
  Description of Artificial Sequence: Synthetic oligonucleotide
  Antisense strand to SEQ ID NO: 1235426
gugauaacuauauaaucac

SEQ ID NO: 1235428 - RNA, 19 nt, Artificial Sequence
  Description of Artificial Sequence: Synthetic oligonucleotide
  Sense strand starting at position 613 of SEQ ID NO: 917461
ucacauuuaguauguguua

SEQ ID NO: 1235429 - RNA, 19 nt, Artificial Sequence
  Description of Artificial Sequence: Synthetic oligonucleotide
  Antisense strand to SEQ ID NO: 1235428
uaacacauacuaaauguga

SEQ ID NO: 1235430 - RNA, 19 nt, Artificial Sequence
  Description of Artificial Sequence: Synthetic oligonucleotide
  Sense strand starting at position 614 of SEQ ID NO: 917461
cacauuuaguauguguuau

SEQ ID NO: 1235431 - RNA, 19 nt, Artificial Sequence
  Description of Artificial Sequence: Synthetic oligonucleotide
  Antisense strand to SEQ ID NO: 1235430
auaacacauacuaaaugug

SEQ ID NO: 1235432 - RNA, 19 nt, Artificial Sequence
  Description of Artificial Sequence: Synthetic oligonucleotide
  Sense strand starting at position 616 of SEQ ID NO: 917461
cauuuaguauguguuauac

SEQ ID NO: 1235433 - RNA, 19 nt, Artificial Sequence
  Description of Artificial Sequence: Synthetic oligonucleotide
  Antisense strand to SEQ ID NO: 1235432
guauaacacauacuaaaug

SEQ ID NO: 1235434 - RNA, 19 nt, Artificial Sequence
  Description of Artificial Sequence: Synthetic oligonucleotide
  Sense strand starting at position 836 of SEQ ID NO: 917461
ugggaaaucucuccuucua

SEQ ID NO: 1235435 - RNA, 19 nt, Artificial Sequence
  Description of Artificial Sequence: Synthetic oligonucleotide
  Antisense strand to SEQ ID NO: 1235434
uagaaggagagauuuccca

SEQ ID NO: 1235436 - RNA, 19 nt, Artificial Sequence
  Description of Artificial Sequence: Synthetic oligonucleotide
  Sense strand starting at position 838 of SEQ ID NO: 917461
ggaaaucucuccuucuaga

SEQ ID NO: 1235437 - RNA, 19 nt, Artificial Sequence
  Description of Artificial Sequence: Synthetic oligonucleotide
  Antisense strand to SEQ ID NO: 1235436
ucuagaaggagagauuucc

SEQ ID NO: 1235438 - RNA, 19 nt, Artificial Sequence
  Description of Artificial Sequence: Synthetic oligonucleotide
  Sense strand starting at position 862 of SEQ ID NO: 917461
auuccagaagcaugaaacu

SEQ ID NO: 1235439 - RNA, 19 nt, Artificial Sequence
  Description of Artificial Sequence: Synthetic oligonucleotide
  Antisense strand to SEQ ID NO: 1235438
aguuucaugcuucuggaau

SEQ ID NO: 1235440 - RNA, 19 nt, Artificial Sequence
  Description of Artificial Sequence: Synthetic oligonucleotide
  Sense strand starting at position 871 of SEQ ID NO: 917461
gcaugaaacuaccugggaa

SEQ ID NO: 1235441 - RNA, 19 nt, Artificial Sequence
  Description of Artificial Sequence: Synthetic oligonucleotide
  Antisense strand to SEQ ID NO: 1235440
uucccagguaguuucaugc

SEQ ID NO: 1235442 - RNA, 19 nt, Artificial Sequence
  Description of Artificial Sequence: Synthetic oligonucleotide
  Sense strand starting at position 1023 of SEQ ID NO: 917461
guuagaccuguugggaaga

SEQ ID NO: 1235443 - RNA, 19 nt, Artificial Sequence
  Description of Artificial Sequence: Synthetic oligonucleotide
  Antisense strand to SEQ ID NO: 1235442
ucuucccaacaggucuaac

SEQ ID NO: 1235444 - RNA, 19 nt, Artificial Sequence
  Description of Artificial Sequence: Synthetic oligonucleotide
  Sense strand starting at position 1041 of SEQ ID NO: 917461
aggccagucagaugaaauu

SEQ ID NO: 1235445 - RNA, 19 nt, Artificial Sequence
  Description of Artificial Sequence: Synthetic oligonucleotide
  Antisense strand to SEQ ID NO: 1235444
aauuucaucugacuggccu

SEQ ID NO: 1235446 - RNA, 19 nt, Artificial Sequence
  Description of Artificial Sequence: Synthetic oligonucleotide
  Sense strand starting at position 1077 of SEQ ID NO: 917461
gacuaaggagucgggcaau

SEQ ID NO: 1235447 - RNA, 19 nt, Artificial Sequence
  Description of Artificial Sequence: Synthetic oligonucleotide
  Antisense strand to SEQ ID NO: 1235446
auugcccgacuccuuaguc

SEQ ID NO: 1235448 - RNA, 19 nt, Artificial Sequence
  Description of Artificial Sequence: Synthetic oligonucleotide
  Sense strand starting at position 1166 of SEQ ID NO: 917461
ucgacuuuaggaggugaga

SEQ ID NO: 1235449 - RNA, 19 nt, Artificial Sequence
  Description of Artificial Sequence: Synthetic oligonucleotide
  Antisense strand to SEQ ID NO: 1235448
ucucaccuccuaaagucga

SEQ ID NO: 1235450 - RNA, 19 nt, Artificial Sequence
  Description of Artificial Sequence: Synthetic oligonucleotide
  Sense strand starting at position 1359 of SEQ ID NO: 917461
gugugacaucuccggagga

SEQ ID NO: 1235451 - RNA, 19 nt, Artificial Sequence
  Description of Artificial Sequence: Synthetic oligonucleotide
  Antisense strand to SEQ ID NO: 1235450
uccuccggagaugucacac

SEQ ID NO: 1235452 - RNA, 19 nt, Artificial Sequence
  Description of Artificial Sequence: Synthetic oligonucleotide
  Sense strand starting at position 1372 of SEQ ID NO: 917461
ggaggaagccuccgagauu

SEQ ID NO: 1235453 - RNA, 19 nt, Artificial Sequence
  Description of Artificial Sequence: Synthetic oligonucleotide
  Antisense strand to SEQ ID NO: 1235452
aaucucggaggcuuccucc

SEQ ID NO: 1235454 - RNA, 19 nt, Artificial Sequence
  Description of Artificial Sequence: Synthetic oligonucleotide
  Sense strand starting at position 1487 of SEQ ID NO: 917461
ccggcuucuggagagaucu

SEQ ID NO: 1235455 - RNA, 19 nt, Artificial Sequence
  Description of Artificial Sequence: Synthetic oligonucleotide
  Antisense strand to SEQ ID NO: 1235454
agaucucuccagaagccgg

SEQ ID NO: 1235456 - RNA, 19 nt, Artificial Sequence
  Description of Artificial Sequence: Synthetic oligonucleotide
  Sense strand starting at position 1493 of SEQ ID NO: 917461
ucuggagagaucugcgaga

SEQ ID NO: 1235457 - RNA, 19 nt, Artificial Sequence
  Description of Artificial Sequence: Synthetic oligonucleotide
  Antisense strand to SEQ ID NO: 1235456
ucucgcagaucucuccaga

SEQ ID NO: 1235458 - RNA, 19 nt, Artificial Sequence
  Description of Artificial Sequence: Synthetic oligonucleotide
  Sense strand starting at position 2221 of SEQ ID NO: 917461
cgacauuauuucuagggau

SEQ ID NO: 1235459 - RNA, 19 nt, Artificial Sequence
  Description of Artificial Sequence: Synthetic oligonucleotide
  Antisense strand to SEQ ID NO: 1235458
aucccuagaaauaaugucg

SEQ ID NO: 1235460 - RNA, 19 nt, Artificial Sequence
  Description of Artificial Sequence: Synthetic oligonucleotide
  Sense strand starting at position 2224 of SEQ ID NO: 917461
cauuauuucuagggaugga

SEQ ID NO: 1235461 - RNA, 19 nt, Artificial Sequence
  Description of Artificial Sequence: Synthetic oligonucleotide
  Antisense strand to SEQ ID NO: 1235460
uccaucccuagaaauaaug

SEQ ID NO: 1235462 - RNA, 19 nt, Artificial Sequence
  Description of Artificial Sequence: Synthetic oligonucleotide
  Sense strand starting at position 2616 of SEQ ID NO: 917461
ugaggguuccgaggaaugu

SEQ ID NO: 1235463 - RNA, 19 nt, Artificial Sequence
  Description of Artificial Sequence: Synthetic oligonucleotide
  Antisense strand to SEQ ID NO: 1235462
acauuccucggaacccuca

SEQ ID NO: 1235464 - RNA, 19 nt, Artificial Sequence
  Description of Artificial Sequence: Synthetic oligonucleotide
  Sense strand starting at position 3198 of SEQ ID NO: 917461
ucaucaaguccugggaaac

SEQ ID NO: 1235465 - RNA, 19 nt, Artificial Sequence
  Description of Artificial Sequence: Synthetic oligonucleotide
  Antisense strand to SEQ ID NO: 1235464
guuucccaggacuugauga

SEQ ID NO: 1235466 - RNA, 19 nt, Artificial Sequence
  Description of Artificial Sequence: Synthetic oligonucleotide
  Sense strand starting at position 3199 of SEQ ID NO: 917461
caucaaguccugggaaacu

SEQ ID NO: 1235467 - RNA, 19 nt, Artificial Sequence
  Description of Artificial Sequence: Synthetic oligonucleotide
  Antisense strand to SEQ ID NO: 1235466
aguuucccaggacuugaug

SEQ ID NO: 1235468 - RNA, 19 nt, Artificial Sequence
  Description of Artificial Sequence: Synthetic oligonucleotide
  Sense strand starting at position 3268 of SEQ ID NO: 917461
agugacccgaguuauaaau

SEQ ID NO: 1235469 - RNA, 19 nt, Artificial Sequence
  Description of Artificial Sequence: Synthetic oligonucleotide
  Antisense strand to SEQ ID NO: 1235468
auuuauaacucgggucacu

SEQ ID NO: 1235470 - RNA, 19 nt, Artificial Sequence
  Description of Artificial Sequence: Synthetic oligonucleotide
  Sense strand starting at position 3391 of SEQ ID NO: 917461
guacguugaaauuaaguua

SEQ ID NO: 1235471 - RNA, 19 nt, Artificial Sequence
  Description of Artificial Sequence: Synthetic oligonucleotide
  Antisense strand to SEQ ID NO: 1235470
uaacuuaauuucaacguac

SEQ ID NO: 1235472 - RNA, 19 nt, Artificial Sequence
  Description of Artificial Sequence: Synthetic oligonucleotide
  Sense strand starting at position 3394 of SEQ ID NO: 917461
cguugaaauuaaguuacca

SEQ ID NO: 1235473 - RNA, 19 nt, Artificial Sequence
  Description of Artificial Sequence: Synthetic oligonucleotide
  Antisense strand to SEQ ID NO: 1235472
ugguaacuuaauuucaacg

SEQ ID NO: 1235474 - RNA, 19 nt, Artificial Sequence
  Description of Artificial Sequence: Synthetic oligonucleotide
  Sense strand starting at position 3418 of SEQ ID NO: 917461
uuuaauaaccaaggugauu

SEQ ID NO: 1235475 - RNA, 19 nt, Artificial Sequence
  Description of Artificial Sequence: Synthetic oligonucleotide
  Antisense strand to SEQ ID NO: 1235474
aaucaccuugguuauuaaa

SEQ ID NO: 1235476 - RNA, 19 nt, Artificial Sequence
  Description of Artificial Sequence: Synthetic oligonucleotide
  Sense strand starting at position 3436 of SEQ ID NO: 917461
uauuaaacugauugagggu

SEQ ID NO: 1235477 - RNA, 19 nt, Artificial Sequence
  Description of Artificial Sequence: Synthetic oligonucleotide
  Antisense strand to SEQ ID NO: 1235476
acccucaaucaguuuaaua

SEQ ID NO: 1235478 - RNA, 19 nt, Artificial Sequence
  Description of Artificial Sequence: Synthetic oligonucleotide
  Sense strand starting at position 3480 of SEQ ID NO: 917461
aguacuuucuugguaauca

SEQ ID NO: 1235479 - RNA, 19 nt, Artificial Sequence
  Description of Artificial Sequence: Synthetic oligonucleotide
  Antisense strand to SEQ ID NO: 1235478
ugauuaccaagaaaguacu

SEQ ID NO: 1235480 - RNA, 19 nt, Artificial Sequence
  Description of Artificial Sequence: Synthetic oligonucleotide
  Sense strand starting at position 3547 of SEQ ID NO: 917461
ggaauuaagugcuuugauu

SEQ ID NO: 1235481 - RNA, 19 nt, Artificial Sequence
  Description of Artificial Sequence: Synthetic oligonucleotide
  Antisense strand to SEQ ID NO: 1235480
aaucaaagcacuuaauucc

SEQ ID NO: 1235482 - RNA, 19 nt, Artificial Sequence
  Description of Artificial Sequence: Synthetic oligonucleotide
  Sense strand starting at position 3857 of SEQ ID NO: 917461
aggaguuaaacugagcagu

SEQ ID NO: 1235483 - RNA, 19 nt, Artificial Sequence
  Description of Artificial Sequence: Synthetic oligonucleotide
  Antisense strand to SEQ ID NO: 1235482
acugcucaguuuaacuccu

SEQ ID NO: 1235484 - RNA, 19 nt, Artificial Sequence
  Description of Artificial Sequence: Synthetic oligonucleotide
  Sense strand starting at position 3859 of SEQ ID NO: 917461
gaguuaaacugagcaguga

SEQ ID NO: 1235485 - RNA, 19 nt, Artificial Sequence
  Description of Artificial Sequence: Synthetic oligonucleotide
  Antisense strand to SEQ ID NO: 1235484
ucacugcucaguuuaacuc

SEQ ID NO: 1235486 - RNA, 19 nt, Artificial Sequence
  Description of Artificial Sequence: Synthetic oligonucleotide
  Sense strand starting at position 3860 of SEQ ID NO: 917461
aguuaaacugagcagugaa

SEQ ID NO: 1235487 - RNA, 19 nt, Artificial Sequence
  Description of Artificial Sequence: Synthetic oligonucleotide
  Antisense strand to SEQ ID NO: 1235486
uucacugcucaguuuaacu

SEQ ID NO: 1235488 - RNA, 19 nt, Artificial Sequence
  Description of Artificial Sequence: Synthetic oligonucleotide
  Sense strand starting at position 3863 of SEQ ID NO: 917461
uaaacugagcagugaauga

SEQ ID NO: 1235489 - RNA, 19 nt, Artificial Sequence
  Description of Artificial Sequence: Synthetic oligonucleotide
  Antisense strand to SEQ ID NO: 1235488
ucauucacugcucaguuua

SEQ ID NO: 1235490 - RNA, 19 nt, Artificial Sequence
  Description of Artificial Sequence: Synthetic oligonucleotide
  Sense strand starting at position 3978 of SEQ ID NO: 917461
agaaaucagcagugagaua

SEQ ID NO: 1235491 - RNA, 19 nt, Artificial Sequence
  Description of Artificial Sequence: Synthetic oligonucleotide
  Antisense strand to SEQ ID NO: 1235490
uaucucacugcugauuucu

SEQ ID NO: 1235492 - RNA, 19 nt, Artificial Sequence
  Description of Artificial Sequence: Synthetic oligonucleotide
  Sense strand starting at position 3978 of SEQ ID NO: 917462
agaaaucagcagugagaua

SEQ ID NO: 1235493 - RNA, 19 nt, Artificial Sequence
  Description of Artificial Sequence: Synthetic oligonucleotide
  Antisense strand to SEQ ID NO: 1235492
uaucucacugcugauuucu

SEQ ID NO: 1235494 - RNA, 19 nt, Artificial Sequence
  Description of Artificial Sequence: Synthetic oligonucleotide
  Sense strand starting at position 131 of SEQ ID NO: 917462
uccuguuagauguaacugu

SEQ ID NO: 1235495 - RNA, 19 nt, Artificial Sequence
  Description of Artificial Sequence: Synthetic oligonucleotide
  Antisense strand to SEQ ID NO: 1235494
acaguuacaucuaacagga

SEQ ID NO: 1235496 - RNA, 19 nt, Artificial Sequence
  Description of Artificial Sequence: Synthetic oligonucleotide
  Sense strand starting at position 340 of SEQ ID NO: 917462
uggauucugaaauggaugu

SEQ ID NO: 1235497 - RNA, 19 nt, Artificial Sequence
  Description of Artificial Sequence: Synthetic oligonucleotide
  Antisense strand to SEQ ID NO: 1235496
acauccauuucagaaucca

SEQ ID NO: 1235498 - RNA, 19 nt, Artificial Sequence
  Description of Artificial Sequence: Synthetic oligonucleotide
  Sense strand starting at position 344 of SEQ ID NO: 917462
uucugaaauggaugucucu

SEQ ID NO: 1235499 - RNA, 19 nt, Artificial Sequence
  Description of Artificial Sequence: Synthetic oligonucleotide
  Antisense strand to SEQ ID NO: 1235498
agagacauccauuucagaa

SEQ ID NO: 1235500 - RNA, 19 nt, Artificial Sequence
  Description of Artificial Sequence: Synthetic oligonucleotide
  Sense strand starting at position 347 of SEQ ID NO: 917462
ugaaauggaugucucuagu

SEQ ID NO: 1235501 - RNA, 19 nt, Artificial Sequence
  Description of Artificial Sequence: Synthetic oligonucleotide
  Antisense strand to SEQ ID NO: 1235500
acuagagacauccauuuca

SEQ ID NO: 1235502 - RNA, 19 nt, Artificial Sequence
  Description of Artificial Sequence: Synthetic oligonucleotide
  Sense strand starting at position 350 of SEQ ID NO: 917462
aauggaugucucuagugga

SEQ ID NO: 1235503 - RNA, 19 nt, Artificial Sequence
  Description of Artificial Sequence: Synthetic oligonucleotide
  Antisense strand to SEQ ID NO: 1235502
uccacuagagacauccauu

SEQ ID NO: 1235504 - RNA, 19 nt, Artificial Sequence
  Description of Artificial Sequence: Synthetic oligonucleotide
  Sense strand starting at position 357 of SEQ ID NO: 917462
gucucuaguggauaaagua

SEQ ID NO: 1235505 - RNA, 19 nt, Artificial Sequence
  Description of Artificial Sequence: Synthetic oligonucleotide
  Antisense strand to SEQ ID NO: 1235504
uacuuuauccacuagagac

SEQ ID NO: 1235506 - RNA, 19 nt, Artificial Sequence
  Description of Artificial Sequence: Synthetic oligonucleotide
  Sense strand starting at position 468 of SEQ ID NO: 917462
guggguuuacucuaugggu

SEQ ID NO: 1235507 - RNA, 19 nt, Artificial Sequence
  Description of Artificial Sequence: Synthetic oligonucleotide
  Antisense strand to SEQ ID NO: 1235506
acccauagaguaaacccac

SEQ ID NO: 1235508 - RNA, 19 nt, Artificial Sequence
  Description of Artificial Sequence: Synthetic oligonucleotide
  Sense strand starting at position 566 of SEQ ID NO: 917462
agucauuguaaggauguga

SEQ ID NO: 1235509 - RNA, 19 nt, Artificial Sequence
  Description of Artificial Sequence: Synthetic oligonucleotide
  Antisense strand to SEQ ID NO: 1235508
ucacauccuuacaaugacu

SEQ ID NO: 1235510 - RNA, 19 nt, Artificial Sequence
  Description of Artificial Sequence: Synthetic oligonucleotide
  Sense strand starting at position 687 of SEQ ID NO: 917462
uauguaauuugacacagag

SEQ ID NO: 1235511 - RNA, 19 nt, Artificial Sequence
  Description of Artificial Sequence: Synthetic oligonucleotide
  Antisense strand to SEQ ID NO: 1235510
cucugugucaaauuacaua

SEQ ID NO: 1235512 - RNA, 19 nt, Artificial Sequence
  Description of Artificial Sequence: Synthetic oligonucleotide
  Sense strand starting at position 1072 of SEQ ID NO: 917462
gguaaauucugacugcacu

SEQ ID NO: 1235513 - RNA, 19 nt, Artificial Sequence
  Description of Artificial Sequence: Synthetic oligonucleotide
  Antisense strand to SEQ ID NO: 1235512
agugcagucagaauuuacc

SEQ ID NO: 1235514 - RNA, 19 nt, Artificial Sequence
  Description of Artificial Sequence: Synthetic oligonucleotide
  Sense strand starting at position 1080 of SEQ ID NO: 917462
cugacugcacucuagacau

SEQ ID NO: 1235515 - RNA, 19 nt, Artificial Sequence
  Description of Artificial Sequence: Synthetic oligonucleotide
  Antisense strand to SEQ ID NO: 1235514
augucuagagugcagucag

SEQ ID NO: 1235516 - RNA, 19 nt, Artificial Sequence
  Description of Artificial Sequence: Synthetic oligonucleotide
  Sense strand starting at position 1090 of SEQ ID NO: 917462
ucuagacauuuaugaugga

SEQ ID NO: 1235517 - RNA, 19 nt, Artificial Sequence
  Description of Artificial Sequence: Synthetic oligonucleotide
  Antisense strand to SEQ ID NO: 1235516
uccaucauaaaugucuaga

SEQ ID NO: 1235518 - RNA, 19 nt, Artificial Sequence
  Description of Artificial Sequence: Synthetic oligonucleotide
  Sense strand starting at position 1176 of SEQ ID NO: 917462
gcuuaagaucacgggauga

SEQ ID NO: 1235519 - RNA, 19 nt, Artificial Sequence
  Description of Artificial Sequence: Synthetic oligonucleotide
  Antisense strand to SEQ ID NO: 1235518
ucaucccgugaucuuaagc

SEQ ID NO: 1235520 - RNA, 19 nt, Artificial Sequence
  Description of Artificial Sequence: Synthetic oligonucleotide
  Sense strand starting at position 1196 of SEQ ID NO: 917462
ggaagaaucucugcucagc

SEQ ID NO: 1235521 - RNA, 19 nt, Artificial Sequence
  Description of Artificial Sequence: Synthetic oligonucleotide
  Antisense strand to SEQ ID NO: 1235520
gcugagcagagauucuucc

SEQ ID NO: 1235522 - RNA, 19 nt, Artificial Sequence
  Description of Artificial Sequence: Synthetic oligonucleotide
  Sense strand starting at position 1379 of SEQ ID NO: 917462
cuuagaauucuccaugguu

SEQ ID NO: 1235523 - RNA, 19 nt, Artificial Sequence
  Description of Artificial Sequence: Synthetic oligonucleotide
  Antisense strand to SEQ ID NO: 1235522
aaccauggagaauucuaag

SEQ ID NO: 1235524 - RNA, 19 nt, Artificial Sequence
  Description of Artificial Sequence: Synthetic oligonucleotide
  Sense strand starting at position 1419 of SEQ ID NO: 917462
auccaaauuuccgaggaca

SEQ ID NO: 1235525 - RNA, 19 nt, Artificial Sequence
  Description of Artificial Sequence: Synthetic oligonucleotide
  Antisense strand to SEQ ID NO: 1235524
uguccucggaaauuuggau

SEQ ID NO: 1235526 - RNA, 19 nt, Artificial Sequence
  Description of Artificial Sequence: Synthetic oligonucleotide
  Sense strand starting at position 1492 of SEQ ID NO: 917462
gcccacaucccugauaguu

SEQ ID NO: 1235527 - RNA, 19 nt, Artificial Sequence
  Description of Artificial Sequence: Synthetic oligonucleotide
  Antisense strand to SEQ ID NO: 1235526
aacuaucagggaugugggc

SEQ ID NO: 1235528 - RNA, 19 nt, Artificial Sequence
  Description of Artificial Sequence: Synthetic oligonucleotide
  Sense strand starting at position 1566 of SEQ ID NO: 917462
cucuguucccuauaggcaa

SEQ ID NO: 1235529 - RNA, 19 nt, Artificial Sequence
  Description of Artificial Sequence: Synthetic oligonucleotide
  Antisense strand to SEQ ID NO: 1235528
uugccuauagggaacagag

SEQ ID NO: 1235530 - RNA, 19 nt, Artificial Sequence
  Description of Artificial Sequence: Synthetic oligonucleotide
  Sense strand starting at position 1618 of SEQ ID NO: 917462
gcuuuaugugacuagucaa

SEQ ID NO: 1235531 - RNA, 19 nt, Artificial Sequence
  Description of Artificial Sequence: Synthetic oligonucleotide
  Antisense strand to SEQ ID NO: 1235530
uugacuagucacauaaagc

SEQ ID NO: 1235532 - RNA, 19 nt, Artificial Sequence
  Description of Artificial Sequence: Synthetic oligonucleotide
  Sense strand starting at position 1621 of SEQ ID NO: 917462
uuaugugacuagucaauuc

SEQ ID NO: 1235533 - RNA, 19 nt, Artificial Sequence
  Description of Artificial Sequence: Synthetic oligonucleotide
  Antisense strand to SEQ ID NO: 1235532
gaauugacuagucacauaa

SEQ ID NO: 1235534 - RNA, 19 nt, Artificial Sequence
  Description of Artificial Sequence: Synthetic oligonucleotide
  Sense strand starting at position 1974 of SEQ ID NO: 917462
agaugauaguccucucuca

SEQ ID NO: 1235535 - RNA, 19 nt, Artificial Sequence
  Description of Artificial Sequence: Synthetic oligonucleotide
  Antisense strand to SEQ ID NO: 1235534
ugagagaggacuaucaucu

SEQ ID NO: 1235536 - RNA, 19 nt, Artificial Sequence
  Description of Artificial Sequence: Synthetic oligonucleotide
  Sense strand starting at position 2159 of SEQ ID NO: 917462
aaaggauucuguuuggaau

SEQ ID NO: 1235537 - RNA, 19 nt, Artificial Sequence
  Description of Artificial Sequence: Synthetic oligonucleotide
  Antisense strand to SEQ ID NO: 1235536
auuccaaacagaauccuuu

SEQ ID NO: 1235538 - RNA, 19 nt, Artificial Sequence
  Description of Artificial Sequence: Synthetic oligonucleotide
  Sense strand starting at position 2160 of SEQ ID NO: 917462
aaggauucuguuuggaaua

SEQ ID NO: 1235539 - RNA, 19 nt, Artificial Sequence
  Description of Artificial Sequence: Synthetic oligonucleotide
  Antisense strand to SEQ ID NO: 1235538
uauuccaaacagaauccuu

SEQ ID NO: 1235540 - RNA, 19 nt, Artificial Sequence
  Description of Artificial Sequence: Synthetic oligonucleotide
  Sense strand starting at position 2325 of SEQ ID NO: 917462
ucauaauuccagugguuaa

SEQ ID NO: 1235541 - RNA, 19 nt, Artificial Sequence
  Description of Artificial Sequence: Synthetic oligonucleotide
  Antisense strand to SEQ ID NO: 1235540
uuaaccacuggaauuauga

SEQ ID NO: 1235542 - RNA, 19 nt, Artificial Sequence
  Description of Artificial Sequence: Synthetic oligonucleotide
  Sense strand starting at position 2494 of SEQ ID NO: 917462
guauaaugcagguacuaag

SEQ ID NO: 1235543 - RNA, 19 nt, Artificial Sequence
  Description of Artificial Sequence: Synthetic oligonucleotide
  Antisense strand to SEQ ID NO: 1235542
cuuaguaccugcauuauac

SEQ ID NO: 1235544 - RNA, 19 nt, Artificial Sequence
  Description of Artificial Sequence: Synthetic oligonucleotide
  Sense strand starting at position 2577 of SEQ ID NO: 917462
uccuaaagaguaugucauu

SEQ ID NO: 1235545 - RNA, 19 nt, Artificial Sequence
  Description of Artificial Sequence: Synthetic oligonucleotide
  Antisense strand to SEQ ID NO: 1235544
aaugacauacucuuuagga

SEQ ID NO: 1235546 - RNA, 19 nt, Artificial Sequence
  Description of Artificial Sequence: Synthetic oligonucleotide
  Sense strand starting at position 2578 of SEQ ID NO: 917462
ccuaaagaguaugucauua

SEQ ID NO: 1235547 - RNA, 19 nt, Artificial Sequence
  Description of Artificial Sequence: Synthetic oligonucleotide
  Antisense strand to SEQ ID NO: 1235546
uaaugacauacucuuuagg

SEQ ID NO: 1235548 - RNA, 19 nt, Artificial Sequence
  Description of Artificial Sequence: Synthetic oligonucleotide
  Sense strand starting at position 2586 of SEQ ID NO: 917462
guaugucauuaauuaucca

SEQ ID NO: 1235549 - RNA, 19 nt, Artificial Sequence
  Description of Artificial Sequence: Synthetic oligonucleotide
  Antisense strand to SEQ ID NO: 1235548
uggauaauuaaugacauac

SEQ ID NO: 1235550 - RNA, 19 nt, Artificial Sequence
  Description of Artificial Sequence: Synthetic oligonucleotide
  Sense strand starting at position 2651 of SEQ ID NO: 917462
uugagaguauuugagauua

SEQ ID NO: 1235551 - RNA, 19 nt, Artificial Sequence
  Description of Artificial Sequence: Synthetic oligonucleotide
  Antisense strand to SEQ ID NO: 1235550
uaaucucaaauacucucaa

SEQ ID NO: 1235552 - RNA, 19 nt, Artificial Sequence
  Description of Artificial Sequence: Synthetic oligonucleotide
  Sense strand starting at position 2653 of SEQ ID NO: 917462
gagaguauuugagauuaac

SEQ ID NO: 1235553 - RNA, 19 nt, Artificial Sequence
  Description of Artificial Sequence: Synthetic oligonucleotide
  Antisense strand to SEQ ID NO: 1235552
guuaaucucaaauacucuc

SEQ ID NO: 1235554 - RNA, 19 nt, Artificial Sequence
  Description of Artificial Sequence: Synthetic oligonucleotide
  Sense strand starting at position 2792 of SEQ ID NO: 917462
ccuguuaaaucugccagaa

SEQ ID NO: 1235555 - RNA, 19 nt, Artificial Sequence
  Description of Artificial Sequence: Synthetic oligonucleotide
  Antisense strand to SEQ ID NO: 1235554
uucuggcagauuuaacagg

SEQ ID NO: 1235556 - RNA, 19 nt, Artificial Sequence
  Description of Artificial Sequence: Synthetic oligonucleotide
  Sense strand starting at position 2817 of SEQ ID NO: 917462
gcguuccuaggcuugcaaa

SEQ ID NO: 1235557 - RNA, 19 nt, Artificial Sequence
  Description of Artificial Sequence: Synthetic oligonucleotide
  Antisense strand to SEQ ID NO: 1235556
uuugcaagccuaggaacgc

SEQ ID NO: 1235558 - RNA, 19 nt, Artificial Sequence
  Description of Artificial Sequence: Synthetic oligonucleotide
  Sense strand starting at position 2909 of SEQ ID NO: 917462
gcugaugucauugucguuu

SEQ ID NO: 1235559 - RNA, 19 nt, Artificial Sequence
  Description of Artificial Sequence: Synthetic oligonucleotide
  Antisense strand to SEQ ID NO: 1235558
aaacgacaaugacaucagc

SEQ ID NO: 1235560 - RNA, 19 nt, Artificial Sequence
  Description of Artificial Sequence: Synthetic oligonucleotide
  Sense strand starting at position 2929 of SEQ ID NO: 917462
ugaaauuccugcccugauc

SEQ ID NO: 1235561 - RNA, 19 nt, Artificial Sequence
  Description of Artificial Sequence: Synthetic oligonucleotide
  Antisense strand to SEQ ID NO: 1235560
gaucagggcaggaauuuca

SEQ ID NO: 1235562 - RNA, 19 nt, Artificial Sequence
  Description of Artificial Sequence: Synthetic oligonucleotide
  Sense strand starting at position 3027 of SEQ ID NO: 917462
aggaaucauugagucacuu

SEQ ID NO: 1235563 - RNA, 19 nt, Artificial Sequence
  Description of Artificial Sequence: Synthetic oligonucleotide
  Antisense strand to SEQ ID NO: 1235562
aagugacucaaugauuccu

SEQ ID NO: 1235564 - RNA, 19 nt, Artificial Sequence
  Description of Artificial Sequence: Synthetic oligonucleotide
  Sense strand starting at position 3222 of SEQ ID NO: 917462
uugagauaaucauugcugu

SEQ ID NO: 1235565 - RNA, 19 nt, Artificial Sequence
  Description of Artificial Sequence: Synthetic oligonucleotide
  Antisense strand to SEQ ID NO: 1235564
acagcaaugauuaucucaa

SEQ ID NO: 1235566 - RNA, 19 nt, Artificial Sequence
  Description of Artificial Sequence: Synthetic oligonucleotide
  Sense strand starting at position 3254 of SEQ ID NO: 917462
ugaauugugcauuaguuaa

SEQ ID NO: 1235567 - RNA, 19 nt, Artificial Sequence
  Description of Artificial Sequence: Synthetic oligonucleotide
  Antisense strand to SEQ ID NO: 1235566
uuaacuaaugcacaauuca

SEQ ID NO: 1235568 - RNA, 19 nt, Artificial Sequence
  Description of Artificial Sequence: Synthetic oligonucleotide
  Sense strand starting at position 3491 of SEQ ID NO: 917462
uuaaauguagugcaugagu

SEQ ID NO: 1235569 - RNA, 19 nt, Artificial Sequence
  Description of Artificial Sequence: Synthetic oligonucleotide
  Antisense strand to SEQ ID NO: 1235568
acucaugcacuacauuuaa

SEQ ID NO: 1235570 - RNA, 19 nt, Artificial Sequence
  Description of Artificial Sequence: Synthetic oligonucleotide
  Sense strand starting at position 3510 of SEQ ID NO: 917462
cuuagcuuuccagaucagu

SEQ ID NO: 1235571 - RNA, 19 nt, Artificial Sequence
  Description of Artificial Sequence: Synthetic oligonucleotide
  Antisense strand to SEQ ID NO: 1235570
acugaucuggaaagcuaag

SEQ ID NO: 1235572 - RNA, 19 nt, Artificial Sequence
  Description of Artificial Sequence: Synthetic oligonucleotide
  Sense strand starting at position 3965 of SEQ ID NO: 917463
uugaguggacucugauucu

SEQ ID NO: 1235573 - RNA, 19 nt, Artificial Sequence
  Description of Artificial Sequence: Synthetic oligonucleotide
  Antisense strand to SEQ ID NO: 1235572
agaaucagaguccacucaa

SEQ ID NO: 1235574 - RNA, 19 nt, Artificial Sequence
  Description of Artificial Sequence: Synthetic oligonucleotide
  Sense strand starting at position 170 of SEQ ID NO: 917463
uuagcucaugcagaacaua

SEQ ID NO: 1235575 - RNA, 19 nt, Artificial Sequence
  Description of Artificial Sequence: Synthetic oligonucleotide
  Antisense strand to SEQ ID NO: 1235574
uauguucugcaugagcuaa

SEQ ID NO: 1235576 - RNA, 19 nt, Artificial Sequence
  Description of Artificial Sequence: Synthetic oligonucleotide
  Sense strand starting at position 182 of SEQ ID NO: 917463
gaacauacugguuggcaua

SEQ ID NO: 1235577 - RNA, 19 nt, Artificial Sequence
  Description of Artificial Sequence: Synthetic oligonucleotide
  Antisense strand to SEQ ID NO: 1235576
uaugccaaccaguauguuc

SEQ ID NO: 1235578 - RNA, 19 nt, Artificial Sequence
  Description of Artificial Sequence: Synthetic oligonucleotide
  Sense strand starting at position 698 of SEQ ID NO: 917463
ucagcucuaccggaagaua

SEQ ID NO: 1235579 - RNA, 19 nt, Artificial Sequence
  Description of Artificial Sequence: Synthetic oligonucleotide
  Antisense strand to SEQ ID NO: 1235578
uaucuuccgguagagcuga

SEQ ID NO: 1235580 - RNA, 19 nt, Artificial Sequence
  Description of Artificial Sequence: Synthetic oligonucleotide
  Sense strand starting at position 701 of SEQ ID NO: 917463
gcucuaccggaagauaaau

SEQ ID NO: 1235581 - RNA, 19 nt, Artificial Sequence
  Description of Artificial Sequence: Synthetic oligonucleotide
  Antisense strand to SEQ ID NO: 1235580
auuuaucuuccgguagagc

SEQ ID NO: 1235582 - RNA, 19 nt, Artificial Sequence
  Description of Artificial Sequence: Synthetic oligonucleotide
  Sense strand starting at position 775 of SEQ ID NO: 917463
uccauauugggccauaaca

SEQ ID NO: 1235583 - RNA, 19 nt, Artificial Sequence
  Description of Artificial Sequence: Synthetic oligonucleotide
  Antisense strand to SEQ ID NO: 1235582
uguuauggcccaauaugga

SEQ ID NO: 1235584 - RNA, 19 nt, Artificial Sequence
  Description of Artificial Sequence: Synthetic oligonucleotide
  Sense strand starting at position 1023 of SEQ ID NO: 917463
cgaauccuggccuaauaaa

SEQ ID NO: 1235585 - RNA, 19 nt, Artificial Sequence
  Description of Artificial Sequence: Synthetic oligonucleotide
  Antisense strand to SEQ ID NO: 1235584
uuuauuaggccaggauucg

SEQ ID NO: 1235586 - RNA, 19 nt, Artificial Sequence
  Description of Artificial Sequence: Synthetic oligonucleotide
  Sense strand starting at position 1145 of SEQ ID NO: 917463
acauaaauagcaggauugu

SEQ ID NO: 1235587 - RNA, 19 nt, Artificial Sequence
  Description of Artificial Sequence: Synthetic oligonucleotide
  Antisense strand to SEQ ID NO: 1235586
acaauccugcuauuuaugu

SEQ ID NO: 1235588 - RNA, 19 nt, Artificial Sequence
  Description of Artificial Sequence: Synthetic oligonucleotide
  Sense strand starting at position 1146 of SEQ ID NO: 917463
cauaaauagcaggauuguu

SEQ ID NO: 1235589 - RNA, 19 nt, Artificial Sequence
  Description of Artificial Sequence: Synthetic oligonucleotide
  Antisense strand to SEQ ID NO: 1235588
aacaauccugcuauuuaug

SEQ ID NO: 1235590 - RNA, 19 nt, Artificial Sequence
  Description of Artificial Sequence: Synthetic oligonucleotide
  Sense strand starting at position 1194 of SEQ ID NO: 917463
guaacagacuuucugagaa

SEQ ID NO: 1235591 - RNA, 19 nt, Artificial Sequence
  Description of Artificial Sequence: Synthetic oligonucleotide
  Antisense strand to SEQ ID NO: 1235590
uucucagaaagucuguuac

SEQ ID NO: 1235592 - RNA, 19 nt, Artificial Sequence
  Description of Artificial Sequence: Synthetic oligonucleotide
  Sense strand starting at position 1407 of SEQ ID NO: 917463
auaaacugccuuugaggaa

SEQ ID NO: 1235593 - RNA, 19 nt, Artificial Sequence
  Description of Artificial Sequence: Synthetic oligonucleotide
  Antisense strand to SEQ ID NO: 1235592
uuccucaaaggcaguuuau

SEQ ID NO: 1235594 - RNA, 19 nt, Artificial Sequence
  Description of Artificial Sequence: Synthetic oligonucleotide
  Sense strand starting at position 1494 of SEQ ID NO: 917463
auaucuguagucugagaua

SEQ ID NO: 1235595 - RNA, 19 nt, Artificial Sequence
  Description of Artificial Sequence: Synthetic oligonucleotide
  Antisense strand to SEQ ID NO: 1235594
uaucucagacuacagauau

SEQ ID NO: 1235596 - RNA, 19 nt, Artificial Sequence
  Description of Artificial Sequence: Synthetic oligonucleotide
  Sense strand starting at position 1905 of SEQ ID NO: 917463
ucguuaucucugccagcua

SEQ ID NO: 1235597 - RNA, 19 nt, Artificial Sequence
  Description of Artificial Sequence: Synthetic oligonucleotide
  Antisense strand to SEQ ID NO: 1235596
uagcuggcagagauaacga

SEQ ID NO: 1235598 - RNA, 19 nt, Artificial Sequence
  Description of Artificial Sequence: Synthetic oligonucleotide
  Sense strand starting at position 1952 of SEQ ID NO: 917463
gugagacugguccacauca

SEQ ID NO: 1235599 - RNA, 19 nt, Artificial Sequence
  Description of Artificial Sequence: Synthetic oligonucleotide
  Antisense strand to SEQ ID NO: 1235598
ugauguggaccagucucac

SEQ ID NO: 1235600 - RNA, 19 nt, Artificial Sequence
  Description of Artificial Sequence: Synthetic oligonucleotide
  Sense strand starting at position 2185 of SEQ ID NO: 917463
aggugccuuccuuauauaa

SEQ ID NO: 1235601 - RNA, 19 nt, Artificial Sequence
  Description of Artificial Sequence: Synthetic oligonucleotide
  Antisense strand to SEQ ID NO: 1235600
uuauauaaggaaggcaccu

SEQ ID NO: 1235602 - RNA, 19 nt, Artificial Sequence
  Description of Artificial Sequence: Synthetic oligonucleotide
  Sense strand starting at position 2297 of SEQ ID NO: 917463
agaagaugcccaugacuga

SEQ ID NO: 1235603 - RNA, 19 nt, Artificial Sequence
  Description of Artificial Sequence: Synthetic oligonucleotide
  Antisense strand to SEQ ID NO: 1235602
ucagucaugggcaucuucu

SEQ ID NO: 1235604 - RNA, 19 nt, Artificial Sequence
  Description of Artificial Sequence: Synthetic oligonucleotide
  Sense strand starting at position 2367 of SEQ ID NO: 917463
guuaauacugugcaaacca

SEQ ID NO: 1235605 - RNA, 19 nt, Artificial Sequence
  Description of Artificial Sequence: Synthetic oligonucleotide
  Antisense strand to SEQ ID NO: 1235604
ugguuugcacaguauuaac

SEQ ID NO: 1235606 - RNA, 19 nt, Artificial Sequence
  Description of Artificial Sequence: Synthetic oligonucleotide
  Sense strand starting at position 2442 of SEQ ID NO: 917463
gugcacauuuaauugugua

SEQ ID NO: 1235607 - RNA, 19 nt, Artificial Sequence
  Description of Artificial Sequence: Synthetic oligonucleotide
  Antisense strand to SEQ ID NO: 1235606
uacacaauuaaaugugcac

SEQ ID NO: 1235608 - RNA, 19 nt, Artificial Sequence
  Description of Artificial Sequence: Synthetic oligonucleotide
  Sense strand starting at position 2521 of SEQ ID NO: 917463
aggauuugcuuguauuuac

SEQ ID NO: 1235609 - RNA, 19 nt, Artificial Sequence
  Description of Artificial Sequence: Synthetic oligonucleotide
  Antisense strand to SEQ ID NO: 1235608
guaaauacaagcaaauccu

SEQ ID NO: 1235610 - RNA, 19 nt, Artificial Sequence
  Description of Artificial Sequence: Synthetic oligonucleotide
  Sense strand starting at position 2542 of SEQ ID NO: 917463
ugccaaugaacuuggugaa

SEQ ID NO: 1235611 - RNA, 19 nt, Artificial Sequence
  Description of Artificial Sequence: Synthetic oligonucleotide
  Antisense strand to SEQ ID NO: 1235610
uucaccaaguucauuggca

SEQ ID NO: 1235612 - RNA, 19 nt, Artificial Sequence
  Description of Artificial Sequence: Synthetic oligonucleotide
  Sense strand starting at position 2543 of SEQ ID NO: 917463
gccaaugaacuuggugaau

SEQ ID NO: 1235613 - RNA, 19 nt, Artificial Sequence
  Description of Artificial Sequence: Synthetic oligonucleotide
  Antisense strand to SEQ ID NO: 1235612
auucaccaaguucauuggc

SEQ ID NO: 1235614 - RNA, 19 nt, Artificial Sequence
  Description of Artificial Sequence: Synthetic oligonucleotide
  Sense strand starting at position 2564 of SEQ ID NO: 917463
ggagaaugcaugggaugca

SEQ ID NO: 1235615 - RNA, 19 nt, Artificial Sequence
  Description of Artificial Sequence: Synthetic oligonucleotide
  Antisense strand to SEQ ID NO: 1235614
ugcaucccaugcauucucc

SEQ ID NO: 1235616 - RNA, 19 nt, Artificial Sequence
  Description of Artificial Sequence: Synthetic oligonucleotide
  Sense strand starting at position 2731 of SEQ ID NO: 917463
guaaucucaccuuaucagu

SEQ ID NO: 1235617 - RNA, 19 nt, Artificial Sequence
  Description of Artificial Sequence: Synthetic oligonucleotide
  Antisense strand to SEQ ID NO: 1235616
acugauaaggugagauuac

SEQ ID NO: 1235618 - RNA, 19 nt, Artificial Sequence
  Description of Artificial Sequence: Synthetic oligonucleotide
  Sense strand starting at position 2761 of SEQ ID NO: 917463
acacguuuaccaugaauag

SEQ ID NO: 1235619 - RNA, 19 nt, Artificial Sequence
  Description of Artificial Sequence: Synthetic oligonucleotide
  Antisense strand to SEQ ID NO: 1235618
cuauucaugguaaacgugu

SEQ ID NO: 1235620 - RNA, 19 nt, Artificial Sequence
  Description of Artificial Sequence: Synthetic oligonucleotide
  Sense strand starting at position 2762 of SEQ ID NO: 917463
cacguuuaccaugaauaga

SEQ ID NO: 1235621 - RNA, 19 nt, Artificial Sequence
  Description of Artificial Sequence: Synthetic oligonucleotide
  Antisense strand to SEQ ID NO: 1235620
ucuauucaugguaaacgug

SEQ ID NO: 1235622 - RNA, 19 nt, Artificial Sequence
  Description of Artificial Sequence: Synthetic oligonucleotide
  Sense strand starting at position 2803 of SEQ ID NO: 917463
aggcuauauguuggaauac

SEQ ID NO: 1235623 - RNA, 19 nt, Artificial Sequence
  Description of Artificial Sequence: Synthetic oligonucleotide
  Antisense strand to SEQ ID NO: 1235622
guauuccaacauauagccu

SEQ ID NO: 1235624 - RNA, 19 nt, Artificial Sequence
  Description of Artificial Sequence: Synthetic oligonucleotide
  Sense strand starting at position 2879 of SEQ ID NO: 917463
aguguccucgaacaugaaa

SEQ ID NO: 1235625 - RNA, 19 nt, Artificial Sequence
  Description of Artificial Sequence: Synthetic oligonucleotide
  Antisense strand to SEQ ID NO: 1235624
uuucauguucgaggacacu

SEQ ID NO: 1235626 - RNA, 19 nt, Artificial Sequence
  Description of Artificial Sequence: Synthetic oligonucleotide
  Sense strand starting at position 2904 of SEQ ID NO: 917463
gaguaugcucuggagaccu

SEQ ID NO: 1235627 - RNA, 19 nt, Artificial Sequence
  Description of Artificial Sequence: Synthetic oligonucleotide
  Antisense strand to SEQ ID NO: 1235626
aggucuccagagcauacuc

SEQ ID NO: 1235628 - RNA, 19 nt, Artificial Sequence
  Description of Artificial Sequence: Synthetic oligonucleotide
  Sense strand starting at position 2951 of SEQ ID NO: 917463
gauaaagaacuuuguuguu

SEQ ID NO: 1235629 - RNA, 19 nt, Artificial Sequence
  Description of Artificial Sequence: Synthetic oligonucleotide
  Antisense strand to SEQ ID NO: 1235628
aacaacaaaguucuuuauc

SEQ ID NO: 1235630 - RNA, 19 nt, Artificial Sequence
  Description of Artificial Sequence: Synthetic oligonucleotide
  Sense strand starting at position 3102 of SEQ ID NO: 917463
gggaguaaggugcagagua

SEQ ID NO: 1235631 - RNA, 19 nt, Artificial Sequence
  Description of Artificial Sequence: Synthetic oligonucleotide
  Antisense strand to SEQ ID NO: 1235630
uacucugcaccuuacuccc

SEQ ID NO: 1235632 - RNA, 19 nt, Artificial Sequence
  Description of Artificial Sequence: Synthetic oligonucleotide
  Sense strand starting at position 3104 of SEQ ID NO: 917463
gaguaaggugcagaguaua

SEQ ID NO: 1235633 - RNA, 19 nt, Artificial Sequence
  Description of Artificial Sequence: Synthetic oligonucleotide
  Antisense strand to SEQ ID NO: 1235632
uauacucugcaccuuacuc

SEQ ID NO: 1235634 - RNA, 19 nt, Artificial Sequence
  Description of Artificial Sequence: Synthetic oligonucleotide
  Sense strand starting at position 3125 of SEQ ID NO: 917463
gugcaugcugaggauaaca

SEQ ID NO: 1235635 - RNA, 19 nt, Artificial Sequence
  Description of Artificial Sequence: Synthetic oligonucleotide
  Antisense strand to SEQ ID NO: 1235634
uguuauccucagcaugcac

SEQ ID NO: 1235636 - RNA, 19 nt, Artificial Sequence
  Description of Artificial Sequence: Synthetic oligonucleotide
  Sense strand starting at position 3323 of SEQ ID NO: 917463
acaacuggagucugucaaa

SEQ ID NO: 1235637 - RNA, 19 nt, Artificial Sequence
  Description of Artificial Sequence: Synthetic oligonucleotide
  Antisense strand to SEQ ID NO: 1235636
uuugacagacuccaguugu

SEQ ID NO: 1235638 - RNA, 19 nt, Artificial Sequence
  Description of Artificial Sequence: Synthetic oligonucleotide
  Sense strand starting at position 3411 of SEQ ID NO: 917463
ugagaagccugaguuugaa

SEQ ID NO: 1235639 - RNA, 19 nt, Artificial Sequence
  Description of Artificial Sequence: Synthetic oligonucleotide
  Antisense strand to SEQ ID NO: 1235638
uucaaacucaggcuucuca

SEQ ID NO: 1235640 - RNA, 19 nt, Artificial Sequence
  Description of Artificial Sequence: Synthetic oligonucleotide
  Sense strand starting at position 3496 of SEQ ID NO: 917463
gagagaggcuuucugagua

SEQ ID NO: 1235641 - RNA, 19 nt, Artificial Sequence
  Description of Artificial Sequence: Synthetic oligonucleotide
  Antisense strand to SEQ ID NO: 1235640
uacucagaaagccucucuc

SEQ ID NO: 1235642 - RNA, 19 nt, Artificial Sequence
  Description of Artificial Sequence: Synthetic oligonucleotide
  Sense strand starting at position 3501 of SEQ ID NO: 917463
aggcuuucugaguaacuga

SEQ ID NO: 1235643 - RNA, 19 nt, Artificial Sequence
  Description of Artificial Sequence: Synthetic oligonucleotide
  Antisense strand to SEQ ID NO: 1235642
ucaguuacucagaaagccu

SEQ ID NO: 1235644 - RNA, 19 nt, Artificial Sequence
  Description of Artificial Sequence: Synthetic oligonucleotide
  Sense strand starting at position 3551 of SEQ ID NO: 917463
ccugauuucguccagcuuu

SEQ ID NO: 1235645 - RNA, 19 nt, Artificial Sequence
  Description of Artificial Sequence: Synthetic oligonucleotide
  Antisense strand to SEQ ID NO: 1235644
aaagcuggacgaaaucagg

SEQ ID NO: 1235646 - RNA, 19 nt, Artificial Sequence
  Description of Artificial Sequence: Synthetic oligonucleotide
  Sense strand starting at position 3648 of SEQ ID NO: 917463
gaaccaggaugucuguaaa

SEQ ID NO: 1235647 - RNA, 19 nt, Artificial Sequence
  Description of Artificial Sequence: Synthetic oligonucleotide
  Antisense strand to SEQ ID NO: 1235646
uuuacagacauccugguuc

SEQ ID NO: 1235648 - RNA, 19 nt, Artificial Sequence
  Description of Artificial Sequence: Synthetic oligonucleotide
  Sense strand starting at position 3651 of SEQ ID NO: 917463
ccaggaugucuguaaacau

SEQ ID NO: 1235649 - RNA, 19 nt, Artificial Sequence
  Description of Artificial Sequence: Synthetic oligonucleotide
  Antisense strand to SEQ ID NO: 1235648
auguuuacagacauccugg

SEQ ID NO: 1235650 - RNA, 19 nt, Artificial Sequence
  Description of Artificial Sequence: Synthetic oligonucleotide
  Sense strand starting at position 3687 of SEQ ID NO: 917463
auggauuguugggucaauu

SEQ ID NO: 1235651 - RNA, 19 nt, Artificial Sequence
  Description of Artificial Sequence: Synthetic oligonucleotide
  Antisense strand to SEQ ID NO: 1235650
aauugacccaacaauccau

SEQ ID NO: 1235652 - RNA, 19 nt, Artificial Sequence
  Description of Artificial Sequence: Synthetic oligonucleotide
  Sense strand starting at position 3893 of SEQ ID NO: 917464
ugugcucuugacuaaauau

SEQ ID NO: 1235653 - RNA, 19 nt, Artificial Sequence
  Description of Artificial Sequence: Synthetic oligonucleotide
  Antisense strand to SEQ ID NO: 1235652
auauuuagucaagagcaca

SEQ ID NO: 1235654 - RNA, 19 nt, Artificial Sequence
  Description of Artificial Sequence: Synthetic oligonucleotide
  Sense strand starting at position 14 of SEQ ID NO: 917464
ucugaugucgugucugguu

SEQ ID NO: 1235655 - RNA, 19 nt, Artificial Sequence
  Description of Artificial Sequence: Synthetic oligonucleotide
  Antisense strand to SEQ ID NO: 1235654
aaccagacacgacaucaga

SEQ ID NO: 1235656 - RNA, 19 nt, Artificial Sequence
  Description of Artificial Sequence: Synthetic oligonucleotide
  Sense strand starting at position 86 of SEQ ID NO: 917464
ugcagauguggagaaaugu

SEQ ID NO: 1235657 - RNA, 19 nt, Artificial Sequence
  Description of Artificial Sequence: Synthetic oligonucleotide
  Antisense strand to SEQ ID NO: 1235656
acauuucuccacaucugca

SEQ ID NO: 1235658 - RNA, 19 nt, Artificial Sequence
  Description of Artificial Sequence: Synthetic oligonucleotide
  Sense strand starting at position 95 of SEQ ID NO: 917464
ggagaaauguugucaaguu

SEQ ID NO: 1235659 - RNA, 19 nt, Artificial Sequence
  Description of Artificial Sequence: Synthetic oligonucleotide
  Antisense strand to SEQ ID NO: 1235658
aacuugacaacauuucucc

SEQ ID NO: 1235660 - RNA, 19 nt, Artificial Sequence
  Description of Artificial Sequence: Synthetic oligonucleotide
  Sense strand starting at position 278 of SEQ ID NO: 917464
gugccaagauuagcaagaa

SEQ ID NO: 1235661 - RNA, 19 nt, Artificial Sequence
  Description of Artificial Sequence: Synthetic oligonucleotide
  Antisense strand to SEQ ID NO: 1235660
uucuugcuaaucuuggcac

SEQ ID NO: 1235662 - RNA, 19 nt, Artificial Sequence
  Description of Artificial Sequence: Synthetic oligonucleotide
  Sense strand starting at position 425 of SEQ ID NO: 917464
uaauccuuagagugaauga

SEQ ID NO: 1235663 - RNA, 19 nt, Artificial Sequence
  Description of Artificial Sequence: Synthetic oligonucleotide
  Antisense strand to SEQ ID NO: 1235662
ucauucacucuaaggauua

SEQ ID NO: 1235664 - RNA, 19 nt, Artificial Sequence
  Description of Artificial Sequence: Synthetic oligonucleotide
  Sense strand starting at position 489 of SEQ ID NO: 917464
agcauaaagccaugagaau

SEQ ID NO: 1235665 - RNA, 19 nt, Artificial Sequence
  Description of Artificial Sequence: Synthetic oligonucleotide
  Antisense strand to SEQ ID NO: 1235664
auucucauggcuuuaugcu

SEQ ID NO: 1235666 - RNA, 19 nt, Artificial Sequence
  Description of Artificial Sequence: Synthetic oligonucleotide
  Sense strand starting at position 657 of SEQ ID NO: 917464
accugugucaugggaauau

SEQ ID NO: 1235667 - RNA, 19 nt, Artificial Sequence
  Description of Artificial Sequence: Synthetic oligonucleotide
  Antisense strand to SEQ ID NO: 1235666
auauucccaugacacaggu

SEQ ID NO: 1235668 - RNA, 19 nt, Artificial Sequence
  Description of Artificial Sequence: Synthetic oligonucleotide
  Sense strand starting at position 845 of SEQ ID NO: 917464
gucccuguauaucugauaa

SEQ ID NO: 1235669 - RNA, 19 nt, Artificial Sequence
  Description of Artificial Sequence: Synthetic oligonucleotide
  Antisense strand to SEQ ID NO: 1235668
uuaucagauauacagggac

SEQ ID NO: 1235670 - RNA, 19 nt, Artificial Sequence
  Description of Artificial Sequence: Synthetic oligonucleotide
  Sense strand starting at position 909 of SEQ ID NO: 917464
auagaugcaguuugauuau

SEQ ID NO: 1235671 - RNA, 19 nt, Artificial Sequence
  Description of Artificial Sequence: Synthetic oligonucleotide
  Antisense strand to SEQ ID NO: 1235670
auaaucaaacugcaucuau

SEQ ID NO: 1235672 - RNA, 19 nt, Artificial Sequence
  Description of Artificial Sequence: Synthetic oligonucleotide
  Sense strand starting at position 912 of SEQ ID NO: 917464
gaugcaguuugauuaucau

SEQ ID NO: 1235673 - RNA, 19 nt, Artificial Sequence
  Description of Artificial Sequence: Synthetic oligonucleotide
  Antisense strand to SEQ ID NO: 1235672
augauaaucaaacugcauc

SEQ ID NO: 1235674 - RNA, 19 nt, Artificial Sequence
  Description of Artificial Sequence: Synthetic oligonucleotide
  Sense strand starting at position 945 of SEQ ID NO: 917464
uuaaguucucuagggcaca

SEQ ID NO: 1235675 - RNA, 19 nt, Artificial Sequence
  Description of Artificial Sequence: Synthetic oligonucleotide
  Antisense strand to SEQ ID NO: 1235674
ugugcccuagagaacuuaa

SEQ ID NO: 1235676 - RNA, 19 nt, Artificial Sequence
  Description of Artificial Sequence: Synthetic oligonucleotide
  Sense strand starting at position 1059 of SEQ ID NO: 917464
cgaguauucuaccucugga

SEQ ID NO: 1235677 - RNA, 19 nt, Artificial Sequence
  Description of Artificial Sequence: Synthetic oligonucleotide
  Antisense strand to SEQ ID NO: 1235676
uccagagguagaauacucg

SEQ ID NO: 1235678 - RNA, 19 nt, Artificial Sequence
  Description of Artificial Sequence: Synthetic oligonucleotide
  Sense strand starting at position 1208 of SEQ ID NO: 917464
ugauaaauccuuggcuccu

SEQ ID NO: 1235679 - RNA, 19 nt, Artificial Sequence
  Description of Artificial Sequence: Synthetic oligonucleotide
  Antisense strand to SEQ ID NO: 1235678
aggagccaaggauuuauca

SEQ ID NO: 1235680 - RNA, 19 nt, Artificial Sequence
  Description of Artificial Sequence: Synthetic oligonucleotide
  Sense strand starting at position 1730 of SEQ ID NO: 917464
gagguuaggcagcauguua

SEQ ID NO: 1235681 - RNA, 19 nt, Artificial Sequence
  Description of Artificial Sequence: Synthetic oligonucleotide
  Antisense strand to SEQ ID NO: 1235680
uaacaugcugccuaaccuc

SEQ ID NO: 1235682 - RNA, 19 nt, Artificial Sequence
  Description of Artificial Sequence: Synthetic oligonucleotide
  Sense strand starting at position 1818 of SEQ ID NO: 917464
agaauuguggcugagcacu

SEQ ID NO: 1235683 - RNA, 19 nt, Artificial Sequence
  Description of Artificial Sequence: Synthetic oligonucleotide
  Antisense strand to SEQ ID NO: 1235682
agugcucagccacaauucu

SEQ ID NO: 1235684 - RNA, 19 nt, Artificial Sequence
  Description of Artificial Sequence: Synthetic oligonucleotide
  Sense strand starting at position 1859 of SEQ ID NO: 917464
caaagaggucuuuaaguuu

SEQ ID NO: 1235685 - RNA, 19 nt, Artificial Sequence
  Description of Artificial Sequence: Synthetic oligonucleotide
  Antisense strand to SEQ ID NO: 1235684
aaacuuaaagaccucuuug

SEQ ID NO: 1235686 - RNA, 19 nt, Artificial Sequence
  Description of Artificial Sequence: Synthetic oligonucleotide
  Sense strand starting at position 1862 of SEQ ID NO: 917464
agaggucuuuaaguuuaaa

SEQ ID NO: 1235687 - RNA, 19 nt, Artificial Sequence
  Description of Artificial Sequence: Synthetic oligonucleotide
  Antisense strand to SEQ ID NO: 1235686
uuuaaacuuaaagaccucu

SEQ ID NO: 1235688 - RNA, 19 nt, Artificial Sequence
  Description of Artificial Sequence: Synthetic oligonucleotide
  Sense strand starting at position 1865 of SEQ ID NO: 917464
ggucuuuaaguuuaaagca

SEQ ID NO: 1235689 - RNA, 19 nt, Artificial Sequence
  Description of Artificial Sequence: Synthetic oligonucleotide
  Antisense strand to SEQ ID NO: 1235688
ugcuuuaaacuuaaagacc

SEQ ID NO: 1235690 - RNA, 19 nt, Artificial Sequence
  Description of Artificial Sequence: Synthetic oligonucleotide
  Sense strand starting at position 1886 of SEQ ID NO: 917464
acaucaaaugugcaggauu

SEQ ID NO: 1235691 - RNA, 19 nt, Artificial Sequence
  Description of Artificial Sequence: Synthetic oligonucleotide
  Antisense strand to SEQ ID NO: 1235690
aauccugcacauuugaugu

SEQ ID NO: 1235692 - RNA, 19 nt, Artificial Sequence
  Description of Artificial Sequence: Synthetic oligonucleotide
  Sense strand starting at position 1916 of SEQ ID NO: 917464
augaaagucucaucuguca

SEQ ID NO: 1235693 - RNA, 19 nt, Artificial Sequence
  Description of Artificial Sequence: Synthetic oligonucleotide
  Antisense strand to SEQ ID NO: 1235692
ugacagaugagacuuucau

SEQ ID NO: 1235694 - RNA, 19 nt, Artificial Sequence
  Description of Artificial Sequence: Synthetic oligonucleotide
  Sense strand starting at position 2068 of SEQ ID NO: 917464
ccaaauuaaccuuggcaug

SEQ ID NO: 1235695 - RNA, 19 nt, Artificial Sequence
  Description of Artificial Sequence: Synthetic oligonucleotide
  Antisense strand to SEQ ID NO: 1235694
caugccaagguuaauuugg

SEQ ID NO: 1235696 - RNA, 19 nt, Artificial Sequence
  Description of Artificial Sequence: Synthetic oligonucleotide
  Sense strand starting at position 2328 of SEQ ID NO: 917464
gcuagugagagggaguaau

SEQ ID NO: 1235697 - RNA, 19 nt, Artificial Sequence
  Description of Artificial Sequence: Synthetic oligonucleotide
  Antisense strand to SEQ ID NO: 1235696
auuacucccucucacuagc

SEQ ID NO: 1235698 - RNA, 19 nt, Artificial Sequence
  Description of Artificial Sequence: Synthetic oligonucleotide
  Sense strand starting at position 2338 of SEQ ID NO: 917464
gggaguaauuuauaaagcu

SEQ ID NO: 1235699 - RNA, 19 nt, Artificial Sequence
  Description of Artificial Sequence: Synthetic oligonucleotide
  Antisense strand to SEQ ID NO: 1235698
agcuuuauaaauuacuccc

SEQ ID NO: 1235700 - RNA, 19 nt, Artificial Sequence
  Description of Artificial Sequence: Synthetic oligonucleotide
  Sense strand starting at position 2423 of SEQ ID NO: 917464
ucaugauuaucaguguaca

SEQ ID NO: 1235701 - RNA, 19 nt, Artificial Sequence
  Description of Artificial Sequence: Synthetic oligonucleotide
  Antisense strand to SEQ ID NO: 1235700
uguacacugauaaucauga

SEQ ID NO: 1235702 - RNA, 19 nt, Artificial Sequence
  Description of Artificial Sequence: Synthetic oligonucleotide
  Sense strand starting at position 2426 of SEQ ID NO: 917464
ugauuaucaguguacaaug

SEQ ID NO: 1235703 - RNA, 19 nt, Artificial Sequence
  Description of Artificial Sequence: Synthetic oligonucleotide
  Antisense strand to SEQ ID NO: 1235702
cauuguacacugauaauca

SEQ ID NO: 1235704 - RNA, 19 nt, Artificial Sequence
  Description of Artificial Sequence: Synthetic oligonucleotide
  Sense strand starting at position 2428 of SEQ ID NO: 917464
auuaucaguguacaaugua

SEQ ID NO: 1235705 - RNA, 19 nt, Artificial Sequence
  Description of Artificial Sequence: Synthetic oligonucleotide
  Antisense strand to SEQ ID NO: 1235704
uacauuguacacugauaau

SEQ ID NO: 1235706 - RNA, 19 nt, Artificial Sequence
  Description of Artificial Sequence: Synthetic oligonucleotide
  Sense strand starting at position 2499 of SEQ ID NO: 917464
uacugcaucuggguuauaa

SEQ ID NO: 1235707 - RNA, 19 nt, Artificial Sequence
  Description of Artificial Sequence: Synthetic oligonucleotide
  Antisense strand to SEQ ID NO: 1235706
uuauaacccagaugcagua

SEQ ID NO: 1235708 - RNA, 19 nt, Artificial Sequence
  Description of Artificial Sequence: Synthetic oligonucleotide
  Sense strand starting at position 2572 of SEQ ID NO: 917464
acuagaagucauugugagg

SEQ ID NO: 1235709 - RNA, 19 nt, Artificial Sequence
  Description of Artificial Sequence: Synthetic oligonucleotide
  Antisense strand to SEQ ID NO: 1235708
ccucacaaugacuucuagu

SEQ ID NO: 1235710 - RNA, 19 nt, Artificial Sequence
  Description of Artificial Sequence: Synthetic oligonucleotide
  Sense strand starting at position 2654 of SEQ ID NO: 917464
cuuucucaccuguguauuu

SEQ ID NO: 1235711 - RNA, 19 nt, Artificial Sequence
  Description of Artificial Sequence: Synthetic oligonucleotide
  Antisense strand to SEQ ID NO: 1235710
aaauacacaggugagaaag

SEQ ID NO: 1235712 - RNA, 19 nt, Artificial Sequence
  Description of Artificial Sequence: Synthetic oligonucleotide
  Sense strand starting at position 2655 of SEQ ID NO: 917464
uuucucaccuguguauuua

SEQ ID NO: 1235713 - RNA, 19 nt, Artificial Sequence
  Description of Artificial Sequence: Synthetic oligonucleotide
  Antisense strand to SEQ ID NO: 1235712
uaaauacacaggugagaaa

SEQ ID NO: 1235714 - RNA, 19 nt, Artificial Sequence
  Description of Artificial Sequence: Synthetic oligonucleotide
  Sense strand starting at position 2663 of SEQ ID NO: 917464
cuguguauuuaucuaccga

SEQ ID NO: 1235715 - RNA, 19 nt, Artificial Sequence
  Description of Artificial Sequence: Synthetic oligonucleotide
  Antisense strand to SEQ ID NO: 1235714
ucgguagauaaauacacag

SEQ ID NO: 1235716 - RNA, 19 nt, Artificial Sequence
  Description of Artificial Sequence: Synthetic oligonucleotide
  Sense strand starting at position 2676 of SEQ ID NO: 917464
uaccgauuacaaugugaca

SEQ ID NO: 1235717 - RNA, 19 nt, Artificial Sequence
  Description of Artificial Sequence: Synthetic oligonucleotide
  Antisense strand to SEQ ID NO: 1235716
ugucacauuguaaucggua

SEQ ID NO: 1235718 - RNA, 19 nt, Artificial Sequence
  Description of Artificial Sequence: Synthetic oligonucleotide
  Sense strand starting at position 2781 of SEQ ID NO: 917464
ugauuacuguuugcauaga

SEQ ID NO: 1235719 - RNA, 19 nt, Artificial Sequence
  Description of Artificial Sequence: Synthetic oligonucleotide
  Antisense strand to SEQ ID NO: 1235718
ucuaugcaaacaguaauca

SEQ ID NO: 1235720 - RNA, 19 nt, Artificial Sequence
  Description of Artificial Sequence: Synthetic oligonucleotide
  Sense strand starting at position 2861 of SEQ ID NO: 917464
ugagcaguuggucauagau

SEQ ID NO: 1235721 - RNA, 19 nt, Artificial Sequence
  Description of Artificial Sequence: Synthetic oligonucleotide
  Antisense strand to SEQ ID NO: 1235720
aucuaugaccaacugcuca

SEQ ID NO: 1235722 - RNA, 19 nt, Artificial Sequence
  Description of Artificial Sequence: Synthetic oligonucleotide
  Sense strand starting at position 2867 of SEQ ID NO: 917464
guuggucauagaugugaag

SEQ ID NO: 1235723 - RNA, 19 nt, Artificial Sequence
  Description of Artificial Sequence: Synthetic oligonucleotide
  Antisense strand to SEQ ID NO: 1235722
cuucacaucuaugaccaac

SEQ ID NO: 1235724 - RNA, 19 nt, Artificial Sequence
  Description of Artificial Sequence: Synthetic oligonucleotide
  Sense strand starting at position 2869 of SEQ ID NO: 917464
uggucauagaugugaagaa

SEQ ID NO: 1235725 - RNA, 19 nt, Artificial Sequence
  Description of Artificial Sequence: Synthetic oligonucleotide
  Antisense strand to SEQ ID NO: 1235724
uucuucacaucuaugacca

SEQ ID NO: 1235726 - RNA, 19 nt, Artificial Sequence
  Description of Artificial Sequence: Synthetic oligonucleotide
  Sense strand starting at position 2894 of SEQ ID NO: 917464
aagauagcaccuggaagua

SEQ ID NO: 1235727 - RNA, 19 nt, Artificial Sequence
  Description of Artificial Sequence: Synthetic oligonucleotide
  Antisense strand to SEQ ID NO: 1235726
uacuuccaggugcuaucuu

SEQ ID NO: 1235728 - RNA, 19 nt, Artificial Sequence
  Description of Artificial Sequence: Synthetic oligonucleotide
  Sense strand starting at position 3465 of SEQ ID NO: 917464
ccgugugcucauguaucca

SEQ ID NO: 1235729 - RNA, 19 nt, Artificial Sequence
  Description of Artificial Sequence: Synthetic oligonucleotide
  Antisense strand to SEQ ID NO: 1235728
uggauacaugagcacacgg

SEQ ID NO: 1235730 - RNA, 19 nt, Artificial Sequence
  Description of Artificial Sequence: Synthetic oligonucleotide
  Sense strand starting at position 3587 of SEQ ID NO: 917464
ugugaaaucuccuagauuu

SEQ ID NO: 1235731 - RNA, 19 nt, Artificial Sequence
  Description of Artificial Sequence: Synthetic oligonucleotide
  Antisense strand to SEQ ID NO: 1235730
aaaucuaggagauuucaca

SEQ ID NO: 1235732 - RNA, 19 nt, Artificial Sequence
  Description of Artificial Sequence: Synthetic oligonucleotide
  Sense strand starting at position 3751 of SEQ ID NO: 917463
cuaggagauuagucucuaa

SEQ ID NO: 1235733 - RNA, 19 nt, Artificial Sequence
  Description of Artificial Sequence: Synthetic oligonucleotide
  Antisense strand to SEQ ID NO: 1235732
uuagagacuaaucuccuag

SEQ ID NO: 1235734 - RNA, 19 nt, Artificial Sequence
  Description of Artificial Sequence: Synthetic oligonucleotide
  Sense strand starting at position 3893 of SEQ ID NO: 917465
ugugcucuugacuaaauau

SEQ ID NO: 1235735 - RNA, 19 nt, Artificial Sequence
  Description of Artificial Sequence: Synthetic oligonucleotide
  Antisense strand to SEQ ID NO: 1235734
auauuuagucaagagcaca

SEQ ID NO: 1235736 - RNA, 19 nt, Artificial Sequence
  Description of Artificial Sequence: Synthetic oligonucleotide
  Sense strand starting at position 186 of SEQ ID NO: 917465
auaugauaugcaugcugag

SEQ ID NO: 1235737 - RNA, 19 nt, Artificial Sequence
  Description of Artificial Sequence: Synthetic oligonucleotide
  Antisense strand to SEQ ID NO: 1235736
cucagcaugcauaucauau

SEQ ID NO: 1235738 - RNA, 19 nt, Artificial Sequence
  Description of Artificial Sequence: Synthetic oligonucleotide
  Sense strand starting at position 193 of SEQ ID NO: 917465
augcaugcugaggaacauu

SEQ ID NO: 1235739 - RNA, 19 nt, Artificial Sequence
  Description of Artificial Sequence: Synthetic oligonucleotide
  Antisense strand to SEQ ID NO: 1235738
aauguuccucagcaugcau

SEQ ID NO: 1235740 - RNA, 19 nt, Artificial Sequence
  Description of Artificial Sequence: Synthetic oligonucleotide
  Sense strand starting at position 224 of SEQ ID NO: 917465
augauagcgcaucauuaag

SEQ ID NO: 1235741 - RNA, 19 nt, Artificial Sequence
  Description of Artificial Sequence: Synthetic oligonucleotide
  Antisense strand to SEQ ID NO: 1235740
cuuaaugaugcgcuaucau

SEQ ID NO: 1235742 - RNA, 19 nt, Artificial Sequence
  Description of Artificial Sequence: Synthetic oligonucleotide
  Sense strand starting at position 275 of SEQ ID NO: 917465
aaggcaccauugucagaaa

SEQ ID NO: 1235743 - RNA, 19 nt, Artificial Sequence
  Description of Artificial Sequence: Synthetic oligonucleotide
  Antisense strand to SEQ ID NO: 1235742
uuucugacaauggugccuu

SEQ ID NO: 1235744 - RNA, 19 nt, Artificial Sequence
  Description of Artificial Sequence: Synthetic oligonucleotide
  Sense strand starting at position 399 of SEQ ID NO: 917465
cacagaguuuaugcaauga

SEQ ID NO: 1235745 - RNA, 19 nt, Artificial Sequence
  Description of Artificial Sequence: Synthetic oligonucleotide
  Antisense strand to SEQ ID NO: 1235744
ucauugcauaaacucugug

SEQ ID NO: 1235746 - RNA, 19 nt, Artificial Sequence
  Description of Artificial Sequence: Synthetic oligonucleotide
  Sense strand starting at position 403 of SEQ ID NO: 917465
gaguuuaugcaaugacaua

SEQ ID NO: 1235747 - RNA, 19 nt, Artificial Sequence
  Description of Artificial Sequence: Synthetic oligonucleotide
  Antisense strand to SEQ ID NO: 1235746
uaugucauugcauaaacuc

SEQ ID NO: 1235748 - RNA, 19 nt, Artificial Sequence
  Description of Artificial Sequence: Synthetic oligonucleotide
  Sense strand starting at position 552 of SEQ ID NO: 917465
acauauuguucuuucugga

SEQ ID NO: 1235749 - RNA, 19 nt, Artificial Sequence
  Description of Artificial Sequence: Synthetic oligonucleotide
  Antisense strand to SEQ ID NO: 1235748
uccagaaagaacaauaugu

SEQ ID NO: 1235750 - RNA, 19 nt, Artificial Sequence
  Description of Artificial Sequence: Synthetic oligonucleotide
  Sense strand starting at position 557 of SEQ ID NO: 917465
uuguucuuucuggaaacau

SEQ ID NO: 1235751 - RNA, 19 nt, Artificial Sequence
  Description of Artificial Sequence: Synthetic oligonucleotide
  Antisense strand to SEQ ID NO: 1235750
auguuuccagaaagaacaa

SEQ ID NO: 1235752 - RNA, 19 nt, Artificial Sequence
  Description of Artificial Sequence: Synthetic oligonucleotide
  Sense strand starting at position 991 of SEQ ID NO: 917465
uuuaguaauguccagacuu

SEQ ID NO: 1235753 - RNA, 19 nt, Artificial Sequence
  Description of Artificial Sequence: Synthetic oligonucleotide
  Antisense strand to SEQ ID NO: 1235752
aagucuggacauuacuaaa

SEQ ID NO: 1235754 - RNA, 19 nt, Artificial Sequence
  Description of Artificial Sequence: Synthetic oligonucleotide
  Sense strand starting at position 1181 of SEQ ID NO: 917465
guggcaacugcugacauaa

SEQ ID NO: 1235755 - RNA, 19 nt, Artificial Sequence
  Description of Artificial Sequence: Synthetic oligonucleotide
  Antisense strand to SEQ ID NO: 1235754
uuaugucagcaguugccac

SEQ ID NO: 1235756 - RNA, 19 nt, Artificial Sequence
  Description of Artificial Sequence: Synthetic oligonucleotide
  Sense strand starting at position 1238 of SEQ ID NO: 917465
ccugguggccuuuagaaca

SEQ ID NO: 1235757 - RNA, 19 nt, Artificial Sequence
  Description of Artificial Sequence: Synthetic oligonucleotide
  Antisense strand to SEQ ID NO: 1235756
uguucuaaaggccaccagg

SEQ ID NO: 1235758 - RNA, 19 nt, Artificial Sequence
  Description of Artificial Sequence: Synthetic oligonucleotide
  Sense strand starting at position 1251 of SEQ ID NO: 917465
agaacagaauucuugcuuu

SEQ ID NO: 1235759 - RNA, 19 nt, Artificial Sequence
  Description of Artificial Sequence: Synthetic oligonucleotide
  Antisense strand to SEQ ID NO: 1235758
aaagcaagaauucuguucu

SEQ ID NO: 1235760 - RNA, 19 nt, Artificial Sequence
  Description of Artificial Sequence: Synthetic oligonucleotide
  Sense strand starting at position 1325 of SEQ ID NO: 917465
ucgccuccucccuaaugaa

SEQ ID NO: 1235761 - RNA, 19 nt, Artificial Sequence
  Description of Artificial Sequence: Synthetic oligonucleotide
  Antisense strand to SEQ ID NO: 1235760
uucauuagggaggaggcga

SEQ ID NO: 1235762 - RNA, 19 nt, Artificial Sequence
  Description of Artificial Sequence: Synthetic oligonucleotide
  Sense strand starting at position 1344 of SEQ ID NO: 917465
auaaacaaguguccacauu

SEQ ID NO: 1235763 - RNA, 19 nt, Artificial Sequence
  Description of Artificial Sequence: Synthetic oligonucleotide
  Antisense strand to SEQ ID NO: 1235762
aauguggacacuuguuuau

SEQ ID NO: 1235764 - RNA, 19 nt, Artificial Sequence
  Description of Artificial Sequence: Synthetic oligonucleotide
  Sense strand starting at position 1416 of SEQ ID NO: 917465
gaguaacaguucucaucug

SEQ ID NO: 1235765 - RNA, 19 nt, Artificial Sequence
  Description of Artificial Sequence: Synthetic oligonucleotide
  Antisense strand to SEQ ID NO: 1235764
cagaugagaacuguuacuc

SEQ ID NO: 1235766 - RNA, 19 nt, Artificial Sequence
  Description of Artificial Sequence: Synthetic oligonucleotide
  Sense strand starting at position 1580 of SEQ ID NO: 917465
gguaguguggcauagaaau

SEQ ID NO: 1235767 - RNA, 19 nt, Artificial Sequence
  Description of Artificial Sequence: Synthetic oligonucleotide
  Antisense strand to SEQ ID NO: 1235766
auuucuaugccacacuacc

SEQ ID NO: 1235768 - RNA, 19 nt, Artificial Sequence
  Description of Artificial Sequence: Synthetic oligonucleotide
  Sense strand starting at position 1767 of SEQ ID NO: 917465
gcgucuuguagucugauca

SEQ ID NO: 1235769 - RNA, 19 nt, Artificial Sequence
  Description of Artificial Sequence: Synthetic oligonucleotide
  Antisense strand to SEQ ID NO: 1235768
ugaucagacuacaagacgc

SEQ ID NO: 1235770 - RNA, 19 nt, Artificial Sequence
  Description of Artificial Sequence: Synthetic oligonucleotide
  Sense strand starting at position 1771 of SEQ ID NO: 917465
cuuguagucugaucaaauc

SEQ ID NO: 1235771 - RNA, 19 nt, Artificial Sequence
  Description of Artificial Sequence: Synthetic oligonucleotide
  Antisense strand to SEQ ID NO: 1235770
gauuugaucagacuacaag

SEQ ID NO: 1235772 - RNA, 19 nt, Artificial Sequence
  Description of Artificial Sequence: Synthetic oligonucleotide
  Sense strand starting at position 1866 of SEQ ID NO: 917465
acugaacaucucggcagau

SEQ ID NO: 1235773 - RNA, 19 nt, Artificial Sequence
  Description of Artificial Sequence: Synthetic oligonucleotide
  Antisense strand to SEQ ID NO: 1235772
aucugccgagauguucagu

SEQ ID NO: 1235774 - RNA, 19 nt, Artificial Sequence
  Description of Artificial Sequence: Synthetic oligonucleotide
  Sense strand starting at position 1867 of SEQ ID NO: 917465
cugaacaucucggcagauu

SEQ ID NO: 1235775 - RNA, 19 nt, Artificial Sequence
  Description of Artificial Sequence: Synthetic oligonucleotide
  Antisense strand to SEQ ID NO: 1235774
aaucugccgagauguucag

SEQ ID NO: 1235776 - RNA, 19 nt, Artificial Sequence
  Description of Artificial Sequence: Synthetic oligonucleotide
  Sense strand starting at position 2172 of SEQ ID NO: 917465
acguauuugacgugccuca

SEQ ID NO: 1235777 - RNA, 19 nt, Artificial Sequence
  Description of Artificial Sequence: Synthetic oligonucleotide
  Antisense strand to SEQ ID NO: 1235776
ugaggcacgucaaauacgu

SEQ ID NO: 1235778 - RNA, 19 nt, Artificial Sequence
  Description of Artificial Sequence: Synthetic oligonucleotide
  Sense strand starting at position 2304 of SEQ ID NO: 917465
gccugucaaaguuagagaa

SEQ ID NO: 1235779 - RNA, 19 nt, Artificial Sequence
  Description of Artificial Sequence: Synthetic oligonucleotide
  Antisense strand to SEQ ID NO: 1235778
uucucuaacuuugacaggc

SEQ ID NO: 1235780 - RNA, 19 nt, Artificial Sequence
  Description of Artificial Sequence: Synthetic oligonucleotide
  Sense strand starting at position 2515 of SEQ ID NO: 917465
gggcuuuaacaccaggagu

SEQ ID NO: 1235781 - RNA, 19 nt, Artificial Sequence
  Description of Artificial Sequence: Synthetic oligonucleotide
  Antisense strand to SEQ ID NO: 1235780
acuccugguguuaaagccc

SEQ ID NO: 1235782 - RNA, 19 nt, Artificial Sequence
  Description of Artificial Sequence: Synthetic oligonucleotide
  Sense strand starting at position 2517 of SEQ ID NO: 917465
gcuuuaacaccaggaguga

SEQ ID NO: 1235783 - RNA, 19 nt, Artificial Sequence
  Description of Artificial Sequence: Synthetic oligonucleotide
  Antisense strand to SEQ ID NO: 1235782
ucacuccugguguuaaagc

SEQ ID NO: 1235784 - RNA, 19 nt, Artificial Sequence
  Description of Artificial Sequence: Synthetic oligonucleotide
  Sense strand starting at position 2614 of SEQ ID NO: 917465
acgcguuacguauuaagca

SEQ ID NO: 1235785 - RNA, 19 nt, Artificial Sequence
  Description of Artificial Sequence: Synthetic oligonucleotide
  Antisense strand to SEQ ID NO: 1235784
ugcuuaauacguaacgcgu

SEQ ID NO: 1235786 - RNA, 19 nt, Artificial Sequence
  Description of Artificial Sequence: Synthetic oligonucleotide
  Sense strand starting at position 2691 of SEQ ID NO: 917465
uuagaaggugccuaucaca

SEQ ID NO: 1235787 - RNA, 19 nt, Artificial Sequence
  Description of Artificial Sequence: Synthetic oligonucleotide
  Antisense strand to SEQ ID NO: 1235786
ugugauaggcaccuucuaa

SEQ ID NO: 1235788 - RNA, 19 nt, Artificial Sequence
  Description of Artificial Sequence: Synthetic oligonucleotide
  Sense strand starting at position 2864 of SEQ ID NO: 917465
aaugcuaggugagcaauau

SEQ ID NO: 1235789 - RNA, 19 nt, Artificial Sequence
  Description of Artificial Sequence: Synthetic oligonucleotide
  Antisense strand to SEQ ID NO: 1235788
auauugcucaccuagcauu

SEQ ID NO: 1235790 - RNA, 19 nt, Artificial Sequence
  Description of Artificial Sequence: Synthetic oligonucleotide
  Sense strand starting at position 2865 of SEQ ID NO: 917465
augcuaggugagcaauauu

SEQ ID NO: 1235791 - RNA, 19 nt, Artificial Sequence
  Description of Artificial Sequence: Synthetic oligonucleotide
  Antisense strand to SEQ ID NO: 1235790
aauauugcucaccuagcau

SEQ ID NO: 1235792 - RNA, 19 nt, Artificial Sequence
  Description of Artificial Sequence: Synthetic oligonucleotide
  Sense strand starting at position 2868 of SEQ ID NO: 917465
cuaggugagcaauauuauu

SEQ ID NO: 1235793 - RNA, 19 nt, Artificial Sequence
  Description of Artificial Sequence: Synthetic oligonucleotide
  Antisense strand to SEQ ID NO: 1235792
aauaauauugcucaccuag

SEQ ID NO: 1235794 - RNA, 19 nt, Artificial Sequence
  Description of Artificial Sequence: Synthetic oligonucleotide
  Sense strand starting at position 2955 of SEQ ID NO: 917465
ggaauucugauaggcagag

SEQ ID NO: 1235795 - RNA, 19 nt, Artificial Sequence
  Description of Artificial Sequence: Synthetic oligonucleotide
  Antisense strand to SEQ ID NO: 1235794
cucugccuaucagaauucc

SEQ ID NO: 1235796 - RNA, 19 nt, Artificial Sequence
  Description of Artificial Sequence: Synthetic oligonucleotide
  Sense strand starting at position 3030 of SEQ ID NO: 917465
gaguauaugguuuaagcaa

SEQ ID NO: 1235797 - RNA, 19 nt, Artificial Sequence
  Description of Artificial Sequence: Synthetic oligonucleotide
  Antisense strand to SEQ ID NO: 1235796
uugcuuaaaccauauacuc

SEQ ID NO: 1235798 - RNA, 19 nt, Artificial Sequence
  Description of Artificial Sequence: Synthetic oligonucleotide
  Sense strand starting at position 3061 of SEQ ID NO: 917465
ucaguuuggccauaucuga

SEQ ID NO: 1235799 - RNA, 19 nt, Artificial Sequence
  Description of Artificial Sequence: Synthetic oligonucleotide
  Antisense strand to SEQ ID NO: 1235798
ucagauauggccaaacuga

SEQ ID NO: 1235800 - RNA, 19 nt, Artificial Sequence
  Description of Artificial Sequence: Synthetic oligonucleotide
  Sense strand starting at position 3210 of SEQ ID NO: 917465
ucuuuaacauuguuugaug

SEQ ID NO: 1235801 - RNA, 19 nt, Artificial Sequence
  Description of Artificial Sequence: Synthetic oligonucleotide
  Antisense strand to SEQ ID NO: 1235800
caucaaacaauguuaaaga

SEQ ID NO: 1235802 - RNA, 19 nt, Artificial Sequence
  Description of Artificial Sequence: Synthetic oligonucleotide
  Sense strand starting at position 3217 of SEQ ID NO: 917465
cauuguuugaugugaagag

SEQ ID NO: 1235803 - RNA, 19 nt, Artificial Sequence
  Description of Artificial Sequence: Synthetic oligonucleotide
  Antisense strand to SEQ ID NO: 1235802
cucuucacaucaaacaaug

SEQ ID NO: 1235804 - RNA, 19 nt, Artificial Sequence
  Description of Artificial Sequence: Synthetic oligonucleotide
  Sense strand starting at position 3423 of SEQ ID NO: 917465
ggauuuaaauuaggacuuu

SEQ ID NO: 1235805 - RNA, 19 nt, Artificial Sequence
  Description of Artificial Sequence: Synthetic oligonucleotide
  Antisense strand to SEQ ID NO: 1235804
aaaguccuaauuuaaaucc

SEQ ID NO: 1235806 - RNA, 19 nt, Artificial Sequence
  Description of Artificial Sequence: Synthetic oligonucleotide
  Sense strand starting at position 3435 of SEQ ID NO: 917465
ggacuuugauucuucuuac

SEQ ID NO: 1235807 - RNA, 19 nt, Artificial Sequence
  Description of Artificial Sequence: Synthetic oligonucleotide
  Antisense strand to SEQ ID NO: 1235806
guaagaagaaucaaagucc

SEQ ID NO: 1235808 - RNA, 19 nt, Artificial Sequence
  Description of Artificial Sequence: Synthetic oligonucleotide
  Sense strand starting at position 3522 of SEQ ID NO: 917465
gaagcagcucgucuuguau

SEQ ID NO: 1235809 - RNA, 19 nt, Artificial Sequence
  Description of Artificial Sequence: Synthetic oligonucleotide
  Antisense strand to SEQ ID NO: 1235808
auacaagacgagcugcuuc

SEQ ID NO: 1235810 - RNA, 19 nt, Artificial Sequence
  Description of Artificial Sequence: Synthetic oligonucleotide
  Sense strand starting at position 3593 of SEQ ID NO: 917465
augugacaauugccuacua

SEQ ID NO: 1235811 - RNA, 19 nt, Artificial Sequence
  Description of Artificial Sequence: Synthetic oligonucleotide
  Antisense strand to SEQ ID NO: 1235810
uaguaggcaauugucacau

SEQ ID NO: 1235812 - RNA, 19 nt, Artificial Sequence
  Description of Artificial Sequence: Synthetic oligonucleotide
  Sense strand starting at position 3645 of SEQ ID NO: 917465
gugguuacacaagagucau

SEQ ID NO: 1235813 - RNA, 19 nt, Artificial Sequence
  Description of Artificial Sequence: Synthetic oligonucleotide
  Antisense strand to SEQ ID NO: 1235812
augacucuuguguaaccac

SEQ ID NO: 1235814 - RNA, 19 nt, Artificial Sequence
  Description of Artificial Sequence: Synthetic oligonucleotide
  Sense strand starting at position 3651 of SEQ ID NO: 917462
acacaagagucaucauguc

SEQ ID NO: 1235815 - RNA, 19 nt, Artificial Sequence
  Description of Artificial Sequence: Synthetic oligonucleotide
  Antisense strand to SEQ ID NO: 1235814
gacaugaugacucuugugu

SEQ ID NO: 1235816 - RNA, 19 nt, Artificial Sequence
  Description of Artificial Sequence: Synthetic oligonucleotide
  Sense strand starting at position 3965 of SEQ ID NO: 917466
uugaguggacucugauucu

SEQ ID NO: 1235817 - RNA, 19 nt, Artificial Sequence
  Description of Artificial Sequence: Synthetic oligonucleotide
  Antisense strand to SEQ ID NO: 1235816
agaaucagaguccacucaa

SEQ ID NO: 1235818 - RNA, 19 nt, Artificial Sequence
  Description of Artificial Sequence: Synthetic oligonucleotide
  Sense strand starting at position 116 of SEQ ID NO: 917466
uuaaaugagagucgacaaa

SEQ ID NO: 1235819 - RNA, 19 nt, Artificial Sequence
  Description of Artificial Sequence: Synthetic oligonucleotide
  Antisense strand to SEQ ID NO: 1235818
uuugucgacucucauuuaa

SEQ ID NO: 1235820 - RNA, 19 nt, Artificial Sequence
  Description of Artificial Sequence: Synthetic oligonucleotide
  Sense strand starting at position 183 of SEQ ID NO: 917466
acuguugcugcuuaaaugu

SEQ ID NO: 1235821 - RNA, 19 nt, Artificial Sequence
  Description of Artificial Sequence: Synthetic oligonucleotide
  Antisense strand to SEQ ID NO: 1235820
acauuuaagcagcaacagu

SEQ ID NO: 1235822 - RNA, 19 nt, Artificial Sequence
  Description of Artificial Sequence: Synthetic oligonucleotide
  Sense strand starting at position 325 of SEQ ID NO: 917466
ugguaacuuugaguuccua

SEQ ID NO: 1235823 - RNA, 19 nt, Artificial Sequence
  Description of Artificial Sequence: Synthetic oligonucleotide
  Antisense strand to SEQ ID NO: 1235822
uaggaacucaaaguuacca

SEQ ID NO: 1235824 - RNA, 19 nt, Artificial Sequence
  Description of Artificial Sequence: Synthetic oligonucleotide
  Sense strand starting at position 412 of SEQ ID NO: 917466
gagggaugaucucacugga

SEQ ID NO: 1235825 - RNA, 19 nt, Artificial Sequence
  Description of Artificial Sequence: Synthetic oligonucleotide
  Antisense strand to SEQ ID NO: 1235824
uccagugagaucaucccuc

SEQ ID NO: 1235826 - RNA, 19 nt, Artificial Sequence
  Description of Artificial Sequence: Synthetic oligonucleotide
  Sense strand starting at position 505 of SEQ ID NO: 917466
gccuguugguaccuguaaa

SEQ ID NO: 1235827 - RNA, 19 nt, Artificial Sequence
  Description of Artificial Sequence: Synthetic oligonucleotide
  Antisense strand to SEQ ID NO: 1235826
uuuacagguaccaacaggc

SEQ ID NO: 1235828 - RNA, 19 nt, Artificial Sequence
  Description of Artificial Sequence: Synthetic oligonucleotide
  Sense strand starting at position 506 of SEQ ID NO: 917466
ccuguugguaccuguaaau

SEQ ID NO: 1235829 - RNA, 19 nt, Artificial Sequence
  Description of Artificial Sequence: Synthetic oligonucleotide
  Antisense strand to SEQ ID NO: 1235828
auuuacagguaccaacagg

SEQ ID NO: 1235830 - RNA, 19 nt, Artificial Sequence
  Description of Artificial Sequence: Synthetic oligonucleotide
  Sense strand starting at position 528 of SEQ ID NO: 917466
ccaguaaucuacuuggaug

SEQ ID NO: 1235831 - RNA, 19 nt, Artificial Sequence
  Description of Artificial Sequence: Synthetic oligonucleotide
  Antisense strand to SEQ ID NO: 1235830
cauccaaguagauuacugg

SEQ ID NO: 1235832 - RNA, 19 nt, Artificial Sequence
  Description of Artificial Sequence: Synthetic oligonucleotide
  Sense strand starting at position 851 of SEQ ID NO: 917466
gagguuuacugggcgaaga

SEQ ID NO: 1235833 - RNA, 19 nt, Artificial Sequence
  Description of Artificial Sequence: Synthetic oligonucleotide
  Antisense strand to SEQ ID NO: 1235832
ucuucgcccaguaaaccuc

SEQ ID NO: 1235834 - RNA, 19 nt, Artificial Sequence
  Description of Artificial Sequence: Synthetic oligonucleotide
  Sense strand starting at position 852 of SEQ ID NO: 917466
agguuuacugggcgaagaa

SEQ ID NO: 1235835 - RNA, 19 nt, Artificial Sequence
  Description of Artificial Sequence: Synthetic oligonucleotide
  Antisense strand to SEQ ID NO: 1235834
uucuucgcccaguaaaccu

SEQ ID NO: 1235836 - RNA, 19 nt, Artificial Sequence
  Description of Artificial Sequence: Synthetic oligonucleotide
  Sense strand starting at position 853 of SEQ ID NO: 917466
gguuuacugggcgaagaau

SEQ ID NO: 1235837 - RNA, 19 nt, Artificial Sequence
  Description of Artificial Sequence: Synthetic oligonucleotide
  Antisense strand to SEQ ID NO: 1235836
auucuucgcccaguaaacc

SEQ ID NO: 1235838 - RNA, 19 nt, Artificial Sequence
  Description of Artificial Sequence: Synthetic oligonucleotide
  Sense strand starting at position 862 of SEQ ID NO: 917466
ggcgaagaauuccuguaaa

SEQ ID NO: 1235839 - RNA, 19 nt, Artificial Sequence
  Description of Artificial Sequence: Synthetic oligonucleotide
  Antisense strand to SEQ ID NO: 1235838
uuuacaggaauucuucgcc

SEQ ID NO: 1235840 - RNA, 19 nt, Artificial Sequence
  Description of Artificial Sequence: Synthetic oligonucleotide
  Sense strand starting at position 940 of SEQ ID NO: 917466
cgcggcuguccgagggauu

SEQ ID NO: 1235841 - RNA, 19 nt, Artificial Sequence
  Description of Artificial Sequence: Synthetic oligonucleotide
  Antisense strand to SEQ ID NO: 1235840
aaucccucggacagccgcg

SEQ ID NO: 1235842 - RNA, 19 nt, Artificial Sequence
  Description of Artificial Sequence: Synthetic oligonucleotide
  Sense strand starting at position 952 of SEQ ID NO: 917466
agggauuccuccuuccaga

SEQ ID NO: 1235843 - RNA, 19 nt, Artificial Sequence
  Description of Artificial Sequence: Synthetic oligonucleotide
  Antisense strand to SEQ ID NO: 1235842
ucuggaaggaggaaucccu

SEQ ID NO: 1235844 - RNA, 19 nt, Artificial Sequence
  Description of Artificial Sequence: Synthetic oligonucleotide
  Sense strand starting at position 2457 of SEQ ID NO: 917466
uucggugucugggugaagu

SEQ ID NO: 1235845 - RNA, 19 nt, Artificial Sequence
  Description of Artificial Sequence: Synthetic oligonucleotide
  Antisense strand to SEQ ID NO: 1235844
acuucacccagacaccgaa

SEQ ID NO: 1235846 - RNA, 19 nt, Artificial Sequence
  Description of Artificial Sequence: Synthetic oligonucleotide
  Sense strand starting at position 2458 of SEQ ID NO: 917466
ucggugucugggugaaguu

SEQ ID NO: 1235847 - RNA, 19 nt, Artificial Sequence
  Description of Artificial Sequence: Synthetic oligonucleotide
  Antisense strand to SEQ ID NO: 1235846
aacuucacccagacaccga

SEQ ID NO: 1235848 - RNA, 19 nt, Artificial Sequence
  Description of Artificial Sequence: Synthetic oligonucleotide
  Sense strand starting at position 2459 of SEQ ID NO: 917466
cggugucugggugaaguuu

SEQ ID NO: 1235849 - RNA, 19 nt, Artificial Sequence
  Description of Artificial Sequence: Synthetic oligonucleotide
  Antisense strand to SEQ ID NO: 1235848
aaacuucacccagacaccg

SEQ ID NO: 1235850 - RNA, 19 nt, Artificial Sequence
  Description of Artificial Sequence: Synthetic oligonucleotide
  Sense strand starting at position 2534 of SEQ ID NO: 917466
uagugcuuugguuaccgaa

SEQ ID NO: 1235851 - RNA, 19 nt, Artificial Sequence
  Description of Artificial Sequence: Synthetic oligonucleotide
  Antisense strand to SEQ ID NO: 1235850
uucgguaaccaaagcacua

SEQ ID NO: 1235852 - RNA, 19 nt, Artificial Sequence
  Description of Artificial Sequence: Synthetic oligonucleotide
  Sense strand starting at position 2995 of SEQ ID NO: 917466
gggcgaguuaggcagacaa

SEQ ID NO: 1235853 - RNA, 19 nt, Artificial Sequence
  Description of Artificial Sequence: Synthetic oligonucleotide
  Antisense strand to SEQ ID NO: 1235852
uugucugccuaacucgccc

SEQ ID NO: 1235854 - RNA, 19 nt, Artificial Sequence
  Description of Artificial Sequence: Synthetic oligonucleotide
  Sense strand starting at position 3076 of SEQ ID NO: 917466
guauuccauccacgaacuu

SEQ ID NO: 1235855 - RNA, 19 nt, Artificial Sequence
  Description of Artificial Sequence: Synthetic oligonucleotide
  Antisense strand to SEQ ID NO: 1235854
aaguucguggauggaauac

SEQ ID NO: 1235856 - RNA, 19 nt, Artificial Sequence
  Description of Artificial Sequence: Synthetic oligonucleotide
  Sense strand starting at position 3112 of SEQ ID NO: 917466
cuggaucugacauggagua

SEQ ID NO: 1235857 - RNA, 19 nt, Artificial Sequence
  Description of Artificial Sequence: Synthetic oligonucleotide
  Antisense strand to SEQ ID NO: 1235856
uacuccaugucagauccag

SEQ ID NO: 1235858 - RNA, 19 nt, Artificial Sequence
  Description of Artificial Sequence: Synthetic oligonucleotide
  Sense strand starting at position 3150 of SEQ ID NO: 917466
cuucuuucccuuuggaaag

SEQ ID NO: 1235859 - RNA, 19 nt, Artificial Sequence
  Description of Artificial Sequence: Synthetic oligonucleotide
  Antisense strand to SEQ ID NO: 1235858
cuuuccaaagggaaagaag

SEQ ID NO: 1235860 - RNA, 19 nt, Artificial Sequence
  Description of Artificial Sequence: Synthetic oligonucleotide
  Sense strand starting at position 3160 of SEQ ID NO: 917466
uuuggaaagaugcauguuu

SEQ ID NO: 1235861 - RNA, 19 nt, Artificial Sequence
  Description of Artificial Sequence: Synthetic oligonucleotide
  Antisense strand to SEQ ID NO: 1235860
aaacaugcaucuuuccaaa

SEQ ID NO: 1235862 - RNA, 19 nt, Artificial Sequence
  Description of Artificial Sequence: Synthetic oligonucleotide
  Sense strand starting at position 3182 of SEQ ID NO: 917466
cucggaguccuagggaaua

SEQ ID NO: 1235863 - RNA, 19 nt, Artificial Sequence
  Description of Artificial Sequence: Synthetic oligonucleotide
  Antisense strand to SEQ ID NO: 1235862
uauucccuaggacuccgag

SEQ ID NO: 1235864 - RNA, 19 nt, Artificial Sequence
  Description of Artificial Sequence: Synthetic oligonucleotide
  Sense strand starting at position 3194 of SEQ ID NO: 917466
gggaauaccuuagaauacu

SEQ ID NO: 1235865 - RNA, 19 nt, Artificial Sequence
  Description of Artificial Sequence: Synthetic oligonucleotide
  Antisense strand to SEQ ID NO: 1235864
aguauucuaagguauuccc

SEQ ID NO: 1235866 - RNA, 19 nt, Artificial Sequence
  Description of Artificial Sequence: Synthetic oligonucleotide
  Sense strand starting at position 3215 of SEQ ID NO: 917466
caugguugucauugguaca

SEQ ID NO: 1235867 - RNA, 19 nt, Artificial Sequence
  Description of Artificial Sequence: Synthetic oligonucleotide
  Antisense strand to SEQ ID NO: 1235866
uguaccaaugacaaccaug

SEQ ID NO: 1235868 - RNA, 19 nt, Artificial Sequence
  Description of Artificial Sequence: Synthetic oligonucleotide
  Sense strand starting at position 3265 of SEQ ID NO: 917466
guaggacugcaaggaaaua

SEQ ID NO: 1235869 - RNA, 19 nt, Artificial Sequence
  Description of Artificial Sequence: Synthetic oligonucleotide
  Antisense strand to SEQ ID NO: 1235868
uauuuccuugcaguccuac

SEQ ID NO: 1235870 - RNA, 19 nt, Artificial Sequence
  Description of Artificial Sequence: Synthetic oligonucleotide
  Sense strand starting at position 3305 of SEQ ID NO: 917466
cccugauacccaggaacuu

SEQ ID NO: 1235871 - RNA, 19 nt, Artificial Sequence
  Description of Artificial Sequence: Synthetic oligonucleotide
  Antisense strand to SEQ ID NO: 1235870
aaguuccuggguaucaggg

SEQ ID NO: 1235872 - RNA, 19 nt, Artificial Sequence
  Description of Artificial Sequence: Synthetic oligonucleotide
  Sense strand starting at position 3483 of SEQ ID NO: 917466
uguggaagaaugcauguaa

SEQ ID NO: 1235873 - RNA, 19 nt, Artificial Sequence
  Description of Artificial Sequence: Synthetic oligonucleotide
  Antisense strand to SEQ ID NO: 1235872
uuacaugcauucuuccaca

SEQ ID NO: 1235874 - RNA, 19 nt, Artificial Sequence
  Description of Artificial Sequence: Synthetic oligonucleotide
  Sense strand starting at position 3490 of SEQ ID NO: 917466
gaaugcauguaagaagaca

SEQ ID NO: 1235875 - RNA, 19 nt, Artificial Sequence
  Description of Artificial Sequence: Synthetic oligonucleotide
  Antisense strand to SEQ ID NO: 1235874
ugucuucuuacaugcauuc

SEQ ID NO: 1235876 - RNA, 19 nt, Artificial Sequence
  Description of Artificial Sequence: Synthetic oligonucleotide
  Sense strand starting at position 3507 of SEQ ID NO: 917466
cacagugauguuuagaauc

SEQ ID NO: 1235877 - RNA, 19 nt, Artificial Sequence
  Description of Artificial Sequence: Synthetic oligonucleotide
  Antisense strand to SEQ ID NO: 1235876
gauucuaaacaucacugug

SEQ ID NO: 1235878 - RNA, 19 nt, Artificial Sequence
  Description of Artificial Sequence: Synthetic oligonucleotide
  Sense strand starting at position 3586 of SEQ ID NO: 917466
acgaguacuauguagucau

SEQ ID NO: 1235879 - RNA, 19 nt, Artificial Sequence
  Description of Artificial Sequence: Synthetic oligonucleotide
  Antisense strand to SEQ ID NO: 1235878
augacuacauaguacucgu

SEQ ID NO: 1235880 - RNA, 19 nt, Artificial Sequence
  Description of Artificial Sequence: Synthetic oligonucleotide
  Sense strand starting at position 3693 of SEQ ID NO: 917466
auagacugaucucaaauga

SEQ ID NO: 1235881 - RNA, 19 nt, Artificial Sequence
  Description of Artificial Sequence: Synthetic oligonucleotide
  Antisense strand to SEQ ID NO: 1235880
ucauuugagaucagucuau

SEQ ID NO: 1235882 - RNA, 19 nt, Artificial Sequence
  Description of Artificial Sequence: Synthetic oligonucleotide
  Sense strand starting at position 3782 of SEQ ID NO: 917466
ugagaaauguguucuuagu

SEQ ID NO: 1235883 - RNA, 19 nt, Artificial Sequence
  Description of Artificial Sequence: Synthetic oligonucleotide
  Antisense strand to SEQ ID NO: 1235882
acuaagaacacauuucuca

SEQ ID NO: 1235884 - RNA, 19 nt, Artificial Sequence
  Description of Artificial Sequence: Synthetic oligonucleotide
  Sense strand starting at position 3784 of SEQ ID NO: 917466
agaaauguguucuuaguug

SEQ ID NO: 1235885 - RNA, 19 nt, Artificial Sequence
  Description of Artificial Sequence: Synthetic oligonucleotide
  Antisense strand to SEQ ID NO: 1235884
caacuaagaacacauuucu

SEQ ID NO: 1235886 - RNA, 19 nt, Artificial Sequence
  Description of Artificial Sequence: Synthetic oligonucleotide
  Sense strand starting at position 3788 of SEQ ID NO: 917466
auguguucuuaguugauuu

SEQ ID NO: 1235887 - RNA, 19 nt, Artificial Sequence
  Description of Artificial Sequence: Synthetic oligonucleotide
  Antisense strand to SEQ ID NO: 1235886
aaaucaacuaagaacacau

SEQ ID NO: 1235888 - RNA, 19 nt, Artificial Sequence
  Description of Artificial Sequence: Synthetic oligonucleotide
  Sense strand starting at position 3806 of SEQ ID NO: 917466
uugucacgugagcaucaua

SEQ ID NO: 1235889 - RNA, 19 nt, Artificial Sequence
  Description of Artificial Sequence: Synthetic oligonucleotide
  Antisense strand to SEQ ID NO: 1235888
uaugaugcucacgugacaa

SEQ ID NO: 1235890 - RNA, 19 nt, Artificial Sequence
  Description of Artificial Sequence: Synthetic oligonucleotide
  Sense strand starting at position 3821 of SEQ ID NO: 917466
cauagaguguacuuccaga

SEQ ID NO: 1235891 - RNA, 19 nt, Artificial Sequence
  Description of Artificial Sequence: Synthetic oligonucleotide
  Antisense strand to SEQ ID NO: 1235890
ucuggaaguacacucuaug

SEQ ID NO: 1235892 - RNA, 19 nt, Artificial Sequence
  Description of Artificial Sequence: Synthetic oligonucleotide
  Sense strand starting at position 3826 of SEQ ID NO: 917466
aguguacuuccagaaaccu

SEQ ID NO: 1235893 - RNA, 19 nt, Artificial Sequence
  Description of Artificial Sequence: Synthetic oligonucleotide
  Antisense strand to SEQ ID NO: 1235892
agguuucuggaaguacacu

SEQ ID NO: 1235894 - RNA, 19 nt, Artificial Sequence
  Description of Artificial Sequence: Synthetic oligonucleotide
  Sense strand starting at position 3871 of SEQ ID NO: 917466
ggcuauaugguaugacgua

SEQ ID NO: 1235895 - RNA, 19 nt, Artificial Sequence
  Description of Artificial Sequence: Synthetic oligonucleotide
  Antisense strand to SEQ ID NO: 1235894
uacgucauaccauauagcc

SEQ ID NO: 1235896 - RNA, 19 nt, Artificial Sequence
  Description of Artificial Sequence: Synthetic oligonucleotide
  Sense strand starting at position 3876 of SEQ ID NO: 917466
uaugguaugacguauugca

SEQ ID NO: 1235897 - RNA, 19 nt, Artificial Sequence
  Description of Artificial Sequence: Synthetic oligonucleotide
  Antisense strand to SEQ ID NO: 1235896
ugcaauacgucauaccaua

SEQ ID NO: 1235898 - RNA, 19 nt, Artificial Sequence
  Description of Artificial Sequence: Synthetic oligonucleotide
  Sense strand starting at position 3876 of SEQ ID NO: 917467
uaugguaugacguauugca

SEQ ID NO: 1235899 - RNA, 19 nt, Artificial Sequence
  Description of Artificial Sequence: Synthetic oligonucleotide
  Antisense strand to SEQ ID NO: 1235898
ugcaauacgucauaccaua

SEQ ID NO: 1235900 - RNA, 19 nt, Artificial Sequence
  Description of Artificial Sequence: Synthetic oligonucleotide
  Sense strand starting at position 47 of SEQ ID NO: 917467
uacagagucgugugaacag

SEQ ID NO: 1235901 - RNA, 19 nt, Artificial Sequence
  Description of Artificial Sequence: Synthetic oligonucleotide
  Antisense strand to SEQ ID NO: 1235900
cuguucacacgacucugua

SEQ ID NO: 1235902 - RNA, 19 nt, Artificial Sequence
  Description of Artificial Sequence: Synthetic oligonucleotide
  Sense strand starting at position 102 of SEQ ID NO: 917467
agggccuguuugucaggaa

SEQ ID NO: 1235903 - RNA, 19 nt, Artificial Sequence
  Description of Artificial Sequence: Synthetic oligonucleotide
  Antisense strand to SEQ ID NO: 1235902
uuccugacaaacaggcccu

SEQ ID NO: 1235904 - RNA, 19 nt, Artificial Sequence
  Description of Artificial Sequence: Synthetic oligonucleotide
  Sense strand starting at position 106 of SEQ ID NO: 917467
ccuguuugucaggaaacug

SEQ ID NO: 1235905 - RNA, 19 nt, Artificial Sequence
  Description of Artificial Sequence: Synthetic oligonucleotide
  Antisense strand to SEQ ID NO: 1235904
caguuuccugacaaacagg

SEQ ID NO: 1235906 - RNA, 19 nt, Artificial Sequence
  Description of Artificial Sequence: Synthetic oligonucleotide
  Sense strand starting at position 125 of SEQ ID NO: 917467
agaagcaaucccgauguuu

SEQ ID NO: 1235907 - RNA, 19 nt, Artificial Sequence
  Description of Artificial Sequence: Synthetic oligonucleotide
  Antisense strand to SEQ ID NO: 1235906
aaacaucgggauugcuucu

SEQ ID NO: 1235908 - RNA, 19 nt, Artificial Sequence
  Description of Artificial Sequence: Synthetic oligonucleotide
  Sense strand starting at position 127 of SEQ ID NO: 917467
aagcaaucccgauguuuag

SEQ ID NO: 1235909 - RNA, 19 nt, Artificial Sequence
  Description of Artificial Sequence: Synthetic oligonucleotide
  Antisense strand to SEQ ID NO: 1235908
cuaaacaucgggauugcuu

SEQ ID NO: 1235910 - RNA, 19 nt, Artificial Sequence
  Description of Artificial Sequence: Synthetic oligonucleotide
  Sense strand starting at position 137 of SEQ ID NO: 917467
gauguuuagcaaggcaaga

SEQ ID NO: 1235911 - RNA, 19 nt, Artificial Sequence
  Description of Artificial Sequence: Synthetic oligonucleotide
  Antisense strand to SEQ ID NO: 1235910
ucuugccuugcuaaacauc

SEQ ID NO: 1235912 - RNA, 19 nt, Artificial Sequence
  Description of Artificial Sequence: Synthetic oligonucleotide
  Sense strand starting at position 341 of SEQ ID NO: 917467
aucuaugaguccuuugaag

SEQ ID NO: 1235913 - RNA, 19 nt, Artificial Sequence
  Description of Artificial Sequence: Synthetic oligonucleotide
  Antisense strand to SEQ ID NO: 1235912
cuucaaaggacucauagau

SEQ ID NO: 1235914 - RNA, 19 nt, Artificial Sequence
  Description of Artificial Sequence: Synthetic oligonucleotide
  Sense strand starting at position 343 of SEQ ID NO: 917467
cuaugaguccuuugaagaa

SEQ ID NO: 1235915 - RNA, 19 nt, Artificial Sequence
  Description of Artificial Sequence: Synthetic oligonucleotide
  Antisense strand to SEQ ID NO: 1235914
uucuucaaaggacucauag

SEQ ID NO: 1235916 - RNA, 19 nt, Artificial Sequence
  Description of Artificial Sequence: Synthetic oligonucleotide
  Sense strand starting at position 439 of SEQ ID NO: 917467
gaagaaagaugacacagaa

SEQ ID NO: 1235917 - RNA, 19 nt, Artificial Sequence
  Description of Artificial Sequence: Synthetic oligonucleotide
  Antisense strand to SEQ ID NO: 1235916
uucugugucaucuuucuuc

SEQ ID NO: 1235918 - RNA, 19 nt, Artificial Sequence
  Description of Artificial Sequence: Synthetic oligonucleotide
  Sense strand starting at position 568 of SEQ ID NO: 917467
acagcucuccaaggugaga

SEQ ID NO: 1235919 - RNA, 19 nt, Artificial Sequence
  Description of Artificial Sequence: Synthetic oligonucleotide
  Antisense strand to SEQ ID NO: 1235918
ucucaccuuggagagcugu

SEQ ID NO: 1235920 - RNA, 19 nt, Artificial Sequence
  Description of Artificial Sequence: Synthetic oligonucleotide
  Sense strand starting at position 605 of SEQ ID NO: 917467
gcugcucuccaagagaacu

SEQ ID NO: 1235921 - RNA, 19 nt, Artificial Sequence
  Description of Artificial Sequence: Synthetic oligonucleotide
  Antisense strand to SEQ ID NO: 1235920
aguucucuuggagagcagc

SEQ ID NO: 1235922 - RNA, 19 nt, Artificial Sequence
  Description of Artificial Sequence: Synthetic oligonucleotide
  Sense strand starting at position 1050 of SEQ ID NO: 917467
acaaacauccacuguguua

SEQ ID NO: 1235923 - RNA, 19 nt, Artificial Sequence
  Description of Artificial Sequence: Synthetic oligonucleotide
  Antisense strand to SEQ ID NO: 1235922
uaacacaguggauguuugu

SEQ ID NO: 1235924 - RNA, 19 nt, Artificial Sequence
  Description of Artificial Sequence: Synthetic oligonucleotide
  Sense strand starting at position 1115 of SEQ ID NO: 917467
cauaucaauugggugauua

SEQ ID NO: 1235925 - RNA, 19 nt, Artificial Sequence
  Description of Artificial Sequence: Synthetic oligonucleotide
  Antisense strand to SEQ ID NO: 1235924
uaaucacccaauugauaug

SEQ ID NO: 1235926 - RNA, 19 nt, Artificial Sequence
  Description of Artificial Sequence: Synthetic oligonucleotide
  Sense strand starting at position 1116 of SEQ ID NO: 917467
auaucaauugggugauuaa

SEQ ID NO: 1235927 - RNA, 19 nt, Artificial Sequence
  Description of Artificial Sequence: Synthetic oligonucleotide
  Antisense strand to SEQ ID NO: 1235926
uuaaucacccaauugauau

SEQ ID NO: 1235928 - RNA, 19 nt, Artificial Sequence
  Description of Artificial Sequence: Synthetic oligonucleotide
  Sense strand starting at position 1127 of SEQ ID NO: 917467
gugauuaaucgagaggcau

SEQ ID NO: 1235929 - RNA, 19 nt, Artificial Sequence
  Description of Artificial Sequence: Synthetic oligonucleotide
  Antisense strand to SEQ ID NO: 1235928
augccucucgauuaaucac

SEQ ID NO: 1235930 - RNA, 19 nt, Artificial Sequence
  Description of Artificial Sequence: Synthetic oligonucleotide
  Sense strand starting at position 1159 of SEQ ID NO: 917467
ugaacaauugcucaauugu

SEQ ID NO: 1235931 - RNA, 19 nt, Artificial Sequence
  Description of Artificial Sequence: Synthetic oligonucleotide
  Antisense strand to SEQ ID NO: 1235930
acaauugagcaauuguuca

SEQ ID NO: 1235932 - RNA, 19 nt, Artificial Sequence
  Description of Artificial Sequence: Synthetic oligonucleotide
  Sense strand starting at position 1203 of SEQ ID NO: 917467
augucuuaugacggucaua

SEQ ID NO: 1235933 - RNA, 19 nt, Artificial Sequence
  Description of Artificial Sequence: Synthetic oligonucleotide
  Antisense strand to SEQ ID NO: 1235932
uaugaccgucauaagacau

SEQ ID NO: 1235934 - RNA, 19 nt, Artificial Sequence
  Description of Artificial Sequence: Synthetic oligonucleotide
  Sense strand starting at position 1206 of SEQ ID NO: 917467
ucuuaugacggucauacuu

SEQ ID NO: 1235935 - RNA, 19 nt, Artificial Sequence
  Description of Artificial Sequence: Synthetic oligonucleotide
  Antisense strand to SEQ ID NO: 1235934
aaguaugaccgucauaaga

SEQ ID NO: 1235936 - RNA, 19 nt, Artificial Sequence
  Description of Artificial Sequence: Synthetic oligonucleotide
  Sense strand starting at position 1237 of SEQ ID NO: 917467
ggcuguguguuuacagguu

SEQ ID NO: 1235937 - RNA, 19 nt, Artificial Sequence
  Description of Artificial Sequence: Synthetic oligonucleotide
  Antisense strand to SEQ ID NO: 1235936
aaccuguaaacacacagcc

SEQ ID NO: 1235938 - RNA, 19 nt, Artificial Sequence
  Description of Artificial Sequence: Synthetic oligonucleotide
  Sense strand starting at position 1270 of SEQ ID NO: 917467
ccaagacuccuggguuuac

SEQ ID NO: 1235939 - RNA, 19 nt, Artificial Sequence
  Description of Artificial Sequence: Synthetic oligonucleotide
  Antisense strand to SEQ ID NO: 1235938
guaaacccaggagucuugg

SEQ ID NO: 1235940 - RNA, 19 nt, Artificial Sequence
  Description of Artificial Sequence: Synthetic oligonucleotide
  Sense strand starting at position 1280 of SEQ ID NO: 917467
uggguuuaccaagauaguc

SEQ ID NO: 1235941 - RNA, 19 nt, Artificial Sequence
  Description of Artificial Sequence: Synthetic oligonucleotide
  Antisense strand to SEQ ID NO: 1235940
gacuaucuugguaaaccca

SEQ ID NO: 1235942 - RNA, 19 nt, Artificial Sequence
  Description of Artificial Sequence: Synthetic oligonucleotide
  Sense strand starting at position 1413 of SEQ ID NO: 917467
ggcugaguaucaccaguca

SEQ ID NO: 1235943 - RNA, 19 nt, Artificial Sequence
  Description of Artificial Sequence: Synthetic oligonucleotide
  Antisense strand to SEQ ID NO: 1235942
ugacuggugauacucagcc

SEQ ID NO: 1235944 - RNA, 19 nt, Artificial Sequence
  Description of Artificial Sequence: Synthetic oligonucleotide
  Sense strand starting at position 1994 of SEQ ID NO: 917467
cgugucugagccuugucaa

SEQ ID NO: 1235945 - RNA, 19 nt, Artificial Sequence
  Description of Artificial Sequence: Synthetic oligonucleotide
  Antisense strand to SEQ ID NO: 1235944
uugacaaggcucagacacg

SEQ ID NO: 1235946 - RNA, 19 nt, Artificial Sequence
  Description of Artificial Sequence: Synthetic oligonucleotide
  Sense strand starting at position 2262 of SEQ ID NO: 917467
ugcagaaauauaugggagu

SEQ ID NO: 1235947 - RNA, 19 nt, Artificial Sequence
  Description of Artificial Sequence: Synthetic oligonucleotide
  Antisense strand to SEQ ID NO: 1235946
acucccauauauuucugca

SEQ ID NO: 1235948 - RNA, 19 nt, Artificial Sequence
  Description of Artificial Sequence: Synthetic oligonucleotide
  Sense strand starting at position 2289 of SEQ ID NO: 917467
ggaggugaauaauccaugu

SEQ ID NO: 1235949 - RNA, 19 nt, Artificial Sequence
  Description of Artificial Sequence: Synthetic oligonucleotide
  Antisense strand to SEQ ID NO: 1235948
acauggauuauucaccucc

SEQ ID NO: 1235950 - RNA, 19 nt, Artificial Sequence
  Description of Artificial Sequence: Synthetic oligonucleotide
  Sense strand starting at position 2350 of SEQ ID NO: 917467
aggaaaggcuguguuaaag

SEQ ID NO: 1235951 - RNA, 19 nt, Artificial Sequence
  Description of Artificial Sequence: Synthetic oligonucleotide
  Antisense strand to SEQ ID NO: 1235950
cuuuaacacagccuuuccu

SEQ ID NO: 1235952 - RNA, 19 nt, Artificial Sequence
  Description of Artificial Sequence: Synthetic oligonucleotide
  Sense strand starting at position 2360 of SEQ ID NO: 917467
guguuaaagacucacguac

SEQ ID NO: 1235953 - RNA, 19 nt, Artificial Sequence
  Description of Artificial Sequence: Synthetic oligonucleotide
  Antisense strand to SEQ ID NO: 1235952
guacgugagucuuuaacac

SEQ ID NO: 1235954 - RNA, 19 nt, Artificial Sequence
  Description of Artificial Sequence: Synthetic oligonucleotide
  Sense strand starting at position 2485 of SEQ ID NO: 917467
acaugugugcacggaauuu

SEQ ID NO: 1235955 - RNA, 19 nt, Artificial Sequence
  Description of Artificial Sequence: Synthetic oligonucleotide
  Antisense strand to SEQ ID NO: 1235954
aaauuccgugcacacaugu

SEQ ID NO: 1235956 - RNA, 19 nt, Artificial Sequence
  Description of Artificial Sequence: Synthetic oligonucleotide
  Sense strand starting at position 2630 of SEQ ID NO: 917467
ugauaaguggcaugggacu

SEQ ID NO: 1235957 - RNA, 19 nt, Artificial Sequence
  Description of Artificial Sequence: Synthetic oligonucleotide
  Antisense strand to SEQ ID NO: 1235956
agucccaugccacuuauca

SEQ ID NO: 1235958 - RNA, 19 nt, Artificial Sequence
  Description of Artificial Sequence: Synthetic oligonucleotide
  Sense strand starting at position 2641 of SEQ ID NO: 917467
augggacuguggucaguaa

SEQ ID NO: 1235959 - RNA, 19 nt, Artificial Sequence
  Description of Artificial Sequence: Synthetic oligonucleotide
  Antisense strand to SEQ ID NO: 1235958
uuacugaccacagucccau

SEQ ID NO: 1235960 - RNA, 19 nt, Artificial Sequence
  Description of Artificial Sequence: Synthetic oligonucleotide
  Sense strand starting at position 2642 of SEQ ID NO: 917467
ugggacuguggucaguaaa

SEQ ID NO: 1235961 - RNA, 19 nt, Artificial Sequence
  Description of Artificial Sequence: Synthetic oligonucleotide
  Antisense strand to SEQ ID NO: 1235960
uuuacugaccacaguccca

SEQ ID NO: 1235962 - RNA, 19 nt, Artificial Sequence
  Description of Artificial Sequence: Synthetic oligonucleotide
  Sense strand starting at position 2645 of SEQ ID NO: 917467
gacuguggucaguaaacau

SEQ ID NO: 1235963 - RNA, 19 nt, Artificial Sequence
  Description of Artificial Sequence: Synthetic oligonucleotide
  Antisense strand to SEQ ID NO: 1235962
auguuuacugaccacaguc

SEQ ID NO: 1235964 - RNA, 19 nt, Artificial Sequence
  Description of Artificial Sequence: Synthetic oligonucleotide
  Sense strand starting at position 3089 of SEQ ID NO: 917467
ccaucauguuaggucaacu

SEQ ID NO: 1235965 - RNA, 19 nt, Artificial Sequence
  Description of Artificial Sequence: Synthetic oligonucleotide
  Antisense strand to SEQ ID NO: 1235964
aguugaccuaacaugaugg

SEQ ID NO: 1235966 - RNA, 19 nt, Artificial Sequence
  Description of Artificial Sequence: Synthetic oligonucleotide
  Sense strand starting at position 3357 of SEQ ID NO: 917467
gcuagucuugcucuguguu

SEQ ID NO: 1235967 - RNA, 19 nt, Artificial Sequence
  Description of Artificial Sequence: Synthetic oligonucleotide
  Antisense strand to SEQ ID NO: 1235966
aacacagagcaagacuagc

SEQ ID NO: 1235968 - RNA, 19 nt, Artificial Sequence
  Description of Artificial Sequence: Synthetic oligonucleotide
  Sense strand starting at position 3369 of SEQ ID NO: 917467
cuguguucugaugaacaua

SEQ ID NO: 1235969 - RNA, 19 nt, Artificial Sequence
  Description of Artificial Sequence: Synthetic oligonucleotide
  Antisense strand to SEQ ID NO: 1235968
uauguucaucagaacacag

SEQ ID NO: 1235970 - RNA, 19 nt, Artificial Sequence
  Description of Artificial Sequence: Synthetic oligonucleotide
  Sense strand starting at position 3529 of SEQ ID NO: 917467
caggaugugccucaaguca

SEQ ID NO: 1235971 - RNA, 19 nt, Artificial Sequence
  Description of Artificial Sequence: Synthetic oligonucleotide
  Antisense strand to SEQ ID NO: 1235970
ugacuugaggcacauccug

SEQ ID NO: 1235972 - RNA, 19 nt, Artificial Sequence
  Description of Artificial Sequence: Synthetic oligonucleotide
  Sense strand starting at position 3676 of SEQ ID NO: 917467
uuggcuugcuacucaacaa

SEQ ID NO: 1235973 - RNA, 19 nt, Artificial Sequence
  Description of Artificial Sequence: Synthetic oligonucleotide
  Antisense strand to SEQ ID NO: 1235972
uuguugaguagcaagccaa

SEQ ID NO: 1235974 - RNA, 19 nt, Artificial Sequence
  Description of Artificial Sequence: Synthetic oligonucleotide
  Sense strand starting at position 3763 of SEQ ID NO: 917467
gcuugacucuaggucagaa

SEQ ID NO: 1235975 - RNA, 19 nt, Artificial Sequence
  Description of Artificial Sequence: Synthetic oligonucleotide
  Antisense strand to SEQ ID NO: 1235974
uucugaccuagagucaagc

SEQ ID NO: 1235976 - RNA, 19 nt, Artificial Sequence
  Description of Artificial Sequence: Synthetic oligonucleotide
  Sense strand starting at position 3801 of SEQ ID NO: 917467
gugagaugccuccaucccu

SEQ ID NO: 1235977 - RNA, 19 nt, Artificial Sequence
  Description of Artificial Sequence: Synthetic oligonucleotide
  Antisense strand to SEQ ID NO: 1235976
agggauggaggcaucucac

SEQ ID NO: 1235978 - RNA, 19 nt, Artificial Sequence
  Description of Artificial Sequence: Synthetic oligonucleotide
  Sense strand starting at position 3868 of SEQ ID NO: 917468
acaauucuuguugagcuga

SEQ ID NO: 1235979 - RNA, 19 nt, Artificial Sequence
  Description of Artificial Sequence: Synthetic oligonucleotide
  Antisense strand to SEQ ID NO: 1235978
ucagcucaacaagaauugu

SEQ ID NO: 1235980 - RNA, 19 nt, Artificial Sequence
  Description of Artificial Sequence: Synthetic oligonucleotide
  Sense strand starting at position 227 of SEQ ID NO: 917468
gcaaacuuaguccacagau

SEQ ID NO: 1235981 - RNA, 19 nt, Artificial Sequence
  Description of Artificial Sequence: Synthetic oligonucleotide
  Antisense strand to SEQ ID NO: 1235980
aucuguggacuaaguuugc

SEQ ID NO: 1235982 - RNA, 19 nt, Artificial Sequence
  Description of Artificial Sequence: Synthetic oligonucleotide
  Sense strand starting at position 595 of SEQ ID NO: 917468
ucagguaaaugucucuaaa

SEQ ID NO: 1235983 - RNA, 19 nt, Artificial Sequence
  Description of Artificial Sequence: Synthetic oligonucleotide
  Antisense strand to SEQ ID NO: 1235982
uuuagagacauuuaccuga

SEQ ID NO: 1235984 - RNA, 19 nt, Artificial Sequence
  Description of Artificial Sequence: Synthetic oligonucleotide
  Sense strand starting at position 597 of SEQ ID NO: 917468
agguaaaugucucuaaaug

SEQ ID NO: 1235985 - RNA, 19 nt, Artificial Sequence
  Description of Artificial Sequence: Synthetic oligonucleotide
  Antisense strand to SEQ ID NO: 1235984
cauuuagagacauuuaccu

SEQ ID NO: 1235986 - RNA, 19 nt, Artificial Sequence
  Description of Artificial Sequence: Synthetic oligonucleotide
  Sense strand starting at position 598 of SEQ ID NO: 917468
gguaaaugucucuaaaugu

SEQ ID NO: 1235987 - RNA, 19 nt, Artificial Sequence
  Description of Artificial Sequence: Synthetic oligonucleotide
  Antisense strand to SEQ ID NO: 1235986
acauuuagagacauuuacc

SEQ ID NO: 1235988 - RNA, 19 nt, Artificial Sequence
  Description of Artificial Sequence: Synthetic oligonucleotide
  Sense strand starting at position 967 of SEQ ID NO: 917468
ccaaacguguucucuauuu

SEQ ID NO: 1235989 - RNA, 19 nt, Artificial Sequence
  Description of Artificial Sequence: Synthetic oligonucleotide
  Antisense strand to SEQ ID NO: 1235988
aaauagagaacacguuugg

SEQ ID NO: 1235990 - RNA, 19 nt, Artificial Sequence
  Description of Artificial Sequence: Synthetic oligonucleotide
  Sense strand starting at position 972 of SEQ ID NO: 917468
cguguucucuauuucuaac

SEQ ID NO: 1235991 - RNA, 19 nt, Artificial Sequence
  Description of Artificial Sequence: Synthetic oligonucleotide
  Antisense strand to SEQ ID NO: 1235990
guuagaaauagagaacacg

SEQ ID NO: 1235992 - RNA, 19 nt, Artificial Sequence
  Description of Artificial Sequence: Synthetic oligonucleotide
  Sense strand starting at position 1156 of SEQ ID NO: 917468
augagauucuaagaggauc

SEQ ID NO: 1235993 - RNA, 19 nt, Artificial Sequence
  Description of Artificial Sequence: Synthetic oligonucleotide
  Antisense strand to SEQ ID NO: 1235992
gauccucuuagaaucucau

SEQ ID NO: 1235994 - RNA, 19 nt, Artificial Sequence
  Description of Artificial Sequence: Synthetic oligonucleotide
  Sense strand starting at position 1257 of SEQ ID NO: 917468
aguaguugguacuuauaag

SEQ ID NO: 1235995 - RNA, 19 nt, Artificial Sequence
  Description of Artificial Sequence: Synthetic oligonucleotide
  Antisense strand to SEQ ID NO: 1235994
cuuauaaguaccaacuacu

SEQ ID NO: 1235996 - RNA, 19 nt, Artificial Sequence
  Description of Artificial Sequence: Synthetic oligonucleotide
  Sense strand starting at position 1364 of SEQ ID NO: 917468
auguuugaaguuggagaaa

SEQ ID NO: 1235997 - RNA, 19 nt, Artificial Sequence
  Description of Artificial Sequence: Synthetic oligonucleotide
  Antisense strand to SEQ ID NO: 1235996
uuucuccaacuucaaacau

SEQ ID NO: 1235998 - RNA, 19 nt, Artificial Sequence
  Description of Artificial Sequence: Synthetic oligonucleotide
  Sense strand starting at position 1478 of SEQ ID NO: 917468
caaguuauagacugcuguu

SEQ ID NO: 1235999 - RNA, 19 nt, Artificial Sequence
  Description of Artificial Sequence: Synthetic oligonucleotide
  Antisense strand to SEQ ID NO: 1235998
aacagcagucuauaacuug

SEQ ID NO: 1236000 - RNA, 19 nt, Artificial Sequence
  Description of Artificial Sequence: Synthetic oligonucleotide
  Sense strand starting at position 1757 of SEQ ID NO: 917468
ccugcuuugccauauaugu

SEQ ID NO: 1236001 - RNA, 19 nt, Artificial Sequence
  Description of Artificial Sequence: Synthetic oligonucleotide
  Antisense strand to SEQ ID NO: 1236000
acauauauggcaaagcagg

SEQ ID NO: 1236002 - RNA, 19 nt, Artificial Sequence
  Description of Artificial Sequence: Synthetic oligonucleotide
  Sense strand starting at position 1802 of SEQ ID NO: 917468
ggaacuuacccacgaaauu

SEQ ID NO: 1236003 - RNA, 19 nt, Artificial Sequence
  Description of Artificial Sequence: Synthetic oligonucleotide
  Antisense strand to SEQ ID NO: 1236002
aauuucguggguaaguucc

SEQ ID NO: 1236004 - RNA, 19 nt, Artificial Sequence
  Description of Artificial Sequence: Synthetic oligonucleotide
  Sense strand starting at position 1814 of SEQ ID NO: 917468
cgaaauucucuuuaucuug

SEQ ID NO: 1236005 - RNA, 19 nt, Artificial Sequence
  Description of Artificial Sequence: Synthetic oligonucleotide
  Antisense strand to SEQ ID NO: 1236004
caagauaaagagaauuucg

SEQ ID NO: 1236006 - RNA, 19 nt, Artificial Sequence
  Description of Artificial Sequence: Synthetic oligonucleotide
  Sense strand starting at position 1830 of SEQ ID NO: 917468
uugcuucucaggugaagac

SEQ ID NO: 1236007 - RNA, 19 nt, Artificial Sequence
  Description of Artificial Sequence: Synthetic oligonucleotide
  Antisense strand to SEQ ID NO: 1236006
gucuucaccugagaagcaa

SEQ ID NO: 1236008 - RNA, 19 nt, Artificial Sequence
  Description of Artificial Sequence: Synthetic oligonucleotide
  Sense strand starting at position 1907 of SEQ ID NO: 917468
uggagcuaagugugaagaa

SEQ ID NO: 1236009 - RNA, 19 nt, Artificial Sequence
  Description of Artificial Sequence: Synthetic oligonucleotide
  Antisense strand to SEQ ID NO: 1236008
uucuucacacuuagcucca

SEQ ID NO: 1236010 - RNA, 19 nt, Artificial Sequence
  Description of Artificial Sequence: Synthetic oligonucleotide
  Sense strand starting at position 1936 of SEQ ID NO: 917468
cucagaugugcuugggaga

SEQ ID NO: 1236011 - RNA, 19 nt, Artificial Sequence
  Description of Artificial Sequence: Synthetic oligonucleotide
  Antisense strand to SEQ ID NO: 1236010
ucucccaagcacaucugag

SEQ ID NO: 1236012 - RNA, 19 nt, Artificial Sequence
  Description of Artificial Sequence: Synthetic oligonucleotide
  Sense strand starting at position 2033 of SEQ ID NO: 917468
agggaagccugauaacaua

SEQ ID NO: 1236013 - RNA, 19 nt, Artificial Sequence
  Description of Artificial Sequence: Synthetic oligonucleotide
  Antisense strand to SEQ ID NO: 1236012
uauguuaucaggcuucccu

SEQ ID NO: 1236014 - RNA, 19 nt, Artificial Sequence
  Description of Artificial Sequence: Synthetic oligonucleotide
  Sense strand starting at position 2126 of SEQ ID NO: 917468
ugguauugcuuccuguaaa

SEQ ID NO: 1236015 - RNA, 19 nt, Artificial Sequence
  Description of Artificial Sequence: Synthetic oligonucleotide
  Antisense strand to SEQ ID NO: 1236014
uuuacaggaagcaauacca

SEQ ID NO: 1236016 - RNA, 19 nt, Artificial Sequence
  Description of Artificial Sequence: Synthetic oligonucleotide
  Sense strand starting at position 2205 of SEQ ID NO: 917468
auaaaucuugugugaucac

SEQ ID NO: 1236017 - RNA, 19 nt, Artificial Sequence
  Description of Artificial Sequence: Synthetic oligonucleotide
  Antisense strand to SEQ ID NO: 1236016
gugaucacacaagauuuau

SEQ ID NO: 1236018 - RNA, 19 nt, Artificial Sequence
  Description of Artificial Sequence: Synthetic oligonucleotide
  Sense strand starting at position 2208 of SEQ ID NO: 917468
aaucuugugugaucacuga

SEQ ID NO: 1236019 - RNA, 19 nt, Artificial Sequence
  Description of Artificial Sequence: Synthetic oligonucleotide
  Antisense strand to SEQ ID NO: 1236018
ucagugaucacacaagauu

SEQ ID NO: 1236020 - RNA, 19 nt, Artificial Sequence
  Description of Artificial Sequence: Synthetic oligonucleotide
  Sense strand starting at position 2212 of SEQ ID NO: 917468
uugugugaucacugauuac

SEQ ID NO: 1236021 - RNA, 19 nt, Artificial Sequence
  Description of Artificial Sequence: Synthetic oligonucleotide
  Antisense strand to SEQ ID NO: 1236020
guaaucagugaucacacaa

SEQ ID NO: 1236022 - RNA, 19 nt, Artificial Sequence
  Description of Artificial Sequence: Synthetic oligonucleotide
  Sense strand starting at position 2215 of SEQ ID NO: 917468
ugugaucacugauuacaca

SEQ ID NO: 1236023 - RNA, 19 nt, Artificial Sequence
  Description of Artificial Sequence: Synthetic oligonucleotide
  Antisense strand to SEQ ID NO: 1236022
uguguaaucagugaucaca

SEQ ID NO: 1236024 - RNA, 19 nt, Artificial Sequence
  Description of Artificial Sequence: Synthetic oligonucleotide
  Sense strand starting at position 2259 of SEQ ID NO: 917468
guguauccauccuuauguu

SEQ ID NO: 1236025 - RNA, 19 nt, Artificial Sequence
  Description of Artificial Sequence: Synthetic oligonucleotide
  Antisense strand to SEQ ID NO: 1236024
aacauaaggauggauacac

SEQ ID NO: 1236026 - RNA, 19 nt, Artificial Sequence
  Description of Artificial Sequence: Synthetic oligonucleotide
  Sense strand starting at position 2260 of SEQ ID NO: 917468
uguauccauccuuauguuu

SEQ ID NO: 1236027 - RNA, 19 nt, Artificial Sequence
  Description of Artificial Sequence: Synthetic oligonucleotide
  Antisense strand to SEQ ID NO: 1236026
aaacauaaggauggauaca

SEQ ID NO: 1236028 - RNA, 19 nt, Artificial Sequence
  Description of Artificial Sequence: Synthetic oligonucleotide
  Sense strand starting at position 2383 of SEQ ID NO: 917468
gccaacugucaauauugua

SEQ ID NO: 1236029 - RNA, 19 nt, Artificial Sequence
  Description of Artificial Sequence: Synthetic oligonucleotide
  Antisense strand to SEQ ID NO: 1236028
uacaauauugacaguuggc

SEQ ID NO: 1236030 - RNA, 19 nt, Artificial Sequence
  Description of Artificial Sequence: Synthetic oligonucleotide
  Sense strand starting at position 2410 of SEQ ID NO: 917468
acuccuaaguguccuacaa

SEQ ID NO: 1236031 - RNA, 19 nt, Artificial Sequence
  Description of Artificial Sequence: Synthetic oligonucleotide
  Antisense strand to SEQ ID NO: 1236030
uuguaggacacuuaggagu

SEQ ID NO: 1236032 - RNA, 19 nt, Artificial Sequence
  Description of Artificial Sequence: Synthetic oligonucleotide
  Sense strand starting at position 2492 of SEQ ID NO: 917468
cuccauuggucuccuauca

SEQ ID NO: 1236033 - RNA, 19 nt, Artificial Sequence
  Description of Artificial Sequence: Synthetic oligonucleotide
  Antisense strand to SEQ ID NO: 1236032
ugauaggagaccaauggag

SEQ ID NO: 1236034 - RNA, 19 nt, Artificial Sequence
  Description of Artificial Sequence: Synthetic oligonucleotide
  Sense strand starting at position 2514 of SEQ ID NO: 917468
ccuccaaagcuugauaugu

SEQ ID NO: 1236035 - RNA, 19 nt, Artificial Sequence
  Description of Artificial Sequence: Synthetic oligonucleotide
  Antisense strand to SEQ ID NO: 1236034
acauaucaagcuuuggagg

SEQ ID NO: 1236036 - RNA, 19 nt, Artificial Sequence
  Description of Artificial Sequence: Synthetic oligonucleotide
  Sense strand starting at position 2588 of SEQ ID NO: 917468
gucuguuucuucuucuaga

SEQ ID NO: 1236037 - RNA, 19 nt, Artificial Sequence
  Description of Artificial Sequence: Synthetic oligonucleotide
  Antisense strand to SEQ ID NO: 1236036
ucuagaagaagaaacagac

SEQ ID NO: 1236038 - RNA, 19 nt, Artificial Sequence
  Description of Artificial Sequence: Synthetic oligonucleotide
  Sense strand starting at position 2666 of SEQ ID NO: 917468
cauaaaguguuauuggaac

SEQ ID NO: 1236039 - RNA, 19 nt, Artificial Sequence
  Description of Artificial Sequence: Synthetic oligonucleotide
  Antisense strand to SEQ ID NO: 1236038
guuccaauaacacuuuaug

SEQ ID NO: 1236040 - RNA, 19 nt, Artificial Sequence
  Description of Artificial Sequence: Synthetic oligonucleotide
  Sense strand starting at position 2672 of SEQ ID NO: 917468
guguuauuggaacacagua

SEQ ID NO: 1236041 - RNA, 19 nt, Artificial Sequence
  Description of Artificial Sequence: Synthetic oligonucleotide
  Antisense strand to SEQ ID NO: 1236040
uacuguguuccaauaacac

SEQ ID NO: 1236042 - RNA, 19 nt, Artificial Sequence
  Description of Artificial Sequence: Synthetic oligonucleotide
  Sense strand starting at position 3057 of SEQ ID NO: 917468
cguggauuugaguaguugu

SEQ ID NO: 1236043 - RNA, 19 nt, Artificial Sequence
  Description of Artificial Sequence: Synthetic oligonucleotide
  Antisense strand to SEQ ID NO: 1236042
acaacuacucaaauccacg

SEQ ID NO: 1236044 - RNA, 19 nt, Artificial Sequence
  Description of Artificial Sequence: Synthetic oligonucleotide
  Sense strand starting at position 3163 of SEQ ID NO: 917468
acauuuccaugaggagagu

SEQ ID NO: 1236045 - RNA, 19 nt, Artificial Sequence
  Description of Artificial Sequence: Synthetic oligonucleotide
  Antisense strand to SEQ ID NO: 1236044
acucuccucauggaaaugu

SEQ ID NO: 1236046 - RNA, 19 nt, Artificial Sequence
  Description of Artificial Sequence: Synthetic oligonucleotide
  Sense strand starting at position 3174 of SEQ ID NO: 917468
aggagagugacuuggucua

SEQ ID NO: 1236047 - RNA, 19 nt, Artificial Sequence
  Description of Artificial Sequence: Synthetic oligonucleotide
  Antisense strand to SEQ ID NO: 1236046
uagaccaagucacucuccu

SEQ ID NO: 1236048 - RNA, 19 nt, Artificial Sequence
  Description of Artificial Sequence: Synthetic oligonucleotide
  Sense strand starting at position 3176 of SEQ ID NO: 917468
gagagugacuuggucuaac

SEQ ID NO: 1236049 - RNA, 19 nt, Artificial Sequence
  Description of Artificial Sequence: Synthetic oligonucleotide
  Antisense strand to SEQ ID NO: 1236048
guuagaccaagucacucuc

SEQ ID NO: 1236050 - RNA, 19 nt, Artificial Sequence
  Description of Artificial Sequence: Synthetic oligonucleotide
  Sense strand starting at position 3304 of SEQ ID NO: 917468
uggcaaagcucuuucucaa

SEQ ID NO: 1236051 - RNA, 19 nt, Artificial Sequence
  Description of Artificial Sequence: Synthetic oligonucleotide
  Antisense strand to SEQ ID NO: 1236050
uugagaaagagcuuugcca

SEQ ID NO: 1236052 - RNA, 19 nt, Artificial Sequence
  Description of Artificial Sequence: Synthetic oligonucleotide
  Sense strand starting at position 3343 of SEQ ID NO: 917468
guacuaggauuccuucuuu

SEQ ID NO: 1236053 - RNA, 19 nt, Artificial Sequence
  Description of Artificial Sequence: Synthetic oligonucleotide
  Antisense strand to SEQ ID NO: 1236052
aaagaaggaauccuaguac

SEQ ID NO: 1236054 - RNA, 19 nt, Artificial Sequence
  Description of Artificial Sequence: Synthetic oligonucleotide
  Sense strand starting at position 3897 of SEQ ID NO: 917468
auggguuauuuauaccaac

SEQ ID NO: 1236055 - RNA, 19 nt, Artificial Sequence
  Description of Artificial Sequence: Synthetic oligonucleotide
  Antisense strand to SEQ ID NO: 1236054
guugguauaaauaacccau

SEQ ID NO: 1236056 - RNA, 19 nt, Artificial Sequence
  Description of Artificial Sequence: Synthetic oligonucleotide
  Sense strand starting at position 3920 of SEQ ID NO: 917468
ugauaaucuugauugccuu

SEQ ID NO: 1236057 - RNA, 19 nt, Artificial Sequence
  Description of Artificial Sequence: Synthetic oligonucleotide
  Antisense strand to SEQ ID NO: 1236056
aaggcaaucaagauuauca

SEQ ID NO: 1236058 - RNA, 19 nt, Artificial Sequence
  Description of Artificial Sequence: Synthetic oligonucleotide
  Sense strand starting at position 3978 of SEQ ID NO: 917468
ucauccacaguuuguaauu

SEQ ID NO: 1236059 - RNA, 19 nt, Artificial Sequence
  Description of Artificial Sequence: Synthetic oligonucleotide
  Antisense strand to SEQ ID NO: 1236058
aauuacaaacuguggauga

SEQ ID NO: 1236060 - RNA, 19 nt, Artificial Sequence
  Description of Artificial Sequence: Synthetic oligonucleotide
  Sense strand starting at position 3978 of SEQ ID NO: 917469
ucauccacaguuuguaauu

SEQ ID NO: 1236061 - RNA, 19 nt, Artificial Sequence
  Description of Artificial Sequence: Synthetic oligonucleotide
  Antisense strand to SEQ ID NO: 1236060
aauuacaaacuguggauga

SEQ ID NO: 1236062 - RNA, 19 nt, Artificial Sequence
  Description of Artificial Sequence: Synthetic oligonucleotide
  Sense strand starting at position 435 of SEQ ID NO: 917469
uugaacgaguuucuuaaga

SEQ ID NO: 1236063 - RNA, 19 nt, Artificial Sequence
  Description of Artificial Sequence: Synthetic oligonucleotide
  Antisense strand to SEQ ID NO: 1236062
ucuuaagaaacucguucaa

SEQ ID NO: 1236064 - RNA, 19 nt, Artificial Sequence
  Description of Artificial Sequence: Synthetic oligonucleotide
  Sense strand starting at position 494 of SEQ ID NO: 917469
ggacuaagguccuuccaaa

SEQ ID NO: 1236065 - RNA, 19 nt, Artificial Sequence
  Description of Artificial Sequence: Synthetic oligonucleotide
  Antisense strand to SEQ ID NO: 1236064
uuuggaaggaccuuagucc

SEQ ID NO: 1236066 - RNA, 19 nt, Artificial Sequence
  Description of Artificial Sequence: Synthetic oligonucleotide
  Sense strand starting at position 527 of SEQ ID NO: 917469
uucuuaauaccaggguaga

SEQ ID NO: 1236067 - RNA, 19 nt, Artificial Sequence
  Description of Artificial Sequence: Synthetic oligonucleotide
  Antisense strand to SEQ ID NO: 1236066
ucuacccugguauuaagaa

SEQ ID NO: 1236068 - RNA, 19 nt, Artificial Sequence
  Description of Artificial Sequence: Synthetic oligonucleotide
  Sense strand starting at position 528 of SEQ ID NO: 917469
ucuuaauaccaggguagaa

SEQ ID NO: 1236069 - RNA, 19 nt, Artificial Sequence
  Description of Artificial Sequence: Synthetic oligonucleotide
  Antisense strand to SEQ ID NO: 1236068
uucuacccugguauuaaga

SEQ ID NO: 1236070 - RNA, 19 nt, Artificial Sequence
  Description of Artificial Sequence: Synthetic oligonucleotide
  Sense strand starting at position 738 of SEQ ID NO: 917469
cacuucuaucgggaagcaa

SEQ ID NO: 1236071 - RNA, 19 nt, Artificial Sequence
  Description of Artificial Sequence: Synthetic oligonucleotide
  Antisense strand to SEQ ID NO: 1236070
uugcuucccgauagaagug

SEQ ID NO: 1236072 - RNA, 19 nt, Artificial Sequence
  Description of Artificial Sequence: Synthetic oligonucleotide
  Sense strand starting at position 1018 of SEQ ID NO: 917469
accagacaccucugggauu

SEQ ID NO: 1236073 - RNA, 19 nt, Artificial Sequence
  Description of Artificial Sequence: Synthetic oligonucleotide
  Antisense strand to SEQ ID NO: 1236072
aaucccagaggugucuggu

SEQ ID NO: 1236074 - RNA, 19 nt, Artificial Sequence
  Description of Artificial Sequence: Synthetic oligonucleotide
  Sense strand starting at position 1234 of SEQ ID NO: 917469
gcuauagccuauccagaaa

SEQ ID NO: 1236075 - RNA, 19 nt, Artificial Sequence
  Description of Artificial Sequence: Synthetic oligonucleotide
  Antisense strand to SEQ ID NO: 1236074
uuucuggauaggcuauagc

SEQ ID NO: 1236076 - RNA, 19 nt, Artificial Sequence
  Description of Artificial Sequence: Synthetic oligonucleotide
  Sense strand starting at position 1282 of SEQ ID NO: 917469
cucuccaacugguuaggua

SEQ ID NO: 1236077 - RNA, 19 nt, Artificial Sequence
  Description of Artificial Sequence: Synthetic oligonucleotide
  Antisense strand to SEQ ID NO: 1236076
uaccuaaccaguuggagag

SEQ ID NO: 1236078 - RNA, 19 nt, Artificial Sequence
  Description of Artificial Sequence: Synthetic oligonucleotide
  Sense strand starting at position 1286 of SEQ ID NO: 917469
ccaacugguuagguagaaa

SEQ ID NO: 1236079 - RNA, 19 nt, Artificial Sequence
  Description of Artificial Sequence: Synthetic oligonucleotide
  Antisense strand to SEQ ID NO: 1236078
uuucuaccuaaccaguugg

SEQ ID NO: 1236080 - RNA, 19 nt, Artificial Sequence
  Description of Artificial Sequence: Synthetic oligonucleotide
  Sense strand starting at position 2119 of SEQ ID NO: 917469
agcuuugaccuuuggaacu

SEQ ID NO: 1236081 - RNA, 19 nt, Artificial Sequence
  Description of Artificial Sequence: Synthetic oligonucleotide
  Antisense strand to SEQ ID NO: 1236080
aguuccaaaggucaaagcu

SEQ ID NO: 1236082 - RNA, 19 nt, Artificial Sequence
  Description of Artificial Sequence: Synthetic oligonucleotide
  Sense strand starting at position 2192 of SEQ ID NO: 917469
agugaauugcaauguaaag

SEQ ID NO: 1236083 - RNA, 19 nt, Artificial Sequence
  Description of Artificial Sequence: Synthetic oligonucleotide
  Antisense strand to SEQ ID NO: 1236082
cuuuacauugcaauucacu

SEQ ID NO: 1236084 - RNA, 19 nt, Artificial Sequence
  Description of Artificial Sequence: Synthetic oligonucleotide
  Sense strand starting at position 2222 of SEQ ID NO: 917469
cgccacuugggugaucuua

SEQ ID NO: 1236085 - RNA, 19 nt, Artificial Sequence
  Description of Artificial Sequence: Synthetic oligonucleotide
  Antisense strand to SEQ ID NO: 1236084
uaagaucacccaaguggcg

SEQ ID NO: 1236086 - RNA, 19 nt, Artificial Sequence
  Description of Artificial Sequence: Synthetic oligonucleotide
  Sense strand starting at position 2224 of SEQ ID NO: 917469
ccacuugggugaucuuaac

SEQ ID NO: 1236087 - RNA, 19 nt, Artificial Sequence
  Description of Artificial Sequence: Synthetic oligonucleotide
  Antisense strand to SEQ ID NO: 1236086
guuaagaucacccaagugg

SEQ ID NO: 1236088 - RNA, 19 nt, Artificial Sequence
  Description of Artificial Sequence: Synthetic oligonucleotide
  Sense strand starting at position 2230 of SEQ ID NO: 917469
gggugaucuuaacuucucu

SEQ ID NO: 1236089 - RNA, 19 nt, Artificial Sequence
  Description of Artificial Sequence: Synthetic oligonucleotide
  Antisense strand to SEQ ID NO: 1236088
agagaaguuaagaucaccc

SEQ ID NO: 1236090 - RNA, 19 nt, Artificial Sequence
  Description of Artificial Sequence: Synthetic oligonucleotide
  Sense strand starting at position 2288 of SEQ ID NO: 917469
agaaaugauuacccagugu

SEQ ID NO: 1236091 - RNA, 19 nt, Artificial Sequence
  Description of Artificial Sequence: Synthetic oligonucleotide
  Antisense strand to SEQ ID NO: 1236090
acacuggguaaucauuucu

SEQ ID NO: 1236092 - RNA, 19 nt, Artificial Sequence
  Description of Artificial Sequence: Synthetic oligonucleotide
  Sense strand starting at position 2292 of SEQ ID NO: 917469
augauuacccagugucuac

SEQ ID NO: 1236093 - RNA, 19 nt, Artificial Sequence
  Description of Artificial Sequence: Synthetic oligonucleotide
  Antisense strand to SEQ ID NO: 1236092
guagacacuggguaaucau

SEQ ID NO: 1236094 - RNA, 19 nt, Artificial Sequence
  Description of Artificial Sequence: Synthetic oligonucleotide
  Sense strand starting at position 2337 of SEQ ID NO: 917469
ggccuacagcaaugaauaa

SEQ ID NO: 1236095 - RNA, 19 nt, Artificial Sequence
  Description of Artificial Sequence: Synthetic oligonucleotide
  Antisense strand to SEQ ID NO: 1236094
uuauucauugcuguaggcc

SEQ ID NO: 1236096 - RNA, 19 nt, Artificial Sequence
  Description of Artificial Sequence: Synthetic oligonucleotide
  Sense strand starting at position 2375 of SEQ ID NO: 917469
agagaagauggucggugua

SEQ ID NO: 1236097 - RNA, 19 nt, Artificial Sequence
  Description of Artificial Sequence: Synthetic oligonucleotide
  Antisense strand to SEQ ID NO: 1236096
uacaccgaccaucuucucu

SEQ ID NO: 1236098 - RNA, 19 nt, Artificial Sequence
  Description of Artificial Sequence: Synthetic oligonucleotide
  Sense strand starting at position 2377 of SEQ ID NO: 917469
agaagauggucgguguaac

SEQ ID NO: 1236099 - RNA, 19 nt, Artificial Sequence
  Description of Artificial Sequence: Synthetic oligonucleotide
  Antisense strand to SEQ ID NO: 1236098
guuacaccgaccaucuucu

SEQ ID NO: 1236100 - RNA, 19 nt, Artificial Sequence
  Description of Artificial Sequence: Synthetic oligonucleotide
  Sense strand starting at position 2387 of SEQ ID NO: 917469
cgguguaacgcgcuuguga

SEQ ID NO: 1236101 - RNA, 19 nt, Artificial Sequence
  Description of Artificial Sequence: Synthetic oligonucleotide
  Antisense strand to SEQ ID NO: 1236100
ucacaagcgcguuacaccg

SEQ ID NO: 1236102 - RNA, 19 nt, Artificial Sequence
  Description of Artificial Sequence: Synthetic oligonucleotide
  Sense strand starting at position 2388 of SEQ ID NO: 917469
gguguaacgcgcuugugau

SEQ ID NO: 1236103 - RNA, 19 nt, Artificial Sequence
  Description of Artificial Sequence: Synthetic oligonucleotide
  Antisense strand to SEQ ID NO: 1236102
aucacaagcgcguuacacc

SEQ ID NO: 1236104 - RNA, 19 nt, Artificial Sequence
  Description of Artificial Sequence: Synthetic oligonucleotide
  Sense strand starting at position 2395 of SEQ ID NO: 917469
cgcgcuugugaugcucaaa

SEQ ID NO: 1236105 - RNA, 19 nt, Artificial Sequence
  Description of Artificial Sequence: Synthetic oligonucleotide
  Antisense strand to SEQ ID NO: 1236104
uuugagcaucacaagcgcg

SEQ ID NO: 1236106 - RNA, 19 nt, Artificial Sequence
  Description of Artificial Sequence: Synthetic oligonucleotide
  Sense strand starting at position 2396 of SEQ ID NO: 917469
gcgcuugugaugcucaaag

SEQ ID NO: 1236107 - RNA, 19 nt, Artificial Sequence
  Description of Artificial Sequence: Synthetic oligonucleotide
  Antisense strand to SEQ ID NO: 1236106
cuuugagcaucacaagcgc

SEQ ID NO: 1236108 - RNA, 19 nt, Artificial Sequence
  Description of Artificial Sequence: Synthetic oligonucleotide
  Sense strand starting at position 2398 of SEQ ID NO: 917469
gcuugugaugcucaaagag

SEQ ID NO: 1236109 - RNA, 19 nt, Artificial Sequence
  Description of Artificial Sequence: Synthetic oligonucleotide
  Antisense strand to SEQ ID NO: 1236108
cucuuugagcaucacaagc

SEQ ID NO: 1236110 - RNA, 19 nt, Artificial Sequence
  Description of Artificial Sequence: Synthetic oligonucleotide
  Sense strand starting at position 2415 of SEQ ID NO: 917469
agaagauggucggugucau

SEQ ID NO: 1236111 - RNA, 19 nt, Artificial Sequence
  Description of Artificial Sequence: Synthetic oligonucleotide
  Antisense strand to SEQ ID NO: 1236110
augacaccgaccaucuucu

SEQ ID NO: 1236112 - RNA, 19 nt, Artificial Sequence
  Description of Artificial Sequence: Synthetic oligonucleotide
  Sense strand starting at position 2425 of SEQ ID NO: 917469
cggugucaugcgcuucuga

SEQ ID NO: 1236113 - RNA, 19 nt, Artificial Sequence
  Description of Artificial Sequence: Synthetic oligonucleotide
  Antisense strand to SEQ ID NO: 1236112
ucagaagcgcaugacaccg

SEQ ID NO: 1236114 - RNA, 19 nt, Artificial Sequence
  Description of Artificial Sequence: Synthetic oligonucleotide
  Sense strand starting at position 2426 of SEQ ID NO: 917469
ggugucaugcgcuucugau

SEQ ID NO: 1236115 - RNA, 19 nt, Artificial Sequence
  Description of Artificial Sequence: Synthetic oligonucleotide
  Antisense strand to SEQ ID NO: 1236114
aucagaagcgcaugacacc

SEQ ID NO: 1236116 - RNA, 19 nt, Artificial Sequence
  Description of Artificial Sequence: Synthetic oligonucleotide
  Sense strand starting at position 2427 of SEQ ID NO: 917469
gugucaugcgcuucugaug

SEQ ID NO: 1236117 - RNA, 19 nt, Artificial Sequence
  Description of Artificial Sequence: Synthetic oligonucleotide
  Antisense strand to SEQ ID NO: 1236116
caucagaagcgcaugacac

SEQ ID NO: 1236118 - RNA, 19 nt, Artificial Sequence
  Description of Artificial Sequence: Synthetic oligonucleotide
  Sense strand starting at position 2495 of SEQ ID NO: 917469
gggugugagcaauaaggcu

SEQ ID NO: 1236119 - RNA, 19 nt, Artificial Sequence
  Description of Artificial Sequence: Synthetic oligonucleotide
  Antisense strand to SEQ ID NO: 1236118
agccuuauugcucacaccc

SEQ ID NO: 1236120 - RNA, 19 nt, Artificial Sequence
  Description of Artificial Sequence: Synthetic oligonucleotide
  Sense strand starting at position 2898 of SEQ ID NO: 917469
ggagucuccagggaagcua

SEQ ID NO: 1236121 - RNA, 19 nt, Artificial Sequence
  Description of Artificial Sequence: Synthetic oligonucleotide
  Antisense strand to SEQ ID NO: 1236120
uagcuucccuggagacucc

SEQ ID NO: 1236122 - RNA, 19 nt, Artificial Sequence
  Description of Artificial Sequence: Synthetic oligonucleotide
  Sense strand starting at position 2910 of SEQ ID NO: 917469
gaagcuauugauugauuga

SEQ ID NO: 1236123 - RNA, 19 nt, Artificial Sequence
  Description of Artificial Sequence: Synthetic oligonucleotide
  Antisense strand to SEQ ID NO: 1236122
ucaaucaaucaauagcuuc

SEQ ID NO: 1236124 - RNA, 19 nt, Artificial Sequence
  Description of Artificial Sequence: Synthetic oligonucleotide
  Sense strand starting at position 3046 of SEQ ID NO: 917469
guaguuugggaccacagau

SEQ ID NO: 1236125 - RNA, 19 nt, Artificial Sequence
  Description of Artificial Sequence: Synthetic oligonucleotide
  Antisense strand to SEQ ID NO: 1236124
aucuguggucccaaacuac

SEQ ID NO: 1236126 - RNA, 19 nt, Artificial Sequence
  Description of Artificial Sequence: Synthetic oligonucleotide
  Sense strand starting at position 3479 of SEQ ID NO: 917469
auaguccucuaacuagaga

SEQ ID NO: 1236127 - RNA, 19 nt, Artificial Sequence
  Description of Artificial Sequence: Synthetic oligonucleotide
  Antisense strand to SEQ ID NO: 1236126
ucucuaguuagaggacuau

SEQ ID NO: 1236128 - RNA, 19 nt, Artificial Sequence
  Description of Artificial Sequence: Synthetic oligonucleotide
  Sense strand starting at position 3538 of SEQ ID NO: 917469
cugagaucuccaggcccaa

SEQ ID NO: 1236129 - RNA, 19 nt, Artificial Sequence
  Description of Artificial Sequence: Synthetic oligonucleotide
  Antisense strand to SEQ ID NO: 1236128
uugggccuggagaucucag

SEQ ID NO: 1236130 - RNA, 19 nt, Artificial Sequence
  Description of Artificial Sequence: Synthetic oligonucleotide
  Sense strand starting at position 3652 of SEQ ID NO: 917469
gccaauguacuguaugaag

SEQ ID NO: 1236131 - RNA, 19 nt, Artificial Sequence
  Description of Artificial Sequence: Synthetic oligonucleotide
  Antisense strand to SEQ ID NO: 1236130
cuucauacaguacauuggc

SEQ ID NO: 1236132 - RNA, 19 nt, Artificial Sequence
  Description of Artificial Sequence: Synthetic oligonucleotide
  Sense strand starting at position 3654 of SEQ ID NO: 917469
caauguacuguaugaaguu

SEQ ID NO: 1236133 - RNA, 19 nt, Artificial Sequence
  Description of Artificial Sequence: Synthetic oligonucleotide
  Antisense strand to SEQ ID NO: 1236132
aacuucauacaguacauug

SEQ ID NO: 1236134 - RNA, 19 nt, Artificial Sequence
  Description of Artificial Sequence: Synthetic oligonucleotide
  Sense strand starting at position 3869 of SEQ ID NO: 917469
uguguaaugcacuauauua

SEQ ID NO: 1236135 - RNA, 19 nt, Artificial Sequence
  Description of Artificial Sequence: Synthetic oligonucleotide
  Antisense strand to SEQ ID NO: 1236134
uaauauagugcauuacaca

SEQ ID NO: 1236136 - RNA, 19 nt, Artificial Sequence
  Description of Artificial Sequence: Synthetic oligonucleotide
  Sense strand starting at position 3871 of SEQ ID NO: 917469
uguaaugcacuauauuaag

SEQ ID NO: 1236137 - RNA, 19 nt, Artificial Sequence
  Description of Artificial Sequence: Synthetic oligonucleotide
  Antisense strand to SEQ ID NO: 1236136
cuuaauauagugcauuaca

SEQ ID NO: 1236138 - RNA, 19 nt, Artificial Sequence
  Description of Artificial Sequence: Synthetic oligonucleotide
  Sense strand starting at position 3877 of SEQ ID NO: 917469
gcacuauauuaaguuagaa

SEQ ID NO: 1236139 - RNA, 19 nt, Artificial Sequence
  Description of Artificial Sequence: Synthetic oligonucleotide
  Antisense strand to SEQ ID NO: 1236138
uucuaacuuaauauagugc

SEQ ID NO: 1236140 - RNA, 19 nt, Artificial Sequence
  Description of Artificial Sequence: Synthetic oligonucleotide
  Sense strand starting at position 3901 of SEQ ID NO: 917470
acaugauaauuucgaucaa

SEQ ID NO: 1236141 - RNA, 19 nt, Artificial Sequence
  Description of Artificial Sequence: Synthetic oligonucleotide
  Antisense strand to SEQ ID NO: 1236140
uugaucgaaauuaucaugu

SEQ ID NO: 1236142 - RNA, 19 nt, Artificial Sequence
  Description of Artificial Sequence: Synthetic oligonucleotide
  Sense strand starting at position 19 of SEQ ID NO: 917470
uucuguuuaugagucaaga

SEQ ID NO: 1236143 - RNA, 19 nt, Artificial Sequence
  Description of Artificial Sequence: Synthetic oligonucleotide
  Antisense strand to SEQ ID NO: 1236142
ucuugacucauaaacagaa

SEQ ID NO: 1236144 - RNA, 19 nt, Artificial Sequence
  Description of Artificial Sequence: Synthetic oligonucleotide
  Sense strand starting at position 138 of SEQ ID NO: 917470
uggagauacucuguaucuu

SEQ ID NO: 1236145 - RNA, 19 nt, Artificial Sequence
  Description of Artificial Sequence: Synthetic oligonucleotide
  Antisense strand to SEQ ID NO: 1236144
aagauacagaguaucucca

SEQ ID NO: 1236146 - RNA, 19 nt, Artificial Sequence
  Description of Artificial Sequence: Synthetic oligonucleotide
  Sense strand starting at position 263 of SEQ ID NO: 917470
gauggaaagugacaauaaa

SEQ ID NO: 1236147 - RNA, 19 nt, Artificial Sequence
  Description of Artificial Sequence: Synthetic oligonucleotide
  Antisense strand to SEQ ID NO: 1236146
uuuauugucacuuuccauc

SEQ ID NO: 1236148 - RNA, 19 nt, Artificial Sequence
  Description of Artificial Sequence: Synthetic oligonucleotide
  Sense strand starting at position 663 of SEQ ID NO: 917470
ugguccugccuggaauauu

SEQ ID NO: 1236149 - RNA, 19 nt, Artificial Sequence
  Description of Artificial Sequence: Synthetic oligonucleotide
  Antisense strand to SEQ ID NO: 1236148
aauauuccaggcaggacca

SEQ ID NO: 1236150 - RNA, 19 nt, Artificial Sequence
  Description of Artificial Sequence: Synthetic oligonucleotide
  Sense strand starting at position 802 of SEQ ID NO: 917470
cgcugucuugccucaaauu

SEQ ID NO: 1236151 - RNA, 19 nt, Artificial Sequence
  Description of Artificial Sequence: Synthetic oligonucleotide
  Antisense strand to SEQ ID NO: 1236150
aauuugaggcaagacagcg

SEQ ID NO: 1236152 - RNA, 19 nt, Artificial Sequence
  Description of Artificial Sequence: Synthetic oligonucleotide
  Sense strand starting at position 919 of SEQ ID NO: 917470
aucuuuagguucuccuuua

SEQ ID NO: 1236153 - RNA, 19 nt, Artificial Sequence
  Description of Artificial Sequence: Synthetic oligonucleotide
  Antisense strand to SEQ ID NO: 1236152
uaaaggagaaccuaaagau

SEQ ID NO: 1236154 - RNA, 19 nt, Artificial Sequence
  Description of Artificial Sequence: Synthetic oligonucleotide
  Sense strand starting at position 971 of SEQ ID NO: 917470
ccuuuacagcuuuaugguu

SEQ ID NO: 1236155 - RNA, 19 nt, Artificial Sequence
  Description of Artificial Sequence: Synthetic oligonucleotide
  Antisense strand to SEQ ID NO: 1236154
aaccauaaagcuguaaagg

SEQ ID NO: 1236156 - RNA, 19 nt, Artificial Sequence
  Description of Artificial Sequence: Synthetic oligonucleotide
  Sense strand starting at position 1014 of SEQ ID NO: 917470
agugauuucuagguuagcu

SEQ ID NO: 1236157 - RNA, 19 nt, Artificial Sequence
  Description of Artificial Sequence: Synthetic oligonucleotide
  Antisense strand to SEQ ID NO: 1236156
agcuaaccuagaaaucacu

SEQ ID NO: 1236158 - RNA, 19 nt, Artificial Sequence
  Description of Artificial Sequence: Synthetic oligonucleotide
  Sense strand starting at position 1023 of SEQ ID NO: 917470
uagguuagcugaguauaua

SEQ ID NO: 1236159 - RNA, 19 nt, Artificial Sequence
  Description of Artificial Sequence: Synthetic oligonucleotide
  Antisense strand to SEQ ID NO: 1236158
uauauacucagcuaaccua

SEQ ID NO: 1236160 - RNA, 19 nt, Artificial Sequence
  Description of Artificial Sequence: Synthetic oligonucleotide
  Sense strand starting at position 1024 of SEQ ID NO: 917470
agguuagcugaguauauaa

SEQ ID NO: 1236161 - RNA, 19 nt, Artificial Sequence
  Description of Artificial Sequence: Synthetic oligonucleotide
  Antisense strand to SEQ ID NO: 1236160
uuauauacucagcuaaccu

SEQ ID NO: 1236162 - RNA, 19 nt, Artificial Sequence
  Description of Artificial Sequence: Synthetic oligonucleotide
  Sense strand starting at position 1214 of SEQ ID NO: 917470
uuacguaagaauggcaaga

SEQ ID NO: 1236163 - RNA, 19 nt, Artificial Sequence
  Description of Artificial Sequence: Synthetic oligonucleotide
  Antisense strand to SEQ ID NO: 1236162
ucuugccauucuuacguaa

SEQ ID NO: 1236164 - RNA, 19 nt, Artificial Sequence
  Description of Artificial Sequence: Synthetic oligonucleotide
  Sense strand starting at position 1225 of SEQ ID NO: 917470
uggcaagaauuauugucaa

SEQ ID NO: 1236165 - RNA, 19 nt, Artificial Sequence
  Description of Artificial Sequence: Synthetic oligonucleotide
  Antisense strand to SEQ ID NO: 1236164
uugacaauaauucuugcca

SEQ ID NO: 1236166 - RNA, 19 nt, Artificial Sequence
  Description of Artificial Sequence: Synthetic oligonucleotide
  Sense strand starting at position 2179 of SEQ ID NO: 917470
ggcguuuguaugucuguua

SEQ ID NO: 1236167 - RNA, 19 nt, Artificial Sequence
  Description of Artificial Sequence: Synthetic oligonucleotide
  Antisense strand to SEQ ID NO: 1236166
uaacagacauacaaacgcc

SEQ ID NO: 1236168 - RNA, 19 nt, Artificial Sequence
  Description of Artificial Sequence: Synthetic oligonucleotide
  Sense strand starting at position 2192 of SEQ ID NO: 917470
cuguuaauaacggaagcua

SEQ ID NO: 1236169 - RNA, 19 nt, Artificial Sequence
  Description of Artificial Sequence: Synthetic oligonucleotide
  Antisense strand to SEQ ID NO: 1236168
uagcuuccguuauuaacag

SEQ ID NO: 1236170 - RNA, 19 nt, Artificial Sequence
  Description of Artificial Sequence: Synthetic oligonucleotide
  Sense strand starting at position 2299 of SEQ ID NO: 917470
ggucucuuccgggagcaga

SEQ ID NO: 1236171 - RNA, 19 nt, Artificial Sequence
  Description of Artificial Sequence: Synthetic oligonucleotide
  Antisense strand to SEQ ID NO: 1236170
ucugcucccggaagagacc

SEQ ID NO: 1236172 - RNA, 19 nt, Artificial Sequence
  Description of Artificial Sequence: Synthetic oligonucleotide
  Sense strand starting at position 2383 of SEQ ID NO: 917470
ggaagucauucugcacuaa

SEQ ID NO: 1236173 - RNA, 19 nt, Artificial Sequence
  Description of Artificial Sequence: Synthetic oligonucleotide
  Antisense strand to SEQ ID NO: 1236172
uuagugcagaaugacuucc

SEQ ID NO: 1236174 - RNA, 19 nt, Artificial Sequence
  Description of Artificial Sequence: Synthetic oligonucleotide
  Sense strand starting at position 2629 of SEQ ID NO: 917470
ugcagaucggauggagaaa

SEQ ID NO: 1236175 - RNA, 19 nt, Artificial Sequence
  Description of Artificial Sequence: Synthetic oligonucleotide
  Antisense strand to SEQ ID NO: 1236174
uuucuccauccgaucugca

SEQ ID NO: 1236176 - RNA, 19 nt, Artificial Sequence
  Description of Artificial Sequence: Synthetic oligonucleotide
  Sense strand starting at position 2720 of SEQ ID NO: 917470
aguaccaaacuauguuaau

SEQ ID NO: 1236177 - RNA, 19 nt, Artificial Sequence
  Description of Artificial Sequence: Synthetic oligonucleotide
  Antisense strand to SEQ ID NO: 1236176
auuaacauaguuugguacu

SEQ ID NO: 1236178 - RNA, 19 nt, Artificial Sequence
  Description of Artificial Sequence: Synthetic oligonucleotide
  Sense strand starting at position 2721 of SEQ ID NO: 917470
guaccaaacuauguuaauu

SEQ ID NO: 1236179 - RNA, 19 nt, Artificial Sequence
  Description of Artificial Sequence: Synthetic oligonucleotide
  Antisense strand to SEQ ID NO: 1236178
aauuaacauaguuugguac

SEQ ID NO: 1236180 - RNA, 19 nt, Artificial Sequence
  Description of Artificial Sequence: Synthetic oligonucleotide
  Sense strand starting at position 2761 of SEQ ID NO: 917470
cuuuaaguccuguaacuua

SEQ ID NO: 1236181 - RNA, 19 nt, Artificial Sequence
  Description of Artificial Sequence: Synthetic oligonucleotide
  Antisense strand to SEQ ID NO: 1236180
uaaguuacaggacuuaaag

SEQ ID NO: 1236182 - RNA, 19 nt, Artificial Sequence
  Description of Artificial Sequence: Synthetic oligonucleotide
  Sense strand starting at position 2834 of SEQ ID NO: 917470
uuggaauuagcuuguuaaa

SEQ ID NO: 1236183 - RNA, 19 nt, Artificial Sequence
  Description of Artificial Sequence: Synthetic oligonucleotide
  Antisense strand to SEQ ID NO: 1236182
uuuaacaagcuaauuccaa

SEQ ID NO: 1236184 - RNA, 19 nt, Artificial Sequence
  Description of Artificial Sequence: Synthetic oligonucleotide
  Sense strand starting at position 2889 of SEQ ID NO: 917470
uauagaucuguuugggaaa

SEQ ID NO: 1236185 - RNA, 19 nt, Artificial Sequence
  Description of Artificial Sequence: Synthetic oligonucleotide
  Antisense strand to SEQ ID NO: 1236184
uuucccaaacagaucuaua

SEQ ID NO: 1236186 - RNA, 19 nt, Artificial Sequence
  Description of Artificial Sequence: Synthetic oligonucleotide
  Sense strand starting at position 3140 of SEQ ID NO: 917470
uuuauauucuacucguaag

SEQ ID NO: 1236187 - RNA, 19 nt, Artificial Sequence
  Description of Artificial Sequence: Synthetic oligonucleotide
  Antisense strand to SEQ ID NO: 1236186
cuuacgaguagaauauaaa

SEQ ID NO: 1236188 - RNA, 19 nt, Artificial Sequence
  Description of Artificial Sequence: Synthetic oligonucleotide
  Sense strand starting at position 3212 of SEQ ID NO: 917470
guucccuuguuauuuguaa

SEQ ID NO: 1236189 - RNA, 19 nt, Artificial Sequence
  Description of Artificial Sequence: Synthetic oligonucleotide
  Antisense strand to SEQ ID NO: 1236188
uuacaaauaacaagggaac

SEQ ID NO: 1236190 - RNA, 19 nt, Artificial Sequence
  Description of Artificial Sequence: Synthetic oligonucleotide
  Sense strand starting at position 3213 of SEQ ID NO: 917470
uucccuuguuauuuguaau

SEQ ID NO: 1236191 - RNA, 19 nt, Artificial Sequence
  Description of Artificial Sequence: Synthetic oligonucleotide
  Antisense strand to SEQ ID NO: 1236190
auuacaaauaacaagggaa

SEQ ID NO: 1236192 - RNA, 19 nt, Artificial Sequence
  Description of Artificial Sequence: Synthetic oligonucleotide
  Sense strand starting at position 3224 of SEQ ID NO: 917470
uuuguaauacucuguagau

SEQ ID NO: 1236193 - RNA, 19 nt, Artificial Sequence
  Description of Artificial Sequence: Synthetic oligonucleotide
  Antisense strand to SEQ ID NO: 1236192
aucuacagaguauuacaaa

SEQ ID NO: 1236194 - RNA, 19 nt, Artificial Sequence
  Description of Artificial Sequence: Synthetic oligonucleotide
  Sense strand starting at position 3225 of SEQ ID NO: 917470
uuguaauacucuguagauu

SEQ ID NO: 1236195 - RNA, 19 nt, Artificial Sequence
  Description of Artificial Sequence: Synthetic oligonucleotide
  Antisense strand to SEQ ID NO: 1236194
aaucuacagaguauuacaa

SEQ ID NO: 1236196 - RNA, 19 nt, Artificial Sequence
  Description of Artificial Sequence: Synthetic oligonucleotide
  Sense strand starting at position 3226 of SEQ ID NO: 917470
uguaauacucuguagauuc

SEQ ID NO: 1236197 - RNA, 19 nt, Artificial Sequence
  Description of Artificial Sequence: Synthetic oligonucleotide
  Antisense strand to SEQ ID NO: 1236196
gaaucuacagaguauuaca

SEQ ID NO: 1236198 - RNA, 19 nt, Artificial Sequence
  Description of Artificial Sequence: Synthetic oligonucleotide
  Sense strand starting at position 3234 of SEQ ID NO: 917470
ucuguagauucuuucggaa

SEQ ID NO: 1236199 - RNA, 19 nt, Artificial Sequence
  Description of Artificial Sequence: Synthetic oligonucleotide
  Antisense strand to SEQ ID NO: 1236198
uuccgaaagaaucuacaga

SEQ ID NO: 1236200 - RNA, 19 nt, Artificial Sequence
  Description of Artificial Sequence: Synthetic oligonucleotide
  Sense strand starting at position 3248 of SEQ ID NO: 917470
cggaauuucugugaucaaa

SEQ ID NO: 1236201 - RNA, 19 nt, Artificial Sequence
  Description of Artificial Sequence: Synthetic oligonucleotide
  Antisense strand to SEQ ID NO: 1236200
uuugaucacagaaauuccg

SEQ ID NO: 1236202 - RNA, 19 nt, Artificial Sequence
  Description of Artificial Sequence: Synthetic oligonucleotide
  Sense strand starting at position 3268 of SEQ ID NO: 917470
ucuugcaauccacgaauaa

SEQ ID NO: 1236203 - RNA, 19 nt, Artificial Sequence
  Description of Artificial Sequence: Synthetic oligonucleotide
  Antisense strand to SEQ ID NO: 1236202
uuauucguggauugcaaga

SEQ ID NO: 1236204 - RNA, 19 nt, Artificial Sequence
  Description of Artificial Sequence: Synthetic oligonucleotide
  Sense strand starting at position 3269 of SEQ ID NO: 917470
cuugcaauccacgaauaaa

SEQ ID NO: 1236205 - RNA, 19 nt, Artificial Sequence
  Description of Artificial Sequence: Synthetic oligonucleotide
  Antisense strand to SEQ ID NO: 1236204
uuuauucguggauugcaag

SEQ ID NO: 1236206 - RNA, 19 nt, Artificial Sequence
  Description of Artificial Sequence: Synthetic oligonucleotide
  Sense strand starting at position 3279 of SEQ ID NO: 917470
acgaauaaagaugguuuaa

SEQ ID NO: 1236207 - RNA, 19 nt, Artificial Sequence
  Description of Artificial Sequence: Synthetic oligonucleotide
  Antisense strand to SEQ ID NO: 1236206
uuaaaccaucuuuauucgu

SEQ ID NO: 1236208 - RNA, 19 nt, Artificial Sequence
  Description of Artificial Sequence: Synthetic oligonucleotide
  Sense strand starting at position 3396 of SEQ ID NO: 917470
ccuugucuuggucauaaca

SEQ ID NO: 1236209 - RNA, 19 nt, Artificial Sequence
  Description of Artificial Sequence: Synthetic oligonucleotide
  Antisense strand to SEQ ID NO: 1236208
uguuaugaccaagacaagg

SEQ ID NO: 1236210 - RNA, 19 nt, Artificial Sequence
  Description of Artificial Sequence: Synthetic oligonucleotide
  Sense strand starting at position 3490 of SEQ ID NO: 917470
ugugaauuaccuugguuag

SEQ ID NO: 1236211 - RNA, 19 nt, Artificial Sequence
  Description of Artificial Sequence: Synthetic oligonucleotide
  Antisense strand to SEQ ID NO: 1236210
cuaaccaagguaauucaca

SEQ ID NO: 1236212 - RNA, 19 nt, Artificial Sequence
  Description of Artificial Sequence: Synthetic oligonucleotide
  Sense strand starting at position 3492 of SEQ ID NO: 917470
ugaauuaccuugguuaguu

SEQ ID NO: 1236213 - RNA, 19 nt, Artificial Sequence
  Description of Artificial Sequence: Synthetic oligonucleotide
  Antisense strand to SEQ ID NO: 1236212
aacuaaccaagguaauuca

SEQ ID NO: 1236214 - RNA, 19 nt, Artificial Sequence
  Description of Artificial Sequence: Synthetic oligonucleotide
  Sense strand starting at position 3493 of SEQ ID NO: 917470
gaauuaccuugguuaguuu

SEQ ID NO: 1236215 - RNA, 19 nt, Artificial Sequence
  Description of Artificial Sequence: Synthetic oligonucleotide
  Antisense strand to SEQ ID NO: 1236214
aaacuaaccaagguaauuc

SEQ ID NO: 1236216 - RNA, 19 nt, Artificial Sequence
  Description of Artificial Sequence: Synthetic oligonucleotide
  Sense strand starting at position 3760 of SEQ ID NO: 917470
aucuguacagcguaagaua

SEQ ID NO: 1236217 - RNA, 19 nt, Artificial Sequence
  Description of Artificial Sequence: Synthetic oligonucleotide
  Antisense strand to SEQ ID NO: 1236216
uaucuuacgcuguacagau

SEQ ID NO: 1236218 - RNA, 19 nt, Artificial Sequence
  Description of Artificial Sequence: Synthetic oligonucleotide
  Sense strand starting at position 3863 of SEQ ID NO: 917470
aacguaaguucuucuuaga

SEQ ID NO: 1236219 - RNA, 19 nt, Artificial Sequence
  Description of Artificial Sequence: Synthetic oligonucleotide
  Antisense strand to SEQ ID NO: 1236218
ucuaagaagaacuuacguu

SEQ ID NO: 1236220 - RNA, 19 nt, Artificial Sequence
  Description of Artificial Sequence: Synthetic oligonucleotide
  Sense strand starting at position 3913 of SEQ ID NO: 917470
auggcucagccauacacua

SEQ ID NO: 1236221 - RNA, 19 nt, Artificial Sequence
  Description of Artificial Sequence: Synthetic oligonucleotide
  Antisense strand to SEQ ID NO: 1236220
uaguguauggcugagccau

SEQ ID NO: 1236222 - RNA, 19 nt, Artificial Sequence
  Description of Artificial Sequence: Synthetic oligonucleotide
  Sense strand starting at position 3913 of SEQ ID NO: 917471
auggcucagccauacacua

SEQ ID NO: 1236223 - RNA, 19 nt, Artificial Sequence
  Description of Artificial Sequence: Synthetic oligonucleotide
  Antisense strand to SEQ ID NO: 1236222
uaguguauggcugagccau

SEQ ID NO: 1236224 - RNA, 19 nt, Artificial Sequence
  Description of Artificial Sequence: Synthetic oligonucleotide
  Sense strand starting at position 539 of SEQ ID NO: 917471
ugaaacuccgucugaaacu

SEQ ID NO: 1236225 - RNA, 19 nt, Artificial Sequence
  Description of Artificial Sequence: Synthetic oligonucleotide
  Antisense strand to SEQ ID NO: 1236224
aguuucagacggaguuuca

SEQ ID NO: 1236226 - RNA, 19 nt, Artificial Sequence
  Description of Artificial Sequence: Synthetic oligonucleotide
  Sense strand starting at position 683 of SEQ ID NO: 917471
guugaauuuaggugaacgu

SEQ ID NO: 1236227 - RNA, 19 nt, Artificial Sequence
  Description of Artificial Sequence: Synthetic oligonucleotide
  Antisense strand to SEQ ID NO: 1236226
acguucaccuaaauucaac

SEQ ID NO: 1236228 - RNA, 19 nt, Artificial Sequence
  Description of Artificial Sequence: Synthetic oligonucleotide
  Sense strand starting at position 764 of SEQ ID NO: 917471
ugaugacuuuaagauuucu

SEQ ID NO: 1236229 - RNA, 19 nt, Artificial Sequence
  Description of Artificial Sequence: Synthetic oligonucleotide
  Antisense strand to SEQ ID NO: 1236228
agaaaucuuaaagucauca

SEQ ID NO: 1236230 - RNA, 19 nt, Artificial Sequence
  Description of Artificial Sequence: Synthetic oligonucleotide
  Sense strand starting at position 906 of SEQ ID NO: 917471
cugugaggaaacuguaauc

SEQ ID NO: 1236231 - RNA, 19 nt, Artificial Sequence
  Description of Artificial Sequence: Synthetic oligonucleotide
  Antisense strand to SEQ ID NO: 1236230
gauuacaguuuccucacag

SEQ ID NO: 1236232 - RNA, 19 nt, Artificial Sequence
  Description of Artificial Sequence: Synthetic oligonucleotide
  Sense strand starting at position 1000 of SEQ ID NO: 917471
ucagaacucuguguccaau

SEQ ID NO: 1236233 - RNA, 19 nt, Artificial Sequence
  Description of Artificial Sequence: Synthetic oligonucleotide
  Antisense strand to SEQ ID NO: 1236232
auuggacacagaguucuga

SEQ ID NO: 1236234 - RNA, 19 nt, Artificial Sequence
  Description of Artificial Sequence: Synthetic oligonucleotide
  Sense strand starting at position 1110 of SEQ ID NO: 917471
ggacccaauucugcucaga

SEQ ID NO: 1236235 - RNA, 19 nt, Artificial Sequence
  Description of Artificial Sequence: Synthetic oligonucleotide
  Antisense strand to SEQ ID NO: 1236234
ucugagcagaauugggucc

SEQ ID NO: 1236236 - RNA, 19 nt, Artificial Sequence
  Description of Artificial Sequence: Synthetic oligonucleotide
  Sense strand starting at position 1112 of SEQ ID NO: 917471
acccaauucugcucagaga

SEQ ID NO: 1236237 - RNA, 19 nt, Artificial Sequence
  Description of Artificial Sequence: Synthetic oligonucleotide
  Antisense strand to SEQ ID NO: 1236236
ucucugagcagaauugggu

SEQ ID NO: 1236238 - RNA, 19 nt, Artificial Sequence
  Description of Artificial Sequence: Synthetic oligonucleotide
  Sense strand starting at position 1113 of SEQ ID NO: 917471
cccaauucugcucagagac

SEQ ID NO: 1236239 - RNA, 19 nt, Artificial Sequence
  Description of Artificial Sequence: Synthetic oligonucleotide
  Antisense strand to SEQ ID NO: 1236238
gucucugagcagaauuggg

SEQ ID NO: 1236240 - RNA, 19 nt, Artificial Sequence
  Description of Artificial Sequence: Synthetic oligonucleotide
  Sense strand starting at position 1119 of SEQ ID NO: 917471
ucugcucagagacgaauau

SEQ ID NO: 1236241 - RNA, 19 nt, Artificial Sequence
  Description of Artificial Sequence: Synthetic oligonucleotide
  Antisense strand to SEQ ID NO: 1236240
auauucgucucugagcaga

SEQ ID NO: 1236242 - RNA, 19 nt, Artificial Sequence
  Description of Artificial Sequence: Synthetic oligonucleotide
  Sense strand starting at position 1159 of SEQ ID NO: 917471
acuuuauaacauggugauc

SEQ ID NO: 1236243 - RNA, 19 nt, Artificial Sequence
  Description of Artificial Sequence: Synthetic oligonucleotide
  Antisense strand to SEQ ID NO: 1236242
gaucaccauguuauaaagu

SEQ ID NO: 1236244 - RNA, 19 nt, Artificial Sequence
  Description of Artificial Sequence: Synthetic oligonucleotide
  Sense strand starting at position 1348 of SEQ ID NO: 917471
gguaaccauggccaguaau

SEQ ID NO: 1236245 - RNA, 19 nt, Artificial Sequence
  Description of Artificial Sequence: Synthetic oligonucleotide
  Antisense strand to SEQ ID NO: 1236244
auuacuggccaugguuacc

SEQ ID NO: 1236246 - RNA, 19 nt, Artificial Sequence
  Description of Artificial Sequence: Synthetic oligonucleotide
  Sense strand starting at position 1390 of SEQ ID NO: 917471
ucaauucuacgcguugcua

SEQ ID NO: 1236247 - RNA, 19 nt, Artificial Sequence
  Description of Artificial Sequence: Synthetic oligonucleotide
  Antisense strand to SEQ ID NO: 1236246
uagcaacgcguagaauuga

SEQ ID NO: 1236248 - RNA, 19 nt, Artificial Sequence
  Description of Artificial Sequence: Synthetic oligonucleotide
  Sense strand starting at position 1391 of SEQ ID NO: 917471
caauucuacgcguugcuau

SEQ ID NO: 1236249 - RNA, 19 nt, Artificial Sequence
  Description of Artificial Sequence: Synthetic oligonucleotide
  Antisense strand to SEQ ID NO: 1236248
auagcaacgcguagaauug

SEQ ID NO: 1236250 - RNA, 19 nt, Artificial Sequence
  Description of Artificial Sequence: Synthetic oligonucleotide
  Sense strand starting at position 1432 of SEQ ID NO: 917471
cgaccagagucuucccauu

SEQ ID NO: 1236251 - RNA, 19 nt, Artificial Sequence
  Description of Artificial Sequence: Synthetic oligonucleotide
  Antisense strand to SEQ ID NO: 1236250
aaugggaagacucuggucg

SEQ ID NO: 1236252 - RNA, 19 nt, Artificial Sequence
  Description of Artificial Sequence: Synthetic oligonucleotide
  Sense strand starting at position 1438 of SEQ ID NO: 917471
gagucuucccauugcagga

SEQ ID NO: 1236253 - RNA, 19 nt, Artificial Sequence
  Description of Artificial Sequence: Synthetic oligonucleotide
  Antisense strand to SEQ ID NO: 1236252
uccugcaaugggaagacuc

SEQ ID NO: 1236254 - RNA, 19 nt, Artificial Sequence
  Description of Artificial Sequence: Synthetic oligonucleotide
  Sense strand starting at position 1490 of SEQ ID NO: 917471
ccgucaucuccacagagga

SEQ ID NO: 1236255 - RNA, 19 nt, Artificial Sequence
  Description of Artificial Sequence: Synthetic oligonucleotide
  Antisense strand to SEQ ID NO: 1236254
uccucuguggagaugacgg

SEQ ID NO: 1236256 - RNA, 19 nt, Artificial Sequence
  Description of Artificial Sequence: Synthetic oligonucleotide
  Sense strand starting at position 2335 of SEQ ID NO: 917471
ugccaaugaguuuauguuu

SEQ ID NO: 1236257 - RNA, 19 nt, Artificial Sequence
  Description of Artificial Sequence: Synthetic oligonucleotide
  Antisense strand to SEQ ID NO: 1236256
aaacauaaacucauuggca

SEQ ID NO: 1236258 - RNA, 19 nt, Artificial Sequence
  Description of Artificial Sequence: Synthetic oligonucleotide
  Sense strand starting at position 2493 of SEQ ID NO: 917471
ggagaaaucucagcuaacu

SEQ ID NO: 1236259 - RNA, 19 nt, Artificial Sequence
  Description of Artificial Sequence: Synthetic oligonucleotide
  Antisense strand to SEQ ID NO: 1236258
aguuagcugagauuucucc

SEQ ID NO: 1236260 - RNA, 19 nt, Artificial Sequence
  Description of Artificial Sequence: Synthetic oligonucleotide
  Sense strand starting at position 2786 of SEQ ID NO: 917471
ggucauaaugaaugaaagu

SEQ ID NO: 1236261 - RNA, 19 nt, Artificial Sequence
  Description of Artificial Sequence: Synthetic oligonucleotide
  Antisense strand to SEQ ID NO: 1236260
acuuucauucauuaugacc

SEQ ID NO: 1236262 - RNA, 19 nt, Artificial Sequence
  Description of Artificial Sequence: Synthetic oligonucleotide
  Sense strand starting at position 2803 of SEQ ID NO: 917471
gugucuuggaauuagaguu

SEQ ID NO: 1236263 - RNA, 19 nt, Artificial Sequence
  Description of Artificial Sequence: Synthetic oligonucleotide
  Antisense strand to SEQ ID NO: 1236262
aacucuaauuccaagacac

SEQ ID NO: 1236264 - RNA, 19 nt, Artificial Sequence
  Description of Artificial Sequence: Synthetic oligonucleotide
  Sense strand starting at position 2809 of SEQ ID NO: 917471
uggaauuagaguuaguggu

SEQ ID NO: 1236265 - RNA, 19 nt, Artificial Sequence
  Description of Artificial Sequence: Synthetic oligonucleotide
  Antisense strand to SEQ ID NO: 1236264
accacuaacucuaauucca

SEQ ID NO: 1236266 - RNA, 19 nt, Artificial Sequence
  Description of Artificial Sequence: Synthetic oligonucleotide
  Sense strand starting at position 2825 of SEQ ID NO: 917471
gguugcacacauuauaagu

SEQ ID NO: 1236267 - RNA, 19 nt, Artificial Sequence
  Description of Artificial Sequence: Synthetic oligonucleotide
  Antisense strand to SEQ ID NO: 1236266
acuuauaaugugugcaacc

SEQ ID NO: 1236268 - RNA, 19 nt, Artificial Sequence
  Description of Artificial Sequence: Synthetic oligonucleotide
  Sense strand starting at position 3152 of SEQ ID NO: 917471
ggcuauugugaauagcaau

SEQ ID NO: 1236269 - RNA, 19 nt, Artificial Sequence
  Description of Artificial Sequence: Synthetic oligonucleotide
  Antisense strand to SEQ ID NO: 1236268
auugcuauucacaauagcc

SEQ ID NO: 1236270 - RNA, 19 nt, Artificial Sequence
  Description of Artificial Sequence: Synthetic oligonucleotide
  Sense strand starting at position 3158 of SEQ ID NO: 917471
ugugaauagcaaugauaug

SEQ ID NO: 1236271 - RNA, 19 nt, Artificial Sequence
  Description of Artificial Sequence: Synthetic oligonucleotide
  Antisense strand to SEQ ID NO: 1236270
cauaucauugcuauucaca

SEQ ID NO: 1236272 - RNA, 19 nt, Artificial Sequence
  Description of Artificial Sequence: Synthetic oligonucleotide
  Sense strand starting at position 3238 of SEQ ID NO: 917471
guggaacuucugggucuua

SEQ ID NO: 1236273 - RNA, 19 nt, Artificial Sequence
  Description of Artificial Sequence: Synthetic oligonucleotide
  Antisense strand to SEQ ID NO: 1236272
uaagacccagaaguuccac

SEQ ID NO: 1236274 - RNA, 19 nt, Artificial Sequence
  Description of Artificial Sequence: Synthetic oligonucleotide
  Sense strand starting at position 3239 of SEQ ID NO: 917471
uggaacuucugggucuuau

SEQ ID NO: 1236275 - RNA, 19 nt, Artificial Sequence
  Description of Artificial Sequence: Synthetic oligonucleotide
  Antisense strand to SEQ ID NO: 1236274
auaagacccagaaguucca

SEQ ID NO: 1236276 - RNA, 19 nt, Artificial Sequence
  Description of Artificial Sequence: Synthetic oligonucleotide
  Sense strand starting at position 3256 of SEQ ID NO: 917471
auaguaauucuacgugaaa

SEQ ID NO: 1236277 - RNA, 19 nt, Artificial Sequence
  Description of Artificial Sequence: Synthetic oligonucleotide
  Antisense strand to SEQ ID NO: 1236276
uuucacguagaauuacuau

SEQ ID NO: 1236278 - RNA, 19 nt, Artificial Sequence
  Description of Artificial Sequence: Synthetic oligonucleotide
  Sense strand starting at position 3389 of SEQ ID NO: 917471
uuucuauuccuuugauagu

SEQ ID NO: 1236279 - RNA, 19 nt, Artificial Sequence
  Description of Artificial Sequence: Synthetic oligonucleotide
  Antisense strand to SEQ ID NO: 1236278
acuaucaaaggaauagaaa

SEQ ID NO: 1236280 - RNA, 19 nt, Artificial Sequence
  Description of Artificial Sequence: Synthetic oligonucleotide
  Sense strand starting at position 3418 of SEQ ID NO: 917471
aaggguauaaagugguauu

SEQ ID NO: 1236281 - RNA, 19 nt, Artificial Sequence
  Description of Artificial Sequence: Synthetic oligonucleotide
  Antisense strand to SEQ ID NO: 1236280
aauaccacuuuauacccuu

SEQ ID NO: 1236282 - RNA, 19 nt, Artificial Sequence
  Description of Artificial Sequence: Synthetic oligonucleotide
  Sense strand starting at position 3458 of SEQ ID NO: 917471
uucccuaauggcuaguuau

SEQ ID NO: 1236283 - RNA, 19 nt, Artificial Sequence
  Description of Artificial Sequence: Synthetic oligonucleotide
  Antisense strand to SEQ ID NO: 1236282
auaacuagccauuagggaa

SEQ ID NO: 1236284 - RNA, 19 nt, Artificial Sequence
  Description of Artificial Sequence: Synthetic oligonucleotide
  Sense strand starting at position 3471 of SEQ ID NO: 917471
aguuaucuugagcaucuuu

SEQ ID NO: 1236285 - RNA, 19 nt, Artificial Sequence
  Description of Artificial Sequence: Synthetic oligonucleotide
  Antisense strand to SEQ ID NO: 1236284
aaagaugcucaagauaacu

SEQ ID NO: 1236286 - RNA, 19 nt, Artificial Sequence
  Description of Artificial Sequence: Synthetic oligonucleotide
  Sense strand starting at position 3591 of SEQ ID NO: 917471
uguguagucauauauucug

SEQ ID NO: 1236287 - RNA, 19 nt, Artificial Sequence
  Description of Artificial Sequence: Synthetic oligonucleotide
  Antisense strand to SEQ ID NO: 1236286
cagaauauaugacuacaca

SEQ ID NO: 1236288 - RNA, 19 nt, Artificial Sequence
  Description of Artificial Sequence: Synthetic oligonucleotide
  Sense strand starting at position 3594 of SEQ ID NO: 917471
guagucauauauucuggau

SEQ ID NO: 1236289 - RNA, 19 nt, Artificial Sequence
  Description of Artificial Sequence: Synthetic oligonucleotide
  Antisense strand to SEQ ID NO: 1236288
auccagaauauaugacuac

SEQ ID NO: 1236290 - RNA, 19 nt, Artificial Sequence
  Description of Artificial Sequence: Synthetic oligonucleotide
  Sense strand starting at position 3627 of SEQ ID NO: 917471
agauauaucauugguggau

SEQ ID NO: 1236291 - RNA, 19 nt, Artificial Sequence
  Description of Artificial Sequence: Synthetic oligonucleotide
  Antisense strand to SEQ ID NO: 1236290
auccaccaaugauauaucu

SEQ ID NO: 1236292 - RNA, 19 nt, Artificial Sequence
  Description of Artificial Sequence: Synthetic oligonucleotide
  Sense strand starting at position 3628 of SEQ ID NO: 917471
gauauaucauugguggaua

SEQ ID NO: 1236293 - RNA, 19 nt, Artificial Sequence
  Description of Artificial Sequence: Synthetic oligonucleotide
  Antisense strand to SEQ ID NO: 1236292
uauccaccaaugauauauc

SEQ ID NO: 1236294 - RNA, 19 nt, Artificial Sequence
  Description of Artificial Sequence: Synthetic oligonucleotide
  Sense strand starting at position 3639 of SEQ ID NO: 917471
gguggauacuuucucccau

SEQ ID NO: 1236295 - RNA, 19 nt, Artificial Sequence
  Description of Artificial Sequence: Synthetic oligonucleotide
  Antisense strand to SEQ ID NO: 1236294
augggagaaaguauccacc

SEQ ID NO: 1236296 - RNA, 19 nt, Artificial Sequence
  Description of Artificial Sequence: Synthetic oligonucleotide
  Sense strand starting at position 3640 of SEQ ID NO: 917471
guggauacuuucucccauu

SEQ ID NO: 1236297 - RNA, 19 nt, Artificial Sequence
  Description of Artificial Sequence: Synthetic oligonucleotide
  Antisense strand to SEQ ID NO: 1236296
aaugggagaaaguauccac

SEQ ID NO: 1236298 - RNA, 19 nt, Artificial Sequence
  Description of Artificial Sequence: Synthetic oligonucleotide
  Sense strand starting at position 3758 of SEQ ID NO: 917471
uggugucaucaccaagaau

SEQ ID NO: 1236299 - RNA, 19 nt, Artificial Sequence
  Description of Artificial Sequence: Synthetic oligonucleotide
  Antisense strand to SEQ ID NO: 1236298
auucuuggugaugacacca

SEQ ID NO: 1236300 - RNA, 19 nt, Artificial Sequence
  Description of Artificial Sequence: Synthetic oligonucleotide
  Sense strand starting at position 3769 of SEQ ID NO: 917471
ccaagaauccauugugcaa

SEQ ID NO: 1236301 - RNA, 19 nt, Artificial Sequence
  Description of Artificial Sequence: Synthetic oligonucleotide
  Antisense strand to SEQ ID NO: 1236300
uugcacaauggauucuugg

SEQ ID NO: 1236302 - RNA, 19 nt, Artificial Sequence
  Description of Artificial Sequence: Synthetic oligonucleotide
  Sense strand starting at position 3942 of SEQ ID NO: 917471
gagauauaauuuggucaac

SEQ ID NO: 1236303 - RNA, 19 nt, Artificial Sequence
  Description of Artificial Sequence: Synthetic oligonucleotide
  Antisense strand to SEQ ID NO: 1236302
guugaccaaauuauaucuc

SEQ ID NO: 1236304 - RNA, 19 nt, Artificial Sequence
  Description of Artificial Sequence: Synthetic oligonucleotide
  Sense strand starting at position 3942 of SEQ ID NO: 917472
gagauauaauuuggucaac

SEQ ID NO: 1236305 - RNA, 19 nt, Artificial Sequence
  Description of Artificial Sequence: Synthetic oligonucleotide
  Antisense strand to SEQ ID NO: 1236304
guugaccaaauuauaucuc

SEQ ID NO: 1236306 - RNA, 19 nt, Artificial Sequence
  Description of Artificial Sequence: Synthetic oligonucleotide
  Sense strand starting at position 175 of SEQ ID NO: 917472
gggaaagugucucuacaaa

SEQ ID NO: 1236307 - RNA, 19 nt, Artificial Sequence
  Description of Artificial Sequence: Synthetic oligonucleotide
  Antisense strand to SEQ ID NO: 1236306
uuuguagagacacuuuccc

SEQ ID NO: 1236308 - RNA, 19 nt, Artificial Sequence
  Description of Artificial Sequence: Synthetic oligonucleotide
  Sense strand starting at position 765 of SEQ ID NO: 917472
ugaaacuccgucugaaacu

SEQ ID NO: 1236309 - RNA, 19 nt, Artificial Sequence
  Description of Artificial Sequence: Synthetic oligonucleotide
  Antisense strand to SEQ ID NO: 1236308
aguuucagacggaguuuca

SEQ ID NO: 1236310 - RNA, 19 nt, Artificial Sequence
  Description of Artificial Sequence: Synthetic oligonucleotide
  Sense strand starting at position 909 of SEQ ID NO: 917472
guugaauuuaggugaacgu

SEQ ID NO: 1236311 - RNA, 19 nt, Artificial Sequence
  Description of Artificial Sequence: Synthetic oligonucleotide
  Antisense strand to SEQ ID NO: 1236310
acguucaccuaaauucaac

SEQ ID NO: 1236312 - RNA, 19 nt, Artificial Sequence
  Description of Artificial Sequence: Synthetic oligonucleotide
  Sense strand starting at position 990 of SEQ ID NO: 917472
ugaugacuuuaagauuucu

SEQ ID NO: 1236313 - RNA, 19 nt, Artificial Sequence
  Description of Artificial Sequence: Synthetic oligonucleotide
  Antisense strand to SEQ ID NO: 1236312
agaaaucuuaaagucauca

SEQ ID NO: 1236314 - RNA, 19 nt, Artificial Sequence
  Description of Artificial Sequence: Synthetic oligonucleotide
  Sense strand starting at position 1132 of SEQ ID NO: 917472
cugugaggaaacuguaauc

SEQ ID NO: 1236315 - RNA, 19 nt, Artificial Sequence
  Description of Artificial Sequence: Synthetic oligonucleotide
  Antisense strand to SEQ ID NO: 1236314
gauuacaguuuccucacag

SEQ ID NO: 1236316 - RNA, 19 nt, Artificial Sequence
  Description of Artificial Sequence: Synthetic oligonucleotide
  Sense strand starting at position 1226 of SEQ ID NO: 917472
ucagaacucuguguccaau

SEQ ID NO: 1236317 - RNA, 19 nt, Artificial Sequence
  Description of Artificial Sequence: Synthetic oligonucleotide
  Antisense strand to SEQ ID NO: 1236316
auuggacacagaguucuga

SEQ ID NO: 1236318 - RNA, 19 nt, Artificial Sequence
  Description of Artificial Sequence: Synthetic oligonucleotide
  Sense strand starting at position 1336 of SEQ ID NO: 917472
ggacccaauucugcucaga

SEQ ID NO: 1236319 - RNA, 19 nt, Artificial Sequence
  Description of Artificial Sequence: Synthetic oligonucleotide
  Antisense strand to SEQ ID NO: 1236318
ucugagcagaauugggucc

SEQ ID NO: 1236320 - RNA, 19 nt, Artificial Sequence
  Description of Artificial Sequence: Synthetic oligonucleotide
  Sense strand starting at position 1338 of SEQ ID NO: 917472
acccaauucugcucagaga

SEQ ID NO: 1236321 - RNA, 19 nt, Artificial Sequence
  Description of Artificial Sequence: Synthetic oligonucleotide
  Antisense strand to SEQ ID NO: 1236320
ucucugagcagaauugggu

SEQ ID NO: 1236322 - RNA, 19 nt, Artificial Sequence
  Description of Artificial Sequence: Synthetic oligonucleotide
  Sense strand starting at position 1339 of SEQ ID NO: 917472
cccaauucugcucagagac

SEQ ID NO: 1236323 - RNA, 19 nt, Artificial Sequence
  Description of Artificial Sequence: Synthetic oligonucleotide
  Antisense strand to SEQ ID NO: 1236322
gucucugagcagaauuggg

SEQ ID NO: 1236324 - RNA, 19 nt, Artificial Sequence
  Description of Artificial Sequence: Synthetic oligonucleotide
  Sense strand starting at position 1345 of SEQ ID NO: 917472
ucugcucagagacgaauau

SEQ ID NO: 1236325 - RNA, 19 nt, Artificial Sequence
  Description of Artificial Sequence: Synthetic oligonucleotide
  Antisense strand to SEQ ID NO: 1236324
auauucgucucugagcaga

SEQ ID NO: 1236326 - RNA, 19 nt, Artificial Sequence
  Description of Artificial Sequence: Synthetic oligonucleotide
  Sense strand starting at position 1385 of SEQ ID NO: 917472
acuuuauaacauggugauc

SEQ ID NO: 1236327 - RNA, 19 nt, Artificial Sequence
  Description of Artificial Sequence: Synthetic oligonucleotide
  Antisense strand to SEQ ID NO: 1236326
gaucaccauguuauaaagu

SEQ ID NO: 1236328 - RNA, 19 nt, Artificial Sequence
  Description of Artificial Sequence: Synthetic oligonucleotide
  Sense strand starting at position 1574 of SEQ ID NO: 917472
gguaaccauggccaguaau

SEQ ID NO: 1236329 - RNA, 19 nt, Artificial Sequence
  Description of Artificial Sequence: Synthetic oligonucleotide
  Antisense strand to SEQ ID NO: 1236328
auuacuggccaugguuacc

SEQ ID NO: 1236330 - RNA, 19 nt, Artificial Sequence
  Description of Artificial Sequence: Synthetic oligonucleotide
  Sense strand starting at position 1616 of SEQ ID NO: 917472
ucaauucuacgcguugcua

SEQ ID NO: 1236331 - RNA, 19 nt, Artificial Sequence
  Description of Artificial Sequence: Synthetic oligonucleotide
  Antisense strand to SEQ ID NO: 1236330
uagcaacgcguagaauuga

SEQ ID NO: 1236332 - RNA, 19 nt, Artificial Sequence
  Description of Artificial Sequence: Synthetic oligonucleotide
  Sense strand starting at position 1617 of SEQ ID NO: 917472
caauucuacgcguugcuau

SEQ ID NO: 1236333 - RNA, 19 nt, Artificial Sequence
  Description of Artificial Sequence: Synthetic oligonucleotide
  Antisense strand to SEQ ID NO: 1236332
auagcaacgcguagaauug

SEQ ID NO: 1236334 - RNA, 19 nt, Artificial Sequence
  Description of Artificial Sequence: Synthetic oligonucleotide
  Sense strand starting at position 1658 of SEQ ID NO: 917472
cgaccagagucuucccauu

SEQ ID NO: 1236335 - RNA, 19 nt, Artificial Sequence
  Description of Artificial Sequence: Synthetic oligonucleotide
  Antisense strand to SEQ ID NO: 1236334
aaugggaagacucuggucg

SEQ ID NO: 1236336 - RNA, 19 nt, Artificial Sequence
  Description of Artificial Sequence: Synthetic oligonucleotide
  Sense strand starting at position 1664 of SEQ ID NO: 917472
gagucuucccauugcagga

SEQ ID NO: 1236337 - RNA, 19 nt, Artificial Sequence
  Description of Artificial Sequence: Synthetic oligonucleotide
  Antisense strand to SEQ ID NO: 1236336
uccugcaaugggaagacuc

SEQ ID NO: 1236338 - RNA, 19 nt, Artificial Sequence
  Description of Artificial Sequence: Synthetic oligonucleotide
  Sense strand starting at position 1716 of SEQ ID NO: 917472
ccgucaucuccacagagga

SEQ ID NO: 1236339 - RNA, 19 nt, Artificial Sequence
  Description of Artificial Sequence: Synthetic oligonucleotide
  Antisense strand to SEQ ID NO: 1236338
uccucuguggagaugacgg

SEQ ID NO: 1236340 - RNA, 19 nt, Artificial Sequence
  Description of Artificial Sequence: Synthetic oligonucleotide
  Sense strand starting at position 2561 of SEQ ID NO: 917472
ugccaaugaguuuauguuu

SEQ ID NO: 1236341 - RNA, 19 nt, Artificial Sequence
  Description of Artificial Sequence: Synthetic oligonucleotide
  Antisense strand to SEQ ID NO: 1236340
aaacauaaacucauuggca

SEQ ID NO: 1236342 - RNA, 19 nt, Artificial Sequence
  Description of Artificial Sequence: Synthetic oligonucleotide
  Sense strand starting at position 2719 of SEQ ID NO: 917472
ggagaaaucucagcuaacu

SEQ ID NO: 1236343 - RNA, 19 nt, Artificial Sequence
  Description of Artificial Sequence: Synthetic oligonucleotide
  Antisense strand to SEQ ID NO: 1236342
aguuagcugagauuucucc

SEQ ID NO: 1236344 - RNA, 19 nt, Artificial Sequence
  Description of Artificial Sequence: Synthetic oligonucleotide
  Sense strand starting at position 3012 of SEQ ID NO: 917472
ggucauaaugaaugaaagu

SEQ ID NO: 1236345 - RNA, 19 nt, Artificial Sequence
  Description of Artificial Sequence: Synthetic oligonucleotide
  Antisense strand to SEQ ID NO: 1236344
acuuucauucauuaugacc

SEQ ID NO: 1236346 - RNA, 19 nt, Artificial Sequence
  Description of Artificial Sequence: Synthetic oligonucleotide
  Sense strand starting at position 3029 of SEQ ID NO: 917472
gugucuuggaauuagaguu

SEQ ID NO: 1236347 - RNA, 19 nt, Artificial Sequence
  Description of Artificial Sequence: Synthetic oligonucleotide
  Antisense strand to SEQ ID NO: 1236346
aacucuaauuccaagacac

SEQ ID NO: 1236348 - RNA, 19 nt, Artificial Sequence
  Description of Artificial Sequence: Synthetic oligonucleotide
  Sense strand starting at position 3035 of SEQ ID NO: 917472
uggaauuagaguuaguggu

SEQ ID NO: 1236349 - RNA, 19 nt, Artificial Sequence
  Description of Artificial Sequence: Synthetic oligonucleotide
  Antisense strand to SEQ ID NO: 1236348
accacuaacucuaauucca

SEQ ID NO: 1236350 - RNA, 19 nt, Artificial Sequence
  Description of Artificial Sequence: Synthetic oligonucleotide
  Sense strand starting at position 3051 of SEQ ID NO: 917472
gguugcacacauuauaagu

SEQ ID NO: 1236351 - RNA, 19 nt, Artificial Sequence
  Description of Artificial Sequence: Synthetic oligonucleotide
  Antisense strand to SEQ ID NO: 1236350
acuuauaaugugugcaacc

SEQ ID NO: 1236352 - RNA, 19 nt, Artificial Sequence
  Description of Artificial Sequence: Synthetic oligonucleotide
  Sense strand starting at position 3378 of SEQ ID NO: 917472
ggcuauugugaauagcaau

SEQ ID NO: 1236353 - RNA, 19 nt, Artificial Sequence
  Description of Artificial Sequence: Synthetic oligonucleotide
  Antisense strand to SEQ ID NO: 1236352
auugcuauucacaauagcc

SEQ ID NO: 1236354 - RNA, 19 nt, Artificial Sequence
  Description of Artificial Sequence: Synthetic oligonucleotide
  Sense strand starting at position 3384 of SEQ ID NO: 917472
ugugaauagcaaugauaug

SEQ ID NO: 1236355 - RNA, 19 nt, Artificial Sequence
  Description of Artificial Sequence: Synthetic oligonucleotide
  Antisense strand to SEQ ID NO: 1236354
cauaucauugcuauucaca

SEQ ID NO: 1236356 - RNA, 19 nt, Artificial Sequence
  Description of Artificial Sequence: Synthetic oligonucleotide
  Sense strand starting at position 3464 of SEQ ID NO: 917472
guggaacuucugggucuua

SEQ ID NO: 1236357 - RNA, 19 nt, Artificial Sequence
  Description of Artificial Sequence: Synthetic oligonucleotide
  Antisense strand to SEQ ID NO: 1236356
uaagacccagaaguuccac

SEQ ID NO: 1236358 - RNA, 19 nt, Artificial Sequence
  Description of Artificial Sequence: Synthetic oligonucleotide
  Sense strand starting at position 3465 of SEQ ID NO: 917472
uggaacuucugggucuuau

SEQ ID NO: 1236359 - RNA, 19 nt, Artificial Sequence
  Description of Artificial Sequence: Synthetic oligonucleotide
  Antisense strand to SEQ ID NO: 1236358
auaagacccagaaguucca

SEQ ID NO: 1236360 - RNA, 19 nt, Artificial Sequence
  Description of Artificial Sequence: Synthetic oligonucleotide
  Sense strand starting at position 3482 of SEQ ID NO: 917472
auaguaauucuacgugaaa

SEQ ID NO: 1236361 - RNA, 19 nt, Artificial Sequence
  Description of Artificial Sequence: Synthetic oligonucleotide
  Antisense strand to SEQ ID NO: 1236360
uuucacguagaauuacuau

SEQ ID NO: 1236362 - RNA, 19 nt, Artificial Sequence
  Description of Artificial Sequence: Synthetic oligonucleotide
  Sense strand starting at position 3615 of SEQ ID NO: 917472
uuucuauuccuuugauagu

SEQ ID NO: 1236363 - RNA, 19 nt, Artificial Sequence
  Description of Artificial Sequence: Synthetic oligonucleotide
  Antisense strand to SEQ ID NO: 1236362
acuaucaaaggaauagaaa

SEQ ID NO: 1236364 - RNA, 19 nt, Artificial Sequence
  Description of Artificial Sequence: Synthetic oligonucleotide
  Sense strand starting at position 3644 of SEQ ID NO: 917472
aaggguauaaagugguauu

SEQ ID NO: 1236365 - RNA, 19 nt, Artificial Sequence
  Description of Artificial Sequence: Synthetic oligonucleotide
  Antisense strand to SEQ ID NO: 1236364
aauaccacuuuauacccuu

SEQ ID NO: 1236366 - RNA, 19 nt, Artificial Sequence
  Description of Artificial Sequence: Synthetic oligonucleotide
  Sense strand starting at position 3684 of SEQ ID NO: 917472
uucccuaauggcuaguuau

SEQ ID NO: 1236367 - RNA, 19 nt, Artificial Sequence
  Description of Artificial Sequence: Synthetic oligonucleotide
  Antisense strand to SEQ ID NO: 1236366
auaacuagccauuagggaa

SEQ ID NO: 1236368 - RNA, 19 nt, Artificial Sequence
  Description of Artificial Sequence: Synthetic oligonucleotide
  Sense strand starting at position 3687 of SEQ ID NO: 917472
ccuaauggcuaguuaucuu

SEQ ID NO: 1236369 - RNA, 19 nt, Artificial Sequence
  Description of Artificial Sequence: Synthetic oligonucleotide
  Antisense strand to SEQ ID NO: 1236368
aagauaacuagccauuagg

SEQ ID NO: 1236370 - RNA, 19 nt, Artificial Sequence
  Description of Artificial Sequence: Synthetic oligonucleotide
  Sense strand starting at position 3694 of SEQ ID NO: 917472
gcuaguuaucuugagcauc

SEQ ID NO: 1236371 - RNA, 19 nt, Artificial Sequence
  Description of Artificial Sequence: Synthetic oligonucleotide
  Antisense strand to SEQ ID NO: 1236370
gaugcucaagauaacuagc

SEQ ID NO: 1236372 - RNA, 19 nt, Artificial Sequence
  Description of Artificial Sequence: Synthetic oligonucleotide
  Sense strand starting at position 3697 of SEQ ID NO: 917472
aguuaucuugagcaucuuu

SEQ ID NO: 1236373 - RNA, 19 nt, Artificial Sequence
  Description of Artificial Sequence: Synthetic oligonucleotide
  Antisense strand to SEQ ID NO: 1236372
aaagaugcucaagauaacu

SEQ ID NO: 1236374 - RNA, 19 nt, Artificial Sequence
  Description of Artificial Sequence: Synthetic oligonucleotide
  Sense strand starting at position 3817 of SEQ ID NO: 917472
uguguagucauauauucug

SEQ ID NO: 1236375 - RNA, 19 nt, Artificial Sequence
  Description of Artificial Sequence: Synthetic oligonucleotide
  Antisense strand to SEQ ID NO: 1236374
cagaauauaugacuacaca

SEQ ID NO: 1236376 - RNA, 19 nt, Artificial Sequence
  Description of Artificial Sequence: Synthetic oligonucleotide
  Sense strand starting at position 3820 of SEQ ID NO: 917472
guagucauauauucuggau

SEQ ID NO: 1236377 - RNA, 19 nt, Artificial Sequence
  Description of Artificial Sequence: Synthetic oligonucleotide
  Antisense strand to SEQ ID NO: 1236376
auccagaauauaugacuac

SEQ ID NO: 1236378 - RNA, 19 nt, Artificial Sequence
  Description of Artificial Sequence: Synthetic oligonucleotide
  Sense strand starting at position 3853 of SEQ ID NO: 917472
agauauaucauugguggau

SEQ ID NO: 1236379 - RNA, 19 nt, Artificial Sequence
  Description of Artificial Sequence: Synthetic oligonucleotide
  Antisense strand to SEQ ID NO: 1236378
auccaccaaugauauaucu

SEQ ID NO: 1236380 - RNA, 19 nt, Artificial Sequence
  Description of Artificial Sequence: Synthetic oligonucleotide
  Sense strand starting at position 3854 of SEQ ID NO: 917472
gauauaucauugguggaua

SEQ ID NO: 1236381 - RNA, 19 nt, Artificial Sequence
  Description of Artificial Sequence: Synthetic oligonucleotide
  Antisense strand to SEQ ID NO: 1236380
uauccaccaaugauauauc

SEQ ID NO: 1236382 - RNA, 19 nt, Artificial Sequence
  Description of Artificial Sequence: Synthetic oligonucleotide
  Sense strand starting at position 3865 of SEQ ID NO: 917472
gguggauacuuucucccau

SEQ ID NO: 1236383 - RNA, 19 nt, Artificial Sequence
  Description of Artificial Sequence: Synthetic oligonucleotide
  Antisense strand to SEQ ID NO: 1236382
augggagaaaguauccacc

SEQ ID NO: 1236384 - RNA, 19 nt, Artificial Sequence
  Description of Artificial Sequence: Synthetic oligonucleotide
  Sense strand starting at position 3866 of SEQ ID NO: 917471
guggauacuuucucccauu

SEQ ID NO: 1236385 - RNA, 19 nt, Artificial Sequence
  Description of Artificial Sequence: Synthetic oligonucleotide
  Antisense strand to SEQ ID NO: 1236384
aaugggagaaaguauccac

SEQ ID NO: 1236386 - RNA, 19 nt, Artificial Sequence
  Description of Artificial Sequence: Synthetic oligonucleotide
  Sense strand starting at position 3942 of SEQ ID NO: 917473
gagauauaauuuggucaac

SEQ ID NO: 1236387 - RNA, 19 nt, Artificial Sequence
  Description of Artificial Sequence: Synthetic oligonucleotide
  Antisense strand to SEQ ID NO: 1236386
guugaccaaauuauaucuc

SEQ ID NO: 1236388 - RNA, 19 nt, Artificial Sequence
  Description of Artificial Sequence: Synthetic oligonucleotide
  Sense strand starting at position 70 of SEQ ID NO: 917473
ccauauuuauaggauguuu

SEQ ID NO: 1236389 - RNA, 19 nt, Artificial Sequence
  Description of Artificial Sequence: Synthetic oligonucleotide
  Antisense strand to SEQ ID NO: 1236388
aaacauccuauaaauaugg

SEQ ID NO: 1236390 - RNA, 19 nt, Artificial Sequence
  Description of Artificial Sequence: Synthetic oligonucleotide
  Sense strand starting at position 88 of SEQ ID NO: 917473
uuucucaucugacuacgau

SEQ ID NO: 1236391 - RNA, 19 nt, Artificial Sequence
  Description of Artificial Sequence: Synthetic oligonucleotide
  Antisense strand to SEQ ID NO: 1236390
aucguagucagaugagaaa

SEQ ID NO: 1236392 - RNA, 19 nt, Artificial Sequence
  Description of Artificial Sequence: Synthetic oligonucleotide
  Sense strand starting at position 89 of SEQ ID NO: 917473
uucucaucugacuacgauu

SEQ ID NO: 1236393 - RNA, 19 nt, Artificial Sequence
  Description of Artificial Sequence: Synthetic oligonucleotide
  Antisense strand to SEQ ID NO: 1236392
aaucguagucagaugagaa

SEQ ID NO: 1236394 - RNA, 19 nt, Artificial Sequence
  Description of Artificial Sequence: Synthetic oligonucleotide
  Sense strand starting at position 91 of SEQ ID NO: 917473
cucaucugacuacgauuaa

SEQ ID NO: 1236395 - RNA, 19 nt, Artificial Sequence
  Description of Artificial Sequence: Synthetic oligonucleotide
  Antisense strand to SEQ ID NO: 1236394
uuaaucguagucagaugag

SEQ ID NO: 1236396 - RNA, 19 nt, Artificial Sequence
  Description of Artificial Sequence: Synthetic oligonucleotide
  Sense strand starting at position 199 of SEQ ID NO: 917473
cugugcaaacaguaaauaa

SEQ ID NO: 1236397 - RNA, 19 nt, Artificial Sequence
  Description of Artificial Sequence: Synthetic oligonucleotide
  Antisense strand to SEQ ID NO: 1236396
uuauuuacuguuugcacag

SEQ ID NO: 1236398 - RNA, 19 nt, Artificial Sequence
  Description of Artificial Sequence: Synthetic oligonucleotide
  Sense strand starting at position 369 of SEQ ID NO: 917473
ggaaguaaaguuuacuguu

SEQ ID NO: 1236399 - RNA, 19 nt, Artificial Sequence
  Description of Artificial Sequence: Synthetic oligonucleotide
  Antisense strand to SEQ ID NO: 1236398
aacaguaaacuuuacuucc

SEQ ID NO: 1236400 - RNA, 19 nt, Artificial Sequence
  Description of Artificial Sequence: Synthetic oligonucleotide
  Sense strand starting at position 375 of SEQ ID NO: 917473
aaaguuuacuguuugguaa

SEQ ID NO: 1236401 - RNA, 19 nt, Artificial Sequence
  Description of Artificial Sequence: Synthetic oligonucleotide
  Antisense strand to SEQ ID NO: 1236400
uuaccaaacaguaaacuuu

SEQ ID NO: 1236402 - RNA, 19 nt, Artificial Sequence
  Description of Artificial Sequence: Synthetic oligonucleotide
  Sense strand starting at position 376 of SEQ ID NO: 917473
aaguuuacuguuugguaau

SEQ ID NO: 1236403 - RNA, 19 nt, Artificial Sequence
  Description of Artificial Sequence: Synthetic oligonucleotide
  Antisense strand to SEQ ID NO: 1236402
auuaccaaacaguaaacuu

SEQ ID NO: 1236404 - RNA, 19 nt, Artificial Sequence
  Description of Artificial Sequence: Synthetic oligonucleotide
  Sense strand starting at position 382 of SEQ ID NO: 917473
acuguuugguaauuagauu

SEQ ID NO: 1236405 - RNA, 19 nt, Artificial Sequence
  Description of Artificial Sequence: Synthetic oligonucleotide
  Antisense strand to SEQ ID NO: 1236404
aaucuaauuaccaaacagu

SEQ ID NO: 1236406 - RNA, 19 nt, Artificial Sequence
  Description of Artificial Sequence: Synthetic oligonucleotide
  Sense strand starting at position 487 of SEQ ID NO: 917473
cuccaauaaguguguuuaa

SEQ ID NO: 1236407 - RNA, 19 nt, Artificial Sequence
  Description of Artificial Sequence: Synthetic oligonucleotide
  Antisense strand to SEQ ID NO: 1236406
uuaaacacacuuauuggag

SEQ ID NO: 1236408 - RNA, 19 nt, Artificial Sequence
  Description of Artificial Sequence: Synthetic oligonucleotide
  Sense strand starting at position 488 of SEQ ID NO: 917473
uccaauaaguguguuuaaa

SEQ ID NO: 1236409 - RNA, 19 nt, Artificial Sequence
  Description of Artificial Sequence: Synthetic oligonucleotide
  Antisense strand to SEQ ID NO: 1236408
uuuaaacacacuuauugga

SEQ ID NO: 1236410 - RNA, 19 nt, Artificial Sequence
  Description of Artificial Sequence: Synthetic oligonucleotide
  Sense strand starting at position 547 of SEQ ID NO: 917473
guagaauccuucuuugcag

SEQ ID NO: 1236411 - RNA, 19 nt, Artificial Sequence
  Description of Artificial Sequence: Synthetic oligonucleotide
  Antisense strand to SEQ ID NO: 1236410
cugcaaagaaggauucuac

SEQ ID NO: 1236412 - RNA, 19 nt, Artificial Sequence
  Description of Artificial Sequence: Synthetic oligonucleotide
  Sense strand starting at position 569 of SEQ ID NO: 917473
aucugacgaugucuaguaa

SEQ ID NO: 1236413 - RNA, 19 nt, Artificial Sequence
  Description of Artificial Sequence: Synthetic oligonucleotide
  Antisense strand to SEQ ID NO: 1236412
uuacuagacaucgucagau

SEQ ID NO: 1236414 - RNA, 19 nt, Artificial Sequence
  Description of Artificial Sequence: Synthetic oligonucleotide
  Sense strand starting at position 664 of SEQ ID NO: 917473
agccaaaccgguuaaggau

SEQ ID NO: 1236415 - RNA, 19 nt, Artificial Sequence
  Description of Artificial Sequence: Synthetic oligonucleotide
  Antisense strand to SEQ ID NO: 1236414
auccuuaaccgguuuggcu

SEQ ID NO: 1236416 - RNA, 19 nt, Artificial Sequence
  Description of Artificial Sequence: Synthetic oligonucleotide
  Sense strand starting at position 679 of SEQ ID NO: 917473
ggauuugacugcgauugag

SEQ ID NO: 1236417 - RNA, 19 nt, Artificial Sequence
  Description of Artificial Sequence: Synthetic oligonucleotide
  Antisense strand to SEQ ID NO: 1236416
cucaaucgcagucaaaucc

SEQ ID NO: 1236418 - RNA, 19 nt, Artificial Sequence
  Description of Artificial Sequence: Synthetic oligonucleotide
  Sense strand starting at position 689 of SEQ ID NO: 917473
gcgauugagaacuagugag

SEQ ID NO: 1236419 - RNA, 19 nt, Artificial Sequence
  Description of Artificial Sequence: Synthetic oligonucleotide
  Antisense strand to SEQ ID NO: 1236418
cucacuaguucucaaucgc

SEQ ID NO: 1236420 - RNA, 19 nt, Artificial Sequence
  Description of Artificial Sequence: Synthetic oligonucleotide
  Sense strand starting at position 1272 of SEQ ID NO: 917473
gcgagauaugcugcgccuu

SEQ ID NO: 1236421 - RNA, 19 nt, Artificial Sequence
  Description of Artificial Sequence: Synthetic oligonucleotide
  Antisense strand to SEQ ID NO: 1236420
aaggcgcagcauaucucgc

SEQ ID NO: 1236422 - RNA, 19 nt, Artificial Sequence
  Description of Artificial Sequence: Synthetic oligonucleotide
  Sense strand starting at position 2170 of SEQ ID NO: 917473
gcggucaguccucaggaaa

SEQ ID NO: 1236423 - RNA, 19 nt, Artificial Sequence
  Description of Artificial Sequence: Synthetic oligonucleotide
  Antisense strand to SEQ ID NO: 1236422
uuuccugaggacugaccgc

SEQ ID NO: 1236424 - RNA, 19 nt, Artificial Sequence
  Description of Artificial Sequence: Synthetic oligonucleotide
  Sense strand starting at position 2607 of SEQ ID NO: 917473
aacaguauuugcuugguuu

SEQ ID NO: 1236425 - RNA, 19 nt, Artificial Sequence
  Description of Artificial Sequence: Synthetic oligonucleotide
  Antisense strand to SEQ ID NO: 1236424
aaaccaagcaaauacuguu

SEQ ID NO: 1236426 - RNA, 19 nt, Artificial Sequence
  Description of Artificial Sequence: Synthetic oligonucleotide
  Sense strand starting at position 2742 of SEQ ID NO: 917473
acauaauaucgacagcuug

SEQ ID NO: 1236427 - RNA, 19 nt, Artificial Sequence
  Description of Artificial Sequence: Synthetic oligonucleotide
  Antisense strand to SEQ ID NO: 1236426
caagcugucgauauuaugu

SEQ ID NO: 1236428 - RNA, 19 nt, Artificial Sequence
  Description of Artificial Sequence: Synthetic oligonucleotide
  Sense strand starting at position 2756 of SEQ ID NO: 917473
gcuugaaucuuccuaguua

SEQ ID NO: 1236429 - RNA, 19 nt, Artificial Sequence
  Description of Artificial Sequence: Synthetic oligonucleotide
  Antisense strand to SEQ ID NO: 1236428
uaacuaggaagauucaagc

SEQ ID NO: 1236430 - RNA, 19 nt, Artificial Sequence
  Description of Artificial Sequence: Synthetic oligonucleotide
  Sense strand starting at position 2832 of SEQ ID NO: 917473
ccaguugagagcuaaugua

SEQ ID NO: 1236431 - RNA, 19 nt, Artificial Sequence
  Description of Artificial Sequence: Synthetic oligonucleotide
  Antisense strand to SEQ ID NO: 1236430
uacauuagcucucaacugg

SEQ ID NO: 1236432 - RNA, 19 nt, Artificial Sequence
  Description of Artificial Sequence: Synthetic oligonucleotide
  Sense strand starting at position 2970 of SEQ ID NO: 917473
acucauaccgaaugauaau

SEQ ID NO: 1236433 - RNA, 19 nt, Artificial Sequence
  Description of Artificial Sequence: Synthetic oligonucleotide
  Antisense strand to SEQ ID NO: 1236432
auuaucauucgguaugagu

SEQ ID NO: 1236434 - RNA, 19 nt, Artificial Sequence
  Description of Artificial Sequence: Synthetic oligonucleotide
  Sense strand starting at position 3032 of SEQ ID NO: 917473
acagaaguuccugacuuuc

SEQ ID NO: 1236435 - RNA, 19 nt, Artificial Sequence
  Description of Artificial Sequence: Synthetic oligonucleotide
  Antisense strand to SEQ ID NO: 1236434
gaaagucaggaacuucugu

SEQ ID NO: 1236436 - RNA, 19 nt, Artificial Sequence
  Description of Artificial Sequence: Synthetic oligonucleotide
  Sense strand starting at position 3050 of SEQ ID NO: 917473
cuccuaagugcuuacaaga

SEQ ID NO: 1236437 - RNA, 19 nt, Artificial Sequence
  Description of Artificial Sequence: Synthetic oligonucleotide
  Antisense strand to SEQ ID NO: 1236436
ucuuguaagcacuuaggag

SEQ ID NO: 1236438 - RNA, 19 nt, Artificial Sequence
  Description of Artificial Sequence: Synthetic oligonucleotide
  Sense strand starting at position 3193 of SEQ ID NO: 917473
cugaauuucugguugcacu

SEQ ID NO: 1236439 - RNA, 19 nt, Artificial Sequence
  Description of Artificial Sequence: Synthetic oligonucleotide
  Antisense strand to SEQ ID NO: 1236438
agugcaaccagaaauucag

SEQ ID NO: 1236440 - RNA, 19 nt, Artificial Sequence
  Description of Artificial Sequence: Synthetic oligonucleotide
  Sense strand starting at position 3211 of SEQ ID NO: 917473
ucugauggcucucuuauua

SEQ ID NO: 1236441 - RNA, 19 nt, Artificial Sequence
  Description of Artificial Sequence: Synthetic oligonucleotide
  Antisense strand to SEQ ID NO: 1236440
uaauaagagagccaucaga

SEQ ID NO: 1236442 - RNA, 19 nt, Artificial Sequence
  Description of Artificial Sequence: Synthetic oligonucleotide
  Sense strand starting at position 3215 of SEQ ID NO: 917473
auggcucucuuauuaauag

SEQ ID NO: 1236443 - RNA, 19 nt, Artificial Sequence
  Description of Artificial Sequence: Synthetic oligonucleotide
  Antisense strand to SEQ ID NO: 1236442
cuauuaauaagagagccau

SEQ ID NO: 1236444 - RNA, 19 nt, Artificial Sequence
  Description of Artificial Sequence: Synthetic oligonucleotide
  Sense strand starting at position 3230 of SEQ ID NO: 917473
auagguaucuaaguuccaa

SEQ ID NO: 1236445 - RNA, 19 nt, Artificial Sequence
  Description of Artificial Sequence: Synthetic oligonucleotide
  Antisense strand to SEQ ID NO: 1236444
uuggaacuuagauaccuau

SEQ ID NO: 1236446 - RNA, 19 nt, Artificial Sequence
  Description of Artificial Sequence: Synthetic oligonucleotide
  Sense strand starting at position 3262 of SEQ ID NO: 917473
cuaauugauuagguuaagu

SEQ ID NO: 1236447 - RNA, 19 nt, Artificial Sequence
  Description of Artificial Sequence: Synthetic oligonucleotide
  Antisense strand to SEQ ID NO: 1236446
acuuaaccuaaucaauuag

SEQ ID NO: 1236448 - RNA, 19 nt, Artificial Sequence
  Description of Artificial Sequence: Synthetic oligonucleotide
  Sense strand starting at position 3447 of SEQ ID NO: 917473
gaacaaagauauggagaaa

SEQ ID NO: 1236449 - RNA, 19 nt, Artificial Sequence
  Description of Artificial Sequence: Synthetic oligonucleotide
  Antisense strand to SEQ ID NO: 1236448
uuucuccauaucuuuguuc

SEQ ID NO: 1236450 - RNA, 19 nt, Artificial Sequence
  Description of Artificial Sequence: Synthetic oligonucleotide
  Sense strand starting at position 3470 of SEQ ID NO: 917473
ggaagucuuguagacucua

SEQ ID NO: 1236451 - RNA, 19 nt, Artificial Sequence
  Description of Artificial Sequence: Synthetic oligonucleotide
  Antisense strand to SEQ ID NO: 1236450
uagagucuacaagacuucc

SEQ ID NO: 1236452 - RNA, 19 nt, Artificial Sequence
  Description of Artificial Sequence: Synthetic oligonucleotide
  Sense strand starting at position 3475 of SEQ ID NO: 917473
ucuuguagacucuacgaaa

SEQ ID NO: 1236453 - RNA, 19 nt, Artificial Sequence
  Description of Artificial Sequence: Synthetic oligonucleotide
  Antisense strand to SEQ ID NO: 1236452
uuucguagagucuacaaga

SEQ ID NO: 1236454 - RNA, 19 nt, Artificial Sequence
  Description of Artificial Sequence: Synthetic oligonucleotide
  Sense strand starting at position 3499 of SEQ ID NO: 917473
cagcuugggagcuaggauu

SEQ ID NO: 1236455 - RNA, 19 nt, Artificial Sequence
  Description of Artificial Sequence: Synthetic oligonucleotide
  Antisense strand to SEQ ID NO: 1236454
aauccuagcucccaagcug

SEQ ID NO: 1236456 - RNA, 19 nt, Artificial Sequence
  Description of Artificial Sequence: Synthetic oligonucleotide
  Sense strand starting at position 3505 of SEQ ID NO: 917473
gggagcuaggauugaauua

SEQ ID NO: 1236457 - RNA, 19 nt, Artificial Sequence
  Description of Artificial Sequence: Synthetic oligonucleotide
  Antisense strand to SEQ ID NO: 1236456
uaauucaauccuagcuccc

SEQ ID NO: 1236458 - RNA, 19 nt, Artificial Sequence
  Description of Artificial Sequence: Synthetic oligonucleotide
  Sense strand starting at position 3550 of SEQ ID NO: 917473
ggcauaauaaagugaagua

SEQ ID NO: 1236459 - RNA, 19 nt, Artificial Sequence
  Description of Artificial Sequence: Synthetic oligonucleotide
  Antisense strand to SEQ ID NO: 1236458
uacuucacuuuauuaugcc

SEQ ID NO: 1236460 - RNA, 19 nt, Artificial Sequence
  Description of Artificial Sequence: Synthetic oligonucleotide
  Sense strand starting at position 3622 of SEQ ID NO: 917473
augacaugcuaaguaugau

SEQ ID NO: 1236461 - RNA, 19 nt, Artificial Sequence
  Description of Artificial Sequence: Synthetic oligonucleotide
  Antisense strand to SEQ ID NO: 1236460
aucauacuuagcaugucau

SEQ ID NO: 1236462 - RNA, 19 nt, Artificial Sequence
  Description of Artificial Sequence: Synthetic oligonucleotide
  Sense strand starting at position 3641 of SEQ ID NO: 917473
ugcuuucugcuugagaaug

SEQ ID NO: 1236463 - RNA, 19 nt, Artificial Sequence
  Description of Artificial Sequence: Synthetic oligonucleotide
  Antisense strand to SEQ ID NO: 1236462
cauucucaagcagaaagca

SEQ ID NO: 1236464 - RNA, 19 nt, Artificial Sequence
  Description of Artificial Sequence: Synthetic oligonucleotide
  Sense strand starting at position 3969 of SEQ ID NO: 917473
cccuguuagguuuaucuua

SEQ ID NO: 1236465 - RNA, 19 nt, Artificial Sequence
  Description of Artificial Sequence: Synthetic oligonucleotide
  Antisense strand to SEQ ID NO: 1236464
uaagauaaaccuaacaggg

SEQ ID NO: 1236466 - RNA, 19 nt, Artificial Sequence
  Description of Artificial Sequence: Synthetic oligonucleotide
  Sense strand starting at position 3976 of SEQ ID NO: 917473
agguuuaucuuacugaaug

SEQ ID NO: 1236467 - RNA, 19 nt, Artificial Sequence
  Description of Artificial Sequence: Synthetic oligonucleotide
  Antisense strand to SEQ ID NO: 1236466
cauucaguaagauaaaccu

SEQ ID NO: 1236468 - RNA, 19 nt, Artificial Sequence
  Description of Artificial Sequence: Synthetic oligonucleotide
  Sense strand starting at position 3976 of SEQ ID NO: 917474
agguuuaucuuacugaaug

SEQ ID NO: 1236469 - RNA, 19 nt, Artificial Sequence
  Description of Artificial Sequence: Synthetic oligonucleotide
  Antisense strand to SEQ ID NO: 1236468
cauucaguaagauaaaccu

SEQ ID NO: 1236470 - RNA, 19 nt, Artificial Sequence
  Description of Artificial Sequence: Synthetic oligonucleotide
  Sense strand starting at position 4 of SEQ ID NO: 917474
gcugaagauuuauaacaau

SEQ ID NO: 1236471 - RNA, 19 nt, Artificial Sequence
  Description of Artificial Sequence: Synthetic oligonucleotide
  Antisense strand to SEQ ID NO: 1236470
auuguuauaaaucuucagc

SEQ ID NO: 1236472 - RNA, 19 nt, Artificial Sequence
  Description of Artificial Sequence: Synthetic oligonucleotide
  Sense strand starting at position 62 of SEQ ID NO: 917474
aggcccugcccagagaauu

SEQ ID NO: 1236473 - RNA, 19 nt, Artificial Sequence
  Description of Artificial Sequence: Synthetic oligonucleotide
  Antisense strand to SEQ ID NO: 1236472
aauucucugggcagggccu

SEQ ID NO: 1236474 - RNA, 19 nt, Artificial Sequence
  Description of Artificial Sequence: Synthetic oligonucleotide
  Sense strand starting at position 73 of SEQ ID NO: 917474
agagaauucugacuggcag

SEQ ID NO: 1236475 - RNA, 19 nt, Artificial Sequence
  Description of Artificial Sequence: Synthetic oligonucleotide
  Antisense strand to SEQ ID NO: 1236474
cugccagucagaauucucu

SEQ ID NO: 1236476 - RNA, 19 nt, Artificial Sequence
  Description of Artificial Sequence: Synthetic oligonucleotide
  Sense strand starting at position 231 of SEQ ID NO: 917474
acacguguucgggaccuaa

SEQ ID NO: 1236477 - RNA, 19 nt, Artificial Sequence
  Description of Artificial Sequence: Synthetic oligonucleotide
  Antisense strand to SEQ ID NO: 1236476
uuaggucccgaacacgugu

SEQ ID NO: 1236478 - RNA, 19 nt, Artificial Sequence
  Description of Artificial Sequence: Synthetic oligonucleotide
  Sense strand starting at position 302 of SEQ ID NO: 917474
aauacugaguuuguaaaug

SEQ ID NO: 1236479 - RNA, 19 nt, Artificial Sequence
  Description of Artificial Sequence: Synthetic oligonucleotide
  Antisense strand to SEQ ID NO: 1236478
cauuuacaaacucaguauu

SEQ ID NO: 1236480 - RNA, 19 nt, Artificial Sequence
  Description of Artificial Sequence: Synthetic oligonucleotide
  Sense strand starting at position 324 of SEQ ID NO: 917474
auauuacuagugugaagga

SEQ ID NO: 1236481 - RNA, 19 nt, Artificial Sequence
  Description of Artificial Sequence: Synthetic oligonucleotide
  Antisense strand to SEQ ID NO: 1236480
uccuucacacuaguaauau

SEQ ID NO: 1236482 - RNA, 19 nt, Artificial Sequence
  Description of Artificial Sequence: Synthetic oligonucleotide
  Sense strand starting at position 435 of SEQ ID NO: 917474
agaagagauuccuauugaa

SEQ ID NO: 1236483 - RNA, 19 nt, Artificial Sequence
  Description of Artificial Sequence: Synthetic oligonucleotide
  Antisense strand to SEQ ID NO: 1236482
uucaauaggaaucucuucu

SEQ ID NO: 1236484 - RNA, 19 nt, Artificial Sequence
  Description of Artificial Sequence: Synthetic oligonucleotide
  Sense strand starting at position 537 of SEQ ID NO: 917474
acgcauaagcguuaaagga

SEQ ID NO: 1236485 - RNA, 19 nt, Artificial Sequence
  Description of Artificial Sequence: Synthetic oligonucleotide
  Antisense strand to SEQ ID NO: 1236484
uccuuuaacgcuuaugcgu

SEQ ID NO: 1236486 - RNA, 19 nt, Artificial Sequence
  Description of Artificial Sequence: Synthetic oligonucleotide
  Sense strand starting at position 573 of SEQ ID NO: 917474
gcccucugugcucaacauu

SEQ ID NO: 1236487 - RNA, 19 nt, Artificial Sequence
  Description of Artificial Sequence: Synthetic oligonucleotide
  Antisense strand to SEQ ID NO: 1236486
aauguugagcacagagggc

SEQ ID NO: 1236488 - RNA, 19 nt, Artificial Sequence
  Description of Artificial Sequence: Synthetic oligonucleotide
  Sense strand starting at position 602 of SEQ ID NO: 917474
acuuucuagcuaugucauu

SEQ ID NO: 1236489 - RNA, 19 nt, Artificial Sequence
  Description of Artificial Sequence: Synthetic oligonucleotide
  Antisense strand to SEQ ID NO: 1236488
aaugacauagcuagaaagu

SEQ ID NO: 1236490 - RNA, 19 nt, Artificial Sequence
  Description of Artificial Sequence: Synthetic oligonucleotide
  Sense strand starting at position 603 of SEQ ID NO: 917474
cuuucuagcuaugucauuu

SEQ ID NO: 1236491 - RNA, 19 nt, Artificial Sequence
  Description of Artificial Sequence: Synthetic oligonucleotide
  Antisense strand to SEQ ID NO: 1236490
aaaugacauagcuagaaag

SEQ ID NO: 1236492 - RNA, 19 nt, Artificial Sequence
  Description of Artificial Sequence: Synthetic oligonucleotide
  Sense strand starting at position 729 of SEQ ID NO: 917474
uugugauuauaucccucua

SEQ ID NO: 1236493 - RNA, 19 nt, Artificial Sequence
  Description of Artificial Sequence: Synthetic oligonucleotide
  Antisense strand to SEQ ID NO: 1236492
uagagggauauaaucacaa

SEQ ID NO: 1236494 - RNA, 19 nt, Artificial Sequence
  Description of Artificial Sequence: Synthetic oligonucleotide
  Sense strand starting at position 731 of SEQ ID NO: 917474
gugauuauaucccucuacu

SEQ ID NO: 1236495 - RNA, 19 nt, Artificial Sequence
  Description of Artificial Sequence: Synthetic oligonucleotide
  Antisense strand to SEQ ID NO: 1236494
aguagagggauauaaucac

SEQ ID NO: 1236496 - RNA, 19 nt, Artificial Sequence
  Description of Artificial Sequence: Synthetic oligonucleotide
  Sense strand starting at position 798 of SEQ ID NO: 917474
uauagaucuuguguagguu

SEQ ID NO: 1236497 - RNA, 19 nt, Artificial Sequence
  Description of Artificial Sequence: Synthetic oligonucleotide
  Antisense strand to SEQ ID NO: 1236496
aaccuacacaagaucuaua

SEQ ID NO: 1236498 - RNA, 19 nt, Artificial Sequence
  Description of Artificial Sequence: Synthetic oligonucleotide
  Sense strand starting at position 829 of SEQ ID NO: 917474
aagcgcuucccugugucau

SEQ ID NO: 1236499 - RNA, 19 nt, Artificial Sequence
  Description of Artificial Sequence: Synthetic oligonucleotide
  Antisense strand to SEQ ID NO: 1236498
augacacagggaagcgcuu

SEQ ID NO: 1236500 - RNA, 19 nt, Artificial Sequence
  Description of Artificial Sequence: Synthetic oligonucleotide
  Sense strand starting at position 1163 of SEQ ID NO: 917474
cugccuaauuucgcauaau

SEQ ID NO: 1236501 - RNA, 19 nt, Artificial Sequence
  Description of Artificial Sequence: Synthetic oligonucleotide
  Antisense strand to SEQ ID NO: 1236500
auuaugcgaaauuaggcag

SEQ ID NO: 1236502 - RNA, 19 nt, Artificial Sequence
  Description of Artificial Sequence: Synthetic oligonucleotide
  Sense strand starting at position 1282 of SEQ ID NO: 917474
ugacauugcggucauucuu

SEQ ID NO: 1236503 - RNA, 19 nt, Artificial Sequence
  Description of Artificial Sequence: Synthetic oligonucleotide
  Antisense strand to SEQ ID NO: 1236502
aagaaugaccgcaauguca

SEQ ID NO: 1236504 - RNA, 19 nt, Artificial Sequence
  Description of Artificial Sequence: Synthetic oligonucleotide
  Sense strand starting at position 3072 of SEQ ID NO: 917474
gaagaagacuguuaggaac

SEQ ID NO: 1236505 - RNA, 19 nt, Artificial Sequence
  Description of Artificial Sequence: Synthetic oligonucleotide
  Antisense strand to SEQ ID NO: 1236504
guuccuaacagucuucuuc

SEQ ID NO: 1236506 - RNA, 19 nt, Artificial Sequence
  Description of Artificial Sequence: Synthetic oligonucleotide
  Sense strand starting at position 3203 of SEQ ID NO: 917474
gaaauuggcaguuacggaa

SEQ ID NO: 1236507 - RNA, 19 nt, Artificial Sequence
  Description of Artificial Sequence: Synthetic oligonucleotide
  Antisense strand to SEQ ID NO: 1236506
uuccguaacugccaauuuc

SEQ ID NO: 1236508 - RNA, 19 nt, Artificial Sequence
  Description of Artificial Sequence: Synthetic oligonucleotide
  Sense strand starting at position 3229 of SEQ ID NO: 917474
gauaauugcccugggugga

SEQ ID NO: 1236509 - RNA, 19 nt, Artificial Sequence
  Description of Artificial Sequence: Synthetic oligonucleotide
  Antisense strand to SEQ ID NO: 1236508
uccacccagggcaauuauc

SEQ ID NO: 1236510 - RNA, 19 nt, Artificial Sequence
  Description of Artificial Sequence: Synthetic oligonucleotide
  Sense strand starting at position 3326 of SEQ ID NO: 917474
aaucgcgaugcuuucguua

SEQ ID NO: 1236511 - RNA, 19 nt, Artificial Sequence
  Description of Artificial Sequence: Synthetic oligonucleotide
  Antisense strand to SEQ ID NO: 1236510
uaacgaaagcaucgcgauu

SEQ ID NO: 1236512 - RNA, 19 nt, Artificial Sequence
  Description of Artificial Sequence: Synthetic oligonucleotide
  Sense strand starting at position 3335 of SEQ ID NO: 917474
gcuuucguuagauggaaug

SEQ ID NO: 1236513 - RNA, 19 nt, Artificial Sequence
  Description of Artificial Sequence: Synthetic oligonucleotide
  Antisense strand to SEQ ID NO: 1236512
cauuccaucuaacgaaagc

SEQ ID NO: 1236514 - RNA, 19 nt, Artificial Sequence
  Description of Artificial Sequence: Synthetic oligonucleotide
  Sense strand starting at position 3359 of SEQ ID NO: 917474
gagauuugcucccaaguau

SEQ ID NO: 1236515 - RNA, 19 nt, Artificial Sequence
  Description of Artificial Sequence: Synthetic oligonucleotide
  Antisense strand to SEQ ID NO: 1236514
auacuugggagcaaaucuc

SEQ ID NO: 1236516 - RNA, 19 nt, Artificial Sequence
  Description of Artificial Sequence: Synthetic oligonucleotide
  Sense strand starting at position 3370 of SEQ ID NO: 917474
ccaaguauauuguuuagau

SEQ ID NO: 1236517 - RNA, 19 nt, Artificial Sequence
  Description of Artificial Sequence: Synthetic oligonucleotide
  Antisense strand to SEQ ID NO: 1236516
aucuaaacaauauacuugg

SEQ ID NO: 1236518 - RNA, 19 nt, Artificial Sequence
  Description of Artificial Sequence: Synthetic oligonucleotide
  Sense strand starting at position 3437 of SEQ ID NO: 917474
guaugcaguguuuaaguca

SEQ ID NO: 1236519 - RNA, 19 nt, Artificial Sequence
  Description of Artificial Sequence: Synthetic oligonucleotide
  Antisense strand to SEQ ID NO: 1236518
ugacuuaaacacugcauac

SEQ ID NO: 1236520 - RNA, 19 nt, Artificial Sequence
  Description of Artificial Sequence: Synthetic oligonucleotide
  Sense strand starting at position 3450 of SEQ ID NO: 917474
aagucauacguaugcuaca

SEQ ID NO: 1236521 - RNA, 19 nt, Artificial Sequence
  Description of Artificial Sequence: Synthetic oligonucleotide
  Antisense strand to SEQ ID NO: 1236520
uguagcauacguaugacuu

SEQ ID NO: 1236522 - RNA, 19 nt, Artificial Sequence
  Description of Artificial Sequence: Synthetic oligonucleotide
  Sense strand starting at position 3455 of SEQ ID NO: 917474
auacguaugcuacagguau

SEQ ID NO: 1236523 - RNA, 19 nt, Artificial Sequence
  Description of Artificial Sequence: Synthetic oligonucleotide
  Antisense strand to SEQ ID NO: 1236522
auaccuguagcauacguau

SEQ ID NO: 1236524 - RNA, 19 nt, Artificial Sequence
  Description of Artificial Sequence: Synthetic oligonucleotide
  Sense strand starting at position 3457 of SEQ ID NO: 917474
acguaugcuacagguauau

SEQ ID NO: 1236525 - RNA, 19 nt, Artificial Sequence
  Description of Artificial Sequence: Synthetic oligonucleotide
  Antisense strand to SEQ ID NO: 1236524
auauaccuguagcauacgu

SEQ ID NO: 1236526 - RNA, 19 nt, Artificial Sequence
  Description of Artificial Sequence: Synthetic oligonucleotide
  Sense strand starting at position 3484 of SEQ ID NO: 917474
auagucaucggccaucaua

SEQ ID NO: 1236527 - RNA, 19 nt, Artificial Sequence
  Description of Artificial Sequence: Synthetic oligonucleotide
  Antisense strand to SEQ ID NO: 1236526
uaugauggccgaugacuau

SEQ ID NO: 1236528 - RNA, 19 nt, Artificial Sequence
  Description of Artificial Sequence: Synthetic oligonucleotide
  Sense strand starting at position 3573 of SEQ ID NO: 917474
uuuauuggcgguuagaauu

SEQ ID NO: 1236529 - RNA, 19 nt, Artificial Sequence
  Description of Artificial Sequence: Synthetic oligonucleotide
  Antisense strand to SEQ ID NO: 1236528
aauucuaaccgccaauaaa

SEQ ID NO: 1236530 - RNA, 19 nt, Artificial Sequence
  Description of Artificial Sequence: Synthetic oligonucleotide
  Sense strand starting at position 3618 of SEQ ID NO: 917474
caguuaguguaaccuguua

SEQ ID NO: 1236531 - RNA, 19 nt, Artificial Sequence
  Description of Artificial Sequence: Synthetic oligonucleotide
  Antisense strand to SEQ ID NO: 1236530
uaacagguuacacuaacug

SEQ ID NO: 1236532 - RNA, 19 nt, Artificial Sequence
  Description of Artificial Sequence: Synthetic oligonucleotide
  Sense strand starting at position 3626 of SEQ ID NO: 917474
guaaccuguuaacuaugaa

SEQ ID NO: 1236533 - RNA, 19 nt, Artificial Sequence
  Description of Artificial Sequence: Synthetic oligonucleotide
  Antisense strand to SEQ ID NO: 1236532
uucauaguuaacagguuac

SEQ ID NO: 1236534 - RNA, 19 nt, Artificial Sequence
  Description of Artificial Sequence: Synthetic oligonucleotide
  Sense strand starting at position 3662 of SEQ ID NO: 917474
aucagaauuucucacuggu

SEQ ID NO: 1236535 - RNA, 19 nt, Artificial Sequence
  Description of Artificial Sequence: Synthetic oligonucleotide
  Antisense strand to SEQ ID NO: 1236534
accagugagaaauucugau

SEQ ID NO: 1236536 - RNA, 19 nt, Artificial Sequence
  Description of Artificial Sequence: Synthetic oligonucleotide
  Sense strand starting at position 3669 of SEQ ID NO: 917474
uuucucacugguuauaaag

SEQ ID NO: 1236537 - RNA, 19 nt, Artificial Sequence
  Description of Artificial Sequence: Synthetic oligonucleotide
  Antisense strand to SEQ ID NO: 1236536
cuuuauaaccagugagaaa

SEQ ID NO: 1236538 - RNA, 19 nt, Artificial Sequence
  Description of Artificial Sequence: Synthetic oligonucleotide
  Sense strand starting at position 3679 of SEQ ID NO: 917474
guuauaaagucauuuguuc

SEQ ID NO: 1236539 - RNA, 19 nt, Artificial Sequence
  Description of Artificial Sequence: Synthetic oligonucleotide
  Antisense strand to SEQ ID NO: 1236538
gaacaaaugacuuuauaac

SEQ ID NO: 1236540 - RNA, 19 nt, Artificial Sequence
  Description of Artificial Sequence: Synthetic oligonucleotide
  Sense strand starting at position 3705 of SEQ ID NO: 917474
ucgugugauucaguaagga

SEQ ID NO: 1236541 - RNA, 19 nt, Artificial Sequence
  Description of Artificial Sequence: Synthetic oligonucleotide
  Antisense strand to SEQ ID NO: 1236540
uccuuacugaaucacacga

SEQ ID NO: 1236542 - RNA, 19 nt, Artificial Sequence
  Description of Artificial Sequence: Synthetic oligonucleotide
  Sense strand starting at position 3730 of SEQ ID NO: 917474
acugcaugguccuuacaau

SEQ ID NO: 1236543 - RNA, 19 nt, Artificial Sequence
  Description of Artificial Sequence: Synthetic oligonucleotide
  Antisense strand to SEQ ID NO: 1236542
auuguaaggaccaugcagu

SEQ ID NO: 1236544 - RNA, 19 nt, Artificial Sequence
  Description of Artificial Sequence: Synthetic oligonucleotide
  Sense strand starting at position 3731 of SEQ ID NO: 917474
cugcaugguccuuacaaua

SEQ ID NO: 1236545 - RNA, 19 nt, Artificial Sequence
  Description of Artificial Sequence: Synthetic oligonucleotide
  Antisense strand to SEQ ID NO: 1236544
uauuguaaggaccaugcag

SEQ ID NO: 1236546 - RNA, 19 nt, Artificial Sequence
  Description of Artificial Sequence: Synthetic oligonucleotide
  Sense strand starting at position 3776 of SEQ ID NO: 917474
ucucuuaaagaauggguuu

SEQ ID NO: 1236547 - RNA, 19 nt, Artificial Sequence
  Description of Artificial Sequence: Synthetic oligonucleotide
  Antisense strand to SEQ ID NO: 1236546
aaacccauucuuuaagaga

SEQ ID NO: 1236548 - RNA, 19 nt, Artificial Sequence
  Description of Artificial Sequence: Synthetic oligonucleotide
  Sense strand starting at position 3801 of SEQ ID NO: 917475
ggagaaaugugggacaaca

SEQ ID NO: 1236549 - RNA, 19 nt, Artificial Sequence
  Description of Artificial Sequence: Synthetic oligonucleotide
  Antisense strand to SEQ ID NO: 1236548
uguugucccacauuucucc

SEQ ID NO: 1236550 - RNA, 19 nt, Artificial Sequence
  Description of Artificial Sequence: Synthetic oligonucleotide
  Sense strand starting at position 327 of SEQ ID NO: 917475
cugccuaauuucgcauaau

SEQ ID NO: 1236551 - RNA, 19 nt, Artificial Sequence
  Description of Artificial Sequence: Synthetic oligonucleotide
  Antisense strand to SEQ ID NO: 1236550
auuaugcgaaauuaggcag

SEQ ID NO: 1236552 - RNA, 19 nt, Artificial Sequence
  Description of Artificial Sequence: Synthetic oligonucleotide
  Sense strand starting at position 446 of SEQ ID NO: 917475
ugacauugcggucauucuu

SEQ ID NO: 1236553 - RNA, 19 nt, Artificial Sequence
  Description of Artificial Sequence: Synthetic oligonucleotide
  Antisense strand to SEQ ID NO: 1236552
aagaaugaccgcaauguca

SEQ ID NO: 1236554 - RNA, 19 nt, Artificial Sequence
  Description of Artificial Sequence: Synthetic oligonucleotide
  Sense strand starting at position 2236 of SEQ ID NO: 917475
gaagaagacuguuaggaac

SEQ ID NO: 1236555 - RNA, 19 nt, Artificial Sequence
  Description of Artificial Sequence: Synthetic oligonucleotide
  Antisense strand to SEQ ID NO: 1236554
guuccuaacagucuucuuc

SEQ ID NO: 1236556 - RNA, 19 nt, Artificial Sequence
  Description of Artificial Sequence: Synthetic oligonucleotide
  Sense strand starting at position 2367 of SEQ ID NO: 917475
gaaauuggcaguuacggaa

SEQ ID NO: 1236557 - RNA, 19 nt, Artificial Sequence
  Description of Artificial Sequence: Synthetic oligonucleotide
  Antisense strand to SEQ ID NO: 1236556
uuccguaacugccaauuuc

SEQ ID NO: 1236558 - RNA, 19 nt, Artificial Sequence
  Description of Artificial Sequence: Synthetic oligonucleotide
  Sense strand starting at position 2393 of SEQ ID NO: 917475
gauaauugcccugggugga

SEQ ID NO: 1236559 - RNA, 19 nt, Artificial Sequence
  Description of Artificial Sequence: Synthetic oligonucleotide
  Antisense strand to SEQ ID NO: 1236558
uccacccagggcaauuauc

SEQ ID NO: 1236560 - RNA, 19 nt, Artificial Sequence
  Description of Artificial Sequence: Synthetic oligonucleotide
  Sense strand starting at position 2490 of SEQ ID NO: 917475
aaucgcgaugcuuucguua

SEQ ID NO: 1236561 - RNA, 19 nt, Artificial Sequence
  Description of Artificial Sequence: Synthetic oligonucleotide
  Antisense strand to SEQ ID NO: 1236560
uaacgaaagcaucgcgauu

SEQ ID NO: 1236562 - RNA, 19 nt, Artificial Sequence
  Description of Artificial Sequence: Synthetic oligonucleotide
  Sense strand starting at position 2499 of SEQ ID NO: 917475
gcuuucguuagauggaaug

SEQ ID NO: 1236563 - RNA, 19 nt, Artificial Sequence
  Description of Artificial Sequence: Synthetic oligonucleotide
  Antisense strand to SEQ ID NO: 1236562
cauuccaucuaacgaaagc

SEQ ID NO: 1236564 - RNA, 19 nt, Artificial Sequence
  Description of Artificial Sequence: Synthetic oligonucleotide
  Sense strand starting at position 2523 of SEQ ID NO: 917475
gagauuugcucccaaguau

SEQ ID NO: 1236565 - RNA, 19 nt, Artificial Sequence
  Description of Artificial Sequence: Synthetic oligonucleotide
  Antisense strand to SEQ ID NO: 1236564
auacuugggagcaaaucuc

SEQ ID NO: 1236566 - RNA, 19 nt, Artificial Sequence
  Description of Artificial Sequence: Synthetic oligonucleotide
  Sense strand starting at position 2534 of SEQ ID NO: 917475
ccaaguauauuguuuagau

SEQ ID NO: 1236567 - RNA, 19 nt, Artificial Sequence
  Description of Artificial Sequence: Synthetic oligonucleotide
  Antisense strand to SEQ ID NO: 1236566
aucuaaacaauauacuugg

SEQ ID NO: 1236568 - RNA, 19 nt, Artificial Sequence
  Description of Artificial Sequence: Synthetic oligonucleotide
  Sense strand starting at position 2601 of SEQ ID NO: 917475
guaugcaguguuuaaguca

SEQ ID NO: 1236569 - RNA, 19 nt, Artificial Sequence
  Description of Artificial Sequence: Synthetic oligonucleotide
  Antisense strand to SEQ ID NO: 1236568
ugacuuaaacacugcauac

SEQ ID NO: 1236570 - RNA, 19 nt, Artificial Sequence
  Description of Artificial Sequence: Synthetic oligonucleotide
  Sense strand starting at position 2614 of SEQ ID NO: 917475
aagucauacguaugcuaca

SEQ ID NO: 1236571 - RNA, 19 nt, Artificial Sequence
  Description of Artificial Sequence: Synthetic oligonucleotide
  Antisense strand to SEQ ID NO: 1236570
uguagcauacguaugacuu

SEQ ID NO: 1236572 - RNA, 19 nt, Artificial Sequence
  Description of Artificial Sequence: Synthetic oligonucleotide
  Sense strand starting at position 2619 of SEQ ID NO: 917475
auacguaugcuacagguau

SEQ ID NO: 1236573 - RNA, 19 nt, Artificial Sequence
  Description of Artificial Sequence: Synthetic oligonucleotide
  Antisense strand to SEQ ID NO: 1236572
auaccuguagcauacguau

SEQ ID NO: 1236574 - RNA, 19 nt, Artificial Sequence
  Description of Artificial Sequence: Synthetic oligonucleotide
  Sense strand starting at position 2621 of SEQ ID NO: 917475
acguaugcuacagguauau

SEQ ID NO: 1236575 - RNA, 19 nt, Artificial Sequence
  Description of Artificial Sequence: Synthetic oligonucleotide
  Antisense strand to SEQ ID NO: 1236574
auauaccuguagcauacgu

SEQ ID NO: 1236576 - RNA, 19 nt, Artificial Sequence
  Description of Artificial Sequence: Synthetic oligonucleotide
  Sense strand starting at position 2648 of SEQ ID NO: 917475
auagucaucggccaucaua

SEQ ID NO: 1236577 - RNA, 19 nt, Artificial Sequence
  Description of Artificial Sequence: Synthetic oligonucleotide
  Antisense strand to SEQ ID NO: 1236576
uaugauggccgaugacuau

SEQ ID NO: 1236578 - RNA, 19 nt, Artificial Sequence
  Description of Artificial Sequence: Synthetic oligonucleotide
  Sense strand starting at position 2737 of SEQ ID NO: 917475
uuuauuggcgguuagaauu

SEQ ID NO: 1236579 - RNA, 19 nt, Artificial Sequence
  Description of Artificial Sequence: Synthetic oligonucleotide
  Antisense strand to SEQ ID NO: 1236578
aauucuaaccgccaauaaa

SEQ ID NO: 1236580 - RNA, 19 nt, Artificial Sequence
  Description of Artificial Sequence: Synthetic oligonucleotide
  Sense strand starting at position 2782 of SEQ ID NO: 917475
caguuaguguaaccuguua

SEQ ID NO: 1236581 - RNA, 19 nt, Artificial Sequence
  Description of Artificial Sequence: Synthetic oligonucleotide
  Antisense strand to SEQ ID NO: 1236580
uaacagguuacacuaacug

SEQ ID NO: 1236582 - RNA, 19 nt, Artificial Sequence
  Description of Artificial Sequence: Synthetic oligonucleotide
  Sense strand starting at position 2784 of SEQ ID NO: 917475
guuaguguaaccuguuaac

SEQ ID NO: 1236583 - RNA, 19 nt, Artificial Sequence
  Description of Artificial Sequence: Synthetic oligonucleotide
  Antisense strand to SEQ ID NO: 1236582
guuaacagguuacacuaac

SEQ ID NO: 1236584 - RNA, 19 nt, Artificial Sequence
  Description of Artificial Sequence: Synthetic oligonucleotide
  Sense strand starting at position 2790 of SEQ ID NO: 917475
guaaccuguuaacuaugaa

SEQ ID NO: 1236585 - RNA, 19 nt, Artificial Sequence
  Description of Artificial Sequence: Synthetic oligonucleotide
  Antisense strand to SEQ ID NO: 1236584
uucauaguuaacagguuac

SEQ ID NO: 1236586 - RNA, 19 nt, Artificial Sequence
  Description of Artificial Sequence: Synthetic oligonucleotide
  Sense strand starting at position 2826 of SEQ ID NO: 917475
aucagaauuucucacuggu

SEQ ID NO: 1236587 - RNA, 19 nt, Artificial Sequence
  Description of Artificial Sequence: Synthetic oligonucleotide
  Antisense strand to SEQ ID NO: 1236586
accagugagaaauucugau

SEQ ID NO: 1236588 - RNA, 19 nt, Artificial Sequence
  Description of Artificial Sequence: Synthetic oligonucleotide
  Sense strand starting at position 2833 of SEQ ID NO: 917475
uuucucacugguuauaaag

SEQ ID NO: 1236589 - RNA, 19 nt, Artificial Sequence
  Description of Artificial Sequence: Synthetic oligonucleotide
  Antisense strand to SEQ ID NO: 1236588
cuuuauaaccagugagaaa

SEQ ID NO: 1236590 - RNA, 19 nt, Artificial Sequence
  Description of Artificial Sequence: Synthetic oligonucleotide
  Sense strand starting at position 2843 of SEQ ID NO: 917475
guuauaaagucauuuguuc

SEQ ID NO: 1236591 - RNA, 19 nt, Artificial Sequence
  Description of Artificial Sequence: Synthetic oligonucleotide
  Antisense strand to SEQ ID NO: 1236590
gaacaaaugacuuuauaac

SEQ ID NO: 1236592 - RNA, 19 nt, Artificial Sequence
  Description of Artificial Sequence: Synthetic oligonucleotide
  Sense strand starting at position 2869 of SEQ ID NO: 917475
ucgugugauucaguaagga

SEQ ID NO: 1236593 - RNA, 19 nt, Artificial Sequence
  Description of Artificial Sequence: Synthetic oligonucleotide
  Antisense strand to SEQ ID NO: 1236592
uccuuacugaaucacacga

SEQ ID NO: 1236594 - RNA, 19 nt, Artificial Sequence
  Description of Artificial Sequence: Synthetic oligonucleotide
  Sense strand starting at position 2894 of SEQ ID NO: 917475
acugcaugguccuuacaau

SEQ ID NO: 1236595 - RNA, 19 nt, Artificial Sequence
  Description of Artificial Sequence: Synthetic oligonucleotide
  Antisense strand to SEQ ID NO: 1236594
auuguaaggaccaugcagu

SEQ ID NO: 1236596 - RNA, 19 nt, Artificial Sequence
  Description of Artificial Sequence: Synthetic oligonucleotide
  Sense strand starting at position 2895 of SEQ ID NO: 917475
cugcaugguccuuacaaua

SEQ ID NO: 1236597 - RNA, 19 nt, Artificial Sequence
  Description of Artificial Sequence: Synthetic oligonucleotide
  Antisense strand to SEQ ID NO: 1236596
uauuguaaggaccaugcag

SEQ ID NO: 1236598 - RNA, 19 nt, Artificial Sequence
  Description of Artificial Sequence: Synthetic oligonucleotide
  Sense strand starting at position 2940 of SEQ ID NO: 917475
ucucuuaaagaauggguuu

SEQ ID NO: 1236599 - RNA, 19 nt, Artificial Sequence
  Description of Artificial Sequence: Synthetic oligonucleotide
  Antisense strand to SEQ ID NO: 1236598
aaacccauucuuuaagaga

SEQ ID NO: 1236600 - RNA, 19 nt, Artificial Sequence
  Description of Artificial Sequence: Synthetic oligonucleotide
  Sense strand starting at position 2965 of SEQ ID NO: 917475
ggagaaaugugggacaaca

SEQ ID NO: 1236601 - RNA, 19 nt, Artificial Sequence
  Description of Artificial Sequence: Synthetic oligonucleotide
  Antisense strand to SEQ ID NO: 1236600
uguugucccacauuucucc

SEQ ID NO: 1236602 - RNA, 19 nt, Artificial Sequence
  Description of Artificial Sequence: Synthetic oligonucleotide
  Sense strand starting at position 3303 of SEQ ID NO: 917475
gccuuaagagaucaaagcu

SEQ ID NO: 1236603 - RNA, 19 nt, Artificial Sequence
  Description of Artificial Sequence: Synthetic oligonucleotide
  Antisense strand to SEQ ID NO: 1236602
agcuuugaucucuuaaggc

SEQ ID NO: 1236604 - RNA, 19 nt, Artificial Sequence
  Description of Artificial Sequence: Synthetic oligonucleotide
  Sense strand starting at position 3348 of SEQ ID NO: 917475
auguauucugcuuacugau

SEQ ID NO: 1236605 - RNA, 19 nt, Artificial Sequence
  Description of Artificial Sequence: Synthetic oligonucleotide
  Antisense strand to SEQ ID NO: 1236604
aucaguaagcagaauacau

SEQ ID NO: 1236606 - RNA, 19 nt, Artificial Sequence
  Description of Artificial Sequence: Synthetic oligonucleotide
  Sense strand starting at position 3414 of SEQ ID NO: 917475
augguuuaaccugaguuua

SEQ ID NO: 1236607 - RNA, 19 nt, Artificial Sequence
  Description of Artificial Sequence: Synthetic oligonucleotide
  Antisense strand to SEQ ID NO: 1236606
uaaacucagguuaaaccau

SEQ ID NO: 1236608 - RNA, 19 nt, Artificial Sequence
  Description of Artificial Sequence: Synthetic oligonucleotide
  Sense strand starting at position 3416 of SEQ ID NO: 917475
gguuuaaccugaguuuaac

SEQ ID NO: 1236609 - RNA, 19 nt, Artificial Sequence
  Description of Artificial Sequence: Synthetic oligonucleotide
  Antisense strand to SEQ ID NO: 1236608
guuaaacucagguuaaacc

SEQ ID NO: 1236610 - RNA, 19 nt, Artificial Sequence
  Description of Artificial Sequence: Synthetic oligonucleotide
  Sense strand starting at position 3488 of SEQ ID NO: 917475
agcaaugucuagguuguca

SEQ ID NO: 1236611 - RNA, 19 nt, Artificial Sequence
  Description of Artificial Sequence: Synthetic oligonucleotide
  Antisense strand to SEQ ID NO: 1236610
ugacaaccuagacauugcu

SEQ ID NO: 1236612 - RNA, 19 nt, Artificial Sequence
  Description of Artificial Sequence: Synthetic oligonucleotide
  Sense strand starting at position 3490 of SEQ ID NO: 917475
caaugucuagguugucaca

SEQ ID NO: 1236613 - RNA, 19 nt, Artificial Sequence
  Description of Artificial Sequence: Synthetic oligonucleotide
  Antisense strand to SEQ ID NO: 1236612
ugugacaaccuagacauug

SEQ ID NO: 1236614 - RNA, 19 nt, Artificial Sequence
  Description of Artificial Sequence: Synthetic oligonucleotide
  Sense strand starting at position 3492 of SEQ ID NO: 917475
augucuagguugucacaau

SEQ ID NO: 1236615 - RNA, 19 nt, Artificial Sequence
  Description of Artificial Sequence: Synthetic oligonucleotide
  Antisense strand to SEQ ID NO: 1236614
auugugacaaccuagacau

SEQ ID NO: 1236616 - RNA, 19 nt, Artificial Sequence
  Description of Artificial Sequence: Synthetic oligonucleotide
  Sense strand starting at position 3524 of SEQ ID NO: 917475
aguguuguuaugcaucuca

SEQ ID NO: 1236617 - RNA, 19 nt, Artificial Sequence
  Description of Artificial Sequence: Synthetic oligonucleotide
  Antisense strand to SEQ ID NO: 1236616
ugagaugcauaacaacacu

SEQ ID NO: 1236618 - RNA, 19 nt, Artificial Sequence
  Description of Artificial Sequence: Synthetic oligonucleotide
  Sense strand starting at position 3589 of SEQ ID NO: 917475
aucgcugaacuccaaagaa

SEQ ID NO: 1236619 - RNA, 19 nt, Artificial Sequence
  Description of Artificial Sequence: Synthetic oligonucleotide
  Antisense strand to SEQ ID NO: 1236618
uucuuuggaguucagcgau

SEQ ID NO: 1236620 - RNA, 19 nt, Artificial Sequence
  Description of Artificial Sequence: Synthetic oligonucleotide
  Sense strand starting at position 3630 of SEQ ID NO: 917475
aaugcuaaggucuagaugu

SEQ ID NO: 1236621 - RNA, 19 nt, Artificial Sequence
  Description of Artificial Sequence: Synthetic oligonucleotide
  Antisense strand to SEQ ID NO: 1236620
acaucuagaccuuagcauu

SEQ ID NO: 1236622 - RNA, 19 nt, Artificial Sequence
  Description of Artificial Sequence: Synthetic oligonucleotide
  Sense strand starting at position 3632 of SEQ ID NO: 917475
ugcuaaggucuagauguaa

SEQ ID NO: 1236623 - RNA, 19 nt, Artificial Sequence
  Description of Artificial Sequence: Synthetic oligonucleotide
  Antisense strand to SEQ ID NO: 1236622
uuacaucuagaccuuagca

SEQ ID NO: 1236624 - RNA, 19 nt, Artificial Sequence
  Description of Artificial Sequence: Synthetic oligonucleotide
  Sense strand starting at position 3661 of SEQ ID NO: 917475
aaaggacguauaggugaua

SEQ ID NO: 1236625 - RNA, 19 nt, Artificial Sequence
  Description of Artificial Sequence: Synthetic oligonucleotide
  Antisense strand to SEQ ID NO: 1236624
uaucaccuauacguccuuu

SEQ ID NO: 1236626 - RNA, 19 nt, Artificial Sequence
  Description of Artificial Sequence: Synthetic oligonucleotide
  Sense strand starting at position 3666 of SEQ ID NO: 917475
acguauaggugauauuuga

SEQ ID NO: 1236627 - RNA, 19 nt, Artificial Sequence
  Description of Artificial Sequence: Synthetic oligonucleotide
  Antisense strand to SEQ ID NO: 1236626
ucaaauaucaccuauacgu

SEQ ID NO: 1236628 - RNA, 19 nt, Artificial Sequence
  Description of Artificial Sequence: Synthetic oligonucleotide
  Sense strand starting at position 3739 of SEQ ID NO: 917475
ucuggccuagacuguuaaa

SEQ ID NO: 1236629 - RNA, 19 nt, Artificial Sequence
  Description of Artificial Sequence: Synthetic oligonucleotide
  Antisense strand to SEQ ID NO: 1236628
uuuaacagucuaggccaga

SEQ ID NO: 1236630 - RNA, 19 nt, Artificial Sequence
  Description of Artificial Sequence: Synthetic oligonucleotide
  Sense strand starting at position 3739 of SEQ ID NO: 917476
ucuggccuagacuguuaaa

SEQ ID NO: 1236631 - RNA, 19 nt, Artificial Sequence
  Description of Artificial Sequence: Synthetic oligonucleotide
  Antisense strand to SEQ ID NO: 1236630
uuuaacagucuaggccaga

SEQ ID NO: 1236632 - RNA, 19 nt, Artificial Sequence
  Description of Artificial Sequence: Synthetic oligonucleotide
  Sense strand starting at position 212 of SEQ ID NO: 917476
guuguuugaauccaccagu

SEQ ID NO: 1236633 - RNA, 19 nt, Artificial Sequence
  Description of Artificial Sequence: Synthetic oligonucleotide
  Antisense strand to SEQ ID NO: 1236632
acugguggauucaaacaac

SEQ ID NO: 1236634 - RNA, 19 nt, Artificial Sequence
  Description of Artificial Sequence: Synthetic oligonucleotide
  Sense strand starting at position 310 of SEQ ID NO: 917476
agucaucagucaccaucaa

SEQ ID NO: 1236635 - RNA, 19 nt, Artificial Sequence
  Description of Artificial Sequence: Synthetic oligonucleotide
  Antisense strand to SEQ ID NO: 1236634
uugauggugacugaugacu

SEQ ID NO: 1236636 - RNA, 19 nt, Artificial Sequence
  Description of Artificial Sequence: Synthetic oligonucleotide
  Sense strand starting at position 506 of SEQ ID NO: 917476
gagaccuggugaucaaacu

SEQ ID NO: 1236637 - RNA, 19 nt, Artificial Sequence
  Description of Artificial Sequence: Synthetic oligonucleotide
  Antisense strand to SEQ ID NO: 1236636
aguuugaucaccaggucuc

SEQ ID NO: 1236638 - RNA, 19 nt, Artificial Sequence
  Description of Artificial Sequence: Synthetic oligonucleotide
  Sense strand starting at position 586 of SEQ ID NO: 917476
ucucaaagucuggaagguu

SEQ ID NO: 1236639 - RNA, 19 nt, Artificial Sequence
  Description of Artificial Sequence: Synthetic oligonucleotide
  Antisense strand to SEQ ID NO: 1236638
aaccuuccagacuuugaga

SEQ ID NO: 1236640 - RNA, 19 nt, Artificial Sequence
  Description of Artificial Sequence: Synthetic oligonucleotide
  Sense strand starting at position 666 of SEQ ID NO: 917476
cauggaacugucugguaga

SEQ ID NO: 1236641 - RNA, 19 nt, Artificial Sequence
  Description of Artificial Sequence: Synthetic oligonucleotide
  Antisense strand to SEQ ID NO: 1236640
ucuaccagacaguuccaug

SEQ ID NO: 1236642 - RNA, 19 nt, Artificial Sequence
  Description of Artificial Sequence: Synthetic oligonucleotide
  Sense strand starting at position 989 of SEQ ID NO: 917476
uauagaaacugaguguauu

SEQ ID NO: 1236643 - RNA, 19 nt, Artificial Sequence
  Description of Artificial Sequence: Synthetic oligonucleotide
  Antisense strand to SEQ ID NO: 1236642
aauacacucaguuucuaua

SEQ ID NO: 1236644 - RNA, 19 nt, Artificial Sequence
  Description of Artificial Sequence: Synthetic oligonucleotide
  Sense strand starting at position 990 of SEQ ID NO: 917476
auagaaacugaguguauua

SEQ ID NO: 1236645 - RNA, 19 nt, Artificial Sequence
  Description of Artificial Sequence: Synthetic oligonucleotide
  Antisense strand to SEQ ID NO: 1236644
uaauacacucaguuucuau

SEQ ID NO: 1236646 - RNA, 19 nt, Artificial Sequence
  Description of Artificial Sequence: Synthetic oligonucleotide
  Sense strand starting at position 1106 of SEQ ID NO: 917476
agcacaauucuagggaauu

SEQ ID NO: 1236647 - RNA, 19 nt, Artificial Sequence
  Description of Artificial Sequence: Synthetic oligonucleotide
  Antisense strand to SEQ ID NO: 1236646
aauucccuagaauugugcu

SEQ ID NO: 1236648 - RNA, 19 nt, Artificial Sequence
  Description of Artificial Sequence: Synthetic oligonucleotide
  Sense strand starting at position 1229 of SEQ ID NO: 917476
cugacuacacgguaaucau

SEQ ID NO: 1236649 - RNA, 19 nt, Artificial Sequence
  Description of Artificial Sequence: Synthetic oligonucleotide
  Antisense strand to SEQ ID NO: 1236648
augauuaccguguagucag

SEQ ID NO: 1236650 - RNA, 19 nt, Artificial Sequence
  Description of Artificial Sequence: Synthetic oligonucleotide
  Sense strand starting at position 1315 of SEQ ID NO: 917476
ugcaucugugggcagaauu

SEQ ID NO: 1236651 - RNA, 19 nt, Artificial Sequence
  Description of Artificial Sequence: Synthetic oligonucleotide
  Antisense strand to SEQ ID NO: 1236650
aauucugcccacagaugca

SEQ ID NO: 1236652 - RNA, 19 nt, Artificial Sequence
  Description of Artificial Sequence: Synthetic oligonucleotide
  Sense strand starting at position 1343 of SEQ ID NO: 917476
agcacuaccucugugaaau

SEQ ID NO: 1236653 - RNA, 19 nt, Artificial Sequence
  Description of Artificial Sequence: Synthetic oligonucleotide
  Antisense strand to SEQ ID NO: 1236652
auuucacagagguagugcu

SEQ ID NO: 1236654 - RNA, 19 nt, Artificial Sequence
  Description of Artificial Sequence: Synthetic oligonucleotide
  Sense strand starting at position 1344 of SEQ ID NO: 917476
gcacuaccucugugaaaua

SEQ ID NO: 1236655 - RNA, 19 nt, Artificial Sequence
  Description of Artificial Sequence: Synthetic oligonucleotide
  Antisense strand to SEQ ID NO: 1236654
uauuucacagagguagugc

SEQ ID NO: 1236656 - RNA, 19 nt, Artificial Sequence
  Description of Artificial Sequence: Synthetic oligonucleotide
  Sense strand starting at position 1514 of SEQ ID NO: 917476
ugcuguuuccaagauccua

SEQ ID NO: 1236657 - RNA, 19 nt, Artificial Sequence
  Description of Artificial Sequence: Synthetic oligonucleotide
  Antisense strand to SEQ ID NO: 1236656
uaggaucuuggaaacagca

SEQ ID NO: 1236658 - RNA, 19 nt, Artificial Sequence
  Description of Artificial Sequence: Synthetic oligonucleotide
  Sense strand starting at position 1721 of SEQ ID NO: 917476
agguuaugcgaaggacuga

SEQ ID NO: 1236659 - RNA, 19 nt, Artificial Sequence
  Description of Artificial Sequence: Synthetic oligonucleotide
  Antisense strand to SEQ ID NO: 1236658
ucaguccuucgcauaaccu

SEQ ID NO: 1236660 - RNA, 19 nt, Artificial Sequence
  Description of Artificial Sequence: Synthetic oligonucleotide
  Sense strand starting at position 2170 of SEQ ID NO: 917476
aaagaaauguggcuuugau

SEQ ID NO: 1236661 - RNA, 19 nt, Artificial Sequence
  Description of Artificial Sequence: Synthetic oligonucleotide
  Antisense strand to SEQ ID NO: 1236660
aucaaagccacauuucuuu

SEQ ID NO: 1236662 - RNA, 19 nt, Artificial Sequence
  Description of Artificial Sequence: Synthetic oligonucleotide
  Sense strand starting at position 2185 of SEQ ID NO: 917476
ugaucuuauggaugccuua

SEQ ID NO: 1236663 - RNA, 19 nt, Artificial Sequence
  Description of Artificial Sequence: Synthetic oligonucleotide
  Antisense strand to SEQ ID NO: 1236662
uaaggcauccauaagauca

SEQ ID NO: 1236664 - RNA, 19 nt, Artificial Sequence
  Description of Artificial Sequence: Synthetic oligonucleotide
  Sense strand starting at position 2253 of SEQ ID NO: 917476
cuuguauguuuccuaagaa

SEQ ID NO: 1236665 - RNA, 19 nt, Artificial Sequence
  Description of Artificial Sequence: Synthetic oligonucleotide
  Antisense strand to SEQ ID NO: 1236664
uucuuaggaaacauacaag

SEQ ID NO: 1236666 - RNA, 19 nt, Artificial Sequence
  Description of Artificial Sequence: Synthetic oligonucleotide
  Sense strand starting at position 2467 of SEQ ID NO: 917476
gggucauccuggcuuagga

SEQ ID NO: 1236667 - RNA, 19 nt, Artificial Sequence
  Description of Artificial Sequence: Synthetic oligonucleotide
  Antisense strand to SEQ ID NO: 1236666
uccuaagccaggaugaccc

SEQ ID NO: 1236668 - RNA, 19 nt, Artificial Sequence
  Description of Artificial Sequence: Synthetic oligonucleotide
  Sense strand starting at position 2819 of SEQ ID NO: 917476
cugaaaucagccggaauca

SEQ ID NO: 1236669 - RNA, 19 nt, Artificial Sequence
  Description of Artificial Sequence: Synthetic oligonucleotide
  Antisense strand to SEQ ID NO: 1236668
ugauuccggcugauuucag

SEQ ID NO: 1236670 - RNA, 19 nt, Artificial Sequence
  Description of Artificial Sequence: Synthetic oligonucleotide
  Sense strand starting at position 2964 of SEQ ID NO: 917476
ccaugcaugccugaagacu

SEQ ID NO: 1236671 - RNA, 19 nt, Artificial Sequence
  Description of Artificial Sequence: Synthetic oligonucleotide
  Antisense strand to SEQ ID NO: 1236670
agucuucaggcaugcaugg

SEQ ID NO: 1236672 - RNA, 19 nt, Artificial Sequence
  Description of Artificial Sequence: Synthetic oligonucleotide
  Sense strand starting at position 2973 of SEQ ID NO: 917476
ccugaagacuucccagaug

SEQ ID NO: 1236673 - RNA, 19 nt, Artificial Sequence
  Description of Artificial Sequence: Synthetic oligonucleotide
  Antisense strand to SEQ ID NO: 1236672
caucugggaagucuucagg

SEQ ID NO: 1236674 - RNA, 19 nt, Artificial Sequence
  Description of Artificial Sequence: Synthetic oligonucleotide
  Sense strand starting at position 3114 of SEQ ID NO: 917476
guuaacuugcaaugugaag

SEQ ID NO: 1236675 - RNA, 19 nt, Artificial Sequence
  Description of Artificial Sequence: Synthetic oligonucleotide
  Antisense strand to SEQ ID NO: 1236674
cuucacauugcaaguuaac

SEQ ID NO: 1236676 - RNA, 19 nt, Artificial Sequence
  Description of Artificial Sequence: Synthetic oligonucleotide
  Sense strand starting at position 3154 of SEQ ID NO: 917476
ggugucauaguguuggcuu

SEQ ID NO: 1236677 - RNA, 19 nt, Artificial Sequence
  Description of Artificial Sequence: Synthetic oligonucleotide
  Antisense strand to SEQ ID NO: 1236676
aagccaacacuaugacacc

SEQ ID NO: 1236678 - RNA, 19 nt, Artificial Sequence
  Description of Artificial Sequence: Synthetic oligonucleotide
  Sense strand starting at position 3196 of SEQ ID NO: 917476
uggauaaccuuaccuggua

SEQ ID NO: 1236679 - RNA, 19 nt, Artificial Sequence
  Description of Artificial Sequence: Synthetic oligonucleotide
  Antisense strand to SEQ ID NO: 1236678
uaccagguaagguuaucca

SEQ ID NO: 1236680 - RNA, 19 nt, Artificial Sequence
  Description of Artificial Sequence: Synthetic oligonucleotide
  Sense strand starting at position 3197 of SEQ ID NO: 917476
ggauaaccuuaccugguaa

SEQ ID NO: 1236681 - RNA, 19 nt, Artificial Sequence
  Description of Artificial Sequence: Synthetic oligonucleotide
  Antisense strand to SEQ ID NO: 1236680
uuaccagguaagguuaucc

SEQ ID NO: 1236682 - RNA, 19 nt, Artificial Sequence
  Description of Artificial Sequence: Synthetic oligonucleotide
  Sense strand starting at position 3209 of SEQ ID NO: 917476
cugguaauuugacauacua

SEQ ID NO: 1236683 - RNA, 19 nt, Artificial Sequence
  Description of Artificial Sequence: Synthetic oligonucleotide
  Antisense strand to SEQ ID NO: 1236682
uaguaugucaaauuaccag

SEQ ID NO: 1236684 - RNA, 19 nt, Artificial Sequence
  Description of Artificial Sequence: Synthetic oligonucleotide
  Sense strand starting at position 3221 of SEQ ID NO: 917476
cauacuaggugguuaguaa

SEQ ID NO: 1236685 - RNA, 19 nt, Artificial Sequence
  Description of Artificial Sequence: Synthetic oligonucleotide
  Antisense strand to SEQ ID NO: 1236684
uuacuaaccaccuaguaug

SEQ ID NO: 1236686 - RNA, 19 nt, Artificial Sequence
  Description of Artificial Sequence: Synthetic oligonucleotide
  Sense strand starting at position 3228 of SEQ ID NO: 917476
ggugguuaguaacuacuga

SEQ ID NO: 1236687 - RNA, 19 nt, Artificial Sequence
  Description of Artificial Sequence: Synthetic oligonucleotide
  Antisense strand to SEQ ID NO: 1236686
ucaguaguuacuaaccacc

SEQ ID NO: 1236688 - RNA, 19 nt, Artificial Sequence
  Description of Artificial Sequence: Synthetic oligonucleotide
  Sense strand starting at position 3321 of SEQ ID NO: 917476
cuggcaaccuguuuacaaa

SEQ ID NO: 1236689 - RNA, 19 nt, Artificial Sequence
  Description of Artificial Sequence: Synthetic oligonucleotide
  Antisense strand to SEQ ID NO: 1236688
uuuguaaacagguugccag

SEQ ID NO: 1236690 - RNA, 19 nt, Artificial Sequence
  Description of Artificial Sequence: Synthetic oligonucleotide
  Sense strand starting at position 3397 of SEQ ID NO: 917476
aacagugcagugugacaaa

SEQ ID NO: 1236691 - RNA, 19 nt, Artificial Sequence
  Description of Artificial Sequence: Synthetic oligonucleotide
  Antisense strand to SEQ ID NO: 1236690
uuugucacacugcacuguu

SEQ ID NO: 1236692 - RNA, 19 nt, Artificial Sequence
  Description of Artificial Sequence: Synthetic oligonucleotide
  Sense strand starting at position 3462 of SEQ ID NO: 917476
ccaaauauaugugcaagga

SEQ ID NO: 1236693 - RNA, 19 nt, Artificial Sequence
  Description of Artificial Sequence: Synthetic oligonucleotide
  Antisense strand to SEQ ID NO: 1236692
uccuugcacauauauuugg

SEQ ID NO: 1236694 - RNA, 19 nt, Artificial Sequence
  Description of Artificial Sequence: Synthetic oligonucleotide
  Sense strand starting at position 3466 of SEQ ID NO: 917476
auauaugugcaaggaaugu

SEQ ID NO: 1236695 - RNA, 19 nt, Artificial Sequence
  Description of Artificial Sequence: Synthetic oligonucleotide
  Antisense strand to SEQ ID NO: 1236694
acauuccuugcacauauau

SEQ ID NO: 1236696 - RNA, 19 nt, Artificial Sequence
  Description of Artificial Sequence: Synthetic oligonucleotide
  Sense strand starting at position 3631 of SEQ ID NO: 917476
gagucuaaauuaggauuua

SEQ ID NO: 1236697 - RNA, 19 nt, Artificial Sequence
  Description of Artificial Sequence: Synthetic oligonucleotide
  Antisense strand to SEQ ID NO: 1236696
uaaauccuaauuuagacuc

SEQ ID NO: 1236698 - RNA, 19 nt, Artificial Sequence
  Description of Artificial Sequence: Synthetic oligonucleotide
  Sense strand starting at position 3643 of SEQ ID NO: 917476
ggauuuaguaguggcaucu

SEQ ID NO: 1236699 - RNA, 19 nt, Artificial Sequence
  Description of Artificial Sequence: Synthetic oligonucleotide
  Antisense strand to SEQ ID NO: 1236698
agaugccacuacuaaaucc

SEQ ID NO: 1236700 - RNA, 19 nt, Artificial Sequence
  Description of Artificial Sequence: Synthetic oligonucleotide
  Sense strand starting at position 3686 of SEQ ID NO: 917476
acagauuacugucuggaaa

SEQ ID NO: 1236701 - RNA, 19 nt, Artificial Sequence
  Description of Artificial Sequence: Synthetic oligonucleotide
  Antisense strand to SEQ ID NO: 1236700
uuuccagacaguaaucugu

SEQ ID NO: 1236702 - RNA, 19 nt, Artificial Sequence
  Description of Artificial Sequence: Synthetic oligonucleotide
  Sense strand starting at position 3687 of SEQ ID NO: 917476
cagauuacugucuggaaau

SEQ ID NO: 1236703 - RNA, 19 nt, Artificial Sequence
  Description of Artificial Sequence: Synthetic oligonucleotide
  Antisense strand to SEQ ID NO: 1236702
auuuccagacaguaaucug

SEQ ID NO: 1236704 - RNA, 19 nt, Artificial Sequence
  Description of Artificial Sequence: Synthetic oligonucleotide
  Sense strand starting at position 3706 of SEQ ID NO: 917476
gguagagcuaauuagcaua

SEQ ID NO: 1236705 - RNA, 19 nt, Artificial Sequence
  Description of Artificial Sequence: Synthetic oligonucleotide
  Antisense strand to SEQ ID NO: 1236704
uaugcuaauuagcucuacc

SEQ ID NO: 1236706 - RNA, 19 nt, Artificial Sequence
  Description of Artificial Sequence: Synthetic oligonucleotide
  Sense strand starting at position 3711 of SEQ ID NO: 917476
agcuaauuagcauagcaua

SEQ ID NO: 1236707 - RNA, 19 nt, Artificial Sequence
  Description of Artificial Sequence: Synthetic oligonucleotide
  Antisense strand to SEQ ID NO: 1236706
uaugcuaugcuaauuagcu

SEQ ID NO: 1236708 - RNA, 19 nt, Artificial Sequence
  Description of Artificial Sequence: Synthetic oligonucleotide
  Sense strand starting at position 3960 of SEQ ID NO: 917476
cucacugugcuguaaacau

SEQ ID NO: 1236709 - RNA, 19 nt, Artificial Sequence
  Description of Artificial Sequence: Synthetic oligonucleotide
  Antisense strand to SEQ ID NO: 1236708
auguuuacagcacagugag

SEQ ID NO: 1236710 - RNA, 19 nt, Artificial Sequence
  Description of Artificial Sequence: Synthetic oligonucleotide
  Sense strand starting at position 3967 of SEQ ID NO: 917477
ugcuguaaacaugaugagu

SEQ ID NO: 1236711 - RNA, 19 nt, Artificial Sequence
  Description of Artificial Sequence: Synthetic oligonucleotide
  Antisense strand to SEQ ID NO: 1236710
acucaucauguuuacagca

SEQ ID NO: 1236712 - RNA, 19 nt, Artificial Sequence
  Description of Artificial Sequence: Synthetic oligonucleotide
  Sense strand starting at position 37 of SEQ ID NO: 917477
gugagaugacuccagccca

SEQ ID NO: 1236713 - RNA, 19 nt, Artificial Sequence
  Description of Artificial Sequence: Synthetic oligonucleotide
  Antisense strand to SEQ ID NO: 1236712
ugggcuggagucaucucac

SEQ ID NO: 1236714 - RNA, 19 nt, Artificial Sequence
  Description of Artificial Sequence: Synthetic oligonucleotide
  Sense strand starting at position 312 of SEQ ID NO: 917477
gccaucuugccagaauaug

SEQ ID NO: 1236715 - RNA, 19 nt, Artificial Sequence
  Description of Artificial Sequence: Synthetic oligonucleotide
  Antisense strand to SEQ ID NO: 1236714
cauauucuggcaagauggc

SEQ ID NO: 1236716 - RNA, 19 nt, Artificial Sequence
  Description of Artificial Sequence: Synthetic oligonucleotide
  Sense strand starting at position 649 of SEQ ID NO: 917477
agaggugcucccuagccua

SEQ ID NO: 1236717 - RNA, 19 nt, Artificial Sequence
  Description of Artificial Sequence: Synthetic oligonucleotide
  Antisense strand to SEQ ID NO: 1236716
uaggcuagggagcaccucu

SEQ ID NO: 1236718 - RNA, 19 nt, Artificial Sequence
  Description of Artificial Sequence: Synthetic oligonucleotide
  Sense strand starting at position 1115 of SEQ ID NO: 917477
gcagguaaaccugagccau

SEQ ID NO: 1236719 - RNA, 19 nt, Artificial Sequence
  Description of Artificial Sequence: Synthetic oligonucleotide
  Antisense strand to SEQ ID NO: 1236718
auggcucagguuuaccugc

SEQ ID NO: 1236720 - RNA, 19 nt, Artificial Sequence
  Description of Artificial Sequence: Synthetic oligonucleotide
  Sense strand starting at position 1195 of SEQ ID NO: 917477
accauaagucacugucauc

SEQ ID NO: 1236721 - RNA, 19 nt, Artificial Sequence
  Description of Artificial Sequence: Synthetic oligonucleotide
  Antisense strand to SEQ ID NO: 1236720
gaugacagugacuuauggu

SEQ ID NO: 1236722 - RNA, 19 nt, Artificial Sequence
  Description of Artificial Sequence: Synthetic oligonucleotide
  Sense strand starting at position 1453 of SEQ ID NO: 917477
cuguuaaagcccuggaaau

SEQ ID NO: 1236723 - RNA, 19 nt, Artificial Sequence
  Description of Artificial Sequence: Synthetic oligonucleotide
  Antisense strand to SEQ ID NO: 1236722
auuuccagggcuuuaacag

SEQ ID NO: 1236724 - RNA, 19 nt, Artificial Sequence
  Description of Artificial Sequence: Synthetic oligonucleotide
  Sense strand starting at position 1454 of SEQ ID NO: 917477
uguuaaagcccuggaaaua

SEQ ID NO: 1236725 - RNA, 19 nt, Artificial Sequence
  Description of Artificial Sequence: Synthetic oligonucleotide
  Antisense strand to SEQ ID NO: 1236724
uauuuccagggcuuuaaca

SEQ ID NO: 1236726 - RNA, 19 nt, Artificial Sequence
  Description of Artificial Sequence: Synthetic oligonucleotide
  Sense strand starting at position 1712 of SEQ ID NO: 917477
ccuccauaccugugaauug

SEQ ID NO: 1236727 - RNA, 19 nt, Artificial Sequence
  Description of Artificial Sequence: Synthetic oligonucleotide
  Antisense strand to SEQ ID NO: 1236726
caauucacagguauggagg

SEQ ID NO: 1236728 - RNA, 19 nt, Artificial Sequence
  Description of Artificial Sequence: Synthetic oligonucleotide
  Sense strand starting at position 2126 of SEQ ID NO: 917477
gugcguguccaccuugaca

SEQ ID NO: 1236729 - RNA, 19 nt, Artificial Sequence
  Description of Artificial Sequence: Synthetic oligonucleotide
  Antisense strand to SEQ ID NO: 1236728
ugucaagguggacacgcac

SEQ ID NO: 1236730 - RNA, 19 nt, Artificial Sequence
  Description of Artificial Sequence: Synthetic oligonucleotide
  Sense strand starting at position 2239 of SEQ ID NO: 917477
ccaccuucccugcaggaua

SEQ ID NO: 1236731 - RNA, 19 nt, Artificial Sequence
  Description of Artificial Sequence: Synthetic oligonucleotide
  Antisense strand to SEQ ID NO: 1236730
uauccugcagggaaggugg

SEQ ID NO: 1236732 - RNA, 19 nt, Artificial Sequence
  Description of Artificial Sequence: Synthetic oligonucleotide
  Sense strand starting at position 2669 of SEQ ID NO: 917477
ugaggaugguggccuuuau

SEQ ID NO: 1236733 - RNA, 19 nt, Artificial Sequence
  Description of Artificial Sequence: Synthetic oligonucleotide
  Antisense strand to SEQ ID NO: 1236732
auaaaggccaccauccuca

SEQ ID NO: 1236734 - RNA, 19 nt, Artificial Sequence
  Description of Artificial Sequence: Synthetic oligonucleotide
  Sense strand starting at position 2681 of SEQ ID NO: 917477
ccuuuauucugagcaaagu

SEQ ID NO: 1236735 - RNA, 19 nt, Artificial Sequence
  Description of Artificial Sequence: Synthetic oligonucleotide
  Antisense strand to SEQ ID NO: 1236734
acuuugcucagaauaaagg

SEQ ID NO: 1236736 - RNA, 19 nt, Artificial Sequence
  Description of Artificial Sequence: Synthetic oligonucleotide
  Sense strand starting at position 2682 of SEQ ID NO: 917477
cuuuauucugagcaaagua

SEQ ID NO: 1236737 - RNA, 19 nt, Artificial Sequence
  Description of Artificial Sequence: Synthetic oligonucleotide
  Antisense strand to SEQ ID NO: 1236736
uacuuugcucagaauaaag

SEQ ID NO: 1236738 - RNA, 19 nt, Artificial Sequence
  Description of Artificial Sequence: Synthetic oligonucleotide
  Sense strand starting at position 2701 of SEQ ID NO: 917477
gggaguuacuagcagauuu

SEQ ID NO: 1236739 - RNA, 19 nt, Artificial Sequence
  Description of Artificial Sequence: Synthetic oligonucleotide
  Antisense strand to SEQ ID NO: 1236738
aaaucugcuaguaacuccc

SEQ ID NO: 1236740 - RNA, 19 nt, Artificial Sequence
  Description of Artificial Sequence: Synthetic oligonucleotide
  Sense strand starting at position 2721 of SEQ ID NO: 917477
gugcgagaaauggaaucau

SEQ ID NO: 1236741 - RNA, 19 nt, Artificial Sequence
  Description of Artificial Sequence: Synthetic oligonucleotide
  Antisense strand to SEQ ID NO: 1236740
augauuccauuucucgcac

SEQ ID NO: 1236742 - RNA, 19 nt, Artificial Sequence
  Description of Artificial Sequence: Synthetic oligonucleotide
  Sense strand starting at position 2779 of SEQ ID NO: 917477
ggagguuugugagcaggaa

SEQ ID NO: 1236743 - RNA, 19 nt, Artificial Sequence
  Description of Artificial Sequence: Synthetic oligonucleotide
  Antisense strand to SEQ ID NO: 1236742
uuccugcucacaaaccucc

SEQ ID NO: 1236744 - RNA, 19 nt, Artificial Sequence
  Description of Artificial Sequence: Synthetic oligonucleotide
  Sense strand starting at position 2800 of SEQ ID NO: 917477
acgggauacucaugaggaa

SEQ ID NO: 1236745 - RNA, 19 nt, Artificial Sequence
  Description of Artificial Sequence: Synthetic oligonucleotide
  Antisense strand to SEQ ID NO: 1236744
uuccucaugaguaucccgu

SEQ ID NO: 1236746 - RNA, 19 nt, Artificial Sequence
  Description of Artificial Sequence: Synthetic oligonucleotide
  Sense strand starting at position 2803 of SEQ ID NO: 917477
ggauacucaugaggaagaa

SEQ ID NO: 1236747 - RNA, 19 nt, Artificial Sequence
  Description of Artificial Sequence: Synthetic oligonucleotide
  Antisense strand to SEQ ID NO: 1236746
uucuuccucaugaguaucc

SEQ ID NO: 1236748 - RNA, 19 nt, Artificial Sequence
  Description of Artificial Sequence: Synthetic oligonucleotide
  Sense strand starting at position 2855 of SEQ ID NO: 917477
caugguuugaguugaagga

SEQ ID NO: 1236749 - RNA, 19 nt, Artificial Sequence
  Description of Artificial Sequence: Synthetic oligonucleotide
  Antisense strand to SEQ ID NO: 1236748
uccuucaacucaaaccaug

SEQ ID NO: 1236750 - RNA, 19 nt, Artificial Sequence
  Description of Artificial Sequence: Synthetic oligonucleotide
  Sense strand starting at position 2857 of SEQ ID NO: 917477
ugguuugaguugaaggagu

SEQ ID NO: 1236751 - RNA, 19 nt, Artificial Sequence
  Description of Artificial Sequence: Synthetic oligonucleotide
  Antisense strand to SEQ ID NO: 1236750
acuccuucaacucaaacca

SEQ ID NO: 1236752 - RNA, 19 nt, Artificial Sequence
  Description of Artificial Sequence: Synthetic oligonucleotide
  Sense strand starting at position 2870 of SEQ ID NO: 917477
aggagugggccuugcauaa

SEQ ID NO: 1236753 - RNA, 19 nt, Artificial Sequence
  Description of Artificial Sequence: Synthetic oligonucleotide
  Antisense strand to SEQ ID NO: 1236752
uuaugcaaggcccacuccu

SEQ ID NO: 1236754 - RNA, 19 nt, Artificial Sequence
  Description of Artificial Sequence: Synthetic oligonucleotide
  Sense strand starting at position 2907 of SEQ ID NO: 917477
ccagaaucuugguagggca

SEQ ID NO: 1236755 - RNA, 19 nt, Artificial Sequence
  Description of Artificial Sequence: Synthetic oligonucleotide
  Antisense strand to SEQ ID NO: 1236754
ugcccuaccaagauucugg

SEQ ID NO: 1236756 - RNA, 19 nt, Artificial Sequence
  Description of Artificial Sequence: Synthetic oligonucleotide
  Sense strand starting at position 3009 of SEQ ID NO: 917477
gggagacacugugucaauc

SEQ ID NO: 1236757 - RNA, 19 nt, Artificial Sequence
  Description of Artificial Sequence: Synthetic oligonucleotide
  Antisense strand to SEQ ID NO: 1236756
gauugacacagugucuccc

SEQ ID NO: 1236758 - RNA, 19 nt, Artificial Sequence
  Description of Artificial Sequence: Synthetic oligonucleotide
  Sense strand starting at position 3011 of SEQ ID NO: 917477
gagacacugugucaaucaa

SEQ ID NO: 1236759 - RNA, 19 nt, Artificial Sequence
  Description of Artificial Sequence: Synthetic oligonucleotide
  Antisense strand to SEQ ID NO: 1236758
uugauugacacagugucuc

SEQ ID NO: 1236760 - RNA, 19 nt, Artificial Sequence
  Description of Artificial Sequence: Synthetic oligonucleotide
  Sense strand starting at position 3201 of SEQ ID NO: 917477
uuggguugaugugucugaa

SEQ ID NO: 1236761 - RNA, 19 nt, Artificial Sequence
  Description of Artificial Sequence: Synthetic oligonucleotide
  Antisense strand to SEQ ID NO: 1236760
uucagacacaucaacccaa

SEQ ID NO: 1236762 - RNA, 19 nt, Artificial Sequence
  Description of Artificial Sequence: Synthetic oligonucleotide
  Sense strand starting at position 3204 of SEQ ID NO: 917477
gguugaugugucugaauuu

SEQ ID NO: 1236763 - RNA, 19 nt, Artificial Sequence
  Description of Artificial Sequence: Synthetic oligonucleotide
  Antisense strand to SEQ ID NO: 1236762
aaauucagacacaucaacc

SEQ ID NO: 1236764 - RNA, 19 nt, Artificial Sequence
  Description of Artificial Sequence: Synthetic oligonucleotide
  Sense strand starting at position 3247 of SEQ ID NO: 917477
cuauguagcacgugucaga

SEQ ID NO: 1236765 - RNA, 19 nt, Artificial Sequence
  Description of Artificial Sequence: Synthetic oligonucleotide
  Antisense strand to SEQ ID NO: 1236764
ucugacacgugcuacauag

SEQ ID NO: 1236766 - RNA, 19 nt, Artificial Sequence
  Description of Artificial Sequence: Synthetic oligonucleotide
  Sense strand starting at position 3271 of SEQ ID NO: 917477
auuccuucucacgacugaa

SEQ ID NO: 1236767 - RNA, 19 nt, Artificial Sequence
  Description of Artificial Sequence: Synthetic oligonucleotide
  Antisense strand to SEQ ID NO: 1236766
uucagucgugagaaggaau

SEQ ID NO: 1236768 - RNA, 19 nt, Artificial Sequence
  Description of Artificial Sequence: Synthetic oligonucleotide
  Sense strand starting at position 3274 of SEQ ID NO: 917477
ccuucucacgacugaauaa

SEQ ID NO: 1236769 - RNA, 19 nt, Artificial Sequence
  Description of Artificial Sequence: Synthetic oligonucleotide
  Antisense strand to SEQ ID NO: 1236768
uuauucagucgugagaagg

SEQ ID NO: 1236770 - RNA, 19 nt, Artificial Sequence
  Description of Artificial Sequence: Synthetic oligonucleotide
  Sense strand starting at position 3313 of SEQ ID NO: 917477
ccacauuucgcuuagucau

SEQ ID NO: 1236771 - RNA, 19 nt, Artificial Sequence
  Description of Artificial Sequence: Synthetic oligonucleotide
  Antisense strand to SEQ ID NO: 1236770
augacuaagcgaaaugugg

SEQ ID NO: 1236772 - RNA, 19 nt, Artificial Sequence
  Description of Artificial Sequence: Synthetic oligonucleotide
  Sense strand starting at position 3325 of SEQ ID NO: 917477
uagucauucgucuguggau

SEQ ID NO: 1236773 - RNA, 19 nt, Artificial Sequence
  Description of Artificial Sequence: Synthetic oligonucleotide
  Antisense strand to SEQ ID NO: 1236772
auccacagacgaaugacua

SEQ ID NO: 1236774 - RNA, 19 nt, Artificial Sequence
  Description of Artificial Sequence: Synthetic oligonucleotide
  Sense strand starting at position 3326 of SEQ ID NO: 917477
agucauucgucuguggaug

SEQ ID NO: 1236775 - RNA, 19 nt, Artificial Sequence
  Description of Artificial Sequence: Synthetic oligonucleotide
  Antisense strand to SEQ ID NO: 1236774
cauccacagacgaaugacu

SEQ ID NO: 1236776 - RNA, 19 nt, Artificial Sequence
  Description of Artificial Sequence: Synthetic oligonucleotide
  Sense strand starting at position 3391 of SEQ ID NO: 917477
gggaacacucaauguaagu

SEQ ID NO: 1236777 - RNA, 19 nt, Artificial Sequence
  Description of Artificial Sequence: Synthetic oligonucleotide
  Antisense strand to SEQ ID NO: 1236776
acuuacauugaguguuccc

SEQ ID NO: 1236778 - RNA, 19 nt, Artificial Sequence
  Description of Artificial Sequence: Synthetic oligonucleotide
  Sense strand starting at position 3402 of SEQ ID NO: 917477
auguaaguuucugugugga

SEQ ID NO: 1236779 - RNA, 19 nt, Artificial Sequence
  Description of Artificial Sequence: Synthetic oligonucleotide
  Antisense strand to SEQ ID NO: 1236778
uccacacagaaacuuacau

SEQ ID NO: 1236780 - RNA, 19 nt, Artificial Sequence
  Description of Artificial Sequence: Synthetic oligonucleotide
  Sense strand starting at position 3408 of SEQ ID NO: 917477
guuucuguguggacguaga

SEQ ID NO: 1236781 - RNA, 19 nt, Artificial Sequence
  Description of Artificial Sequence: Synthetic oligonucleotide
  Antisense strand to SEQ ID NO: 1236780
ucuacguccacacagaaac

SEQ ID NO: 1236782 - RNA, 19 nt, Artificial Sequence
  Description of Artificial Sequence: Synthetic oligonucleotide
  Sense strand starting at position 3430 of SEQ ID NO: 917477
ucacuuauccuugguauau

SEQ ID NO: 1236783 - RNA, 19 nt, Artificial Sequence
  Description of Artificial Sequence: Synthetic oligonucleotide
  Antisense strand to SEQ ID NO: 1236782
auauaccaaggauaaguga

SEQ ID NO: 1236784 - RNA, 19 nt, Artificial Sequence
  Description of Artificial Sequence: Synthetic oligonucleotide
  Sense strand starting at position 3481 of SEQ ID NO: 917477
ggaagaacccaauguuugu

SEQ ID NO: 1236785 - RNA, 19 nt, Artificial Sequence
  Description of Artificial Sequence: Synthetic oligonucleotide
  Antisense strand to SEQ ID NO: 1236784
acaaacauuggguucuucc

SEQ ID NO: 1236786 - RNA, 19 nt, Artificial Sequence
  Description of Artificial Sequence: Synthetic oligonucleotide
  Sense strand starting at position 3532 of SEQ ID NO: 917477
cccucaagaugaugggauu

SEQ ID NO: 1236787 - RNA, 19 nt, Artificial Sequence
  Description of Artificial Sequence: Synthetic oligonucleotide
  Antisense strand to SEQ ID NO: 1236786
aaucccaucaucuugaggg

SEQ ID NO: 1236788 - RNA, 19 nt, Artificial Sequence
  Description of Artificial Sequence: Synthetic oligonucleotide
  Sense strand starting at position 3671 of SEQ ID NO: 917477
gugagaaggcgccggauau

SEQ ID NO: 1236789 - RNA, 19 nt, Artificial Sequence
  Description of Artificial Sequence: Synthetic oligonucleotide
  Antisense strand to SEQ ID NO: 1236788
auauccggcgccuucucac

SEQ ID NO: 1236790 - RNA, 19 nt, Artificial Sequence
  Description of Artificial Sequence: Synthetic oligonucleotide
  Sense strand starting at position 3821 of SEQ ID NO: 917478
ccagaugggcuaugacaua

SEQ ID NO: 1236791 - RNA, 19 nt, Artificial Sequence
  Description of Artificial Sequence: Synthetic oligonucleotide
  Antisense strand to SEQ ID NO: 1236790
uaugucauagcccaucugg

SEQ ID NO: 1236792 - RNA, 19 nt, Artificial Sequence
  Description of Artificial Sequence: Synthetic oligonucleotide
  Sense strand starting at position 95 of SEQ ID NO: 917478
gccaguuuccgugcaguuu

SEQ ID NO: 1236793 - RNA, 19 nt, Artificial Sequence
  Description of Artificial Sequence: Synthetic oligonucleotide
  Antisense strand to SEQ ID NO: 1236792
aaacugcacggaaacuggc

SEQ ID NO: 1236794 - RNA, 19 nt, Artificial Sequence
  Description of Artificial Sequence: Synthetic oligonucleotide
  Sense strand starting at position 101 of SEQ ID NO: 917478
uuccgugcaguuugaagau

SEQ ID NO: 1236795 - RNA, 19 nt, Artificial Sequence
  Description of Artificial Sequence: Synthetic oligonucleotide
  Antisense strand to SEQ ID NO: 1236794
aucuucaaacugcacggaa

SEQ ID NO: 1236796 - RNA, 19 nt, Artificial Sequence
  Description of Artificial Sequence: Synthetic oligonucleotide
  Sense strand starting at position 111 of SEQ ID NO: 917478
uuugaagauucugugguua

SEQ ID NO: 1236797 - RNA, 19 nt, Artificial Sequence
  Description of Artificial Sequence: Synthetic oligonucleotide
  Antisense strand to SEQ ID NO: 1236796
uaaccacagaaucuucaaa

SEQ ID NO: 1236798 - RNA, 19 nt, Artificial Sequence
  Description of Artificial Sequence: Synthetic oligonucleotide
  Sense strand starting at position 115 of SEQ ID NO: 917478
aagauucugugguuaauac

SEQ ID NO: 1236799 - RNA, 19 nt, Artificial Sequence
  Description of Artificial Sequence: Synthetic oligonucleotide
  Antisense strand to SEQ ID NO: 1236798
guauuaaccacagaaucuu

SEQ ID NO: 1236800 - RNA, 19 nt, Artificial Sequence
  Description of Artificial Sequence: Synthetic oligonucleotide
  Sense strand starting at position 116 of SEQ ID NO: 917478
agauucugugguuaauaca

SEQ ID NO: 1236801 - RNA, 19 nt, Artificial Sequence
  Description of Artificial Sequence: Synthetic oligonucleotide
  Antisense strand to SEQ ID NO: 1236800
uguauuaaccacagaaucu

SEQ ID NO: 1236802 - RNA, 19 nt, Artificial Sequence
  Description of Artificial Sequence: Synthetic oligonucleotide
  Sense strand starting at position 168 of SEQ ID NO: 917478
cuauuugauugccagcguu

SEQ ID NO: 1236803 - RNA, 19 nt, Artificial Sequence
  Description of Artificial Sequence: Synthetic oligonucleotide
  Antisense strand to SEQ ID NO: 1236802
aacgcuggcaaucaaauag

SEQ ID NO: 1236804 - RNA, 19 nt, Artificial Sequence
  Description of Artificial Sequence: Synthetic oligonucleotide
  Sense strand starting at position 178 of SEQ ID NO: 917478
gccagcguuuccuuuccua

SEQ ID NO: 1236805 - RNA, 19 nt, Artificial Sequence
  Description of Artificial Sequence: Synthetic oligonucleotide
  Antisense strand to SEQ ID NO: 1236804
uaggaaaggaaacgcuggc

SEQ ID NO: 1236806 - RNA, 19 nt, Artificial Sequence
  Description of Artificial Sequence: Synthetic oligonucleotide
  Sense strand starting at position 235 of SEQ ID NO: 917478
gccuuaauguaaguuuagu

SEQ ID NO: 1236807 - RNA, 19 nt, Artificial Sequence
  Description of Artificial Sequence: Synthetic oligonucleotide
  Antisense strand to SEQ ID NO: 1236806
acuaaacuuacauuaaggc

SEQ ID NO: 1236808 - RNA, 19 nt, Artificial Sequence
  Description of Artificial Sequence: Synthetic oligonucleotide
  Sense strand starting at position 240 of SEQ ID NO: 917478
aauguaaguuuagugaaac

SEQ ID NO: 1236809 - RNA, 19 nt, Artificial Sequence
  Description of Artificial Sequence: Synthetic oligonucleotide
  Antisense strand to SEQ ID NO: 1236808
guuucacuaaacuuacauu

SEQ ID NO: 1236810 - RNA, 19 nt, Artificial Sequence
  Description of Artificial Sequence: Synthetic oligonucleotide
  Sense strand starting at position 267 of SEQ ID NO: 917478
ggaguaaauuuagaugcau

SEQ ID NO: 1236811 - RNA, 19 nt, Artificial Sequence
  Description of Artificial Sequence: Synthetic oligonucleotide
  Antisense strand to SEQ ID NO: 1236810
augcaucuaaauuuacucc

SEQ ID NO: 1236812 - RNA, 19 nt, Artificial Sequence
  Description of Artificial Sequence: Synthetic oligonucleotide
  Sense strand starting at position 371 of SEQ ID NO: 917478
aauugaguggcgcaaucau

SEQ ID NO: 1236813 - RNA, 19 nt, Artificial Sequence
  Description of Artificial Sequence: Synthetic oligonucleotide
  Antisense strand to SEQ ID NO: 1236812
augauugcgccacucaauu

SEQ ID NO: 1236814 - RNA, 19 nt, Artificial Sequence
  Description of Artificial Sequence: Synthetic oligonucleotide
  Sense strand starting at position 380 of SEQ ID NO: 917478
gcgcaaucauaagcucacu

SEQ ID NO: 1236815 - RNA, 19 nt, Artificial Sequence
  Description of Artificial Sequence: Synthetic oligonucleotide
  Antisense strand to SEQ ID NO: 1236814
agugagcuuaugauugcgc

SEQ ID NO: 1236816 - RNA, 19 nt, Artificial Sequence
  Description of Artificial Sequence: Synthetic oligonucleotide
  Sense strand starting at position 393 of SEQ ID NO: 917478
cucacugaauccucgaacu

SEQ ID NO: 1236817 - RNA, 19 nt, Artificial Sequence
  Description of Artificial Sequence: Synthetic oligonucleotide
  Antisense strand to SEQ ID NO: 1236816
aguucgaggauucagugag

SEQ ID NO: 1236818 - RNA, 19 nt, Artificial Sequence
  Description of Artificial Sequence: Synthetic oligonucleotide
  Sense strand starting at position 1119 of SEQ ID NO: 917478
ccucaauggcgauggugaa

SEQ ID NO: 1236819 - RNA, 19 nt, Artificial Sequence
  Description of Artificial Sequence: Synthetic oligonucleotide
  Antisense strand to SEQ ID NO: 1236818
uucaccaucgccauugagg

SEQ ID NO: 1236820 - RNA, 19 nt, Artificial Sequence
  Description of Artificial Sequence: Synthetic oligonucleotide
  Sense strand starting at position 1222 of SEQ ID NO: 917478
ggaguucuaggacgacaac

SEQ ID NO: 1236821 - RNA, 19 nt, Artificial Sequence
  Description of Artificial Sequence: Synthetic oligonucleotide
  Antisense strand to SEQ ID NO: 1236820
guugucguccuagaacucc

SEQ ID NO: 1236822 - RNA, 19 nt, Artificial Sequence
  Description of Artificial Sequence: Synthetic oligonucleotide
  Sense strand starting at position 1315 of SEQ ID NO: 917478
aaacguucgugcccuguua

SEQ ID NO: 1236823 - RNA, 19 nt, Artificial Sequence
  Description of Artificial Sequence: Synthetic oligonucleotide
  Antisense strand to SEQ ID NO: 1236822
uaacagggcacgaacguuu

SEQ ID NO: 1236824 - RNA, 19 nt, Artificial Sequence
  Description of Artificial Sequence: Synthetic oligonucleotide
  Sense strand starting at position 1328 of SEQ ID NO: 917478
cuguuacguccacagcauu

SEQ ID NO: 1236825 - RNA, 19 nt, Artificial Sequence
  Description of Artificial Sequence: Synthetic oligonucleotide
  Antisense strand to SEQ ID NO: 1236824
aaugcuguggacguaacag

SEQ ID NO: 1236826 - RNA, 19 nt, Artificial Sequence
  Description of Artificial Sequence: Synthetic oligonucleotide
  Sense strand starting at position 1487 of SEQ ID NO: 917478
auccguucucuccgcaaau

SEQ ID NO: 1236827 - RNA, 19 nt, Artificial Sequence
  Description of Artificial Sequence: Synthetic oligonucleotide
  Antisense strand to SEQ ID NO: 1236826
auuugcggagagaacggau

SEQ ID NO: 1236828 - RNA, 19 nt, Artificial Sequence
  Description of Artificial Sequence: Synthetic oligonucleotide
  Sense strand starting at position 2261 of SEQ ID NO: 917478
cgauucguuacucccguua

SEQ ID NO: 1236829 - RNA, 19 nt, Artificial Sequence
  Description of Artificial Sequence: Synthetic oligonucleotide
  Antisense strand to SEQ ID NO: 1236828
uaacgggaguaacgaaucg

SEQ ID NO: 1236830 - RNA, 19 nt, Artificial Sequence
  Description of Artificial Sequence: Synthetic oligonucleotide
  Sense strand starting at position 2265 of SEQ ID NO: 917478
ucguuacucccguuaaggu

SEQ ID NO: 1236831 - RNA, 19 nt, Artificial Sequence
  Description of Artificial Sequence: Synthetic oligonucleotide
  Antisense strand to SEQ ID NO: 1236830
accuuaacgggaguaacga

SEQ ID NO: 1236832 - RNA, 19 nt, Artificial Sequence
  Description of Artificial Sequence: Synthetic oligonucleotide
  Sense strand starting at position 2353 of SEQ ID NO: 917478
ggaugauuguaacaaucac

SEQ ID NO: 1236833 - RNA, 19 nt, Artificial Sequence
  Description of Artificial Sequence: Synthetic oligonucleotide
  Antisense strand to SEQ ID NO: 1236832
gugauuguuacaaucaucc

SEQ ID NO: 1236834 - RNA, 19 nt, Artificial Sequence
  Description of Artificial Sequence: Synthetic oligonucleotide
  Sense strand starting at position 2371 of SEQ ID NO: 917478
cuuaaauggucgcuucgua

SEQ ID NO: 1236835 - RNA, 19 nt, Artificial Sequence
  Description of Artificial Sequence: Synthetic oligonucleotide
  Antisense strand to SEQ ID NO: 1236834
uacgaagcgaccauuuaag

SEQ ID NO: 1236836 - RNA, 19 nt, Artificial Sequence
  Description of Artificial Sequence: Synthetic oligonucleotide
  Sense strand starting at position 2766 of SEQ ID NO: 917478
ucacgagcuauggauguau

SEQ ID NO: 1236837 - RNA, 19 nt, Artificial Sequence
  Description of Artificial Sequence: Synthetic oligonucleotide
  Antisense strand to SEQ ID NO: 1236836
auacauccauagcucguga

SEQ ID NO: 1236838 - RNA, 19 nt, Artificial Sequence
  Description of Artificial Sequence: Synthetic oligonucleotide
  Sense strand starting at position 2770 of SEQ ID NO: 917478
gagcuauggauguaucugu

SEQ ID NO: 1236839 - RNA, 19 nt, Artificial Sequence
  Description of Artificial Sequence: Synthetic oligonucleotide
  Antisense strand to SEQ ID NO: 1236838
acagauacauccauagcuc

SEQ ID NO: 1236840 - RNA, 19 nt, Artificial Sequence
  Description of Artificial Sequence: Synthetic oligonucleotide
  Sense strand starting at position 2777 of SEQ ID NO: 917478
ggauguaucugugucuccu

SEQ ID NO: 1236841 - RNA, 19 nt, Artificial Sequence
  Description of Artificial Sequence: Synthetic oligonucleotide
  Antisense strand to SEQ ID NO: 1236840
aggagacacagauacaucc

SEQ ID NO: 1236842 - RNA, 19 nt, Artificial Sequence
  Description of Artificial Sequence: Synthetic oligonucleotide
  Sense strand starting at position 2858 of SEQ ID NO: 917478
ugaaccucuuguguaugaa

SEQ ID NO: 1236843 - RNA, 19 nt, Artificial Sequence
  Description of Artificial Sequence: Synthetic oligonucleotide
  Antisense strand to SEQ ID NO: 1236842
uucauacacaagagguuca

SEQ ID NO: 1236844 - RNA, 19 nt, Artificial Sequence
  Description of Artificial Sequence: Synthetic oligonucleotide
  Sense strand starting at position 2859 of SEQ ID NO: 917478
gaaccucuuguguaugaau

SEQ ID NO: 1236845 - RNA, 19 nt, Artificial Sequence
  Description of Artificial Sequence: Synthetic oligonucleotide
  Antisense strand to SEQ ID NO: 1236844
auucauacacaagagguuc

SEQ ID NO: 1236846 - RNA, 19 nt, Artificial Sequence
  Description of Artificial Sequence: Synthetic oligonucleotide
  Sense strand starting at position 2961 of SEQ ID NO: 917478
cgguacauacaaggaaaua

SEQ ID NO: 1236847 - RNA, 19 nt, Artificial Sequence
  Description of Artificial Sequence: Synthetic oligonucleotide
  Antisense strand to SEQ ID NO: 1236846
uauuuccuuguauguaccg

SEQ ID NO: 1236848 - RNA, 19 nt, Artificial Sequence
  Description of Artificial Sequence: Synthetic oligonucleotide
  Sense strand starting at position 2991 of SEQ ID NO: 917478
accacauagucgcugucau

SEQ ID NO: 1236849 - RNA, 19 nt, Artificial Sequence
  Description of Artificial Sequence: Synthetic oligonucleotide
  Antisense strand to SEQ ID NO: 1236848
augacagcgacuauguggu

SEQ ID NO: 1236850 - RNA, 19 nt, Artificial Sequence
  Description of Artificial Sequence: Synthetic oligonucleotide
  Sense strand starting at position 2992 of SEQ ID NO: 917478
ccacauagucgcugucauu

SEQ ID NO: 1236851 - RNA, 19 nt, Artificial Sequence
  Description of Artificial Sequence: Synthetic oligonucleotide
  Antisense strand to SEQ ID NO: 1236850
aaugacagcgacuaugugg

SEQ ID NO: 1236852 - RNA, 19 nt, Artificial Sequence
  Description of Artificial Sequence: Synthetic oligonucleotide
  Sense strand starting at position 2995 of SEQ ID NO: 917478
cauagucgcugucauuuau

SEQ ID NO: 1236853 - RNA, 19 nt, Artificial Sequence
  Description of Artificial Sequence: Synthetic oligonucleotide
  Antisense strand to SEQ ID NO: 1236852
auaaaugacagcgacuaug

SEQ ID NO: 1236854 - RNA, 19 nt, Artificial Sequence
  Description of Artificial Sequence: Synthetic oligonucleotide
  Sense strand starting at position 3001 of SEQ ID NO: 917478
cgcugucauuuaucacaag

SEQ ID NO: 1236855 - RNA, 19 nt, Artificial Sequence
  Description of Artificial Sequence: Synthetic oligonucleotide
  Antisense strand to SEQ ID NO: 1236854
cuugugauaaaugacagcg

SEQ ID NO: 1236856 - RNA, 19 nt, Artificial Sequence
  Description of Artificial Sequence: Synthetic oligonucleotide
  Sense strand starting at position 3002 of SEQ ID NO: 917478
gcugucauuuaucacaagu

SEQ ID NO: 1236857 - RNA, 19 nt, Artificial Sequence
  Description of Artificial Sequence: Synthetic oligonucleotide
  Antisense strand to SEQ ID NO: 1236856
acuugugauaaaugacagc

SEQ ID NO: 1236858 - RNA, 19 nt, Artificial Sequence
  Description of Artificial Sequence: Synthetic oligonucleotide
  Sense strand starting at position 3221 of SEQ ID NO: 917478
aguuauaguugagguagga

SEQ ID NO: 1236859 - RNA, 19 nt, Artificial Sequence
  Description of Artificial Sequence: Synthetic oligonucleotide
  Antisense strand to SEQ ID NO: 1236858
uccuaccucaacuauaacu

SEQ ID NO: 1236860 - RNA, 19 nt, Artificial Sequence
  Description of Artificial Sequence: Synthetic oligonucleotide
  Sense strand starting at position 3236 of SEQ ID NO: 917478
aggagaucagcaggacuuu

SEQ ID NO: 1236861 - RNA, 19 nt, Artificial Sequence
  Description of Artificial Sequence: Synthetic oligonucleotide
  Antisense strand to SEQ ID NO: 1236860
aaaguccugcugaucuccu

SEQ ID NO: 1236862 - RNA, 19 nt, Artificial Sequence
  Description of Artificial Sequence: Synthetic oligonucleotide
  Sense strand starting at position 3363 of SEQ ID NO: 917478
ccaggauggugaccaaagu

SEQ ID NO: 1236863 - RNA, 19 nt, Artificial Sequence
  Description of Artificial Sequence: Synthetic oligonucleotide
  Antisense strand to SEQ ID NO: 1236862
acuuuggucaccauccugg

SEQ ID NO: 1236864 - RNA, 19 nt, Artificial Sequence
  Description of Artificial Sequence: Synthetic oligonucleotide
  Sense strand starting at position 3449 of SEQ ID NO: 917478
ccagcacucugacaguuua

SEQ ID NO: 1236865 - RNA, 19 nt, Artificial Sequence
  Description of Artificial Sequence: Synthetic oligonucleotide
  Antisense strand to SEQ ID NO: 1236864
uaaacugucagagugcugg

SEQ ID NO: 1236866 - RNA, 19 nt, Artificial Sequence
  Description of Artificial Sequence: Synthetic oligonucleotide
  Sense strand starting at position 3513 of SEQ ID NO: 917478
acggaagaauucucaguuc

SEQ ID NO: 1236867 - RNA, 19 nt, Artificial Sequence
  Description of Artificial Sequence: Synthetic oligonucleotide
  Antisense strand to SEQ ID NO: 1236866
gaacugagaauucuuccgu

SEQ ID NO: 1236868 - RNA, 19 nt, Artificial Sequence
  Description of Artificial Sequence: Synthetic oligonucleotide
  Sense strand starting at position 3579 of SEQ ID NO: 917478
ccuuauuuagcguacgaug

SEQ ID NO: 1236869 - RNA, 19 nt, Artificial Sequence
  Description of Artificial Sequence: Synthetic oligonucleotide
  Antisense strand to SEQ ID NO: 1236868
caucguacgcuaaauaagg

SEQ ID NO: 1236870 - RNA, 19 nt, Artificial Sequence
  Description of Artificial Sequence: Synthetic oligonucleotide
  Sense strand starting at position 3581 of SEQ ID NO: 917478
uuauuuagcguacgaugaa

SEQ ID NO: 1236871 - RNA, 19 nt, Artificial Sequence
  Description of Artificial Sequence: Synthetic oligonucleotide
  Antisense strand to SEQ ID NO: 1236870
uucaucguacgcuaaauaa

SEQ ID NO: 1236872 - RNA, 19 nt, Artificial Sequence
  Description of Artificial Sequence: Synthetic oligonucleotide
  Sense strand starting at position 3581 of SEQ ID NO: 917479
uuauuuagcguacgaugaa

SEQ ID NO: 1236873 - RNA, 19 nt, Artificial Sequence
  Description of Artificial Sequence: Synthetic oligonucleotide
  Antisense strand to SEQ ID NO: 1236872
uucaucguacgcuaaauaa

SEQ ID NO: 1236874 - RNA, 19 nt, Artificial Sequence
  Description of Artificial Sequence: Synthetic oligonucleotide
  Sense strand starting at position 83 of SEQ ID NO: 917479
agauguaucucaggcagag

SEQ ID NO: 1236875 - RNA, 19 nt, Artificial Sequence
  Description of Artificial Sequence: Synthetic oligonucleotide
  Antisense strand to SEQ ID NO: 1236874
cucugccugagauacaucu

SEQ ID NO: 1236876 - RNA, 19 nt, Artificial Sequence
  Description of Artificial Sequence: Synthetic oligonucleotide
  Sense strand starting at position 271 of SEQ ID NO: 917479
agacuaaauuucuggcuuu

SEQ ID NO: 1236877 - RNA, 19 nt, Artificial Sequence
  Description of Artificial Sequence: Synthetic oligonucleotide
  Antisense strand to SEQ ID NO: 1236876
aaagccagaaauuuagucu

SEQ ID NO: 1236878 - RNA, 19 nt, Artificial Sequence
  Description of Artificial Sequence: Synthetic oligonucleotide
  Sense strand starting at position 438 of SEQ ID NO: 917479
ggaauuaacuuccucugua

SEQ ID NO: 1236879 - RNA, 19 nt, Artificial Sequence
  Description of Artificial Sequence: Synthetic oligonucleotide
  Antisense strand to SEQ ID NO: 1236878
uacagaggaaguuaauucc

SEQ ID NO: 1236880 - RNA, 19 nt, Artificial Sequence
  Description of Artificial Sequence: Synthetic oligonucleotide
  Sense strand starting at position 441 of SEQ ID NO: 917479
auuaacuuccucuguagga

SEQ ID NO: 1236881 - RNA, 19 nt, Artificial Sequence
  Description of Artificial Sequence: Synthetic oligonucleotide
  Antisense strand to SEQ ID NO: 1236880
uccuacagaggaaguuaau

SEQ ID NO: 1236882 - RNA, 19 nt, Artificial Sequence
  Description of Artificial Sequence: Synthetic oligonucleotide
  Sense strand starting at position 442 of SEQ ID NO: 917479
uuaacuuccucuguaggaa

SEQ ID NO: 1236883 - RNA, 19 nt, Artificial Sequence
  Description of Artificial Sequence: Synthetic oligonucleotide
  Antisense strand to SEQ ID NO: 1236882
uuccuacagaggaaguuaa

SEQ ID NO: 1236884 - RNA, 19 nt, Artificial Sequence
  Description of Artificial Sequence: Synthetic oligonucleotide
  Sense strand starting at position 510 of SEQ ID NO: 917479
uccagcgucucauguggaa

SEQ ID NO: 1236885 - RNA, 19 nt, Artificial Sequence
  Description of Artificial Sequence: Synthetic oligonucleotide
  Antisense strand to SEQ ID NO: 1236884
uuccacaugagacgcugga

SEQ ID NO: 1236886 - RNA, 19 nt, Artificial Sequence
  Description of Artificial Sequence: Synthetic oligonucleotide
  Sense strand starting at position 614 of SEQ ID NO: 917479
uaacacagucgguaaagau

SEQ ID NO: 1236887 - RNA, 19 nt, Artificial Sequence
  Description of Artificial Sequence: Synthetic oligonucleotide
  Antisense strand to SEQ ID NO: 1236886
aucuuuaccgacuguguua

SEQ ID NO: 1236888 - RNA, 19 nt, Artificial Sequence
  Description of Artificial Sequence: Synthetic oligonucleotide
  Sense strand starting at position 671 of SEQ ID NO: 917479
acugcagugugguauccaa

SEQ ID NO: 1236889 - RNA, 19 nt, Artificial Sequence
  Description of Artificial Sequence: Synthetic oligonucleotide
  Antisense strand to SEQ ID NO: 1236888
uuggauaccacacugcagu

SEQ ID NO: 1236890 - RNA, 19 nt, Artificial Sequence
  Description of Artificial Sequence: Synthetic oligonucleotide
  Sense strand starting at position 795 of SEQ ID NO: 917479
guagcuuauguguugucau

SEQ ID NO: 1236891 - RNA, 19 nt, Artificial Sequence
  Description of Artificial Sequence: Synthetic oligonucleotide
  Antisense strand to SEQ ID NO: 1236890
augacaacacauaagcuac

SEQ ID NO: 1236892 - RNA, 19 nt, Artificial Sequence
  Description of Artificial Sequence: Synthetic oligonucleotide
  Sense strand starting at position 796 of SEQ ID NO: 917479
uagcuuauguguugucauu

SEQ ID NO: 1236893 - RNA, 19 nt, Artificial Sequence
  Description of Artificial Sequence: Synthetic oligonucleotide
  Antisense strand to SEQ ID NO: 1236892
aaugacaacacauaagcua

SEQ ID NO: 1236894 - RNA, 19 nt, Artificial Sequence
  Description of Artificial Sequence: Synthetic oligonucleotide
  Sense strand starting at position 798 of SEQ ID NO: 917479
gcuuauguguugucauucu

SEQ ID NO: 1236895 - RNA, 19 nt, Artificial Sequence
  Description of Artificial Sequence: Synthetic oligonucleotide
  Antisense strand to SEQ ID NO: 1236894
agaaugacaacacauaagc

SEQ ID NO: 1236896 - RNA, 19 nt, Artificial Sequence
  Description of Artificial Sequence: Synthetic oligonucleotide
  Sense strand starting at position 805 of SEQ ID NO: 917479
uguugucauucugaaauaa

SEQ ID NO: 1236897 - RNA, 19 nt, Artificial Sequence
  Description of Artificial Sequence: Synthetic oligonucleotide
  Antisense strand to SEQ ID NO: 1236896
uuauuucagaaugacaaca

SEQ ID NO: 1236898 - RNA, 19 nt, Artificial Sequence
  Description of Artificial Sequence: Synthetic oligonucleotide
  Sense strand starting at position 840 of SEQ ID NO: 917479
agaauuuagugcgaggcaa

SEQ ID NO: 1236899 - RNA, 19 nt, Artificial Sequence
  Description of Artificial Sequence: Synthetic oligonucleotide
  Antisense strand to SEQ ID NO: 1236898
uugccucgcacuaaauucu

SEQ ID NO: 1236900 - RNA, 19 nt, Artificial Sequence
  Description of Artificial Sequence: Synthetic oligonucleotide
  Sense strand starting at position 854 of SEQ ID NO: 917479
ggcaaacauucgugugcag

SEQ ID NO: 1236901 - RNA, 19 nt, Artificial Sequence
  Description of Artificial Sequence: Synthetic oligonucleotide
  Antisense strand to SEQ ID NO: 1236900
cugcacacgaauguuugcc

SEQ ID NO: 1236902 - RNA, 19 nt, Artificial Sequence
  Description of Artificial Sequence: Synthetic oligonucleotide
  Sense strand starting at position 856 of SEQ ID NO: 917479
caaacauucgugugcagca

SEQ ID NO: 1236903 - RNA, 19 nt, Artificial Sequence
  Description of Artificial Sequence: Synthetic oligonucleotide
  Antisense strand to SEQ ID NO: 1236902
ugcugcacacgaauguuug

SEQ ID NO: 1236904 - RNA, 19 nt, Artificial Sequence
  Description of Artificial Sequence: Synthetic oligonucleotide
  Sense strand starting at position 857 of SEQ ID NO: 917479
aaacauucgugugcagcau

SEQ ID NO: 1236905 - RNA, 19 nt, Artificial Sequence
  Description of Artificial Sequence: Synthetic oligonucleotide
  Antisense strand to SEQ ID NO: 1236904
augcugcacacgaauguuu

SEQ ID NO: 1236906 - RNA, 19 nt, Artificial Sequence
  Description of Artificial Sequence: Synthetic oligonucleotide
  Sense strand starting at position 2503 of SEQ ID NO: 917479
gggacuagugugugcacua

SEQ ID NO: 1236907 - RNA, 19 nt, Artificial Sequence
  Description of Artificial Sequence: Synthetic oligonucleotide
  Antisense strand to SEQ ID NO: 1236906
uagugcacacacuaguccc

SEQ ID NO: 1236908 - RNA, 19 nt, Artificial Sequence
  Description of Artificial Sequence: Synthetic oligonucleotide
  Sense strand starting at position 2545 of SEQ ID NO: 917479
gggacuggugugugcacua

SEQ ID NO: 1236909 - RNA, 19 nt, Artificial Sequence
  Description of Artificial Sequence: Synthetic oligonucleotide
  Antisense strand to SEQ ID NO: 1236908
uagugcacacaccaguccc

SEQ ID NO: 1236910 - RNA, 19 nt, Artificial Sequence
  Description of Artificial Sequence: Synthetic oligonucleotide
  Sense strand starting at position 3095 of SEQ ID NO: 917479
cggguaugucaggaugugu

SEQ ID NO: 1236911 - RNA, 19 nt, Artificial Sequence
  Description of Artificial Sequence: Synthetic oligonucleotide
  Antisense strand to SEQ ID NO: 1236910
acacauccugacauacccg

SEQ ID NO: 1236912 - RNA, 19 nt, Artificial Sequence
  Description of Artificial Sequence: Synthetic oligonucleotide
  Sense strand starting at position 3106 of SEQ ID NO: 917479
ggauguguguuugugugca

SEQ ID NO: 1236913 - RNA, 19 nt, Artificial Sequence
  Description of Artificial Sequence: Synthetic oligonucleotide
  Antisense strand to SEQ ID NO: 1236912
ugcacacaaacacacaucc

SEQ ID NO: 1236914 - RNA, 19 nt, Artificial Sequence
  Description of Artificial Sequence: Synthetic oligonucleotide
  Sense strand starting at position 3110 of SEQ ID NO: 917479
guguguuugugugcaggga

SEQ ID NO: 1236915 - RNA, 19 nt, Artificial Sequence
  Description of Artificial Sequence: Synthetic oligonucleotide
  Antisense strand to SEQ ID NO: 1236914
ucccugcacacaaacacac

SEQ ID NO: 1236916 - RNA, 19 nt, Artificial Sequence
  Description of Artificial Sequence: Synthetic oligonucleotide
  Sense strand starting at position 3371 of SEQ ID NO: 917479
ugugcauagacguguguau

SEQ ID NO: 1236917 - RNA, 19 nt, Artificial Sequence
  Description of Artificial Sequence: Synthetic oligonucleotide
  Antisense strand to SEQ ID NO: 1236916
auacacacgucuaugcaca

SEQ ID NO: 1236918 - RNA, 19 nt, Artificial Sequence
  Description of Artificial Sequence: Synthetic oligonucleotide
  Sense strand starting at position 3373 of SEQ ID NO: 917479
ugcauagacguguguaugu

SEQ ID NO: 1236919 - RNA, 19 nt, Artificial Sequence
  Description of Artificial Sequence: Synthetic oligonucleotide
  Antisense strand to SEQ ID NO: 1236918
acauacacacgucuaugca

SEQ ID NO: 1236920 - RNA, 19 nt, Artificial Sequence
  Description of Artificial Sequence: Synthetic oligonucleotide
  Sense strand starting at position 3486 of SEQ ID NO: 917479
cgcccagauucccaacaau

SEQ ID NO: 1236921 - RNA, 19 nt, Artificial Sequence
  Description of Artificial Sequence: Synthetic oligonucleotide
  Antisense strand to SEQ ID NO: 1236920
auuguugggaaucugggcg

SEQ ID NO: 1236922 - RNA, 19 nt, Artificial Sequence
  Description of Artificial Sequence: Synthetic oligonucleotide
  Sense strand starting at position 3614 of SEQ ID NO: 917479
cccggagucuuggagacuu

SEQ ID NO: 1236923 - RNA, 19 nt, Artificial Sequence
  Description of Artificial Sequence: Synthetic oligonucleotide
  Antisense strand to SEQ ID NO: 1236922
aagucuccaagacuccggg

SEQ ID NO: 1236924 - RNA, 19 nt, Artificial Sequence
  Description of Artificial Sequence: Synthetic oligonucleotide
  Sense strand starting at position 3616 of SEQ ID NO: 917479
cggagucuuggagacuuaa

SEQ ID NO: 1236925 - RNA, 19 nt, Artificial Sequence
  Description of Artificial Sequence: Synthetic oligonucleotide
  Antisense strand to SEQ ID NO: 1236924
uuaagucuccaagacuccg

SEQ ID NO: 1236926 - RNA, 19 nt, Artificial Sequence
  Description of Artificial Sequence: Synthetic oligonucleotide
  Sense strand starting at position 3699 of SEQ ID NO: 917479
cagagaagaguccgaaguu

SEQ ID NO: 1236927 - RNA, 19 nt, Artificial Sequence
  Description of Artificial Sequence: Synthetic oligonucleotide
  Antisense strand to SEQ ID NO: 1236926
aacuucggacucuucucug

SEQ ID NO: 1236928 - RNA, 19 nt, Artificial Sequence
  Description of Artificial Sequence: Synthetic oligonucleotide
  Sense strand starting at position 3804 of SEQ ID NO: 917479
cugccugugcgguguauua

SEQ ID NO: 1236929 - RNA, 19 nt, Artificial Sequence
  Description of Artificial Sequence: Synthetic oligonucleotide
  Antisense strand to SEQ ID NO: 1236928
uaauacaccgcacaggcag

SEQ ID NO: 1236930 - RNA, 19 nt, Artificial Sequence
  Description of Artificial Sequence: Synthetic oligonucleotide
  Sense strand starting at position 3806 of SEQ ID NO: 917479
gccugugcgguguauuauu

SEQ ID NO: 1236931 - RNA, 19 nt, Artificial Sequence
  Description of Artificial Sequence: Synthetic oligonucleotide
  Antisense strand to SEQ ID NO: 1236930
aauaauacaccgcacaggc

SEQ ID NO: 1236932 - RNA, 19 nt, Artificial Sequence
  Description of Artificial Sequence: Synthetic oligonucleotide
  Sense strand starting at position 3814 of SEQ ID NO: 917479
gguguauuauuacaugaca

SEQ ID NO: 1236933 - RNA, 19 nt, Artificial Sequence
  Description of Artificial Sequence: Synthetic oligonucleotide
  Antisense strand to SEQ ID NO: 1236932
ugucauguaauaauacacc

SEQ ID NO: 1236934 - RNA, 19 nt, Artificial Sequence
  Description of Artificial Sequence: Synthetic oligonucleotide
  Sense strand starting at position 3894 of SEQ ID NO: 917479
cccuaaagcucuggucacu

SEQ ID NO: 1236935 - RNA, 19 nt, Artificial Sequence
  Description of Artificial Sequence: Synthetic oligonucleotide
  Antisense strand to SEQ ID NO: 1236934
agugaccagagcuuuaggg

SEQ ID NO: 1236936 - RNA, 19 nt, Artificial Sequence
  Description of Artificial Sequence: Synthetic oligonucleotide
  Sense strand starting at position 3903 of SEQ ID NO: 917479
ucuggucacuuggcuuaaa

SEQ ID NO: 1236937 - RNA, 19 nt, Artificial Sequence
  Description of Artificial Sequence: Synthetic oligonucleotide
  Antisense strand to SEQ ID NO: 1236936
uuuaagccaagugaccaga

SEQ ID NO: 1236938 - RNA, 19 nt, Artificial Sequence
  Description of Artificial Sequence: Synthetic oligonucleotide
  Sense strand starting at position 3914 of SEQ ID NO: 917479
ggcuuaaacugcuuacaag

SEQ ID NO: 1236939 - RNA, 19 nt, Artificial Sequence
  Description of Artificial Sequence: Synthetic oligonucleotide
  Antisense strand to SEQ ID NO: 1236938
cuuguaagcaguuuaagcc

SEQ ID NO: 1236940 - RNA, 19 nt, Artificial Sequence
  Description of Artificial Sequence: Synthetic oligonucleotide
  Sense strand starting at position 3915 of SEQ ID NO: 917479
gcuuaaacugcuuacaagu

SEQ ID NO: 1236941 - RNA, 19 nt, Artificial Sequence
  Description of Artificial Sequence: Synthetic oligonucleotide
  Antisense strand to SEQ ID NO: 1236940
acuuguaagcaguuuaagc

SEQ ID NO: 1236942 - RNA, 19 nt, Artificial Sequence
  Description of Artificial Sequence: Synthetic oligonucleotide
  Sense strand starting at position 3938 of SEQ ID NO: 917479
acccguuucuucuuugaag

SEQ ID NO: 1236943 - RNA, 19 nt, Artificial Sequence
  Description of Artificial Sequence: Synthetic oligonucleotide
  Antisense strand to SEQ ID NO: 1236942
cuucaaagaagaaacgggu

SEQ ID NO: 1236944 - RNA, 19 nt, Artificial Sequence
  Description of Artificial Sequence: Synthetic oligonucleotide
  Sense strand starting at position 3939 of SEQ ID NO: 917479
cccguuucuucuuugaaga

SEQ ID NO: 1236945 - RNA, 19 nt, Artificial Sequence
  Description of Artificial Sequence: Synthetic oligonucleotide
  Antisense strand to SEQ ID NO: 1236944
ucuucaaagaagaaacggg

SEQ ID NO: 1236946 - RNA, 19 nt, Artificial Sequence
  Description of Artificial Sequence: Synthetic oligonucleotide
  Sense strand starting at position 3940 of SEQ ID NO: 917479
ccguuucuucuuugaagac

SEQ ID NO: 1236947 - RNA, 19 nt, Artificial Sequence
  Description of Artificial Sequence: Synthetic oligonucleotide
  Antisense strand to SEQ ID NO: 1236946
gucuucaaagaagaaacgg

SEQ ID NO: 1236948 - RNA, 19 nt, Artificial Sequence
  Description of Artificial Sequence: Synthetic oligonucleotide
  Sense strand starting at position 3941 of SEQ ID NO: 917480
cguuucuucuuugaagacu

SEQ ID NO: 1236949 - RNA, 19 nt, Artificial Sequence
  Description of Artificial Sequence: Synthetic oligonucleotide
  Antisense strand to SEQ ID NO: 1236948
agucuucaaagaagaaacg

SEQ ID NO: 1236950 - RNA, 19 nt, Artificial Sequence
  Description of Artificial Sequence: Synthetic oligonucleotide
  Sense strand starting at position 88 of SEQ ID NO: 917480
auaguaacuucugcaauug

SEQ ID NO: 1236951 - RNA, 19 nt, Artificial Sequence
  Description of Artificial Sequence: Synthetic oligonucleotide
  Antisense strand to SEQ ID NO: 1236950
caauugcagaaguuacuau

SEQ ID NO: 1236952 - RNA, 19 nt, Artificial Sequence
  Description of Artificial Sequence: Synthetic oligonucleotide
  Sense strand starting at position 104 of SEQ ID NO: 917480
uugcuauuucuugguauaa

SEQ ID NO: 1236953 - RNA, 19 nt, Artificial Sequence
  Description of Artificial Sequence: Synthetic oligonucleotide
  Antisense strand to SEQ ID NO: 1236952
uuauaccaagaaauagcaa

SEQ ID NO: 1236954 - RNA, 19 nt, Artificial Sequence
  Description of Artificial Sequence: Synthetic oligonucleotide
  Sense strand starting at position 172 of SEQ ID NO: 917480
ccaggauucccaggcuaau

SEQ ID NO: 1236955 - RNA, 19 nt, Artificial Sequence
  Description of Artificial Sequence: Synthetic oligonucleotide
  Antisense strand to SEQ ID NO: 1236954
auuagccugggaauccugg

SEQ ID NO: 1236956 - RNA, 19 nt, Artificial Sequence
  Description of Artificial Sequence: Synthetic oligonucleotide
  Sense strand starting at position 199 of SEQ ID NO: 917480
aaaccauucugaguuggau

SEQ ID NO: 1236957 - RNA, 19 nt, Artificial Sequence
  Description of Artificial Sequence: Synthetic oligonucleotide
  Antisense strand to SEQ ID NO: 1236956
auccaacucagaaugguuu

SEQ ID NO: 1236958 - RNA, 19 nt, Artificial Sequence
  Description of Artificial Sequence: Synthetic oligonucleotide
  Sense strand starting at position 264 of SEQ ID NO: 917480
aggcauaucucagugaaau

SEQ ID NO: 1236959 - RNA, 19 nt, Artificial Sequence
  Description of Artificial Sequence: Synthetic oligonucleotide
  Antisense strand to SEQ ID NO: 1236958
auuucacugagauaugccu

SEQ ID NO: 1236960 - RNA, 19 nt, Artificial Sequence
  Description of Artificial Sequence: Synthetic oligonucleotide
  Sense strand starting at position 265 of SEQ ID NO: 917480
ggcauaucucagugaaaug

SEQ ID NO: 1236961 - RNA, 19 nt, Artificial Sequence
  Description of Artificial Sequence: Synthetic oligonucleotide
  Antisense strand to SEQ ID NO: 1236960
cauuucacugagauaugcc

SEQ ID NO: 1236962 - RNA, 19 nt, Artificial Sequence
  Description of Artificial Sequence: Synthetic oligonucleotide
  Sense strand starting at position 333 of SEQ ID NO: 917480
gggagcccuugaccaaauu

SEQ ID NO: 1236963 - RNA, 19 nt, Artificial Sequence
  Description of Artificial Sequence: Synthetic oligonucleotide
  Antisense strand to SEQ ID NO: 1236962
aauuuggucaagggcuccc

SEQ ID NO: 1236964 - RNA, 19 nt, Artificial Sequence
  Description of Artificial Sequence: Synthetic oligonucleotide
  Sense strand starting at position 500 of SEQ ID NO: 917480
ccaaaugacuugucggauu

SEQ ID NO: 1236965 - RNA, 19 nt, Artificial Sequence
  Description of Artificial Sequence: Synthetic oligonucleotide
  Antisense strand to SEQ ID NO: 1236964
aauccgacaagucauuugg

SEQ ID NO: 1236966 - RNA, 19 nt, Artificial Sequence
  Description of Artificial Sequence: Synthetic oligonucleotide
  Sense strand starting at position 502 of SEQ ID NO: 917480
aaaugacuugucggauuag

SEQ ID NO: 1236967 - RNA, 19 nt, Artificial Sequence
  Description of Artificial Sequence: Synthetic oligonucleotide
  Antisense strand to SEQ ID NO: 1236966
cuaauccgacaagucauuu

SEQ ID NO: 1236968 - RNA, 19 nt, Artificial Sequence
  Description of Artificial Sequence: Synthetic oligonucleotide
  Sense strand starting at position 609 of SEQ ID NO: 917480
auaggagaguuuccuguuu

SEQ ID NO: 1236969 - RNA, 19 nt, Artificial Sequence
  Description of Artificial Sequence: Synthetic oligonucleotide
  Antisense strand to SEQ ID NO: 1236968
aaacaggaaacucuccuau

SEQ ID NO: 1236970 - RNA, 19 nt, Artificial Sequence
  Description of Artificial Sequence: Synthetic oligonucleotide
  Sense strand starting at position 770 of SEQ ID NO: 917480
agacacaaauccgcaauau

SEQ ID NO: 1236971 - RNA, 19 nt, Artificial Sequence
  Description of Artificial Sequence: Synthetic oligonucleotide
  Antisense strand to SEQ ID NO: 1236970
auauugcggauuugugucu

SEQ ID NO: 1236972 - RNA, 19 nt, Artificial Sequence
  Description of Artificial Sequence: Synthetic oligonucleotide
  Sense strand starting at position 835 of SEQ ID NO: 917480
uagauaugguggucaggua

SEQ ID NO: 1236973 - RNA, 19 nt, Artificial Sequence
  Description of Artificial Sequence: Synthetic oligonucleotide
  Antisense strand to SEQ ID NO: 1236972
uaccugaccaccauaucua

SEQ ID NO: 1236974 - RNA, 19 nt, Artificial Sequence
  Description of Artificial Sequence: Synthetic oligonucleotide
  Sense strand starting at position 836 of SEQ ID NO: 917480
agauaugguggucagguaa

SEQ ID NO: 1236975 - RNA, 19 nt, Artificial Sequence
  Description of Artificial Sequence: Synthetic oligonucleotide
  Antisense strand to SEQ ID NO: 1236974
uuaccugaccaccauaucu

SEQ ID NO: 1236976 - RNA, 19 nt, Artificial Sequence
  Description of Artificial Sequence: Synthetic oligonucleotide
  Sense strand starting at position 851 of SEQ ID NO: 917480
guaagaacucucugaggug

SEQ ID NO: 1236977 - RNA, 19 nt, Artificial Sequence
  Description of Artificial Sequence: Synthetic oligonucleotide
  Antisense strand to SEQ ID NO: 1236976
caccucagagaguucuuac

SEQ ID NO: 1236978 - RNA, 19 nt, Artificial Sequence
  Description of Artificial Sequence: Synthetic oligonucleotide
  Sense strand starting at position 863 of SEQ ID NO: 917480
ugaggugcuaucugaauaa

SEQ ID NO: 1236979 - RNA, 19 nt, Artificial Sequence
  Description of Artificial Sequence: Synthetic oligonucleotide
  Antisense strand to SEQ ID NO: 1236978
uuauucagauagcaccuca

SEQ ID NO: 1236980 - RNA, 19 nt, Artificial Sequence
  Description of Artificial Sequence: Synthetic oligonucleotide
  Sense strand starting at position 928 of SEQ ID NO: 917480
gugcaaaggccucaagaca

SEQ ID NO: 1236981 - RNA, 19 nt, Artificial Sequence
  Description of Artificial Sequence: Synthetic oligonucleotide
  Antisense strand to SEQ ID NO: 1236980
ugucuugaggccuuugcac

SEQ ID NO: 1236982 - RNA, 19 nt, Artificial Sequence
  Description of Artificial Sequence: Synthetic oligonucleotide
  Sense strand starting at position 939 of SEQ ID NO: 917480
ucaagacagaaguguguau

SEQ ID NO: 1236983 - RNA, 19 nt, Artificial Sequence
  Description of Artificial Sequence: Synthetic oligonucleotide
  Antisense strand to SEQ ID NO: 1236982
auacacacuucugucuuga

SEQ ID NO: 1236984 - RNA, 19 nt, Artificial Sequence
  Description of Artificial Sequence: Synthetic oligonucleotide
  Sense strand starting at position 943 of SEQ ID NO: 917480
gacagaaguguguaucuug

SEQ ID NO: 1236985 - RNA, 19 nt, Artificial Sequence
  Description of Artificial Sequence: Synthetic oligonucleotide
  Antisense strand to SEQ ID NO: 1236984
caagauacacacuucuguc

SEQ ID NO: 1236986 - RNA, 19 nt, Artificial Sequence
  Description of Artificial Sequence: Synthetic oligonucleotide
  Sense strand starting at position 1111 of SEQ ID NO: 917480
ugcuucuaccaugaucuga

SEQ ID NO: 1236987 - RNA, 19 nt, Artificial Sequence
  Description of Artificial Sequence: Synthetic oligonucleotide
  Antisense strand to SEQ ID NO: 1236986
ucagaucaugguagaagca

SEQ ID NO: 1236988 - RNA, 19 nt, Artificial Sequence
  Description of Artificial Sequence: Synthetic oligonucleotide
  Sense strand starting at position 1119 of SEQ ID NO: 917480
ccaugaucugauugacuua

SEQ ID NO: 1236989 - RNA, 19 nt, Artificial Sequence
  Description of Artificial Sequence: Synthetic oligonucleotide
  Antisense strand to SEQ ID NO: 1236988
uaagucaaucagaucaugg

SEQ ID NO: 1236990 - RNA, 19 nt, Artificial Sequence
  Description of Artificial Sequence: Synthetic oligonucleotide
  Sense strand starting at position 1281 of SEQ ID NO: 917480
aguggucgccguaaggaua

SEQ ID NO: 1236991 - RNA, 19 nt, Artificial Sequence
  Description of Artificial Sequence: Synthetic oligonucleotide
  Antisense strand to SEQ ID NO: 1236990
uauccuuacggcgaccacu

SEQ ID NO: 1236992 - RNA, 19 nt, Artificial Sequence
  Description of Artificial Sequence: Synthetic oligonucleotide
  Sense strand starting at position 1282 of SEQ ID NO: 917480
guggucgccguaaggauau

SEQ ID NO: 1236993 - RNA, 19 nt, Artificial Sequence
  Description of Artificial Sequence: Synthetic oligonucleotide
  Antisense strand to SEQ ID NO: 1236992
auauccuuacggcgaccac

SEQ ID NO: 1236994 - RNA, 19 nt, Artificial Sequence
  Description of Artificial Sequence: Synthetic oligonucleotide
  Sense strand starting at position 1387 of SEQ ID NO: 917480
uuacauagauguccuauua

SEQ ID NO: 1236995 - RNA, 19 nt, Artificial Sequence
  Description of Artificial Sequence: Synthetic oligonucleotide
  Antisense strand to SEQ ID NO: 1236994
uaauaggacaucuauguaa

SEQ ID NO: 1236996 - RNA, 19 nt, Artificial Sequence
  Description of Artificial Sequence: Synthetic oligonucleotide
  Sense strand starting at position 1781 of SEQ ID NO: 917480
cgccauuaccuacaugaaa

SEQ ID NO: 1236997 - RNA, 19 nt, Artificial Sequence
  Description of Artificial Sequence: Synthetic oligonucleotide
  Antisense strand to SEQ ID NO: 1236996
uuucauguagguaauggcg

SEQ ID NO: 1236998 - RNA, 19 nt, Artificial Sequence
  Description of Artificial Sequence: Synthetic oligonucleotide
  Sense strand starting at position 1895 of SEQ ID NO: 917480
ugccuaguaccguaaagag

SEQ ID NO: 1236999 - RNA, 19 nt, Artificial Sequence
  Description of Artificial Sequence: Synthetic oligonucleotide
  Antisense strand to SEQ ID NO: 1236998
cucuuuacgguacuaggca

SEQ ID NO: 1237000 - RNA, 19 nt, Artificial Sequence
  Description of Artificial Sequence: Synthetic oligonucleotide
  Sense strand starting at position 1907 of SEQ ID NO: 917480
uaaagaguauggucugaaa

SEQ ID NO: 1237001 - RNA, 19 nt, Artificial Sequence
  Description of Artificial Sequence: Synthetic oligonucleotide
  Antisense strand to SEQ ID NO: 1237000
uuucagaccauacucuuua

SEQ ID NO: 1237002 - RNA, 19 nt, Artificial Sequence
  Description of Artificial Sequence: Synthetic oligonucleotide
  Sense strand starting at position 2178 of SEQ ID NO: 917480
ggaucagauuuaugaauga

SEQ ID NO: 1237003 - RNA, 19 nt, Artificial Sequence
  Description of Artificial Sequence: Synthetic oligonucleotide
  Antisense strand to SEQ ID NO: 1237002
ucauucauaaaucugaucc

SEQ ID NO: 1237004 - RNA, 19 nt, Artificial Sequence
  Description of Artificial Sequence: Synthetic oligonucleotide
  Sense strand starting at position 2221 of SEQ ID NO: 917480
cagccaucucuagagguua

SEQ ID NO: 1237005 - RNA, 19 nt, Artificial Sequence
  Description of Artificial Sequence: Synthetic oligonucleotide
  Antisense strand to SEQ ID NO: 1237004
uaaccucuagagauggcug

SEQ ID NO: 1237006 - RNA, 19 nt, Artificial Sequence
  Description of Artificial Sequence: Synthetic oligonucleotide
  Sense strand starting at position 2263 of SEQ ID NO: 917480
ggaguuguugcagauggag

SEQ ID NO: 1237007 - RNA, 19 nt, Artificial Sequence
  Description of Artificial Sequence: Synthetic oligonucleotide
  Antisense strand to SEQ ID NO: 1237006
cuccaucugcaacaacucc

SEQ ID NO: 1237008 - RNA, 19 nt, Artificial Sequence
  Description of Artificial Sequence: Synthetic oligonucleotide
  Sense strand starting at position 2517 of SEQ ID NO: 917480
cucgaacuccugggaucua

SEQ ID NO: 1237009 - RNA, 19 nt, Artificial Sequence
  Description of Artificial Sequence: Synthetic oligonucleotide
  Antisense strand to SEQ ID NO: 1237008
uagaucccaggaguucgag

SEQ ID NO: 1237010 - RNA, 19 nt, Artificial Sequence
  Description of Artificial Sequence: Synthetic oligonucleotide
  Sense strand starting at position 2956 of SEQ ID NO: 917480
gcuugcaaucaugauaaag

SEQ ID NO: 1237011 - RNA, 19 nt, Artificial Sequence
  Description of Artificial Sequence: Synthetic oligonucleotide
  Antisense strand to SEQ ID NO: 1237010
cuuuaucaugauugcaagc

SEQ ID NO: 1237012 - RNA, 19 nt, Artificial Sequence
  Description of Artificial Sequence: Synthetic oligonucleotide
  Sense strand starting at position 2973 of SEQ ID NO: 917480
agauauucccuagguccua

SEQ ID NO: 1237013 - RNA, 19 nt, Artificial Sequence
  Description of Artificial Sequence: Synthetic oligonucleotide
  Antisense strand to SEQ ID NO: 1237012
uaggaccuagggaauaucu

SEQ ID NO: 1237014 - RNA, 19 nt, Artificial Sequence
  Description of Artificial Sequence: Synthetic oligonucleotide
  Sense strand starting at position 3323 of SEQ ID NO: 917480
aucgcauguccuuagagac

SEQ ID NO: 1237015 - RNA, 19 nt, Artificial Sequence
  Description of Artificial Sequence: Synthetic oligonucleotide
  Antisense strand to SEQ ID NO: 1237014
gucucuaaggacaugcgau

SEQ ID NO: 1237016 - RNA, 19 nt, Artificial Sequence
  Description of Artificial Sequence: Synthetic oligonucleotide
  Sense strand starting at position 3333 of SEQ ID NO: 917480
cuuagagacuuggcacaga

SEQ ID NO: 1237017 - RNA, 19 nt, Artificial Sequence
  Description of Artificial Sequence: Synthetic oligonucleotide
  Antisense strand to SEQ ID NO: 1237016
ucugugccaagucucuaag

SEQ ID NO: 1237018 - RNA, 19 nt, Artificial Sequence
  Description of Artificial Sequence: Synthetic oligonucleotide
  Sense strand starting at position 3399 of SEQ ID NO: 917480
ccaccauaauguuuggcaa

SEQ ID NO: 1237019 - RNA, 19 nt, Artificial Sequence
  Description of Artificial Sequence: Synthetic oligonucleotide
  Antisense strand to SEQ ID NO: 1237018
uugccaaacauuauggugg

SEQ ID NO: 1237020 - RNA, 19 nt, Artificial Sequence
  Description of Artificial Sequence: Synthetic oligonucleotide
  Sense strand starting at position 3756 of SEQ ID NO: 917480
cccacuguccuuuaugauc

SEQ ID NO: 1237021 - RNA, 19 nt, Artificial Sequence
  Description of Artificial Sequence: Synthetic oligonucleotide
  Antisense strand to SEQ ID NO: 1237020
gaucauaaaggacaguggg

SEQ ID NO: 1237022 - RNA, 19 nt, Artificial Sequence
  Description of Artificial Sequence: Synthetic oligonucleotide
  Sense strand starting at position 3804 of SEQ ID NO: 917480
augaaaucuggcugacucu

SEQ ID NO: 1237023 - RNA, 19 nt, Artificial Sequence
  Description of Artificial Sequence: Synthetic oligonucleotide
  Antisense strand to SEQ ID NO: 1237022
agagucagccagauuucau

SEQ ID NO: 1237024 - RNA, 19 nt, Artificial Sequence
  Description of Artificial Sequence: Synthetic oligonucleotide
  Sense strand starting at position 3805 of SEQ ID NO: 917480
ugaaaucuggcugacucua

SEQ ID NO: 1237025 - RNA, 19 nt, Artificial Sequence
  Description of Artificial Sequence: Synthetic oligonucleotide
  Antisense strand to SEQ ID NO: 1237024
uagagucagccagauuuca

SEQ ID NO: 1237026 - RNA, 19 nt, Artificial Sequence
  Description of Artificial Sequence: Synthetic oligonucleotide
  Sense strand starting at position 3847 of SEQ ID NO: 917480
gauuuagaauucgacuaag

SEQ ID NO: 1237027 - RNA, 19 nt, Artificial Sequence
  Description of Artificial Sequence: Synthetic oligonucleotide
  Antisense strand to SEQ ID NO: 1237026
cuuagucgaauucuaaauc

SEQ ID NO: 1237028 - RNA, 19 nt, Artificial Sequence
  Description of Artificial Sequence: Synthetic oligonucleotide
  Sense strand starting at position 3880 of SEQ ID NO: 917481
ugguuacucuacuugaacu

SEQ ID NO: 1237029 - RNA, 19 nt, Artificial Sequence
  Description of Artificial Sequence: Synthetic oligonucleotide
  Antisense strand to SEQ ID NO: 1237028
aguucaaguagaguaacca

SEQ ID NO: 1237030 - RNA, 19 nt, Artificial Sequence
  Description of Artificial Sequence: Synthetic oligonucleotide
  Sense strand starting at position 106 of SEQ ID NO: 917481
ugggaaaccugggcaaagu

SEQ ID NO: 1237031 - RNA, 19 nt, Artificial Sequence
  Description of Artificial Sequence: Synthetic oligonucleotide
  Antisense strand to SEQ ID NO: 1237030
acuuugcccagguuuccca

SEQ ID NO: 1237032 - RNA, 19 nt, Artificial Sequence
  Description of Artificial Sequence: Synthetic oligonucleotide
  Sense strand starting at position 128 of SEQ ID NO: 917481
ccaguaagauccuugcaga

SEQ ID NO: 1237033 - RNA, 19 nt, Artificial Sequence
  Description of Artificial Sequence: Synthetic oligonucleotide
  Antisense strand to SEQ ID NO: 1237032
ucugcaaggaucuuacugg

SEQ ID NO: 1237034 - RNA, 19 nt, Artificial Sequence
  Description of Artificial Sequence: Synthetic oligonucleotide
  Sense strand starting at position 129 of SEQ ID NO: 917481
caguaagauccuugcagaa

SEQ ID NO: 1237035 - RNA, 19 nt, Artificial Sequence
  Description of Artificial Sequence: Synthetic oligonucleotide
  Antisense strand to SEQ ID NO: 1237034
uucugcaaggaucuuacug

SEQ ID NO: 1237036 - RNA, 19 nt, Artificial Sequence
  Description of Artificial Sequence: Synthetic oligonucleotide
  Sense strand starting at position 163 of SEQ ID NO: 917481
gggcaagugugagcacuua

SEQ ID NO: 1237037 - RNA, 19 nt, Artificial Sequence
  Description of Artificial Sequence: Synthetic oligonucleotide
  Antisense strand to SEQ ID NO: 1237036
uaagugcucacacuugccc

SEQ ID NO: 1237038 - RNA, 19 nt, Artificial Sequence
  Description of Artificial Sequence: Synthetic oligonucleotide
  Sense strand starting at position 206 of SEQ ID NO: 917481
gucacugagaccugguaac

SEQ ID NO: 1237039 - RNA, 19 nt, Artificial Sequence
  Description of Artificial Sequence: Synthetic oligonucleotide
  Antisense strand to SEQ ID NO: 1237038
guuaccaggucucagugac

SEQ ID NO: 1237040 - RNA, 19 nt, Artificial Sequence
  Description of Artificial Sequence: Synthetic oligonucleotide
  Sense strand starting at position 255 of SEQ ID NO: 917481
ugaacuggcuucucucaga

SEQ ID NO: 1237041 - RNA, 19 nt, Artificial Sequence
  Description of Artificial Sequence: Synthetic oligonucleotide
  Antisense strand to SEQ ID NO: 1237040
ucugagagaagccaguuca

SEQ ID NO: 1237042 - RNA, 19 nt, Artificial Sequence
  Description of Artificial Sequence: Synthetic oligonucleotide
  Sense strand starting at position 258 of SEQ ID NO: 917481
acuggcuucucucagauuu

SEQ ID NO: 1237043 - RNA, 19 nt, Artificial Sequence
  Description of Artificial Sequence: Synthetic oligonucleotide
  Antisense strand to SEQ ID NO: 1237042
aaaucugagagaagccagu

SEQ ID NO: 1237044 - RNA, 19 nt, Artificial Sequence
  Description of Artificial Sequence: Synthetic oligonucleotide
  Sense strand starting at position 277 of SEQ ID NO: 917481
guuugcuuccacgacaaua

SEQ ID NO: 1237045 - RNA, 19 nt, Artificial Sequence
  Description of Artificial Sequence: Synthetic oligonucleotide
  Antisense strand to SEQ ID NO: 1237044
uauugucguggaagcaaac

SEQ ID NO: 1237046 - RNA, 19 nt, Artificial Sequence
  Description of Artificial Sequence: Synthetic oligonucleotide
  Sense strand starting at position 377 of SEQ ID NO: 917481
aacauagaauggugagaca

SEQ ID NO: 1237047 - RNA, 19 nt, Artificial Sequence
  Description of Artificial Sequence: Synthetic oligonucleotide
  Antisense strand to SEQ ID NO: 1237046
ugucucaccauucuauguu

SEQ ID NO: 1237048 - RNA, 19 nt, Artificial Sequence
  Description of Artificial Sequence: Synthetic oligonucleotide
  Sense strand starting at position 380 of SEQ ID NO: 917481
auagaauggugagacaauc

SEQ ID NO: 1237049 - RNA, 19 nt, Artificial Sequence
  Description of Artificial Sequence: Synthetic oligonucleotide
  Antisense strand to SEQ ID NO: 1237048
gauugucucaccauucuau

SEQ ID NO: 1237050 - RNA, 19 nt, Artificial Sequence
  Description of Artificial Sequence: Synthetic oligonucleotide
  Sense strand starting at position 448 of SEQ ID NO: 917481
ugucaaucauaauauggaa

SEQ ID NO: 1237051 - RNA, 19 nt, Artificial Sequence
  Description of Artificial Sequence: Synthetic oligonucleotide
  Antisense strand to SEQ ID NO: 1237050
uuccauauuaugauugaca

SEQ ID NO: 1237052 - RNA, 19 nt, Artificial Sequence
  Description of Artificial Sequence: Synthetic oligonucleotide
  Sense strand starting at position 463 of SEQ ID NO: 917481
ggaauaugaucauaacauu

SEQ ID NO: 1237053 - RNA, 19 nt, Artificial Sequence
  Description of Artificial Sequence: Synthetic oligonucleotide
  Antisense strand to SEQ ID NO: 1237052
aauguuaugaucauauucc

SEQ ID NO: 1237054 - RNA, 19 nt, Artificial Sequence
  Description of Artificial Sequence: Synthetic oligonucleotide
  Sense strand starting at position 483 of SEQ ID NO: 917481
gucauaauaugucucuuua

SEQ ID NO: 1237055 - RNA, 19 nt, Artificial Sequence
  Description of Artificial Sequence: Synthetic oligonucleotide
  Antisense strand to SEQ ID NO: 1237054
uaaagagacauauuaugac

SEQ ID NO: 1237056 - RNA, 19 nt, Artificial Sequence
  Description of Artificial Sequence: Synthetic oligonucleotide
  Sense strand starting at position 529 of SEQ ID NO: 917481
ucaacauguuguucucaau

SEQ ID NO: 1237057 - RNA, 19 nt, Artificial Sequence
  Description of Artificial Sequence: Synthetic oligonucleotide
  Antisense strand to SEQ ID NO: 1237056
auugagaacaacauguuga

SEQ ID NO: 1237058 - RNA, 19 nt, Artificial Sequence
  Description of Artificial Sequence: Synthetic oligonucleotide
  Sense strand starting at position 540 of SEQ ID NO: 917481
uucucaauaccucgacuga

SEQ ID NO: 1237059 - RNA, 19 nt, Artificial Sequence
  Description of Artificial Sequence: Synthetic oligonucleotide
  Antisense strand to SEQ ID NO: 1237058
ucagucgagguauugagaa

SEQ ID NO: 1237060 - RNA, 19 nt, Artificial Sequence
  Description of Artificial Sequence: Synthetic oligonucleotide
  Sense strand starting at position 551 of SEQ ID NO: 917481
ucgacugacuucuuacaau

SEQ ID NO: 1237061 - RNA, 19 nt, Artificial Sequence
  Description of Artificial Sequence: Synthetic oligonucleotide
  Antisense strand to SEQ ID NO: 1237060
auuguaagaagucagucga

SEQ ID NO: 1237062 - RNA, 19 nt, Artificial Sequence
  Description of Artificial Sequence: Synthetic oligonucleotide
  Sense strand starting at position 562 of SEQ ID NO: 917481
cuuacaauguuugcauuga

SEQ ID NO: 1237063 - RNA, 19 nt, Artificial Sequence
  Description of Artificial Sequence: Synthetic oligonucleotide
  Antisense strand to SEQ ID NO: 1237062
ucaaugcaaacauuguaag

SEQ ID NO: 1237064 - RNA, 19 nt, Artificial Sequence
  Description of Artificial Sequence: Synthetic oligonucleotide
  Sense strand starting at position 566 of SEQ ID NO: 917481
caauguuugcauugagaau

SEQ ID NO: 1237065 - RNA, 19 nt, Artificial Sequence
  Description of Artificial Sequence: Synthetic oligonucleotide
  Antisense strand to SEQ ID NO: 1237064
auucucaaugcaaacauug

SEQ ID NO: 1237066 - RNA, 19 nt, Artificial Sequence
  Description of Artificial Sequence: Synthetic oligonucleotide
  Sense strand starting at position 575 of SEQ ID NO: 917481
cauugagaauuguucuaag

SEQ ID NO: 1237067 - RNA, 19 nt, Artificial Sequence
  Description of Artificial Sequence: Synthetic oligonucleotide
  Antisense strand to SEQ ID NO: 1237066
cuuagaacaauucucaaug

SEQ ID NO: 1237068 - RNA, 19 nt, Artificial Sequence
  Description of Artificial Sequence: Synthetic oligonucleotide
  Sense strand starting at position 644 of SEQ ID NO: 917481
agcauucuuguauguaaac

SEQ ID NO: 1237069 - RNA, 19 nt, Artificial Sequence
  Description of Artificial Sequence: Synthetic oligonucleotide
  Antisense strand to SEQ ID NO: 1237068
guuuacauacaagaaugcu

SEQ ID NO: 1237070 - RNA, 19 nt, Artificial Sequence
  Description of Artificial Sequence: Synthetic oligonucleotide
  Sense strand starting at position 645 of SEQ ID NO: 917481
gcauucuuguauguaaacu

SEQ ID NO: 1237071 - RNA, 19 nt, Artificial Sequence
  Description of Artificial Sequence: Synthetic oligonucleotide
  Antisense strand to SEQ ID NO: 1237070
aguuuacauacaagaaugc

SEQ ID NO: 1237072 - RNA, 19 nt, Artificial Sequence
  Description of Artificial Sequence: Synthetic oligonucleotide
  Sense strand starting at position 655 of SEQ ID NO: 917481
auguaaacuuuagagacaa

SEQ ID NO: 1237073 - RNA, 19 nt, Artificial Sequence
  Description of Artificial Sequence: Synthetic oligonucleotide
  Antisense strand to SEQ ID NO: 1237072
uugucucuaaaguuuacau

SEQ ID NO: 1237074 - RNA, 19 nt, Artificial Sequence
  Description of Artificial Sequence: Synthetic oligonucleotide
  Sense strand starting at position 677 of SEQ ID NO: 917481
cuaaaugcaucagcugaga

SEQ ID NO: 1237075 - RNA, 19 nt, Artificial Sequence
  Description of Artificial Sequence: Synthetic oligonucleotide
  Antisense strand to SEQ ID NO: 1237074
ucucagcugaugcauuuag

SEQ ID NO: 1237076 - RNA, 19 nt, Artificial Sequence
  Description of Artificial Sequence: Synthetic oligonucleotide
  Sense strand starting at position 707 of SEQ ID NO: 917481
aguugugaauauucucaau

SEQ ID NO: 1237077 - RNA, 19 nt, Artificial Sequence
  Description of Artificial Sequence: Synthetic oligonucleotide
  Antisense strand to SEQ ID NO: 1237076
auugagaauauucacaacu

SEQ ID NO: 1237078 - RNA, 19 nt, Artificial Sequence
  Description of Artificial Sequence: Synthetic oligonucleotide
  Sense strand starting at position 845 of SEQ ID NO: 917481
ggaccaaugauucgugaaa

SEQ ID NO: 1237079 - RNA, 19 nt, Artificial Sequence
  Description of Artificial Sequence: Synthetic oligonucleotide
  Antisense strand to SEQ ID NO: 1237078
uuucacgaaucauuggucc

SEQ ID NO: 1237080 - RNA, 19 nt, Artificial Sequence
  Description of Artificial Sequence: Synthetic oligonucleotide
  Sense strand starting at position 846 of SEQ ID NO: 917481
gaccaaugauucgugaaag

SEQ ID NO: 1237081 - RNA, 19 nt, Artificial Sequence
  Description of Artificial Sequence: Synthetic oligonucleotide
  Antisense strand to SEQ ID NO: 1237080
cuuucacgaaucauugguc

SEQ ID NO: 1237082 - RNA, 19 nt, Artificial Sequence
  Description of Artificial Sequence: Synthetic oligonucleotide
  Sense strand starting at position 939 of SEQ ID NO: 917481
uaguauuuauugggaggaa

SEQ ID NO: 1237083 - RNA, 19 nt, Artificial Sequence
  Description of Artificial Sequence: Synthetic oligonucleotide
  Antisense strand to SEQ ID NO: 1237082
uuccucccaauaaauacua

SEQ ID NO: 1237084 - RNA, 19 nt, Artificial Sequence
  Description of Artificial Sequence: Synthetic oligonucleotide
  Sense strand starting at position 940 of SEQ ID NO: 917481
aguauuuauugggaggaaa

SEQ ID NO: 1237085 - RNA, 19 nt, Artificial Sequence
  Description of Artificial Sequence: Synthetic oligonucleotide
  Antisense strand to SEQ ID NO: 1237084
uuuccucccaauaaauacu

SEQ ID NO: 1237086 - RNA, 19 nt, Artificial Sequence
  Description of Artificial Sequence: Synthetic oligonucleotide
  Sense strand starting at position 954 of SEQ ID NO: 917481
ggaaaucucuaguucuaaa

SEQ ID NO: 1237087 - RNA, 19 nt, Artificial Sequence
  Description of Artificial Sequence: Synthetic oligonucleotide
  Antisense strand to SEQ ID NO: 1237086
uuuagaacuagagauuucc

SEQ ID NO: 1237088 - RNA, 19 nt, Artificial Sequence
  Description of Artificial Sequence: Synthetic oligonucleotide
  Sense strand starting at position 1444 of SEQ ID NO: 917481
ggcagaguccggaggcauu

SEQ ID NO: 1237089 - RNA, 19 nt, Artificial Sequence
  Description of Artificial Sequence: Synthetic oligonucleotide
  Antisense strand to SEQ ID NO: 1237088
aaugccuccggacucugcc

SEQ ID NO: 1237090 - RNA, 19 nt, Artificial Sequence
  Description of Artificial Sequence: Synthetic oligonucleotide
  Sense strand starting at position 2049 of SEQ ID NO: 917481
gcaugugggcuguaaacuu

SEQ ID NO: 1237091 - RNA, 19 nt, Artificial Sequence
  Description of Artificial Sequence: Synthetic oligonucleotide
  Antisense strand to SEQ ID NO: 1237090
aaguuuacagcccacaugc

SEQ ID NO: 1237092 - RNA, 19 nt, Artificial Sequence
  Description of Artificial Sequence: Synthetic oligonucleotide
  Sense strand starting at position 2072 of SEQ ID NO: 917481
ucccaaaugucacugaaga

SEQ ID NO: 1237093 - RNA, 19 nt, Artificial Sequence
  Description of Artificial Sequence: Synthetic oligonucleotide
  Antisense strand to SEQ ID NO: 1237092
ucuucagugacauuuggga

SEQ ID NO: 1237094 - RNA, 19 nt, Artificial Sequence
  Description of Artificial Sequence: Synthetic oligonucleotide
  Sense strand starting at position 2073 of SEQ ID NO: 917481
cccaaaugucacugaagag

SEQ ID NO: 1237095 - RNA, 19 nt, Artificial Sequence
  Description of Artificial Sequence: Synthetic oligonucleotide
  Antisense strand to SEQ ID NO: 1237094
cucuucagugacauuuggg

SEQ ID NO: 1237096 - RNA, 19 nt, Artificial Sequence
  Description of Artificial Sequence: Synthetic oligonucleotide
  Sense strand starting at position 2142 of SEQ ID NO: 917481
gggucagaauugguauuaa

SEQ ID NO: 1237097 - RNA, 19 nt, Artificial Sequence
  Description of Artificial Sequence: Synthetic oligonucleotide
  Antisense strand to SEQ ID NO: 1237096
uuaauaccaauucugaccc

SEQ ID NO: 1237098 - RNA, 19 nt, Artificial Sequence
  Description of Artificial Sequence: Synthetic oligonucleotide
  Sense strand starting at position 2353 of SEQ ID NO: 917481
ccgcacuauguuuaucaca

SEQ ID NO: 1237099 - RNA, 19 nt, Artificial Sequence
  Description of Artificial Sequence: Synthetic oligonucleotide
  Antisense strand to SEQ ID NO: 1237098
ugugauaaacauagugcgg

SEQ ID NO: 1237100 - RNA, 19 nt, Artificial Sequence
  Description of Artificial Sequence: Synthetic oligonucleotide
  Sense strand starting at position 2355 of SEQ ID NO: 917481
gcacuauguuuaucacagu

SEQ ID NO: 1237101 - RNA, 19 nt, Artificial Sequence
  Description of Artificial Sequence: Synthetic oligonucleotide
  Antisense strand to SEQ ID NO: 1237100
acugugauaaacauagugc

SEQ ID NO: 1237102 - RNA, 19 nt, Artificial Sequence
  Description of Artificial Sequence: Synthetic oligonucleotide
  Sense strand starting at position 2608 of SEQ ID NO: 917481
acggguacucauggacaua

SEQ ID NO: 1237103 - RNA, 19 nt, Artificial Sequence
  Description of Artificial Sequence: Synthetic oligonucleotide
  Antisense strand to SEQ ID NO: 1237102
uauguccaugaguacccgu

SEQ ID NO: 1237104 - RNA, 19 nt, Artificial Sequence
  Description of Artificial Sequence: Synthetic oligonucleotide
  Sense strand starting at position 2704 of SEQ ID NO: 917481
uggguacuguguccggaau

SEQ ID NO: 1237105 - RNA, 19 nt, Artificial Sequence
  Description of Artificial Sequence: Synthetic oligonucleotide
  Antisense strand to SEQ ID NO: 1237104
auuccggacacaguaccca

SEQ ID NO: 1237106 - RNA, 19 nt, Artificial Sequence
  Description of Artificial Sequence: Synthetic oligonucleotide
  Sense strand starting at position 2705 of SEQ ID NO: 917481
ggguacuguguccggaauu

SEQ ID NO: 1237107 - RNA, 19 nt, Artificial Sequence
  Description of Artificial Sequence: Synthetic oligonucleotide
  Antisense strand to SEQ ID NO: 1237106
aauuccggacacaguaccc

SEQ ID NO: 1237108 - RNA, 19 nt, Artificial Sequence
  Description of Artificial Sequence: Synthetic oligonucleotide
  Sense strand starting at position 2894 of SEQ ID NO: 917481
gcggaccuucgccaugagu

SEQ ID NO: 1237109 - RNA, 19 nt, Artificial Sequence
  Description of Artificial Sequence: Synthetic oligonucleotide
  Antisense strand to SEQ ID NO: 1237108
acucauggcgaagguccgc

SEQ ID NO: 1237110 - RNA, 19 nt, Artificial Sequence
  Description of Artificial Sequence: Synthetic oligonucleotide
  Sense strand starting at position 2894 of SEQ ID NO: 917482
gcggaccuucgccaugagu

SEQ ID NO: 1237111 - RNA, 19 nt, Artificial Sequence
  Description of Artificial Sequence: Synthetic oligonucleotide
  Antisense strand to SEQ ID NO: 1237110
acucauggcgaagguccgc

SEQ ID NO: 1237112 - RNA, 19 nt, Artificial Sequence
  Description of Artificial Sequence: Synthetic oligonucleotide
  Sense strand starting at position 27 of SEQ ID NO: 917482
acaucauccuguguaacag

SEQ ID NO: 1237113 - RNA, 19 nt, Artificial Sequence
  Description of Artificial Sequence: Synthetic oligonucleotide
  Antisense strand to SEQ ID NO: 1237112
cuguuacacaggaugaugu

SEQ ID NO: 1237114 - RNA, 19 nt, Artificial Sequence
  Description of Artificial Sequence: Synthetic oligonucleotide
  Sense strand starting at position 181 of SEQ ID NO: 917482
gccuuaaagguugguuacu

SEQ ID NO: 1237115 - RNA, 19 nt, Artificial Sequence
  Description of Artificial Sequence: Synthetic oligonucleotide
  Antisense strand to SEQ ID NO: 1237114
aguaaccaaccuuuaaggc

SEQ ID NO: 1237116 - RNA, 19 nt, Artificial Sequence
  Description of Artificial Sequence: Synthetic oligonucleotide
  Sense strand starting at position 182 of SEQ ID NO: 917482
ccuuaaagguugguuacua

SEQ ID NO: 1237117 - RNA, 19 nt, Artificial Sequence
  Description of Artificial Sequence: Synthetic oligonucleotide
  Antisense strand to SEQ ID NO: 1237116
uaguaaccaaccuuuaagg

SEQ ID NO: 1237118 - RNA, 19 nt, Artificial Sequence
  Description of Artificial Sequence: Synthetic oligonucleotide
  Sense strand starting at position 183 of SEQ ID NO: 917482
cuuaaagguugguuacuaa

SEQ ID NO: 1237119 - RNA, 19 nt, Artificial Sequence
  Description of Artificial Sequence: Synthetic oligonucleotide
  Antisense strand to SEQ ID NO: 1237118
uuaguaaccaaccuuuaag

SEQ ID NO: 1237120 - RNA, 19 nt, Artificial Sequence
  Description of Artificial Sequence: Synthetic oligonucleotide
  Sense strand starting at position 317 of SEQ ID NO: 917482
guaugaacuuaaguacuga

SEQ ID NO: 1237121 - RNA, 19 nt, Artificial Sequence
  Description of Artificial Sequence: Synthetic oligonucleotide
  Antisense strand to SEQ ID NO: 1237120
ucaguacuuaaguucauac

SEQ ID NO: 1237122 - RNA, 19 nt, Artificial Sequence
  Description of Artificial Sequence: Synthetic oligonucleotide
  Sense strand starting at position 345 of SEQ ID NO: 917482
ugcagacuugaguaaaccu

SEQ ID NO: 1237123 - RNA, 19 nt, Artificial Sequence
  Description of Artificial Sequence: Synthetic oligonucleotide
  Antisense strand to SEQ ID NO: 1237122
agguuuacucaagucugca

SEQ ID NO: 1237124 - RNA, 19 nt, Artificial Sequence
  Description of Artificial Sequence: Synthetic oligonucleotide
  Sense strand starting at position 400 of SEQ ID NO: 917482
ugcacagauguauaaacau

SEQ ID NO: 1237125 - RNA, 19 nt, Artificial Sequence
  Description of Artificial Sequence: Synthetic oligonucleotide
  Antisense strand to SEQ ID NO: 1237124
auguuuauacaucugugca

SEQ ID NO: 1237126 - RNA, 19 nt, Artificial Sequence
  Description of Artificial Sequence: Synthetic oligonucleotide
  Sense strand starting at position 586 of SEQ ID NO: 917482
auuguaaacguuuguugaa

SEQ ID NO: 1237127 - RNA, 19 nt, Artificial Sequence
  Description of Artificial Sequence: Synthetic oligonucleotide
  Antisense strand to SEQ ID NO: 1237126
uucaacaaacguuuacaau

SEQ ID NO: 1237128 - RNA, 19 nt, Artificial Sequence
  Description of Artificial Sequence: Synthetic oligonucleotide
  Sense strand starting at position 602 of SEQ ID NO: 917482
gaacgauuauuugaauugu

SEQ ID NO: 1237129 - RNA, 19 nt, Artificial Sequence
  Description of Artificial Sequence: Synthetic oligonucleotide
  Antisense strand to SEQ ID NO: 1237128
acaauucaaauaaucguuc

SEQ ID NO: 1237130 - RNA, 19 nt, Artificial Sequence
  Description of Artificial Sequence: Synthetic oligonucleotide
  Sense strand starting at position 685 of SEQ ID NO: 917482
cgaaauaauuguguaugua

SEQ ID NO: 1237131 - RNA, 19 nt, Artificial Sequence
  Description of Artificial Sequence: Synthetic oligonucleotide
  Antisense strand to SEQ ID NO: 1237130
uacauacacaauuauuucg

SEQ ID NO: 1237132 - RNA, 19 nt, Artificial Sequence
  Description of Artificial Sequence: Synthetic oligonucleotide
  Sense strand starting at position 780 of SEQ ID NO: 917482
aaaccuugagugugaaugu

SEQ ID NO: 1237133 - RNA, 19 nt, Artificial Sequence
  Description of Artificial Sequence: Synthetic oligonucleotide
  Antisense strand to SEQ ID NO: 1237132
acauucacacucaagguuu

SEQ ID NO: 1237134 - RNA, 19 nt, Artificial Sequence
  Description of Artificial Sequence: Synthetic oligonucleotide
  Sense strand starting at position 797 of SEQ ID NO: 917482
guuguaagagaucaaaguu

SEQ ID NO: 1237135 - RNA, 19 nt, Artificial Sequence
  Description of Artificial Sequence: Synthetic oligonucleotide
  Antisense strand to SEQ ID NO: 1237134
aacuuugaucucuuacaac

SEQ ID NO: 1237136 - RNA, 19 nt, Artificial Sequence
  Description of Artificial Sequence: Synthetic oligonucleotide
  Sense strand starting at position 1009 of SEQ ID NO: 917482
gguguuauacuccacaaau

SEQ ID NO: 1237137 - RNA, 19 nt, Artificial Sequence
  Description of Artificial Sequence: Synthetic oligonucleotide
  Antisense strand to SEQ ID NO: 1237136
auuuguggaguauaacacc

SEQ ID NO: 1237138 - RNA, 19 nt, Artificial Sequence
  Description of Artificial Sequence: Synthetic oligonucleotide
  Sense strand starting at position 1041 of SEQ ID NO: 917482
cuaauugugaagcgagaua

SEQ ID NO: 1237139 - RNA, 19 nt, Artificial Sequence
  Description of Artificial Sequence: Synthetic oligonucleotide
  Antisense strand to SEQ ID NO: 1237138
uaucucgcuucacaauuag

SEQ ID NO: 1237140 - RNA, 19 nt, Artificial Sequence
  Description of Artificial Sequence: Synthetic oligonucleotide
  Sense strand starting at position 1046 of SEQ ID NO: 917482
ugugaagcgagauaucaaa

SEQ ID NO: 1237141 - RNA, 19 nt, Artificial Sequence
  Description of Artificial Sequence: Synthetic oligonucleotide
  Antisense strand to SEQ ID NO: 1237140
uuugauaucucgcuucaca

SEQ ID NO: 1237142 - RNA, 19 nt, Artificial Sequence
  Description of Artificial Sequence: Synthetic oligonucleotide
  Sense strand starting at position 1094 of SEQ ID NO: 917482
acuagaagguuccaggaaa

SEQ ID NO: 1237143 - RNA, 19 nt, Artificial Sequence
  Description of Artificial Sequence: Synthetic oligonucleotide
  Antisense strand to SEQ ID NO: 1237142
uuuccuggaaccuucuagu

SEQ ID NO: 1237144 - RNA, 19 nt, Artificial Sequence
  Description of Artificial Sequence: Synthetic oligonucleotide
  Sense strand starting at position 1155 of SEQ ID NO: 917482
acuguuaacuaggcugagu

SEQ ID NO: 1237145 - RNA, 19 nt, Artificial Sequence
  Description of Artificial Sequence: Synthetic oligonucleotide
  Antisense strand to SEQ ID NO: 1237144
acucagccuaguuaacagu

SEQ ID NO: 1237146 - RNA, 19 nt, Artificial Sequence
  Description of Artificial Sequence: Synthetic oligonucleotide
  Sense strand starting at position 1393 of SEQ ID NO: 917482
cugcguccuccagaaacua

SEQ ID NO: 1237147 - RNA, 19 nt, Artificial Sequence
  Description of Artificial Sequence: Synthetic oligonucleotide
  Antisense strand to SEQ ID NO: 1237146
uaguuucuggaggacgcag

SEQ ID NO: 1237148 - RNA, 19 nt, Artificial Sequence
  Description of Artificial Sequence: Synthetic oligonucleotide
  Sense strand starting at position 2005 of SEQ ID NO: 917482
gaggaguuuccgggaggga

SEQ ID NO: 1237149 - RNA, 19 nt, Artificial Sequence
  Description of Artificial Sequence: Synthetic oligonucleotide
  Antisense strand to SEQ ID NO: 1237148
ucccucccggaaacuccuc

SEQ ID NO: 1237150 - RNA, 19 nt, Artificial Sequence
  Description of Artificial Sequence: Synthetic oligonucleotide
  Sense strand starting at position 2233 of SEQ ID NO: 917482
acaguuucuuugucacacu

SEQ ID NO: 1237151 - RNA, 19 nt, Artificial Sequence
  Description of Artificial Sequence: Synthetic oligonucleotide
  Antisense strand to SEQ ID NO: 1237150
agugugacaaagaaacugu

SEQ ID NO: 1237152 - RNA, 19 nt, Artificial Sequence
  Description of Artificial Sequence: Synthetic oligonucleotide
  Sense strand starting at position 2473 of SEQ ID NO: 917482
agugauugugugcacacau

SEQ ID NO: 1237153 - RNA, 19 nt, Artificial Sequence
  Description of Artificial Sequence: Synthetic oligonucleotide
  Antisense strand to SEQ ID NO: 1237152
augugugcacacaaucacu

SEQ ID NO: 1237154 - RNA, 19 nt, Artificial Sequence
  Description of Artificial Sequence: Synthetic oligonucleotide
  Sense strand starting at position 2543 of SEQ ID NO: 917482
gaguguagcguugacauuu

SEQ ID NO: 1237155 - RNA, 19 nt, Artificial Sequence
  Description of Artificial Sequence: Synthetic oligonucleotide
  Antisense strand to SEQ ID NO: 1237154
aaaugucaacgcuacacuc

SEQ ID NO: 1237156 - RNA, 19 nt, Artificial Sequence
  Description of Artificial Sequence: Synthetic oligonucleotide
  Sense strand starting at position 2591 of SEQ ID NO: 917482
cugagagcucagugaagaa

SEQ ID NO: 1237157 - RNA, 19 nt, Artificial Sequence
  Description of Artificial Sequence: Synthetic oligonucleotide
  Antisense strand to SEQ ID NO: 1237156
uucuucacugagcucucag

SEQ ID NO: 1237158 - RNA, 19 nt, Artificial Sequence
  Description of Artificial Sequence: Synthetic oligonucleotide
  Sense strand starting at position 2619 of SEQ ID NO: 917482
ggcgaaucggauuaauaug

SEQ ID NO: 1237159 - RNA, 19 nt, Artificial Sequence
  Description of Artificial Sequence: Synthetic oligonucleotide
  Antisense strand to SEQ ID NO: 1237158
cauauuaauccgauucgcc

SEQ ID NO: 1237160 - RNA, 19 nt, Artificial Sequence
  Description of Artificial Sequence: Synthetic oligonucleotide
  Sense strand starting at position 2624 of SEQ ID NO: 917482
aucggauuaauaugguaug

SEQ ID NO: 1237161 - RNA, 19 nt, Artificial Sequence
  Description of Artificial Sequence: Synthetic oligonucleotide
  Antisense strand to SEQ ID NO: 1237160
cauaccauauuaauccgau

SEQ ID NO: 1237162 - RNA, 19 nt, Artificial Sequence
  Description of Artificial Sequence: Synthetic oligonucleotide
  Sense strand starting at position 2635 of SEQ ID NO: 917482
augguaugaucagccuuua

SEQ ID NO: 1237163 - RNA, 19 nt, Artificial Sequence
  Description of Artificial Sequence: Synthetic oligonucleotide
  Antisense strand to SEQ ID NO: 1237162
uaaaggcugaucauaccau

SEQ ID NO: 1237164 - RNA, 19 nt, Artificial Sequence
  Description of Artificial Sequence: Synthetic oligonucleotide
  Sense strand starting at position 2646 of SEQ ID NO: 917482
agccuuuagcaagauucua

SEQ ID NO: 1237165 - RNA, 19 nt, Artificial Sequence
  Description of Artificial Sequence: Synthetic oligonucleotide
  Antisense strand to SEQ ID NO: 1237164
uagaaucuugcuaaaggcu

SEQ ID NO: 1237166 - RNA, 19 nt, Artificial Sequence
  Description of Artificial Sequence: Synthetic oligonucleotide
  Sense strand starting at position 2793 of SEQ ID NO: 917482
ucaguuagccacuagaguu

SEQ ID NO: 1237167 - RNA, 19 nt, Artificial Sequence
  Description of Artificial Sequence: Synthetic oligonucleotide
  Antisense strand to SEQ ID NO: 1237166
aacucuaguggcuaacuga

SEQ ID NO: 1237168 - RNA, 19 nt, Artificial Sequence
  Description of Artificial Sequence: Synthetic oligonucleotide
  Sense strand starting at position 2826 of SEQ ID NO: 917482
ggaagagugcaucaucuua

SEQ ID NO: 1237169 - RNA, 19 nt, Artificial Sequence
  Description of Artificial Sequence: Synthetic oligonucleotide
  Antisense strand to SEQ ID NO: 1237168
uaagaugaugcacucuucc

SEQ ID NO: 1237170 - RNA, 19 nt, Artificial Sequence
  Description of Artificial Sequence: Synthetic oligonucleotide
  Sense strand starting at position 2865 of SEQ ID NO: 917482
ugaccuccagcucagaauu

SEQ ID NO: 1237171 - RNA, 19 nt, Artificial Sequence
  Description of Artificial Sequence: Synthetic oligonucleotide
  Antisense strand to SEQ ID NO: 1237170
aauucugagcuggagguca

SEQ ID NO: 1237172 - RNA, 19 nt, Artificial Sequence
  Description of Artificial Sequence: Synthetic oligonucleotide
  Sense strand starting at position 2884 of SEQ ID NO: 917482
caagaauaggcagguuugu

SEQ ID NO: 1237173 - RNA, 19 nt, Artificial Sequence
  Description of Artificial Sequence: Synthetic oligonucleotide
  Antisense strand to SEQ ID NO: 1237172
acaaaccugccuauucuug

SEQ ID NO: 1237174 - RNA, 19 nt, Artificial Sequence
  Description of Artificial Sequence: Synthetic oligonucleotide
  Sense strand starting at position 2889 of SEQ ID NO: 917482
auaggcagguuugugaaau

SEQ ID NO: 1237175 - RNA, 19 nt, Artificial Sequence
  Description of Artificial Sequence: Synthetic oligonucleotide
  Antisense strand to SEQ ID NO: 1237174
auuucacaaaccugccuau

SEQ ID NO: 1237176 - RNA, 19 nt, Artificial Sequence
  Description of Artificial Sequence: Synthetic oligonucleotide
  Sense strand starting at position 2895 of SEQ ID NO: 917482
agguuugugaaauaguaag

SEQ ID NO: 1237177 - RNA, 19 nt, Artificial Sequence
  Description of Artificial Sequence: Synthetic oligonucleotide
  Antisense strand to SEQ ID NO: 1237176
cuuacuauuucacaaaccu

SEQ ID NO: 1237178 - RNA, 19 nt, Artificial Sequence
  Description of Artificial Sequence: Synthetic oligonucleotide
  Sense strand starting at position 2901 of SEQ ID NO: 917482
gugaaauaguaagcucaga

SEQ ID NO: 1237179 - RNA, 19 nt, Artificial Sequence
  Description of Artificial Sequence: Synthetic oligonucleotide
  Antisense strand to SEQ ID NO: 1237178
ucugagcuuacuauuucac

SEQ ID NO: 1237180 - RNA, 19 nt, Artificial Sequence
  Description of Artificial Sequence: Synthetic oligonucleotide
  Sense strand starting at position 2977 of SEQ ID NO: 917482
ccagguaagguuuauaacu

SEQ ID NO: 1237181 - RNA, 19 nt, Artificial Sequence
  Description of Artificial Sequence: Synthetic oligonucleotide
  Antisense strand to SEQ ID NO: 1237180
aguuauaaaccuuaccugg

SEQ ID NO: 1237182 - RNA, 19 nt, Artificial Sequence
  Description of Artificial Sequence: Synthetic oligonucleotide
  Sense strand starting at position 3095 of SEQ ID NO: 917482
aucuuaagguuguugugaa

SEQ ID NO: 1237183 - RNA, 19 nt, Artificial Sequence
  Description of Artificial Sequence: Synthetic oligonucleotide
  Antisense strand to SEQ ID NO: 1237182
uucacaacaaccuuaagau

SEQ ID NO: 1237184 - RNA, 19 nt, Artificial Sequence
  Description of Artificial Sequence: Synthetic oligonucleotide
  Sense strand starting at position 3272 of SEQ ID NO: 917482
ucaacauauucgcugaacu

SEQ ID NO: 1237185 - RNA, 19 nt, Artificial Sequence
  Description of Artificial Sequence: Synthetic oligonucleotide
  Antisense strand to SEQ ID NO: 1237184
aguucagcgaauauguuga

SEQ ID NO: 1237186 - RNA, 19 nt, Artificial Sequence
  Description of Artificial Sequence: Synthetic oligonucleotide
  Sense strand starting at position 3280 of SEQ ID NO: 917482
uucgcugaacuuugggaua

SEQ ID NO: 1237187 - RNA, 19 nt, Artificial Sequence
  Description of Artificial Sequence: Synthetic oligonucleotide
  Antisense strand to SEQ ID NO: 1237186
uaucccaaaguucagcgaa

SEQ ID NO: 1237188 - RNA, 19 nt, Artificial Sequence
  Description of Artificial Sequence: Synthetic oligonucleotide
  Sense strand starting at position 3324 of SEQ ID NO: 917482
uuuggaagucauggagauu

SEQ ID NO: 1237189 - RNA, 19 nt, Artificial Sequence
  Description of Artificial Sequence: Synthetic oligonucleotide
  Antisense strand to SEQ ID NO: 1237188
aaucuccaugacuuccaaa

SEQ ID NO: 1237190 - RNA, 19 nt, Artificial Sequence
  Description of Artificial Sequence: Synthetic oligonucleotide
  Sense strand starting at position 3940 of SEQ ID NO: 917483
gcuaaacuaugggcuaaau

SEQ ID NO: 1237191 - RNA, 19 nt, Artificial Sequence
  Description of Artificial Sequence: Synthetic oligonucleotide
  Antisense strand to SEQ ID NO: 1237190
auuuagcccauaguuuagc

SEQ ID NO: 1237192 - RNA, 19 nt, Artificial Sequence
  Description of Artificial Sequence: Synthetic oligonucleotide
  Sense strand starting at position 4 of SEQ ID NO: 917483
ugagcaaauuaguaaacau

SEQ ID NO: 1237193 - RNA, 19 nt, Artificial Sequence
  Description of Artificial Sequence: Synthetic oligonucleotide
  Antisense strand to SEQ ID NO: 1237192
auguuuacuaauuugcuca

SEQ ID NO: 1237194 - RNA, 19 nt, Artificial Sequence
  Description of Artificial Sequence: Synthetic oligonucleotide
  Sense strand starting at position 21 of SEQ ID NO: 917483
aucuuuagcuguucuaguu

SEQ ID NO: 1237195 - RNA, 19 nt, Artificial Sequence
  Description of Artificial Sequence: Synthetic oligonucleotide
  Antisense strand to SEQ ID NO: 1237194
aacuagaacagcuaaagau

SEQ ID NO: 1237196 - RNA, 19 nt, Artificial Sequence
  Description of Artificial Sequence: Synthetic oligonucleotide
  Sense strand starting at position 53 of SEQ ID NO: 917483
uuuggauuccuguaaugug

SEQ ID NO: 1237197 - RNA, 19 nt, Artificial Sequence
  Description of Artificial Sequence: Synthetic oligonucleotide
  Antisense strand to SEQ ID NO: 1237196
cacauuacaggaauccaaa

SEQ ID NO: 1237198 - RNA, 19 nt, Artificial Sequence
  Description of Artificial Sequence: Synthetic oligonucleotide
  Sense strand starting at position 88 of SEQ ID NO: 917483
ugcuguuugagacggaguu

SEQ ID NO: 1237199 - RNA, 19 nt, Artificial Sequence
  Description of Artificial Sequence: Synthetic oligonucleotide
  Antisense strand to SEQ ID NO: 1237198
aacuccgucucaaacagca

SEQ ID NO: 1237200 - RNA, 19 nt, Artificial Sequence
  Description of Artificial Sequence: Synthetic oligonucleotide
  Sense strand starting at position 89 of SEQ ID NO: 917483
gcuguuugagacggaguuu

SEQ ID NO: 1237201 - RNA, 19 nt, Artificial Sequence
  Description of Artificial Sequence: Synthetic oligonucleotide
  Antisense strand to SEQ ID NO: 1237200
aaacuccgucucaaacagc

SEQ ID NO: 1237202 - RNA, 19 nt, Artificial Sequence
  Description of Artificial Sequence: Synthetic oligonucleotide
  Sense strand starting at position 382 of SEQ ID NO: 917483
cugcaucuugagcaauuga

SEQ ID NO: 1237203 - RNA, 19 nt, Artificial Sequence
  Description of Artificial Sequence: Synthetic oligonucleotide
  Antisense strand to SEQ ID NO: 1237202
ucaauugcucaagaugcag

SEQ ID NO: 1237204 - RNA, 19 nt, Artificial Sequence
  Description of Artificial Sequence: Synthetic oligonucleotide
  Sense strand starting at position 407 of SEQ ID NO: 917483
uaacaaugcggauguaucu

SEQ ID NO: 1237205 - RNA, 19 nt, Artificial Sequence
  Description of Artificial Sequence: Synthetic oligonucleotide
  Antisense strand to SEQ ID NO: 1237204
agauacauccgcauuguua

SEQ ID NO: 1237206 - RNA, 19 nt, Artificial Sequence
  Description of Artificial Sequence: Synthetic oligonucleotide
  Sense strand starting at position 420 of SEQ ID NO: 917483
guaucucaaggcugaguga

SEQ ID NO: 1237207 - RNA, 19 nt, Artificial Sequence
  Description of Artificial Sequence: Synthetic oligonucleotide
  Antisense strand to SEQ ID NO: 1237206
ucacucagccuugagauac

SEQ ID NO: 1237208 - RNA, 19 nt, Artificial Sequence
  Description of Artificial Sequence: Synthetic oligonucleotide
  Sense strand starting at position 495 of SEQ ID NO: 917483
gcauguauaguuggugcaa

SEQ ID NO: 1237209 - RNA, 19 nt, Artificial Sequence
  Description of Artificial Sequence: Synthetic oligonucleotide
  Antisense strand to SEQ ID NO: 1237208
uugcaccaacuauacaugc

SEQ ID NO: 1237210 - RNA, 19 nt, Artificial Sequence
  Description of Artificial Sequence: Synthetic oligonucleotide
  Sense strand starting at position 496 of SEQ ID NO: 917483
cauguauaguuggugcaau

SEQ ID NO: 1237211 - RNA, 19 nt, Artificial Sequence
  Description of Artificial Sequence: Synthetic oligonucleotide
  Antisense strand to SEQ ID NO: 1237210
auugcaccaacuauacaug

SEQ ID NO: 1237212 - RNA, 19 nt, Artificial Sequence
  Description of Artificial Sequence: Synthetic oligonucleotide
  Sense strand starting at position 508 of SEQ ID NO: 917483
gugcaaucucaacagguca

SEQ ID NO: 1237213 - RNA, 19 nt, Artificial Sequence
  Description of Artificial Sequence: Synthetic oligonucleotide
  Antisense strand to SEQ ID NO: 1237212
ugaccuguugagauugcac

SEQ ID NO: 1237214 - RNA, 19 nt, Artificial Sequence
  Description of Artificial Sequence: Synthetic oligonucleotide
  Sense strand starting at position 573 of SEQ ID NO: 917483
aggugcuaccauuggagaa

SEQ ID NO: 1237215 - RNA, 19 nt, Artificial Sequence
  Description of Artificial Sequence: Synthetic oligonucleotide
  Antisense strand to SEQ ID NO: 1237214
uucuccaaugguagcaccu

SEQ ID NO: 1237216 - RNA, 19 nt, Artificial Sequence
  Description of Artificial Sequence: Synthetic oligonucleotide
  Sense strand starting at position 574 of SEQ ID NO: 917483
ggugcuaccauuggagaaa

SEQ ID NO: 1237217 - RNA, 19 nt, Artificial Sequence
  Description of Artificial Sequence: Synthetic oligonucleotide
  Antisense strand to SEQ ID NO: 1237216
uuucuccaaugguagcacc

SEQ ID NO: 1237218 - RNA, 19 nt, Artificial Sequence
  Description of Artificial Sequence: Synthetic oligonucleotide
  Sense strand starting at position 600 of SEQ ID NO: 917483
aaaggcacucuguaggauu

SEQ ID NO: 1237219 - RNA, 19 nt, Artificial Sequence
  Description of Artificial Sequence: Synthetic oligonucleotide
  Antisense strand to SEQ ID NO: 1237218
aauccuacagagugccuuu

SEQ ID NO: 1237220 - RNA, 19 nt, Artificial Sequence
  Description of Artificial Sequence: Synthetic oligonucleotide
  Sense strand starting at position 707 of SEQ ID NO: 917483
gguuaaugccacugcugua

SEQ ID NO: 1237221 - RNA, 19 nt, Artificial Sequence
  Description of Artificial Sequence: Synthetic oligonucleotide
  Antisense strand to SEQ ID NO: 1237220
uacagcaguggcauuaacc

SEQ ID NO: 1237222 - RNA, 19 nt, Artificial Sequence
  Description of Artificial Sequence: Synthetic oligonucleotide
  Sense strand starting at position 720 of SEQ ID NO: 917483
gcuguauuacgacacaauu

SEQ ID NO: 1237223 - RNA, 19 nt, Artificial Sequence
  Description of Artificial Sequence: Synthetic oligonucleotide
  Antisense strand to SEQ ID NO: 1237222
aauugugucguaauacagc

SEQ ID NO: 1237224 - RNA, 19 nt, Artificial Sequence
  Description of Artificial Sequence: Synthetic oligonucleotide
  Sense strand starting at position 728 of SEQ ID NO: 917483
acgacacaauuaucuguau

SEQ ID NO: 1237225 - RNA, 19 nt, Artificial Sequence
  Description of Artificial Sequence: Synthetic oligonucleotide
  Antisense strand to SEQ ID NO: 1237224
auacagauaauugugucgu

SEQ ID NO: 1237226 - RNA, 19 nt, Artificial Sequence
  Description of Artificial Sequence: Synthetic oligonucleotide
  Sense strand starting at position 729 of SEQ ID NO: 917483
cgacacaauuaucuguauu

SEQ ID NO: 1237227 - RNA, 19 nt, Artificial Sequence
  Description of Artificial Sequence: Synthetic oligonucleotide
  Antisense strand to SEQ ID NO: 1237226
aauacagauaauugugucg

SEQ ID NO: 1237228 - RNA, 19 nt, Artificial Sequence
  Description of Artificial Sequence: Synthetic oligonucleotide
  Sense strand starting at position 996 of SEQ ID NO: 917483
uuaagucaagccuguagga

SEQ ID NO: 1237229 - RNA, 19 nt, Artificial Sequence
  Description of Artificial Sequence: Synthetic oligonucleotide
  Antisense strand to SEQ ID NO: 1237228
uccuacaggcuugacuuaa

SEQ ID NO: 1237230 - RNA, 19 nt, Artificial Sequence
  Description of Artificial Sequence: Synthetic oligonucleotide
  Sense strand starting at position 998 of SEQ ID NO: 917483
aagucaagccuguaggaga

SEQ ID NO: 1237231 - RNA, 19 nt, Artificial Sequence
  Description of Artificial Sequence: Synthetic oligonucleotide
  Antisense strand to SEQ ID NO: 1237230
ucuccuacaggcuugacuu

SEQ ID NO: 1237232 - RNA, 19 nt, Artificial Sequence
  Description of Artificial Sequence: Synthetic oligonucleotide
  Sense strand starting at position 1303 of SEQ ID NO: 917483
gguuccauuccagguuaga

SEQ ID NO: 1237233 - RNA, 19 nt, Artificial Sequence
  Description of Artificial Sequence: Synthetic oligonucleotide
  Antisense strand to SEQ ID NO: 1237232
ucuaaccuggaauggaacc

SEQ ID NO: 1237234 - RNA, 19 nt, Artificial Sequence
  Description of Artificial Sequence: Synthetic oligonucleotide
  Sense strand starting at position 2920 of SEQ ID NO: 917483
gcacaucaguuacuuugaa

SEQ ID NO: 1237235 - RNA, 19 nt, Artificial Sequence
  Description of Artificial Sequence: Synthetic oligonucleotide
  Antisense strand to SEQ ID NO: 1237234
uucaaaguaacugaugugc

SEQ ID NO: 1237236 - RNA, 19 nt, Artificial Sequence
  Description of Artificial Sequence: Synthetic oligonucleotide
  Sense strand starting at position 2934 of SEQ ID NO: 917483
uugaaaugugguggaaaug

SEQ ID NO: 1237237 - RNA, 19 nt, Artificial Sequence
  Description of Artificial Sequence: Synthetic oligonucleotide
  Antisense strand to SEQ ID NO: 1237236
cauuuccaccacauuucaa

SEQ ID NO: 1237238 - RNA, 19 nt, Artificial Sequence
  Description of Artificial Sequence: Synthetic oligonucleotide
  Sense strand starting at position 2952 of SEQ ID NO: 917483
ggugauggaugggauuuau

SEQ ID NO: 1237239 - RNA, 19 nt, Artificial Sequence
  Description of Artificial Sequence: Synthetic oligonucleotide
  Antisense strand to SEQ ID NO: 1237238
auaaaucccauccaucacc

SEQ ID NO: 1237240 - RNA, 19 nt, Artificial Sequence
  Description of Artificial Sequence: Synthetic oligonucleotide
  Sense strand starting at position 3090 of SEQ ID NO: 917483
acaauuguuugaccacagu

SEQ ID NO: 1237241 - RNA, 19 nt, Artificial Sequence
  Description of Artificial Sequence: Synthetic oligonucleotide
  Antisense strand to SEQ ID NO: 1237240
acuguggucaaacaauugu

SEQ ID NO: 1237242 - RNA, 19 nt, Artificial Sequence
  Description of Artificial Sequence: Synthetic oligonucleotide
  Sense strand starting at position 3185 of SEQ ID NO: 917483
ugaguugaacuguggagaa

SEQ ID NO: 1237243 - RNA, 19 nt, Artificial Sequence
  Description of Artificial Sequence: Synthetic oligonucleotide
  Antisense strand to SEQ ID NO: 1237242
uucuccacaguucaacuca

SEQ ID NO: 1237244 - RNA, 19 nt, Artificial Sequence
  Description of Artificial Sequence: Synthetic oligonucleotide
  Sense strand starting at position 3293 of SEQ ID NO: 917483
cuuagugguaggcgaugau

SEQ ID NO: 1237245 - RNA, 19 nt, Artificial Sequence
  Description of Artificial Sequence: Synthetic oligonucleotide
  Antisense strand to SEQ ID NO: 1237244
aucaucgccuaccacuaag

SEQ ID NO: 1237246 - RNA, 19 nt, Artificial Sequence
  Description of Artificial Sequence: Synthetic oligonucleotide
  Sense strand starting at position 3313 of SEQ ID NO: 917483
acguauaggagcugaaaga

SEQ ID NO: 1237247 - RNA, 19 nt, Artificial Sequence
  Description of Artificial Sequence: Synthetic oligonucleotide
  Antisense strand to SEQ ID NO: 1237246
ucuuucagcuccuauacgu

SEQ ID NO: 1237248 - RNA, 19 nt, Artificial Sequence
  Description of Artificial Sequence: Synthetic oligonucleotide
  Sense strand starting at position 3314 of SEQ ID NO: 917483
cguauaggagcugaaagau

SEQ ID NO: 1237249 - RNA, 19 nt, Artificial Sequence
  Description of Artificial Sequence: Synthetic oligonucleotide
  Antisense strand to SEQ ID NO: 1237248
aucuuucagcuccuauacg

SEQ ID NO: 1237250 - RNA, 19 nt, Artificial Sequence
  Description of Artificial Sequence: Synthetic oligonucleotide
  Sense strand starting at position 3327 of SEQ ID NO: 917483
aaagauuguccuggcuaag

SEQ ID NO: 1237251 - RNA, 19 nt, Artificial Sequence
  Description of Artificial Sequence: Synthetic oligonucleotide
  Antisense strand to SEQ ID NO: 1237250
cuuagccaggacaaucuuu

SEQ ID NO: 1237252 - RNA, 19 nt, Artificial Sequence
  Description of Artificial Sequence: Synthetic oligonucleotide
  Sense strand starting at position 3470 of SEQ ID NO: 917483
acacuagaaugugucgaaa

SEQ ID NO: 1237253 - RNA, 19 nt, Artificial Sequence
  Description of Artificial Sequence: Synthetic oligonucleotide
  Antisense strand to SEQ ID NO: 1237252
uuucgacacauucuagugu

SEQ ID NO: 1237254 - RNA, 19 nt, Artificial Sequence
  Description of Artificial Sequence: Synthetic oligonucleotide
  Sense strand starting at position 3473 of SEQ ID NO: 917483
cuagaaugugucgaaacca

SEQ ID NO: 1237255 - RNA, 19 nt, Artificial Sequence
  Description of Artificial Sequence: Synthetic oligonucleotide
  Antisense strand to SEQ ID NO: 1237254
ugguuucgacacauucuag

SEQ ID NO: 1237256 - RNA, 19 nt, Artificial Sequence
  Description of Artificial Sequence: Synthetic oligonucleotide
  Sense strand starting at position 3660 of SEQ ID NO: 917483
gagauagcuugcuccagcu

SEQ ID NO: 1237257 - RNA, 19 nt, Artificial Sequence
  Description of Artificial Sequence: Synthetic oligonucleotide
  Antisense strand to SEQ ID NO: 1237256
agcuggagcaagcuaucuc

SEQ ID NO: 1237258 - RNA, 19 nt, Artificial Sequence
  Description of Artificial Sequence: Synthetic oligonucleotide
  Sense strand starting at position 3662 of SEQ ID NO: 917483
gauagcuugcuccagcuuu

SEQ ID NO: 1237259 - RNA, 19 nt, Artificial Sequence
  Description of Artificial Sequence: Synthetic oligonucleotide
  Antisense strand to SEQ ID NO: 1237258
aaagcuggagcaagcuauc

SEQ ID NO: 1237260 - RNA, 19 nt, Artificial Sequence
  Description of Artificial Sequence: Synthetic oligonucleotide
  Sense strand starting at position 3813 of SEQ ID NO: 917483
cccucuagcgugcuguaua

SEQ ID NO: 1237261 - RNA, 19 nt, Artificial Sequence
  Description of Artificial Sequence: Synthetic oligonucleotide
  Antisense strand to SEQ ID NO: 1237260
uauacagcacgcuagaggg

SEQ ID NO: 1237262 - RNA, 19 nt, Artificial Sequence
  Description of Artificial Sequence: Synthetic oligonucleotide
  Sense strand starting at position 3840 of SEQ ID NO: 917483
gagugaaagugauccauaa

SEQ ID NO: 1237263 - RNA, 19 nt, Artificial Sequence
  Description of Artificial Sequence: Synthetic oligonucleotide
  Antisense strand to SEQ ID NO: 1237262
uuauggaucacuuucacuc

SEQ ID NO: 1237264 - RNA, 19 nt, Artificial Sequence
  Description of Artificial Sequence: Synthetic oligonucleotide
  Sense strand starting at position 3853 of SEQ ID NO: 917483
ccauaaacuuacguaguuu

SEQ ID NO: 1237265 - RNA, 19 nt, Artificial Sequence
  Description of Artificial Sequence: Synthetic oligonucleotide
  Antisense strand to SEQ ID NO: 1237264
aaacuacguaaguuuaugg

SEQ ID NO: 1237266 - RNA, 19 nt, Artificial Sequence
  Description of Artificial Sequence: Synthetic oligonucleotide
  Sense strand starting at position 3862 of SEQ ID NO: 917483
uacguaguuuauucgauca

SEQ ID NO: 1237267 - RNA, 19 nt, Artificial Sequence
  Description of Artificial Sequence: Synthetic oligonucleotide
  Antisense strand to SEQ ID NO: 1237266
ugaucgaauaaacuacgua

SEQ ID NO: 1237268 - RNA, 19 nt, Artificial Sequence
  Description of Artificial Sequence: Synthetic oligonucleotide
  Sense strand starting at position 3867 of SEQ ID NO: 917483
aguuuauucgaucaacaug

SEQ ID NO: 1237269 - RNA, 19 nt, Artificial Sequence
  Description of Artificial Sequence: Synthetic oligonucleotide
  Antisense strand to SEQ ID NO: 1237268
cauguugaucgaauaaacu

SEQ ID NO: 1237270 - RNA, 19 nt, Artificial Sequence
  Description of Artificial Sequence: Synthetic oligonucleotide
  Sense strand starting at position 3972 of SEQ ID NO: 917484
cagauuauaugagucguau

SEQ ID NO: 1237271 - RNA, 19 nt, Artificial Sequence
  Description of Artificial Sequence: Synthetic oligonucleotide
  Antisense strand to SEQ ID NO: 1237270
auacgacucauauaaucug

SEQ ID NO: 1237272 - RNA, 19 nt, Artificial Sequence
  Description of Artificial Sequence: Synthetic oligonucleotide
  Sense strand starting at position 65 of SEQ ID NO: 917484
aagagugaguuccauuuaa

SEQ ID NO: 1237273 - RNA, 19 nt, Artificial Sequence
  Description of Artificial Sequence: Synthetic oligonucleotide
  Antisense strand to SEQ ID NO: 1237272
uuaaauggaacucacucuu

SEQ ID NO: 1237274 - RNA, 19 nt, Artificial Sequence
  Description of Artificial Sequence: Synthetic oligonucleotide
  Sense strand starting at position 99 of SEQ ID NO: 917484
agucaugguguccaaguaa

SEQ ID NO: 1237275 - RNA, 19 nt, Artificial Sequence
  Description of Artificial Sequence: Synthetic oligonucleotide
  Antisense strand to SEQ ID NO: 1237274
uuacuuggacaccaugacu

SEQ ID NO: 1237276 - RNA, 19 nt, Artificial Sequence
  Description of Artificial Sequence: Synthetic oligonucleotide
  Sense strand starting at position 147 of SEQ ID NO: 917484
ccgucaauuccucuuucgu

SEQ ID NO: 1237277 - RNA, 19 nt, Artificial Sequence
  Description of Artificial Sequence: Synthetic oligonucleotide
  Antisense strand to SEQ ID NO: 1237276
acgaaagaggaauugacgg

SEQ ID NO: 1237278 - RNA, 19 nt, Artificial Sequence
  Description of Artificial Sequence: Synthetic oligonucleotide
  Sense strand starting at position 788 of SEQ ID NO: 917484
gguuuaaaguucuuuguca

SEQ ID NO: 1237279 - RNA, 19 nt, Artificial Sequence
  Description of Artificial Sequence: Synthetic oligonucleotide
  Antisense strand to SEQ ID NO: 1237278
ugacaaagaacuuuaaacc

SEQ ID NO: 1237280 - RNA, 19 nt, Artificial Sequence
  Description of Artificial Sequence: Synthetic oligonucleotide
  Sense strand starting at position 789 of SEQ ID NO: 917484
guuuaaaguucuuugucag

SEQ ID NO: 1237281 - RNA, 19 nt, Artificial Sequence
  Description of Artificial Sequence: Synthetic oligonucleotide
  Antisense strand to SEQ ID NO: 1237280
cugacaaagaacuuuaaac

SEQ ID NO: 1237282 - RNA, 19 nt, Artificial Sequence
  Description of Artificial Sequence: Synthetic oligonucleotide
  Sense strand starting at position 790 of SEQ ID NO: 917484
uuuaaaguucuuugucaga

SEQ ID NO: 1237283 - RNA, 19 nt, Artificial Sequence
  Description of Artificial Sequence: Synthetic oligonucleotide
  Antisense strand to SEQ ID NO: 1237282
ucugacaaagaacuuuaaa

SEQ ID NO: 1237284 - RNA, 19 nt, Artificial Sequence
  Description of Artificial Sequence: Synthetic oligonucleotide
  Sense strand starting at position 792 of SEQ ID NO: 917484
uaaaguucuuugucagaag

SEQ ID NO: 1237285 - RNA, 19 nt, Artificial Sequence
  Description of Artificial Sequence: Synthetic oligonucleotide
  Antisense strand to SEQ ID NO: 1237284
cuucugacaaagaacuuua

SEQ ID NO: 1237286 - RNA, 19 nt, Artificial Sequence
  Description of Artificial Sequence: Synthetic oligonucleotide
  Sense strand starting at position 1022 of SEQ ID NO: 917484
guaauucguccgguuccga

SEQ ID NO: 1237287 - RNA, 19 nt, Artificial Sequence
  Description of Artificial Sequence: Synthetic oligonucleotide
  Antisense strand to SEQ ID NO: 1237286
ucggaaccggacgaauuac

SEQ ID NO: 1237288 - RNA, 19 nt, Artificial Sequence
  Description of Artificial Sequence: Synthetic oligonucleotide
  Sense strand starting at position 1076 of SEQ ID NO: 917484
ccagaaguuuguguuggau

SEQ ID NO: 1237289 - RNA, 19 nt, Artificial Sequence
  Description of Artificial Sequence: Synthetic oligonucleotide
  Antisense strand to SEQ ID NO: 1237288
auccaacacaaacuucugg

SEQ ID NO: 1237290 - RNA, 19 nt, Artificial Sequence
  Description of Artificial Sequence: Synthetic oligonucleotide
  Sense strand starting at position 1079 of SEQ ID NO: 917484
gaaguuuguguuggauuau

SEQ ID NO: 1237291 - RNA, 19 nt, Artificial Sequence
  Description of Artificial Sequence: Synthetic oligonucleotide
  Antisense strand to SEQ ID NO: 1237290
auaauccaacacaaacuuc

SEQ ID NO: 1237292 - RNA, 19 nt, Artificial Sequence
  Description of Artificial Sequence: Synthetic oligonucleotide
  Sense strand starting at position 1089 of SEQ ID NO: 917484
uuggauuauuucugaggga

SEQ ID NO: 1237293 - RNA, 19 nt, Artificial Sequence
  Description of Artificial Sequence: Synthetic oligonucleotide
  Antisense strand to SEQ ID NO: 1237292
ucccucagaaauaauccaa

SEQ ID NO: 1237294 - RNA, 19 nt, Artificial Sequence
  Description of Artificial Sequence: Synthetic oligonucleotide
  Sense strand starting at position 1090 of SEQ ID NO: 917484
uggauuauuucugagggag

SEQ ID NO: 1237295 - RNA, 19 nt, Artificial Sequence
  Description of Artificial Sequence: Synthetic oligonucleotide
  Antisense strand to SEQ ID NO: 1237294
cucccucagaaauaaucca

SEQ ID NO: 1237296 - RNA, 19 nt, Artificial Sequence
  Description of Artificial Sequence: Synthetic oligonucleotide
  Sense strand starting at position 1169 of SEQ ID NO: 917484
agggaacucuguuucucuu

SEQ ID NO: 1237297 - RNA, 19 nt, Artificial Sequence
  Description of Artificial Sequence: Synthetic oligonucleotide
  Antisense strand to SEQ ID NO: 1237296
aagagaaacagaguucccu

SEQ ID NO: 1237298 - RNA, 19 nt, Artificial Sequence
  Description of Artificial Sequence: Synthetic oligonucleotide
  Sense strand starting at position 1374 of SEQ ID NO: 917484
auuggagauuccgugaaca

SEQ ID NO: 1237299 - RNA, 19 nt, Artificial Sequence
  Description of Artificial Sequence: Synthetic oligonucleotide
  Antisense strand to SEQ ID NO: 1237298
uguucacggaaucuccaau

SEQ ID NO: 1237300 - RNA, 19 nt, Artificial Sequence
  Description of Artificial Sequence: Synthetic oligonucleotide
  Sense strand starting at position 1455 of SEQ ID NO: 917484
gcgccucugcacguucaaa

SEQ ID NO: 1237301 - RNA, 19 nt, Artificial Sequence
  Description of Artificial Sequence: Synthetic oligonucleotide
  Antisense strand to SEQ ID NO: 1237300
uuugaacgugcagaggcgc

SEQ ID NO: 1237302 - RNA, 19 nt, Artificial Sequence
  Description of Artificial Sequence: Synthetic oligonucleotide
  Sense strand starting at position 1518 of SEQ ID NO: 917484
aaugguguagguuggaaua

SEQ ID NO: 1237303 - RNA, 19 nt, Artificial Sequence
  Description of Artificial Sequence: Synthetic oligonucleotide
  Antisense strand to SEQ ID NO: 1237302
uauuccaaccuacaccauu

SEQ ID NO: 1237304 - RNA, 19 nt, Artificial Sequence
  Description of Artificial Sequence: Synthetic oligonucleotide
  Sense strand starting at position 1762 of SEQ ID NO: 917484
aaugcaaaguguuccaaag

SEQ ID NO: 1237305 - RNA, 19 nt, Artificial Sequence
  Description of Artificial Sequence: Synthetic oligonucleotide
  Antisense strand to SEQ ID NO: 1237304
cuuuggaacacuuugcauu

SEQ ID NO: 1237306 - RNA, 19 nt, Artificial Sequence
  Description of Artificial Sequence: Synthetic oligonucleotide
  Sense strand starting at position 2596 of SEQ ID NO: 917484
cacugaaguuguucugagu

SEQ ID NO: 1237307 - RNA, 19 nt, Artificial Sequence
  Description of Artificial Sequence: Synthetic oligonucleotide
  Antisense strand to SEQ ID NO: 1237306
acucagaacaacuucagug

SEQ ID NO: 1237308 - RNA, 19 nt, Artificial Sequence
  Description of Artificial Sequence: Synthetic oligonucleotide
  Sense strand starting at position 2752 of SEQ ID NO: 917484
aaagaagaugcuugaacga

SEQ ID NO: 1237309 - RNA, 19 nt, Artificial Sequence
  Description of Artificial Sequence: Synthetic oligonucleotide
  Antisense strand to SEQ ID NO: 1237308
ucguucaagcaucuucuuu

SEQ ID NO: 1237310 - RNA, 19 nt, Artificial Sequence
  Description of Artificial Sequence: Synthetic oligonucleotide
  Sense strand starting at position 3072 of SEQ ID NO: 917484
ucguuaaagucauccagga

SEQ ID NO: 1237311 - RNA, 19 nt, Artificial Sequence
  Description of Artificial Sequence: Synthetic oligonucleotide
  Antisense strand to SEQ ID NO: 1237310
uccuggaugacuuuaacga

SEQ ID NO: 1237312 - RNA, 19 nt, Artificial Sequence
  Description of Artificial Sequence: Synthetic oligonucleotide
  Sense strand starting at position 3199 of SEQ ID NO: 917484
uaggccauccacugugaga

SEQ ID NO: 1237313 - RNA, 19 nt, Artificial Sequence
  Description of Artificial Sequence: Synthetic oligonucleotide
  Antisense strand to SEQ ID NO: 1237312
ucucacaguggauggccua

SEQ ID NO: 1237314 - RNA, 19 nt, Artificial Sequence
  Description of Artificial Sequence: Synthetic oligonucleotide
  Sense strand starting at position 3201 of SEQ ID NO: 917484
ggccauccacugugagaga

SEQ ID NO: 1237315 - RNA, 19 nt, Artificial Sequence
  Description of Artificial Sequence: Synthetic oligonucleotide
  Antisense strand to SEQ ID NO: 1237314
ucucucacaguggauggcc

SEQ ID NO: 1237316 - RNA, 19 nt, Artificial Sequence
  Description of Artificial Sequence: Synthetic oligonucleotide
  Sense strand starting at position 3234 of SEQ ID NO: 917484
aaguaugcaugugcuagaa

SEQ ID NO: 1237317 - RNA, 19 nt, Artificial Sequence
  Description of Artificial Sequence: Synthetic oligonucleotide
  Antisense strand to SEQ ID NO: 1237316
uucuagcacaugcauacuu

SEQ ID NO: 1237318 - RNA, 19 nt, Artificial Sequence
  Description of Artificial Sequence: Synthetic oligonucleotide
  Sense strand starting at position 3238 of SEQ ID NO: 917484
augcaugugcuagaagaug

SEQ ID NO: 1237319 - RNA, 19 nt, Artificial Sequence
  Description of Artificial Sequence: Synthetic oligonucleotide
  Antisense strand to SEQ ID NO: 1237318
caucuucuagcacaugcau

SEQ ID NO: 1237320 - RNA, 19 nt, Artificial Sequence
  Description of Artificial Sequence: Synthetic oligonucleotide
  Sense strand starting at position 3246 of SEQ ID NO: 917484
gcuagaagaugcguacaga

SEQ ID NO: 1237321 - RNA, 19 nt, Artificial Sequence
  Description of Artificial Sequence: Synthetic oligonucleotide
  Antisense strand to SEQ ID NO: 1237320
ucuguacgcaucuucuagc

SEQ ID NO: 1237322 - RNA, 19 nt, Artificial Sequence
  Description of Artificial Sequence: Synthetic oligonucleotide
  Sense strand starting at position 3247 of SEQ ID NO: 917484
cuagaagaugcguacagaa

SEQ ID NO: 1237323 - RNA, 19 nt, Artificial Sequence
  Description of Artificial Sequence: Synthetic oligonucleotide
  Antisense strand to SEQ ID NO: 1237322
uucuguacgcaucuucuag

SEQ ID NO: 1237324 - RNA, 19 nt, Artificial Sequence
  Description of Artificial Sequence: Synthetic oligonucleotide
  Sense strand starting at position 3296 of SEQ ID NO: 917484
ccggacacacccugaauau

SEQ ID NO: 1237325 - RNA, 19 nt, Artificial Sequence
  Description of Artificial Sequence: Synthetic oligonucleotide
  Antisense strand to SEQ ID NO: 1237324
auauucaggguguguccgg

SEQ ID NO: 1237326 - RNA, 19 nt, Artificial Sequence
  Description of Artificial Sequence: Synthetic oligonucleotide
  Sense strand starting at position 3330 of SEQ ID NO: 917484
gcgauaaagaaaugggcau

SEQ ID NO: 1237327 - RNA, 19 nt, Artificial Sequence
  Description of Artificial Sequence: Synthetic oligonucleotide
  Antisense strand to SEQ ID NO: 1237326
augcccauuucuuuaucgc

SEQ ID NO: 1237328 - RNA, 19 nt, Artificial Sequence
  Description of Artificial Sequence: Synthetic oligonucleotide
  Sense strand starting at position 3331 of SEQ ID NO: 917484
cgauaaagaaaugggcaua

SEQ ID NO: 1237329 - RNA, 19 nt, Artificial Sequence
  Description of Artificial Sequence: Synthetic oligonucleotide
  Antisense strand to SEQ ID NO: 1237328
uaugcccauuucuuuaucg

SEQ ID NO: 1237330 - RNA, 19 nt, Artificial Sequence
  Description of Artificial Sequence: Synthetic oligonucleotide
  Sense strand starting at position 3343 of SEQ ID NO: 917484
gggcauauacagcgaaaua

SEQ ID NO: 1237331 - RNA, 19 nt, Artificial Sequence
  Description of Artificial Sequence: Synthetic oligonucleotide
  Antisense strand to SEQ ID NO: 1237330
uauuucgcuguauaugccc

SEQ ID NO: 1237332 - RNA, 19 nt, Artificial Sequence
  Description of Artificial Sequence: Synthetic oligonucleotide
  Sense strand starting at position 3344 of SEQ ID NO: 917484
ggcauauacagcgaaauac

SEQ ID NO: 1237333 - RNA, 19 nt, Artificial Sequence
  Description of Artificial Sequence: Synthetic oligonucleotide
  Antisense strand to SEQ ID NO: 1237332
guauuucgcuguauaugcc

SEQ ID NO: 1237334 - RNA, 19 nt, Artificial Sequence
  Description of Artificial Sequence: Synthetic oligonucleotide
  Sense strand starting at position 3382 of SEQ ID NO: 917484
augagagcuacauggauca

SEQ ID NO: 1237335 - RNA, 19 nt, Artificial Sequence
  Description of Artificial Sequence: Synthetic oligonucleotide
  Antisense strand to SEQ ID NO: 1237334
ugauccauguagcucucau

SEQ ID NO: 1237336 - RNA, 19 nt, Artificial Sequence
  Description of Artificial Sequence: Synthetic oligonucleotide
  Sense strand starting at position 3560 of SEQ ID NO: 917484
acuaaacauccgcgauaua

SEQ ID NO: 1237337 - RNA, 19 nt, Artificial Sequence
  Description of Artificial Sequence: Synthetic oligonucleotide
  Antisense strand to SEQ ID NO: 1237336
uauaucgcggauguuuagu

SEQ ID NO: 1237338 - RNA, 19 nt, Artificial Sequence
  Description of Artificial Sequence: Synthetic oligonucleotide
  Sense strand starting at position 3561 of SEQ ID NO: 917484
cuaaacauccgcgauauac

SEQ ID NO: 1237339 - RNA, 19 nt, Artificial Sequence
  Description of Artificial Sequence: Synthetic oligonucleotide
  Antisense strand to SEQ ID NO: 1237338
guauaucgcggauguuuag

SEQ ID NO: 1237340 - RNA, 19 nt, Artificial Sequence
  Description of Artificial Sequence: Synthetic oligonucleotide
  Sense strand starting at position 3582 of SEQ ID NO: 917484
gacacuguuccagguacuu

SEQ ID NO: 1237341 - RNA, 19 nt, Artificial Sequence
  Description of Artificial Sequence: Synthetic oligonucleotide
  Antisense strand to SEQ ID NO: 1237340
aaguaccuggaacaguguc

SEQ ID NO: 1237342 - RNA, 19 nt, Artificial Sequence
  Description of Artificial Sequence: Synthetic oligonucleotide
  Sense strand starting at position 3593 of SEQ ID NO: 917484
agguacuugggauguauca

SEQ ID NO: 1237343 - RNA, 19 nt, Artificial Sequence
  Description of Artificial Sequence: Synthetic oligonucleotide
  Antisense strand to SEQ ID NO: 1237342
ugauacaucccaaguaccu

SEQ ID NO: 1237344 - RNA, 19 nt, Artificial Sequence
  Description of Artificial Sequence: Synthetic oligonucleotide
  Sense strand starting at position 3595 of SEQ ID NO: 917484
guacuugggauguaucaau

SEQ ID NO: 1237345 - RNA, 19 nt, Artificial Sequence
  Description of Artificial Sequence: Synthetic oligonucleotide
  Antisense strand to SEQ ID NO: 1237344
auugauacaucccaaguac

SEQ ID NO: 1237346 - RNA, 19 nt, Artificial Sequence
  Description of Artificial Sequence: Synthetic oligonucleotide
  Sense strand starting at position 3605 of SEQ ID NO: 917484
uguaucaaugagcaacgua

SEQ ID NO: 1237347 - RNA, 19 nt, Artificial Sequence
  Description of Artificial Sequence: Synthetic oligonucleotide
  Antisense strand to SEQ ID NO: 1237346
uacguugcucauugauaca

SEQ ID NO: 1237348 - RNA, 19 nt, Artificial Sequence
  Description of Artificial Sequence: Synthetic oligonucleotide
  Sense strand starting at position 3699 of SEQ ID NO: 917484
ggcaacaugcuauggaaua

SEQ ID NO: 1237349 - RNA, 19 nt, Artificial Sequence
  Description of Artificial Sequence: Synthetic oligonucleotide
  Antisense strand to SEQ ID NO: 1237348
uauuccauagcauguugcc

SEQ ID NO: 1237350 - RNA, 19 nt, Artificial Sequence
  Description of Artificial Sequence: Synthetic oligonucleotide
  Sense strand starting at position 3935 of SEQ ID NO: 917485
acacacuuauacgugcaua

SEQ ID NO: 1237351 - RNA, 19 nt, Artificial Sequence
  Description of Artificial Sequence: Synthetic oligonucleotide
  Antisense strand to SEQ ID NO: 1237350
uaugcacguauaagugugu

SEQ ID NO: 1237352 - RNA, 19 nt, Artificial Sequence
  Description of Artificial Sequence: Synthetic oligonucleotide
  Sense strand starting at position 79 of SEQ ID NO: 917485
gaggaaugaagucaguguu

SEQ ID NO: 1237353 - RNA, 19 nt, Artificial Sequence
  Description of Artificial Sequence: Synthetic oligonucleotide
  Antisense strand to SEQ ID NO: 1237352
aacacugacuucauuccuc

SEQ ID NO: 1237354 - RNA, 19 nt, Artificial Sequence
  Description of Artificial Sequence: Synthetic oligonucleotide
  Sense strand starting at position 82 of SEQ ID NO: 917485
gaaugaagucaguguucug

SEQ ID NO: 1237355 - RNA, 19 nt, Artificial Sequence
  Description of Artificial Sequence: Synthetic oligonucleotide
  Antisense strand to SEQ ID NO: 1237354
cagaacacugacuucauuc

SEQ ID NO: 1237356 - RNA, 19 nt, Artificial Sequence
  Description of Artificial Sequence: Synthetic oligonucleotide
  Sense strand starting at position 89 of SEQ ID NO: 917485
gucaguguucugcucgcua

SEQ ID NO: 1237357 - RNA, 19 nt, Artificial Sequence
  Description of Artificial Sequence: Synthetic oligonucleotide
  Antisense strand to SEQ ID NO: 1237356
uagcgagcagaacacugac

SEQ ID NO: 1237358 - RNA, 19 nt, Artificial Sequence
  Description of Artificial Sequence: Synthetic oligonucleotide
  Sense strand starting at position 107 of SEQ ID NO: 917485
accugacuccugcgacaga

SEQ ID NO: 1237359 - RNA, 19 nt, Artificial Sequence
  Description of Artificial Sequence: Synthetic oligonucleotide
  Antisense strand to SEQ ID NO: 1237358
ucugucgcaggagucaggu

SEQ ID NO: 1237360 - RNA, 19 nt, Artificial Sequence
  Description of Artificial Sequence: Synthetic oligonucleotide
  Sense strand starting at position 544 of SEQ ID NO: 917485
ggaaucagauuagagaaca

SEQ ID NO: 1237361 - RNA, 19 nt, Artificial Sequence
  Description of Artificial Sequence: Synthetic oligonucleotide
  Antisense strand to SEQ ID NO: 1237360
uguucucuaaucugauucc

SEQ ID NO: 1237362 - RNA, 19 nt, Artificial Sequence
  Description of Artificial Sequence: Synthetic oligonucleotide
  Sense strand starting at position 557 of SEQ ID NO: 917485
agaacacaaucguuuguga

SEQ ID NO: 1237363 - RNA, 19 nt, Artificial Sequence
  Description of Artificial Sequence: Synthetic oligonucleotide
  Antisense strand to SEQ ID NO: 1237362
ucacaaacgauuguguucu

SEQ ID NO: 1237364 - RNA, 19 nt, Artificial Sequence
  Description of Artificial Sequence: Synthetic oligonucleotide
  Sense strand starting at position 595 of SEQ ID NO: 917485
gcaguuuccugacugauca

SEQ ID NO: 1237365 - RNA, 19 nt, Artificial Sequence
  Description of Artificial Sequence: Synthetic oligonucleotide
  Antisense strand to SEQ ID NO: 1237364
ugaucagucaggaaacugc

SEQ ID NO: 1237366 - RNA, 19 nt, Artificial Sequence
  Description of Artificial Sequence: Synthetic oligonucleotide
  Sense strand starting at position 662 of SEQ ID NO: 917485
cuccgugcagugcugaaua

SEQ ID NO: 1237367 - RNA, 19 nt, Artificial Sequence
  Description of Artificial Sequence: Synthetic oligonucleotide
  Antisense strand to SEQ ID NO: 1237366
uauucagcacugcacggag

SEQ ID NO: 1237368 - RNA, 19 nt, Artificial Sequence
  Description of Artificial Sequence: Synthetic oligonucleotide
  Sense strand starting at position 800 of SEQ ID NO: 917485
uccacugucccagaaaguu

SEQ ID NO: 1237369 - RNA, 19 nt, Artificial Sequence
  Description of Artificial Sequence: Synthetic oligonucleotide
  Antisense strand to SEQ ID NO: 1237368
aacuuucugggacagugga

SEQ ID NO: 1237370 - RNA, 19 nt, Artificial Sequence
  Description of Artificial Sequence: Synthetic oligonucleotide
  Sense strand starting at position 808 of SEQ ID NO: 917485
cccagaaaguuuccaguuu

SEQ ID NO: 1237371 - RNA, 19 nt, Artificial Sequence
  Description of Artificial Sequence: Synthetic oligonucleotide
  Antisense strand to SEQ ID NO: 1237370
aaacuggaaacuuucuggg

SEQ ID NO: 1237372 - RNA, 19 nt, Artificial Sequence
  Description of Artificial Sequence: Synthetic oligonucleotide
  Sense strand starting at position 819 of SEQ ID NO: 917485
uccaguuugcuagcuugua

SEQ ID NO: 1237373 - RNA, 19 nt, Artificial Sequence
  Description of Artificial Sequence: Synthetic oligonucleotide
  Antisense strand to SEQ ID NO: 1237372
uacaagcuagcaaacugga

SEQ ID NO: 1237374 - RNA, 19 nt, Artificial Sequence
  Description of Artificial Sequence: Synthetic oligonucleotide
  Sense strand starting at position 940 of SEQ ID NO: 917485
ccuagucagucccuacuau

SEQ ID NO: 1237375 - RNA, 19 nt, Artificial Sequence
  Description of Artificial Sequence: Synthetic oligonucleotide
  Antisense strand to SEQ ID NO: 1237374
auaguagggacugacuagg

SEQ ID NO: 1237376 - RNA, 19 nt, Artificial Sequence
  Description of Artificial Sequence: Synthetic oligonucleotide
  Sense strand starting at position 941 of SEQ ID NO: 917485
cuagucagucccuacuaua

SEQ ID NO: 1237377 - RNA, 19 nt, Artificial Sequence
  Description of Artificial Sequence: Synthetic oligonucleotide
  Antisense strand to SEQ ID NO: 1237376
uauaguagggacugacuag

SEQ ID NO: 1237378 - RNA, 19 nt, Artificial Sequence
  Description of Artificial Sequence: Synthetic oligonucleotide
  Sense strand starting at position 1014 of SEQ ID NO: 917485
cgaagugugggaugacuca

SEQ ID NO: 1237379 - RNA, 19 nt, Artificial Sequence
  Description of Artificial Sequence: Synthetic oligonucleotide
  Antisense strand to SEQ ID NO: 1237378
ugagucaucccacacuucg

SEQ ID NO: 1237380 - RNA, 19 nt, Artificial Sequence
  Description of Artificial Sequence: Synthetic oligonucleotide
  Sense strand starting at position 1027 of SEQ ID NO: 917485
gacucauaguggcuagauc

SEQ ID NO: 1237381 - RNA, 19 nt, Artificial Sequence
  Description of Artificial Sequence: Synthetic oligonucleotide
  Antisense strand to SEQ ID NO: 1237380
gaucuagccacuaugaguc

SEQ ID NO: 1237382 - RNA, 19 nt, Artificial Sequence
  Description of Artificial Sequence: Synthetic oligonucleotide
  Sense strand starting at position 1039 of SEQ ID NO: 917485
cuagaucguuccucuaacu

SEQ ID NO: 1237383 - RNA, 19 nt, Artificial Sequence
  Description of Artificial Sequence: Synthetic oligonucleotide
  Antisense strand to SEQ ID NO: 1237382
aguuagaggaacgaucuag

SEQ ID NO: 1237384 - RNA, 19 nt, Artificial Sequence
  Description of Artificial Sequence: Synthetic oligonucleotide
  Sense strand starting at position 2242 of SEQ ID NO: 917485
ccgagugagcccucgcuuu

SEQ ID NO: 1237385 - RNA, 19 nt, Artificial Sequence
  Description of Artificial Sequence: Synthetic oligonucleotide
  Antisense strand to SEQ ID NO: 1237384
aaagcgagggcucacucgg

SEQ ID NO: 1237386 - RNA, 19 nt, Artificial Sequence
  Description of Artificial Sequence: Synthetic oligonucleotide
  Sense strand starting at position 2449 of SEQ ID NO: 917485
cguguucuucccgccgaga

SEQ ID NO: 1237387 - RNA, 19 nt, Artificial Sequence
  Description of Artificial Sequence: Synthetic oligonucleotide
  Antisense strand to SEQ ID NO: 1237386
ucucggcgggaagaacacg

SEQ ID NO: 1237388 - RNA, 19 nt, Artificial Sequence
  Description of Artificial Sequence: Synthetic oligonucleotide
  Sense strand starting at position 2754 of SEQ ID NO: 917485
auccguauccucggcauuu

SEQ ID NO: 1237389 - RNA, 19 nt, Artificial Sequence
  Description of Artificial Sequence: Synthetic oligonucleotide
  Antisense strand to SEQ ID NO: 1237388
aaaugccgaggauacggau

SEQ ID NO: 1237390 - RNA, 19 nt, Artificial Sequence
  Description of Artificial Sequence: Synthetic oligonucleotide
  Sense strand starting at position 3230 of SEQ ID NO: 917485
uccaaauccguuuaucuag

SEQ ID NO: 1237391 - RNA, 19 nt, Artificial Sequence
  Description of Artificial Sequence: Synthetic oligonucleotide
  Antisense strand to SEQ ID NO: 1237390
cuagauaaacggauuugga

SEQ ID NO: 1237392 - RNA, 19 nt, Artificial Sequence
  Description of Artificial Sequence: Synthetic oligonucleotide
  Sense strand starting at position 3257 of SEQ ID NO: 917485
ucagcuacuccugguaaca

SEQ ID NO: 1237393 - RNA, 19 nt, Artificial Sequence
  Description of Artificial Sequence: Synthetic oligonucleotide
  Antisense strand to SEQ ID NO: 1237392
uguuaccaggaguagcuga

SEQ ID NO: 1237394 - RNA, 19 nt, Artificial Sequence
  Description of Artificial Sequence: Synthetic oligonucleotide
  Sense strand starting at position 3404 of SEQ ID NO: 917485
ucuaacaaaucgccaagau

SEQ ID NO: 1237395 - RNA, 19 nt, Artificial Sequence
  Description of Artificial Sequence: Synthetic oligonucleotide
  Antisense strand to SEQ ID NO: 1237394
aucuuggcgauuuguuaga

SEQ ID NO: 1237396 - RNA, 19 nt, Artificial Sequence
  Description of Artificial Sequence: Synthetic oligonucleotide
  Sense strand starting at position 3405 of SEQ ID NO: 917485
cuaacaaaucgccaagauu

SEQ ID NO: 1237397 - RNA, 19 nt, Artificial Sequence
  Description of Artificial Sequence: Synthetic oligonucleotide
  Antisense strand to SEQ ID NO: 1237396
aaucuuggcgauuuguuag

SEQ ID NO: 1237398 - RNA, 19 nt, Artificial Sequence
  Description of Artificial Sequence: Synthetic oligonucleotide
  Sense strand starting at position 3408 of SEQ ID NO: 917485
acaaaucgccaagauucua

SEQ ID NO: 1237399 - RNA, 19 nt, Artificial Sequence
  Description of Artificial Sequence: Synthetic oligonucleotide
  Antisense strand to SEQ ID NO: 1237398
uagaaucuuggcgauuugu

SEQ ID NO: 1237400 - RNA, 19 nt, Artificial Sequence
  Description of Artificial Sequence: Synthetic oligonucleotide
  Sense strand starting at position 3481 of SEQ ID NO: 917485
ucauaaugugcuuacugca

SEQ ID NO: 1237401 - RNA, 19 nt, Artificial Sequence
  Description of Artificial Sequence: Synthetic oligonucleotide
  Antisense strand to SEQ ID NO: 1237400
ugcaguaagcacauuauga

SEQ ID NO: 1237402 - RNA, 19 nt, Artificial Sequence
  Description of Artificial Sequence: Synthetic oligonucleotide
  Sense strand starting at position 3626 of SEQ ID NO: 917485
gcugauugucucuagacuu

SEQ ID NO: 1237403 - RNA, 19 nt, Artificial Sequence
  Description of Artificial Sequence: Synthetic oligonucleotide
  Antisense strand to SEQ ID NO: 1237402
aagucuagagacaaucagc

SEQ ID NO: 1237404 - RNA, 19 nt, Artificial Sequence
  Description of Artificial Sequence: Synthetic oligonucleotide
  Sense strand starting at position 3693 of SEQ ID NO: 917485
guguuuagugcugaaacaa

SEQ ID NO: 1237405 - RNA, 19 nt, Artificial Sequence
  Description of Artificial Sequence: Synthetic oligonucleotide
  Antisense strand to SEQ ID NO: 1237404
uuguuucagcacuaaacac

SEQ ID NO: 1237406 - RNA, 19 nt, Artificial Sequence
  Description of Artificial Sequence: Synthetic oligonucleotide
  Sense strand starting at position 3716 of SEQ ID NO: 917485
gcaguuuaaugaguuuaua

SEQ ID NO: 1237407 - RNA, 19 nt, Artificial Sequence
  Description of Artificial Sequence: Synthetic oligonucleotide
  Antisense strand to SEQ ID NO: 1237406
uauaaacucauuaaacugc

SEQ ID NO: 1237408 - RNA, 19 nt, Artificial Sequence
  Description of Artificial Sequence: Synthetic oligonucleotide
  Sense strand starting at position 3726 of SEQ ID NO: 917485
gaguuuauacaaggguaag

SEQ ID NO: 1237409 - RNA, 19 nt, Artificial Sequence
  Description of Artificial Sequence: Synthetic oligonucleotide
  Antisense strand to SEQ ID NO: 1237408
cuuacccuuguauaaacuc

SEQ ID NO: 1237410 - RNA, 19 nt, Artificial Sequence
  Description of Artificial Sequence: Synthetic oligonucleotide
  Sense strand starting at position 3727 of SEQ ID NO: 917485
aguuuauacaaggguaaga

SEQ ID NO: 1237411 - RNA, 19 nt, Artificial Sequence
  Description of Artificial Sequence: Synthetic oligonucleotide
  Antisense strand to SEQ ID NO: 1237410
ucuuacccuuguauaaacu

SEQ ID NO: 1237412 - RNA, 19 nt, Artificial Sequence
  Description of Artificial Sequence: Synthetic oligonucleotide
  Sense strand starting at position 3800 of SEQ ID NO: 917485
aguggaucgguauguaauu

SEQ ID NO: 1237413 - RNA, 19 nt, Artificial Sequence
  Description of Artificial Sequence: Synthetic oligonucleotide
  Antisense strand to SEQ ID NO: 1237412
aauuacauaccgauccacu

SEQ ID NO: 1237414 - RNA, 19 nt, Artificial Sequence
  Description of Artificial Sequence: Synthetic oligonucleotide
  Sense strand starting at position 3801 of SEQ ID NO: 917485
guggaucgguauguaauuu

SEQ ID NO: 1237415 - RNA, 19 nt, Artificial Sequence
  Description of Artificial Sequence: Synthetic oligonucleotide
  Antisense strand to SEQ ID NO: 1237414
aaauuacauaccgauccac

SEQ ID NO: 1237416 - RNA, 19 nt, Artificial Sequence
  Description of Artificial Sequence: Synthetic oligonucleotide
  Sense strand starting at position 3825 of SEQ ID NO: 917485
gucacaucaugguugaguu

SEQ ID NO: 1237417 - RNA, 19 nt, Artificial Sequence
  Description of Artificial Sequence: Synthetic oligonucleotide
  Antisense strand to SEQ ID NO: 1237416
aacucaaccaugaugugac

SEQ ID NO: 1237418 - RNA, 19 nt, Artificial Sequence
  Description of Artificial Sequence: Synthetic oligonucleotide
  Sense strand starting at position 3826 of SEQ ID NO: 917485
ucacaucaugguugaguua

SEQ ID NO: 1237419 - RNA, 19 nt, Artificial Sequence
  Description of Artificial Sequence: Synthetic oligonucleotide
  Antisense strand to SEQ ID NO: 1237418
uaacucaaccaugauguga

SEQ ID NO: 1237420 - RNA, 19 nt, Artificial Sequence
  Description of Artificial Sequence: Synthetic oligonucleotide
  Sense strand starting at position 3829 of SEQ ID NO: 917485
caucaugguugaguuacaa

SEQ ID NO: 1237421 - RNA, 19 nt, Artificial Sequence
  Description of Artificial Sequence: Synthetic oligonucleotide
  Antisense strand to SEQ ID NO: 1237420
uuguaacucaaccaugaug

SEQ ID NO: 1237422 - RNA, 19 nt, Artificial Sequence
  Description of Artificial Sequence: Synthetic oligonucleotide
  Sense strand starting at position 3837 of SEQ ID NO: 917485
uugaguuacaagcauugga

SEQ ID NO: 1237423 - RNA, 19 nt, Artificial Sequence
  Description of Artificial Sequence: Synthetic oligonucleotide
  Antisense strand to SEQ ID NO: 1237422
uccaaugcuuguaacucaa

SEQ ID NO: 1237424 - RNA, 19 nt, Artificial Sequence
  Description of Artificial Sequence: Synthetic oligonucleotide
  Sense strand starting at position 3890 of SEQ ID NO: 917485
caaagcuuucugugagaau

SEQ ID NO: 1237425 - RNA, 19 nt, Artificial Sequence
  Description of Artificial Sequence: Synthetic oligonucleotide
  Antisense strand to SEQ ID NO: 1237424
auucucacagaaagcuuug

SEQ ID NO: 1237426 - RNA, 19 nt, Artificial Sequence
  Description of Artificial Sequence: Synthetic oligonucleotide
  Sense strand starting at position 3899 of SEQ ID NO: 917485
cugugagaaucagucaagu

SEQ ID NO: 1237427 - RNA, 19 nt, Artificial Sequence
  Description of Artificial Sequence: Synthetic oligonucleotide
  Antisense strand to SEQ ID NO: 1237426
acuugacugauucucacag

SEQ ID NO: 1237428 - RNA, 19 nt, Artificial Sequence
  Description of Artificial Sequence: Synthetic oligonucleotide
  Sense strand starting at position 3901 of SEQ ID NO: 917485
gugagaaucagucaaguag

SEQ ID NO: 1237429 - RNA, 19 nt, Artificial Sequence
  Description of Artificial Sequence: Synthetic oligonucleotide
  Antisense strand to SEQ ID NO: 1237428
cuacuugacugauucucac

SEQ ID NO: 1237430 - RNA, 19 nt, Artificial Sequence
  Description of Artificial Sequence: Synthetic oligonucleotide
  Sense strand starting at position 3956 of SEQ ID NO: 917485
guguauuguuuauuacaca

SEQ ID NO: 1237431 - RNA, 19 nt, Artificial Sequence
  Description of Artificial Sequence: Synthetic oligonucleotide
  Antisense strand to SEQ ID NO: 1237430
uguguaauaaacaauacac

SEQ ID NO: 1237432 - RNA, 19 nt, Artificial Sequence
  Description of Artificial Sequence: Synthetic oligonucleotide
  Sense strand starting at position 3956 of SEQ ID NO: 917486
guguauuguuuauuacaca

SEQ ID NO: 1237433 - RNA, 19 nt, Artificial Sequence
  Description of Artificial Sequence: Synthetic oligonucleotide
  Antisense strand to SEQ ID NO: 1237432
uguguaauaaacaauacac

SEQ ID NO: 1237434 - RNA, 19 nt, Artificial Sequence
  Description of Artificial Sequence: Synthetic oligonucleotide
  Sense strand starting at position 260 of SEQ ID NO: 917486
ugcaauuuccagugcauaa

SEQ ID NO: 1237435 - RNA, 19 nt, Artificial Sequence
  Description of Artificial Sequence: Synthetic oligonucleotide
  Antisense strand to SEQ ID NO: 1237434
uuaugcacuggaaauugca

SEQ ID NO: 1237436 - RNA, 19 nt, Artificial Sequence
  Description of Artificial Sequence: Synthetic oligonucleotide
  Sense strand starting at position 320 of SEQ ID NO: 917486
uggacucagaguugcaaga

SEQ ID NO: 1237437 - RNA, 19 nt, Artificial Sequence
  Description of Artificial Sequence: Synthetic oligonucleotide
  Antisense strand to SEQ ID NO: 1237436
ucuugcaacucugagucca

SEQ ID NO: 1237438 - RNA, 19 nt, Artificial Sequence
  Description of Artificial Sequence: Synthetic oligonucleotide
  Sense strand starting at position 471 of SEQ ID NO: 917486
uagauaugguaagacauuu

SEQ ID NO: 1237439 - RNA, 19 nt, Artificial Sequence
  Description of Artificial Sequence: Synthetic oligonucleotide
  Antisense strand to SEQ ID NO: 1237438
aaaugucuuaccauaucua

SEQ ID NO: 1237440 - RNA, 19 nt, Artificial Sequence
  Description of Artificial Sequence: Synthetic oligonucleotide
  Sense strand starting at position 548 of SEQ ID NO: 917486
ggcuauauugugcaaauga

SEQ ID NO: 1237441 - RNA, 19 nt, Artificial Sequence
  Description of Artificial Sequence: Synthetic oligonucleotide
  Antisense strand to SEQ ID NO: 1237440
ucauuugcacaauauagcc

SEQ ID NO: 1237442 - RNA, 19 nt, Artificial Sequence
  Description of Artificial Sequence: Synthetic oligonucleotide
  Sense strand starting at position 595 of SEQ ID NO: 917486
ucagaacaauuugauaagu

SEQ ID NO: 1237443 - RNA, 19 nt, Artificial Sequence
  Description of Artificial Sequence: Synthetic oligonucleotide
  Antisense strand to SEQ ID NO: 1237442
acuuaucaaauuguucuga

SEQ ID NO: 1237444 - RNA, 19 nt, Artificial Sequence
  Description of Artificial Sequence: Synthetic oligonucleotide
  Sense strand starting at position 597 of SEQ ID NO: 917486
agaacaauuugauaagugu

SEQ ID NO: 1237445 - RNA, 19 nt, Artificial Sequence
  Description of Artificial Sequence: Synthetic oligonucleotide
  Antisense strand to SEQ ID NO: 1237444
acacuuaucaaauuguucu

SEQ ID NO: 1237446 - RNA, 19 nt, Artificial Sequence
  Description of Artificial Sequence: Synthetic oligonucleotide
  Sense strand starting at position 640 of SEQ ID NO: 917486
guacucacaucucugugaa

SEQ ID NO: 1237447 - RNA, 19 nt, Artificial Sequence
  Description of Artificial Sequence: Synthetic oligonucleotide
  Antisense strand to SEQ ID NO: 1237446
uucacagagaugugaguac

SEQ ID NO: 1237448 - RNA, 19 nt, Artificial Sequence
  Description of Artificial Sequence: Synthetic oligonucleotide
  Sense strand starting at position 642 of SEQ ID NO: 917486
acucacaucucugugaaug

SEQ ID NO: 1237449 - RNA, 19 nt, Artificial Sequence
  Description of Artificial Sequence: Synthetic oligonucleotide
  Antisense strand to SEQ ID NO: 1237448
cauucacagagaugugagu

SEQ ID NO: 1237450 - RNA, 19 nt, Artificial Sequence
  Description of Artificial Sequence: Synthetic oligonucleotide
  Sense strand starting at position 728 of SEQ ID NO: 917486
auaagcacugccuggaauu

SEQ ID NO: 1237451 - RNA, 19 nt, Artificial Sequence
  Description of Artificial Sequence: Synthetic oligonucleotide
  Antisense strand to SEQ ID NO: 1237450
aauuccaggcagugcuuau

SEQ ID NO: 1237452 - RNA, 19 nt, Artificial Sequence
  Description of Artificial Sequence: Synthetic oligonucleotide
  Sense strand starting at position 823 of SEQ ID NO: 917486
ccugaaguaacgcaaugua

SEQ ID NO: 1237453 - RNA, 19 nt, Artificial Sequence
  Description of Artificial Sequence: Synthetic oligonucleotide
  Antisense strand to SEQ ID NO: 1237452
uacauugcguuacuucagg

SEQ ID NO: 1237454 - RNA, 19 nt, Artificial Sequence
  Description of Artificial Sequence: Synthetic oligonucleotide
  Sense strand starting at position 888 of SEQ ID NO: 917486
agaaauaucguuugcauga

SEQ ID NO: 1237455 - RNA, 19 nt, Artificial Sequence
  Description of Artificial Sequence: Synthetic oligonucleotide
  Antisense strand to SEQ ID NO: 1237454
ucaugcaaacgauauuucu

SEQ ID NO: 1237456 - RNA, 19 nt, Artificial Sequence
  Description of Artificial Sequence: Synthetic oligonucleotide
  Sense strand starting at position 924 of SEQ ID NO: 917486
cuguuuccuguuuacauaa

SEQ ID NO: 1237457 - RNA, 19 nt, Artificial Sequence
  Description of Artificial Sequence: Synthetic oligonucleotide
  Antisense strand to SEQ ID NO: 1237456
uuauguaaacaggaaacag

SEQ ID NO: 1237458 - RNA, 19 nt, Artificial Sequence
  Description of Artificial Sequence: Synthetic oligonucleotide
  Sense strand starting at position 1098 of SEQ ID NO: 917486
ugacauggguuucuuacaa

SEQ ID NO: 1237459 - RNA, 19 nt, Artificial Sequence
  Description of Artificial Sequence: Synthetic oligonucleotide
  Antisense strand to SEQ ID NO: 1237458
uuguaagaaacccauguca

SEQ ID NO: 1237460 - RNA, 19 nt, Artificial Sequence
  Description of Artificial Sequence: Synthetic oligonucleotide
  Sense strand starting at position 1105 of SEQ ID NO: 917486
gguuucuuacaauagugaa

SEQ ID NO: 1237461 - RNA, 19 nt, Artificial Sequence
  Description of Artificial Sequence: Synthetic oligonucleotide
  Antisense strand to SEQ ID NO: 1237460
uucacuauuguaagaaacc

SEQ ID NO: 1237462 - RNA, 19 nt, Artificial Sequence
  Description of Artificial Sequence: Synthetic oligonucleotide
  Sense strand starting at position 1184 of SEQ ID NO: 917486
acuugaucuccaggaguau

SEQ ID NO: 1237463 - RNA, 19 nt, Artificial Sequence
  Description of Artificial Sequence: Synthetic oligonucleotide
  Antisense strand to SEQ ID NO: 1237462
auacuccuggagaucaagu

SEQ ID NO: 1237464 - RNA, 19 nt, Artificial Sequence
  Description of Artificial Sequence: Synthetic oligonucleotide
  Sense strand starting at position 1195 of SEQ ID NO: 917486
aggaguauauuagccaaau

SEQ ID NO: 1237465 - RNA, 19 nt, Artificial Sequence
  Description of Artificial Sequence: Synthetic oligonucleotide
  Antisense strand to SEQ ID NO: 1237464
auuuggcuaauauacuccu

SEQ ID NO: 1237466 - RNA, 19 nt, Artificial Sequence
  Description of Artificial Sequence: Synthetic oligonucleotide
  Sense strand starting at position 1196 of SEQ ID NO: 917486
ggaguauauuagccaaauu

SEQ ID NO: 1237467 - RNA, 19 nt, Artificial Sequence
  Description of Artificial Sequence: Synthetic oligonucleotide
  Antisense strand to SEQ ID NO: 1237466
aauuuggcuaauauacucc

SEQ ID NO: 1237468 - RNA, 19 nt, Artificial Sequence
  Description of Artificial Sequence: Synthetic oligonucleotide
  Sense strand starting at position 1218 of SEQ ID NO: 917486
gucccaugagauggcauua

SEQ ID NO: 1237469 - RNA, 19 nt, Artificial Sequence
  Description of Artificial Sequence: Synthetic oligonucleotide
  Antisense strand to SEQ ID NO: 1237468
uaaugccaucucaugggac

SEQ ID NO: 1237470 - RNA, 19 nt, Artificial Sequence
  Description of Artificial Sequence: Synthetic oligonucleotide
  Sense strand starting at position 2947 of SEQ ID NO: 917486
uauacuagguacuugugaa

SEQ ID NO: 1237471 - RNA, 19 nt, Artificial Sequence
  Description of Artificial Sequence: Synthetic oligonucleotide
  Antisense strand to SEQ ID NO: 1237470
uucacaaguaccuaguaua

SEQ ID NO: 1237472 - RNA, 19 nt, Artificial Sequence
  Description of Artificial Sequence: Synthetic oligonucleotide
  Sense strand starting at position 2954 of SEQ ID NO: 917486
gguacuugugaacaauguu

SEQ ID NO: 1237473 - RNA, 19 nt, Artificial Sequence
  Description of Artificial Sequence: Synthetic oligonucleotide
  Antisense strand to SEQ ID NO: 1237472
aacauuguucacaaguacc

SEQ ID NO: 1237474 - RNA, 19 nt, Artificial Sequence
  Description of Artificial Sequence: Synthetic oligonucleotide
  Sense strand starting at position 2957 of SEQ ID NO: 917486
acuugugaacaauguuaaa

SEQ ID NO: 1237475 - RNA, 19 nt, Artificial Sequence
  Description of Artificial Sequence: Synthetic oligonucleotide
  Antisense strand to SEQ ID NO: 1237474
uuuaacauuguucacaagu

SEQ ID NO: 1237476 - RNA, 19 nt, Artificial Sequence
  Description of Artificial Sequence: Synthetic oligonucleotide
  Sense strand starting at position 2988 of SEQ ID NO: 917486
gaugucacaccuugauaga

SEQ ID NO: 1237477 - RNA, 19 nt, Artificial Sequence
  Description of Artificial Sequence: Synthetic oligonucleotide
  Antisense strand to SEQ ID NO: 1237476
ucuaucaaggugugacauc

SEQ ID NO: 1237478 - RNA, 19 nt, Artificial Sequence
  Description of Artificial Sequence: Synthetic oligonucleotide
  Sense strand starting at position 2998 of SEQ ID NO: 917486
cuugauagagguuguauau

SEQ ID NO: 1237479 - RNA, 19 nt, Artificial Sequence
  Description of Artificial Sequence: Synthetic oligonucleotide
  Antisense strand to SEQ ID NO: 1237478
auauacaaccucuaucaag

SEQ ID NO: 1237480 - RNA, 19 nt, Artificial Sequence
  Description of Artificial Sequence: Synthetic oligonucleotide
  Sense strand starting at position 3064 of SEQ ID NO: 917486
guaaacgauuuccaaauga

SEQ ID NO: 1237481 - RNA, 19 nt, Artificial Sequence
  Description of Artificial Sequence: Synthetic oligonucleotide
  Antisense strand to SEQ ID NO: 1237480
ucauuuggaaaucguuuac

SEQ ID NO: 1237482 - RNA, 19 nt, Artificial Sequence
  Description of Artificial Sequence: Synthetic oligonucleotide
  Sense strand starting at position 3078 of SEQ ID NO: 917486
aaugauguacguuaucuaa

SEQ ID NO: 1237483 - RNA, 19 nt, Artificial Sequence
  Description of Artificial Sequence: Synthetic oligonucleotide
  Antisense strand to SEQ ID NO: 1237482
uuagauaacguacaucauu

SEQ ID NO: 1237484 - RNA, 19 nt, Artificial Sequence
  Description of Artificial Sequence: Synthetic oligonucleotide
  Sense strand starting at position 3081 of SEQ ID NO: 917486
gauguacguuaucuaauuu

SEQ ID NO: 1237485 - RNA, 19 nt, Artificial Sequence
  Description of Artificial Sequence: Synthetic oligonucleotide
  Antisense strand to SEQ ID NO: 1237484
aaauuagauaacguacauc

SEQ ID NO: 1237486 - RNA, 19 nt, Artificial Sequence
  Description of Artificial Sequence: Synthetic oligonucleotide
  Sense strand starting at position 3295 of SEQ ID NO: 917486
gauggauacucagcacuuc

SEQ ID NO: 1237487 - RNA, 19 nt, Artificial Sequence
  Description of Artificial Sequence: Synthetic oligonucleotide
  Antisense strand to SEQ ID NO: 1237486
gaagugcugaguauccauc

SEQ ID NO: 1237488 - RNA, 19 nt, Artificial Sequence
  Description of Artificial Sequence: Synthetic oligonucleotide
  Sense strand starting at position 3479 of SEQ ID NO: 917486
uacugucaggcugaagagu

SEQ ID NO: 1237489 - RNA, 19 nt, Artificial Sequence
  Description of Artificial Sequence: Synthetic oligonucleotide
  Antisense strand to SEQ ID NO: 1237488
acucuucagccugacagua

SEQ ID NO: 1237490 - RNA, 19 nt, Artificial Sequence
  Description of Artificial Sequence: Synthetic oligonucleotide
  Sense strand starting at position 3490 of SEQ ID NO: 917486
ugaagagucacaggagguu

SEQ ID NO: 1237491 - RNA, 19 nt, Artificial Sequence
  Description of Artificial Sequence: Synthetic oligonucleotide
  Antisense strand to SEQ ID NO: 1237490
aaccuccugugacucuuca

SEQ ID NO: 1237492 - RNA, 19 nt, Artificial Sequence
  Description of Artificial Sequence: Synthetic oligonucleotide
  Sense strand starting at position 3502 of SEQ ID NO: 917486
ggagguuccucacuguaaa

SEQ ID NO: 1237493 - RNA, 19 nt, Artificial Sequence
  Description of Artificial Sequence: Synthetic oligonucleotide
  Antisense strand to SEQ ID NO: 1237492
uuuacagugaggaaccucc

SEQ ID NO: 1237494 - RNA, 19 nt, Artificial Sequence
  Description of Artificial Sequence: Synthetic oligonucleotide
  Sense strand starting at position 3503 of SEQ ID NO: 917486
gagguuccucacuguaaag

SEQ ID NO: 1237495 - RNA, 19 nt, Artificial Sequence
  Description of Artificial Sequence: Synthetic oligonucleotide
  Antisense strand to SEQ ID NO: 1237494
cuuuacagugaggaaccuc

SEQ ID NO: 1237496 - RNA, 19 nt, Artificial Sequence
  Description of Artificial Sequence: Synthetic oligonucleotide
  Sense strand starting at position 3505 of SEQ ID NO: 917486
gguuccucacuguaaagaa

SEQ ID NO: 1237497 - RNA, 19 nt, Artificial Sequence
  Description of Artificial Sequence: Synthetic oligonucleotide
  Antisense strand to SEQ ID NO: 1237496
uucuuuacagugaggaacc

SEQ ID NO: 1237498 - RNA, 19 nt, Artificial Sequence
  Description of Artificial Sequence: Synthetic oligonucleotide
  Sense strand starting at position 3752 of SEQ ID NO: 917486
ccucaauucugagccuaug

SEQ ID NO: 1237499 - RNA, 19 nt, Artificial Sequence
  Description of Artificial Sequence: Synthetic oligonucleotide
  Antisense strand to SEQ ID NO: 1237498
cauaggcucagaauugagg

SEQ ID NO: 1237500 - RNA, 19 nt, Artificial Sequence
  Description of Artificial Sequence: Synthetic oligonucleotide
  Sense strand starting at position 3826 of SEQ ID NO: 917486
ucauaagauucuguguacu

SEQ ID NO: 1237501 - RNA, 19 nt, Artificial Sequence
  Description of Artificial Sequence: Synthetic oligonucleotide
  Antisense strand to SEQ ID NO: 1237500
aguacacagaaucuuauga

SEQ ID NO: 1237502 - RNA, 19 nt, Artificial Sequence
  Description of Artificial Sequence: Synthetic oligonucleotide
  Sense strand starting at position 3828 of SEQ ID NO: 917486
auaagauucuguguacuaa

SEQ ID NO: 1237503 - RNA, 19 nt, Artificial Sequence
  Description of Artificial Sequence: Synthetic oligonucleotide
  Antisense strand to SEQ ID NO: 1237502
uuaguacacagaaucuuau

SEQ ID NO: 1237504 - RNA, 19 nt, Artificial Sequence
  Description of Artificial Sequence: Synthetic oligonucleotide
  Sense strand starting at position 3947 of SEQ ID NO: 917486
aaagcuuucugaguggaau

SEQ ID NO: 1237505 - RNA, 19 nt, Artificial Sequence
  Description of Artificial Sequence: Synthetic oligonucleotide
  Antisense strand to SEQ ID NO: 1237504
auuccacucagaaagcuuu

SEQ ID NO: 1237506 - RNA, 19 nt, Artificial Sequence
  Description of Artificial Sequence: Synthetic oligonucleotide
  Sense strand starting at position 3948 of SEQ ID NO: 917486
aagcuuucugaguggaauu

SEQ ID NO: 1237507 - RNA, 19 nt, Artificial Sequence
  Description of Artificial Sequence: Synthetic oligonucleotide
  Antisense strand to SEQ ID NO: 1237506
aauuccacucagaaagcuu

SEQ ID NO: 1237508 - RNA, 19 nt, Artificial Sequence
  Description of Artificial Sequence: Synthetic oligonucleotide
  Sense strand starting at position 3949 of SEQ ID NO: 917486
agcuuucugaguggaauug

SEQ ID NO: 1237509 - RNA, 19 nt, Artificial Sequence
  Description of Artificial Sequence: Synthetic oligonucleotide
  Antisense strand to SEQ ID NO: 1237508
caauuccacucagaaagcu

SEQ ID NO: 1237510 - RNA, 19 nt, Artificial Sequence
  Description of Artificial Sequence: Synthetic oligonucleotide
  Sense strand starting at position 3950 of SEQ ID NO: 917486
gcuuucugaguggaauuga

SEQ ID NO: 1237511 - RNA, 19 nt, Artificial Sequence
  Description of Artificial Sequence: Synthetic oligonucleotide
  Antisense strand to SEQ ID NO: 1237510
ucaauuccacucagaaagc

SEQ ID NO: 1237512 - RNA, 19 nt, Artificial Sequence
  Description of Artificial Sequence: Synthetic oligonucleotide
  Sense strand starting at position 3982 of SEQ ID NO: 917487
ggaacuaccuucucugacu

SEQ ID NO: 1237513 - RNA, 19 nt, Artificial Sequence
  Description of Artificial Sequence: Synthetic oligonucleotide
  Antisense strand to SEQ ID NO: 1237512
agucagagaagguaguucc

SEQ ID NO: 1237514 - RNA, 19 nt, Artificial Sequence
  Description of Artificial Sequence: Synthetic oligonucleotide
  Sense strand starting at position 49 of SEQ ID NO: 917487
ccgauauugcaggauauug

SEQ ID NO: 1237515 - RNA, 19 nt, Artificial Sequence
  Description of Artificial Sequence: Synthetic oligonucleotide
  Antisense strand to SEQ ID NO: 1237514
caauauccugcaauaucgg

SEQ ID NO: 1237516 - RNA, 19 nt, Artificial Sequence
  Description of Artificial Sequence: Synthetic oligonucleotide
  Sense strand starting at position 178 of SEQ ID NO: 917487
auauaaucaguuuagcaug

SEQ ID NO: 1237517 - RNA, 19 nt, Artificial Sequence
  Description of Artificial Sequence: Synthetic oligonucleotide
  Antisense strand to SEQ ID NO: 1237516
caugcuaaacugauuauau

SEQ ID NO: 1237518 - RNA, 19 nt, Artificial Sequence
  Description of Artificial Sequence: Synthetic oligonucleotide
  Sense strand starting at position 189 of SEQ ID NO: 917487
uuagcauggcuuuaaauaa

SEQ ID NO: 1237519 - RNA, 19 nt, Artificial Sequence
  Description of Artificial Sequence: Synthetic oligonucleotide
  Antisense strand to SEQ ID NO: 1237518
uuauuuaaagccaugcuaa

SEQ ID NO: 1237520 - RNA, 19 nt, Artificial Sequence
  Description of Artificial Sequence: Synthetic oligonucleotide
  Sense strand starting at position 265 of SEQ ID NO: 917487
cuaguaucaagaggaaagu

SEQ ID NO: 1237521 - RNA, 19 nt, Artificial Sequence
  Description of Artificial Sequence: Synthetic oligonucleotide
  Antisense strand to SEQ ID NO: 1237520
acuuuccucuugauacuag

SEQ ID NO: 1237522 - RNA, 19 nt, Artificial Sequence
  Description of Artificial Sequence: Synthetic oligonucleotide
  Sense strand starting at position 378 of SEQ ID NO: 917487
aaggauaacuggucuuauc

SEQ ID NO: 1237523 - RNA, 19 nt, Artificial Sequence
  Description of Artificial Sequence: Synthetic oligonucleotide
  Antisense strand to SEQ ID NO: 1237522
gauaagaccaguuauccuu

SEQ ID NO: 1237524 - RNA, 19 nt, Artificial Sequence
  Description of Artificial Sequence: Synthetic oligonucleotide
  Sense strand starting at position 496 of SEQ ID NO: 917487
aaacaucgcgaacaaagua

SEQ ID NO: 1237525 - RNA, 19 nt, Artificial Sequence
  Description of Artificial Sequence: Synthetic oligonucleotide
  Antisense strand to SEQ ID NO: 1237524
uacuuuguucgcgauguuu

SEQ ID NO: 1237526 - RNA, 19 nt, Artificial Sequence
  Description of Artificial Sequence: Synthetic oligonucleotide
  Sense strand starting at position 634 of SEQ ID NO: 917487
ucaaauucgguacagcaau

SEQ ID NO: 1237527 - RNA, 19 nt, Artificial Sequence
  Description of Artificial Sequence: Synthetic oligonucleotide
  Antisense strand to SEQ ID NO: 1237526
auugcuguaccgaauuuga

SEQ ID NO: 1237528 - RNA, 19 nt, Artificial Sequence
  Description of Artificial Sequence: Synthetic oligonucleotide
  Sense strand starting at position 640 of SEQ ID NO: 917487
ucgguacagcaauauaauu

SEQ ID NO: 1237529 - RNA, 19 nt, Artificial Sequence
  Description of Artificial Sequence: Synthetic oligonucleotide
  Antisense strand to SEQ ID NO: 1237528
aauuauauugcuguaccga

SEQ ID NO: 1237530 - RNA, 19 nt, Artificial Sequence
  Description of Artificial Sequence: Synthetic oligonucleotide
  Sense strand starting at position 697 of SEQ ID NO: 917487
ugacuaagauacuuuaugu

SEQ ID NO: 1237531 - RNA, 19 nt, Artificial Sequence
  Description of Artificial Sequence: Synthetic oligonucleotide
  Antisense strand to SEQ ID NO: 1237530
acauaaaguaucuuaguca

SEQ ID NO: 1237532 - RNA, 19 nt, Artificial Sequence
  Description of Artificial Sequence: Synthetic oligonucleotide
  Sense strand starting at position 725 of SEQ ID NO: 917487
acuguugauuacucagaua

SEQ ID NO: 1237533 - RNA, 19 nt, Artificial Sequence
  Description of Artificial Sequence: Synthetic oligonucleotide
  Antisense strand to SEQ ID NO: 1237532
uaucugaguaaucaacagu

SEQ ID NO: 1237534 - RNA, 19 nt, Artificial Sequence
  Description of Artificial Sequence: Synthetic oligonucleotide
  Sense strand starting at position 962 of SEQ ID NO: 917487
uuaaucauacuugaugguu

SEQ ID NO: 1237535 - RNA, 19 nt, Artificial Sequence
  Description of Artificial Sequence: Synthetic oligonucleotide
  Antisense strand to SEQ ID NO: 1237534
aaccaucaaguaugauuaa

SEQ ID NO: 1237536 - RNA, 19 nt, Artificial Sequence
  Description of Artificial Sequence: Synthetic oligonucleotide
  Sense strand starting at position 1070 of SEQ ID NO: 917487
gaaacaguauugccagaga

SEQ ID NO: 1237537 - RNA, 19 nt, Artificial Sequence
  Description of Artificial Sequence: Synthetic oligonucleotide
  Antisense strand to SEQ ID NO: 1237536
ucucuggcaauacuguuuc

SEQ ID NO: 1237538 - RNA, 19 nt, Artificial Sequence
  Description of Artificial Sequence: Synthetic oligonucleotide
  Sense strand starting at position 1073 of SEQ ID NO: 917487
acaguauugccagagauac

SEQ ID NO: 1237539 - RNA, 19 nt, Artificial Sequence
  Description of Artificial Sequence: Synthetic oligonucleotide
  Antisense strand to SEQ ID NO: 1237538
guaucucuggcaauacugu

SEQ ID NO: 1237540 - RNA, 19 nt, Artificial Sequence
  Description of Artificial Sequence: Synthetic oligonucleotide
  Sense strand starting at position 1188 of SEQ ID NO: 917487
gcaauuauagcucacagau

SEQ ID NO: 1237541 - RNA, 19 nt, Artificial Sequence
  Description of Artificial Sequence: Synthetic oligonucleotide
  Antisense strand to SEQ ID NO: 1237540
aucugugagcuauaauugc

SEQ ID NO: 1237542 - RNA, 19 nt, Artificial Sequence
  Description of Artificial Sequence: Synthetic oligonucleotide
  Sense strand starting at position 1237 of SEQ ID NO: 917487
aagugagcgcuguucuguu

SEQ ID NO: 1237543 - RNA, 19 nt, Artificial Sequence
  Description of Artificial Sequence: Synthetic oligonucleotide
  Antisense strand to SEQ ID NO: 1237542
aacagaacagcgcucacuu

SEQ ID NO: 1237544 - RNA, 19 nt, Artificial Sequence
  Description of Artificial Sequence: Synthetic oligonucleotide
  Sense strand starting at position 1344 of SEQ ID NO: 917487
uuccauaguuacucugaua

SEQ ID NO: 1237545 - RNA, 19 nt, Artificial Sequence
  Description of Artificial Sequence: Synthetic oligonucleotide
  Antisense strand to SEQ ID NO: 1237544
uaucagaguaacuauggaa

SEQ ID NO: 1237546 - RNA, 19 nt, Artificial Sequence
  Description of Artificial Sequence: Synthetic oligonucleotide
  Sense strand starting at position 1999 of SEQ ID NO: 917487
ugcagaucccaugacauca

SEQ ID NO: 1237547 - RNA, 19 nt, Artificial Sequence
  Description of Artificial Sequence: Synthetic oligonucleotide
  Antisense strand to SEQ ID NO: 1237546
ugaugucaugggaucugca

SEQ ID NO: 1237548 - RNA, 19 nt, Artificial Sequence
  Description of Artificial Sequence: Synthetic oligonucleotide
  Sense strand starting at position 2083 of SEQ ID NO: 917487
gccagaguuuggcugauuu

SEQ ID NO: 1237549 - RNA, 19 nt, Artificial Sequence
  Description of Artificial Sequence: Synthetic oligonucleotide
  Antisense strand to SEQ ID NO: 1237548
aaaucagccaaacucuggc

SEQ ID NO: 1237550 - RNA, 19 nt, Artificial Sequence
  Description of Artificial Sequence: Synthetic oligonucleotide
  Sense strand starting at position 2094 of SEQ ID NO: 917487
gcugauuucuaaucauguu

SEQ ID NO: 1237551 - RNA, 19 nt, Artificial Sequence
  Description of Artificial Sequence: Synthetic oligonucleotide
  Antisense strand to SEQ ID NO: 1237550
aacaugauuagaaaucagc

SEQ ID NO: 1237552 - RNA, 19 nt, Artificial Sequence
  Description of Artificial Sequence: Synthetic oligonucleotide
  Sense strand starting at position 2187 of SEQ ID NO: 917487
ugcuucuugggugauaaga

SEQ ID NO: 1237553 - RNA, 19 nt, Artificial Sequence
  Description of Artificial Sequence: Synthetic oligonucleotide
  Antisense strand to SEQ ID NO: 1237552
ucuuaucacccaagaagca

SEQ ID NO: 1237554 - RNA, 19 nt, Artificial Sequence
  Description of Artificial Sequence: Synthetic oligonucleotide
  Sense strand starting at position 2314 of SEQ ID NO: 917487
gcacuaugagaccacucua

SEQ ID NO: 1237555 - RNA, 19 nt, Artificial Sequence
  Description of Artificial Sequence: Synthetic oligonucleotide
  Antisense strand to SEQ ID NO: 1237554
uagaguggucucauagugc

SEQ ID NO: 1237556 - RNA, 19 nt, Artificial Sequence
  Description of Artificial Sequence: Synthetic oligonucleotide
  Sense strand starting at position 2398 of SEQ ID NO: 917487
agugacaagucuuuaagga

SEQ ID NO: 1237557 - RNA, 19 nt, Artificial Sequence
  Description of Artificial Sequence: Synthetic oligonucleotide
  Antisense strand to SEQ ID NO: 1237556
uccuuaaagacuugucacu

SEQ ID NO: 1237558 - RNA, 19 nt, Artificial Sequence
  Description of Artificial Sequence: Synthetic oligonucleotide
  Sense strand starting at position 2477 of SEQ ID NO: 917487
ccggguuguguuaaguagu

SEQ ID NO: 1237559 - RNA, 19 nt, Artificial Sequence
  Description of Artificial Sequence: Synthetic oligonucleotide
  Antisense strand to SEQ ID NO: 1237558
acuacuuaacacaacccgg

SEQ ID NO: 1237560 - RNA, 19 nt, Artificial Sequence
  Description of Artificial Sequence: Synthetic oligonucleotide
  Sense strand starting at position 2491 of SEQ ID NO: 917487
guaguuaagcagcagauaa

SEQ ID NO: 1237561 - RNA, 19 nt, Artificial Sequence
  Description of Artificial Sequence: Synthetic oligonucleotide
  Antisense strand to SEQ ID NO: 1237560
uuaucugcugcuuaacuac

SEQ ID NO: 1237562 - RNA, 19 nt, Artificial Sequence
  Description of Artificial Sequence: Synthetic oligonucleotide
  Sense strand starting at position 2649 of SEQ ID NO: 917487
uuaauacuuguugagcauu

SEQ ID NO: 1237563 - RNA, 19 nt, Artificial Sequence
  Description of Artificial Sequence: Synthetic oligonucleotide
  Antisense strand to SEQ ID NO: 1237562
aaugcucaacaaguauuaa

SEQ ID NO: 1237564 - RNA, 19 nt, Artificial Sequence
  Description of Artificial Sequence: Synthetic oligonucleotide
  Sense strand starting at position 2699 of SEQ ID NO: 917487
caaagcauuugcccuguga

SEQ ID NO: 1237565 - RNA, 19 nt, Artificial Sequence
  Description of Artificial Sequence: Synthetic oligonucleotide
  Antisense strand to SEQ ID NO: 1237564
ucacagggcaaaugcuuug

SEQ ID NO: 1237566 - RNA, 19 nt, Artificial Sequence
  Description of Artificial Sequence: Synthetic oligonucleotide
  Sense strand starting at position 2701 of SEQ ID NO: 917487
aagcauuugcccugugauu

SEQ ID NO: 1237567 - RNA, 19 nt, Artificial Sequence
  Description of Artificial Sequence: Synthetic oligonucleotide
  Antisense strand to SEQ ID NO: 1237566
aaucacagggcaaaugcuu

SEQ ID NO: 1237568 - RNA, 19 nt, Artificial Sequence
  Description of Artificial Sequence: Synthetic oligonucleotide
  Sense strand starting at position 2703 of SEQ ID NO: 917487
gcauuugcccugugauuau

SEQ ID NO: 1237569 - RNA, 19 nt, Artificial Sequence
  Description of Artificial Sequence: Synthetic oligonucleotide
  Antisense strand to SEQ ID NO: 1237568
auaaucacagggcaaaugc

SEQ ID NO: 1237570 - RNA, 19 nt, Artificial Sequence
  Description of Artificial Sequence: Synthetic oligonucleotide
  Sense strand starting at position 2762 of SEQ ID NO: 917487
gaacucauaguuuggacuu

SEQ ID NO: 1237571 - RNA, 19 nt, Artificial Sequence
  Description of Artificial Sequence: Synthetic oligonucleotide
  Antisense strand to SEQ ID NO: 1237570
aaguccaaacuaugaguuc

SEQ ID NO: 1237572 - RNA, 19 nt, Artificial Sequence
  Description of Artificial Sequence: Synthetic oligonucleotide
  Sense strand starting at position 2807 of SEQ ID NO: 917487
agccuaauucuucguauuu

SEQ ID NO: 1237573 - RNA, 19 nt, Artificial Sequence
  Description of Artificial Sequence: Synthetic oligonucleotide
  Antisense strand to SEQ ID NO: 1237572
aaauacgaagaauuaggcu

SEQ ID NO: 1237574 - RNA, 19 nt, Artificial Sequence
  Description of Artificial Sequence: Synthetic oligonucleotide
  Sense strand starting at position 3186 of SEQ ID NO: 917487
aguguuuauuuccagauuu

SEQ ID NO: 1237575 - RNA, 19 nt, Artificial Sequence
  Description of Artificial Sequence: Synthetic oligonucleotide
  Antisense strand to SEQ ID NO: 1237574
aaaucuggaaauaaacacu

SEQ ID NO: 1237576 - RNA, 19 nt, Artificial Sequence
  Description of Artificial Sequence: Synthetic oligonucleotide
  Sense strand starting at position 3253 of SEQ ID NO: 917487
ucauaaguucuguauaaca

SEQ ID NO: 1237577 - RNA, 19 nt, Artificial Sequence
  Description of Artificial Sequence: Synthetic oligonucleotide
  Antisense strand to SEQ ID NO: 1237576
uguuauacagaacuuauga

SEQ ID NO: 1237578 - RNA, 19 nt, Artificial Sequence
  Description of Artificial Sequence: Synthetic oligonucleotide
  Sense strand starting at position 3373 of SEQ ID NO: 917487
aggugugaugcuuaaggac

SEQ ID NO: 1237579 - RNA, 19 nt, Artificial Sequence
  Description of Artificial Sequence: Synthetic oligonucleotide
  Antisense strand to SEQ ID NO: 1237578
guccuuaagcaucacaccu

SEQ ID NO: 1237580 - RNA, 19 nt, Artificial Sequence
  Description of Artificial Sequence: Synthetic oligonucleotide
  Sense strand starting at position 3576 of SEQ ID NO: 917487
gccugcacucaggauuaaa

SEQ ID NO: 1237581 - RNA, 19 nt, Artificial Sequence
  Description of Artificial Sequence: Synthetic oligonucleotide
  Antisense strand to SEQ ID NO: 1237580
uuuaauccugagugcaggc

SEQ ID NO: 1237582 - RNA, 19 nt, Artificial Sequence
  Description of Artificial Sequence: Synthetic oligonucleotide
  Sense strand starting at position 3579 of SEQ ID NO: 917487
ugcacucaggauuaaaguu

SEQ ID NO: 1237583 - RNA, 19 nt, Artificial Sequence
  Description of Artificial Sequence: Synthetic oligonucleotide
  Antisense strand to SEQ ID NO: 1237582
aacuuuaauccugagugca

SEQ ID NO: 1237584 - RNA, 19 nt, Artificial Sequence
  Description of Artificial Sequence: Synthetic oligonucleotide
  Sense strand starting at position 3587 of SEQ ID NO: 917487
ggauuaaaguuucccgaua

SEQ ID NO: 1237585 - RNA, 19 nt, Artificial Sequence
  Description of Artificial Sequence: Synthetic oligonucleotide
  Antisense strand to SEQ ID NO: 1237584
uaucgggaaacuuuaaucc

SEQ ID NO: 1237586 - RNA, 19 nt, Artificial Sequence
  Description of Artificial Sequence: Synthetic oligonucleotide
  Sense strand starting at position 3592 of SEQ ID NO: 917487
aaaguuucccgauacacug

SEQ ID NO: 1237587 - RNA, 19 nt, Artificial Sequence
  Description of Artificial Sequence: Synthetic oligonucleotide
  Antisense strand to SEQ ID NO: 1237586
caguguaucgggaaacuuu

SEQ ID NO: 1237588 - RNA, 19 nt, Artificial Sequence
  Description of Artificial Sequence: Synthetic oligonucleotide
  Sense strand starting at position 3860 of SEQ ID NO: 917487
uaccaucuccaguggaaga

SEQ ID NO: 1237589 - RNA, 19 nt, Artificial Sequence
  Description of Artificial Sequence: Synthetic oligonucleotide
  Antisense strand to SEQ ID NO: 1237588
ucuuccacuggagauggua

SEQ ID NO: 1237590 - RNA, 19 nt, Artificial Sequence
  Description of Artificial Sequence: Synthetic oligonucleotide
  Sense strand starting at position 3865 of SEQ ID NO: 917487
ucuccaguggaagaguuua

SEQ ID NO: 1237591 - RNA, 19 nt, Artificial Sequence
  Description of Artificial Sequence: Synthetic oligonucleotide
  Antisense strand to SEQ ID NO: 1237590
uaaacucuuccacuggaga

SEQ ID NO: 1237592 - RNA, 19 nt, Artificial Sequence
  Description of Artificial Sequence: Synthetic oligonucleotide
  Sense strand starting at position 3885 of SEQ ID NO: 917486
ucaccaagucacuggauau

SEQ ID NO: 1237593 - RNA, 19 nt, Artificial Sequence
  Description of Artificial Sequence: Synthetic oligonucleotide
  Antisense strand to SEQ ID NO: 1237592
auauccagugacuugguga

SEQ ID NO: 1237594 - RNA, 19 nt, Artificial Sequence
  Description of Artificial Sequence: Synthetic oligonucleotide
  Sense strand starting at position 3885 of SEQ ID NO: 917488
ucaccaagucacuggauau

SEQ ID NO: 1237595 - RNA, 19 nt, Artificial Sequence
  Description of Artificial Sequence: Synthetic oligonucleotide
  Antisense strand to SEQ ID NO: 1237594
auauccagugacuugguga

SEQ ID NO: 1237596 - RNA, 19 nt, Artificial Sequence
  Description of Artificial Sequence: Synthetic oligonucleotide
  Sense strand starting at position 24 of SEQ ID NO: 917488
ggagaacuacugcaucuuu

SEQ ID NO: 1237597 - RNA, 19 nt, Artificial Sequence
  Description of Artificial Sequence: Synthetic oligonucleotide
  Antisense strand to SEQ ID NO: 1237596
aaagaugcaguaguucucc

SEQ ID NO: 1237598 - RNA, 19 nt, Artificial Sequence
  Description of Artificial Sequence: Synthetic oligonucleotide
  Sense strand starting at position 136 of SEQ ID NO: 917488
uggacacugucuguugaau

SEQ ID NO: 1237599 - RNA, 19 nt, Artificial Sequence
  Description of Artificial Sequence: Synthetic oligonucleotide
  Antisense strand to SEQ ID NO: 1237598
auucaacagacagugucca

SEQ ID NO: 1237600 - RNA, 19 nt, Artificial Sequence
  Description of Artificial Sequence: Synthetic oligonucleotide
  Sense strand starting at position 301 of SEQ ID NO: 917488
gaaagacguuuagucacuu

SEQ ID NO: 1237601 - RNA, 19 nt, Artificial Sequence
  Description of Artificial Sequence: Synthetic oligonucleotide
  Antisense strand to SEQ ID NO: 1237600
aagugacuaaacgucuuuc

SEQ ID NO: 1237602 - RNA, 19 nt, Artificial Sequence
  Description of Artificial Sequence: Synthetic oligonucleotide
  Sense strand starting at position 324 of SEQ ID NO: 917488
auagauuuguuaucugugu

SEQ ID NO: 1237603 - RNA, 19 nt, Artificial Sequence
  Description of Artificial Sequence: Synthetic oligonucleotide
  Antisense strand to SEQ ID NO: 1237602
acacagauaacaaaucuau

SEQ ID NO: 1237604 - RNA, 19 nt, Artificial Sequence
  Description of Artificial Sequence: Synthetic oligonucleotide
  Sense strand starting at position 325 of SEQ ID NO: 917488
uagauuuguuaucuguguu

SEQ ID NO: 1237605 - RNA, 19 nt, Artificial Sequence
  Description of Artificial Sequence: Synthetic oligonucleotide
  Antisense strand to SEQ ID NO: 1237604
aacacagauaacaaaucua

SEQ ID NO: 1237606 - RNA, 19 nt, Artificial Sequence
  Description of Artificial Sequence: Synthetic oligonucleotide
  Sense strand starting at position 326 of SEQ ID NO: 917488
agauuuguuaucuguguug

SEQ ID NO: 1237607 - RNA, 19 nt, Artificial Sequence
  Description of Artificial Sequence: Synthetic oligonucleotide
  Antisense strand to SEQ ID NO: 1237606
caacacagauaacaaaucu

SEQ ID NO: 1237608 - RNA, 19 nt, Artificial Sequence
  Description of Artificial Sequence: Synthetic oligonucleotide
  Sense strand starting at position 328 of SEQ ID NO: 917488
auuuguuaucuguguugca

SEQ ID NO: 1237609 - RNA, 19 nt, Artificial Sequence
  Description of Artificial Sequence: Synthetic oligonucleotide
  Antisense strand to SEQ ID NO: 1237608
ugcaacacagauaacaaau

SEQ ID NO: 1237610 - RNA, 19 nt, Artificial Sequence
  Description of Artificial Sequence: Synthetic oligonucleotide
  Sense strand starting at position 332 of SEQ ID NO: 917488
guuaucuguguugcaagca

SEQ ID NO: 1237611 - RNA, 19 nt, Artificial Sequence
  Description of Artificial Sequence: Synthetic oligonucleotide
  Antisense strand to SEQ ID NO: 1237610
ugcuugcaacacagauaac

SEQ ID NO: 1237612 - RNA, 19 nt, Artificial Sequence
  Description of Artificial Sequence: Synthetic oligonucleotide
  Sense strand starting at position 456 of SEQ ID NO: 917488
agguaaucacacuaguucu

SEQ ID NO: 1237613 - RNA, 19 nt, Artificial Sequence
  Description of Artificial Sequence: Synthetic oligonucleotide
  Antisense strand to SEQ ID NO: 1237612
agaacuagugugauuaccu

SEQ ID NO: 1237614 - RNA, 19 nt, Artificial Sequence
  Description of Artificial Sequence: Synthetic oligonucleotide
  Sense strand starting at position 528 of SEQ ID NO: 917488
aguaauggaguucgagaca

SEQ ID NO: 1237615 - RNA, 19 nt, Artificial Sequence
  Description of Artificial Sequence: Synthetic oligonucleotide
  Antisense strand to SEQ ID NO: 1237614
ugucucgaacuccauuacu

SEQ ID NO: 1237616 - RNA, 19 nt, Artificial Sequence
  Description of Artificial Sequence: Synthetic oligonucleotide
  Sense strand starting at position 541 of SEQ ID NO: 917488
gagacauuggcacauguca

SEQ ID NO: 1237617 - RNA, 19 nt, Artificial Sequence
  Description of Artificial Sequence: Synthetic oligonucleotide
  Antisense strand to SEQ ID NO: 1237616
ugacaugugccaaugucuc

SEQ ID NO: 1237618 - RNA, 19 nt, Artificial Sequence
  Description of Artificial Sequence: Synthetic oligonucleotide
  Sense strand starting at position 633 of SEQ ID NO: 917488
aaacgaauguaguccaaac

SEQ ID NO: 1237619 - RNA, 19 nt, Artificial Sequence
  Description of Artificial Sequence: Synthetic oligonucleotide
  Antisense strand to SEQ ID NO: 1237618
guuuggacuacauucguuu

SEQ ID NO: 1237620 - RNA, 19 nt, Artificial Sequence
  Description of Artificial Sequence: Synthetic oligonucleotide
  Sense strand starting at position 882 of SEQ ID NO: 917488
uuccgaagguugguuauuu

SEQ ID NO: 1237621 - RNA, 19 nt, Artificial Sequence
  Description of Artificial Sequence: Synthetic oligonucleotide
  Antisense strand to SEQ ID NO: 1237620
aaauaaccaaccuucggaa

SEQ ID NO: 1237622 - RNA, 19 nt, Artificial Sequence
  Description of Artificial Sequence: Synthetic oligonucleotide
  Sense strand starting at position 890 of SEQ ID NO: 917488
guugguuauuugcuagacu

SEQ ID NO: 1237623 - RNA, 19 nt, Artificial Sequence
  Description of Artificial Sequence: Synthetic oligonucleotide
  Antisense strand to SEQ ID NO: 1237622
agucuagcaaauaaccaac

SEQ ID NO: 1237624 - RNA, 19 nt, Artificial Sequence
  Description of Artificial Sequence: Synthetic oligonucleotide
  Sense strand starting at position 1300 of SEQ ID NO: 917488
guaugcaaucacuaccaga

SEQ ID NO: 1237625 - RNA, 19 nt, Artificial Sequence
  Description of Artificial Sequence: Synthetic oligonucleotide
  Antisense strand to SEQ ID NO: 1237624
ucugguagugauugcauac

SEQ ID NO: 1237626 - RNA, 19 nt, Artificial Sequence
  Description of Artificial Sequence: Synthetic oligonucleotide
  Sense strand starting at position 2248 of SEQ ID NO: 917488
agguccaagagauggguua

SEQ ID NO: 1237627 - RNA, 19 nt, Artificial Sequence
  Description of Artificial Sequence: Synthetic oligonucleotide
  Antisense strand to SEQ ID NO: 1237626
uaacccaucucuuggaccu

SEQ ID NO: 1237628 - RNA, 19 nt, Artificial Sequence
  Description of Artificial Sequence: Synthetic oligonucleotide
  Sense strand starting at position 2249 of SEQ ID NO: 917488
gguccaagagauggguuaa

SEQ ID NO: 1237629 - RNA, 19 nt, Artificial Sequence
  Description of Artificial Sequence: Synthetic oligonucleotide
  Antisense strand to SEQ ID NO: 1237628
uuaacccaucucuuggacc

SEQ ID NO: 1237630 - RNA, 19 nt, Artificial Sequence
  Description of Artificial Sequence: Synthetic oligonucleotide
  Sense strand starting at position 2250 of SEQ ID NO: 917488
guccaagagauggguuaaa

SEQ ID NO: 1237631 - RNA, 19 nt, Artificial Sequence
  Description of Artificial Sequence: Synthetic oligonucleotide
  Antisense strand to SEQ ID NO: 1237630
uuuaacccaucucuuggac

SEQ ID NO: 1237632 - RNA, 19 nt, Artificial Sequence
  Description of Artificial Sequence: Synthetic oligonucleotide
  Sense strand starting at position 2277 of SEQ ID NO: 917488
agaggacaccuuugcuaaa

SEQ ID NO: 1237633 - RNA, 19 nt, Artificial Sequence
  Description of Artificial Sequence: Synthetic oligonucleotide
  Antisense strand to SEQ ID NO: 1237632
uuuagcaaagguguccucu

SEQ ID NO: 1237634 - RNA, 19 nt, Artificial Sequence
  Description of Artificial Sequence: Synthetic oligonucleotide
  Sense strand starting at position 2332 of SEQ ID NO: 917488
cauucuaguuugguagaga

SEQ ID NO: 1237635 - RNA, 19 nt, Artificial Sequence
  Description of Artificial Sequence: Synthetic oligonucleotide
  Antisense strand to SEQ ID NO: 1237634
ucucuaccaaacuagaaug

SEQ ID NO: 1237636 - RNA, 19 nt, Artificial Sequence
  Description of Artificial Sequence: Synthetic oligonucleotide
  Sense strand starting at position 2374 of SEQ ID NO: 917488
cgguuuccuccuuaggauu

SEQ ID NO: 1237637 - RNA, 19 nt, Artificial Sequence
  Description of Artificial Sequence: Synthetic oligonucleotide
  Antisense strand to SEQ ID NO: 1237636
aauccuaaggaggaaaccg

SEQ ID NO: 1237638 - RNA, 19 nt, Artificial Sequence
  Description of Artificial Sequence: Synthetic oligonucleotide
  Sense strand starting at position 2405 of SEQ ID NO: 917488
uuugaugaucucugaagac

SEQ ID NO: 1237639 - RNA, 19 nt, Artificial Sequence
  Description of Artificial Sequence: Synthetic oligonucleotide
  Antisense strand to SEQ ID NO: 1237638
gucuucagagaucaucaaa

SEQ ID NO: 1237640 - RNA, 19 nt, Artificial Sequence
  Description of Artificial Sequence: Synthetic oligonucleotide
  Sense strand starting at position 2530 of SEQ ID NO: 917488
gcaucuugaaggugacauu

SEQ ID NO: 1237641 - RNA, 19 nt, Artificial Sequence
  Description of Artificial Sequence: Synthetic oligonucleotide
  Antisense strand to SEQ ID NO: 1237640
aaugucaccuucaagaugc

SEQ ID NO: 1237642 - RNA, 19 nt, Artificial Sequence
  Description of Artificial Sequence: Synthetic oligonucleotide
  Sense strand starting at position 3009 of SEQ ID NO: 917488
ggacuaacaucuguagacu

SEQ ID NO: 1237643 - RNA, 19 nt, Artificial Sequence
  Description of Artificial Sequence: Synthetic oligonucleotide
  Antisense strand to SEQ ID NO: 1237642
agucuacagauguuagucc

SEQ ID NO: 1237644 - RNA, 19 nt, Artificial Sequence
  Description of Artificial Sequence: Synthetic oligonucleotide
  Sense strand starting at position 3155 of SEQ ID NO: 917488
auacuaugccaugauaugu

SEQ ID NO: 1237645 - RNA, 19 nt, Artificial Sequence
  Description of Artificial Sequence: Synthetic oligonucleotide
  Antisense strand to SEQ ID NO: 1237644
acauaucauggcauaguau

SEQ ID NO: 1237646 - RNA, 19 nt, Artificial Sequence
  Description of Artificial Sequence: Synthetic oligonucleotide
  Sense strand starting at position 3160 of SEQ ID NO: 917488
augccaugauauguuaaga

SEQ ID NO: 1237647 - RNA, 19 nt, Artificial Sequence
  Description of Artificial Sequence: Synthetic oligonucleotide
  Antisense strand to SEQ ID NO: 1237646
ucuuaacauaucauggcau

SEQ ID NO: 1237648 - RNA, 19 nt, Artificial Sequence
  Description of Artificial Sequence: Synthetic oligonucleotide
  Sense strand starting at position 3236 of SEQ ID NO: 917488
accagucuuccauggauau

SEQ ID NO: 1237649 - RNA, 19 nt, Artificial Sequence
  Description of Artificial Sequence: Synthetic oligonucleotide
  Antisense strand to SEQ ID NO: 1237648
auauccauggaagacuggu

SEQ ID NO: 1237650 - RNA, 19 nt, Artificial Sequence
  Description of Artificial Sequence: Synthetic oligonucleotide
  Sense strand starting at position 3237 of SEQ ID NO: 917488
ccagucuuccauggauauc

SEQ ID NO: 1237651 - RNA, 19 nt, Artificial Sequence
  Description of Artificial Sequence: Synthetic oligonucleotide
  Antisense strand to SEQ ID NO: 1237650
gauauccauggaagacugg

SEQ ID NO: 1237652 - RNA, 19 nt, Artificial Sequence
  Description of Artificial Sequence: Synthetic oligonucleotide
  Sense strand starting at position 3294 of SEQ ID NO: 917488
ugccuaauucgcuaaugag

SEQ ID NO: 1237653 - RNA, 19 nt, Artificial Sequence
  Description of Artificial Sequence: Synthetic oligonucleotide
  Antisense strand to SEQ ID NO: 1237652
cucauuagcgaauuaggca

SEQ ID NO: 1237654 - RNA, 19 nt, Artificial Sequence
  Description of Artificial Sequence: Synthetic oligonucleotide
  Sense strand starting at position 3325 of SEQ ID NO: 917488
caagauuugugacaaauga

SEQ ID NO: 1237655 - RNA, 19 nt, Artificial Sequence
  Description of Artificial Sequence: Synthetic oligonucleotide
  Antisense strand to SEQ ID NO: 1237654
ucauuugucacaaaucuug

SEQ ID NO: 1237656 - RNA, 19 nt, Artificial Sequence
  Description of Artificial Sequence: Synthetic oligonucleotide
  Sense strand starting at position 3339 of SEQ ID NO: 917488
aaugacaggucucugaguu

SEQ ID NO: 1237657 - RNA, 19 nt, Artificial Sequence
  Description of Artificial Sequence: Synthetic oligonucleotide
  Antisense strand to SEQ ID NO: 1237656
aacucagagaccugucauu

SEQ ID NO: 1237658 - RNA, 19 nt, Artificial Sequence
  Description of Artificial Sequence: Synthetic oligonucleotide
  Sense strand starting at position 3340 of SEQ ID NO: 917488
augacaggucucugaguua

SEQ ID NO: 1237659 - RNA, 19 nt, Artificial Sequence
  Description of Artificial Sequence: Synthetic oligonucleotide
  Antisense strand to SEQ ID NO: 1237658
uaacucagagaccugucau

SEQ ID NO: 1237660 - RNA, 19 nt, Artificial Sequence
  Description of Artificial Sequence: Synthetic oligonucleotide
  Sense strand starting at position 3343 of SEQ ID NO: 917488
acaggucucugaguuauua

SEQ ID NO: 1237661 - RNA, 19 nt, Artificial Sequence
  Description of Artificial Sequence: Synthetic oligonucleotide
  Antisense strand to SEQ ID NO: 1237660
uaauaacucagagaccugu

SEQ ID NO: 1237662 - RNA, 19 nt, Artificial Sequence
  Description of Artificial Sequence: Synthetic oligonucleotide
  Sense strand starting at position 3385 of SEQ ID NO: 917488
cuuagaccucaguaaaugu

SEQ ID NO: 1237663 - RNA, 19 nt, Artificial Sequence
  Description of Artificial Sequence: Synthetic oligonucleotide
  Antisense strand to SEQ ID NO: 1237662
acauuuacugaggucuaag

SEQ ID NO: 1237664 - RNA, 19 nt, Artificial Sequence
  Description of Artificial Sequence: Synthetic oligonucleotide
  Sense strand starting at position 3495 of SEQ ID NO: 917488
uguguaucaauauauaggu

SEQ ID NO: 1237665 - RNA, 19 nt, Artificial Sequence
  Description of Artificial Sequence: Synthetic oligonucleotide
  Antisense strand to SEQ ID NO: 1237664
accuauauauugauacaca

SEQ ID NO: 1237666 - RNA, 19 nt, Artificial Sequence
  Description of Artificial Sequence: Synthetic oligonucleotide
  Sense strand starting at position 3504 of SEQ ID NO: 917488
auauauagguugguggaga

SEQ ID NO: 1237667 - RNA, 19 nt, Artificial Sequence
  Description of Artificial Sequence: Synthetic oligonucleotide
  Antisense strand to SEQ ID NO: 1237666
ucuccaccaaccuauauau

SEQ ID NO: 1237668 - RNA, 19 nt, Artificial Sequence
  Description of Artificial Sequence: Synthetic oligonucleotide
  Sense strand starting at position 3608 of SEQ ID NO: 917488
guuuguuaacuuugggaag

SEQ ID NO: 1237669 - RNA, 19 nt, Artificial Sequence
  Description of Artificial Sequence: Synthetic oligonucleotide
  Antisense strand to SEQ ID NO: 1237668
cuucccaaaguuaacaaac

SEQ ID NO: 1237670 - RNA, 19 nt, Artificial Sequence
  Description of Artificial Sequence: Synthetic oligonucleotide
  Sense strand starting at position 3863 of SEQ ID NO: 917488
acaucuugauccucagguu

SEQ ID NO: 1237671 - RNA, 19 nt, Artificial Sequence
  Description of Artificial Sequence: Synthetic oligonucleotide
  Antisense strand to SEQ ID NO: 1237670
aaccugaggaucaagaugu

SEQ ID NO: 1237672 - RNA, 19 nt, Artificial Sequence
  Description of Artificial Sequence: Synthetic oligonucleotide
  Sense strand starting at position 3956 of SEQ ID NO: 917488
guuacauuccuacagaguu

SEQ ID NO: 1237673 - RNA, 19 nt, Artificial Sequence
  Description of Artificial Sequence: Synthetic oligonucleotide
  Antisense strand to SEQ ID NO: 1237672
aacucuguaggaauguaac

SEQ ID NO: 1237674 - RNA, 19 nt, Artificial Sequence
  Description of Artificial Sequence: Synthetic oligonucleotide
  Sense strand starting at position 3979 of SEQ ID NO: 917489
auaugacauuucuacuagu

SEQ ID NO: 1237675 - RNA, 19 nt, Artificial Sequence
  Description of Artificial Sequence: Synthetic oligonucleotide
  Antisense strand to SEQ ID NO: 1237674
acuaguagaaaugucauau

SEQ ID NO: 1237676 - RNA, 19 nt, Artificial Sequence
  Description of Artificial Sequence: Synthetic oligonucleotide
  Sense strand starting at position 12 of SEQ ID NO: 917489
auauacaaugcuugguaua

SEQ ID NO: 1237677 - RNA, 19 nt, Artificial Sequence
  Description of Artificial Sequence: Synthetic oligonucleotide
  Antisense strand to SEQ ID NO: 1237676
uauaccaagcauuguauau

SEQ ID NO: 1237678 - RNA, 19 nt, Artificial Sequence
  Description of Artificial Sequence: Synthetic oligonucleotide
  Sense strand starting at position 566 of SEQ ID NO: 917489
uaagcauguggauauucua

SEQ ID NO: 1237679 - RNA, 19 nt, Artificial Sequence
  Description of Artificial Sequence: Synthetic oligonucleotide
  Antisense strand to SEQ ID NO: 1237678
uagaauauccacaugcuua

SEQ ID NO: 1237680 - RNA, 19 nt, Artificial Sequence
  Description of Artificial Sequence: Synthetic oligonucleotide
  Sense strand starting at position 569 of SEQ ID NO: 917489
gcauguggauauucuagaa

SEQ ID NO: 1237681 - RNA, 19 nt, Artificial Sequence
  Description of Artificial Sequence: Synthetic oligonucleotide
  Antisense strand to SEQ ID NO: 1237680
uucuagaauauccacaugc

SEQ ID NO: 1237682 - RNA, 19 nt, Artificial Sequence
  Description of Artificial Sequence: Synthetic oligonucleotide
  Sense strand starting at position 739 of SEQ ID NO: 917489
agaaauacaugggacauua

SEQ ID NO: 1237683 - RNA, 19 nt, Artificial Sequence
  Description of Artificial Sequence: Synthetic oligonucleotide
  Antisense strand to SEQ ID NO: 1237682
uaaugucccauguauuucu

SEQ ID NO: 1237684 - RNA, 19 nt, Artificial Sequence
  Description of Artificial Sequence: Synthetic oligonucleotide
  Sense strand starting at position 833 of SEQ ID NO: 917489
auauuauggugagaacuuu

SEQ ID NO: 1237685 - RNA, 19 nt, Artificial Sequence
  Description of Artificial Sequence: Synthetic oligonucleotide
  Antisense strand to SEQ ID NO: 1237684
aaaguucucaccauaauau

SEQ ID NO: 1237686 - RNA, 19 nt, Artificial Sequence
  Description of Artificial Sequence: Synthetic oligonucleotide
  Sense strand starting at position 1022 of SEQ ID NO: 917489
ggaaaucucagguagguuu

SEQ ID NO: 1237687 - RNA, 19 nt, Artificial Sequence
  Description of Artificial Sequence: Synthetic oligonucleotide
  Antisense strand to SEQ ID NO: 1237686
aaaccuaccugagauuucc

SEQ ID NO: 1237688 - RNA, 19 nt, Artificial Sequence
  Description of Artificial Sequence: Synthetic oligonucleotide
  Sense strand starting at position 1596 of SEQ ID NO: 917489
aguuauaaccuggguuggu

SEQ ID NO: 1237689 - RNA, 19 nt, Artificial Sequence
  Description of Artificial Sequence: Synthetic oligonucleotide
  Antisense strand to SEQ ID NO: 1237688
accaacccagguuauaacu

SEQ ID NO: 1237690 - RNA, 19 nt, Artificial Sequence
  Description of Artificial Sequence: Synthetic oligonucleotide
  Sense strand starting at position 1615 of SEQ ID NO: 917489
gcucucugagcuugguaaa

SEQ ID NO: 1237691 - RNA, 19 nt, Artificial Sequence
  Description of Artificial Sequence: Synthetic oligonucleotide
  Antisense strand to SEQ ID NO: 1237690
uuuaccaagcucagagagc

SEQ ID NO: 1237692 - RNA, 19 nt, Artificial Sequence
  Description of Artificial Sequence: Synthetic oligonucleotide
  Sense strand starting at position 1695 of SEQ ID NO: 917489
cuggaaacaucugacugaa

SEQ ID NO: 1237693 - RNA, 19 nt, Artificial Sequence
  Description of Artificial Sequence: Synthetic oligonucleotide
  Antisense strand to SEQ ID NO: 1237692
uucagucagauguuuccag

SEQ ID NO: 1237694 - RNA, 19 nt, Artificial Sequence
  Description of Artificial Sequence: Synthetic oligonucleotide
  Sense strand starting at position 1725 of SEQ ID NO: 917489
cuagcugacuguuuacagu

SEQ ID NO: 1237695 - RNA, 19 nt, Artificial Sequence
  Description of Artificial Sequence: Synthetic oligonucleotide
  Antisense strand to SEQ ID NO: 1237694
acuguaaacagucagcuag

SEQ ID NO: 1237696 - RNA, 19 nt, Artificial Sequence
  Description of Artificial Sequence: Synthetic oligonucleotide
  Sense strand starting at position 2016 of SEQ ID NO: 917489
agacaaaucccaggcucuu

SEQ ID NO: 1237697 - RNA, 19 nt, Artificial Sequence
  Description of Artificial Sequence: Synthetic oligonucleotide
  Antisense strand to SEQ ID NO: 1237696
aagagccugggauuugucu

SEQ ID NO: 1237698 - RNA, 19 nt, Artificial Sequence
  Description of Artificial Sequence: Synthetic oligonucleotide
  Sense strand starting at position 2028 of SEQ ID NO: 917489
ggcucuuuguuaccugaaa

SEQ ID NO: 1237699 - RNA, 19 nt, Artificial Sequence
  Description of Artificial Sequence: Synthetic oligonucleotide
  Antisense strand to SEQ ID NO: 1237698
uuucagguaacaaagagcc

SEQ ID NO: 1237700 - RNA, 19 nt, Artificial Sequence
  Description of Artificial Sequence: Synthetic oligonucleotide
  Sense strand starting at position 2029 of SEQ ID NO: 917489
gcucuuuguuaccugaaac

SEQ ID NO: 1237701 - RNA, 19 nt, Artificial Sequence
  Description of Artificial Sequence: Synthetic oligonucleotide
  Antisense strand to SEQ ID NO: 1237700
guuucagguaacaaagagc

SEQ ID NO: 1237702 - RNA, 19 nt, Artificial Sequence
  Description of Artificial Sequence: Synthetic oligonucleotide
  Sense strand starting at position 2192 of SEQ ID NO: 917489
cuuugaaauaugggaguuu

SEQ ID NO: 1237703 - RNA, 19 nt, Artificial Sequence
  Description of Artificial Sequence: Synthetic oligonucleotide
  Antisense strand to SEQ ID NO: 1237702
aaacucccauauuucaaag

SEQ ID NO: 1237704 - RNA, 19 nt, Artificial Sequence
  Description of Artificial Sequence: Synthetic oligonucleotide
  Sense strand starting at position 2221 of SEQ ID NO: 917489
ggauuuaguuuccacuuua

SEQ ID NO: 1237705 - RNA, 19 nt, Artificial Sequence
  Description of Artificial Sequence: Synthetic oligonucleotide
  Antisense strand to SEQ ID NO: 1237704
uaaaguggaaacuaaaucc

SEQ ID NO: 1237706 - RNA, 19 nt, Artificial Sequence
  Description of Artificial Sequence: Synthetic oligonucleotide
  Sense strand starting at position 2305 of SEQ ID NO: 917489
acaugagaguucuuaaccu

SEQ ID NO: 1237707 - RNA, 19 nt, Artificial Sequence
  Description of Artificial Sequence: Synthetic oligonucleotide
  Antisense strand to SEQ ID NO: 1237706
agguuaagaacucucaugu

SEQ ID NO: 1237708 - RNA, 19 nt, Artificial Sequence
  Description of Artificial Sequence: Synthetic oligonucleotide
  Sense strand starting at position 2309 of SEQ ID NO: 917489
gagaguucuuaaccuagac

SEQ ID NO: 1237709 - RNA, 19 nt, Artificial Sequence
  Description of Artificial Sequence: Synthetic oligonucleotide
  Antisense strand to SEQ ID NO: 1237708
gucuagguuaagaacucuc

SEQ ID NO: 1237710 - RNA, 19 nt, Artificial Sequence
  Description of Artificial Sequence: Synthetic oligonucleotide
  Sense strand starting at position 2374 of SEQ ID NO: 917489
aggcuugugggaugaguca

SEQ ID NO: 1237711 - RNA, 19 nt, Artificial Sequence
  Description of Artificial Sequence: Synthetic oligonucleotide
  Antisense strand to SEQ ID NO: 1237710
ugacucaucccacaagccu

SEQ ID NO: 1237712 - RNA, 19 nt, Artificial Sequence
  Description of Artificial Sequence: Synthetic oligonucleotide
  Sense strand starting at position 2386 of SEQ ID NO: 917489
ugagucaguuauccaagca

SEQ ID NO: 1237713 - RNA, 19 nt, Artificial Sequence
  Description of Artificial Sequence: Synthetic oligonucleotide
  Antisense strand to SEQ ID NO: 1237712
ugcuuggauaacugacuca

SEQ ID NO: 1237714 - RNA, 19 nt, Artificial Sequence
  Description of Artificial Sequence: Synthetic oligonucleotide
  Sense strand starting at position 2461 of SEQ ID NO: 917489
cugaaagaaguuuagugua

SEQ ID NO: 1237715 - RNA, 19 nt, Artificial Sequence
  Description of Artificial Sequence: Synthetic oligonucleotide
  Antisense strand to SEQ ID NO: 1237714
uacacuaaacuucuuucag

SEQ ID NO: 1237716 - RNA, 19 nt, Artificial Sequence
  Description of Artificial Sequence: Synthetic oligonucleotide
  Sense strand starting at position 2631 of SEQ ID NO: 917489
caggucuguuguguaauuu

SEQ ID NO: 1237717 - RNA, 19 nt, Artificial Sequence
  Description of Artificial Sequence: Synthetic oligonucleotide
  Antisense strand to SEQ ID NO: 1237716
aaauuacacaacagaccug

SEQ ID NO: 1237718 - RNA, 19 nt, Artificial Sequence
  Description of Artificial Sequence: Synthetic oligonucleotide
  Sense strand starting at position 2642 of SEQ ID NO: 917489
uguaauuuagaaugugcuu

SEQ ID NO: 1237719 - RNA, 19 nt, Artificial Sequence
  Description of Artificial Sequence: Synthetic oligonucleotide
  Antisense strand to SEQ ID NO: 1237718
aagcacauucuaaauuaca

SEQ ID NO: 1237720 - RNA, 19 nt, Artificial Sequence
  Description of Artificial Sequence: Synthetic oligonucleotide
  Sense strand starting at position 2647 of SEQ ID NO: 917489
uuuagaaugugcuuugacu

SEQ ID NO: 1237721 - RNA, 19 nt, Artificial Sequence
  Description of Artificial Sequence: Synthetic oligonucleotide
  Antisense strand to SEQ ID NO: 1237720
agucaaagcacauucuaaa

SEQ ID NO: 1237722 - RNA, 19 nt, Artificial Sequence
  Description of Artificial Sequence: Synthetic oligonucleotide
  Sense strand starting at position 2844 of SEQ ID NO: 917489
uggguuuggugacuaacca

SEQ ID NO: 1237723 - RNA, 19 nt, Artificial Sequence
  Description of Artificial Sequence: Synthetic oligonucleotide
  Antisense strand to SEQ ID NO: 1237722
ugguuagucaccaaaccca

SEQ ID NO: 1237724 - RNA, 19 nt, Artificial Sequence
  Description of Artificial Sequence: Synthetic oligonucleotide
  Sense strand starting at position 2907 of SEQ ID NO: 917489
agguuucucucuuuggcaa

SEQ ID NO: 1237725 - RNA, 19 nt, Artificial Sequence
  Description of Artificial Sequence: Synthetic oligonucleotide
  Antisense strand to SEQ ID NO: 1237724
uugccaaagagagaaaccu

SEQ ID NO: 1237726 - RNA, 19 nt, Artificial Sequence
  Description of Artificial Sequence: Synthetic oligonucleotide
  Sense strand starting at position 2934 of SEQ ID NO: 917489
gugccacuugcugauauga

SEQ ID NO: 1237727 - RNA, 19 nt, Artificial Sequence
  Description of Artificial Sequence: Synthetic oligonucleotide
  Antisense strand to SEQ ID NO: 1237726
ucauaucagcaaguggcac

SEQ ID NO: 1237728 - RNA, 19 nt, Artificial Sequence
  Description of Artificial Sequence: Synthetic oligonucleotide
  Sense strand starting at position 2949 of SEQ ID NO: 917489
augaaacacucuggaggaa

SEQ ID NO: 1237729 - RNA, 19 nt, Artificial Sequence
  Description of Artificial Sequence: Synthetic oligonucleotide
  Antisense strand to SEQ ID NO: 1237728
uuccuccagaguguuucau

SEQ ID NO: 1237730 - RNA, 19 nt, Artificial Sequence
  Description of Artificial Sequence: Synthetic oligonucleotide
  Sense strand starting at position 3482 of SEQ ID NO: 917489
uccucauuacagugacuuu

SEQ ID NO: 1237731 - RNA, 19 nt, Artificial Sequence
  Description of Artificial Sequence: Synthetic oligonucleotide
  Antisense strand to SEQ ID NO: 1237730
aaagucacuguaaugagga

SEQ ID NO: 1237732 - RNA, 19 nt, Artificial Sequence
  Description of Artificial Sequence: Synthetic oligonucleotide
  Sense strand starting at position 3505 of SEQ ID NO: 917489
auaugagugucuucucuag

SEQ ID NO: 1237733 - RNA, 19 nt, Artificial Sequence
  Description of Artificial Sequence: Synthetic oligonucleotide
  Antisense strand to SEQ ID NO: 1237732
cuagagaagacacucauau

SEQ ID NO: 1237734 - RNA, 19 nt, Artificial Sequence
  Description of Artificial Sequence: Synthetic oligonucleotide
  Sense strand starting at position 3507 of SEQ ID NO: 917489
augagugucuucucuagua

SEQ ID NO: 1237735 - RNA, 19 nt, Artificial Sequence
  Description of Artificial Sequence: Synthetic oligonucleotide
  Antisense strand to SEQ ID NO: 1237734
uacuagagaagacacucau

SEQ ID NO: 1237736 - RNA, 19 nt, Artificial Sequence
  Description of Artificial Sequence: Synthetic oligonucleotide
  Sense strand starting at position 3509 of SEQ ID NO: 917489
gagugucuucucuaguaga

SEQ ID NO: 1237737 - RNA, 19 nt, Artificial Sequence
  Description of Artificial Sequence: Synthetic oligonucleotide
  Antisense strand to SEQ ID NO: 1237736
ucuacuagagaagacacuc

SEQ ID NO: 1237738 - RNA, 19 nt, Artificial Sequence
  Description of Artificial Sequence: Synthetic oligonucleotide
  Sense strand starting at position 3514 of SEQ ID NO: 917489
ucuucucuaguagauuaua

SEQ ID NO: 1237739 - RNA, 19 nt, Artificial Sequence
  Description of Artificial Sequence: Synthetic oligonucleotide
  Antisense strand to SEQ ID NO: 1237738
uauaaucuacuagagaaga

SEQ ID NO: 1237740 - RNA, 19 nt, Artificial Sequence
  Description of Artificial Sequence: Synthetic oligonucleotide
  Sense strand starting at position 3601 of SEQ ID NO: 917489
auaguaggcucuuuauuag

SEQ ID NO: 1237741 - RNA, 19 nt, Artificial Sequence
  Description of Artificial Sequence: Synthetic oligonucleotide
  Antisense strand to SEQ ID NO: 1237740
cuaauaaagagccuacuau

SEQ ID NO: 1237742 - RNA, 19 nt, Artificial Sequence
  Description of Artificial Sequence: Synthetic oligonucleotide
  Sense strand starting at position 3615 of SEQ ID NO: 917489
auuaguguuguugaauaca

SEQ ID NO: 1237743 - RNA, 19 nt, Artificial Sequence
  Description of Artificial Sequence: Synthetic oligonucleotide
  Antisense strand to SEQ ID NO: 1237742
uguauucaacaacacuaau

SEQ ID NO: 1237744 - RNA, 19 nt, Artificial Sequence
  Description of Artificial Sequence: Synthetic oligonucleotide
  Sense strand starting at position 3677 of SEQ ID NO: 917489
ugcaaacauguauacagua

SEQ ID NO: 1237745 - RNA, 19 nt, Artificial Sequence
  Description of Artificial Sequence: Synthetic oligonucleotide
  Antisense strand to SEQ ID NO: 1237744
uacuguauacauguuugca

SEQ ID NO: 1237746 - RNA, 19 nt, Artificial Sequence
  Description of Artificial Sequence: Synthetic oligonucleotide
  Sense strand starting at position 3682 of SEQ ID NO: 917489
acauguauacaguaugauc

SEQ ID NO: 1237747 - RNA, 19 nt, Artificial Sequence
  Description of Artificial Sequence: Synthetic oligonucleotide
  Antisense strand to SEQ ID NO: 1237746
gaucauacuguauacaugu

SEQ ID NO: 1237748 - RNA, 19 nt, Artificial Sequence
  Description of Artificial Sequence: Synthetic oligonucleotide
  Sense strand starting at position 3690 of SEQ ID NO: 917489
acaguaugaucuuucugaa

SEQ ID NO: 1237749 - RNA, 19 nt, Artificial Sequence
  Description of Artificial Sequence: Synthetic oligonucleotide
  Antisense strand to SEQ ID NO: 1237748
uucagaaagaucauacugu

SEQ ID NO: 1237750 - RNA, 19 nt, Artificial Sequence
  Description of Artificial Sequence: Synthetic oligonucleotide
  Sense strand starting at position 3840 of SEQ ID NO: 917489
gauggagcuuucuuaagga

SEQ ID NO: 1237751 - RNA, 19 nt, Artificial Sequence
  Description of Artificial Sequence: Synthetic oligonucleotide
  Antisense strand to SEQ ID NO: 1237750
uccuuaagaaagcuccauc

SEQ ID NO: 1237752 - RNA, 19 nt, Artificial Sequence
  Description of Artificial Sequence: Synthetic oligonucleotide
  Sense strand starting at position 3875 of SEQ ID NO: 917489
augucauauuguguccaga

SEQ ID NO: 1237753 - RNA, 19 nt, Artificial Sequence
  Description of Artificial Sequence: Synthetic oligonucleotide
  Antisense strand to SEQ ID NO: 1237752
ucuggacacaauaugacau

SEQ ID NO: 1237754 - RNA, 19 nt, Artificial Sequence
  Description of Artificial Sequence: Synthetic oligonucleotide
  Sense strand starting at position 3877 of SEQ ID NO: 917490
gucauauuguguccagaau

SEQ ID NO: 1237755 - RNA, 19 nt, Artificial Sequence
  Description of Artificial Sequence: Synthetic oligonucleotide
  Antisense strand to SEQ ID NO: 1237754
auucuggacacaauaugac

SEQ ID NO: 1237756 - RNA, 19 nt, Artificial Sequence
  Description of Artificial Sequence: Synthetic oligonucleotide
  Sense strand starting at position 113 of SEQ ID NO: 917490
auaaguuuauagucagggu

SEQ ID NO: 1237757 - RNA, 19 nt, Artificial Sequence
  Description of Artificial Sequence: Synthetic oligonucleotide
  Antisense strand to SEQ ID NO: 1237756
acccugacuauaaacuuau

SEQ ID NO: 1237758 - RNA, 19 nt, Artificial Sequence
  Description of Artificial Sequence: Synthetic oligonucleotide
  Sense strand starting at position 305 of SEQ ID NO: 917490
aacgaaauaguauguuuga

SEQ ID NO: 1237759 - RNA, 19 nt, Artificial Sequence
  Description of Artificial Sequence: Synthetic oligonucleotide
  Antisense strand to SEQ ID NO: 1237758
ucaaacauacuauuucguu

SEQ ID NO: 1237760 - RNA, 19 nt, Artificial Sequence
  Description of Artificial Sequence: Synthetic oligonucleotide
  Sense strand starting at position 306 of SEQ ID NO: 917490
acgaaauaguauguuugaa

SEQ ID NO: 1237761 - RNA, 19 nt, Artificial Sequence
  Description of Artificial Sequence: Synthetic oligonucleotide
  Antisense strand to SEQ ID NO: 1237760
uucaaacauacuauuucgu

SEQ ID NO: 1237762 - RNA, 19 nt, Artificial Sequence
  Description of Artificial Sequence: Synthetic oligonucleotide
  Sense strand starting at position 509 of SEQ ID NO: 917490
ccaccaacucuguaaaguu

SEQ ID NO: 1237763 - RNA, 19 nt, Artificial Sequence
  Description of Artificial Sequence: Synthetic oligonucleotide
  Antisense strand to SEQ ID NO: 1237762
aacuuuacagaguuggugg

SEQ ID NO: 1237764 - RNA, 19 nt, Artificial Sequence
  Description of Artificial Sequence: Synthetic oligonucleotide
  Sense strand starting at position 521 of SEQ ID NO: 917490
uaaaguuccguggaaugag

SEQ ID NO: 1237765 - RNA, 19 nt, Artificial Sequence
  Description of Artificial Sequence: Synthetic oligonucleotide
  Antisense strand to SEQ ID NO: 1237764
cucauuccacggaacuuua

SEQ ID NO: 1237766 - RNA, 19 nt, Artificial Sequence
  Description of Artificial Sequence: Synthetic oligonucleotide
  Sense strand starting at position 562 of SEQ ID NO: 917490
aucaguaaaggacgauuau

SEQ ID NO: 1237767 - RNA, 19 nt, Artificial Sequence
  Description of Artificial Sequence: Synthetic oligonucleotide
  Antisense strand to SEQ ID NO: 1237766
auaaucguccuuuacugau

SEQ ID NO: 1237768 - RNA, 19 nt, Artificial Sequence
  Description of Artificial Sequence: Synthetic oligonucleotide
  Sense strand starting at position 814 of SEQ ID NO: 917490
guaagcaaagucuaauucu

SEQ ID NO: 1237769 - RNA, 19 nt, Artificial Sequence
  Description of Artificial Sequence: Synthetic oligonucleotide
  Antisense strand to SEQ ID NO: 1237768
agaauuagacuuugcuuac

SEQ ID NO: 1237770 - RNA, 19 nt, Artificial Sequence
  Description of Artificial Sequence: Synthetic oligonucleotide
  Sense strand starting at position 892 of SEQ ID NO: 917490
ggcauuaucuaccugagga

SEQ ID NO: 1237771 - RNA, 19 nt, Artificial Sequence
  Description of Artificial Sequence: Synthetic oligonucleotide
  Antisense strand to SEQ ID NO: 1237770
uccucagguagauaaugcc

SEQ ID NO: 1237772 - RNA, 19 nt, Artificial Sequence
  Description of Artificial Sequence: Synthetic oligonucleotide
  Sense strand starting at position 938 of SEQ ID NO: 917490
augcuuaaugcacagauaa

SEQ ID NO: 1237773 - RNA, 19 nt, Artificial Sequence
  Description of Artificial Sequence: Synthetic oligonucleotide
  Antisense strand to SEQ ID NO: 1237772
uuaucugugcauuaagcau

SEQ ID NO: 1237774 - RNA, 19 nt, Artificial Sequence
  Description of Artificial Sequence: Synthetic oligonucleotide
  Sense strand starting at position 991 of SEQ ID NO: 917490
acacgaucugcucauugga

SEQ ID NO: 1237775 - RNA, 19 nt, Artificial Sequence
  Description of Artificial Sequence: Synthetic oligonucleotide
  Antisense strand to SEQ ID NO: 1237774
uccaaugagcagaucgugu

SEQ ID NO: 1237776 - RNA, 19 nt, Artificial Sequence
  Description of Artificial Sequence: Synthetic oligonucleotide
  Sense strand starting at position 1150 of SEQ ID NO: 917490
acuggauguuauucucuaa

SEQ ID NO: 1237777 - RNA, 19 nt, Artificial Sequence
  Description of Artificial Sequence: Synthetic oligonucleotide
  Antisense strand to SEQ ID NO: 1237776
uuagagaauaacauccagu

SEQ ID NO: 1237778 - RNA, 19 nt, Artificial Sequence
  Description of Artificial Sequence: Synthetic oligonucleotide
  Sense strand starting at position 1153 of SEQ ID NO: 917490
ggauguuauucucuaaucc

SEQ ID NO: 1237779 - RNA, 19 nt, Artificial Sequence
  Description of Artificial Sequence: Synthetic oligonucleotide
  Antisense strand to SEQ ID NO: 1237778
ggauuagagaauaacaucc

SEQ ID NO: 1237780 - RNA, 19 nt, Artificial Sequence
  Description of Artificial Sequence: Synthetic oligonucleotide
  Sense strand starting at position 2066 of SEQ ID NO: 917490
uggaguuuggauuggcaca

SEQ ID NO: 1237781 - RNA, 19 nt, Artificial Sequence
  Description of Artificial Sequence: Synthetic oligonucleotide
  Antisense strand to SEQ ID NO: 1237780
ugugccaauccaaacucca

SEQ ID NO: 1237782 - RNA, 19 nt, Artificial Sequence
  Description of Artificial Sequence: Synthetic oligonucleotide
  Sense strand starting at position 2071 of SEQ ID NO: 917490
uuuggauuggcacagucaa

SEQ ID NO: 1237783 - RNA, 19 nt, Artificial Sequence
  Description of Artificial Sequence: Synthetic oligonucleotide
  Antisense strand to SEQ ID NO: 1237782
uugacugugccaauccaaa

SEQ ID NO: 1237784 - RNA, 19 nt, Artificial Sequence
  Description of Artificial Sequence: Synthetic oligonucleotide
  Sense strand starting at position 2100 of SEQ ID NO: 917490
uuaagauaugcucaggucu

SEQ ID NO: 1237785 - RNA, 19 nt, Artificial Sequence
  Description of Artificial Sequence: Synthetic oligonucleotide
  Antisense strand to SEQ ID NO: 1237784
agaccugagcauaucuuaa

SEQ ID NO: 1237786 - RNA, 19 nt, Artificial Sequence
  Description of Artificial Sequence: Synthetic oligonucleotide
  Sense strand starting at position 2205 of SEQ ID NO: 917490
guuccugcugcugucauaa

SEQ ID NO: 1237787 - RNA, 19 nt, Artificial Sequence
  Description of Artificial Sequence: Synthetic oligonucleotide
  Antisense strand to SEQ ID NO: 1237786
uuaugacagcagcaggaac

SEQ ID NO: 1237788 - RNA, 19 nt, Artificial Sequence
  Description of Artificial Sequence: Synthetic oligonucleotide
  Sense strand starting at position 2228 of SEQ ID NO: 917490
aauuaaugugaaggucaga

SEQ ID NO: 1237789 - RNA, 19 nt, Artificial Sequence
  Description of Artificial Sequence: Synthetic oligonucleotide
  Antisense strand to SEQ ID NO: 1237788
ucugaccuucacauuaauu

SEQ ID NO: 1237790 - RNA, 19 nt, Artificial Sequence
  Description of Artificial Sequence: Synthetic oligonucleotide
  Sense strand starting at position 2269 of SEQ ID NO: 917490
aauuguucuuagcuagaga

SEQ ID NO: 1237791 - RNA, 19 nt, Artificial Sequence
  Description of Artificial Sequence: Synthetic oligonucleotide
  Antisense strand to SEQ ID NO: 1237790
ucucuagcuaagaacaauu

SEQ ID NO: 1237792 - RNA, 19 nt, Artificial Sequence
  Description of Artificial Sequence: Synthetic oligonucleotide
  Sense strand starting at position 2270 of SEQ ID NO: 917490
auuguucuuagcuagagag

SEQ ID NO: 1237793 - RNA, 19 nt, Artificial Sequence
  Description of Artificial Sequence: Synthetic oligonucleotide
  Antisense strand to SEQ ID NO: 1237792
cucucuagcuaagaacaau

SEQ ID NO: 1237794 - RNA, 19 nt, Artificial Sequence
  Description of Artificial Sequence: Synthetic oligonucleotide
  Sense strand starting at position 2274 of SEQ ID NO: 917490
uucuuagcuagagagugau

SEQ ID NO: 1237795 - RNA, 19 nt, Artificial Sequence
  Description of Artificial Sequence: Synthetic oligonucleotide
  Antisense strand to SEQ ID NO: 1237794
aucacucucuagcuaagaa

SEQ ID NO: 1237796 - RNA, 19 nt, Artificial Sequence
  Description of Artificial Sequence: Synthetic oligonucleotide
  Sense strand starting at position 2331 of SEQ ID NO: 917490
ccuugaaggaaguguggaa

SEQ ID NO: 1237797 - RNA, 19 nt, Artificial Sequence
  Description of Artificial Sequence: Synthetic oligonucleotide
  Antisense strand to SEQ ID NO: 1237796
uuccacacuuccuucaagg

SEQ ID NO: 1237798 - RNA, 19 nt, Artificial Sequence
  Description of Artificial Sequence: Synthetic oligonucleotide
  Sense strand starting at position 2348 of SEQ ID NO: 917490
aaguaaguccacugggaau

SEQ ID NO: 1237799 - RNA, 19 nt, Artificial Sequence
  Description of Artificial Sequence: Synthetic oligonucleotide
  Antisense strand to SEQ ID NO: 1237798
auucccaguggacuuacuu

SEQ ID NO: 1237800 - RNA, 19 nt, Artificial Sequence
  Description of Artificial Sequence: Synthetic oligonucleotide
  Sense strand starting at position 2350 of SEQ ID NO: 917490
guaaguccacugggaauua

SEQ ID NO: 1237801 - RNA, 19 nt, Artificial Sequence
  Description of Artificial Sequence: Synthetic oligonucleotide
  Antisense strand to SEQ ID NO: 1237800
uaauucccaguggacuuac

SEQ ID NO: 1237802 - RNA, 19 nt, Artificial Sequence
  Description of Artificial Sequence: Synthetic oligonucleotide
  Sense strand starting at position 2409 of SEQ ID NO: 917490
guaaauguuacagacguau

SEQ ID NO: 1237803 - RNA, 19 nt, Artificial Sequence
  Description of Artificial Sequence: Synthetic oligonucleotide
  Antisense strand to SEQ ID NO: 1237802
auacgucuguaacauuuac

SEQ ID NO: 1237804 - RNA, 19 nt, Artificial Sequence
  Description of Artificial Sequence: Synthetic oligonucleotide
  Sense strand starting at position 2739 of SEQ ID NO: 917490
acaagagguccuugaucac

SEQ ID NO: 1237805 - RNA, 19 nt, Artificial Sequence
  Description of Artificial Sequence: Synthetic oligonucleotide
  Antisense strand to SEQ ID NO: 1237804
gugaucaaggaccucuugu

SEQ ID NO: 1237806 - RNA, 19 nt, Artificial Sequence
  Description of Artificial Sequence: Synthetic oligonucleotide
  Sense strand starting at position 2742 of SEQ ID NO: 917490
agagguccuugaucacaca

SEQ ID NO: 1237807 - RNA, 19 nt, Artificial Sequence
  Description of Artificial Sequence: Synthetic oligonucleotide
  Antisense strand to SEQ ID NO: 1237806
ugugugaucaaggaccucu

SEQ ID NO: 1237808 - RNA, 19 nt, Artificial Sequence
  Description of Artificial Sequence: Synthetic oligonucleotide
  Sense strand starting at position 2975 of SEQ ID NO: 917490
uaagaauagugagcuuuag

SEQ ID NO: 1237809 - RNA, 19 nt, Artificial Sequence
  Description of Artificial Sequence: Synthetic oligonucleotide
  Antisense strand to SEQ ID NO: 1237808
cuaaagcucacuauucuua

SEQ ID NO: 1237810 - RNA, 19 nt, Artificial Sequence
  Description of Artificial Sequence: Synthetic oligonucleotide
  Sense strand starting at position 3167 of SEQ ID NO: 917490
uucguaugacgauauuaac

SEQ ID NO: 1237811 - RNA, 19 nt, Artificial Sequence
  Description of Artificial Sequence: Synthetic oligonucleotide
  Antisense strand to SEQ ID NO: 1237810
guuaauaucgucauacgaa

SEQ ID NO: 1237812 - RNA, 19 nt, Artificial Sequence
  Description of Artificial Sequence: Synthetic oligonucleotide
  Sense strand starting at position 3179 of SEQ ID NO: 917490
uauuaacugucccugggau

SEQ ID NO: 1237813 - RNA, 19 nt, Artificial Sequence
  Description of Artificial Sequence: Synthetic oligonucleotide
  Antisense strand to SEQ ID NO: 1237812
aucccagggacaguuaaua

SEQ ID NO: 1237814 - RNA, 19 nt, Artificial Sequence
  Description of Artificial Sequence: Synthetic oligonucleotide
  Sense strand starting at position 3180 of SEQ ID NO: 917490
auuaacugucccugggaua

SEQ ID NO: 1237815 - RNA, 19 nt, Artificial Sequence
  Description of Artificial Sequence: Synthetic oligonucleotide
  Antisense strand to SEQ ID NO: 1237814
uaucccagggacaguuaau

SEQ ID NO: 1237816 - RNA, 19 nt, Artificial Sequence
  Description of Artificial Sequence: Synthetic oligonucleotide
  Sense strand starting at position 3207 of SEQ ID NO: 917490
ggcuuacaagaauguggaa

SEQ ID NO: 1237817 - RNA, 19 nt, Artificial Sequence
  Description of Artificial Sequence: Synthetic oligonucleotide
  Antisense strand to SEQ ID NO: 1237816
uuccacauucuuguaagcc

SEQ ID NO: 1237818 - RNA, 19 nt, Artificial Sequence
  Description of Artificial Sequence: Synthetic oligonucleotide
  Sense strand starting at position 3282 of SEQ ID NO: 917490
gggaauaggugguauuuga

SEQ ID NO: 1237819 - RNA, 19 nt, Artificial Sequence
  Description of Artificial Sequence: Synthetic oligonucleotide
  Antisense strand to SEQ ID NO: 1237818
ucaaauaccaccuauuccc

SEQ ID NO: 1237820 - RNA, 19 nt, Artificial Sequence
  Description of Artificial Sequence: Synthetic oligonucleotide
  Sense strand starting at position 3297 of SEQ ID NO: 917490
uugauuacaugguuaaguu

SEQ ID NO: 1237821 - RNA, 19 nt, Artificial Sequence
  Description of Artificial Sequence: Synthetic oligonucleotide
  Antisense strand to SEQ ID NO: 1237820
aacuuaaccauguaaucaa

SEQ ID NO: 1237822 - RNA, 19 nt, Artificial Sequence
  Description of Artificial Sequence: Synthetic oligonucleotide
  Sense strand starting at position 3298 of SEQ ID NO: 917490
ugauuacaugguuaaguua

SEQ ID NO: 1237823 - RNA, 19 nt, Artificial Sequence
  Description of Artificial Sequence: Synthetic oligonucleotide
  Antisense strand to SEQ ID NO: 1237822
uaacuuaaccauguaauca

SEQ ID NO: 1237824 - RNA, 19 nt, Artificial Sequence
  Description of Artificial Sequence: Synthetic oligonucleotide
  Sense strand starting at position 3426 of SEQ ID NO: 917490
gucccuaaaguccauuaga

SEQ ID NO: 1237825 - RNA, 19 nt, Artificial Sequence
  Description of Artificial Sequence: Synthetic oligonucleotide
  Antisense strand to SEQ ID NO: 1237824
ucuaauggacuuuagggac

SEQ ID NO: 1237826 - RNA, 19 nt, Artificial Sequence
  Description of Artificial Sequence: Synthetic oligonucleotide
  Sense strand starting at position 3461 of SEQ ID NO: 917490
gcaucuuuguaauuuagcu

SEQ ID NO: 1237827 - RNA, 19 nt, Artificial Sequence
  Description of Artificial Sequence: Synthetic oligonucleotide
  Antisense strand to SEQ ID NO: 1237826
agcuaaauuacaaagaugc

SEQ ID NO: 1237828 - RNA, 19 nt, Artificial Sequence
  Description of Artificial Sequence: Synthetic oligonucleotide
  Sense strand starting at position 3478 of SEQ ID NO: 917490
cucccacugugaguuagaa

SEQ ID NO: 1237829 - RNA, 19 nt, Artificial Sequence
  Description of Artificial Sequence: Synthetic oligonucleotide
  Antisense strand to SEQ ID NO: 1237828
uucuaacucacagugggag

SEQ ID NO: 1237830 - RNA, 19 nt, Artificial Sequence
  Description of Artificial Sequence: Synthetic oligonucleotide
  Sense strand starting at position 3566 of SEQ ID NO: 917490
ugaugcgaacaucauuaau

SEQ ID NO: 1237831 - RNA, 19 nt, Artificial Sequence
  Description of Artificial Sequence: Synthetic oligonucleotide
  Antisense strand to SEQ ID NO: 1237830
auuaaugauguucgcauca

SEQ ID NO: 1237832 - RNA, 19 nt, Artificial Sequence
  Description of Artificial Sequence: Synthetic oligonucleotide
  Sense strand starting at position 3568 of SEQ ID NO: 917490
augcgaacaucauuaauuc

SEQ ID NO: 1237833 - RNA, 19 nt, Artificial Sequence
  Description of Artificial Sequence: Synthetic oligonucleotide
  Antisense strand to SEQ ID NO: 1237832
gaauuaaugauguucgcau

SEQ ID NO: 1237834 - RNA, 19 nt, Artificial Sequence
  Description of Artificial Sequence: Synthetic oligonucleotide
  Sense strand starting at position 3846 of SEQ ID NO: 917490
gguuguacuaaaugaucag

SEQ ID NO: 1237835 - RNA, 19 nt, Artificial Sequence
  Description of Artificial Sequence: Synthetic oligonucleotide
  Antisense strand to SEQ ID NO: 1237834
cugaucauuuaguacaacc

SEQ ID NO: 1237836 - RNA, 19 nt, Artificial Sequence
  Description of Artificial Sequence: Synthetic oligonucleotide
  Sense strand starting at position 3846 of SEQ ID NO: 917491
gguuguacuaaaugaucag

SEQ ID NO: 1237837 - RNA, 19 nt, Artificial Sequence
  Description of Artificial Sequence: Synthetic oligonucleotide
  Antisense strand to SEQ ID NO: 1237836
cugaucauuuaguacaacc

SEQ ID NO: 1237838 - RNA, 19 nt, Artificial Sequence
  Description of Artificial Sequence: Synthetic oligonucleotide
  Sense strand starting at position 65 of SEQ ID NO: 917491
auuagccaguccucuuaua

SEQ ID NO: 1237839 - RNA, 19 nt, Artificial Sequence
  Description of Artificial Sequence: Synthetic oligonucleotide
  Antisense strand to SEQ ID NO: 1237838
uauaagaggacuggcuaau

SEQ ID NO: 1237840 - RNA, 19 nt, Artificial Sequence
  Description of Artificial Sequence: Synthetic oligonucleotide
  Sense strand starting at position 140 of SEQ ID NO: 917491
acagaauaaugugagaaac

SEQ ID NO: 1237841 - RNA, 19 nt, Artificial Sequence
  Description of Artificial Sequence: Synthetic oligonucleotide
  Antisense strand to SEQ ID NO: 1237840
guuucucacauuauucugu

SEQ ID NO: 1237842 - RNA, 19 nt, Artificial Sequence
  Description of Artificial Sequence: Synthetic oligonucleotide
  Sense strand starting at position 142 of SEQ ID NO: 917491
agaauaaugugagaaacag

SEQ ID NO: 1237843 - RNA, 19 nt, Artificial Sequence
  Description of Artificial Sequence: Synthetic oligonucleotide
  Antisense strand to SEQ ID NO: 1237842
cuguuucucacauuauucu

SEQ ID NO: 1237844 - RNA, 19 nt, Artificial Sequence
  Description of Artificial Sequence: Synthetic oligonucleotide
  Sense strand starting at position 348 of SEQ ID NO: 917491
augaguugauagcugucau

SEQ ID NO: 1237845 - RNA, 19 nt, Artificial Sequence
  Description of Artificial Sequence: Synthetic oligonucleotide
  Antisense strand to SEQ ID NO: 1237844
augacagcuaucaacucau

SEQ ID NO: 1237846 - RNA, 19 nt, Artificial Sequence
  Description of Artificial Sequence: Synthetic oligonucleotide
  Sense strand starting at position 368 of SEQ ID NO: 917491
guucuaagucuuuaaguua

SEQ ID NO: 1237847 - RNA, 19 nt, Artificial Sequence
  Description of Artificial Sequence: Synthetic oligonucleotide
  Antisense strand to SEQ ID NO: 1237846
uaacuuaaagacuuagaac

SEQ ID NO: 1237848 - RNA, 19 nt, Artificial Sequence
  Description of Artificial Sequence: Synthetic oligonucleotide
  Sense strand starting at position 466 of SEQ ID NO: 917491
ugcuguacuccagaguggu

SEQ ID NO: 1237849 - RNA, 19 nt, Artificial Sequence
  Description of Artificial Sequence: Synthetic oligonucleotide
  Antisense strand to SEQ ID NO: 1237848
accacucuggaguacagca

SEQ ID NO: 1237850 - RNA, 19 nt, Artificial Sequence
  Description of Artificial Sequence: Synthetic oligonucleotide
  Sense strand starting at position 625 of SEQ ID NO: 917491
ggaggaggaugaguguuua

SEQ ID NO: 1237851 - RNA, 19 nt, Artificial Sequence
  Description of Artificial Sequence: Synthetic oligonucleotide
  Antisense strand to SEQ ID NO: 1237850
uaaacacucauccuccucc

SEQ ID NO: 1237852 - RNA, 19 nt, Artificial Sequence
  Description of Artificial Sequence: Synthetic oligonucleotide
  Sense strand starting at position 629 of SEQ ID NO: 917491
gaggaugaguguuuagugu

SEQ ID NO: 1237853 - RNA, 19 nt, Artificial Sequence
  Description of Artificial Sequence: Synthetic oligonucleotide
  Antisense strand to SEQ ID NO: 1237852
acacuaaacacucauccuc

SEQ ID NO: 1237854 - RNA, 19 nt, Artificial Sequence
  Description of Artificial Sequence: Synthetic oligonucleotide
  Sense strand starting at position 635 of SEQ ID NO: 917491
gaguguuuaguguagaaag

SEQ ID NO: 1237855 - RNA, 19 nt, Artificial Sequence
  Description of Artificial Sequence: Synthetic oligonucleotide
  Antisense strand to SEQ ID NO: 1237854
cuuucuacacuaaacacuc

SEQ ID NO: 1237856 - RNA, 19 nt, Artificial Sequence
  Description of Artificial Sequence: Synthetic oligonucleotide
  Sense strand starting at position 637 of SEQ ID NO: 917491
guguuuaguguagaaagga

SEQ ID NO: 1237857 - RNA, 19 nt, Artificial Sequence
  Description of Artificial Sequence: Synthetic oligonucleotide
  Antisense strand to SEQ ID NO: 1237856
uccuuucuacacuaaacac

SEQ ID NO: 1237858 - RNA, 19 nt, Artificial Sequence
  Description of Artificial Sequence: Synthetic oligonucleotide
  Sense strand starting at position 701 of SEQ ID NO: 917491
aggauuagucagggaugcu

SEQ ID NO: 1237859 - RNA, 19 nt, Artificial Sequence
  Description of Artificial Sequence: Synthetic oligonucleotide
  Antisense strand to SEQ ID NO: 1237858
agcaucccugacuaauccu

SEQ ID NO: 1237860 - RNA, 19 nt, Artificial Sequence
  Description of Artificial Sequence: Synthetic oligonucleotide
  Sense strand starting at position 702 of SEQ ID NO: 917491
ggauuagucagggaugcug

SEQ ID NO: 1237861 - RNA, 19 nt, Artificial Sequence
  Description of Artificial Sequence: Synthetic oligonucleotide
  Antisense strand to SEQ ID NO: 1237860
cagcaucccugacuaaucc

SEQ ID NO: 1237862 - RNA, 19 nt, Artificial Sequence
  Description of Artificial Sequence: Synthetic oligonucleotide
  Sense strand starting at position 731 of SEQ ID NO: 917491
cuugaauaacggugaaauu

SEQ ID NO: 1237863 - RNA, 19 nt, Artificial Sequence
  Description of Artificial Sequence: Synthetic oligonucleotide
  Antisense strand to SEQ ID NO: 1237862
aauuucaccguuauucaag

SEQ ID NO: 1237864 - RNA, 19 nt, Artificial Sequence
  Description of Artificial Sequence: Synthetic oligonucleotide
  Sense strand starting at position 857 of SEQ ID NO: 917491
cugguaugauaccuugaau

SEQ ID NO: 1237865 - RNA, 19 nt, Artificial Sequence
  Description of Artificial Sequence: Synthetic oligonucleotide
  Antisense strand to SEQ ID NO: 1237864
auucaagguaucauaccag

SEQ ID NO: 1237866 - RNA, 19 nt, Artificial Sequence
  Description of Artificial Sequence: Synthetic oligonucleotide
  Sense strand starting at position 884 of SEQ ID NO: 917491
uuuaaaguugccuaaggca

SEQ ID NO: 1237867 - RNA, 19 nt, Artificial Sequence
  Description of Artificial Sequence: Synthetic oligonucleotide
  Antisense strand to SEQ ID NO: 1237866
ugccuuaggcaacuuuaaa

SEQ ID NO: 1237868 - RNA, 19 nt, Artificial Sequence
  Description of Artificial Sequence: Synthetic oligonucleotide
  Sense strand starting at position 1155 of SEQ ID NO: 917491
agcuuucgugcuuaaagac

SEQ ID NO: 1237869 - RNA, 19 nt, Artificial Sequence
  Description of Artificial Sequence: Synthetic oligonucleotide
  Antisense strand to SEQ ID NO: 1237868
gucuuuaagcacgaaagcu

SEQ ID NO: 1237870 - RNA, 19 nt, Artificial Sequence
  Description of Artificial Sequence: Synthetic oligonucleotide
  Sense strand starting at position 2318 of SEQ ID NO: 917491
ggcaaacgauaguuuccaa

SEQ ID NO: 1237871 - RNA, 19 nt, Artificial Sequence
  Description of Artificial Sequence: Synthetic oligonucleotide
  Antisense strand to SEQ ID NO: 1237870
uuggaaacuaucguuugcc

SEQ ID NO: 1237872 - RNA, 19 nt, Artificial Sequence
  Description of Artificial Sequence: Synthetic oligonucleotide
  Sense strand starting at position 2340 of SEQ ID NO: 917491
uaagguuguggaugaaacu

SEQ ID NO: 1237873 - RNA, 19 nt, Artificial Sequence
  Description of Artificial Sequence: Synthetic oligonucleotide
  Antisense strand to SEQ ID NO: 1237872
aguuucauccacaaccuua

SEQ ID NO: 1237874 - RNA, 19 nt, Artificial Sequence
  Description of Artificial Sequence: Synthetic oligonucleotide
  Sense strand starting at position 2462 of SEQ ID NO: 917491
gcgaaagcuccggacauga

SEQ ID NO: 1237875 - RNA, 19 nt, Artificial Sequence
  Description of Artificial Sequence: Synthetic oligonucleotide
  Antisense strand to SEQ ID NO: 1237874
ucauguccggagcuuucgc

SEQ ID NO: 1237876 - RNA, 19 nt, Artificial Sequence
  Description of Artificial Sequence: Synthetic oligonucleotide
  Sense strand starting at position 2464 of SEQ ID NO: 917491
gaaagcuccggacaugauu

SEQ ID NO: 1237877 - RNA, 19 nt, Artificial Sequence
  Description of Artificial Sequence: Synthetic oligonucleotide
  Antisense strand to SEQ ID NO: 1237876
aaucauguccggagcuuuc

SEQ ID NO: 1237878 - RNA, 19 nt, Artificial Sequence
  Description of Artificial Sequence: Synthetic oligonucleotide
  Sense strand starting at position 2634 of SEQ ID NO: 917491
cuuuguagccaguaacaaa

SEQ ID NO: 1237879 - RNA, 19 nt, Artificial Sequence
  Description of Artificial Sequence: Synthetic oligonucleotide
  Antisense strand to SEQ ID NO: 1237878
uuuguuacuggcuacaaag

SEQ ID NO: 1237880 - RNA, 19 nt, Artificial Sequence
  Description of Artificial Sequence: Synthetic oligonucleotide
  Sense strand starting at position 2871 of SEQ ID NO: 917491
augcucaugccaggguaau

SEQ ID NO: 1237881 - RNA, 19 nt, Artificial Sequence
  Description of Artificial Sequence: Synthetic oligonucleotide
  Antisense strand to SEQ ID NO: 1237880
auuacccuggcaugagcau

SEQ ID NO: 1237882 - RNA, 19 nt, Artificial Sequence
  Description of Artificial Sequence: Synthetic oligonucleotide
  Sense strand starting at position 3042 of SEQ ID NO: 917491
uguuauauagcaggagcuu

SEQ ID NO: 1237883 - RNA, 19 nt, Artificial Sequence
  Description of Artificial Sequence: Synthetic oligonucleotide
  Antisense strand to SEQ ID NO: 1237882
aagcuccugcuauauaaca

SEQ ID NO: 1237884 - RNA, 19 nt, Artificial Sequence
  Description of Artificial Sequence: Synthetic oligonucleotide
  Sense strand starting at position 3043 of SEQ ID NO: 917491
guuauauagcaggagcuuu

SEQ ID NO: 1237885 - RNA, 19 nt, Artificial Sequence
  Description of Artificial Sequence: Synthetic oligonucleotide
  Antisense strand to SEQ ID NO: 1237884
aaagcuccugcuauauaac

SEQ ID NO: 1237886 - RNA, 19 nt, Artificial Sequence
  Description of Artificial Sequence: Synthetic oligonucleotide
  Sense strand starting at position 3169 of SEQ ID NO: 917491
uuuggagauagcggugaaa

SEQ ID NO: 1237887 - RNA, 19 nt, Artificial Sequence
  Description of Artificial Sequence: Synthetic oligonucleotide
  Antisense strand to SEQ ID NO: 1237886
uuucaccgcuaucuccaaa

SEQ ID NO: 1237888 - RNA, 19 nt, Artificial Sequence
  Description of Artificial Sequence: Synthetic oligonucleotide
  Sense strand starting at position 3217 of SEQ ID NO: 917491
gugacauaacagcauaacu

SEQ ID NO: 1237889 - RNA, 19 nt, Artificial Sequence
  Description of Artificial Sequence: Synthetic oligonucleotide
  Antisense strand to SEQ ID NO: 1237888
aguuaugcuguuaugucac

SEQ ID NO: 1237890 - RNA, 19 nt, Artificial Sequence
  Description of Artificial Sequence: Synthetic oligonucleotide
  Sense strand starting at position 3275 of SEQ ID NO: 917491
aauuaagagguuuguaucu

SEQ ID NO: 1237891 - RNA, 19 nt, Artificial Sequence
  Description of Artificial Sequence: Synthetic oligonucleotide
  Antisense strand to SEQ ID NO: 1237890
agauacaaaccucuuaauu

SEQ ID NO: 1237892 - RNA, 19 nt, Artificial Sequence
  Description of Artificial Sequence: Synthetic oligonucleotide
  Sense strand starting at position 3319 of SEQ ID NO: 917491
cuuggauucugucuaugga

SEQ ID NO: 1237893 - RNA, 19 nt, Artificial Sequence
  Description of Artificial Sequence: Synthetic oligonucleotide
  Antisense strand to SEQ ID NO: 1237892
uccauagacagaauccaag

SEQ ID NO: 1237894 - RNA, 19 nt, Artificial Sequence
  Description of Artificial Sequence: Synthetic oligonucleotide
  Sense strand starting at position 3343 of SEQ ID NO: 917491
aguuaagaauaccugguau

SEQ ID NO: 1237895 - RNA, 19 nt, Artificial Sequence
  Description of Artificial Sequence: Synthetic oligonucleotide
  Antisense strand to SEQ ID NO: 1237894
auaccagguauucuuaacu

SEQ ID NO: 1237896 - RNA, 19 nt, Artificial Sequence
  Description of Artificial Sequence: Synthetic oligonucleotide
  Sense strand starting at position 3456 of SEQ ID NO: 917491
ucagcugauuccuugauca

SEQ ID NO: 1237897 - RNA, 19 nt, Artificial Sequence
  Description of Artificial Sequence: Synthetic oligonucleotide
  Antisense strand to SEQ ID NO: 1237896
ugaucaaggaaucagcuga

SEQ ID NO: 1237898 - RNA, 19 nt, Artificial Sequence
  Description of Artificial Sequence: Synthetic oligonucleotide
  Sense strand starting at position 3458 of SEQ ID NO: 917491
agcugauuccuugaucauu

SEQ ID NO: 1237899 - RNA, 19 nt, Artificial Sequence
  Description of Artificial Sequence: Synthetic oligonucleotide
  Antisense strand to SEQ ID NO: 1237898
aaugaucaaggaaucagcu

SEQ ID NO: 1237900 - RNA, 19 nt, Artificial Sequence
  Description of Artificial Sequence: Synthetic oligonucleotide
  Sense strand starting at position 3509 of SEQ ID NO: 917491
cucuuuagugcagaggaaa

SEQ ID NO: 1237901 - RNA, 19 nt, Artificial Sequence
  Description of Artificial Sequence: Synthetic oligonucleotide
  Antisense strand to SEQ ID NO: 1237900
uuuccucugcacuaaagag

SEQ ID NO: 1237902 - RNA, 19 nt, Artificial Sequence
  Description of Artificial Sequence: Synthetic oligonucleotide
  Sense strand starting at position 3563 of SEQ ID NO: 917491
uguuuacauuaccucuaga

SEQ ID NO: 1237903 - RNA, 19 nt, Artificial Sequence
  Description of Artificial Sequence: Synthetic oligonucleotide
  Antisense strand to SEQ ID NO: 1237902
ucuagagguaauguaaaca

SEQ ID NO: 1237904 - RNA, 19 nt, Artificial Sequence
  Description of Artificial Sequence: Synthetic oligonucleotide
  Sense strand starting at position 3680 of SEQ ID NO: 917491
ucaagugaaccauagucca

SEQ ID NO: 1237905 - RNA, 19 nt, Artificial Sequence
  Description of Artificial Sequence: Synthetic oligonucleotide
  Antisense strand to SEQ ID NO: 1237904
uggacuaugguucacuuga

SEQ ID NO: 1237906 - RNA, 19 nt, Artificial Sequence
  Description of Artificial Sequence: Synthetic oligonucleotide
  Sense strand starting at position 3814 of SEQ ID NO: 917491
acaccaugugcaugacuuu

SEQ ID NO: 1237907 - RNA, 19 nt, Artificial Sequence
  Description of Artificial Sequence: Synthetic oligonucleotide
  Antisense strand to SEQ ID NO: 1237906
aaagucaugcacauggugu

SEQ ID NO: 1237908 - RNA, 19 nt, Artificial Sequence
  Description of Artificial Sequence: Synthetic oligonucleotide
  Sense strand starting at position 3825 of SEQ ID NO: 917491
augacuuugccagaguauc

SEQ ID NO: 1237909 - RNA, 19 nt, Artificial Sequence
  Description of Artificial Sequence: Synthetic oligonucleotide
  Antisense strand to SEQ ID NO: 1237908
gauacucuggcaaagucau

SEQ ID NO: 1237910 - RNA, 19 nt, Artificial Sequence
  Description of Artificial Sequence: Synthetic oligonucleotide
  Sense strand starting at position 3833 of SEQ ID NO: 917491
gccagaguaucacccaaug

SEQ ID NO: 1237911 - RNA, 19 nt, Artificial Sequence
  Description of Artificial Sequence: Synthetic oligonucleotide
  Antisense strand to SEQ ID NO: 1237910
cauugggugauacucuggc

SEQ ID NO: 1237912 - RNA, 19 nt, Artificial Sequence
  Description of Artificial Sequence: Synthetic oligonucleotide
  Sense strand starting at position 3876 of SEQ ID NO: 917491
uuaugaaaccuagguggca

SEQ ID NO: 1237913 - RNA, 19 nt, Artificial Sequence
  Description of Artificial Sequence: Synthetic oligonucleotide
  Antisense strand to SEQ ID NO: 1237912
ugccaccuagguuucauaa

SEQ ID NO: 1237914 - RNA, 19 nt, Artificial Sequence
  Description of Artificial Sequence: Synthetic oligonucleotide
  Sense strand starting at position 3903 of SEQ ID NO: 917491
auuagacugccguaacaau

SEQ ID NO: 1237915 - RNA, 19 nt, Artificial Sequence
  Description of Artificial Sequence: Synthetic oligonucleotide
  Antisense strand to SEQ ID NO: 1237914
auuguuacggcagucuaau

SEQ ID NO: 1237916 - RNA, 19 nt, Artificial Sequence
  Description of Artificial Sequence: Synthetic oligonucleotide
  Sense strand starting at position 3914 of SEQ ID NO: 917492
guaacaauguucuuuagau

SEQ ID NO: 1237917 - RNA, 19 nt, Artificial Sequence
  Description of Artificial Sequence: Synthetic oligonucleotide
  Antisense strand to SEQ ID NO: 1237916
aucuaaagaacauuguuac

SEQ ID NO: 1237918 - RNA, 19 nt, Artificial Sequence
  Description of Artificial Sequence: Synthetic oligonucleotide
  Sense strand starting at position 34 of SEQ ID NO: 917492
aaaugucaucugggaagca

SEQ ID NO: 1237919 - RNA, 19 nt, Artificial Sequence
  Description of Artificial Sequence: Synthetic oligonucleotide
  Antisense strand to SEQ ID NO: 1237918
ugcuucccagaugacauuu

SEQ ID NO: 1237920 - RNA, 19 nt, Artificial Sequence
  Description of Artificial Sequence: Synthetic oligonucleotide
  Sense strand starting at position 115 of SEQ ID NO: 917492
cuggaauacuaguauagaa

SEQ ID NO: 1237921 - RNA, 19 nt, Artificial Sequence
  Description of Artificial Sequence: Synthetic oligonucleotide
  Antisense strand to SEQ ID NO: 1237920
uucuauacuaguauuccag

SEQ ID NO: 1237922 - RNA, 19 nt, Artificial Sequence
  Description of Artificial Sequence: Synthetic oligonucleotide
  Sense strand starting at position 192 of SEQ ID NO: 917492
ccagauacuuaagguauuu

SEQ ID NO: 1237923 - RNA, 19 nt, Artificial Sequence
  Description of Artificial Sequence: Synthetic oligonucleotide
  Antisense strand to SEQ ID NO: 1237922
aaauaccuuaaguaucugg

SEQ ID NO: 1237924 - RNA, 19 nt, Artificial Sequence
  Description of Artificial Sequence: Synthetic oligonucleotide
  Sense strand starting at position 203 of SEQ ID NO: 917492
agguauuuaccugguaguu

SEQ ID NO: 1237925 - RNA, 19 nt, Artificial Sequence
  Description of Artificial Sequence: Synthetic oligonucleotide
  Antisense strand to SEQ ID NO: 1237924
aacuaccagguaaauaccu

SEQ ID NO: 1237926 - RNA, 19 nt, Artificial Sequence
  Description of Artificial Sequence: Synthetic oligonucleotide
  Sense strand starting at position 332 of SEQ ID NO: 917492
ucauuaacagguugaagua

SEQ ID NO: 1237927 - RNA, 19 nt, Artificial Sequence
  Description of Artificial Sequence: Synthetic oligonucleotide
  Antisense strand to SEQ ID NO: 1237926
uacuucaaccuguuaauga

SEQ ID NO: 1237928 - RNA, 19 nt, Artificial Sequence
  Description of Artificial Sequence: Synthetic oligonucleotide
  Sense strand starting at position 472 of SEQ ID NO: 917492
uguuuacauuucuuguuga

SEQ ID NO: 1237929 - RNA, 19 nt, Artificial Sequence
  Description of Artificial Sequence: Synthetic oligonucleotide
  Antisense strand to SEQ ID NO: 1237928
ucaacaagaaauguaaaca

SEQ ID NO: 1237930 - RNA, 19 nt, Artificial Sequence
  Description of Artificial Sequence: Synthetic oligonucleotide
  Sense strand starting at position 616 of SEQ ID NO: 917492
aaguauacccacugcgaaa

SEQ ID NO: 1237931 - RNA, 19 nt, Artificial Sequence
  Description of Artificial Sequence: Synthetic oligonucleotide
  Antisense strand to SEQ ID NO: 1237930
uuucgcaguggguauacuu

SEQ ID NO: 1237932 - RNA, 19 nt, Artificial Sequence
  Description of Artificial Sequence: Synthetic oligonucleotide
  Sense strand starting at position 783 of SEQ ID NO: 917492
ugacaauaucgacaccagu

SEQ ID NO: 1237933 - RNA, 19 nt, Artificial Sequence
  Description of Artificial Sequence: Synthetic oligonucleotide
  Antisense strand to SEQ ID NO: 1237932
acuggugucgauauuguca

SEQ ID NO: 1237934 - RNA, 19 nt, Artificial Sequence
  Description of Artificial Sequence: Synthetic oligonucleotide
  Sense strand starting at position 789 of SEQ ID NO: 917492
uaucgacaccagugauuac

SEQ ID NO: 1237935 - RNA, 19 nt, Artificial Sequence
  Description of Artificial Sequence: Synthetic oligonucleotide
  Antisense strand to SEQ ID NO: 1237934
guaaucacuggugucgaua

SEQ ID NO: 1237936 - RNA, 19 nt, Artificial Sequence
  Description of Artificial Sequence: Synthetic oligonucleotide
  Sense strand starting at position 981 of SEQ ID NO: 917492
gaaguauucuuaguucuug

SEQ ID NO: 1237937 - RNA, 19 nt, Artificial Sequence
  Description of Artificial Sequence: Synthetic oligonucleotide
  Antisense strand to SEQ ID NO: 1237936
caagaacuaagaauacuuc

SEQ ID NO: 1237938 - RNA, 19 nt, Artificial Sequence
  Description of Artificial Sequence: Synthetic oligonucleotide
  Sense strand starting at position 1031 of SEQ ID NO: 917492
aaaguugugacccguggau

SEQ ID NO: 1237939 - RNA, 19 nt, Artificial Sequence
  Description of Artificial Sequence: Synthetic oligonucleotide
  Antisense strand to SEQ ID NO: 1237938
auccacgggucacaacuuu

SEQ ID NO: 1237940 - RNA, 19 nt, Artificial Sequence
  Description of Artificial Sequence: Synthetic oligonucleotide
  Sense strand starting at position 1033 of SEQ ID NO: 917492
aguugugacccguggauuu

SEQ ID NO: 1237941 - RNA, 19 nt, Artificial Sequence
  Description of Artificial Sequence: Synthetic oligonucleotide
  Antisense strand to SEQ ID NO: 1237940
aaauccacgggucacaacu

SEQ ID NO: 1237942 - RNA, 19 nt, Artificial Sequence
  Description of Artificial Sequence: Synthetic oligonucleotide
  Sense strand starting at position 1079 of SEQ ID NO: 917492
gucuguuggccggaacaaa

SEQ ID NO: 1237943 - RNA, 19 nt, Artificial Sequence
  Description of Artificial Sequence: Synthetic oligonucleotide
  Antisense strand to SEQ ID NO: 1237942
uuuguuccggccaacagac

SEQ ID NO: 1237944 - RNA, 19 nt, Artificial Sequence
  Description of Artificial Sequence: Synthetic oligonucleotide
  Sense strand starting at position 1133 of SEQ ID NO: 917492
gcaugugaugccuccgguu

SEQ ID NO: 1237945 - RNA, 19 nt, Artificial Sequence
  Description of Artificial Sequence: Synthetic oligonucleotide
  Antisense strand to SEQ ID NO: 1237944
aaccggaggcaucacaugc

SEQ ID NO: 1237946 - RNA, 19 nt, Artificial Sequence
  Description of Artificial Sequence: Synthetic oligonucleotide
  Sense strand starting at position 1204 of SEQ ID NO: 917492
gcaucaugucccggacaac

SEQ ID NO: 1237947 - RNA, 19 nt, Artificial Sequence
  Description of Artificial Sequence: Synthetic oligonucleotide
  Antisense strand to SEQ ID NO: 1237946
guuguccgggacaugaugc

SEQ ID NO: 1237948 - RNA, 19 nt, Artificial Sequence
  Description of Artificial Sequence: Synthetic oligonucleotide
  Sense strand starting at position 1469 of SEQ ID NO: 917492
ggaucuuguagaugucgga

SEQ ID NO: 1237949 - RNA, 19 nt, Artificial Sequence
  Description of Artificial Sequence: Synthetic oligonucleotide
  Antisense strand to SEQ ID NO: 1237948
uccgacaucuacaagaucc

SEQ ID NO: 1237950 - RNA, 19 nt, Artificial Sequence
  Description of Artificial Sequence: Synthetic oligonucleotide
  Sense strand starting at position 1473 of SEQ ID NO: 917492
cuuguagaugucggagaac

SEQ ID NO: 1237951 - RNA, 19 nt, Artificial Sequence
  Description of Artificial Sequence: Synthetic oligonucleotide
  Antisense strand to SEQ ID NO: 1237950
guucuccgacaucuacaag

SEQ ID NO: 1237952 - RNA, 19 nt, Artificial Sequence
  Description of Artificial Sequence: Synthetic oligonucleotide
  Sense strand starting at position 1476 of SEQ ID NO: 917492
guagaugucggagaacauc

SEQ ID NO: 1237953 - RNA, 19 nt, Artificial Sequence
  Description of Artificial Sequence: Synthetic oligonucleotide
  Antisense strand to SEQ ID NO: 1237952
gauguucuccgacaucuac

SEQ ID NO: 1237954 - RNA, 19 nt, Artificial Sequence
  Description of Artificial Sequence: Synthetic oligonucleotide
  Sense strand starting at position 1761 of SEQ ID NO: 917492
ugaugaggucccgguagau

SEQ ID NO: 1237955 - RNA, 19 nt, Artificial Sequence
  Description of Artificial Sequence: Synthetic oligonucleotide
  Antisense strand to SEQ ID NO: 1237954
aucuaccgggaccucauca

SEQ ID NO: 1237956 - RNA, 19 nt, Artificial Sequence
  Description of Artificial Sequence: Synthetic oligonucleotide
  Sense strand starting at position 1770 of SEQ ID NO: 917492
cccgguagauaaucaugau

SEQ ID NO: 1237957 - RNA, 19 nt, Artificial Sequence
  Description of Artificial Sequence: Synthetic oligonucleotide
  Antisense strand to SEQ ID NO: 1237956
aucaugauuaucuaccggg

SEQ ID NO: 1237958 - RNA, 19 nt, Artificial Sequence
  Description of Artificial Sequence: Synthetic oligonucleotide
  Sense strand starting at position 2260 of SEQ ID NO: 917492
gguggagcuuagaggaauu

SEQ ID NO: 1237959 - RNA, 19 nt, Artificial Sequence
  Description of Artificial Sequence: Synthetic oligonucleotide
  Antisense strand to SEQ ID NO: 1237958
aauuccucuaagcuccacc

SEQ ID NO: 1237960 - RNA, 19 nt, Artificial Sequence
  Description of Artificial Sequence: Synthetic oligonucleotide
  Sense strand starting at position 2323 of SEQ ID NO: 917492
cugggaacgugaguaucaa

SEQ ID NO: 1237961 - RNA, 19 nt, Artificial Sequence
  Description of Artificial Sequence: Synthetic oligonucleotide
  Antisense strand to SEQ ID NO: 1237960
uugauacucacguucccag

SEQ ID NO: 1237962 - RNA, 19 nt, Artificial Sequence
  Description of Artificial Sequence: Synthetic oligonucleotide
  Sense strand starting at position 2331 of SEQ ID NO: 917492
gugaguaucaaccaaggua

SEQ ID NO: 1237963 - RNA, 19 nt, Artificial Sequence
  Description of Artificial Sequence: Synthetic oligonucleotide
  Antisense strand to SEQ ID NO: 1237962
uaccuugguugauacucac

SEQ ID NO: 1237964 - RNA, 19 nt, Artificial Sequence
  Description of Artificial Sequence: Synthetic oligonucleotide
  Sense strand starting at position 2347 of SEQ ID NO: 917492
guaggagaacgucgcauuu

SEQ ID NO: 1237965 - RNA, 19 nt, Artificial Sequence
  Description of Artificial Sequence: Synthetic oligonucleotide
  Antisense strand to SEQ ID NO: 1237964
aaaugcgacguucuccuac

SEQ ID NO: 1237966 - RNA, 19 nt, Artificial Sequence
  Description of Artificial Sequence: Synthetic oligonucleotide
  Sense strand starting at position 2588 of SEQ ID NO: 917492
gaagaugucacgggagucu

SEQ ID NO: 1237967 - RNA, 19 nt, Artificial Sequence
  Description of Artificial Sequence: Synthetic oligonucleotide
  Antisense strand to SEQ ID NO: 1237966
agacucccgugacaucuuc

SEQ ID NO: 1237968 - RNA, 19 nt, Artificial Sequence
  Description of Artificial Sequence: Synthetic oligonucleotide
  Sense strand starting at position 2612 of SEQ ID NO: 917492
ggguuuccauguguuccaa

SEQ ID NO: 1237969 - RNA, 19 nt, Artificial Sequence
  Description of Artificial Sequence: Synthetic oligonucleotide
  Antisense strand to SEQ ID NO: 1237968
uuggaacacauggaaaccc

SEQ ID NO: 1237970 - RNA, 19 nt, Artificial Sequence
  Description of Artificial Sequence: Synthetic oligonucleotide
  Sense strand starting at position 3139 of SEQ ID NO: 917492
gucacaucuuuggcauaag

SEQ ID NO: 1237971 - RNA, 19 nt, Artificial Sequence
  Description of Artificial Sequence: Synthetic oligonucleotide
  Antisense strand to SEQ ID NO: 1237970
cuuaugccaaagaugugac

SEQ ID NO: 1237972 - RNA, 19 nt, Artificial Sequence
  Description of Artificial Sequence: Synthetic oligonucleotide
  Sense strand starting at position 3142 of SEQ ID NO: 917492
acaucuuuggcauaaggca

SEQ ID NO: 1237973 - RNA, 19 nt, Artificial Sequence
  Description of Artificial Sequence: Synthetic oligonucleotide
  Antisense strand to SEQ ID NO: 1237972
ugccuuaugccaaagaugu

SEQ ID NO: 1237974 - RNA, 19 nt, Artificial Sequence
  Description of Artificial Sequence: Synthetic oligonucleotide
  Sense strand starting at position 3157 of SEQ ID NO: 917492
ggcaaagauacaugccagu

SEQ ID NO: 1237975 - RNA, 19 nt, Artificial Sequence
  Description of Artificial Sequence: Synthetic oligonucleotide
  Antisense strand to SEQ ID NO: 1237974
acuggcauguaucuuugcc

SEQ ID NO: 1237976 - RNA, 19 nt, Artificial Sequence
  Description of Artificial Sequence: Synthetic oligonucleotide
  Sense strand starting at position 3182 of SEQ ID NO: 917492
ucugaaagcuuguucuauu

SEQ ID NO: 1237977 - RNA, 19 nt, Artificial Sequence
  Description of Artificial Sequence: Synthetic oligonucleotide
  Antisense strand to SEQ ID NO: 1237976
aauagaacaagcuuucaga

SEQ ID NO: 1237978 - RNA, 19 nt, Artificial Sequence
  Description of Artificial Sequence: Synthetic oligonucleotide
  Sense strand starting at position 3183 of SEQ ID NO: 917492
cugaaagcuuguucuauuu

SEQ ID NO: 1237979 - RNA, 19 nt, Artificial Sequence
  Description of Artificial Sequence: Synthetic oligonucleotide
  Antisense strand to SEQ ID NO: 1237978
aaauagaacaagcuuucag

SEQ ID NO: 1237980 - RNA, 19 nt, Artificial Sequence
  Description of Artificial Sequence: Synthetic oligonucleotide
  Sense strand starting at position 3191 of SEQ ID NO: 917492
uuguucuauuucgcaaaua

SEQ ID NO: 1237981 - RNA, 19 nt, Artificial Sequence
  Description of Artificial Sequence: Synthetic oligonucleotide
  Antisense strand to SEQ ID NO: 1237980
uauuugcgaaauagaacaa

SEQ ID NO: 1237982 - RNA, 19 nt, Artificial Sequence
  Description of Artificial Sequence: Synthetic oligonucleotide
  Sense strand starting at position 3215 of SEQ ID NO: 917492
ugcuuuguaucccuuagaa

SEQ ID NO: 1237983 - RNA, 19 nt, Artificial Sequence
  Description of Artificial Sequence: Synthetic oligonucleotide
  Antisense strand to SEQ ID NO: 1237982
uucuaagggauacaaagca

SEQ ID NO: 1237984 - RNA, 19 nt, Artificial Sequence
  Description of Artificial Sequence: Synthetic oligonucleotide
  Sense strand starting at position 3278 of SEQ ID NO: 917492
guccuacuuauagaagugu

SEQ ID NO: 1237985 - RNA, 19 nt, Artificial Sequence
  Description of Artificial Sequence: Synthetic oligonucleotide
  Antisense strand to SEQ ID NO: 1237984
acacuucuauaaguaggac

SEQ ID NO: 1237986 - RNA, 19 nt, Artificial Sequence
  Description of Artificial Sequence: Synthetic oligonucleotide
  Sense strand starting at position 3382 of SEQ ID NO: 917492
gaaugcaacccuugggaaa

SEQ ID NO: 1237987 - RNA, 19 nt, Artificial Sequence
  Description of Artificial Sequence: Synthetic oligonucleotide
  Antisense strand to SEQ ID NO: 1237986
uuucccaaggguugcauuc

SEQ ID NO: 1237988 - RNA, 19 nt, Artificial Sequence
  Description of Artificial Sequence: Synthetic oligonucleotide
  Sense strand starting at position 3416 of SEQ ID NO: 917492
uggcaauuggaaugaugga

SEQ ID NO: 1237989 - RNA, 19 nt, Artificial Sequence
  Description of Artificial Sequence: Synthetic oligonucleotide
  Antisense strand to SEQ ID NO: 1237988
uccaucauuccaauugcca

SEQ ID NO: 1237990 - RNA, 19 nt, Artificial Sequence
  Description of Artificial Sequence: Synthetic oligonucleotide
  Sense strand starting at position 3673 of SEQ ID NO: 917492
gcuggaguucuuggaugga

SEQ ID NO: 1237991 - RNA, 19 nt, Artificial Sequence
  Description of Artificial Sequence: Synthetic oligonucleotide
  Antisense strand to SEQ ID NO: 1237990
uccauccaagaacuccagc

SEQ ID NO: 1237992 - RNA, 19 nt, Artificial Sequence
  Description of Artificial Sequence: Synthetic oligonucleotide
  Sense strand starting at position 3892 of SEQ ID NO: 917492
ugagaugauuaucacacau

SEQ ID NO: 1237993 - RNA, 19 nt, Artificial Sequence
  Description of Artificial Sequence: Synthetic oligonucleotide
  Antisense strand to SEQ ID NO: 1237992
augugugauaaucaucuca

SEQ ID NO: 1237994 - RNA, 19 nt, Artificial Sequence
  Description of Artificial Sequence: Synthetic oligonucleotide
  Sense strand starting at position 3907 of SEQ ID NO: 917492
acauuaauacugugugaac

SEQ ID NO: 1237995 - RNA, 19 nt, Artificial Sequence
  Description of Artificial Sequence: Synthetic oligonucleotide
  Antisense strand to SEQ ID NO: 1237994
guucacacaguauuaaugu

SEQ ID NO: 1237996 - RNA, 19 nt, Artificial Sequence
  Description of Artificial Sequence: Synthetic oligonucleotide
  Sense strand starting at position 3909 of SEQ ID NO: 917492
auuaauacugugugaacau

SEQ ID NO: 1237997 - RNA, 19 nt, Artificial Sequence
  Description of Artificial Sequence: Synthetic oligonucleotide
  Antisense strand to SEQ ID NO: 1237996
auguucacacaguauuaau

SEQ ID NO: 1237998 - RNA, 19 nt, Artificial Sequence
  Description of Artificial Sequence: Synthetic oligonucleotide
  Sense strand starting at position 3909 of SEQ ID NO: 917493
auuaauacugugugaacau

SEQ ID NO: 1237999 - RNA, 19 nt, Artificial Sequence
  Description of Artificial Sequence: Synthetic oligonucleotide
  Antisense strand to SEQ ID NO: 1237998
auguucacacaguauuaau

SEQ ID NO: 1238000 - RNA, 19 nt, Artificial Sequence
  Description of Artificial Sequence: Synthetic oligonucleotide
  Sense strand starting at position 117 of SEQ ID NO: 917493
aagaguaguaacgaggcaa

SEQ ID NO: 1238001 - RNA, 19 nt, Artificial Sequence
  Description of Artificial Sequence: Synthetic oligonucleotide
  Antisense strand to SEQ ID NO: 1238000
uugccucguuacuacucuu

SEQ ID NO: 1238002 - RNA, 19 nt, Artificial Sequence
  Description of Artificial Sequence: Synthetic oligonucleotide
  Sense strand starting at position 121 of SEQ ID NO: 917493
guaguaacgaggcaagaau

SEQ ID NO: 1238003 - RNA, 19 nt, Artificial Sequence
  Description of Artificial Sequence: Synthetic oligonucleotide
  Antisense strand to SEQ ID NO: 1238002
auucuugccucguuacuac

SEQ ID NO: 1238004 - RNA, 19 nt, Artificial Sequence
  Description of Artificial Sequence: Synthetic oligonucleotide
  Sense strand starting at position 130 of SEQ ID NO: 917493
aggcaagaaucuuaagaua

SEQ ID NO: 1238005 - RNA, 19 nt, Artificial Sequence
  Description of Artificial Sequence: Synthetic oligonucleotide
  Antisense strand to SEQ ID NO: 1238004
uaucuuaagauucuugccu

SEQ ID NO: 1238006 - RNA, 19 nt, Artificial Sequence
  Description of Artificial Sequence: Synthetic oligonucleotide
  Sense strand starting at position 489 of SEQ ID NO: 917493
ccaagaaucuaaggauaac

SEQ ID NO: 1238007 - RNA, 19 nt, Artificial Sequence
  Description of Artificial Sequence: Synthetic oligonucleotide
  Antisense strand to SEQ ID NO: 1238006
guuauccuuagauucuugg

SEQ ID NO: 1238008 - RNA, 19 nt, Artificial Sequence
  Description of Artificial Sequence: Synthetic oligonucleotide
  Sense strand starting at position 619 of SEQ ID NO: 917493
ugucaucacuggcuaguga

SEQ ID NO: 1238009 - RNA, 19 nt, Artificial Sequence
  Description of Artificial Sequence: Synthetic oligonucleotide
  Antisense strand to SEQ ID NO: 1238008
ucacuagccagugaugaca

SEQ ID NO: 1238010 - RNA, 19 nt, Artificial Sequence
  Description of Artificial Sequence: Synthetic oligonucleotide
  Sense strand starting at position 620 of SEQ ID NO: 917493
gucaucacuggcuagugaa

SEQ ID NO: 1238011 - RNA, 19 nt, Artificial Sequence
  Description of Artificial Sequence: Synthetic oligonucleotide
  Antisense strand to SEQ ID NO: 1238010
uucacuagccagugaugac

SEQ ID NO: 1238012 - RNA, 19 nt, Artificial Sequence
  Description of Artificial Sequence: Synthetic oligonucleotide
  Sense strand starting at position 654 of SEQ ID NO: 917493
aggaauucucagcaaaugu

SEQ ID NO: 1238013 - RNA, 19 nt, Artificial Sequence
  Description of Artificial Sequence: Synthetic oligonucleotide
  Antisense strand to SEQ ID NO: 1238012
acauuugcugagaauuccu

SEQ ID NO: 1238014 - RNA, 19 nt, Artificial Sequence
  Description of Artificial Sequence: Synthetic oligonucleotide
  Sense strand starting at position 803 of SEQ ID NO: 917493
uuaauaagugacugagguu

SEQ ID NO: 1238015 - RNA, 19 nt, Artificial Sequence
  Description of Artificial Sequence: Synthetic oligonucleotide
  Antisense strand to SEQ ID NO: 1238014
aaccucagucacuuauuaa

SEQ ID NO: 1238016 - RNA, 19 nt, Artificial Sequence
  Description of Artificial Sequence: Synthetic oligonucleotide
  Sense strand starting at position 826 of SEQ ID NO: 917493
guaauacuaucuccaggau

SEQ ID NO: 1238017 - RNA, 19 nt, Artificial Sequence
  Description of Artificial Sequence: Synthetic oligonucleotide
  Antisense strand to SEQ ID NO: 1238016
auccuggagauaguauuac

SEQ ID NO: 1238018 - RNA, 19 nt, Artificial Sequence
  Description of Artificial Sequence: Synthetic oligonucleotide
  Sense strand starting at position 1201 of SEQ ID NO: 917493
gggauaauaugacaucaaa

SEQ ID NO: 1238019 - RNA, 19 nt, Artificial Sequence
  Description of Artificial Sequence: Synthetic oligonucleotide
  Antisense strand to SEQ ID NO: 1238018
uuugaugucauauuauccc

SEQ ID NO: 1238020 - RNA, 19 nt, Artificial Sequence
  Description of Artificial Sequence: Synthetic oligonucleotide
  Sense strand starting at position 1333 of SEQ ID NO: 917493
auugucucaguuuauuaga

SEQ ID NO: 1238021 - RNA, 19 nt, Artificial Sequence
  Description of Artificial Sequence: Synthetic oligonucleotide
  Antisense strand to SEQ ID NO: 1238020
ucuaauaaacugagacaau

SEQ ID NO: 1238022 - RNA, 19 nt, Artificial Sequence
  Description of Artificial Sequence: Synthetic oligonucleotide
  Sense strand starting at position 1335 of SEQ ID NO: 917493
ugucucaguuuauuagaau

SEQ ID NO: 1238023 - RNA, 19 nt, Artificial Sequence
  Description of Artificial Sequence: Synthetic oligonucleotide
  Antisense strand to SEQ ID NO: 1238022
auucuaauaaacugagaca

SEQ ID NO: 1238024 - RNA, 19 nt, Artificial Sequence
  Description of Artificial Sequence: Synthetic oligonucleotide
  Sense strand starting at position 1347 of SEQ ID NO: 917493
uuagaauauggauggucuu

SEQ ID NO: 1238025 - RNA, 19 nt, Artificial Sequence
  Description of Artificial Sequence: Synthetic oligonucleotide
  Antisense strand to SEQ ID NO: 1238024
aagaccauccauauucuaa

SEQ ID NO: 1238026 - RNA, 19 nt, Artificial Sequence
  Description of Artificial Sequence: Synthetic oligonucleotide
  Sense strand starting at position 1348 of SEQ ID NO: 917493
uagaauauggauggucuuu

SEQ ID NO: 1238027 - RNA, 19 nt, Artificial Sequence
  Description of Artificial Sequence: Synthetic oligonucleotide
  Antisense strand to SEQ ID NO: 1238026
aaagaccauccauauucua

SEQ ID NO: 1238028 - RNA, 19 nt, Artificial Sequence
  Description of Artificial Sequence: Synthetic oligonucleotide
  Sense strand starting at position 1409 of SEQ ID NO: 917493
ggaauuaucuuggaaucug

SEQ ID NO: 1238029 - RNA, 19 nt, Artificial Sequence
  Description of Artificial Sequence: Synthetic oligonucleotide
  Antisense strand to SEQ ID NO: 1238028
cagauuccaagauaauucc

SEQ ID NO: 1238030 - RNA, 19 nt, Artificial Sequence
  Description of Artificial Sequence: Synthetic oligonucleotide
  Sense strand starting at position 1426 of SEQ ID NO: 917493
ugauaauucugagacucua

SEQ ID NO: 1238031 - RNA, 19 nt, Artificial Sequence
  Description of Artificial Sequence: Synthetic oligonucleotide
  Antisense strand to SEQ ID NO: 1238030
uagagucucagaauuauca

SEQ ID NO: 1238032 - RNA, 19 nt, Artificial Sequence
  Description of Artificial Sequence: Synthetic oligonucleotide
  Sense strand starting at position 1434 of SEQ ID NO: 917493
cugagacucuacuaaugac

SEQ ID NO: 1238033 - RNA, 19 nt, Artificial Sequence
  Description of Artificial Sequence: Synthetic oligonucleotide
  Antisense strand to SEQ ID NO: 1238032
gucauuaguagagucucag

SEQ ID NO: 1238034 - RNA, 19 nt, Artificial Sequence
  Description of Artificial Sequence: Synthetic oligonucleotide
  Sense strand starting at position 1466 of SEQ ID NO: 917493
ucuacauuaugugcucauu

SEQ ID NO: 1238035 - RNA, 19 nt, Artificial Sequence
  Description of Artificial Sequence: Synthetic oligonucleotide
  Antisense strand to SEQ ID NO: 1238034
aaugagcacauaauguaga

SEQ ID NO: 1238036 - RNA, 19 nt, Artificial Sequence
  Description of Artificial Sequence: Synthetic oligonucleotide
  Sense strand starting at position 1681 of SEQ ID NO: 917493
gugugucccuccucaauca

SEQ ID NO: 1238037 - RNA, 19 nt, Artificial Sequence
  Description of Artificial Sequence: Synthetic oligonucleotide
  Antisense strand to SEQ ID NO: 1238036
ugauugaggagggacacac

SEQ ID NO: 1238038 - RNA, 19 nt, Artificial Sequence
  Description of Artificial Sequence: Synthetic oligonucleotide
  Sense strand starting at position 1689 of SEQ ID NO: 917493
cuccucaaucaccguguua

SEQ ID NO: 1238039 - RNA, 19 nt, Artificial Sequence
  Description of Artificial Sequence: Synthetic oligonucleotide
  Antisense strand to SEQ ID NO: 1238038
uaacacggugauugaggag

SEQ ID NO: 1238040 - RNA, 19 nt, Artificial Sequence
  Description of Artificial Sequence: Synthetic oligonucleotide
  Sense strand starting at position 1691 of SEQ ID NO: 917493
ccucaaucaccguguuaug

SEQ ID NO: 1238041 - RNA, 19 nt, Artificial Sequence
  Description of Artificial Sequence: Synthetic oligonucleotide
  Antisense strand to SEQ ID NO: 1238040
cauaacacggugauugagg

SEQ ID NO: 1238042 - RNA, 19 nt, Artificial Sequence
  Description of Artificial Sequence: Synthetic oligonucleotide
  Sense strand starting at position 1700 of SEQ ID NO: 917493
ccguguuauguugaucauu

SEQ ID NO: 1238043 - RNA, 19 nt, Artificial Sequence
  Description of Artificial Sequence: Synthetic oligonucleotide
  Antisense strand to SEQ ID NO: 1238042
aaugaucaacauaacacgg

SEQ ID NO: 1238044 - RNA, 19 nt, Artificial Sequence
  Description of Artificial Sequence: Synthetic oligonucleotide
  Sense strand starting at position 1813 of SEQ ID NO: 917493
uguauucugcugcaacuua

SEQ ID NO: 1238045 - RNA, 19 nt, Artificial Sequence
  Description of Artificial Sequence: Synthetic oligonucleotide
  Antisense strand to SEQ ID NO: 1238044
uaaguugcagcagaauaca

SEQ ID NO: 1238046 - RNA, 19 nt, Artificial Sequence
  Description of Artificial Sequence: Synthetic oligonucleotide
  Sense strand starting at position 1849 of SEQ ID NO: 917493
guuucugaaauuugucugu

SEQ ID NO: 1238047 - RNA, 19 nt, Artificial Sequence
  Description of Artificial Sequence: Synthetic oligonucleotide
  Antisense strand to SEQ ID NO: 1238046
acagacaaauuucagaaac

SEQ ID NO: 1238048 - RNA, 19 nt, Artificial Sequence
  Description of Artificial Sequence: Synthetic oligonucleotide
  Sense strand starting at position 1856 of SEQ ID NO: 917493
aaauuugucugugaugaug

SEQ ID NO: 1238049 - RNA, 19 nt, Artificial Sequence
  Description of Artificial Sequence: Synthetic oligonucleotide
  Antisense strand to SEQ ID NO: 1238048
caucaucacagacaaauuu

SEQ ID NO: 1238050 - RNA, 19 nt, Artificial Sequence
  Description of Artificial Sequence: Synthetic oligonucleotide
  Sense strand starting at position 1865 of SEQ ID NO: 917493
ugugaugauguguauagcu

SEQ ID NO: 1238051 - RNA, 19 nt, Artificial Sequence
  Description of Artificial Sequence: Synthetic oligonucleotide
  Antisense strand to SEQ ID NO: 1238050
agcuauacacaucaucaca

SEQ ID NO: 1238052 - RNA, 19 nt, Artificial Sequence
  Description of Artificial Sequence: Synthetic oligonucleotide
  Sense strand starting at position 1867 of SEQ ID NO: 917493
ugaugauguguauagcucu

SEQ ID NO: 1238053 - RNA, 19 nt, Artificial Sequence
  Description of Artificial Sequence: Synthetic oligonucleotide
  Antisense strand to SEQ ID NO: 1238052
agagcuauacacaucauca

SEQ ID NO: 1238054 - RNA, 19 nt, Artificial Sequence
  Description of Artificial Sequence: Synthetic oligonucleotide
  Sense strand starting at position 1870 of SEQ ID NO: 917493
ugauguguauagcucuauu

SEQ ID NO: 1238055 - RNA, 19 nt, Artificial Sequence
  Description of Artificial Sequence: Synthetic oligonucleotide
  Antisense strand to SEQ ID NO: 1238054
aauagagcuauacacauca

SEQ ID NO: 1238056 - RNA, 19 nt, Artificial Sequence
  Description of Artificial Sequence: Synthetic oligonucleotide
  Sense strand starting at position 1904 of SEQ ID NO: 917493
uccauauaguguuccauug

SEQ ID NO: 1238057 - RNA, 19 nt, Artificial Sequence
  Description of Artificial Sequence: Synthetic oligonucleotide
  Antisense strand to SEQ ID NO: 1238056
caauggaacacuauaugga

SEQ ID NO: 1238058 - RNA, 19 nt, Artificial Sequence
  Description of Artificial Sequence: Synthetic oligonucleotide
  Sense strand starting at position 1914 of SEQ ID NO: 917493
guuccauugcaaggauaaa

SEQ ID NO: 1238059 - RNA, 19 nt, Artificial Sequence
  Description of Artificial Sequence: Synthetic oligonucleotide
  Antisense strand to SEQ ID NO: 1238058
uuuauccuugcaauggaac

SEQ ID NO: 1238060 - RNA, 19 nt, Artificial Sequence
  Description of Artificial Sequence: Synthetic oligonucleotide
  Sense strand starting at position 1943 of SEQ ID NO: 917493
uuaucaguucuccaggucu

SEQ ID NO: 1238061 - RNA, 19 nt, Artificial Sequence
  Description of Artificial Sequence: Synthetic oligonucleotide
  Antisense strand to SEQ ID NO: 1238060
agaccuggagaacugauaa

SEQ ID NO: 1238062 - RNA, 19 nt, Artificial Sequence
  Description of Artificial Sequence: Synthetic oligonucleotide
  Sense strand starting at position 1990 of SEQ ID NO: 917493
cuucgaucauuucuguacu

SEQ ID NO: 1238063 - RNA, 19 nt, Artificial Sequence
  Description of Artificial Sequence: Synthetic oligonucleotide
  Antisense strand to SEQ ID NO: 1238062
aguacagaaaugaucgaag

SEQ ID NO: 1238064 - RNA, 19 nt, Artificial Sequence
  Description of Artificial Sequence: Synthetic oligonucleotide
  Sense strand starting at position 2020 of SEQ ID NO: 917493
ccuuaucugcaagagguuu

SEQ ID NO: 1238065 - RNA, 19 nt, Artificial Sequence
  Description of Artificial Sequence: Synthetic oligonucleotide
  Antisense strand to SEQ ID NO: 1238064
aaaccucuugcagauaagg

SEQ ID NO: 1238066 - RNA, 19 nt, Artificial Sequence
  Description of Artificial Sequence: Synthetic oligonucleotide
  Sense strand starting at position 2047 of SEQ ID NO: 917493
ggguauguucuccaggaac

SEQ ID NO: 1238067 - RNA, 19 nt, Artificial Sequence
  Description of Artificial Sequence: Synthetic oligonucleotide
  Antisense strand to SEQ ID NO: 1238066
guuccuggagaacauaccc

SEQ ID NO: 1238068 - RNA, 19 nt, Artificial Sequence
  Description of Artificial Sequence: Synthetic oligonucleotide
  Sense strand starting at position 2049 of SEQ ID NO: 917493
guauguucuccaggaacag

SEQ ID NO: 1238069 - RNA, 19 nt, Artificial Sequence
  Description of Artificial Sequence: Synthetic oligonucleotide
  Antisense strand to SEQ ID NO: 1238068
cuguuccuggagaacauac

SEQ ID NO: 1238070 - RNA, 19 nt, Artificial Sequence
  Description of Artificial Sequence: Synthetic oligonucleotide
  Sense strand starting at position 2297 of SEQ ID NO: 917493
ccuucuaaggguuaugcau

SEQ ID NO: 1238071 - RNA, 19 nt, Artificial Sequence
  Description of Artificial Sequence: Synthetic oligonucleotide
  Antisense strand to SEQ ID NO: 1238070
augcauaacccuuagaagg

SEQ ID NO: 1238072 - RNA, 19 nt, Artificial Sequence
  Description of Artificial Sequence: Synthetic oligonucleotide
  Sense strand starting at position 2329 of SEQ ID NO: 917493
augcuaccucaauaugguu

SEQ ID NO: 1238073 - RNA, 19 nt, Artificial Sequence
  Description of Artificial Sequence: Synthetic oligonucleotide
  Antisense strand to SEQ ID NO: 1238072
aaccauauugagguagcau

SEQ ID NO: 1238074 - RNA, 19 nt, Artificial Sequence
  Description of Artificial Sequence: Synthetic oligonucleotide
  Sense strand starting at position 2355 of SEQ ID NO: 917493
gcauuucccugagcauuau

SEQ ID NO: 1238075 - RNA, 19 nt, Artificial Sequence
  Description of Artificial Sequence: Synthetic oligonucleotide
  Antisense strand to SEQ ID NO: 1238074
auaaugcucagggaaaugc

SEQ ID NO: 1238076 - RNA, 19 nt, Artificial Sequence
  Description of Artificial Sequence: Synthetic oligonucleotide
  Sense strand starting at position 2455 of SEQ ID NO: 917493
guugucuucuacuugauuu

SEQ ID NO: 1238077 - RNA, 19 nt, Artificial Sequence
  Description of Artificial Sequence: Synthetic oligonucleotide
  Antisense strand to SEQ ID NO: 1238076
aaaucaaguagaagacaac

SEQ ID NO: 1238078 - RNA, 19 nt, Artificial Sequence
  Description of Artificial Sequence: Synthetic oligonucleotide
  Sense strand starting at position 2813 of SEQ ID NO: 917494
guuuguuugggacagaagu

SEQ ID NO: 1238079 - RNA, 19 nt, Artificial Sequence
  Description of Artificial Sequence: Synthetic oligonucleotide
  Antisense strand to SEQ ID NO: 1238078
acuucugucccaaacaaac

SEQ ID NO: 1238080 - RNA, 19 nt, Artificial Sequence
  Description of Artificial Sequence: Synthetic oligonucleotide
  Sense strand starting at position 242 of SEQ ID NO: 917494
cagugaucuuugggcagag

SEQ ID NO: 1238081 - RNA, 19 nt, Artificial Sequence
  Description of Artificial Sequence: Synthetic oligonucleotide
  Antisense strand to SEQ ID NO: 1238080
cucugcccaaagaucacug

SEQ ID NO: 1238082 - RNA, 19 nt, Artificial Sequence
  Description of Artificial Sequence: Synthetic oligonucleotide
  Sense strand starting at position 246 of SEQ ID NO: 917494
gaucuuugggcagaggcua

SEQ ID NO: 1238083 - RNA, 19 nt, Artificial Sequence
  Description of Artificial Sequence: Synthetic oligonucleotide
  Antisense strand to SEQ ID NO: 1238082
uagccucugcccaaagauc

SEQ ID NO: 1238084 - RNA, 19 nt, Artificial Sequence
  Description of Artificial Sequence: Synthetic oligonucleotide
  Sense strand starting at position 491 of SEQ ID NO: 917494
uggaucaauggcugucaau

SEQ ID NO: 1238085 - RNA, 19 nt, Artificial Sequence
  Description of Artificial Sequence: Synthetic oligonucleotide
  Antisense strand to SEQ ID NO: 1238084
auugacagccauugaucca

SEQ ID NO: 1238086 - RNA, 19 nt, Artificial Sequence
  Description of Artificial Sequence: Synthetic oligonucleotide
  Sense strand starting at position 749 of SEQ ID NO: 917494
aucuguguaucucaaauua

SEQ ID NO: 1238087 - RNA, 19 nt, Artificial Sequence
  Description of Artificial Sequence: Synthetic oligonucleotide
  Antisense strand to SEQ ID NO: 1238086
uaauuugagauacacagau

SEQ ID NO: 1238088 - RNA, 19 nt, Artificial Sequence
  Description of Artificial Sequence: Synthetic oligonucleotide
  Sense strand starting at position 1140 of SEQ ID NO: 917494
augguacuggcaggaauaa

SEQ ID NO: 1238089 - RNA, 19 nt, Artificial Sequence
  Description of Artificial Sequence: Synthetic oligonucleotide
  Antisense strand to SEQ ID NO: 1238088
uuauuccugccaguaccau

SEQ ID NO: 1238090 - RNA, 19 nt, Artificial Sequence
  Description of Artificial Sequence: Synthetic oligonucleotide
  Sense strand starting at position 1182 of SEQ ID NO: 917494
gaagcauguugauuacuga

SEQ ID NO: 1238091 - RNA, 19 nt, Artificial Sequence
  Description of Artificial Sequence: Synthetic oligonucleotide
  Antisense strand to SEQ ID NO: 1238090
ucaguaaucaacaugcuuc

SEQ ID NO: 1238092 - RNA, 19 nt, Artificial Sequence
  Description of Artificial Sequence: Synthetic oligonucleotide
  Sense strand starting at position 1183 of SEQ ID NO: 917494
aagcauguugauuacugaa

SEQ ID NO: 1238093 - RNA, 19 nt, Artificial Sequence
  Description of Artificial Sequence: Synthetic oligonucleotide
  Antisense strand to SEQ ID NO: 1238092
uucaguaaucaacaugcuu

SEQ ID NO: 1238094 - RNA, 19 nt, Artificial Sequence
  Description of Artificial Sequence: Synthetic oligonucleotide
  Sense strand starting at position 1185 of SEQ ID NO: 917494
gcauguugauuacugaaug

SEQ ID NO: 1238095 - RNA, 19 nt, Artificial Sequence
  Description of Artificial Sequence: Synthetic oligonucleotide
  Antisense strand to SEQ ID NO: 1238094
cauucaguaaucaacaugc

SEQ ID NO: 1238096 - RNA, 19 nt, Artificial Sequence
  Description of Artificial Sequence: Synthetic oligonucleotide
  Sense strand starting at position 1186 of SEQ ID NO: 917494
cauguugauuacugaaugu

SEQ ID NO: 1238097 - RNA, 19 nt, Artificial Sequence
  Description of Artificial Sequence: Synthetic oligonucleotide
  Antisense strand to SEQ ID NO: 1238096
acauucaguaaucaacaug

SEQ ID NO: 1238098 - RNA, 19 nt, Artificial Sequence
  Description of Artificial Sequence: Synthetic oligonucleotide
  Sense strand starting at position 1212 of SEQ ID NO: 917494
uguguaacaugacuuuacu

SEQ ID NO: 1238099 - RNA, 19 nt, Artificial Sequence
  Description of Artificial Sequence: Synthetic oligonucleotide
  Antisense strand to SEQ ID NO: 1238098
aguaaagucauguuacaca

SEQ ID NO: 1238100 - RNA, 19 nt, Artificial Sequence
  Description of Artificial Sequence: Synthetic oligonucleotide
  Sense strand starting at position 1278 of SEQ ID NO: 917494
guugauauugcauacauca

SEQ ID NO: 1238101 - RNA, 19 nt, Artificial Sequence
  Description of Artificial Sequence: Synthetic oligonucleotide
  Antisense strand to SEQ ID NO: 1238100
ugauguaugcaauaucaac

SEQ ID NO: 1238102 - RNA, 19 nt, Artificial Sequence
  Description of Artificial Sequence: Synthetic oligonucleotide
  Sense strand starting at position 1438 of SEQ ID NO: 917494
cuaacuagugcacguuaaa

SEQ ID NO: 1238103 - RNA, 19 nt, Artificial Sequence
  Description of Artificial Sequence: Synthetic oligonucleotide
  Antisense strand to SEQ ID NO: 1238102
uuuaacgugcacuaguuag

SEQ ID NO: 1238104 - RNA, 19 nt, Artificial Sequence
  Description of Artificial Sequence: Synthetic oligonucleotide
  Sense strand starting at position 1441 of SEQ ID NO: 917494
acuagugcacguuaaacaa

SEQ ID NO: 1238105 - RNA, 19 nt, Artificial Sequence
  Description of Artificial Sequence: Synthetic oligonucleotide
  Antisense strand to SEQ ID NO: 1238104
uuguuuaacgugcacuagu

SEQ ID NO: 1238106 - RNA, 19 nt, Artificial Sequence
  Description of Artificial Sequence: Synthetic oligonucleotide
  Sense strand starting at position 1588 of SEQ ID NO: 917494
agagaaaguuuguagaaca

SEQ ID NO: 1238107 - RNA, 19 nt, Artificial Sequence
  Description of Artificial Sequence: Synthetic oligonucleotide
  Antisense strand to SEQ ID NO: 1238106
uguucuacaaacuuucucu

SEQ ID NO: 1238108 - RNA, 19 nt, Artificial Sequence
  Description of Artificial Sequence: Synthetic oligonucleotide
  Sense strand starting at position 2304 of SEQ ID NO: 917494
aauggcaauuccucggaau

SEQ ID NO: 1238109 - RNA, 19 nt, Artificial Sequence
  Description of Artificial Sequence: Synthetic oligonucleotide
  Antisense strand to SEQ ID NO: 1238108
auuccgaggaauugccauu

SEQ ID NO: 1238110 - RNA, 19 nt, Artificial Sequence
  Description of Artificial Sequence: Synthetic oligonucleotide
  Sense strand starting at position 2305 of SEQ ID NO: 917494
auggcaauuccucggaauu

SEQ ID NO: 1238111 - RNA, 19 nt, Artificial Sequence
  Description of Artificial Sequence: Synthetic oligonucleotide
  Antisense strand to SEQ ID NO: 1238110
aauuccgaggaauugccau

SEQ ID NO: 1238112 - RNA, 19 nt, Artificial Sequence
  Description of Artificial Sequence: Synthetic oligonucleotide
  Sense strand starting at position 2306 of SEQ ID NO: 917494
uggcaauuccucggaauua

SEQ ID NO: 1238113 - RNA, 19 nt, Artificial Sequence
  Description of Artificial Sequence: Synthetic oligonucleotide
  Antisense strand to SEQ ID NO: 1238112
uaauuccgaggaauugcca

SEQ ID NO: 1238114 - RNA, 19 nt, Artificial Sequence
  Description of Artificial Sequence: Synthetic oligonucleotide
  Sense strand starting at position 2307 of SEQ ID NO: 917494
ggcaauuccucggaauuau

SEQ ID NO: 1238115 - RNA, 19 nt, Artificial Sequence
  Description of Artificial Sequence: Synthetic oligonucleotide
  Antisense strand to SEQ ID NO: 1238114
auaauuccgaggaauugcc

SEQ ID NO: 1238116 - RNA, 19 nt, Artificial Sequence
  Description of Artificial Sequence: Synthetic oligonucleotide
  Sense strand starting at position 2377 of SEQ ID NO: 917494
acagcauucgacugauaaa

SEQ ID NO: 1238117 - RNA, 19 nt, Artificial Sequence
  Description of Artificial Sequence: Synthetic oligonucleotide
  Antisense strand to SEQ ID NO: 1238116
uuuaucagucgaaugcugu

SEQ ID NO: 1238118 - RNA, 19 nt, Artificial Sequence
  Description of Artificial Sequence: Synthetic oligonucleotide
  Sense strand starting at position 2485 of SEQ ID NO: 917494
agagauuguuucucccaag

SEQ ID NO: 1238119 - RNA, 19 nt, Artificial Sequence
  Description of Artificial Sequence: Synthetic oligonucleotide
  Antisense strand to SEQ ID NO: 1238118
cuugggagaaacaaucucu

SEQ ID NO: 1238120 - RNA, 19 nt, Artificial Sequence
  Description of Artificial Sequence: Synthetic oligonucleotide
  Sense strand starting at position 2509 of SEQ ID NO: 917494
gagcucauuugaggagaga

SEQ ID NO: 1238121 - RNA, 19 nt, Artificial Sequence
  Description of Artificial Sequence: Synthetic oligonucleotide
  Antisense strand to SEQ ID NO: 1238120
ucucuccucaaaugagcuc

SEQ ID NO: 1238122 - RNA, 19 nt, Artificial Sequence
  Description of Artificial Sequence: Synthetic oligonucleotide
  Sense strand starting at position 3026 of SEQ ID NO: 917494
gugcuagcaucuccagaua

SEQ ID NO: 1238123 - RNA, 19 nt, Artificial Sequence
  Description of Artificial Sequence: Synthetic oligonucleotide
  Antisense strand to SEQ ID NO: 1238122
uaucuggagaugcuagcac

SEQ ID NO: 1238124 - RNA, 19 nt, Artificial Sequence
  Description of Artificial Sequence: Synthetic oligonucleotide
  Sense strand starting at position 3123 of SEQ ID NO: 917494
uggcaaugcuuccuaccaa

SEQ ID NO: 1238125 - RNA, 19 nt, Artificial Sequence
  Description of Artificial Sequence: Synthetic oligonucleotide
  Antisense strand to SEQ ID NO: 1238124
uugguaggaagcauugcca

SEQ ID NO: 1238126 - RNA, 19 nt, Artificial Sequence
  Description of Artificial Sequence: Synthetic oligonucleotide
  Sense strand starting at position 3124 of SEQ ID NO: 917494
ggcaaugcuuccuaccaaa

SEQ ID NO: 1238127 - RNA, 19 nt, Artificial Sequence
  Description of Artificial Sequence: Synthetic oligonucleotide
  Antisense strand to SEQ ID NO: 1238126
uuugguaggaagcauugcc

SEQ ID NO: 1238128 - RNA, 19 nt, Artificial Sequence
  Description of Artificial Sequence: Synthetic oligonucleotide
  Sense strand starting at position 3287 of SEQ ID NO: 917494
aucagaacuucuggaacua

SEQ ID NO: 1238129 - RNA, 19 nt, Artificial Sequence
  Description of Artificial Sequence: Synthetic oligonucleotide
  Antisense strand to SEQ ID NO: 1238128
uaguuccagaaguucugau

SEQ ID NO: 1238130 - RNA, 19 nt, Artificial Sequence
  Description of Artificial Sequence: Synthetic oligonucleotide
  Sense strand starting at position 3578 of SEQ ID NO: 917494
uuucuugaaucuugcuaga

SEQ ID NO: 1238131 - RNA, 19 nt, Artificial Sequence
  Description of Artificial Sequence: Synthetic oligonucleotide
  Antisense strand to SEQ ID NO: 1238130
ucuagcaagauucaagaaa

SEQ ID NO: 1238132 - RNA, 19 nt, Artificial Sequence
  Description of Artificial Sequence: Synthetic oligonucleotide
  Sense strand starting at position 3580 of SEQ ID NO: 917494
ucuugaaucuugcuagaua

SEQ ID NO: 1238133 - RNA, 19 nt, Artificial Sequence
  Description of Artificial Sequence: Synthetic oligonucleotide
  Antisense strand to SEQ ID NO: 1238132
uaucuagcaagauucaaga

SEQ ID NO: 1238134 - RNA, 19 nt, Artificial Sequence
  Description of Artificial Sequence: Synthetic oligonucleotide
  Sense strand starting at position 3581 of SEQ ID NO: 917493
cuugaaucuugcuagauag

SEQ ID NO: 1238135 - RNA, 19 nt, Artificial Sequence
  Description of Artificial Sequence: Synthetic oligonucleotide
  Antisense strand to SEQ ID NO: 1238134
cuaucuagcaagauucaag

SEQ ID NO: 1238136 - RNA, 19 nt, Artificial Sequence
  Description of Artificial Sequence: Synthetic oligonucleotide
  Sense strand starting at position 2813 of SEQ ID NO: 917493
guuuguuugggacagaagu

SEQ ID NO: 1238137 - RNA, 19 nt, Artificial Sequence
  Description of Artificial Sequence: Synthetic oligonucleotide
  Antisense strand to SEQ ID NO: 1238136
acuucugucccaaacaaac

SEQ ID NO: 1238138 - RNA, 19 nt, Artificial Sequence
  Description of Artificial Sequence: Synthetic oligonucleotide
  Sense strand starting at position 2813 of SEQ ID NO: 917495
guuuguuugggacagaagu

SEQ ID NO: 1238139 - RNA, 19 nt, Artificial Sequence
  Description of Artificial Sequence: Synthetic oligonucleotide
  Antisense strand to SEQ ID NO: 1238138
acuucugucccaaacaaac

SEQ ID NO: 1238140 - RNA, 19 nt, Artificial Sequence
  Description of Artificial Sequence: Synthetic oligonucleotide
  Sense strand starting at position 407 of SEQ ID NO: 917495
ucucaacuccugugugaug

SEQ ID NO: 1238141 - RNA, 19 nt, Artificial Sequence
  Description of Artificial Sequence: Synthetic oligonucleotide
  Antisense strand to SEQ ID NO: 1238140
caucacacaggaguugaga

SEQ ID NO: 1238142 - RNA, 19 nt, Artificial Sequence
  Description of Artificial Sequence: Synthetic oligonucleotide
  Sense strand starting at position 414 of SEQ ID NO: 917495
uccugugugaugugugaga

SEQ ID NO: 1238143 - RNA, 19 nt, Artificial Sequence
  Description of Artificial Sequence: Synthetic oligonucleotide
  Antisense strand to SEQ ID NO: 1238142
ucucacacaucacacagga

SEQ ID NO: 1238144 - RNA, 19 nt, Artificial Sequence
  Description of Artificial Sequence: Synthetic oligonucleotide
  Sense strand starting at position 416 of SEQ ID NO: 917495
cugugugaugugugagaau

SEQ ID NO: 1238145 - RNA, 19 nt, Artificial Sequence
  Description of Artificial Sequence: Synthetic oligonucleotide
  Antisense strand to SEQ ID NO: 1238144
auucucacacaucacacag

SEQ ID NO: 1238146 - RNA, 19 nt, Artificial Sequence
  Description of Artificial Sequence: Synthetic oligonucleotide
  Sense strand starting at position 515 of SEQ ID NO: 917495
ggagcaucaguguaucaag

SEQ ID NO: 1238147 - RNA, 19 nt, Artificial Sequence
  Description of Artificial Sequence: Synthetic oligonucleotide
  Antisense strand to SEQ ID NO: 1238146
cuugauacacugaugcucc

SEQ ID NO: 1238148 - RNA, 19 nt, Artificial Sequence
  Description of Artificial Sequence: Synthetic oligonucleotide
  Sense strand starting at position 624 of SEQ ID NO: 917495
augagcauaucugaacaaa

SEQ ID NO: 1238149 - RNA, 19 nt, Artificial Sequence
  Description of Artificial Sequence: Synthetic oligonucleotide
  Antisense strand to SEQ ID NO: 1238148
uuuguucagauaugcucau

SEQ ID NO: 1238150 - RNA, 19 nt, Artificial Sequence
  Description of Artificial Sequence: Synthetic oligonucleotide
  Sense strand starting at position 809 of SEQ ID NO: 917495
ggaaguauagccgguuaac

SEQ ID NO: 1238151 - RNA, 19 nt, Artificial Sequence
  Description of Artificial Sequence: Synthetic oligonucleotide
  Antisense strand to SEQ ID NO: 1238150
guuaaccggcuauacuucc

SEQ ID NO: 1238152 - RNA, 19 nt, Artificial Sequence
  Description of Artificial Sequence: Synthetic oligonucleotide
  Sense strand starting at position 821 of SEQ ID NO: 917495
gguuaacagcuccaucaag

SEQ ID NO: 1238153 - RNA, 19 nt, Artificial Sequence
  Description of Artificial Sequence: Synthetic oligonucleotide
  Antisense strand to SEQ ID NO: 1238152
cuugauggagcuguuaacc

SEQ ID NO: 1238154 - RNA, 19 nt, Artificial Sequence
  Description of Artificial Sequence: Synthetic oligonucleotide
  Sense strand starting at position 850 of SEQ ID NO: 917495
aggagugccuauguaaaug

SEQ ID NO: 1238155 - RNA, 19 nt, Artificial Sequence
  Description of Artificial Sequence: Synthetic oligonucleotide
  Antisense strand to SEQ ID NO: 1238154
cauuuacauaggcacuccu

SEQ ID NO: 1238156 - RNA, 19 nt, Artificial Sequence
  Description of Artificial Sequence: Synthetic oligonucleotide
  Sense strand starting at position 933 of SEQ ID NO: 917495
gcccuagcagccugacaau

SEQ ID NO: 1238157 - RNA, 19 nt, Artificial Sequence
  Description of Artificial Sequence: Synthetic oligonucleotide
  Antisense strand to SEQ ID NO: 1238156
auugucaggcugcuagggc

SEQ ID NO: 1238158 - RNA, 19 nt, Artificial Sequence
  Description of Artificial Sequence: Synthetic oligonucleotide
  Sense strand starting at position 1017 of SEQ ID NO: 917495
uaauaugaauguuuggcua

SEQ ID NO: 1238159 - RNA, 19 nt, Artificial Sequence
  Description of Artificial Sequence: Synthetic oligonucleotide
  Antisense strand to SEQ ID NO: 1238158
uagccaaacauucauauua

SEQ ID NO: 1238160 - RNA, 19 nt, Artificial Sequence
  Description of Artificial Sequence: Synthetic oligonucleotide
  Sense strand starting at position 1020 of SEQ ID NO: 917495
uaugaauguuuggcuauau

SEQ ID NO: 1238161 - RNA, 19 nt, Artificial Sequence
  Description of Artificial Sequence: Synthetic oligonucleotide
  Antisense strand to SEQ ID NO: 1238160
auauagccaaacauucaua

SEQ ID NO: 1238162 - RNA, 19 nt, Artificial Sequence
  Description of Artificial Sequence: Synthetic oligonucleotide
  Sense strand starting at position 1021 of SEQ ID NO: 917495
augaauguuuggcuauauu

SEQ ID NO: 1238163 - RNA, 19 nt, Artificial Sequence
  Description of Artificial Sequence: Synthetic oligonucleotide
  Antisense strand to SEQ ID NO: 1238162
aauauagccaaacauucau

SEQ ID NO: 1238164 - RNA, 19 nt, Artificial Sequence
  Description of Artificial Sequence: Synthetic oligonucleotide
  Sense strand starting at position 1128 of SEQ ID NO: 917495
gaaaguggaugggaacaua

SEQ ID NO: 1238165 - RNA, 19 nt, Artificial Sequence
  Description of Artificial Sequence: Synthetic oligonucleotide
  Antisense strand to SEQ ID NO: 1238164
uauguucccauccacuuuc

SEQ ID NO: 1238166 - RNA, 19 nt, Artificial Sequence
  Description of Artificial Sequence: Synthetic oligonucleotide
  Sense strand starting at position 1137 of SEQ ID NO: 917495
ugggaacauacguauucua

SEQ ID NO: 1238167 - RNA, 19 nt, Artificial Sequence
  Description of Artificial Sequence: Synthetic oligonucleotide
  Antisense strand to SEQ ID NO: 1238166
uagaauacguauguuccca

SEQ ID NO: 1238168 - RNA, 19 nt, Artificial Sequence
  Description of Artificial Sequence: Synthetic oligonucleotide
  Sense strand starting at position 1176 of SEQ ID NO: 917495
gguucuagggccuauugaa

SEQ ID NO: 1238169 - RNA, 19 nt, Artificial Sequence
  Description of Artificial Sequence: Synthetic oligonucleotide
  Antisense strand to SEQ ID NO: 1238168
uucaauaggcccuagaacc

SEQ ID NO: 1238170 - RNA, 19 nt, Artificial Sequence
  Description of Artificial Sequence: Synthetic oligonucleotide
  Sense strand starting at position 1188 of SEQ ID NO: 917495
uauugaaauuggguguuua

SEQ ID NO: 1238171 - RNA, 19 nt, Artificial Sequence
  Description of Artificial Sequence: Synthetic oligonucleotide
  Antisense strand to SEQ ID NO: 1238170
uaaacacccaauuucaaua

SEQ ID NO: 1238172 - RNA, 19 nt, Artificial Sequence
  Description of Artificial Sequence: Synthetic oligonucleotide
  Sense strand starting at position 1189 of SEQ ID NO: 917495
auugaaauuggguguuuaa

SEQ ID NO: 1238173 - RNA, 19 nt, Artificial Sequence
  Description of Artificial Sequence: Synthetic oligonucleotide
  Antisense strand to SEQ ID NO: 1238172
uuaaacacccaauuucaau

SEQ ID NO: 1238174 - RNA, 19 nt, Artificial Sequence
  Description of Artificial Sequence: Synthetic oligonucleotide
  Sense strand starting at position 2468 of SEQ ID NO: 917495
ggaagaaagucucccaguu

SEQ ID NO: 1238175 - RNA, 19 nt, Artificial Sequence
  Description of Artificial Sequence: Synthetic oligonucleotide
  Antisense strand to SEQ ID NO: 1238174
aacugggagacuuucuucc

SEQ ID NO: 1238176 - RNA, 19 nt, Artificial Sequence
  Description of Artificial Sequence: Synthetic oligonucleotide
  Sense strand starting at position 2483 of SEQ ID NO: 917495
aguuaagcugccgugcaau

SEQ ID NO: 1238177 - RNA, 19 nt, Artificial Sequence
  Description of Artificial Sequence: Synthetic oligonucleotide
  Antisense strand to SEQ ID NO: 1238176
auugcacggcagcuuaacu

SEQ ID NO: 1238178 - RNA, 19 nt, Artificial Sequence
  Description of Artificial Sequence: Synthetic oligonucleotide
  Sense strand starting at position 2485 of SEQ ID NO: 917495
uuaagcugccgugcaauua

SEQ ID NO: 1238179 - RNA, 19 nt, Artificial Sequence
  Description of Artificial Sequence: Synthetic oligonucleotide
  Antisense strand to SEQ ID NO: 1238178
uaauugcacggcagcuuaa

SEQ ID NO: 1238180 - RNA, 19 nt, Artificial Sequence
  Description of Artificial Sequence: Synthetic oligonucleotide
  Sense strand starting at position 2489 of SEQ ID NO: 917495
gcugccgugcaauuaagau

SEQ ID NO: 1238181 - RNA, 19 nt, Artificial Sequence
  Description of Artificial Sequence: Synthetic oligonucleotide
  Antisense strand to SEQ ID NO: 1238180
aucuuaauugcacggcagc

SEQ ID NO: 1238182 - RNA, 19 nt, Artificial Sequence
  Description of Artificial Sequence: Synthetic oligonucleotide
  Sense strand starting at position 2498 of SEQ ID NO: 917495
caauuaagaugguuggguu

SEQ ID NO: 1238183 - RNA, 19 nt, Artificial Sequence
  Description of Artificial Sequence: Synthetic oligonucleotide
  Antisense strand to SEQ ID NO: 1238182
aacccaaccaucuuaauug

SEQ ID NO: 1238184 - RNA, 19 nt, Artificial Sequence
  Description of Artificial Sequence: Synthetic oligonucleotide
  Sense strand starting at position 2499 of SEQ ID NO: 917495
aauuaagaugguuggguuu

SEQ ID NO: 1238185 - RNA, 19 nt, Artificial Sequence
  Description of Artificial Sequence: Synthetic oligonucleotide
  Antisense strand to SEQ ID NO: 1238184
aaacccaaccaucuuaauu

SEQ ID NO: 1238186 - RNA, 19 nt, Artificial Sequence
  Description of Artificial Sequence: Synthetic oligonucleotide
  Sense strand starting at position 2510 of SEQ ID NO: 917495
uuggguuuggauuguugua

SEQ ID NO: 1238187 - RNA, 19 nt, Artificial Sequence
  Description of Artificial Sequence: Synthetic oligonucleotide
  Antisense strand to SEQ ID NO: 1238186
uacaacaauccaaacccaa

SEQ ID NO: 1238188 - RNA, 19 nt, Artificial Sequence
  Description of Artificial Sequence: Synthetic oligonucleotide
  Sense strand starting at position 2956 of SEQ ID NO: 917495
aacaguuacucagucgaua

SEQ ID NO: 1238189 - RNA, 19 nt, Artificial Sequence
  Description of Artificial Sequence: Synthetic oligonucleotide
  Antisense strand to SEQ ID NO: 1238188
uaucgacugaguaacuguu

SEQ ID NO: 1238190 - RNA, 19 nt, Artificial Sequence
  Description of Artificial Sequence: Synthetic oligonucleotide
  Sense strand starting at position 2967 of SEQ ID NO: 917495
agucgauaaccugacuauu

SEQ ID NO: 1238191 - RNA, 19 nt, Artificial Sequence
  Description of Artificial Sequence: Synthetic oligonucleotide
  Antisense strand to SEQ ID NO: 1238190
aauagucagguuaucgacu

SEQ ID NO: 1238192 - RNA, 19 nt, Artificial Sequence
  Description of Artificial Sequence: Synthetic oligonucleotide
  Sense strand starting at position 2969 of SEQ ID NO: 917495
ucgauaaccugacuauucu

SEQ ID NO: 1238193 - RNA, 19 nt, Artificial Sequence
  Description of Artificial Sequence: Synthetic oligonucleotide
  Antisense strand to SEQ ID NO: 1238192
agaauagucagguuaucga

SEQ ID NO: 1238194 - RNA, 19 nt, Artificial Sequence
  Description of Artificial Sequence: Synthetic oligonucleotide
  Sense strand starting at position 3054 of SEQ ID NO: 917495
gugugaaggaugcaaacau

SEQ ID NO: 1238195 - RNA, 19 nt, Artificial Sequence
  Description of Artificial Sequence: Synthetic oligonucleotide
  Antisense strand to SEQ ID NO: 1238194
auguuugcauccuucacac

SEQ ID NO: 1238196 - RNA, 19 nt, Artificial Sequence
  Description of Artificial Sequence: Synthetic oligonucleotide
  Sense strand starting at position 3099 of SEQ ID NO: 917495
aauuuacgaucuugggaga

SEQ ID NO: 1238197 - RNA, 19 nt, Artificial Sequence
  Description of Artificial Sequence: Synthetic oligonucleotide
  Antisense strand to SEQ ID NO: 1238196
ucucccaagaucguaaauu

SEQ ID NO: 1238198 - RNA, 19 nt, Artificial Sequence
  Description of Artificial Sequence: Synthetic oligonucleotide
  Sense strand starting at position 3113 of SEQ ID NO: 917495
ggagaagugaggcgaguau

SEQ ID NO: 1238199 - RNA, 19 nt, Artificial Sequence
  Description of Artificial Sequence: Synthetic oligonucleotide
  Antisense strand to SEQ ID NO: 1238198
auacucgccucacuucucc

SEQ ID NO: 1238200 - RNA, 19 nt, Artificial Sequence
  Description of Artificial Sequence: Synthetic oligonucleotide
  Sense strand starting at position 3117 of SEQ ID NO: 917495
aagugaggcgaguauagaa

SEQ ID NO: 1238201 - RNA, 19 nt, Artificial Sequence
  Description of Artificial Sequence: Synthetic oligonucleotide
  Antisense strand to SEQ ID NO: 1238200
uucuauacucgccucacuu

SEQ ID NO: 1238202 - RNA, 19 nt, Artificial Sequence
  Description of Artificial Sequence: Synthetic oligonucleotide
  Sense strand starting at position 3127 of SEQ ID NO: 917495
aguauagaaucucagaaca

SEQ ID NO: 1238203 - RNA, 19 nt, Artificial Sequence
  Description of Artificial Sequence: Synthetic oligonucleotide
  Antisense strand to SEQ ID NO: 1238202
uguucugagauucuauacu

SEQ ID NO: 1238204 - RNA, 19 nt, Artificial Sequence
  Description of Artificial Sequence: Synthetic oligonucleotide
  Sense strand starting at position 3161 of SEQ ID NO: 917495
uucgaucccaguugaggaa

SEQ ID NO: 1238205 - RNA, 19 nt, Artificial Sequence
  Description of Artificial Sequence: Synthetic oligonucleotide
  Antisense strand to SEQ ID NO: 1238204
uuccucaacugggaucgaa

SEQ ID NO: 1238206 - RNA, 19 nt, Artificial Sequence
  Description of Artificial Sequence: Synthetic oligonucleotide
  Sense strand starting at position 3249 of SEQ ID NO: 917495
cagcccguugacuaauaau

SEQ ID NO: 1238207 - RNA, 19 nt, Artificial Sequence
  Description of Artificial Sequence: Synthetic oligonucleotide
  Antisense strand to SEQ ID NO: 1238206
auuauuagucaacgggcug

SEQ ID NO: 1238208 - RNA, 19 nt, Artificial Sequence
  Description of Artificial Sequence: Synthetic oligonucleotide
  Sense strand starting at position 3299 of SEQ ID NO: 917495
ccacauccgucuccugaga

SEQ ID NO: 1238209 - RNA, 19 nt, Artificial Sequence
  Description of Artificial Sequence: Synthetic oligonucleotide
  Antisense strand to SEQ ID NO: 1238208
ucucaggagacggaugugg

SEQ ID NO: 1238210 - RNA, 19 nt, Artificial Sequence
  Description of Artificial Sequence: Synthetic oligonucleotide
  Sense strand starting at position 3362 of SEQ ID NO: 917495
uaacuuugccuucguagaa

SEQ ID NO: 1238211 - RNA, 19 nt, Artificial Sequence
  Description of Artificial Sequence: Synthetic oligonucleotide
  Antisense strand to SEQ ID NO: 1238210
uucuacgaaggcaaaguua

SEQ ID NO: 1238212 - RNA, 19 nt, Artificial Sequence
  Description of Artificial Sequence: Synthetic oligonucleotide
  Sense strand starting at position 3363 of SEQ ID NO: 917495
aacuuugccuucguagaac

SEQ ID NO: 1238213 - RNA, 19 nt, Artificial Sequence
  Description of Artificial Sequence: Synthetic oligonucleotide
  Antisense strand to SEQ ID NO: 1238212
guucuacgaaggcaaaguu

SEQ ID NO: 1238214 - RNA, 19 nt, Artificial Sequence
  Description of Artificial Sequence: Synthetic oligonucleotide
  Sense strand starting at position 3406 of SEQ ID NO: 917495
gucucauaacacuguguaa

SEQ ID NO: 1238215 - RNA, 19 nt, Artificial Sequence
  Description of Artificial Sequence: Synthetic oligonucleotide
  Antisense strand to SEQ ID NO: 1238214
uuacacaguguuaugagac

SEQ ID NO: 1238216 - RNA, 19 nt, Artificial Sequence
  Description of Artificial Sequence: Synthetic oligonucleotide
  Sense strand starting at position 3549 of SEQ ID NO: 917495
ccauaacugucagugacaa

SEQ ID NO: 1238217 - RNA, 19 nt, Artificial Sequence
  Description of Artificial Sequence: Synthetic oligonucleotide
  Antisense strand to SEQ ID NO: 1238216
uugucacugacaguuaugg

SEQ ID NO: 1238218 - RNA, 19 nt, Artificial Sequence
  Description of Artificial Sequence: Synthetic oligonucleotide
  Sense strand starting at position 3957 of SEQ ID NO: 917495
auuuguugucauugugugu

SEQ ID NO: 1238219 - RNA, 19 nt, Artificial Sequence
  Description of Artificial Sequence: Synthetic oligonucleotide
  Antisense strand to SEQ ID NO: 1238218
acacacaaugacaacaaau

SEQ ID NO: 1238220 - RNA, 19 nt, Artificial Sequence
  Description of Artificial Sequence: Synthetic oligonucleotide
  Sense strand starting at position 3957 of SEQ ID NO: 917496
auuuguugucauugugugu

SEQ ID NO: 1238221 - RNA, 19 nt, Artificial Sequence
  Description of Artificial Sequence: Synthetic oligonucleotide
  Antisense strand to SEQ ID NO: 1238220
acacacaaugacaacaaau

SEQ ID NO: 1238222 - RNA, 19 nt, Artificial Sequence
  Description of Artificial Sequence: Synthetic oligonucleotide
  Sense strand starting at position 34 of SEQ ID NO: 917496
agcuuuggauuccuaaaug

SEQ ID NO: 1238223 - RNA, 19 nt, Artificial Sequence
  Description of Artificial Sequence: Synthetic oligonucleotide
  Antisense strand to SEQ ID NO: 1238222
cauuuaggaauccaaagcu

SEQ ID NO: 1238224 - RNA, 19 nt, Artificial Sequence
  Description of Artificial Sequence: Synthetic oligonucleotide
  Sense strand starting at position 100 of SEQ ID NO: 917496
cuccauggagcauaaguua

SEQ ID NO: 1238225 - RNA, 19 nt, Artificial Sequence
  Description of Artificial Sequence: Synthetic oligonucleotide
  Antisense strand to SEQ ID NO: 1238224
uaacuuaugcuccauggag

SEQ ID NO: 1238226 - RNA, 19 nt, Artificial Sequence
  Description of Artificial Sequence: Synthetic oligonucleotide
  Sense strand starting at position 115 of SEQ ID NO: 917496
guuagaaaguuaguuugaa

SEQ ID NO: 1238227 - RNA, 19 nt, Artificial Sequence
  Description of Artificial Sequence: Synthetic oligonucleotide
  Antisense strand to SEQ ID NO: 1238226
uucaaacuaacuuucuaac

SEQ ID NO: 1238228 - RNA, 19 nt, Artificial Sequence
  Description of Artificial Sequence: Synthetic oligonucleotide
  Sense strand starting at position 128 of SEQ ID NO: 917496
uuugaaauguguguauaga

SEQ ID NO: 1238229 - RNA, 19 nt, Artificial Sequence
  Description of Artificial Sequence: Synthetic oligonucleotide
  Antisense strand to SEQ ID NO: 1238228
ucuauacacacauuucaaa

SEQ ID NO: 1238230 - RNA, 19 nt, Artificial Sequence
  Description of Artificial Sequence: Synthetic oligonucleotide
  Sense strand starting at position 129 of SEQ ID NO: 917496
uugaaauguguguauagaa

SEQ ID NO: 1238231 - RNA, 19 nt, Artificial Sequence
  Description of Artificial Sequence: Synthetic oligonucleotide
  Antisense strand to SEQ ID NO: 1238230
uucuauacacacauuucaa

SEQ ID NO: 1238232 - RNA, 19 nt, Artificial Sequence
  Description of Artificial Sequence: Synthetic oligonucleotide
  Sense strand starting at position 189 of SEQ ID NO: 917496
uugcuucuguuauuuccua

SEQ ID NO: 1238233 - RNA, 19 nt, Artificial Sequence
  Description of Artificial Sequence: Synthetic oligonucleotide
  Antisense strand to SEQ ID NO: 1238232
uaggaaauaacagaagcaa

SEQ ID NO: 1238234 - RNA, 19 nt, Artificial Sequence
  Description of Artificial Sequence: Synthetic oligonucleotide
  Sense strand starting at position 218 of SEQ ID NO: 917496
guaugaaucgauuaagguu

SEQ ID NO: 1238235 - RNA, 19 nt, Artificial Sequence
  Description of Artificial Sequence: Synthetic oligonucleotide
  Antisense strand to SEQ ID NO: 1238234
aaccuuaaucgauucauac

SEQ ID NO: 1238236 - RNA, 19 nt, Artificial Sequence
  Description of Artificial Sequence: Synthetic oligonucleotide
  Sense strand starting at position 251 of SEQ ID NO: 917496
guuauuuggucucuuacug

SEQ ID NO: 1238237 - RNA, 19 nt, Artificial Sequence
  Description of Artificial Sequence: Synthetic oligonucleotide
  Antisense strand to SEQ ID NO: 1238236
caguaagagaccaaauaac

SEQ ID NO: 1238238 - RNA, 19 nt, Artificial Sequence
  Description of Artificial Sequence: Synthetic oligonucleotide
  Sense strand starting at position 448 of SEQ ID NO: 917496
cagaaugaccagugagcaa

SEQ ID NO: 1238239 - RNA, 19 nt, Artificial Sequence
  Description of Artificial Sequence: Synthetic oligonucleotide
  Antisense strand to SEQ ID NO: 1238238
uugcucacuggucauucug

SEQ ID NO: 1238240 - RNA, 19 nt, Artificial Sequence
  Description of Artificial Sequence: Synthetic oligonucleotide
  Sense strand starting at position 531 of SEQ ID NO: 917496
gacaauaguguccagguga

SEQ ID NO: 1238241 - RNA, 19 nt, Artificial Sequence
  Description of Artificial Sequence: Synthetic oligonucleotide
  Antisense strand to SEQ ID NO: 1238240
ucaccuggacacuauuguc

SEQ ID NO: 1238242 - RNA, 19 nt, Artificial Sequence
  Description of Artificial Sequence: Synthetic oligonucleotide
  Sense strand starting at position 554 of SEQ ID NO: 917496
gaaaguaggcgcuacaaau

SEQ ID NO: 1238243 - RNA, 19 nt, Artificial Sequence
  Description of Artificial Sequence: Synthetic oligonucleotide
  Antisense strand to SEQ ID NO: 1238242
auuuguagcgccuacuuuc

SEQ ID NO: 1238244 - RNA, 19 nt, Artificial Sequence
  Description of Artificial Sequence: Synthetic oligonucleotide
  Sense strand starting at position 742 of SEQ ID NO: 917496
gauuauguacugugaaagg

SEQ ID NO: 1238245 - RNA, 19 nt, Artificial Sequence
  Description of Artificial Sequence: Synthetic oligonucleotide
  Antisense strand to SEQ ID NO: 1238244
ccuuucacaguacauaauc

SEQ ID NO: 1238246 - RNA, 19 nt, Artificial Sequence
  Description of Artificial Sequence: Synthetic oligonucleotide
  Sense strand starting at position 1119 of SEQ ID NO: 917496
caacaaguugugcagugaa

SEQ ID NO: 1238247 - RNA, 19 nt, Artificial Sequence
  Description of Artificial Sequence: Synthetic oligonucleotide
  Antisense strand to SEQ ID NO: 1238246
uucacugcacaacuuguug

SEQ ID NO: 1238248 - RNA, 19 nt, Artificial Sequence
  Description of Artificial Sequence: Synthetic oligonucleotide
  Sense strand starting at position 1294 of SEQ ID NO: 917496
guaaucgaucgguagaaca

SEQ ID NO: 1238249 - RNA, 19 nt, Artificial Sequence
  Description of Artificial Sequence: Synthetic oligonucleotide
  Antisense strand to SEQ ID NO: 1238248
uguucuaccgaucgauuac

SEQ ID NO: 1238250 - RNA, 19 nt, Artificial Sequence
  Description of Artificial Sequence: Synthetic oligonucleotide
  Sense strand starting at position 1296 of SEQ ID NO: 917496
aaucgaucgguagaacauu

SEQ ID NO: 1238251 - RNA, 19 nt, Artificial Sequence
  Description of Artificial Sequence: Synthetic oligonucleotide
  Antisense strand to SEQ ID NO: 1238250
aauguucuaccgaucgauu

SEQ ID NO: 1238252 - RNA, 19 nt, Artificial Sequence
  Description of Artificial Sequence: Synthetic oligonucleotide
  Sense strand starting at position 1305 of SEQ ID NO: 917496
guagaacauugaucacucu

SEQ ID NO: 1238253 - RNA, 19 nt, Artificial Sequence
  Description of Artificial Sequence: Synthetic oligonucleotide
  Antisense strand to SEQ ID NO: 1238252
agagugaucaauguucuac

SEQ ID NO: 1238254 - RNA, 19 nt, Artificial Sequence
  Description of Artificial Sequence: Synthetic oligonucleotide
  Sense strand starting at position 1460 of SEQ ID NO: 917496
gcugcagcuccuuuguuua

SEQ ID NO: 1238255 - RNA, 19 nt, Artificial Sequence
  Description of Artificial Sequence: Synthetic oligonucleotide
  Antisense strand to SEQ ID NO: 1238254
uaaacaaaggagcugcagc

SEQ ID NO: 1238256 - RNA, 19 nt, Artificial Sequence
  Description of Artificial Sequence: Synthetic oligonucleotide
  Sense strand starting at position 1610 of SEQ ID NO: 917496
uuuccugagccuugaagag

SEQ ID NO: 1238257 - RNA, 19 nt, Artificial Sequence
  Description of Artificial Sequence: Synthetic oligonucleotide
  Antisense strand to SEQ ID NO: 1238256
cucuucaaggcucaggaaa

SEQ ID NO: 1238258 - RNA, 19 nt, Artificial Sequence
  Description of Artificial Sequence: Synthetic oligonucleotide
  Sense strand starting at position 1875 of SEQ ID NO: 917496
ggcaaauuccaauggaauu

SEQ ID NO: 1238259 - RNA, 19 nt, Artificial Sequence
  Description of Artificial Sequence: Synthetic oligonucleotide
  Antisense strand to SEQ ID NO: 1238258
aauuccauuggaauuugcc

SEQ ID NO: 1238260 - RNA, 19 nt, Artificial Sequence
  Description of Artificial Sequence: Synthetic oligonucleotide
  Sense strand starting at position 1976 of SEQ ID NO: 917496
gagugaggaugcucugaaa

SEQ ID NO: 1238261 - RNA, 19 nt, Artificial Sequence
  Description of Artificial Sequence: Synthetic oligonucleotide
  Antisense strand to SEQ ID NO: 1238260
uuucagagcauccucacuc

SEQ ID NO: 1238262 - RNA, 19 nt, Artificial Sequence
  Description of Artificial Sequence: Synthetic oligonucleotide
  Sense strand starting at position 2203 of SEQ ID NO: 917496
agggauaguccgggaagau

SEQ ID NO: 1238263 - RNA, 19 nt, Artificial Sequence
  Description of Artificial Sequence: Synthetic oligonucleotide
  Antisense strand to SEQ ID NO: 1238262
aucuucccggacuaucccu

SEQ ID NO: 1238264 - RNA, 19 nt, Artificial Sequence
  Description of Artificial Sequence: Synthetic oligonucleotide
  Sense strand starting at position 2404 of SEQ ID NO: 917496
gagaauccacccugugguu

SEQ ID NO: 1238265 - RNA, 19 nt, Artificial Sequence
  Description of Artificial Sequence: Synthetic oligonucleotide
  Antisense strand to SEQ ID NO: 1238264
aaccacaggguggauucuc

SEQ ID NO: 1238266 - RNA, 19 nt, Artificial Sequence
  Description of Artificial Sequence: Synthetic oligonucleotide
  Sense strand starting at position 2651 of SEQ ID NO: 917496
ucagacuucccuugcaaga

SEQ ID NO: 1238267 - RNA, 19 nt, Artificial Sequence
  Description of Artificial Sequence: Synthetic oligonucleotide
  Antisense strand to SEQ ID NO: 1238266
ucuugcaagggaagucuga

SEQ ID NO: 1238268 - RNA, 19 nt, Artificial Sequence
  Description of Artificial Sequence: Synthetic oligonucleotide
  Sense strand starting at position 2711 of SEQ ID NO: 917496
agucgcaaugaauaaauga

SEQ ID NO: 1238269 - RNA, 19 nt, Artificial Sequence
  Description of Artificial Sequence: Synthetic oligonucleotide
  Antisense strand to SEQ ID NO: 1238268
ucauuuauucauugcgacu

SEQ ID NO: 1238270 - RNA, 19 nt, Artificial Sequence
  Description of Artificial Sequence: Synthetic oligonucleotide
  Sense strand starting at position 2911 of SEQ ID NO: 917496
ucuuacugagagugagauu

SEQ ID NO: 1238271 - RNA, 19 nt, Artificial Sequence
  Description of Artificial Sequence: Synthetic oligonucleotide
  Antisense strand to SEQ ID NO: 1238270
aaucucacucucaguaaga

SEQ ID NO: 1238272 - RNA, 19 nt, Artificial Sequence
  Description of Artificial Sequence: Synthetic oligonucleotide
  Sense strand starting at position 2933 of SEQ ID NO: 917496
agauaaacguuaucucuug

SEQ ID NO: 1238273 - RNA, 19 nt, Artificial Sequence
  Description of Artificial Sequence: Synthetic oligonucleotide
  Antisense strand to SEQ ID NO: 1238272
caagagauaacguuuaucu

SEQ ID NO: 1238274 - RNA, 19 nt, Artificial Sequence
  Description of Artificial Sequence: Synthetic oligonucleotide
  Sense strand starting at position 3140 of SEQ ID NO: 917496
agaguucacguguaagaua

SEQ ID NO: 1238275 - RNA, 19 nt, Artificial Sequence
  Description of Artificial Sequence: Synthetic oligonucleotide
  Antisense strand to SEQ ID NO: 1238274
uaucuuacacgugaacucu

SEQ ID NO: 1238276 - RNA, 19 nt, Artificial Sequence
  Description of Artificial Sequence: Synthetic oligonucleotide
  Sense strand starting at position 3162 of SEQ ID NO: 917496
aguggagcccuugaggaau

SEQ ID NO: 1238277 - RNA, 19 nt, Artificial Sequence
  Description of Artificial Sequence: Synthetic oligonucleotide
  Antisense strand to SEQ ID NO: 1238276
auuccucaagggcuccacu

SEQ ID NO: 1238278 - RNA, 19 nt, Artificial Sequence
  Description of Artificial Sequence: Synthetic oligonucleotide
  Sense strand starting at position 3174 of SEQ ID NO: 917496
gaggaauccuagcuggcaa

SEQ ID NO: 1238279 - RNA, 19 nt, Artificial Sequence
  Description of Artificial Sequence: Synthetic oligonucleotide
  Antisense strand to SEQ ID NO: 1238278
uugccagcuaggauuccuc

SEQ ID NO: 1238280 - RNA, 19 nt, Artificial Sequence
  Description of Artificial Sequence: Synthetic oligonucleotide
  Sense strand starting at position 3236 of SEQ ID NO: 917496
ucugaaagcccugagguua

SEQ ID NO: 1238281 - RNA, 19 nt, Artificial Sequence
  Description of Artificial Sequence: Synthetic oligonucleotide
  Antisense strand to SEQ ID NO: 1238280
uaaccucagggcuuucaga

SEQ ID NO: 1238282 - RNA, 19 nt, Artificial Sequence
  Description of Artificial Sequence: Synthetic oligonucleotide
  Sense strand starting at position 3349 of SEQ ID NO: 917496
aguuguuacaccugggaag

SEQ ID NO: 1238283 - RNA, 19 nt, Artificial Sequence
  Description of Artificial Sequence: Synthetic oligonucleotide
  Antisense strand to SEQ ID NO: 1238282
cuucccagguguaacaacu

SEQ ID NO: 1238284 - RNA, 19 nt, Artificial Sequence
  Description of Artificial Sequence: Synthetic oligonucleotide
  Sense strand starting at position 3393 of SEQ ID NO: 917496
accaguuucuucccaugga

SEQ ID NO: 1238285 - RNA, 19 nt, Artificial Sequence
  Description of Artificial Sequence: Synthetic oligonucleotide
  Antisense strand to SEQ ID NO: 1238284
uccaugggaagaaacuggu

SEQ ID NO: 1238286 - RNA, 19 nt, Artificial Sequence
  Description of Artificial Sequence: Synthetic oligonucleotide
  Sense strand starting at position 3396 of SEQ ID NO: 917496
aguuucuucccauggaaua

SEQ ID NO: 1238287 - RNA, 19 nt, Artificial Sequence
  Description of Artificial Sequence: Synthetic oligonucleotide
  Antisense strand to SEQ ID NO: 1238286
uauuccaugggaagaaacu

SEQ ID NO: 1238288 - RNA, 19 nt, Artificial Sequence
  Description of Artificial Sequence: Synthetic oligonucleotide
  Sense strand starting at position 3397 of SEQ ID NO: 917496
guuucuucccauggaauau

SEQ ID NO: 1238289 - RNA, 19 nt, Artificial Sequence
  Description of Artificial Sequence: Synthetic oligonucleotide
  Antisense strand to SEQ ID NO: 1238288
auauuccaugggaagaaac

SEQ ID NO: 1238290 - RNA, 19 nt, Artificial Sequence
  Description of Artificial Sequence: Synthetic oligonucleotide
  Sense strand starting at position 3748 of SEQ ID NO: 917496
ugagauaaaccugguuucu

SEQ ID NO: 1238291 - RNA, 19 nt, Artificial Sequence
  Description of Artificial Sequence: Synthetic oligonucleotide
  Antisense strand to SEQ ID NO: 1238290
agaaaccagguuuaucuca

SEQ ID NO: 1238292 - RNA, 19 nt, Artificial Sequence
  Description of Artificial Sequence: Synthetic oligonucleotide
  Sense strand starting at position 3750 of SEQ ID NO: 917496
agauaaaccugguuucuac

SEQ ID NO: 1238293 - RNA, 19 nt, Artificial Sequence
  Description of Artificial Sequence: Synthetic oligonucleotide
  Antisense strand to SEQ ID NO: 1238292
guagaaaccagguuuaucu

SEQ ID NO: 1238294 - RNA, 19 nt, Artificial Sequence
  Description of Artificial Sequence: Synthetic oligonucleotide
  Sense strand starting at position 3770 of SEQ ID NO: 917496
augcuacugcaguaaacaa

SEQ ID NO: 1238295 - RNA, 19 nt, Artificial Sequence
  Description of Artificial Sequence: Synthetic oligonucleotide
  Antisense strand to SEQ ID NO: 1238294
uuguuuacugcaguagcau

SEQ ID NO: 1238296 - RNA, 19 nt, Artificial Sequence
  Description of Artificial Sequence: Synthetic oligonucleotide
  Sense strand starting at position 3924 of SEQ ID NO: 917496
auguaucuaucaguagaca

SEQ ID NO: 1238297 - RNA, 19 nt, Artificial Sequence
  Description of Artificial Sequence: Synthetic oligonucleotide
  Antisense strand to SEQ ID NO: 1238296
ugucuacugauagauacau

SEQ ID NO: 1238298 - RNA, 19 nt, Artificial Sequence
  Description of Artificial Sequence: Synthetic oligonucleotide
  Sense strand starting at position 3925 of SEQ ID NO: 917496
uguaucuaucaguagacaa

SEQ ID NO: 1238299 - RNA, 19 nt, Artificial Sequence
  Description of Artificial Sequence: Synthetic oligonucleotide
  Antisense strand to SEQ ID NO: 1238298
uugucuacugauagauaca

SEQ ID NO: 1238300 - RNA, 19 nt, Artificial Sequence
  Description of Artificial Sequence: Synthetic oligonucleotide
  Sense strand starting at position 3932 of SEQ ID NO: 917496
aucaguagacaagguaaua

SEQ ID NO: 1238301 - RNA, 19 nt, Artificial Sequence
  Description of Artificial Sequence: Synthetic oligonucleotide
  Antisense strand to SEQ ID NO: 1238300
uauuaccuugucuacugau

SEQ ID NO: 1238302 - RNA, 19 nt, Artificial Sequence
  Description of Artificial Sequence: Synthetic oligonucleotide
  Sense strand starting at position 3932 of SEQ ID NO: 917497
aucaguagacaagguaaua

SEQ ID NO: 1238303 - RNA, 19 nt, Artificial Sequence
  Description of Artificial Sequence: Synthetic oligonucleotide
  Antisense strand to SEQ ID NO: 1238302
uauuaccuugucuacugau

SEQ ID NO: 1238304 - RNA, 19 nt, Artificial Sequence
  Description of Artificial Sequence: Synthetic oligonucleotide
  Sense strand starting at position 84 of SEQ ID NO: 917497
uuucgugauuaagcugaca

SEQ ID NO: 1238305 - RNA, 19 nt, Artificial Sequence
  Description of Artificial Sequence: Synthetic oligonucleotide
  Antisense strand to SEQ ID NO: 1238304
ugucagcuuaaucacgaaa

SEQ ID NO: 1238306 - RNA, 19 nt, Artificial Sequence
  Description of Artificial Sequence: Synthetic oligonucleotide
  Sense strand starting at position 86 of SEQ ID NO: 917497
ucgugauuaagcugacauc

SEQ ID NO: 1238307 - RNA, 19 nt, Artificial Sequence
  Description of Artificial Sequence: Synthetic oligonucleotide
  Antisense strand to SEQ ID NO: 1238306
gaugucagcuuaaucacga

SEQ ID NO: 1238308 - RNA, 19 nt, Artificial Sequence
  Description of Artificial Sequence: Synthetic oligonucleotide
  Sense strand starting at position 87 of SEQ ID NO: 917497
cgugauuaagcugacauca

SEQ ID NO: 1238309 - RNA, 19 nt, Artificial Sequence
  Description of Artificial Sequence: Synthetic oligonucleotide
  Antisense strand to SEQ ID NO: 1238308
ugaugucagcuuaaucacg

SEQ ID NO: 1238310 - RNA, 19 nt, Artificial Sequence
  Description of Artificial Sequence: Synthetic oligonucleotide
  Sense strand starting at position 116 of SEQ ID NO: 917497
ggcagacgucgcagccaau

SEQ ID NO: 1238311 - RNA, 19 nt, Artificial Sequence
  Description of Artificial Sequence: Synthetic oligonucleotide
  Antisense strand to SEQ ID NO: 1238310
auuggcugcgacgucugcc

SEQ ID NO: 1238312 - RNA, 19 nt, Artificial Sequence
  Description of Artificial Sequence: Synthetic oligonucleotide
  Sense strand starting at position 139 of SEQ ID NO: 917497
gcccgaguuauuuauagcu

SEQ ID NO: 1238313 - RNA, 19 nt, Artificial Sequence
  Description of Artificial Sequence: Synthetic oligonucleotide
  Antisense strand to SEQ ID NO: 1238312
agcuauaaauaacucgggc

SEQ ID NO: 1238314 - RNA, 19 nt, Artificial Sequence
  Description of Artificial Sequence: Synthetic oligonucleotide
  Sense strand starting at position 148 of SEQ ID NO: 917497
auuuauagcuccgaauuaa

SEQ ID NO: 1238315 - RNA, 19 nt, Artificial Sequence
  Description of Artificial Sequence: Synthetic oligonucleotide
  Antisense strand to SEQ ID NO: 1238314
uuaauucggagcuauaaau

SEQ ID NO: 1238316 - RNA, 19 nt, Artificial Sequence
  Description of Artificial Sequence: Synthetic oligonucleotide
  Sense strand starting at position 196 of SEQ ID NO: 917497
cagagaaucccgugagaag

SEQ ID NO: 1238317 - RNA, 19 nt, Artificial Sequence
  Description of Artificial Sequence: Synthetic oligonucleotide
  Antisense strand to SEQ ID NO: 1238316
cuucucacgggauucucug

SEQ ID NO: 1238318 - RNA, 19 nt, Artificial Sequence
  Description of Artificial Sequence: Synthetic oligonucleotide
  Sense strand starting at position 356 of SEQ ID NO: 917497
uugugcaccgucuagaaga

SEQ ID NO: 1238319 - RNA, 19 nt, Artificial Sequence
  Description of Artificial Sequence: Synthetic oligonucleotide
  Antisense strand to SEQ ID NO: 1238318
ucuucuagacggugcacaa

SEQ ID NO: 1238320 - RNA, 19 nt, Artificial Sequence
  Description of Artificial Sequence: Synthetic oligonucleotide
  Sense strand starting at position 432 of SEQ ID NO: 917497
auauuaggauuccuaguaa

SEQ ID NO: 1238321 - RNA, 19 nt, Artificial Sequence
  Description of Artificial Sequence: Synthetic oligonucleotide
  Antisense strand to SEQ ID NO: 1238320
uuacuaggaauccuaauau

SEQ ID NO: 1238322 - RNA, 19 nt, Artificial Sequence
  Description of Artificial Sequence: Synthetic oligonucleotide
  Sense strand starting at position 788 of SEQ ID NO: 917497
accauagcuugcucgauuu

SEQ ID NO: 1238323 - RNA, 19 nt, Artificial Sequence
  Description of Artificial Sequence: Synthetic oligonucleotide
  Antisense strand to SEQ ID NO: 1238322
aaaucgagcaagcuauggu

SEQ ID NO: 1238324 - RNA, 19 nt, Artificial Sequence
  Description of Artificial Sequence: Synthetic oligonucleotide
  Sense strand starting at position 864 of SEQ ID NO: 917497
gucaucgauaaauggaauu

SEQ ID NO: 1238325 - RNA, 19 nt, Artificial Sequence
  Description of Artificial Sequence: Synthetic oligonucleotide
  Antisense strand to SEQ ID NO: 1238324
aauuccauuuaucgaugac

SEQ ID NO: 1238326 - RNA, 19 nt, Artificial Sequence
  Description of Artificial Sequence: Synthetic oligonucleotide
  Sense strand starting at position 876 of SEQ ID NO: 917497
uggaauuuaucuuaagcuu

SEQ ID NO: 1238327 - RNA, 19 nt, Artificial Sequence
  Description of Artificial Sequence: Synthetic oligonucleotide
  Antisense strand to SEQ ID NO: 1238326
aagcuuaagauaaauucca

SEQ ID NO: 1238328 - RNA, 19 nt, Artificial Sequence
  Description of Artificial Sequence: Synthetic oligonucleotide
  Sense strand starting at position 1200 of SEQ ID NO: 917497
auaaguaucccacgaauaa

SEQ ID NO: 1238329 - RNA, 19 nt, Artificial Sequence
  Description of Artificial Sequence: Synthetic oligonucleotide
  Antisense strand to SEQ ID NO: 1238328
uuauucgugggauacuuau

SEQ ID NO: 1238330 - RNA, 19 nt, Artificial Sequence
  Description of Artificial Sequence: Synthetic oligonucleotide
  Sense strand starting at position 1315 of SEQ ID NO: 917497
augucucaguugguaaacu

SEQ ID NO: 1238331 - RNA, 19 nt, Artificial Sequence
  Description of Artificial Sequence: Synthetic oligonucleotide
  Antisense strand to SEQ ID NO: 1238330
aguuuaccaacugagacau

SEQ ID NO: 1238332 - RNA, 19 nt, Artificial Sequence
  Description of Artificial Sequence: Synthetic oligonucleotide
  Sense strand starting at position 1352 of SEQ ID NO: 917497
ggucuacaccauugggauu

SEQ ID NO: 1238333 - RNA, 19 nt, Artificial Sequence
  Description of Artificial Sequence: Synthetic oligonucleotide
  Antisense strand to SEQ ID NO: 1238332
aaucccaaugguguagacc

SEQ ID NO: 1238334 - RNA, 19 nt, Artificial Sequence
  Description of Artificial Sequence: Synthetic oligonucleotide
  Sense strand starting at position 1424 of SEQ ID NO: 917497
agccuuguauaagcuagau

SEQ ID NO: 1238335 - RNA, 19 nt, Artificial Sequence
  Description of Artificial Sequence: Synthetic oligonucleotide
  Antisense strand to SEQ ID NO: 1238334
aucuagcuuauacaaggcu

SEQ ID NO: 1238336 - RNA, 19 nt, Artificial Sequence
  Description of Artificial Sequence: Synthetic oligonucleotide
  Sense strand starting at position 1510 of SEQ ID NO: 917497
gcuucuagggcuugaugau

SEQ ID NO: 1238337 - RNA, 19 nt, Artificial Sequence
  Description of Artificial Sequence: Synthetic oligonucleotide
  Antisense strand to SEQ ID NO: 1238336
aucaucaagcccuagaagc

SEQ ID NO: 1238338 - RNA, 19 nt, Artificial Sequence
  Description of Artificial Sequence: Synthetic oligonucleotide
  Sense strand starting at position 1975 of SEQ ID NO: 917497
ggcgaaagcuuccuauuug

SEQ ID NO: 1238339 - RNA, 19 nt, Artificial Sequence
  Description of Artificial Sequence: Synthetic oligonucleotide
  Antisense strand to SEQ ID NO: 1238338
caaauaggaagcuuucgcc

SEQ ID NO: 1238340 - RNA, 19 nt, Artificial Sequence
  Description of Artificial Sequence: Synthetic oligonucleotide
  Sense strand starting at position 2238 of SEQ ID NO: 917497
auauauucuuugcuaggca

SEQ ID NO: 1238341 - RNA, 19 nt, Artificial Sequence
  Description of Artificial Sequence: Synthetic oligonucleotide
  Antisense strand to SEQ ID NO: 1238340
ugccuagcaaagaauauau

SEQ ID NO: 1238342 - RNA, 19 nt, Artificial Sequence
  Description of Artificial Sequence: Synthetic oligonucleotide
  Sense strand starting at position 2241 of SEQ ID NO: 917497
uauucuuugcuaggcauga

SEQ ID NO: 1238343 - RNA, 19 nt, Artificial Sequence
  Description of Artificial Sequence: Synthetic oligonucleotide
  Antisense strand to SEQ ID NO: 1238342
ucaugccuagcaaagaaua

SEQ ID NO: 1238344 - RNA, 19 nt, Artificial Sequence
  Description of Artificial Sequence: Synthetic oligonucleotide
  Sense strand starting at position 2429 of SEQ ID NO: 917497
uaguuaagucccuaaggca

SEQ ID NO: 1238345 - RNA, 19 nt, Artificial Sequence
  Description of Artificial Sequence: Synthetic oligonucleotide
  Antisense strand to SEQ ID NO: 1238344
ugccuuagggacuuaacua

SEQ ID NO: 1238346 - RNA, 19 nt, Artificial Sequence
  Description of Artificial Sequence: Synthetic oligonucleotide
  Sense strand starting at position 2453 of SEQ ID NO: 917497
uugcaagcugagugacaau

SEQ ID NO: 1238347 - RNA, 19 nt, Artificial Sequence
  Description of Artificial Sequence: Synthetic oligonucleotide
  Antisense strand to SEQ ID NO: 1238346
auugucacucagcuugcaa

SEQ ID NO: 1238348 - RNA, 19 nt, Artificial Sequence
  Description of Artificial Sequence: Synthetic oligonucleotide
  Sense strand starting at position 2462 of SEQ ID NO: 917497
gagugacaauuccucuaag

SEQ ID NO: 1238349 - RNA, 19 nt, Artificial Sequence
  Description of Artificial Sequence: Synthetic oligonucleotide
  Antisense strand to SEQ ID NO: 1238348
cuuagaggaauugucacuc

SEQ ID NO: 1238350 - RNA, 19 nt, Artificial Sequence
  Description of Artificial Sequence: Synthetic oligonucleotide
  Sense strand starting at position 2463 of SEQ ID NO: 917497
agugacaauuccucuaaga

SEQ ID NO: 1238351 - RNA, 19 nt, Artificial Sequence
  Description of Artificial Sequence: Synthetic oligonucleotide
  Antisense strand to SEQ ID NO: 1238350
ucuuagaggaauugucacu

SEQ ID NO: 1238352 - RNA, 19 nt, Artificial Sequence
  Description of Artificial Sequence: Synthetic oligonucleotide
  Sense strand starting at position 2551 of SEQ ID NO: 917497
gcauacaaauccuugaagu

SEQ ID NO: 1238353 - RNA, 19 nt, Artificial Sequence
  Description of Artificial Sequence: Synthetic oligonucleotide
  Antisense strand to SEQ ID NO: 1238352
acuucaaggauuuguaugc

SEQ ID NO: 1238354 - RNA, 19 nt, Artificial Sequence
  Description of Artificial Sequence: Synthetic oligonucleotide
  Sense strand starting at position 2608 of SEQ ID NO: 917497
ggaggauauaauggugguu

SEQ ID NO: 1238355 - RNA, 19 nt, Artificial Sequence
  Description of Artificial Sequence: Synthetic oligonucleotide
  Antisense strand to SEQ ID NO: 1238354
aaccaccauuauauccucc

SEQ ID NO: 1238356 - RNA, 19 nt, Artificial Sequence
  Description of Artificial Sequence: Synthetic oligonucleotide
  Sense strand starting at position 2611 of SEQ ID NO: 917497
ggauauaauggugguuaaa

SEQ ID NO: 1238357 - RNA, 19 nt, Artificial Sequence
  Description of Artificial Sequence: Synthetic oligonucleotide
  Antisense strand to SEQ ID NO: 1238356
uuuaaccaccauuauaucc

SEQ ID NO: 1238358 - RNA, 19 nt, Artificial Sequence
  Description of Artificial Sequence: Synthetic oligonucleotide
  Sense strand starting at position 2719 of SEQ ID NO: 917497
aaucgagagauguggguau

SEQ ID NO: 1238359 - RNA, 19 nt, Artificial Sequence
  Description of Artificial Sequence: Synthetic oligonucleotide
  Antisense strand to SEQ ID NO: 1238358
auacccacaucucucgauu

SEQ ID NO: 1238360 - RNA, 19 nt, Artificial Sequence
  Description of Artificial Sequence: Synthetic oligonucleotide
  Sense strand starting at position 2721 of SEQ ID NO: 917497
ucgagagauguggguauaa

SEQ ID NO: 1238361 - RNA, 19 nt, Artificial Sequence
  Description of Artificial Sequence: Synthetic oligonucleotide
  Antisense strand to SEQ ID NO: 1238360
uuauacccacaucucucga

SEQ ID NO: 1238362 - RNA, 19 nt, Artificial Sequence
  Description of Artificial Sequence: Synthetic oligonucleotide
  Sense strand starting at position 2833 of SEQ ID NO: 917497
agcccugaaguuugcuaaa

SEQ ID NO: 1238363 - RNA, 19 nt, Artificial Sequence
  Description of Artificial Sequence: Synthetic oligonucleotide
  Antisense strand to SEQ ID NO: 1238362
uuuagcaaacuucagggcu

SEQ ID NO: 1238364 - RNA, 19 nt, Artificial Sequence
  Description of Artificial Sequence: Synthetic oligonucleotide
  Sense strand starting at position 2835 of SEQ ID NO: 917497
cccugaaguuugcuaaauu

SEQ ID NO: 1238365 - RNA, 19 nt, Artificial Sequence
  Description of Artificial Sequence: Synthetic oligonucleotide
  Antisense strand to SEQ ID NO: 1238364
aauuuagcaaacuucaggg

SEQ ID NO: 1238366 - RNA, 19 nt, Artificial Sequence
  Description of Artificial Sequence: Synthetic oligonucleotide
  Sense strand starting at position 2878 of SEQ ID NO: 917497
agucaauacaugcgagaaa

SEQ ID NO: 1238367 - RNA, 19 nt, Artificial Sequence
  Description of Artificial Sequence: Synthetic oligonucleotide
  Antisense strand to SEQ ID NO: 1238366
uuucucgcauguauugacu

SEQ ID NO: 1238368 - RNA, 19 nt, Artificial Sequence
  Description of Artificial Sequence: Synthetic oligonucleotide
  Sense strand starting at position 3210 of SEQ ID NO: 917497
uguccaaaguuauuaggaa

SEQ ID NO: 1238369 - RNA, 19 nt, Artificial Sequence
  Description of Artificial Sequence: Synthetic oligonucleotide
  Antisense strand to SEQ ID NO: 1238368
uuccuaauaacuuuggaca

SEQ ID NO: 1238370 - RNA, 19 nt, Artificial Sequence
  Description of Artificial Sequence: Synthetic oligonucleotide
  Sense strand starting at position 3289 of SEQ ID NO: 917497
accaaagugugaccaacua

SEQ ID NO: 1238371 - RNA, 19 nt, Artificial Sequence
  Description of Artificial Sequence: Synthetic oligonucleotide
  Antisense strand to SEQ ID NO: 1238370
uaguuggucacacuuuggu

SEQ ID NO: 1238372 - RNA, 19 nt, Artificial Sequence
  Description of Artificial Sequence: Synthetic oligonucleotide
  Sense strand starting at position 3496 of SEQ ID NO: 917497
guaauuauuugggaagcug

SEQ ID NO: 1238373 - RNA, 19 nt, Artificial Sequence
  Description of Artificial Sequence: Synthetic oligonucleotide
  Antisense strand to SEQ ID NO: 1238372
cagcuucccaaauaauuac

SEQ ID NO: 1238374 - RNA, 19 nt, Artificial Sequence
  Description of Artificial Sequence: Synthetic oligonucleotide
  Sense strand starting at position 3521 of SEQ ID NO: 917497
ggucccuaugucuaugaau

SEQ ID NO: 1238375 - RNA, 19 nt, Artificial Sequence
  Description of Artificial Sequence: Synthetic oligonucleotide
  Antisense strand to SEQ ID NO: 1238374
auucauagacauagggacc

SEQ ID NO: 1238376 - RNA, 19 nt, Artificial Sequence
  Description of Artificial Sequence: Synthetic oligonucleotide
  Sense strand starting at position 3559 of SEQ ID NO: 917497
acuacaugauagucucuau

SEQ ID NO: 1238377 - RNA, 19 nt, Artificial Sequence
  Description of Artificial Sequence: Synthetic oligonucleotide
  Antisense strand to SEQ ID NO: 1238376
auagagacuaucauguagu

SEQ ID NO: 1238378 - RNA, 19 nt, Artificial Sequence
  Description of Artificial Sequence: Synthetic oligonucleotide
  Sense strand starting at position 3562 of SEQ ID NO: 917497
acaugauagucucuauauu

SEQ ID NO: 1238379 - RNA, 19 nt, Artificial Sequence
  Description of Artificial Sequence: Synthetic oligonucleotide
  Antisense strand to SEQ ID NO: 1238378
aauauagagacuaucaugu

SEQ ID NO: 1238380 - RNA, 19 nt, Artificial Sequence
  Description of Artificial Sequence: Synthetic oligonucleotide
  Sense strand starting at position 3841 of SEQ ID NO: 917497
cugaucauccauuguauca

SEQ ID NO: 1238381 - RNA, 19 nt, Artificial Sequence
  Description of Artificial Sequence: Synthetic oligonucleotide
  Antisense strand to SEQ ID NO: 1238380
ugauacaauggaugaucag

SEQ ID NO: 1238382 - RNA, 19 nt, Artificial Sequence
  Description of Artificial Sequence: Synthetic oligonucleotide
  Sense strand starting at position 3904 of SEQ ID NO: 917498
uuuccuauugaaggacauu

SEQ ID NO: 1238383 - RNA, 19 nt, Artificial Sequence
  Description of Artificial Sequence: Synthetic oligonucleotide
  Antisense strand to SEQ ID NO: 1238382
aauguccuucaauaggaaa

SEQ ID NO: 1238384 - RNA, 19 nt, Artificial Sequence
  Description of Artificial Sequence: Synthetic oligonucleotide
  Sense strand starting at position 241 of SEQ ID NO: 917498
agcauaguccucgccugua

SEQ ID NO: 1238385 - RNA, 19 nt, Artificial Sequence
  Description of Artificial Sequence: Synthetic oligonucleotide
  Antisense strand to SEQ ID NO: 1238384
uacaggcgaggacuaugcu

SEQ ID NO: 1238386 - RNA, 19 nt, Artificial Sequence
  Description of Artificial Sequence: Synthetic oligonucleotide
  Sense strand starting at position 334 of SEQ ID NO: 917498
gugaaacccuggcuauaca

SEQ ID NO: 1238387 - RNA, 19 nt, Artificial Sequence
  Description of Artificial Sequence: Synthetic oligonucleotide
  Antisense strand to SEQ ID NO: 1238386
uguauagccaggguuucac

SEQ ID NO: 1238388 - RNA, 19 nt, Artificial Sequence
  Description of Artificial Sequence: Synthetic oligonucleotide
  Sense strand starting at position 447 of SEQ ID NO: 917498
ugcagugagccaugaccua

SEQ ID NO: 1238389 - RNA, 19 nt, Artificial Sequence
  Description of Artificial Sequence: Synthetic oligonucleotide
  Antisense strand to SEQ ID NO: 1238388
uaggucauggcucacugca

SEQ ID NO: 1238390 - RNA, 19 nt, Artificial Sequence
  Description of Artificial Sequence: Synthetic oligonucleotide
  Sense strand starting at position 709 of SEQ ID NO: 917498
gucuuacauagauggcagu

SEQ ID NO: 1238391 - RNA, 19 nt, Artificial Sequence
  Description of Artificial Sequence: Synthetic oligonucleotide
  Antisense strand to SEQ ID NO: 1238390
acugccaucuauguaagac

SEQ ID NO: 1238392 - RNA, 19 nt, Artificial Sequence
  Description of Artificial Sequence: Synthetic oligonucleotide
  Sense strand starting at position 1232 of SEQ ID NO: 917498
uguacaauuggaugaguac

SEQ ID NO: 1238393 - RNA, 19 nt, Artificial Sequence
  Description of Artificial Sequence: Synthetic oligonucleotide
  Antisense strand to SEQ ID NO: 1238392
guacucauccaauuguaca

SEQ ID NO: 1238394 - RNA, 19 nt, Artificial Sequence
  Description of Artificial Sequence: Synthetic oligonucleotide
  Sense strand starting at position 1262 of SEQ ID NO: 917498
ugcaaaucaguuuaaguua

SEQ ID NO: 1238395 - RNA, 19 nt, Artificial Sequence
  Description of Artificial Sequence: Synthetic oligonucleotide
  Antisense strand to SEQ ID NO: 1238394
uaacuuaaacugauuugca

SEQ ID NO: 1238396 - RNA, 19 nt, Artificial Sequence
  Description of Artificial Sequence: Synthetic oligonucleotide
  Sense strand starting at position 1418 of SEQ ID NO: 917498
ugcaacugaugguuuacau

SEQ ID NO: 1238397 - RNA, 19 nt, Artificial Sequence
  Description of Artificial Sequence: Synthetic oligonucleotide
  Antisense strand to SEQ ID NO: 1238396
auguaaaccaucaguugca

SEQ ID NO: 1238398 - RNA, 19 nt, Artificial Sequence
  Description of Artificial Sequence: Synthetic oligonucleotide
  Sense strand starting at position 1422 of SEQ ID NO: 917498
acugaugguuuacauauaa

SEQ ID NO: 1238399 - RNA, 19 nt, Artificial Sequence
  Description of Artificial Sequence: Synthetic oligonucleotide
  Antisense strand to SEQ ID NO: 1238398
uuauauguaaaccaucagu

SEQ ID NO: 1238400 - RNA, 19 nt, Artificial Sequence
  Description of Artificial Sequence: Synthetic oligonucleotide
  Sense strand starting at position 1619 of SEQ ID NO: 917498
gcaacuaaauguuuaaaga

SEQ ID NO: 1238401 - RNA, 19 nt, Artificial Sequence
  Description of Artificial Sequence: Synthetic oligonucleotide
  Antisense strand to SEQ ID NO: 1238400
ucuuuaaacauuuaguugc

SEQ ID NO: 1238402 - RNA, 19 nt, Artificial Sequence
  Description of Artificial Sequence: Synthetic oligonucleotide
  Sense strand starting at position 1893 of SEQ ID NO: 917498
uuugaauuacagugaggua

SEQ ID NO: 1238403 - RNA, 19 nt, Artificial Sequence
  Description of Artificial Sequence: Synthetic oligonucleotide
  Antisense strand to SEQ ID NO: 1238402
uaccucacuguaauucaaa

SEQ ID NO: 1238404 - RNA, 19 nt, Artificial Sequence
  Description of Artificial Sequence: Synthetic oligonucleotide
  Sense strand starting at position 1909 of SEQ ID NO: 917498
guacucacagcaggauuau

SEQ ID NO: 1238405 - RNA, 19 nt, Artificial Sequence
  Description of Artificial Sequence: Synthetic oligonucleotide
  Antisense strand to SEQ ID NO: 1238404
auaauccugcugugaguac

SEQ ID NO: 1238406 - RNA, 19 nt, Artificial Sequence
  Description of Artificial Sequence: Synthetic oligonucleotide
  Sense strand starting at position 1918 of SEQ ID NO: 917498
gcaggauuaucacuagacu

SEQ ID NO: 1238407 - RNA, 19 nt, Artificial Sequence
  Description of Artificial Sequence: Synthetic oligonucleotide
  Antisense strand to SEQ ID NO: 1238406
agucuagugauaauccugc

SEQ ID NO: 1238408 - RNA, 19 nt, Artificial Sequence
  Description of Artificial Sequence: Synthetic oligonucleotide
  Sense strand starting at position 2068 of SEQ ID NO: 917498
ggcaguuucuacuuaaagg

SEQ ID NO: 1238409 - RNA, 19 nt, Artificial Sequence
  Description of Artificial Sequence: Synthetic oligonucleotide
  Antisense strand to SEQ ID NO: 1238408
ccuuuaaguagaaacugcc

SEQ ID NO: 1238410 - RNA, 19 nt, Artificial Sequence
  Description of Artificial Sequence: Synthetic oligonucleotide
  Sense strand starting at position 2141 of SEQ ID NO: 917498
cuaugaauauagugauuug

SEQ ID NO: 1238411 - RNA, 19 nt, Artificial Sequence
  Description of Artificial Sequence: Synthetic oligonucleotide
  Antisense strand to SEQ ID NO: 1238410
caaaucacuauauucauag

SEQ ID NO: 1238412 - RNA, 19 nt, Artificial Sequence
  Description of Artificial Sequence: Synthetic oligonucleotide
  Sense strand starting at position 2208 of SEQ ID NO: 917498
cuuagagugcaacaaguua

SEQ ID NO: 1238413 - RNA, 19 nt, Artificial Sequence
  Description of Artificial Sequence: Synthetic oligonucleotide
  Antisense strand to SEQ ID NO: 1238412
uaacuuguugcacucuaag

SEQ ID NO: 1238414 - RNA, 19 nt, Artificial Sequence
  Description of Artificial Sequence: Synthetic oligonucleotide
  Sense strand starting at position 2309 of SEQ ID NO: 917498
acuuaugucagaggugaaa

SEQ ID NO: 1238415 - RNA, 19 nt, Artificial Sequence
  Description of Artificial Sequence: Synthetic oligonucleotide
  Antisense strand to SEQ ID NO: 1238414
uuucaccucugacauaagu

SEQ ID NO: 1238416 - RNA, 19 nt, Artificial Sequence
  Description of Artificial Sequence: Synthetic oligonucleotide
  Sense strand starting at position 2565 of SEQ ID NO: 917498
cgagauaucugacaacuuu

SEQ ID NO: 1238417 - RNA, 19 nt, Artificial Sequence
  Description of Artificial Sequence: Synthetic oligonucleotide
  Antisense strand to SEQ ID NO: 1238416
aaaguugucagauaucucg

SEQ ID NO: 1238418 - RNA, 19 nt, Artificial Sequence
  Description of Artificial Sequence: Synthetic oligonucleotide
  Sense strand starting at position 2596 of SEQ ID NO: 917498
acaauaaggccucauugua

SEQ ID NO: 1238419 - RNA, 19 nt, Artificial Sequence
  Description of Artificial Sequence: Synthetic oligonucleotide
  Antisense strand to SEQ ID NO: 1238418
uacaaugaggccuuauugu

SEQ ID NO: 1238420 - RNA, 19 nt, Artificial Sequence
  Description of Artificial Sequence: Synthetic oligonucleotide
  Sense strand starting at position 2747 of SEQ ID NO: 917498
cugcaauguuguuccagaa

SEQ ID NO: 1238421 - RNA, 19 nt, Artificial Sequence
  Description of Artificial Sequence: Synthetic oligonucleotide
  Antisense strand to SEQ ID NO: 1238420
uucuggaacaacauugcag

SEQ ID NO: 1238422 - RNA, 19 nt, Artificial Sequence
  Description of Artificial Sequence: Synthetic oligonucleotide
  Sense strand starting at position 2751 of SEQ ID NO: 917498
aauguuguuccagaaggua

SEQ ID NO: 1238423 - RNA, 19 nt, Artificial Sequence
  Description of Artificial Sequence: Synthetic oligonucleotide
  Antisense strand to SEQ ID NO: 1238422
uaccuucuggaacaacauu

SEQ ID NO: 1238424 - RNA, 19 nt, Artificial Sequence
  Description of Artificial Sequence: Synthetic oligonucleotide
  Sense strand starting at position 2828 of SEQ ID NO: 917498
uauuaauuaugagacggaa

SEQ ID NO: 1238425 - RNA, 19 nt, Artificial Sequence
  Description of Artificial Sequence: Synthetic oligonucleotide
  Antisense strand to SEQ ID NO: 1238424
uuccgucucauaauuaaua

SEQ ID NO: 1238426 - RNA, 19 nt, Artificial Sequence
  Description of Artificial Sequence: Synthetic oligonucleotide
  Sense strand starting at position 3024 of SEQ ID NO: 917498
gcaggaugcaucuaaagua

SEQ ID NO: 1238427 - RNA, 19 nt, Artificial Sequence
  Description of Artificial Sequence: Synthetic oligonucleotide
  Antisense strand to SEQ ID NO: 1238426
uacuuuagaugcauccugc

SEQ ID NO: 1238428 - RNA, 19 nt, Artificial Sequence
  Description of Artificial Sequence: Synthetic oligonucleotide
  Sense strand starting at position 3052 of SEQ ID NO: 917498
ggaaauguauagucuugaa

SEQ ID NO: 1238429 - RNA, 19 nt, Artificial Sequence
  Description of Artificial Sequence: Synthetic oligonucleotide
  Antisense strand to SEQ ID NO: 1238428
uucaagacuauacauuucc

SEQ ID NO: 1238430 - RNA, 19 nt, Artificial Sequence
  Description of Artificial Sequence: Synthetic oligonucleotide
  Sense strand starting at position 3056 of SEQ ID NO: 917498
auguauagucuugaacauu

SEQ ID NO: 1238431 - RNA, 19 nt, Artificial Sequence
  Description of Artificial Sequence: Synthetic oligonucleotide
  Antisense strand to SEQ ID NO: 1238430
aauguucaagacuauacau

SEQ ID NO: 1238432 - RNA, 19 nt, Artificial Sequence
  Description of Artificial Sequence: Synthetic oligonucleotide
  Sense strand starting at position 3083 of SEQ ID NO: 917498
gccuaaagauuauugggau

SEQ ID NO: 1238433 - RNA, 19 nt, Artificial Sequence
  Description of Artificial Sequence: Synthetic oligonucleotide
  Antisense strand to SEQ ID NO: 1238432
aucccaauaaucuuuaggc

SEQ ID NO: 1238434 - RNA, 19 nt, Artificial Sequence
  Description of Artificial Sequence: Synthetic oligonucleotide
  Sense strand starting at position 3084 of SEQ ID NO: 917498
ccuaaagauuauugggaua

SEQ ID NO: 1238435 - RNA, 19 nt, Artificial Sequence
  Description of Artificial Sequence: Synthetic oligonucleotide
  Antisense strand to SEQ ID NO: 1238434
uaucccaauaaucuuuagg

SEQ ID NO: 1238436 - RNA, 19 nt, Artificial Sequence
  Description of Artificial Sequence: Synthetic oligonucleotide
  Sense strand starting at position 3086 of SEQ ID NO: 917498
uaaagauuauugggauaag

SEQ ID NO: 1238437 - RNA, 19 nt, Artificial Sequence
  Description of Artificial Sequence: Synthetic oligonucleotide
  Antisense strand to SEQ ID NO: 1238436
cuuaucccaauaaucuuua

SEQ ID NO: 1238438 - RNA, 19 nt, Artificial Sequence
  Description of Artificial Sequence: Synthetic oligonucleotide
  Sense strand starting at position 3290 of SEQ ID NO: 917498
gcaagccgccaguauaauu

SEQ ID NO: 1238439 - RNA, 19 nt, Artificial Sequence
  Description of Artificial Sequence: Synthetic oligonucleotide
  Antisense strand to SEQ ID NO: 1238438
aauuauacuggcggcuugc

SEQ ID NO: 1238440 - RNA, 19 nt, Artificial Sequence
  Description of Artificial Sequence: Synthetic oligonucleotide
  Sense strand starting at position 3433 of SEQ ID NO: 917498
gauauaaagucugaauagu

SEQ ID NO: 1238441 - RNA, 19 nt, Artificial Sequence
  Description of Artificial Sequence: Synthetic oligonucleotide
  Antisense strand to SEQ ID NO: 1238440
acuauucagacuuuauauc

SEQ ID NO: 1238442 - RNA, 19 nt, Artificial Sequence
  Description of Artificial Sequence: Synthetic oligonucleotide
  Sense strand starting at position 3449 of SEQ ID NO: 917498
aguccuauauugccaucau

SEQ ID NO: 1238443 - RNA, 19 nt, Artificial Sequence
  Description of Artificial Sequence: Synthetic oligonucleotide
  Antisense strand to SEQ ID NO: 1238442
augauggcaauauaggacu

SEQ ID NO: 1238444 - RNA, 19 nt, Artificial Sequence
  Description of Artificial Sequence: Synthetic oligonucleotide
  Sense strand starting at position 3623 of SEQ ID NO: 917498
aguggcagucuccagugaa

SEQ ID NO: 1238445 - RNA, 19 nt, Artificial Sequence
  Description of Artificial Sequence: Synthetic oligonucleotide
  Antisense strand to SEQ ID NO: 1238444
uucacuggagacugccacu

SEQ ID NO: 1238446 - RNA, 19 nt, Artificial Sequence
  Description of Artificial Sequence: Synthetic oligonucleotide
  Sense strand starting at position 3682 of SEQ ID NO: 917498
aaauuaaugccaugugguu

SEQ ID NO: 1238447 - RNA, 19 nt, Artificial Sequence
  Description of Artificial Sequence: Synthetic oligonucleotide
  Antisense strand to SEQ ID NO: 1238446
aaccacauggcauuaauuu

SEQ ID NO: 1238448 - RNA, 19 nt, Artificial Sequence
  Description of Artificial Sequence: Synthetic oligonucleotide
  Sense strand starting at position 3705 of SEQ ID NO: 917498
cccagagcucugcaugaac

SEQ ID NO: 1238449 - RNA, 19 nt, Artificial Sequence
  Description of Artificial Sequence: Synthetic oligonucleotide
  Antisense strand to SEQ ID NO: 1238448
guucaugcagagcucuggg

SEQ ID NO: 1238450 - RNA, 19 nt, Artificial Sequence
  Description of Artificial Sequence: Synthetic oligonucleotide
  Sense strand starting at position 3708 of SEQ ID NO: 917498
agagcucugcaugaaccau

SEQ ID NO: 1238451 - RNA, 19 nt, Artificial Sequence
  Description of Artificial Sequence: Synthetic oligonucleotide
  Antisense strand to SEQ ID NO: 1238450
augguucaugcagagcucu

SEQ ID NO: 1238452 - RNA, 19 nt, Artificial Sequence
  Description of Artificial Sequence: Synthetic oligonucleotide
  Sense strand starting at position 3845 of SEQ ID NO: 917498
ucuuaagggauauggaguu

SEQ ID NO: 1238453 - RNA, 19 nt, Artificial Sequence
  Description of Artificial Sequence: Synthetic oligonucleotide
  Antisense strand to SEQ ID NO: 1238452
aacuccauaucccuuaaga

SEQ ID NO: 1238454 - RNA, 19 nt, Artificial Sequence
  Description of Artificial Sequence: Synthetic oligonucleotide
  Sense strand starting at position 3866 of SEQ ID NO: 917498
caaauauuagcugagaugu

SEQ ID NO: 1238455 - RNA, 19 nt, Artificial Sequence
  Description of Artificial Sequence: Synthetic oligonucleotide
  Antisense strand to SEQ ID NO: 1238454
acaucucagcuaauauuug

SEQ ID NO: 1238456 - RNA, 19 nt, Artificial Sequence
  Description of Artificial Sequence: Synthetic oligonucleotide
  Sense strand starting at position 3872 of SEQ ID NO: 917498
uuagcugagaugugauuau

SEQ ID NO: 1238457 - RNA, 19 nt, Artificial Sequence
  Description of Artificial Sequence: Synthetic oligonucleotide
  Antisense strand to SEQ ID NO: 1238456
auaaucacaucucagcuaa

SEQ ID NO: 1238458 - RNA, 19 nt, Artificial Sequence
  Description of Artificial Sequence: Synthetic oligonucleotide
  Sense strand starting at position 3882 of SEQ ID NO: 917498
ugugauuauugacauauac

SEQ ID NO: 1238459 - RNA, 19 nt, Artificial Sequence
  Description of Artificial Sequence: Synthetic oligonucleotide
  Antisense strand to SEQ ID NO: 1238458
guauaugucaauaaucaca

SEQ ID NO: 1238460 - RNA, 19 nt, Artificial Sequence
  Description of Artificial Sequence: Synthetic oligonucleotide
  Sense strand starting at position 3972 of SEQ ID NO: 917498
agggaaacuuguguugugu

SEQ ID NO: 1238461 - RNA, 19 nt, Artificial Sequence
  Description of Artificial Sequence: Synthetic oligonucleotide
  Antisense strand to SEQ ID NO: 1238460
acacaacacaaguuucccu

SEQ ID NO: 1238462 - RNA, 19 nt, Artificial Sequence
  Description of Artificial Sequence: Synthetic oligonucleotide
  Sense strand starting at position 3980 of SEQ ID NO: 917499
uuguguuguguccaggaau

SEQ ID NO: 1238463 - RNA, 19 nt, Artificial Sequence
  Description of Artificial Sequence: Synthetic oligonucleotide
  Antisense strand to SEQ ID NO: 1238462
auuccuggacacaacacaa

SEQ ID NO: 1238464 - RNA, 19 nt, Artificial Sequence
  Description of Artificial Sequence: Synthetic oligonucleotide
  Sense strand starting at position 133 of SEQ ID NO: 917499
agucacuucuaucggauuu

SEQ ID NO: 1238465 - RNA, 19 nt, Artificial Sequence
  Description of Artificial Sequence: Synthetic oligonucleotide
  Antisense strand to SEQ ID NO: 1238464
aaauccgauagaagugacu

SEQ ID NO: 1238466 - RNA, 19 nt, Artificial Sequence
  Description of Artificial Sequence: Synthetic oligonucleotide
  Sense strand starting at position 219 of SEQ ID NO: 917499
cauagaacucagugcaagu

SEQ ID NO: 1238467 - RNA, 19 nt, Artificial Sequence
  Description of Artificial Sequence: Synthetic oligonucleotide
  Antisense strand to SEQ ID NO: 1238466
acuugcacugaguucuaug

SEQ ID NO: 1238468 - RNA, 19 nt, Artificial Sequence
  Description of Artificial Sequence: Synthetic oligonucleotide
  Sense strand starting at position 295 of SEQ ID NO: 917499
cgaaguguuaacuguuggu

SEQ ID NO: 1238469 - RNA, 19 nt, Artificial Sequence
  Description of Artificial Sequence: Synthetic oligonucleotide
  Antisense strand to SEQ ID NO: 1238468
accaacaguuaacacuucg

SEQ ID NO: 1238470 - RNA, 19 nt, Artificial Sequence
  Description of Artificial Sequence: Synthetic oligonucleotide
  Sense strand starting at position 299 of SEQ ID NO: 917499
guguuaacuguugguuguu

SEQ ID NO: 1238471 - RNA, 19 nt, Artificial Sequence
  Description of Artificial Sequence: Synthetic oligonucleotide
  Antisense strand to SEQ ID NO: 1238470
aacaaccaacaguuaacac

SEQ ID NO: 1238472 - RNA, 19 nt, Artificial Sequence
  Description of Artificial Sequence: Synthetic oligonucleotide
  Sense strand starting at position 314 of SEQ ID NO: 917499
uguugcugcugacuugaaa

SEQ ID NO: 1238473 - RNA, 19 nt, Artificial Sequence
  Description of Artificial Sequence: Synthetic oligonucleotide
  Antisense strand to SEQ ID NO: 1238472
uuucaagucagcagcaaca

SEQ ID NO: 1238474 - RNA, 19 nt, Artificial Sequence
  Description of Artificial Sequence: Synthetic oligonucleotide
  Sense strand starting at position 477 of SEQ ID NO: 917499
uaggaauauugcuuguacu

SEQ ID NO: 1238475 - RNA, 19 nt, Artificial Sequence
  Description of Artificial Sequence: Synthetic oligonucleotide
  Antisense strand to SEQ ID NO: 1238474
aguacaagcaauauuccua

SEQ ID NO: 1238476 - RNA, 19 nt, Artificial Sequence
  Description of Artificial Sequence: Synthetic oligonucleotide
  Sense strand starting at position 478 of SEQ ID NO: 917499
aggaauauugcuuguacuu

SEQ ID NO: 1238477 - RNA, 19 nt, Artificial Sequence
  Description of Artificial Sequence: Synthetic oligonucleotide
  Antisense strand to SEQ ID NO: 1238476
aaguacaagcaauauuccu

SEQ ID NO: 1238478 - RNA, 19 nt, Artificial Sequence
  Description of Artificial Sequence: Synthetic oligonucleotide
  Sense strand starting at position 511 of SEQ ID NO: 917499
aagcaugcugcuugucaca

SEQ ID NO: 1238479 - RNA, 19 nt, Artificial Sequence
  Description of Artificial Sequence: Synthetic oligonucleotide
  Antisense strand to SEQ ID NO: 1238478
ugugacaagcagcaugcuu

SEQ ID NO: 1238480 - RNA, 19 nt, Artificial Sequence
  Description of Artificial Sequence: Synthetic oligonucleotide
  Sense strand starting at position 522 of SEQ ID NO: 917499
uugucacauuaggauuaaa

SEQ ID NO: 1238481 - RNA, 19 nt, Artificial Sequence
  Description of Artificial Sequence: Synthetic oligonucleotide
  Antisense strand to SEQ ID NO: 1238480
uuuaauccuaaugugacaa

SEQ ID NO: 1238482 - RNA, 19 nt, Artificial Sequence
  Description of Artificial Sequence: Synthetic oligonucleotide
  Sense strand starting at position 626 of SEQ ID NO: 917499
gcacgcauauuagucauua

SEQ ID NO: 1238483 - RNA, 19 nt, Artificial Sequence
  Description of Artificial Sequence: Synthetic oligonucleotide
  Antisense strand to SEQ ID NO: 1238482
uaaugacuaauaugcgugc

SEQ ID NO: 1238484 - RNA, 19 nt, Artificial Sequence
  Description of Artificial Sequence: Synthetic oligonucleotide
  Sense strand starting at position 630 of SEQ ID NO: 917499
gcauauuagucauuacaga

SEQ ID NO: 1238485 - RNA, 19 nt, Artificial Sequence
  Description of Artificial Sequence: Synthetic oligonucleotide
  Antisense strand to SEQ ID NO: 1238484
ucuguaaugacuaauaugc

SEQ ID NO: 1238486 - RNA, 19 nt, Artificial Sequence
  Description of Artificial Sequence: Synthetic oligonucleotide
  Sense strand starting at position 637 of SEQ ID NO: 917499
agucauuacagaugcaggu

SEQ ID NO: 1238487 - RNA, 19 nt, Artificial Sequence
  Description of Artificial Sequence: Synthetic oligonucleotide
  Antisense strand to SEQ ID NO: 1238486
accugcaucuguaaugacu

SEQ ID NO: 1238488 - RNA, 19 nt, Artificial Sequence
  Description of Artificial Sequence: Synthetic oligonucleotide
  Sense strand starting at position 684 of SEQ ID NO: 917499
gugcaacuggugugauacu

SEQ ID NO: 1238489 - RNA, 19 nt, Artificial Sequence
  Description of Artificial Sequence: Synthetic oligonucleotide
  Antisense strand to SEQ ID NO: 1238488
aguaucacaccaguugcac

SEQ ID NO: 1238490 - RNA, 19 nt, Artificial Sequence
  Description of Artificial Sequence: Synthetic oligonucleotide
  Sense strand starting at position 706 of SEQ ID NO: 917499
agagcuuccaguuguagag

SEQ ID NO: 1238491 - RNA, 19 nt, Artificial Sequence
  Description of Artificial Sequence: Synthetic oligonucleotide
  Antisense strand to SEQ ID NO: 1238490
cucuacaacuggaagcucu

SEQ ID NO: 1238492 - RNA, 19 nt, Artificial Sequence
  Description of Artificial Sequence: Synthetic oligonucleotide
  Sense strand starting at position 710 of SEQ ID NO: 917499
cuuccaguuguagagaguu

SEQ ID NO: 1238493 - RNA, 19 nt, Artificial Sequence
  Description of Artificial Sequence: Synthetic oligonucleotide
  Antisense strand to SEQ ID NO: 1238492
aacucucuacaacuggaag

SEQ ID NO: 1238494 - RNA, 19 nt, Artificial Sequence
  Description of Artificial Sequence: Synthetic oligonucleotide
  Sense strand starting at position 824 of SEQ ID NO: 917499
ccaugaugaaucugauggu

SEQ ID NO: 1238495 - RNA, 19 nt, Artificial Sequence
  Description of Artificial Sequence: Synthetic oligonucleotide
  Antisense strand to SEQ ID NO: 1238494
accaucagauucaucaugg

SEQ ID NO: 1238496 - RNA, 19 nt, Artificial Sequence
  Description of Artificial Sequence: Synthetic oligonucleotide
  Sense strand starting at position 852 of SEQ ID NO: 917499
ggugguguggaugagcauu

SEQ ID NO: 1238497 - RNA, 19 nt, Artificial Sequence
  Description of Artificial Sequence: Synthetic oligonucleotide
  Antisense strand to SEQ ID NO: 1238496
aaugcucauccacaccacc

SEQ ID NO: 1238498 - RNA, 19 nt, Artificial Sequence
  Description of Artificial Sequence: Synthetic oligonucleotide
  Sense strand starting at position 860 of SEQ ID NO: 917499
ggaugagcauucccauuga

SEQ ID NO: 1238499 - RNA, 19 nt, Artificial Sequence
  Description of Artificial Sequence: Synthetic oligonucleotide
  Antisense strand to SEQ ID NO: 1238498
ucaaugggaaugcucaucc

SEQ ID NO: 1238500 - RNA, 19 nt, Artificial Sequence
  Description of Artificial Sequence: Synthetic oligonucleotide
  Sense strand starting at position 958 of SEQ ID NO: 917499
cucggcuuccuggaaguua

SEQ ID NO: 1238501 - RNA, 19 nt, Artificial Sequence
  Description of Artificial Sequence: Synthetic oligonucleotide
  Antisense strand to SEQ ID NO: 1238500
uaacuuccaggaagccgag

SEQ ID NO: 1238502 - RNA, 19 nt, Artificial Sequence
  Description of Artificial Sequence: Synthetic oligonucleotide
  Sense strand starting at position 970 of SEQ ID NO: 917499
gaaguuauuuagggucucu

SEQ ID NO: 1238503 - RNA, 19 nt, Artificial Sequence
  Description of Artificial Sequence: Synthetic oligonucleotide
  Antisense strand to SEQ ID NO: 1238502
agagacccuaaauaacuuc

SEQ ID NO: 1238504 - RNA, 19 nt, Artificial Sequence
  Description of Artificial Sequence: Synthetic oligonucleotide
  Sense strand starting at position 1018 of SEQ ID NO: 917499
gucaguagcccuggaaagu

SEQ ID NO: 1238505 - RNA, 19 nt, Artificial Sequence
  Description of Artificial Sequence: Synthetic oligonucleotide
  Antisense strand to SEQ ID NO: 1238504
acuuuccagggcuacugac

SEQ ID NO: 1238506 - RNA, 19 nt, Artificial Sequence
  Description of Artificial Sequence: Synthetic oligonucleotide
  Sense strand starting at position 1041 of SEQ ID NO: 917499
caucaaggaucuccgaaga

SEQ ID NO: 1238507 - RNA, 19 nt, Artificial Sequence
  Description of Artificial Sequence: Synthetic oligonucleotide
  Antisense strand to SEQ ID NO: 1238506
ucuucggagauccuugaug

SEQ ID NO: 1238508 - RNA, 19 nt, Artificial Sequence
  Description of Artificial Sequence: Synthetic oligonucleotide
  Sense strand starting at position 1061 of SEQ ID NO: 917499
gagagaucuuccgugugag

SEQ ID NO: 1238509 - RNA, 19 nt, Artificial Sequence
  Description of Artificial Sequence: Synthetic oligonucleotide
  Antisense strand to SEQ ID NO: 1238508
cucacacggaagaucucuc

SEQ ID NO: 1238510 - RNA, 19 nt, Artificial Sequence
  Description of Artificial Sequence: Synthetic oligonucleotide
  Sense strand starting at position 1062 of SEQ ID NO: 917499
agagaucuuccgugugaga

SEQ ID NO: 1238511 - RNA, 19 nt, Artificial Sequence
  Description of Artificial Sequence: Synthetic oligonucleotide
  Antisense strand to SEQ ID NO: 1238510
ucucacacggaagaucucu

SEQ ID NO: 1238512 - RNA, 19 nt, Artificial Sequence
  Description of Artificial Sequence: Synthetic oligonucleotide
  Sense strand starting at position 1064 of SEQ ID NO: 917499
agaucuuccgugugagauu

SEQ ID NO: 1238513 - RNA, 19 nt, Artificial Sequence
  Description of Artificial Sequence: Synthetic oligonucleotide
  Antisense strand to SEQ ID NO: 1238512
aaucucacacggaagaucu

SEQ ID NO: 1238514 - RNA, 19 nt, Artificial Sequence
  Description of Artificial Sequence: Synthetic oligonucleotide
  Sense strand starting at position 1100 of SEQ ID NO: 917499
cucucaguguccucugcua

SEQ ID NO: 1238515 - RNA, 19 nt, Artificial Sequence
  Description of Artificial Sequence: Synthetic oligonucleotide
  Antisense strand to SEQ ID NO: 1238514
uagcagaggacacugagag

SEQ ID NO: 1238516 - RNA, 19 nt, Artificial Sequence
  Description of Artificial Sequence: Synthetic oligonucleotide
  Sense strand starting at position 1102 of SEQ ID NO: 917499
cucaguguccucugcuaua

SEQ ID NO: 1238517 - RNA, 19 nt, Artificial Sequence
  Description of Artificial Sequence: Synthetic oligonucleotide
  Antisense strand to SEQ ID NO: 1238516
uauagcagaggacacugag

SEQ ID NO: 1238518 - RNA, 19 nt, Artificial Sequence
  Description of Artificial Sequence: Synthetic oligonucleotide
  Sense strand starting at position 1122 of SEQ ID NO: 917499
uguuguuagagcugauacu

SEQ ID NO: 1238519 - RNA, 19 nt, Artificial Sequence
  Description of Artificial Sequence: Synthetic oligonucleotide
  Antisense strand to SEQ ID NO: 1238518
aguaucagcucuaacaaca

SEQ ID NO: 1238520 - RNA, 19 nt, Artificial Sequence
  Description of Artificial Sequence: Synthetic oligonucleotide
  Sense strand starting at position 1123 of SEQ ID NO: 917499
guuguuagagcugauacua

SEQ ID NO: 1238521 - RNA, 19 nt, Artificial Sequence
  Description of Artificial Sequence: Synthetic oligonucleotide
  Antisense strand to SEQ ID NO: 1238520
uaguaucagcucuaacaac

SEQ ID NO: 1238522 - RNA, 19 nt, Artificial Sequence
  Description of Artificial Sequence: Synthetic oligonucleotide
  Sense strand starting at position 1143 of SEQ ID NO: 917499
cggagaucugagcaggagu

SEQ ID NO: 1238523 - RNA, 19 nt, Artificial Sequence
  Description of Artificial Sequence: Synthetic oligonucleotide
  Antisense strand to SEQ ID NO: 1238522
acuccugcucagaucuccg

SEQ ID NO: 1238524 - RNA, 19 nt, Artificial Sequence
  Description of Artificial Sequence: Synthetic oligonucleotide
  Sense strand starting at position 1145 of SEQ ID NO: 917499
gagaucugagcaggaguaa

SEQ ID NO: 1238525 - RNA, 19 nt, Artificial Sequence
  Description of Artificial Sequence: Synthetic oligonucleotide
  Antisense strand to SEQ ID NO: 1238524
uuacuccugcucagaucuc

SEQ ID NO: 1238526 - RNA, 19 nt, Artificial Sequence
  Description of Artificial Sequence: Synthetic oligonucleotide
  Sense strand starting at position 1158 of SEQ ID NO: 917499
gaguaacgcuaguuaucug

SEQ ID NO: 1238527 - RNA, 19 nt, Artificial Sequence
  Description of Artificial Sequence: Synthetic oligonucleotide
  Antisense strand to SEQ ID NO: 1238526
cagauaacuagcguuacuc

SEQ ID NO: 1238528 - RNA, 19 nt, Artificial Sequence
  Description of Artificial Sequence: Synthetic oligonucleotide
  Sense strand starting at position 1161 of SEQ ID NO: 917499
uaacgcuaguuaucuggaa

SEQ ID NO: 1238529 - RNA, 19 nt, Artificial Sequence
  Description of Artificial Sequence: Synthetic oligonucleotide
  Antisense strand to SEQ ID NO: 1238528
uuccagauaacuagcguua

SEQ ID NO: 1238530 - RNA, 19 nt, Artificial Sequence
  Description of Artificial Sequence: Synthetic oligonucleotide
  Sense strand starting at position 1165 of SEQ ID NO: 917499
gcuaguuaucuggaagcca

SEQ ID NO: 1238531 - RNA, 19 nt, Artificial Sequence
  Description of Artificial Sequence: Synthetic oligonucleotide
  Antisense strand to SEQ ID NO: 1238530
uggcuuccagauaacuagc

SEQ ID NO: 1238532 - RNA, 19 nt, Artificial Sequence
  Description of Artificial Sequence: Synthetic oligonucleotide
  Sense strand starting at position 2117 of SEQ ID NO: 917499
cggcugcucggugaggaaa

SEQ ID NO: 1238533 - RNA, 19 nt, Artificial Sequence
  Description of Artificial Sequence: Synthetic oligonucleotide
  Antisense strand to SEQ ID NO: 1238532
uuuccucaccgagcagccg

SEQ ID NO: 1238534 - RNA, 19 nt, Artificial Sequence
  Description of Artificial Sequence: Synthetic oligonucleotide
  Sense strand starting at position 2959 of SEQ ID NO: 917499
caggucucccgacggaaau

SEQ ID NO: 1238535 - RNA, 19 nt, Artificial Sequence
  Description of Artificial Sequence: Synthetic oligonucleotide
  Antisense strand to SEQ ID NO: 1238534
auuuccgucgggagaccug

SEQ ID NO: 1238536 - RNA, 19 nt, Artificial Sequence
  Description of Artificial Sequence: Synthetic oligonucleotide
  Sense strand starting at position 2960 of SEQ ID NO: 917499
aggucucccgacggaaauu

SEQ ID NO: 1238537 - RNA, 19 nt, Artificial Sequence
  Description of Artificial Sequence: Synthetic oligonucleotide
  Antisense strand to SEQ ID NO: 1238536
aauuuccgucgggagaccu

SEQ ID NO: 1238538 - RNA, 19 nt, Artificial Sequence
  Description of Artificial Sequence: Synthetic oligonucleotide
  Sense strand starting at position 2961 of SEQ ID NO: 917499
ggucucccgacggaaauua

SEQ ID NO: 1238539 - RNA, 19 nt, Artificial Sequence
  Description of Artificial Sequence: Synthetic oligonucleotide
  Antisense strand to SEQ ID NO: 1238538
uaauuuccgucgggagacc

SEQ ID NO: 1238540 - RNA, 19 nt, Artificial Sequence
  Description of Artificial Sequence: Synthetic oligonucleotide
  Sense strand starting at position 3041 of SEQ ID NO: 917499
gggaauuccggccgaagga

SEQ ID NO: 1238541 - RNA, 19 nt, Artificial Sequence
  Description of Artificial Sequence: Synthetic oligonucleotide
  Antisense strand to SEQ ID NO: 1238540
uccuucggccggaauuccc

SEQ ID NO: 1238542 - RNA, 19 nt, Artificial Sequence
  Description of Artificial Sequence: Synthetic oligonucleotide
  Sense strand starting at position 3494 of SEQ ID NO: 917500
ccgguggcucccggugaua

SEQ ID NO: 1238543 - RNA, 19 nt, Artificial Sequence
  Description of Artificial Sequence: Synthetic oligonucleotide
  Antisense strand to SEQ ID NO: 1238542
uaucaccgggagccaccgg

SEQ ID NO: 1238544 - RNA, 19 nt, Artificial Sequence
  Description of Artificial Sequence: Synthetic oligonucleotide
  Sense strand starting at position 120 of SEQ ID NO: 917500
uguacaauacuugaguuua

SEQ ID NO: 1238545 - RNA, 19 nt, Artificial Sequence
  Description of Artificial Sequence: Synthetic oligonucleotide
  Antisense strand to SEQ ID NO: 1238544
uaaacucaaguauuguaca

SEQ ID NO: 1238546 - RNA, 19 nt, Artificial Sequence
  Description of Artificial Sequence: Synthetic oligonucleotide
  Sense strand starting at position 125 of SEQ ID NO: 917500
aauacuugaguuuaacgua

SEQ ID NO: 1238547 - RNA, 19 nt, Artificial Sequence
  Description of Artificial Sequence: Synthetic oligonucleotide
  Antisense strand to SEQ ID NO: 1238546
uacguuaaacucaaguauu

SEQ ID NO: 1238548 - RNA, 19 nt, Artificial Sequence
  Description of Artificial Sequence: Synthetic oligonucleotide
  Sense strand starting at position 132 of SEQ ID NO: 917500
gaguuuaacguauaaauga

SEQ ID NO: 1238549 - RNA, 19 nt, Artificial Sequence
  Description of Artificial Sequence: Synthetic oligonucleotide
  Antisense strand to SEQ ID NO: 1238548
ucauuuauacguuaaacuc

SEQ ID NO: 1238550 - RNA, 19 nt, Artificial Sequence
  Description of Artificial Sequence: Synthetic oligonucleotide
  Sense strand starting at position 139 of SEQ ID NO: 917500
acguauaaaugaucaagcu

SEQ ID NO: 1238551 - RNA, 19 nt, Artificial Sequence
  Description of Artificial Sequence: Synthetic oligonucleotide
  Antisense strand to SEQ ID NO: 1238550
agcuugaucauuuauacgu

SEQ ID NO: 1238552 - RNA, 19 nt, Artificial Sequence
  Description of Artificial Sequence: Synthetic oligonucleotide
  Sense strand starting at position 140 of SEQ ID NO: 917500
cguauaaaugaucaagcuu

SEQ ID NO: 1238553 - RNA, 19 nt, Artificial Sequence
  Description of Artificial Sequence: Synthetic oligonucleotide
  Antisense strand to SEQ ID NO: 1238552
aagcuugaucauuuauacg

SEQ ID NO: 1238554 - RNA, 19 nt, Artificial Sequence
  Description of Artificial Sequence: Synthetic oligonucleotide
  Sense strand starting at position 190 of SEQ ID NO: 917500
gccagaaacgcccaaguaa

SEQ ID NO: 1238555 - RNA, 19 nt, Artificial Sequence
  Description of Artificial Sequence: Synthetic oligonucleotide
  Antisense strand to SEQ ID NO: 1238554
uuacuugggcguuucuggc

SEQ ID NO: 1238556 - RNA, 19 nt, Artificial Sequence
  Description of Artificial Sequence: Synthetic oligonucleotide
  Sense strand starting at position 417 of SEQ ID NO: 917500
cgugauuaagcugacauca

SEQ ID NO: 1238557 - RNA, 19 nt, Artificial Sequence
  Description of Artificial Sequence: Synthetic oligonucleotide
  Antisense strand to SEQ ID NO: 1238556
ugaugucagcuuaaucacg

SEQ ID NO: 1238558 - RNA, 19 nt, Artificial Sequence
  Description of Artificial Sequence: Synthetic oligonucleotide
  Sense strand starting at position 446 of SEQ ID NO: 917500
ggcagacgucgcagccaau

SEQ ID NO: 1238559 - RNA, 19 nt, Artificial Sequence
  Description of Artificial Sequence: Synthetic oligonucleotide
  Antisense strand to SEQ ID NO: 1238558
auuggcugcgacgucugcc

SEQ ID NO: 1238560 - RNA, 19 nt, Artificial Sequence
  Description of Artificial Sequence: Synthetic oligonucleotide
  Sense strand starting at position 469 of SEQ ID NO: 917500
gcccgaguuauuuauagcu

SEQ ID NO: 1238561 - RNA, 19 nt, Artificial Sequence
  Description of Artificial Sequence: Synthetic oligonucleotide
  Antisense strand to SEQ ID NO: 1238560
agcuauaaauaacucgggc

SEQ ID NO: 1238562 - RNA, 19 nt, Artificial Sequence
  Description of Artificial Sequence: Synthetic oligonucleotide
  Sense strand starting at position 478 of SEQ ID NO: 917500
auuuauagcuccgaauuaa

SEQ ID NO: 1238563 - RNA, 19 nt, Artificial Sequence
  Description of Artificial Sequence: Synthetic oligonucleotide
  Antisense strand to SEQ ID NO: 1238562
uuaauucggagcuauaaau

SEQ ID NO: 1238564 - RNA, 19 nt, Artificial Sequence
  Description of Artificial Sequence: Synthetic oligonucleotide
  Sense strand starting at position 526 of SEQ ID NO: 917500
cagagaaucccgugagaag

SEQ ID NO: 1238565 - RNA, 19 nt, Artificial Sequence
  Description of Artificial Sequence: Synthetic oligonucleotide
  Antisense strand to SEQ ID NO: 1238564
cuucucacgggauucucug

SEQ ID NO: 1238566 - RNA, 19 nt, Artificial Sequence
  Description of Artificial Sequence: Synthetic oligonucleotide
  Sense strand starting at position 686 of SEQ ID NO: 917500
uugugcaccgucuagaaga

SEQ ID NO: 1238567 - RNA, 19 nt, Artificial Sequence
  Description of Artificial Sequence: Synthetic oligonucleotide
  Antisense strand to SEQ ID NO: 1238566
ucuucuagacggugcacaa

SEQ ID NO: 1238568 - RNA, 19 nt, Artificial Sequence
  Description of Artificial Sequence: Synthetic oligonucleotide
  Sense strand starting at position 762 of SEQ ID NO: 917500
auauuaggauuccuaguaa

SEQ ID NO: 1238569 - RNA, 19 nt, Artificial Sequence
  Description of Artificial Sequence: Synthetic oligonucleotide
  Antisense strand to SEQ ID NO: 1238568
uuacuaggaauccuaauau

SEQ ID NO: 1238570 - RNA, 19 nt, Artificial Sequence
  Description of Artificial Sequence: Synthetic oligonucleotide
  Sense strand starting at position 1118 of SEQ ID NO: 917500
accauagcuugcucgauuu

SEQ ID NO: 1238571 - RNA, 19 nt, Artificial Sequence
  Description of Artificial Sequence: Synthetic oligonucleotide
  Antisense strand to SEQ ID NO: 1238570
aaaucgagcaagcuauggu

SEQ ID NO: 1238572 - RNA, 19 nt, Artificial Sequence
  Description of Artificial Sequence: Synthetic oligonucleotide
  Sense strand starting at position 1194 of SEQ ID NO: 917500
gucaucgauaaauggaauu

SEQ ID NO: 1238573 - RNA, 19 nt, Artificial Sequence
  Description of Artificial Sequence: Synthetic oligonucleotide
  Antisense strand to SEQ ID NO: 1238572
aauuccauuuaucgaugac

SEQ ID NO: 1238574 - RNA, 19 nt, Artificial Sequence
  Description of Artificial Sequence: Synthetic oligonucleotide
  Sense strand starting at position 1206 of SEQ ID NO: 917500
uggaauuuaucuuaagcuu

SEQ ID NO: 1238575 - RNA, 19 nt, Artificial Sequence
  Description of Artificial Sequence: Synthetic oligonucleotide
  Antisense strand to SEQ ID NO: 1238574
aagcuuaagauaaauucca

SEQ ID NO: 1238576 - RNA, 19 nt, Artificial Sequence
  Description of Artificial Sequence: Synthetic oligonucleotide
  Sense strand starting at position 1530 of SEQ ID NO: 917500
auaaguaucccacgaauaa

SEQ ID NO: 1238577 - RNA, 19 nt, Artificial Sequence
  Description of Artificial Sequence: Synthetic oligonucleotide
  Antisense strand to SEQ ID NO: 1238576
uuauucgugggauacuuau

SEQ ID NO: 1238578 - RNA, 19 nt, Artificial Sequence
  Description of Artificial Sequence: Synthetic oligonucleotide
  Sense strand starting at position 1645 of SEQ ID NO: 917500
augucucaguugguaaacu

SEQ ID NO: 1238579 - RNA, 19 nt, Artificial Sequence
  Description of Artificial Sequence: Synthetic oligonucleotide
  Antisense strand to SEQ ID NO: 1238578
aguuuaccaacugagacau

SEQ ID NO: 1238580 - RNA, 19 nt, Artificial Sequence
  Description of Artificial Sequence: Synthetic oligonucleotide
  Sense strand starting at position 1682 of SEQ ID NO: 917500
ggucuacaccauugggauu

SEQ ID NO: 1238581 - RNA, 19 nt, Artificial Sequence
  Description of Artificial Sequence: Synthetic oligonucleotide
  Antisense strand to SEQ ID NO: 1238580
aaucccaaugguguagacc

SEQ ID NO: 1238582 - RNA, 19 nt, Artificial Sequence
  Description of Artificial Sequence: Synthetic oligonucleotide
  Sense strand starting at position 1754 of SEQ ID NO: 917500
agccuuguauaagcuagau

SEQ ID NO: 1238583 - RNA, 19 nt, Artificial Sequence
  Description of Artificial Sequence: Synthetic oligonucleotide
  Antisense strand to SEQ ID NO: 1238582
aucuagcuuauacaaggcu

SEQ ID NO: 1238584 - RNA, 19 nt, Artificial Sequence
  Description of Artificial Sequence: Synthetic oligonucleotide
  Sense strand starting at position 1840 of SEQ ID NO: 917500
gcuucuagggcuugaugau

SEQ ID NO: 1238585 - RNA, 19 nt, Artificial Sequence
  Description of Artificial Sequence: Synthetic oligonucleotide
  Antisense strand to SEQ ID NO: 1238584
aucaucaagcccuagaagc

SEQ ID NO: 1238586 - RNA, 19 nt, Artificial Sequence
  Description of Artificial Sequence: Synthetic oligonucleotide
  Sense strand starting at position 2305 of SEQ ID NO: 917500
ggcgaaagcuuccuauuug

SEQ ID NO: 1238587 - RNA, 19 nt, Artificial Sequence
  Description of Artificial Sequence: Synthetic oligonucleotide
  Antisense strand to SEQ ID NO: 1238586
caaauaggaagcuuucgcc

SEQ ID NO: 1238588 - RNA, 19 nt, Artificial Sequence
  Description of Artificial Sequence: Synthetic oligonucleotide
  Sense strand starting at position 2568 of SEQ ID NO: 917500
auauauucuuugcuaggca

SEQ ID NO: 1238589 - RNA, 19 nt, Artificial Sequence
  Description of Artificial Sequence: Synthetic oligonucleotide
  Antisense strand to SEQ ID NO: 1238588
ugccuagcaaagaauauau

SEQ ID NO: 1238590 - RNA, 19 nt, Artificial Sequence
  Description of Artificial Sequence: Synthetic oligonucleotide
  Sense strand starting at position 2759 of SEQ ID NO: 917500
uaguuaagucccuaaggca

SEQ ID NO: 1238591 - RNA, 19 nt, Artificial Sequence
  Description of Artificial Sequence: Synthetic oligonucleotide
  Antisense strand to SEQ ID NO: 1238590
ugccuuagggacuuaacua

SEQ ID NO: 1238592 - RNA, 19 nt, Artificial Sequence
  Description of Artificial Sequence: Synthetic oligonucleotide
  Sense strand starting at position 2783 of SEQ ID NO: 917500
uugcaagcugagugacaau

SEQ ID NO: 1238593 - RNA, 19 nt, Artificial Sequence
  Description of Artificial Sequence: Synthetic oligonucleotide
  Antisense strand to SEQ ID NO: 1238592
auugucacucagcuugcaa

SEQ ID NO: 1238594 - RNA, 19 nt, Artificial Sequence
  Description of Artificial Sequence: Synthetic oligonucleotide
  Sense strand starting at position 2792 of SEQ ID NO: 917500
gagugacaauuccucuaag

SEQ ID NO: 1238595 - RNA, 19 nt, Artificial Sequence
  Description of Artificial Sequence: Synthetic oligonucleotide
  Antisense strand to SEQ ID NO: 1238594
cuuagaggaauugucacuc

SEQ ID NO: 1238596 - RNA, 19 nt, Artificial Sequence
  Description of Artificial Sequence: Synthetic oligonucleotide
  Sense strand starting at position 2793 of SEQ ID NO: 917500
agugacaauuccucuaaga

SEQ ID NO: 1238597 - RNA, 19 nt, Artificial Sequence
  Description of Artificial Sequence: Synthetic oligonucleotide
  Antisense strand to SEQ ID NO: 1238596
ucuuagaggaauugucacu

SEQ ID NO: 1238598 - RNA, 19 nt, Artificial Sequence
  Description of Artificial Sequence: Synthetic oligonucleotide
  Sense strand starting at position 2881 of SEQ ID NO: 917500
gcauacaaauccuugaagu

SEQ ID NO: 1238599 - RNA, 19 nt, Artificial Sequence
  Description of Artificial Sequence: Synthetic oligonucleotide
  Antisense strand to SEQ ID NO: 1238598
acuucaaggauuuguaugc

SEQ ID NO: 1238600 - RNA, 19 nt, Artificial Sequence
  Description of Artificial Sequence: Synthetic oligonucleotide
  Sense strand starting at position 2938 of SEQ ID NO: 917500
ggaggauauaauggugguu

SEQ ID NO: 1238601 - RNA, 19 nt, Artificial Sequence
  Description of Artificial Sequence: Synthetic oligonucleotide
  Antisense strand to SEQ ID NO: 1238600
aaccaccauuauauccucc

SEQ ID NO: 1238602 - RNA, 19 nt, Artificial Sequence
  Description of Artificial Sequence: Synthetic oligonucleotide
  Sense strand starting at position 2941 of SEQ ID NO: 917500
ggauauaauggugguuaaa

SEQ ID NO: 1238603 - RNA, 19 nt, Artificial Sequence
  Description of Artificial Sequence: Synthetic oligonucleotide
  Antisense strand to SEQ ID NO: 1238602
uuuaaccaccauuauaucc

SEQ ID NO: 1238604 - RNA, 19 nt, Artificial Sequence
  Description of Artificial Sequence: Synthetic oligonucleotide
  Sense strand starting at position 3049 of SEQ ID NO: 917500
aaucgagagauguggguau

SEQ ID NO: 1238605 - RNA, 19 nt, Artificial Sequence
  Description of Artificial Sequence: Synthetic oligonucleotide
  Antisense strand to SEQ ID NO: 1238604
auacccacaucucucgauu

SEQ ID NO: 1238606 - RNA, 19 nt, Artificial Sequence
  Description of Artificial Sequence: Synthetic oligonucleotide
  Sense strand starting at position 3051 of SEQ ID NO: 917500
ucgagagauguggguauaa

SEQ ID NO: 1238607 - RNA, 19 nt, Artificial Sequence
  Description of Artificial Sequence: Synthetic oligonucleotide
  Antisense strand to SEQ ID NO: 1238606
uuauacccacaucucucga

SEQ ID NO: 1238608 - RNA, 19 nt, Artificial Sequence
  Description of Artificial Sequence: Synthetic oligonucleotide
  Sense strand starting at position 3165 of SEQ ID NO: 917500
cccugaaguuugcuaaauu

SEQ ID NO: 1238609 - RNA, 19 nt, Artificial Sequence
  Description of Artificial Sequence: Synthetic oligonucleotide
  Antisense strand to SEQ ID NO: 1238608
aauuuagcaaacuucaggg

SEQ ID NO: 1238610 - RNA, 19 nt, Artificial Sequence
  Description of Artificial Sequence: Synthetic oligonucleotide
  Sense strand starting at position 3208 of SEQ ID NO: 917500
agucaauacaugcgagaaa

SEQ ID NO: 1238611 - RNA, 19 nt, Artificial Sequence
  Description of Artificial Sequence: Synthetic oligonucleotide
  Antisense strand to SEQ ID NO: 1238610
uuucucgcauguauugacu

SEQ ID NO: 1238612 - RNA, 19 nt, Artificial Sequence
  Description of Artificial Sequence: Synthetic oligonucleotide
  Sense strand starting at position 3540 of SEQ ID NO: 917500
uguccaaaguuauuaggaa

SEQ ID NO: 1238613 - RNA, 19 nt, Artificial Sequence
  Description of Artificial Sequence: Synthetic oligonucleotide
  Antisense strand to SEQ ID NO: 1238612
uuccuaauaacuuuggaca

SEQ ID NO: 1238614 - RNA, 19 nt, Artificial Sequence
  Description of Artificial Sequence: Synthetic oligonucleotide
  Sense strand starting at position 3619 of SEQ ID NO: 917500
accaaagugugaccaacua

SEQ ID NO: 1238615 - RNA, 19 nt, Artificial Sequence
  Description of Artificial Sequence: Synthetic oligonucleotide
  Antisense strand to SEQ ID NO: 1238614
uaguuggucacacuuuggu

SEQ ID NO: 1238616 - RNA, 19 nt, Artificial Sequence
  Description of Artificial Sequence: Synthetic oligonucleotide
  Sense strand starting at position 3826 of SEQ ID NO: 917500
guaauuauuugggaagcug

SEQ ID NO: 1238617 - RNA, 19 nt, Artificial Sequence
  Description of Artificial Sequence: Synthetic oligonucleotide
  Antisense strand to SEQ ID NO: 1238616
cagcuucccaaauaauuac

SEQ ID NO: 1238618 - RNA, 19 nt, Artificial Sequence
  Description of Artificial Sequence: Synthetic oligonucleotide
  Sense strand starting at position 3851 of SEQ ID NO: 917500
ggucccuaugucuaugaau

SEQ ID NO: 1238619 - RNA, 19 nt, Artificial Sequence
  Description of Artificial Sequence: Synthetic oligonucleotide
  Antisense strand to SEQ ID NO: 1238618
auucauagacauagggacc

SEQ ID NO: 1238620 - RNA, 19 nt, Artificial Sequence
  Description of Artificial Sequence: Synthetic oligonucleotide
  Sense strand starting at position 3889 of SEQ ID NO: 917500
acuacaugauagucucuau

SEQ ID NO: 1238621 - RNA, 19 nt, Artificial Sequence
  Description of Artificial Sequence: Synthetic oligonucleotide
  Antisense strand to SEQ ID NO: 1238620
auagagacuaucauguagu

SEQ ID NO: 1238622 - RNA, 19 nt, Artificial Sequence
  Description of Artificial Sequence: Synthetic oligonucleotide
  Sense strand starting at position 3892 of SEQ ID NO: 917499
acaugauagucucuauauu

SEQ ID NO: 1238623 - RNA, 19 nt, Artificial Sequence
  Description of Artificial Sequence: Synthetic oligonucleotide
  Antisense strand to SEQ ID NO: 1238622
aauauagagacuaucaugu

SEQ ID NO: 1238624 - RNA, 19 nt, Artificial Sequence
  Description of Artificial Sequence: Synthetic oligonucleotide
  Sense strand starting at position 3494 of SEQ ID NO: 917501
ccgguggcucccggugaua

SEQ ID NO: 1238625 - RNA, 19 nt, Artificial Sequence
  Description of Artificial Sequence: Synthetic oligonucleotide
  Antisense strand to SEQ ID NO: 1238624
uaucaccgggagccaccgg

SEQ ID NO: 1238626 - RNA, 19 nt, Artificial Sequence
  Description of Artificial Sequence: Synthetic oligonucleotide
  Sense strand starting at position 136 of SEQ ID NO: 917501
ccagguguucaguaugugu

SEQ ID NO: 1238627 - RNA, 19 nt, Artificial Sequence
  Description of Artificial Sequence: Synthetic oligonucleotide
  Antisense strand to SEQ ID NO: 1238626
acacauacugaacaccugg

SEQ ID NO: 1238628 - RNA, 19 nt, Artificial Sequence
  Description of Artificial Sequence: Synthetic oligonucleotide
  Sense strand starting at position 536 of SEQ ID NO: 917501
uucuuuaagcccugacaag

SEQ ID NO: 1238629 - RNA, 19 nt, Artificial Sequence
  Description of Artificial Sequence: Synthetic oligonucleotide
  Antisense strand to SEQ ID NO: 1238628
cuugucagggcuuaaagaa

SEQ ID NO: 1238630 - RNA, 19 nt, Artificial Sequence
  Description of Artificial Sequence: Synthetic oligonucleotide
  Sense strand starting at position 1081 of SEQ ID NO: 917501
gggcaacagagcuguuguu

SEQ ID NO: 1238631 - RNA, 19 nt, Artificial Sequence
  Description of Artificial Sequence: Synthetic oligonucleotide
  Antisense strand to SEQ ID NO: 1238630
aacaacagcucuguugccc

SEQ ID NO: 1238632 - RNA, 19 nt, Artificial Sequence
  Description of Artificial Sequence: Synthetic oligonucleotide
  Sense strand starting at position 1093 of SEQ ID NO: 917501
uguuguugagccguuucaa

SEQ ID NO: 1238633 - RNA, 19 nt, Artificial Sequence
  Description of Artificial Sequence: Synthetic oligonucleotide
  Antisense strand to SEQ ID NO: 1238632
uugaaacggcucaacaaca

SEQ ID NO: 1238634 - RNA, 19 nt, Artificial Sequence
  Description of Artificial Sequence: Synthetic oligonucleotide
  Sense strand starting at position 1176 of SEQ ID NO: 917501
ucuauucuuuaugugaaug

SEQ ID NO: 1238635 - RNA, 19 nt, Artificial Sequence
  Description of Artificial Sequence: Synthetic oligonucleotide
  Antisense strand to SEQ ID NO: 1238634
cauucacauaaagaauaga

SEQ ID NO: 1238636 - RNA, 19 nt, Artificial Sequence
  Description of Artificial Sequence: Synthetic oligonucleotide
  Sense strand starting at position 1464 of SEQ ID NO: 917501
gcuuuaauuccugaucuga

SEQ ID NO: 1238637 - RNA, 19 nt, Artificial Sequence
  Description of Artificial Sequence: Synthetic oligonucleotide
  Antisense strand to SEQ ID NO: 1238636
ucagaucaggaauuaaagc

SEQ ID NO: 1238638 - RNA, 19 nt, Artificial Sequence
  Description of Artificial Sequence: Synthetic oligonucleotide
  Sense strand starting at position 2070 of SEQ ID NO: 917501
uugauuggccguugugcaa

SEQ ID NO: 1238639 - RNA, 19 nt, Artificial Sequence
  Description of Artificial Sequence: Synthetic oligonucleotide
  Antisense strand to SEQ ID NO: 1238638
uugcacaacggccaaucaa

SEQ ID NO: 1238640 - RNA, 19 nt, Artificial Sequence
  Description of Artificial Sequence: Synthetic oligonucleotide
  Sense strand starting at position 2252 of SEQ ID NO: 917501
gcagcuacugcgucuuuau

SEQ ID NO: 1238641 - RNA, 19 nt, Artificial Sequence
  Description of Artificial Sequence: Synthetic oligonucleotide
  Antisense strand to SEQ ID NO: 1238640
auaaagacgcaguagcugc

SEQ ID NO: 1238642 - RNA, 19 nt, Artificial Sequence
  Description of Artificial Sequence: Synthetic oligonucleotide
  Sense strand starting at position 2262 of SEQ ID NO: 917501
cgucuuuauagguggagga

SEQ ID NO: 1238643 - RNA, 19 nt, Artificial Sequence
  Description of Artificial Sequence: Synthetic oligonucleotide
  Antisense strand to SEQ ID NO: 1238642
uccuccaccuauaaagacg

SEQ ID NO: 1238644 - RNA, 19 nt, Artificial Sequence
  Description of Artificial Sequence: Synthetic oligonucleotide
  Sense strand starting at position 2263 of SEQ ID NO: 917501
gucuuuauagguggaggaa

SEQ ID NO: 1238645 - RNA, 19 nt, Artificial Sequence
  Description of Artificial Sequence: Synthetic oligonucleotide
  Antisense strand to SEQ ID NO: 1238644
uuccuccaccuauaaagac

SEQ ID NO: 1238646 - RNA, 19 nt, Artificial Sequence
  Description of Artificial Sequence: Synthetic oligonucleotide
  Sense strand starting at position 2275 of SEQ ID NO: 917501
ggaggaacauugcuuugua

SEQ ID NO: 1238647 - RNA, 19 nt, Artificial Sequence
  Description of Artificial Sequence: Synthetic oligonucleotide
  Antisense strand to SEQ ID NO: 1238646
uacaaagcaauguuccucc

SEQ ID NO: 1238648 - RNA, 19 nt, Artificial Sequence
  Description of Artificial Sequence: Synthetic oligonucleotide
  Sense strand starting at position 2276 of SEQ ID NO: 917501
gaggaacauugcuuuguaa

SEQ ID NO: 1238649 - RNA, 19 nt, Artificial Sequence
  Description of Artificial Sequence: Synthetic oligonucleotide
  Antisense strand to SEQ ID NO: 1238648
uuacaaagcaauguuccuc

SEQ ID NO: 1238650 - RNA, 19 nt, Artificial Sequence
  Description of Artificial Sequence: Synthetic oligonucleotide
  Sense strand starting at position 2278 of SEQ ID NO: 917501
ggaacauugcuuuguaagu

SEQ ID NO: 1238651 - RNA, 19 nt, Artificial Sequence
  Description of Artificial Sequence: Synthetic oligonucleotide
  Antisense strand to SEQ ID NO: 1238650
acuuacaaagcaauguucc

SEQ ID NO: 1238652 - RNA, 19 nt, Artificial Sequence
  Description of Artificial Sequence: Synthetic oligonucleotide
  Sense strand starting at position 2279 of SEQ ID NO: 917501
gaacauugcuuuguaagua

SEQ ID NO: 1238653 - RNA, 19 nt, Artificial Sequence
  Description of Artificial Sequence: Synthetic oligonucleotide
  Antisense strand to SEQ ID NO: 1238652
uacuuacaaagcaauguuc

SEQ ID NO: 1238654 - RNA, 19 nt, Artificial Sequence
  Description of Artificial Sequence: Synthetic oligonucleotide
  Sense strand starting at position 2375 of SEQ ID NO: 917501
ggaggugccuuauucagau

SEQ ID NO: 1238655 - RNA, 19 nt, Artificial Sequence
  Description of Artificial Sequence: Synthetic oligonucleotide
  Antisense strand to SEQ ID NO: 1238654
aucugaauaaggcaccucc

SEQ ID NO: 1238656 - RNA, 19 nt, Artificial Sequence
  Description of Artificial Sequence: Synthetic oligonucleotide
  Sense strand starting at position 3191 of SEQ ID NO: 917501
caguuuauuugggccaagu

SEQ ID NO: 1238657 - RNA, 19 nt, Artificial Sequence
  Description of Artificial Sequence: Synthetic oligonucleotide
  Antisense strand to SEQ ID NO: 1238656
acuuggcccaaauaaacug

SEQ ID NO: 1238658 - RNA, 19 nt, Artificial Sequence
  Description of Artificial Sequence: Synthetic oligonucleotide
  Sense strand starting at position 3229 of SEQ ID NO: 917501
agaugcaaguugccuuaau

SEQ ID NO: 1238659 - RNA, 19 nt, Artificial Sequence
  Description of Artificial Sequence: Synthetic oligonucleotide
  Antisense strand to SEQ ID NO: 1238658
auuaaggcaacuugcaucu

SEQ ID NO: 1238660 - RNA, 19 nt, Artificial Sequence
  Description of Artificial Sequence: Synthetic oligonucleotide
  Sense strand starting at position 3230 of SEQ ID NO: 917501
gaugcaaguugccuuaaua

SEQ ID NO: 1238661 - RNA, 19 nt, Artificial Sequence
  Description of Artificial Sequence: Synthetic oligonucleotide
  Antisense strand to SEQ ID NO: 1238660
uauuaaggcaacuugcauc

SEQ ID NO: 1238662 - RNA, 19 nt, Artificial Sequence
  Description of Artificial Sequence: Synthetic oligonucleotide
  Sense strand starting at position 3413 of SEQ ID NO: 917501
uggccagaggaauguauau

SEQ ID NO: 1238663 - RNA, 19 nt, Artificial Sequence
  Description of Artificial Sequence: Synthetic oligonucleotide
  Antisense strand to SEQ ID NO: 1238662
auauacauuccucuggcca

SEQ ID NO: 1238664 - RNA, 19 nt, Artificial Sequence
  Description of Artificial Sequence: Synthetic oligonucleotide
  Sense strand starting at position 3444 of SEQ ID NO: 917501
agcuauuuauuggcucuau

SEQ ID NO: 1238665 - RNA, 19 nt, Artificial Sequence
  Description of Artificial Sequence: Synthetic oligonucleotide
  Antisense strand to SEQ ID NO: 1238664
auagagccaauaaauagcu

SEQ ID NO: 1238666 - RNA, 19 nt, Artificial Sequence
  Description of Artificial Sequence: Synthetic oligonucleotide
  Sense strand starting at position 3445 of SEQ ID NO: 917501
gcuauuuauuggcucuaua

SEQ ID NO: 1238667 - RNA, 19 nt, Artificial Sequence
  Description of Artificial Sequence: Synthetic oligonucleotide
  Antisense strand to SEQ ID NO: 1238666
uauagagccaauaaauagc

SEQ ID NO: 1238668 - RNA, 19 nt, Artificial Sequence
  Description of Artificial Sequence: Synthetic oligonucleotide
  Sense strand starting at position 3497 of SEQ ID NO: 917501
agauaaagcuagucaggaa

SEQ ID NO: 1238669 - RNA, 19 nt, Artificial Sequence
  Description of Artificial Sequence: Synthetic oligonucleotide
  Antisense strand to SEQ ID NO: 1238668
uuccugacuagcuuuaucu

SEQ ID NO: 1238670 - RNA, 19 nt, Artificial Sequence
  Description of Artificial Sequence: Synthetic oligonucleotide
  Sense strand starting at position 3544 of SEQ ID NO: 917501
auggguaugagguguguga

SEQ ID NO: 1238671 - RNA, 19 nt, Artificial Sequence
  Description of Artificial Sequence: Synthetic oligonucleotide
  Antisense strand to SEQ ID NO: 1238670
ucacacaccucauacccau

SEQ ID NO: 1238672 - RNA, 19 nt, Artificial Sequence
  Description of Artificial Sequence: Synthetic oligonucleotide
  Sense strand starting at position 3546 of SEQ ID NO: 917501
ggguaugaggugugugacu

SEQ ID NO: 1238673 - RNA, 19 nt, Artificial Sequence
  Description of Artificial Sequence: Synthetic oligonucleotide
  Antisense strand to SEQ ID NO: 1238672
agucacacaccucauaccc

SEQ ID NO: 1238674 - RNA, 19 nt, Artificial Sequence
  Description of Artificial Sequence: Synthetic oligonucleotide
  Sense strand starting at position 3548 of SEQ ID NO: 917501
guaugaggugugugacuga

SEQ ID NO: 1238675 - RNA, 19 nt, Artificial Sequence
  Description of Artificial Sequence: Synthetic oligonucleotide
  Antisense strand to SEQ ID NO: 1238674
ucagucacacaccucauac

SEQ ID NO: 1238676 - RNA, 19 nt, Artificial Sequence
  Description of Artificial Sequence: Synthetic oligonucleotide
  Sense strand starting at position 3551 of SEQ ID NO: 917501
ugaggugugugacugaagu

SEQ ID NO: 1238677 - RNA, 19 nt, Artificial Sequence
  Description of Artificial Sequence: Synthetic oligonucleotide
  Antisense strand to SEQ ID NO: 1238676
acuucagucacacaccuca

SEQ ID NO: 1238678 - RNA, 19 nt, Artificial Sequence
  Description of Artificial Sequence: Synthetic oligonucleotide
  Sense strand starting at position 3620 of SEQ ID NO: 917501
cucaaagugcuuugaacac

SEQ ID NO: 1238679 - RNA, 19 nt, Artificial Sequence
  Description of Artificial Sequence: Synthetic oligonucleotide
  Antisense strand to SEQ ID NO: 1238678
guguucaaagcacuuugag

SEQ ID NO: 1238680 - RNA, 19 nt, Artificial Sequence
  Description of Artificial Sequence: Synthetic oligonucleotide
  Sense strand starting at position 3675 of SEQ ID NO: 917501
guuuauggccaccaggaaa

SEQ ID NO: 1238681 - RNA, 19 nt, Artificial Sequence
  Description of Artificial Sequence: Synthetic oligonucleotide
  Antisense strand to SEQ ID NO: 1238680
uuuccugguggccauaaac

SEQ ID NO: 1238682 - RNA, 19 nt, Artificial Sequence
  Description of Artificial Sequence: Synthetic oligonucleotide
  Sense strand starting at position 3704 of SEQ ID NO: 917501
cagcccuguccugggaaga

SEQ ID NO: 1238683 - RNA, 19 nt, Artificial Sequence
  Description of Artificial Sequence: Synthetic oligonucleotide
  Antisense strand to SEQ ID NO: 1238682
ucuucccaggacagggcug

SEQ ID NO: 1238684 - RNA, 19 nt, Artificial Sequence
  Description of Artificial Sequence: Synthetic oligonucleotide
  Sense strand starting at position 3747 of SEQ ID NO: 917501
uuuggaggagucuggaaca

SEQ ID NO: 1238685 - RNA, 19 nt, Artificial Sequence
  Description of Artificial Sequence: Synthetic oligonucleotide
  Antisense strand to SEQ ID NO: 1238684
uguuccagacuccuccaaa

SEQ ID NO: 1238686 - RNA, 19 nt, Artificial Sequence
  Description of Artificial Sequence: Synthetic oligonucleotide
  Sense strand starting at position 3750 of SEQ ID NO: 917501
ggaggagucuggaacaguc

SEQ ID NO: 1238687 - RNA, 19 nt, Artificial Sequence
  Description of Artificial Sequence: Synthetic oligonucleotide
  Antisense strand to SEQ ID NO: 1238686
gacuguuccagacuccucc

SEQ ID NO: 1238688 - RNA, 19 nt, Artificial Sequence
  Description of Artificial Sequence: Synthetic oligonucleotide
  Sense strand starting at position 3758 of SEQ ID NO: 917501
cuggaacagucaccugauu

SEQ ID NO: 1238689 - RNA, 19 nt, Artificial Sequence
  Description of Artificial Sequence: Synthetic oligonucleotide
  Antisense strand to SEQ ID NO: 1238688
aaucaggugacuguuccag

SEQ ID NO: 1238690 - RNA, 19 nt, Artificial Sequence
  Description of Artificial Sequence: Synthetic oligonucleotide
  Sense strand starting at position 3763 of SEQ ID NO: 917501
acagucaccugauucuuau

SEQ ID NO: 1238691 - RNA, 19 nt, Artificial Sequence
  Description of Artificial Sequence: Synthetic oligonucleotide
  Antisense strand to SEQ ID NO: 1238690
auaagaaucaggugacugu

SEQ ID NO: 1238692 - RNA, 19 nt, Artificial Sequence
  Description of Artificial Sequence: Synthetic oligonucleotide
  Sense strand starting at position 3810 of SEQ ID NO: 917501
ggacacugguucucaccau

SEQ ID NO: 1238693 - RNA, 19 nt, Artificial Sequence
  Description of Artificial Sequence: Synthetic oligonucleotide
  Antisense strand to SEQ ID NO: 1238692
auggugagaaccagugucc

SEQ ID NO: 1238694 - RNA, 19 nt, Artificial Sequence
  Description of Artificial Sequence: Synthetic oligonucleotide
  Sense strand starting at position 3898 of SEQ ID NO: 917501
ggacuacaggcguguaauu

SEQ ID NO: 1238695 - RNA, 19 nt, Artificial Sequence
  Description of Artificial Sequence: Synthetic oligonucleotide
  Antisense strand to SEQ ID NO: 1238694
aauuacacgccuguagucc

SEQ ID NO: 1238696 - RNA, 19 nt, Artificial Sequence
  Description of Artificial Sequence: Synthetic oligonucleotide
  Sense strand starting at position 3909 of SEQ ID NO: 917501
guguaauucuucccaguuu

SEQ ID NO: 1238697 - RNA, 19 nt, Artificial Sequence
  Description of Artificial Sequence: Synthetic oligonucleotide
  Antisense strand to SEQ ID NO: 1238696
aaacugggaagaauuacac

SEQ ID NO: 1238698 - RNA, 19 nt, Artificial Sequence
  Description of Artificial Sequence: Synthetic oligonucleotide
  Sense strand starting at position 3921 of SEQ ID NO: 917501
ccaguuugauucuuccauu

SEQ ID NO: 1238699 - RNA, 19 nt, Artificial Sequence
  Description of Artificial Sequence: Synthetic oligonucleotide
  Antisense strand to SEQ ID NO: 1238698
aauggaagaaucaaacugg

SEQ ID NO: 1238700 - RNA, 19 nt, Artificial Sequence
  Description of Artificial Sequence: Synthetic oligonucleotide
  Sense strand starting at position 3924 of SEQ ID NO: 917501
guuugauucuuccauuucu

SEQ ID NO: 1238701 - RNA, 19 nt, Artificial Sequence
  Description of Artificial Sequence: Synthetic oligonucleotide
  Antisense strand to SEQ ID NO: 1238700
agaaauggaagaaucaaac

SEQ ID NO: 1238702 - RNA, 19 nt, Artificial Sequence
  Description of Artificial Sequence: Synthetic oligonucleotide
  Sense strand starting at position 3945 of SEQ ID NO: 917501
agaucaucuuaacagugua

SEQ ID NO: 1238703 - RNA, 19 nt, Artificial Sequence
  Description of Artificial Sequence: Synthetic oligonucleotide
  Antisense strand to SEQ ID NO: 1238702
uacacuguuaagaugaucu

SEQ ID NO: 1238704 - RNA, 19 nt, Artificial Sequence
  Description of Artificial Sequence: Synthetic oligonucleotide
  Sense strand starting at position 3948 of SEQ ID NO: 917502
ucaucuuaacaguguauau

SEQ ID NO: 1238705 - RNA, 19 nt, Artificial Sequence
  Description of Artificial Sequence: Synthetic oligonucleotide
  Antisense strand to SEQ ID NO: 1238704
auauacacuguuaagauga

SEQ ID NO: 1238706 - RNA, 19 nt, Artificial Sequence
  Description of Artificial Sequence: Synthetic oligonucleotide
  Sense strand starting at position 68 of SEQ ID NO: 917502
aaguucuuagguugagaaa

SEQ ID NO: 1238707 - RNA, 19 nt, Artificial Sequence
  Description of Artificial Sequence: Synthetic oligonucleotide
  Antisense strand to SEQ ID NO: 1238706
uuucucaaccuaagaacuu

SEQ ID NO: 1238708 - RNA, 19 nt, Artificial Sequence
  Description of Artificial Sequence: Synthetic oligonucleotide
  Sense strand starting at position 80 of SEQ ID NO: 917502
ugagaaauaucauucuagc

SEQ ID NO: 1238709 - RNA, 19 nt, Artificial Sequence
  Description of Artificial Sequence: Synthetic oligonucleotide
  Antisense strand to SEQ ID NO: 1238708
gcuagaaugauauuucuca

SEQ ID NO: 1238710 - RNA, 19 nt, Artificial Sequence
  Description of Artificial Sequence: Synthetic oligonucleotide
  Sense strand starting at position 91 of SEQ ID NO: 917502
auucuagcucaugaugaau

SEQ ID NO: 1238711 - RNA, 19 nt, Artificial Sequence
  Description of Artificial Sequence: Synthetic oligonucleotide
  Antisense strand to SEQ ID NO: 1238710
auucaucaugagcuagaau

SEQ ID NO: 1238712 - RNA, 19 nt, Artificial Sequence
  Description of Artificial Sequence: Synthetic oligonucleotide
  Sense strand starting at position 151 of SEQ ID NO: 917502
ugugguuuaucccuagaaa

SEQ ID NO: 1238713 - RNA, 19 nt, Artificial Sequence
  Description of Artificial Sequence: Synthetic oligonucleotide
  Antisense strand to SEQ ID NO: 1238712
uuucuagggauaaaccaca

SEQ ID NO: 1238714 - RNA, 19 nt, Artificial Sequence
  Description of Artificial Sequence: Synthetic oligonucleotide
  Sense strand starting at position 204 of SEQ ID NO: 917502
cugacauuaagguggguaa

SEQ ID NO: 1238715 - RNA, 19 nt, Artificial Sequence
  Description of Artificial Sequence: Synthetic oligonucleotide
  Antisense strand to SEQ ID NO: 1238714
uuacccaccuuaaugucag

SEQ ID NO: 1238716 - RNA, 19 nt, Artificial Sequence
  Description of Artificial Sequence: Synthetic oligonucleotide
  Sense strand starting at position 206 of SEQ ID NO: 917502
gacauuaagguggguaagu

SEQ ID NO: 1238717 - RNA, 19 nt, Artificial Sequence
  Description of Artificial Sequence: Synthetic oligonucleotide
  Antisense strand to SEQ ID NO: 1238716
acuuacccaccuuaauguc

SEQ ID NO: 1238718 - RNA, 19 nt, Artificial Sequence
  Description of Artificial Sequence: Synthetic oligonucleotide
  Sense strand starting at position 284 of SEQ ID NO: 917502
ggaaacucagucugcuaau

SEQ ID NO: 1238719 - RNA, 19 nt, Artificial Sequence
  Description of Artificial Sequence: Synthetic oligonucleotide
  Antisense strand to SEQ ID NO: 1238718
auuagcagacugaguuucc

SEQ ID NO: 1238720 - RNA, 19 nt, Artificial Sequence
  Description of Artificial Sequence: Synthetic oligonucleotide
  Sense strand starting at position 285 of SEQ ID NO: 917502
gaaacucagucugcuaaug

SEQ ID NO: 1238721 - RNA, 19 nt, Artificial Sequence
  Description of Artificial Sequence: Synthetic oligonucleotide
  Antisense strand to SEQ ID NO: 1238720
cauuagcagacugaguuuc

SEQ ID NO: 1238722 - RNA, 19 nt, Artificial Sequence
  Description of Artificial Sequence: Synthetic oligonucleotide
  Sense strand starting at position 503 of SEQ ID NO: 917502
aauuaacauggcugguuua

SEQ ID NO: 1238723 - RNA, 19 nt, Artificial Sequence
  Description of Artificial Sequence: Synthetic oligonucleotide
  Antisense strand to SEQ ID NO: 1238722
uaaaccagccauguuaauu

SEQ ID NO: 1238724 - RNA, 19 nt, Artificial Sequence
  Description of Artificial Sequence: Synthetic oligonucleotide
  Sense strand starting at position 506 of SEQ ID NO: 917502
uaacauggcugguuuauca

SEQ ID NO: 1238725 - RNA, 19 nt, Artificial Sequence
  Description of Artificial Sequence: Synthetic oligonucleotide
  Antisense strand to SEQ ID NO: 1238724
ugauaaaccagccauguua

SEQ ID NO: 1238726 - RNA, 19 nt, Artificial Sequence
  Description of Artificial Sequence: Synthetic oligonucleotide
  Sense strand starting at position 527 of SEQ ID NO: 917502
ugucucuuccaguagagug

SEQ ID NO: 1238727 - RNA, 19 nt, Artificial Sequence
  Description of Artificial Sequence: Synthetic oligonucleotide
  Antisense strand to SEQ ID NO: 1238726
cacucuacuggaagagaca

SEQ ID NO: 1238728 - RNA, 19 nt, Artificial Sequence
  Description of Artificial Sequence: Synthetic oligonucleotide
  Sense strand starting at position 549 of SEQ ID NO: 917502
gucagaucugugggaggaa

SEQ ID NO: 1238729 - RNA, 19 nt, Artificial Sequence
  Description of Artificial Sequence: Synthetic oligonucleotide
  Antisense strand to SEQ ID NO: 1238728
uuccucccacagaucugac

SEQ ID NO: 1238730 - RNA, 19 nt, Artificial Sequence
  Description of Artificial Sequence: Synthetic oligonucleotide
  Sense strand starting at position 561 of SEQ ID NO: 917502
ggaggaaugacuugugcau

SEQ ID NO: 1238731 - RNA, 19 nt, Artificial Sequence
  Description of Artificial Sequence: Synthetic oligonucleotide
  Antisense strand to SEQ ID NO: 1238730
augcacaagucauuccucc

SEQ ID NO: 1238732 - RNA, 19 nt, Artificial Sequence
  Description of Artificial Sequence: Synthetic oligonucleotide
  Sense strand starting at position 687 of SEQ ID NO: 917502
cagcaagaacugugugaag

SEQ ID NO: 1238733 - RNA, 19 nt, Artificial Sequence
  Description of Artificial Sequence: Synthetic oligonucleotide
  Antisense strand to SEQ ID NO: 1238732
cuucacacaguucuugcug

SEQ ID NO: 1238734 - RNA, 19 nt, Artificial Sequence
  Description of Artificial Sequence: Synthetic oligonucleotide
  Sense strand starting at position 782 of SEQ ID NO: 917502
aguaauugucaugaagcau

SEQ ID NO: 1238735 - RNA, 19 nt, Artificial Sequence
  Description of Artificial Sequence: Synthetic oligonucleotide
  Antisense strand to SEQ ID NO: 1238734
augcuucaugacaauuacu

SEQ ID NO: 1238736 - RNA, 19 nt, Artificial Sequence
  Description of Artificial Sequence: Synthetic oligonucleotide
  Sense strand starting at position 793 of SEQ ID NO: 917502
ugaagcaugaaaggucaaa

SEQ ID NO: 1238737 - RNA, 19 nt, Artificial Sequence
  Description of Artificial Sequence: Synthetic oligonucleotide
  Antisense strand to SEQ ID NO: 1238736
uuugaccuuucaugcuuca

SEQ ID NO: 1238738 - RNA, 19 nt, Artificial Sequence
  Description of Artificial Sequence: Synthetic oligonucleotide
  Sense strand starting at position 812 of SEQ ID NO: 917502
augcauucucaguacuuua

SEQ ID NO: 1238739 - RNA, 19 nt, Artificial Sequence
  Description of Artificial Sequence: Synthetic oligonucleotide
  Antisense strand to SEQ ID NO: 1238738
uaaaguacugagaaugcau

SEQ ID NO: 1238740 - RNA, 19 nt, Artificial Sequence
  Description of Artificial Sequence: Synthetic oligonucleotide
  Sense strand starting at position 1037 of SEQ ID NO: 917502
uuaccuaccguauaggauu

SEQ ID NO: 1238741 - RNA, 19 nt, Artificial Sequence
  Description of Artificial Sequence: Synthetic oligonucleotide
  Antisense strand to SEQ ID NO: 1238740
aauccuauacgguagguaa

SEQ ID NO: 1238742 - RNA, 19 nt, Artificial Sequence
  Description of Artificial Sequence: Synthetic oligonucleotide
  Sense strand starting at position 1072 of SEQ ID NO: 917502
aacaauauucgccauguga

SEQ ID NO: 1238743 - RNA, 19 nt, Artificial Sequence
  Description of Artificial Sequence: Synthetic oligonucleotide
  Antisense strand to SEQ ID NO: 1238742
ucacauggcgaauauuguu

SEQ ID NO: 1238744 - RNA, 19 nt, Artificial Sequence
  Description of Artificial Sequence: Synthetic oligonucleotide
  Sense strand starting at position 1085 of SEQ ID NO: 917502
augugaacuuucccagaau

SEQ ID NO: 1238745 - RNA, 19 nt, Artificial Sequence
  Description of Artificial Sequence: Synthetic oligonucleotide
  Antisense strand to SEQ ID NO: 1238744
auucugggaaaguucacau

SEQ ID NO: 1238746 - RNA, 19 nt, Artificial Sequence
  Description of Artificial Sequence: Synthetic oligonucleotide
  Sense strand starting at position 1197 of SEQ ID NO: 917502
uguuaaacuuuccuaacga

SEQ ID NO: 1238747 - RNA, 19 nt, Artificial Sequence
  Description of Artificial Sequence: Synthetic oligonucleotide
  Antisense strand to SEQ ID NO: 1238746
ucguuaggaaaguuuaaca

SEQ ID NO: 1238748 - RNA, 19 nt, Artificial Sequence
  Description of Artificial Sequence: Synthetic oligonucleotide
  Sense strand starting at position 2266 of SEQ ID NO: 917502
augaaagaagccuguuuaa

SEQ ID NO: 1238749 - RNA, 19 nt, Artificial Sequence
  Description of Artificial Sequence: Synthetic oligonucleotide
  Antisense strand to SEQ ID NO: 1238748
uuaaacaggcuucuuucau

SEQ ID NO: 1238750 - RNA, 19 nt, Artificial Sequence
  Description of Artificial Sequence: Synthetic oligonucleotide
  Sense strand starting at position 2548 of SEQ ID NO: 917502
aucguuaaagcuuacacau

SEQ ID NO: 1238751 - RNA, 19 nt, Artificial Sequence
  Description of Artificial Sequence: Synthetic oligonucleotide
  Antisense strand to SEQ ID NO: 1238750
auguguaagcuuuaacgau

SEQ ID NO: 1238752 - RNA, 19 nt, Artificial Sequence
  Description of Artificial Sequence: Synthetic oligonucleotide
  Sense strand starting at position 2779 of SEQ ID NO: 917502
acguuuguugucguucuga

SEQ ID NO: 1238753 - RNA, 19 nt, Artificial Sequence
  Description of Artificial Sequence: Synthetic oligonucleotide
  Antisense strand to SEQ ID NO: 1238752
ucagaacgacaacaaacgu

SEQ ID NO: 1238754 - RNA, 19 nt, Artificial Sequence
  Description of Artificial Sequence: Synthetic oligonucleotide
  Sense strand starting at position 2781 of SEQ ID NO: 917502
guuuguugucguucugacu

SEQ ID NO: 1238755 - RNA, 19 nt, Artificial Sequence
  Description of Artificial Sequence: Synthetic oligonucleotide
  Antisense strand to SEQ ID NO: 1238754
agucagaacgacaacaaac

SEQ ID NO: 1238756 - RNA, 19 nt, Artificial Sequence
  Description of Artificial Sequence: Synthetic oligonucleotide
  Sense strand starting at position 2994 of SEQ ID NO: 917502
ucaacacgaucaguuagua

SEQ ID NO: 1238757 - RNA, 19 nt, Artificial Sequence
  Description of Artificial Sequence: Synthetic oligonucleotide
  Antisense strand to SEQ ID NO: 1238756
uacuaacugaucguguuga

SEQ ID NO: 1238758 - RNA, 19 nt, Artificial Sequence
  Description of Artificial Sequence: Synthetic oligonucleotide
  Sense strand starting at position 3014 of SEQ ID NO: 917502
cuggcuucucaugaaguua

SEQ ID NO: 1238759 - RNA, 19 nt, Artificial Sequence
  Description of Artificial Sequence: Synthetic oligonucleotide
  Antisense strand to SEQ ID NO: 1238758
uaacuucaugagaagccag

SEQ ID NO: 1238760 - RNA, 19 nt, Artificial Sequence
  Description of Artificial Sequence: Synthetic oligonucleotide
  Sense strand starting at position 3049 of SEQ ID NO: 917502
cuacaauguccagauguca

SEQ ID NO: 1238761 - RNA, 19 nt, Artificial Sequence
  Description of Artificial Sequence: Synthetic oligonucleotide
  Antisense strand to SEQ ID NO: 1238760
ugacaucuggacauuguag

SEQ ID NO: 1238762 - RNA, 19 nt, Artificial Sequence
  Description of Artificial Sequence: Synthetic oligonucleotide
  Sense strand starting at position 3111 of SEQ ID NO: 917502
gcaugacugcaucaucuua

SEQ ID NO: 1238763 - RNA, 19 nt, Artificial Sequence
  Description of Artificial Sequence: Synthetic oligonucleotide
  Antisense strand to SEQ ID NO: 1238762
uaagaugaugcagucaugc

SEQ ID NO: 1238764 - RNA, 19 nt, Artificial Sequence
  Description of Artificial Sequence: Synthetic oligonucleotide
  Sense strand starting at position 3137 of SEQ ID NO: 917502
agcucucuccuaggacaga

SEQ ID NO: 1238765 - RNA, 19 nt, Artificial Sequence
  Description of Artificial Sequence: Synthetic oligonucleotide
  Antisense strand to SEQ ID NO: 1238764
ucuguccuaggagagagcu

SEQ ID NO: 1238766 - RNA, 19 nt, Artificial Sequence
  Description of Artificial Sequence: Synthetic oligonucleotide
  Sense strand starting at position 3171 of SEQ ID NO: 917502
cucacuaacgcugauguua

SEQ ID NO: 1238767 - RNA, 19 nt, Artificial Sequence
  Description of Artificial Sequence: Synthetic oligonucleotide
  Antisense strand to SEQ ID NO: 1238766
uaacaucagcguuagugag

SEQ ID NO: 1238768 - RNA, 19 nt, Artificial Sequence
  Description of Artificial Sequence: Synthetic oligonucleotide
  Sense strand starting at position 3180 of SEQ ID NO: 917502
gcugauguuauuugguuua

SEQ ID NO: 1238769 - RNA, 19 nt, Artificial Sequence
  Description of Artificial Sequence: Synthetic oligonucleotide
  Antisense strand to SEQ ID NO: 1238768
uaaaccaaauaacaucagc

SEQ ID NO: 1238770 - RNA, 19 nt, Artificial Sequence
  Description of Artificial Sequence: Synthetic oligonucleotide
  Sense strand starting at position 3221 of SEQ ID NO: 917502
gcagcuggaagguauuaca

SEQ ID NO: 1238771 - RNA, 19 nt, Artificial Sequence
  Description of Artificial Sequence: Synthetic oligonucleotide
  Antisense strand to SEQ ID NO: 1238770
uguaauaccuuccagcugc

SEQ ID NO: 1238772 - RNA, 19 nt, Artificial Sequence
  Description of Artificial Sequence: Synthetic oligonucleotide
  Sense strand starting at position 3229 of SEQ ID NO: 917502
aagguauuacacugguuau

SEQ ID NO: 1238773 - RNA, 19 nt, Artificial Sequence
  Description of Artificial Sequence: Synthetic oligonucleotide
  Antisense strand to SEQ ID NO: 1238772
auaaccaguguaauaccuu

SEQ ID NO: 1238774 - RNA, 19 nt, Artificial Sequence
  Description of Artificial Sequence: Synthetic oligonucleotide
  Sense strand starting at position 3230 of SEQ ID NO: 917502
agguauuacacugguuaug

SEQ ID NO: 1238775 - RNA, 19 nt, Artificial Sequence
  Description of Artificial Sequence: Synthetic oligonucleotide
  Antisense strand to SEQ ID NO: 1238774
cauaaccaguguaauaccu

SEQ ID NO: 1238776 - RNA, 19 nt, Artificial Sequence
  Description of Artificial Sequence: Synthetic oligonucleotide
  Sense strand starting at position 3282 of SEQ ID NO: 917502
cuugucuuccaggagcaau

SEQ ID NO: 1238777 - RNA, 19 nt, Artificial Sequence
  Description of Artificial Sequence: Synthetic oligonucleotide
  Antisense strand to SEQ ID NO: 1238776
auugcuccuggaagacaag

SEQ ID NO: 1238778 - RNA, 19 nt, Artificial Sequence
  Description of Artificial Sequence: Synthetic oligonucleotide
  Sense strand starting at position 3391 of SEQ ID NO: 917502
cuuauagaguagcucauaa

SEQ ID NO: 1238779 - RNA, 19 nt, Artificial Sequence
  Description of Artificial Sequence: Synthetic oligonucleotide
  Antisense strand to SEQ ID NO: 1238778
uuaugagcuacucuauaag

SEQ ID NO: 1238780 - RNA, 19 nt, Artificial Sequence
  Description of Artificial Sequence: Synthetic oligonucleotide
  Sense strand starting at position 3401 of SEQ ID NO: 917502
agcucauaacuuuggaaug

SEQ ID NO: 1238781 - RNA, 19 nt, Artificial Sequence
  Description of Artificial Sequence: Synthetic oligonucleotide
  Antisense strand to SEQ ID NO: 1238780
cauuccaaaguuaugagcu

SEQ ID NO: 1238782 - RNA, 19 nt, Artificial Sequence
  Description of Artificial Sequence: Synthetic oligonucleotide
  Sense strand starting at position 3573 of SEQ ID NO: 917502
ccaguuagcagguaguaua

SEQ ID NO: 1238783 - RNA, 19 nt, Artificial Sequence
  Description of Artificial Sequence: Synthetic oligonucleotide
  Antisense strand to SEQ ID NO: 1238782
uauacuaccugcuaacugg

SEQ ID NO: 1238784 - RNA, 19 nt, Artificial Sequence
  Description of Artificial Sequence: Synthetic oligonucleotide
  Sense strand starting at position 3747 of SEQ ID NO: 917502
ugauguacgguuugaccaa

SEQ ID NO: 1238785 - RNA, 19 nt, Artificial Sequence
  Description of Artificial Sequence: Synthetic oligonucleotide
  Antisense strand to SEQ ID NO: 1238784
uuggucaaaccguacauca

SEQ ID NO: 1238786 - RNA, 19 nt, Artificial Sequence
  Description of Artificial Sequence: Synthetic oligonucleotide
  Sense strand starting at position 3747 of SEQ ID NO: 917503
ugauguacgguuugaccaa

SEQ ID NO: 1238787 - RNA, 19 nt, Artificial Sequence
  Description of Artificial Sequence: Synthetic oligonucleotide
  Antisense strand to SEQ ID NO: 1238786
uuggucaaaccguacauca

SEQ ID NO: 1238788 - RNA, 19 nt, Artificial Sequence
  Description of Artificial Sequence: Synthetic oligonucleotide
  Sense strand starting at position 101 of SEQ ID NO: 917503
gaagauuacuuaguaguug

SEQ ID NO: 1238789 - RNA, 19 nt, Artificial Sequence
  Description of Artificial Sequence: Synthetic oligonucleotide
  Antisense strand to SEQ ID NO: 1238788
caacuacuaaguaaucuuc

SEQ ID NO: 1238790 - RNA, 19 nt, Artificial Sequence
  Description of Artificial Sequence: Synthetic oligonucleotide
  Sense strand starting at position 212 of SEQ ID NO: 917503
cugagaaguugagaaguga

SEQ ID NO: 1238791 - RNA, 19 nt, Artificial Sequence
  Description of Artificial Sequence: Synthetic oligonucleotide
  Antisense strand to SEQ ID NO: 1238790
ucacuucucaacuucucag

SEQ ID NO: 1238792 - RNA, 19 nt, Artificial Sequence
  Description of Artificial Sequence: Synthetic oligonucleotide
  Sense strand starting at position 655 of SEQ ID NO: 917503
ggaaaugucagauguuucu

SEQ ID NO: 1238793 - RNA, 19 nt, Artificial Sequence
  Description of Artificial Sequence: Synthetic oligonucleotide
  Antisense strand to SEQ ID NO: 1238792
agaaacaucugacauuucc

SEQ ID NO: 1238794 - RNA, 19 nt, Artificial Sequence
  Description of Artificial Sequence: Synthetic oligonucleotide
  Sense strand starting at position 775 of SEQ ID NO: 917503
cgcagucuaccuuaccgaa

SEQ ID NO: 1238795 - RNA, 19 nt, Artificial Sequence
  Description of Artificial Sequence: Synthetic oligonucleotide
  Antisense strand to SEQ ID NO: 1238794
uucgguaagguagacugcg

SEQ ID NO: 1238796 - RNA, 19 nt, Artificial Sequence
  Description of Artificial Sequence: Synthetic oligonucleotide
  Sense strand starting at position 822 of SEQ ID NO: 917503
gccguuuaacuggcuguaa

SEQ ID NO: 1238797 - RNA, 19 nt, Artificial Sequence
  Description of Artificial Sequence: Synthetic oligonucleotide
  Antisense strand to SEQ ID NO: 1238796
uuacagccaguuaaacggc

SEQ ID NO: 1238798 - RNA, 19 nt, Artificial Sequence
  Description of Artificial Sequence: Synthetic oligonucleotide
  Sense strand starting at position 823 of SEQ ID NO: 917503
ccguuuaacuggcuguaaa

SEQ ID NO: 1238799 - RNA, 19 nt, Artificial Sequence
  Description of Artificial Sequence: Synthetic oligonucleotide
  Antisense strand to SEQ ID NO: 1238798
uuuacagccaguuaaacgg

SEQ ID NO: 1238800 - RNA, 19 nt, Artificial Sequence
  Description of Artificial Sequence: Synthetic oligonucleotide
  Sense strand starting at position 2329 of SEQ ID NO: 917503
ugaaguuacucuuugccaa

SEQ ID NO: 1238801 - RNA, 19 nt, Artificial Sequence
  Description of Artificial Sequence: Synthetic oligonucleotide
  Antisense strand to SEQ ID NO: 1238800
uuggcaaagaguaacuuca

SEQ ID NO: 1238802 - RNA, 19 nt, Artificial Sequence
  Description of Artificial Sequence: Synthetic oligonucleotide
  Sense strand starting at position 2332 of SEQ ID NO: 917503
aguuacucuuugccaaagu

SEQ ID NO: 1238803 - RNA, 19 nt, Artificial Sequence
  Description of Artificial Sequence: Synthetic oligonucleotide
  Antisense strand to SEQ ID NO: 1238802
acuuuggcaaagaguaacu

SEQ ID NO: 1238804 - RNA, 19 nt, Artificial Sequence
  Description of Artificial Sequence: Synthetic oligonucleotide
  Sense strand starting at position 2359 of SEQ ID NO: 917503
uuaaaugugugagccugaa

SEQ ID NO: 1238805 - RNA, 19 nt, Artificial Sequence
  Description of Artificial Sequence: Synthetic oligonucleotide
  Antisense strand to SEQ ID NO: 1238804
uucaggcucacacauuuaa

SEQ ID NO: 1238806 - RNA, 19 nt, Artificial Sequence
  Description of Artificial Sequence: Synthetic oligonucleotide
  Sense strand starting at position 2415 of SEQ ID NO: 917503
aguugaucucgugaaagua

SEQ ID NO: 1238807 - RNA, 19 nt, Artificial Sequence
  Description of Artificial Sequence: Synthetic oligonucleotide
  Antisense strand to SEQ ID NO: 1238806
uacuuucacgagaucaacu

SEQ ID NO: 1238808 - RNA, 19 nt, Artificial Sequence
  Description of Artificial Sequence: Synthetic oligonucleotide
  Sense strand starting at position 2424 of SEQ ID NO: 917503
cgugaaaguagggaguaaa

SEQ ID NO: 1238809 - RNA, 19 nt, Artificial Sequence
  Description of Artificial Sequence: Synthetic oligonucleotide
  Antisense strand to SEQ ID NO: 1238808
uuuacucccuacuuucacg

SEQ ID NO: 1238810 - RNA, 19 nt, Artificial Sequence
  Description of Artificial Sequence: Synthetic oligonucleotide
  Sense strand starting at position 2449 of SEQ ID NO: 917503
guuauucuuguacagagga

SEQ ID NO: 1238811 - RNA, 19 nt, Artificial Sequence
  Description of Artificial Sequence: Synthetic oligonucleotide
  Antisense strand to SEQ ID NO: 1238810
uccucuguacaagaauaac

SEQ ID NO: 1238812 - RNA, 19 nt, Artificial Sequence
  Description of Artificial Sequence: Synthetic oligonucleotide
  Sense strand starting at position 2513 of SEQ ID NO: 917503
aaguuauaguuagaaggaa

SEQ ID NO: 1238813 - RNA, 19 nt, Artificial Sequence
  Description of Artificial Sequence: Synthetic oligonucleotide
  Antisense strand to SEQ ID NO: 1238812
uuccuucuaacuauaacuu

SEQ ID NO: 1238814 - RNA, 19 nt, Artificial Sequence
  Description of Artificial Sequence: Synthetic oligonucleotide
  Sense strand starting at position 2551 of SEQ ID NO: 917503
gcacguuuggaugacuaua

SEQ ID NO: 1238815 - RNA, 19 nt, Artificial Sequence
  Description of Artificial Sequence: Synthetic oligonucleotide
  Antisense strand to SEQ ID NO: 1238814
uauagucauccaaacgugc

SEQ ID NO: 1238816 - RNA, 19 nt, Artificial Sequence
  Description of Artificial Sequence: Synthetic oligonucleotide
  Sense strand starting at position 2559 of SEQ ID NO: 917503
ggaugacuauacucaacga

SEQ ID NO: 1238817 - RNA, 19 nt, Artificial Sequence
  Description of Artificial Sequence: Synthetic oligonucleotide
  Antisense strand to SEQ ID NO: 1238816
ucguugaguauagucaucc

SEQ ID NO: 1238818 - RNA, 19 nt, Artificial Sequence
  Description of Artificial Sequence: Synthetic oligonucleotide
  Sense strand starting at position 2670 of SEQ ID NO: 917503
cccugauuagaugguugca

SEQ ID NO: 1238819 - RNA, 19 nt, Artificial Sequence
  Description of Artificial Sequence: Synthetic oligonucleotide
  Antisense strand to SEQ ID NO: 1238818
ugcaaccaucuaaucaggg

SEQ ID NO: 1238820 - RNA, 19 nt, Artificial Sequence
  Description of Artificial Sequence: Synthetic oligonucleotide
  Sense strand starting at position 2672 of SEQ ID NO: 917503
cugauuagaugguugcaca

SEQ ID NO: 1238821 - RNA, 19 nt, Artificial Sequence
  Description of Artificial Sequence: Synthetic oligonucleotide
  Antisense strand to SEQ ID NO: 1238820
ugugcaaccaucuaaucag

SEQ ID NO: 1238822 - RNA, 19 nt, Artificial Sequence
  Description of Artificial Sequence: Synthetic oligonucleotide
  Sense strand starting at position 2673 of SEQ ID NO: 917503
ugauuagaugguugcacaa

SEQ ID NO: 1238823 - RNA, 19 nt, Artificial Sequence
  Description of Artificial Sequence: Synthetic oligonucleotide
  Antisense strand to SEQ ID NO: 1238822
uugugcaaccaucuaauca

SEQ ID NO: 1238824 - RNA, 19 nt, Artificial Sequence
  Description of Artificial Sequence: Synthetic oligonucleotide
  Sense strand starting at position 2682 of SEQ ID NO: 917503
gguugcacaauguguauau

SEQ ID NO: 1238825 - RNA, 19 nt, Artificial Sequence
  Description of Artificial Sequence: Synthetic oligonucleotide
  Antisense strand to SEQ ID NO: 1238824
auauacacauugugcaacc

SEQ ID NO: 1238826 - RNA, 19 nt, Artificial Sequence
  Description of Artificial Sequence: Synthetic oligonucleotide
  Sense strand starting at position 2732 of SEQ ID NO: 917503
acaugcaauuaugugagaa

SEQ ID NO: 1238827 - RNA, 19 nt, Artificial Sequence
  Description of Artificial Sequence: Synthetic oligonucleotide
  Antisense strand to SEQ ID NO: 1238826
uucucacauaauugcaugu

SEQ ID NO: 1238828 - RNA, 19 nt, Artificial Sequence
  Description of Artificial Sequence: Synthetic oligonucleotide
  Sense strand starting at position 2795 of SEQ ID NO: 917503
agggauaggcuauggagua

SEQ ID NO: 1238829 - RNA, 19 nt, Artificial Sequence
  Description of Artificial Sequence: Synthetic oligonucleotide
  Antisense strand to SEQ ID NO: 1238828
uacuccauagccuaucccu

SEQ ID NO: 1238830 - RNA, 19 nt, Artificial Sequence
  Description of Artificial Sequence: Synthetic oligonucleotide
  Sense strand starting at position 2857 of SEQ ID NO: 917503
gugugcuaaaucugugauu

SEQ ID NO: 1238831 - RNA, 19 nt, Artificial Sequence
  Description of Artificial Sequence: Synthetic oligonucleotide
  Antisense strand to SEQ ID NO: 1238830
aaucacagauuuagcacac

SEQ ID NO: 1238832 - RNA, 19 nt, Artificial Sequence
  Description of Artificial Sequence: Synthetic oligonucleotide
  Sense strand starting at position 2858 of SEQ ID NO: 917503
ugugcuaaaucugugauuc

SEQ ID NO: 1238833 - RNA, 19 nt, Artificial Sequence
  Description of Artificial Sequence: Synthetic oligonucleotide
  Antisense strand to SEQ ID NO: 1238832
gaaucacagauuuagcaca

SEQ ID NO: 1238834 - RNA, 19 nt, Artificial Sequence
  Description of Artificial Sequence: Synthetic oligonucleotide
  Sense strand starting at position 2859 of SEQ ID NO: 917503
gugcuaaaucugugauucg

SEQ ID NO: 1238835 - RNA, 19 nt, Artificial Sequence
  Description of Artificial Sequence: Synthetic oligonucleotide
  Antisense strand to SEQ ID NO: 1238834
cgaaucacagauuuagcac

SEQ ID NO: 1238836 - RNA, 19 nt, Artificial Sequence
  Description of Artificial Sequence: Synthetic oligonucleotide
  Sense strand starting at position 2862 of SEQ ID NO: 917503
cuaaaucugugauucguag

SEQ ID NO: 1238837 - RNA, 19 nt, Artificial Sequence
  Description of Artificial Sequence: Synthetic oligonucleotide
  Antisense strand to SEQ ID NO: 1238836
cuacgaaucacagauuuag

SEQ ID NO: 1238838 - RNA, 19 nt, Artificial Sequence
  Description of Artificial Sequence: Synthetic oligonucleotide
  Sense strand starting at position 2868 of SEQ ID NO: 917503
cugugauucguagaucaac

SEQ ID NO: 1238839 - RNA, 19 nt, Artificial Sequence
  Description of Artificial Sequence: Synthetic oligonucleotide
  Antisense strand to SEQ ID NO: 1238838
guugaucuacgaaucacag

SEQ ID NO: 1238840 - RNA, 19 nt, Artificial Sequence
  Description of Artificial Sequence: Synthetic oligonucleotide
  Sense strand starting at position 2871 of SEQ ID NO: 917503
ugauucguagaucaacaca

SEQ ID NO: 1238841 - RNA, 19 nt, Artificial Sequence
  Description of Artificial Sequence: Synthetic oligonucleotide
  Antisense strand to SEQ ID NO: 1238840
uguguugaucuacgaauca

SEQ ID NO: 1238842 - RNA, 19 nt, Artificial Sequence
  Description of Artificial Sequence: Synthetic oligonucleotide
  Sense strand starting at position 2927 of SEQ ID NO: 917503
uguuaacacugauuauaga

SEQ ID NO: 1238843 - RNA, 19 nt, Artificial Sequence
  Description of Artificial Sequence: Synthetic oligonucleotide
  Antisense strand to SEQ ID NO: 1238842
ucuauaaucaguguuaaca

SEQ ID NO: 1238844 - RNA, 19 nt, Artificial Sequence
  Description of Artificial Sequence: Synthetic oligonucleotide
  Sense strand starting at position 2975 of SEQ ID NO: 917503
uuaggcuuuauucguaaag

SEQ ID NO: 1238845 - RNA, 19 nt, Artificial Sequence
  Description of Artificial Sequence: Synthetic oligonucleotide
  Antisense strand to SEQ ID NO: 1238844
cuuuacgaauaaagccuaa

SEQ ID NO: 1238846 - RNA, 19 nt, Artificial Sequence
  Description of Artificial Sequence: Synthetic oligonucleotide
  Sense strand starting at position 2976 of SEQ ID NO: 917503
uaggcuuuauucguaaagu

SEQ ID NO: 1238847 - RNA, 19 nt, Artificial Sequence
  Description of Artificial Sequence: Synthetic oligonucleotide
  Antisense strand to SEQ ID NO: 1238846
acuuuacgaauaaagccua

SEQ ID NO: 1238848 - RNA, 19 nt, Artificial Sequence
  Description of Artificial Sequence: Synthetic oligonucleotide
  Sense strand starting at position 3384 of SEQ ID NO: 917503
gguccuuuauguuugcaga

SEQ ID NO: 1238849 - RNA, 19 nt, Artificial Sequence
  Description of Artificial Sequence: Synthetic oligonucleotide
  Antisense strand to SEQ ID NO: 1238848
ucugcaaacauaaaggacc

SEQ ID NO: 1238850 - RNA, 19 nt, Artificial Sequence
  Description of Artificial Sequence: Synthetic oligonucleotide
  Sense strand starting at position 3385 of SEQ ID NO: 917503
guccuuuauguuugcagaa

SEQ ID NO: 1238851 - RNA, 19 nt, Artificial Sequence
  Description of Artificial Sequence: Synthetic oligonucleotide
  Antisense strand to SEQ ID NO: 1238850
uucugcaaacauaaaggac

SEQ ID NO: 1238852 - RNA, 19 nt, Artificial Sequence
  Description of Artificial Sequence: Synthetic oligonucleotide
  Sense strand starting at position 3386 of SEQ ID NO: 917503
uccuuuauguuugcagaag

SEQ ID NO: 1238853 - RNA, 19 nt, Artificial Sequence
  Description of Artificial Sequence: Synthetic oligonucleotide
  Antisense strand to SEQ ID NO: 1238852
cuucugcaaacauaaagga

SEQ ID NO: 1238854 - RNA, 19 nt, Artificial Sequence
  Description of Artificial Sequence: Synthetic oligonucleotide
  Sense strand starting at position 3597 of SEQ ID NO: 917503
ccaguugaccgaugcauaa

SEQ ID NO: 1238855 - RNA, 19 nt, Artificial Sequence
  Description of Artificial Sequence: Synthetic oligonucleotide
  Antisense strand to SEQ ID NO: 1238854
uuaugcaucggucaacugg

SEQ ID NO: 1238856 - RNA, 19 nt, Artificial Sequence
  Description of Artificial Sequence: Synthetic oligonucleotide
  Sense strand starting at position 3620 of SEQ ID NO: 917503
augaaaucuuaugugggua

SEQ ID NO: 1238857 - RNA, 19 nt, Artificial Sequence
  Description of Artificial Sequence: Synthetic oligonucleotide
  Antisense strand to SEQ ID NO: 1238856
uacccacauaagauuucau

SEQ ID NO: 1238858 - RNA, 19 nt, Artificial Sequence
  Description of Artificial Sequence: Synthetic oligonucleotide
  Sense strand starting at position 3621 of SEQ ID NO: 917503
ugaaaucuuauguggguaa

SEQ ID NO: 1238859 - RNA, 19 nt, Artificial Sequence
  Description of Artificial Sequence: Synthetic oligonucleotide
  Antisense strand to SEQ ID NO: 1238858
uuacccacauaagauuuca

SEQ ID NO: 1238860 - RNA, 19 nt, Artificial Sequence
  Description of Artificial Sequence: Synthetic oligonucleotide
  Sense strand starting at position 3665 of SEQ ID NO: 917503
accaguaaacuuuagugua

SEQ ID NO: 1238861 - RNA, 19 nt, Artificial Sequence
  Description of Artificial Sequence: Synthetic oligonucleotide
  Antisense strand to SEQ ID NO: 1238860
uacacuaaaguuuacuggu

SEQ ID NO: 1238862 - RNA, 19 nt, Artificial Sequence
  Description of Artificial Sequence: Synthetic oligonucleotide
  Sense strand starting at position 3751 of SEQ ID NO: 917503
cuugcuaaguuaucguaua

SEQ ID NO: 1238863 - RNA, 19 nt, Artificial Sequence
  Description of Artificial Sequence: Synthetic oligonucleotide
  Antisense strand to SEQ ID NO: 1238862
uauacgauaacuuagcaag

SEQ ID NO: 1238864 - RNA, 19 nt, Artificial Sequence
  Description of Artificial Sequence: Synthetic oligonucleotide
  Sense strand starting at position 3756 of SEQ ID NO: 917503
uaaguuaucguauaguauc

SEQ ID NO: 1238865 - RNA, 19 nt, Artificial Sequence
  Description of Artificial Sequence: Synthetic oligonucleotide
  Antisense strand to SEQ ID NO: 1238864
gauacuauacgauaacuua

SEQ ID NO: 1238866 - RNA, 19 nt, Artificial Sequence
  Description of Artificial Sequence: Synthetic oligonucleotide
  Sense strand starting at position 3950 of SEQ ID NO: 917504
aagacauuugcccgccaga

SEQ ID NO: 1238867 - RNA, 19 nt, Artificial Sequence
  Description of Artificial Sequence: Synthetic oligonucleotide
  Antisense strand to SEQ ID NO: 1238866
ucuggcgggcaaaugucuu

SEQ ID NO: 1238868 - RNA, 19 nt, Artificial Sequence
  Description of Artificial Sequence: Synthetic oligonucleotide
  Sense strand starting at position 63 of SEQ ID NO: 917504
guucaucgcccagaggaga

SEQ ID NO: 1238869 - RNA, 19 nt, Artificial Sequence
  Description of Artificial Sequence: Synthetic oligonucleotide
  Antisense strand to SEQ ID NO: 1238868
ucuccucugggcgaugaac

SEQ ID NO: 1238870 - RNA, 19 nt, Artificial Sequence
  Description of Artificial Sequence: Synthetic oligonucleotide
  Sense strand starting at position 231 of SEQ ID NO: 917504
acaguuugguuccuagaau

SEQ ID NO: 1238871 - RNA, 19 nt, Artificial Sequence
  Description of Artificial Sequence: Synthetic oligonucleotide
  Antisense strand to SEQ ID NO: 1238870
auucuaggaaccaaacugu

SEQ ID NO: 1238872 - RNA, 19 nt, Artificial Sequence
  Description of Artificial Sequence: Synthetic oligonucleotide
  Sense strand starting at position 298 of SEQ ID NO: 917504
acaguugcccuguaucaaa

SEQ ID NO: 1238873 - RNA, 19 nt, Artificial Sequence
  Description of Artificial Sequence: Synthetic oligonucleotide
  Antisense strand to SEQ ID NO: 1238872
uuugauacagggcaacugu

SEQ ID NO: 1238874 - RNA, 19 nt, Artificial Sequence
  Description of Artificial Sequence: Synthetic oligonucleotide
  Sense strand starting at position 301 of SEQ ID NO: 917504
guugcccuguaucaaauuu

SEQ ID NO: 1238875 - RNA, 19 nt, Artificial Sequence
  Description of Artificial Sequence: Synthetic oligonucleotide
  Antisense strand to SEQ ID NO: 1238874
aaauuugauacagggcaac

SEQ ID NO: 1238876 - RNA, 19 nt, Artificial Sequence
  Description of Artificial Sequence: Synthetic oligonucleotide
  Sense strand starting at position 319 of SEQ ID NO: 917504
ugaauacacuuggccaaua

SEQ ID NO: 1238877 - RNA, 19 nt, Artificial Sequence
  Description of Artificial Sequence: Synthetic oligonucleotide
  Antisense strand to SEQ ID NO: 1238876
uauuggccaaguguauuca

SEQ ID NO: 1238878 - RNA, 19 nt, Artificial Sequence
  Description of Artificial Sequence: Synthetic oligonucleotide
  Sense strand starting at position 403 of SEQ ID NO: 917504
uacuuuggccagcaaggau

SEQ ID NO: 1238879 - RNA, 19 nt, Artificial Sequence
  Description of Artificial Sequence: Synthetic oligonucleotide
  Antisense strand to SEQ ID NO: 1238878
auccuugcuggccaaagua

SEQ ID NO: 1238880 - RNA, 19 nt, Artificial Sequence
  Description of Artificial Sequence: Synthetic oligonucleotide
  Sense strand starting at position 585 of SEQ ID NO: 917504
gaagauuacuuaguaguug

SEQ ID NO: 1238881 - RNA, 19 nt, Artificial Sequence
  Description of Artificial Sequence: Synthetic oligonucleotide
  Antisense strand to SEQ ID NO: 1238880
caacuacuaaguaaucuuc

SEQ ID NO: 1238882 - RNA, 19 nt, Artificial Sequence
  Description of Artificial Sequence: Synthetic oligonucleotide
  Sense strand starting at position 696 of SEQ ID NO: 917504
cugagaaguugagaaguga

SEQ ID NO: 1238883 - RNA, 19 nt, Artificial Sequence
  Description of Artificial Sequence: Synthetic oligonucleotide
  Antisense strand to SEQ ID NO: 1238882
ucacuucucaacuucucag

SEQ ID NO: 1238884 - RNA, 19 nt, Artificial Sequence
  Description of Artificial Sequence: Synthetic oligonucleotide
  Sense strand starting at position 732 of SEQ ID NO: 917504
gccuguggcgcugauacua

SEQ ID NO: 1238885 - RNA, 19 nt, Artificial Sequence
  Description of Artificial Sequence: Synthetic oligonucleotide
  Antisense strand to SEQ ID NO: 1238884
uaguaucagcgccacaggc

SEQ ID NO: 1238886 - RNA, 19 nt, Artificial Sequence
  Description of Artificial Sequence: Synthetic oligonucleotide
  Sense strand starting at position 1139 of SEQ ID NO: 917504
ggaaaugucagauguuucu

SEQ ID NO: 1238887 - RNA, 19 nt, Artificial Sequence
  Description of Artificial Sequence: Synthetic oligonucleotide
  Antisense strand to SEQ ID NO: 1238886
agaaacaucugacauuucc

SEQ ID NO: 1238888 - RNA, 19 nt, Artificial Sequence
  Description of Artificial Sequence: Synthetic oligonucleotide
  Sense strand starting at position 1259 of SEQ ID NO: 917504
cgcagucuaccuuaccgaa

SEQ ID NO: 1238889 - RNA, 19 nt, Artificial Sequence
  Description of Artificial Sequence: Synthetic oligonucleotide
  Antisense strand to SEQ ID NO: 1238888
uucgguaagguagacugcg

SEQ ID NO: 1238890 - RNA, 19 nt, Artificial Sequence
  Description of Artificial Sequence: Synthetic oligonucleotide
  Sense strand starting at position 1306 of SEQ ID NO: 917504
gccguuuaacuggcuguaa

SEQ ID NO: 1238891 - RNA, 19 nt, Artificial Sequence
  Description of Artificial Sequence: Synthetic oligonucleotide
  Antisense strand to SEQ ID NO: 1238890
uuacagccaguuaaacggc

SEQ ID NO: 1238892 - RNA, 19 nt, Artificial Sequence
  Description of Artificial Sequence: Synthetic oligonucleotide
  Sense strand starting at position 1307 of SEQ ID NO: 917504
ccguuuaacuggcuguaaa

SEQ ID NO: 1238893 - RNA, 19 nt, Artificial Sequence
  Description of Artificial Sequence: Synthetic oligonucleotide
  Antisense strand to SEQ ID NO: 1238892
uuuacagccaguuaaacgg

SEQ ID NO: 1238894 - RNA, 19 nt, Artificial Sequence
  Description of Artificial Sequence: Synthetic oligonucleotide
  Sense strand starting at position 2813 of SEQ ID NO: 917504
ugaaguuacucuuugccaa

SEQ ID NO: 1238895 - RNA, 19 nt, Artificial Sequence
  Description of Artificial Sequence: Synthetic oligonucleotide
  Antisense strand to SEQ ID NO: 1238894
uuggcaaagaguaacuuca

SEQ ID NO: 1238896 - RNA, 19 nt, Artificial Sequence
  Description of Artificial Sequence: Synthetic oligonucleotide
  Sense strand starting at position 2816 of SEQ ID NO: 917504
aguuacucuuugccaaagu

SEQ ID NO: 1238897 - RNA, 19 nt, Artificial Sequence
  Description of Artificial Sequence: Synthetic oligonucleotide
  Antisense strand to SEQ ID NO: 1238896
acuuuggcaaagaguaacu

SEQ ID NO: 1238898 - RNA, 19 nt, Artificial Sequence
  Description of Artificial Sequence: Synthetic oligonucleotide
  Sense strand starting at position 2843 of SEQ ID NO: 917504
uuaaaugugugagccugaa

SEQ ID NO: 1238899 - RNA, 19 nt, Artificial Sequence
  Description of Artificial Sequence: Synthetic oligonucleotide
  Antisense strand to SEQ ID NO: 1238898
uucaggcucacacauuuaa

SEQ ID NO: 1238900 - RNA, 19 nt, Artificial Sequence
  Description of Artificial Sequence: Synthetic oligonucleotide
  Sense strand starting at position 2899 of SEQ ID NO: 917504
aguugaucucgugaaagua

SEQ ID NO: 1238901 - RNA, 19 nt, Artificial Sequence
  Description of Artificial Sequence: Synthetic oligonucleotide
  Antisense strand to SEQ ID NO: 1238900
uacuuucacgagaucaacu

SEQ ID NO: 1238902 - RNA, 19 nt, Artificial Sequence
  Description of Artificial Sequence: Synthetic oligonucleotide
  Sense strand starting at position 2908 of SEQ ID NO: 917504
cgugaaaguagggaguaaa

SEQ ID NO: 1238903 - RNA, 19 nt, Artificial Sequence
  Description of Artificial Sequence: Synthetic oligonucleotide
  Antisense strand to SEQ ID NO: 1238902
uuuacucccuacuuucacg

SEQ ID NO: 1238904 - RNA, 19 nt, Artificial Sequence
  Description of Artificial Sequence: Synthetic oligonucleotide
  Sense strand starting at position 2933 of SEQ ID NO: 917504
guuauucuuguacagagga

SEQ ID NO: 1238905 - RNA, 19 nt, Artificial Sequence
  Description of Artificial Sequence: Synthetic oligonucleotide
  Antisense strand to SEQ ID NO: 1238904
uccucuguacaagaauaac

SEQ ID NO: 1238906 - RNA, 19 nt, Artificial Sequence
  Description of Artificial Sequence: Synthetic oligonucleotide
  Sense strand starting at position 2997 of SEQ ID NO: 917504
aaguuauaguuagaaggaa

SEQ ID NO: 1238907 - RNA, 19 nt, Artificial Sequence
  Description of Artificial Sequence: Synthetic oligonucleotide
  Antisense strand to SEQ ID NO: 1238906
uuccuucuaacuauaacuu

SEQ ID NO: 1238908 - RNA, 19 nt, Artificial Sequence
  Description of Artificial Sequence: Synthetic oligonucleotide
  Sense strand starting at position 3035 of SEQ ID NO: 917504
gcacguuuggaugacuaua

SEQ ID NO: 1238909 - RNA, 19 nt, Artificial Sequence
  Description of Artificial Sequence: Synthetic oligonucleotide
  Antisense strand to SEQ ID NO: 1238908
uauagucauccaaacgugc

SEQ ID NO: 1238910 - RNA, 19 nt, Artificial Sequence
  Description of Artificial Sequence: Synthetic oligonucleotide
  Sense strand starting at position 3043 of SEQ ID NO: 917504
ggaugacuauacucaacga

SEQ ID NO: 1238911 - RNA, 19 nt, Artificial Sequence
  Description of Artificial Sequence: Synthetic oligonucleotide
  Antisense strand to SEQ ID NO: 1238910
ucguugaguauagucaucc

SEQ ID NO: 1238912 - RNA, 19 nt, Artificial Sequence
  Description of Artificial Sequence: Synthetic oligonucleotide
  Sense strand starting at position 3154 of SEQ ID NO: 917504
cccugauuagaugguugca

SEQ ID NO: 1238913 - RNA, 19 nt, Artificial Sequence
  Description of Artificial Sequence: Synthetic oligonucleotide
  Antisense strand to SEQ ID NO: 1238912
ugcaaccaucuaaucaggg

SEQ ID NO: 1238914 - RNA, 19 nt, Artificial Sequence
  Description of Artificial Sequence: Synthetic oligonucleotide
  Sense strand starting at position 3156 of SEQ ID NO: 917504
cugauuagaugguugcaca

SEQ ID NO: 1238915 - RNA, 19 nt, Artificial Sequence
  Description of Artificial Sequence: Synthetic oligonucleotide
  Antisense strand to SEQ ID NO: 1238914
ugugcaaccaucuaaucag

SEQ ID NO: 1238916 - RNA, 19 nt, Artificial Sequence
  Description of Artificial Sequence: Synthetic oligonucleotide
  Sense strand starting at position 3157 of SEQ ID NO: 917504
ugauuagaugguugcacaa

SEQ ID NO: 1238917 - RNA, 19 nt, Artificial Sequence
  Description of Artificial Sequence: Synthetic oligonucleotide
  Antisense strand to SEQ ID NO: 1238916
uugugcaaccaucuaauca

SEQ ID NO: 1238918 - RNA, 19 nt, Artificial Sequence
  Description of Artificial Sequence: Synthetic oligonucleotide
  Sense strand starting at position 3166 of SEQ ID NO: 917504
gguugcacaauguguauau

SEQ ID NO: 1238919 - RNA, 19 nt, Artificial Sequence
  Description of Artificial Sequence: Synthetic oligonucleotide
  Antisense strand to SEQ ID NO: 1238918
auauacacauugugcaacc

SEQ ID NO: 1238920 - RNA, 19 nt, Artificial Sequence
  Description of Artificial Sequence: Synthetic oligonucleotide
  Sense strand starting at position 3216 of SEQ ID NO: 917504
acaugcaauuaugugagaa

SEQ ID NO: 1238921 - RNA, 19 nt, Artificial Sequence
  Description of Artificial Sequence: Synthetic oligonucleotide
  Antisense strand to SEQ ID NO: 1238920
uucucacauaauugcaugu

SEQ ID NO: 1238922 - RNA, 19 nt, Artificial Sequence
  Description of Artificial Sequence: Synthetic oligonucleotide
  Sense strand starting at position 3279 of SEQ ID NO: 917504
agggauaggcuauggagua

SEQ ID NO: 1238923 - RNA, 19 nt, Artificial Sequence
  Description of Artificial Sequence: Synthetic oligonucleotide
  Antisense strand to SEQ ID NO: 1238922
uacuccauagccuaucccu

SEQ ID NO: 1238924 - RNA, 19 nt, Artificial Sequence
  Description of Artificial Sequence: Synthetic oligonucleotide
  Sense strand starting at position 3341 of SEQ ID NO: 917504
gugugcuaaaucugugauu

SEQ ID NO: 1238925 - RNA, 19 nt, Artificial Sequence
  Description of Artificial Sequence: Synthetic oligonucleotide
  Antisense strand to SEQ ID NO: 1238924
aaucacagauuuagcacac

SEQ ID NO: 1238926 - RNA, 19 nt, Artificial Sequence
  Description of Artificial Sequence: Synthetic oligonucleotide
  Sense strand starting at position 3342 of SEQ ID NO: 917504
ugugcuaaaucugugauuc

SEQ ID NO: 1238927 - RNA, 19 nt, Artificial Sequence
  Description of Artificial Sequence: Synthetic oligonucleotide
  Antisense strand to SEQ ID NO: 1238926
gaaucacagauuuagcaca

SEQ ID NO: 1238928 - RNA, 19 nt, Artificial Sequence
  Description of Artificial Sequence: Synthetic oligonucleotide
  Sense strand starting at position 3343 of SEQ ID NO: 917504
gugcuaaaucugugauucg

SEQ ID NO: 1238929 - RNA, 19 nt, Artificial Sequence
  Description of Artificial Sequence: Synthetic oligonucleotide
  Antisense strand to SEQ ID NO: 1238928
cgaaucacagauuuagcac

SEQ ID NO: 1238930 - RNA, 19 nt, Artificial Sequence
  Description of Artificial Sequence: Synthetic oligonucleotide
  Sense strand starting at position 3346 of SEQ ID NO: 917504
cuaaaucugugauucguag

SEQ ID NO: 1238931 - RNA, 19 nt, Artificial Sequence
  Description of Artificial Sequence: Synthetic oligonucleotide
  Antisense strand to SEQ ID NO: 1238930
cuacgaaucacagauuuag

SEQ ID NO: 1238932 - RNA, 19 nt, Artificial Sequence
  Description of Artificial Sequence: Synthetic oligonucleotide
  Sense strand starting at position 3352 of SEQ ID NO: 917504
cugugauucguagaucaac

SEQ ID NO: 1238933 - RNA, 19 nt, Artificial Sequence
  Description of Artificial Sequence: Synthetic oligonucleotide
  Antisense strand to SEQ ID NO: 1238932
guugaucuacgaaucacag

SEQ ID NO: 1238934 - RNA, 19 nt, Artificial Sequence
  Description of Artificial Sequence: Synthetic oligonucleotide
  Sense strand starting at position 3355 of SEQ ID NO: 917504
ugauucguagaucaacaca

SEQ ID NO: 1238935 - RNA, 19 nt, Artificial Sequence
  Description of Artificial Sequence: Synthetic oligonucleotide
  Antisense strand to SEQ ID NO: 1238934
uguguugaucuacgaauca

SEQ ID NO: 1238936 - RNA, 19 nt, Artificial Sequence
  Description of Artificial Sequence: Synthetic oligonucleotide
  Sense strand starting at position 3411 of SEQ ID NO: 917504
uguuaacacugauuauaga

SEQ ID NO: 1238937 - RNA, 19 nt, Artificial Sequence
  Description of Artificial Sequence: Synthetic oligonucleotide
  Antisense strand to SEQ ID NO: 1238936
ucuauaaucaguguuaaca

SEQ ID NO: 1238938 - RNA, 19 nt, Artificial Sequence
  Description of Artificial Sequence: Synthetic oligonucleotide
  Sense strand starting at position 3459 of SEQ ID NO: 917504
uuaggcuuuauucguaaag

SEQ ID NO: 1238939 - RNA, 19 nt, Artificial Sequence
  Description of Artificial Sequence: Synthetic oligonucleotide
  Antisense strand to SEQ ID NO: 1238938
cuuuacgaauaaagccuaa

SEQ ID NO: 1238940 - RNA, 19 nt, Artificial Sequence
  Description of Artificial Sequence: Synthetic oligonucleotide
  Sense strand starting at position 3460 of SEQ ID NO: 917504
uaggcuuuauucguaaagu

SEQ ID NO: 1238941 - RNA, 19 nt, Artificial Sequence
  Description of Artificial Sequence: Synthetic oligonucleotide
  Antisense strand to SEQ ID NO: 1238940
acuuuacgaauaaagccua

SEQ ID NO: 1238942 - RNA, 19 nt, Artificial Sequence
  Description of Artificial Sequence: Synthetic oligonucleotide
  Sense strand starting at position 3868 of SEQ ID NO: 917504
gguccuuuauguuugcaga

SEQ ID NO: 1238943 - RNA, 19 nt, Artificial Sequence
  Description of Artificial Sequence: Synthetic oligonucleotide
  Antisense strand to SEQ ID NO: 1238942
ucugcaaacauaaaggacc

SEQ ID NO: 1238944 - RNA, 19 nt, Artificial Sequence
  Description of Artificial Sequence: Synthetic oligonucleotide
  Sense strand starting at position 3869 of SEQ ID NO: 917504
guccuuuauguuugcagaa

SEQ ID NO: 1238945 - RNA, 19 nt, Artificial Sequence
  Description of Artificial Sequence: Synthetic oligonucleotide
  Antisense strand to SEQ ID NO: 1238944
uucugcaaacauaaaggac

SEQ ID NO: 1238946 - RNA, 19 nt, Artificial Sequence
  Description of Artificial Sequence: Synthetic oligonucleotide
  Sense strand starting at position 3870 of SEQ ID NO: 917505
uccuuuauguuugcagaag

SEQ ID NO: 1238947 - RNA, 19 nt, Artificial Sequence
  Description of Artificial Sequence: Synthetic oligonucleotide
  Antisense strand to SEQ ID NO: 1238946
cuucugcaaacauaaagga

SEQ ID NO: 1238948 - RNA, 19 nt, Artificial Sequence
  Description of Artificial Sequence: Synthetic oligonucleotide
  Sense strand starting at position 128 of SEQ ID NO: 917505
cucaacacucagugaucga

SEQ ID NO: 1238949 - RNA, 19 nt, Artificial Sequence
  Description of Artificial Sequence: Synthetic oligonucleotide
  Antisense strand to SEQ ID NO: 1238948
ucgaucacugaguguugag

SEQ ID NO: 1238950 - RNA, 19 nt, Artificial Sequence
  Description of Artificial Sequence: Synthetic oligonucleotide
  Sense strand starting at position 139 of SEQ ID NO: 917505
gugaucgaggcucaauacu

SEQ ID NO: 1238951 - RNA, 19 nt, Artificial Sequence
  Description of Artificial Sequence: Synthetic oligonucleotide
  Antisense strand to SEQ ID NO: 1238950
aguauugagccucgaucac

SEQ ID NO: 1238952 - RNA, 19 nt, Artificial Sequence
  Description of Artificial Sequence: Synthetic oligonucleotide
  Sense strand starting at position 286 of SEQ ID NO: 917505
cuuuauauuucuguugcca

SEQ ID NO: 1238953 - RNA, 19 nt, Artificial Sequence
  Description of Artificial Sequence: Synthetic oligonucleotide
  Antisense strand to SEQ ID NO: 1238952
uggcaacagaaauauaaag

SEQ ID NO: 1238954 - RNA, 19 nt, Artificial Sequence
  Description of Artificial Sequence: Synthetic oligonucleotide
  Sense strand starting at position 294 of SEQ ID NO: 917505
uucuguugccauccguauu

SEQ ID NO: 1238955 - RNA, 19 nt, Artificial Sequence
  Description of Artificial Sequence: Synthetic oligonucleotide
  Antisense strand to SEQ ID NO: 1238954
aauacggauggcaacagaa

SEQ ID NO: 1238956 - RNA, 19 nt, Artificial Sequence
  Description of Artificial Sequence: Synthetic oligonucleotide
  Sense strand starting at position 762 of SEQ ID NO: 917505
cgucuuuccgauuaaauaa

SEQ ID NO: 1238957 - RNA, 19 nt, Artificial Sequence
  Description of Artificial Sequence: Synthetic oligonucleotide
  Antisense strand to SEQ ID NO: 1238956
uuauuuaaucggaaagacg

SEQ ID NO: 1238958 - RNA, 19 nt, Artificial Sequence
  Description of Artificial Sequence: Synthetic oligonucleotide
  Sense strand starting at position 792 of SEQ ID NO: 917505
acaauuaaaucagugucau

SEQ ID NO: 1238959 - RNA, 19 nt, Artificial Sequence
  Description of Artificial Sequence: Synthetic oligonucleotide
  Antisense strand to SEQ ID NO: 1238958
augacacugauuuaauugu

SEQ ID NO: 1238960 - RNA, 19 nt, Artificial Sequence
  Description of Artificial Sequence: Synthetic oligonucleotide
  Sense strand starting at position 872 of SEQ ID NO: 917505
cacccagauguuuacgaaa

SEQ ID NO: 1238961 - RNA, 19 nt, Artificial Sequence
  Description of Artificial Sequence: Synthetic oligonucleotide
  Antisense strand to SEQ ID NO: 1238960
uuucguaaacaucugggug

SEQ ID NO: 1238962 - RNA, 19 nt, Artificial Sequence
  Description of Artificial Sequence: Synthetic oligonucleotide
  Sense strand starting at position 1257 of SEQ ID NO: 917505
gagucaaguccucauuaag

SEQ ID NO: 1238963 - RNA, 19 nt, Artificial Sequence
  Description of Artificial Sequence: Synthetic oligonucleotide
  Antisense strand to SEQ ID NO: 1238962
cuuaaugaggacuugacuc

SEQ ID NO: 1238964 - RNA, 19 nt, Artificial Sequence
  Description of Artificial Sequence: Synthetic oligonucleotide
  Sense strand starting at position 1266 of SEQ ID NO: 917505
ccucauuaagcaggagaaa

SEQ ID NO: 1238965 - RNA, 19 nt, Artificial Sequence
  Description of Artificial Sequence: Synthetic oligonucleotide
  Antisense strand to SEQ ID NO: 1238964
uuucuccugcuuaaugagg

SEQ ID NO: 1238966 - RNA, 19 nt, Artificial Sequence
  Description of Artificial Sequence: Synthetic oligonucleotide
  Sense strand starting at position 1295 of SEQ ID NO: 917505
cguggauguacacagauaa

SEQ ID NO: 1238967 - RNA, 19 nt, Artificial Sequence
  Description of Artificial Sequence: Synthetic oligonucleotide
  Antisense strand to SEQ ID NO: 1238966
uuaucuguguacauccacg

SEQ ID NO: 1238968 - RNA, 19 nt, Artificial Sequence
  Description of Artificial Sequence: Synthetic oligonucleotide
  Sense strand starting at position 1306 of SEQ ID NO: 917505
acagauaacuauguagcua

SEQ ID NO: 1238969 - RNA, 19 nt, Artificial Sequence
  Description of Artificial Sequence: Synthetic oligonucleotide
  Antisense strand to SEQ ID NO: 1238968
uagcuacauaguuaucugu

SEQ ID NO: 1238970 - RNA, 19 nt, Artificial Sequence
  Description of Artificial Sequence: Synthetic oligonucleotide
  Sense strand starting at position 2215 of SEQ ID NO: 917505
gagugcugugaucaugaga

SEQ ID NO: 1238971 - RNA, 19 nt, Artificial Sequence
  Description of Artificial Sequence: Synthetic oligonucleotide
  Antisense strand to SEQ ID NO: 1238970
ucucaugaucacagcacuc

SEQ ID NO: 1238972 - RNA, 19 nt, Artificial Sequence
  Description of Artificial Sequence: Synthetic oligonucleotide
  Sense strand starting at position 2218 of SEQ ID NO: 917505
ugcugugaucaugagaauu

SEQ ID NO: 1238973 - RNA, 19 nt, Artificial Sequence
  Description of Artificial Sequence: Synthetic oligonucleotide
  Antisense strand to SEQ ID NO: 1238972
aauucucaugaucacagca

SEQ ID NO: 1238974 - RNA, 19 nt, Artificial Sequence
  Description of Artificial Sequence: Synthetic oligonucleotide
  Sense strand starting at position 2474 of SEQ ID NO: 917505
ggaucucauuaagcaguga

SEQ ID NO: 1238975 - RNA, 19 nt, Artificial Sequence
  Description of Artificial Sequence: Synthetic oligonucleotide
  Antisense strand to SEQ ID NO: 1238974
ucacugcuuaaugagaucc

SEQ ID NO: 1238976 - RNA, 19 nt, Artificial Sequence
  Description of Artificial Sequence: Synthetic oligonucleotide
  Sense strand starting at position 2478 of SEQ ID NO: 917505
cucauuaagcagugagaau

SEQ ID NO: 1238977 - RNA, 19 nt, Artificial Sequence
  Description of Artificial Sequence: Synthetic oligonucleotide
  Antisense strand to SEQ ID NO: 1238976
auucucacugcuuaaugag

SEQ ID NO: 1238978 - RNA, 19 nt, Artificial Sequence
  Description of Artificial Sequence: Synthetic oligonucleotide
  Sense strand starting at position 2489 of SEQ ID NO: 917505
gugagaauauuugaacaug

SEQ ID NO: 1238979 - RNA, 19 nt, Artificial Sequence
  Description of Artificial Sequence: Synthetic oligonucleotide
  Antisense strand to SEQ ID NO: 1238978
cauguucaaauauucucac

SEQ ID NO: 1238980 - RNA, 19 nt, Artificial Sequence
  Description of Artificial Sequence: Synthetic oligonucleotide
  Sense strand starting at position 2501 of SEQ ID NO: 917505
gaacauguguuuccuugaa

SEQ ID NO: 1238981 - RNA, 19 nt, Artificial Sequence
  Description of Artificial Sequence: Synthetic oligonucleotide
  Antisense strand to SEQ ID NO: 1238980
uucaaggaaacacauguuc

SEQ ID NO: 1238982 - RNA, 19 nt, Artificial Sequence
  Description of Artificial Sequence: Synthetic oligonucleotide
  Sense strand starting at position 2505 of SEQ ID NO: 917505
auguguuuccuugaagacc

SEQ ID NO: 1238983 - RNA, 19 nt, Artificial Sequence
  Description of Artificial Sequence: Synthetic oligonucleotide
  Antisense strand to SEQ ID NO: 1238982
ggucuucaaggaaacacau

SEQ ID NO: 1238984 - RNA, 19 nt, Artificial Sequence
  Description of Artificial Sequence: Synthetic oligonucleotide
  Sense strand starting at position 2578 of SEQ ID NO: 917505
acaacaguguuauuauauc

SEQ ID NO: 1238985 - RNA, 19 nt, Artificial Sequence
  Description of Artificial Sequence: Synthetic oligonucleotide
  Antisense strand to SEQ ID NO: 1238984
gauauaauaacacuguugu

SEQ ID NO: 1238986 - RNA, 19 nt, Artificial Sequence
  Description of Artificial Sequence: Synthetic oligonucleotide
  Sense strand starting at position 2735 of SEQ ID NO: 917505
aaauaaugccauuguugag

SEQ ID NO: 1238987 - RNA, 19 nt, Artificial Sequence
  Description of Artificial Sequence: Synthetic oligonucleotide
  Antisense strand to SEQ ID NO: 1238986
cucaacaauggcauuauuu

SEQ ID NO: 1238988 - RNA, 19 nt, Artificial Sequence
  Description of Artificial Sequence: Synthetic oligonucleotide
  Sense strand starting at position 2764 of SEQ ID NO: 917505
gauggacauuugugauuuc

SEQ ID NO: 1238989 - RNA, 19 nt, Artificial Sequence
  Description of Artificial Sequence: Synthetic oligonucleotide
  Antisense strand to SEQ ID NO: 1238988
gaaaucacaaauguccauc

SEQ ID NO: 1238990 - RNA, 19 nt, Artificial Sequence
  Description of Artificial Sequence: Synthetic oligonucleotide
  Sense strand starting at position 2832 of SEQ ID NO: 917505
cucuuaguccuuugacaga

SEQ ID NO: 1238991 - RNA, 19 nt, Artificial Sequence
  Description of Artificial Sequence: Synthetic oligonucleotide
  Antisense strand to SEQ ID NO: 1238990
ucugucaaaggacuaagag

SEQ ID NO: 1238992 - RNA, 19 nt, Artificial Sequence
  Description of Artificial Sequence: Synthetic oligonucleotide
  Sense strand starting at position 2843 of SEQ ID NO: 917505
uugacagaguacuuuagaa

SEQ ID NO: 1238993 - RNA, 19 nt, Artificial Sequence
  Description of Artificial Sequence: Synthetic oligonucleotide
  Antisense strand to SEQ ID NO: 1238992
uucuaaaguacucugucaa

SEQ ID NO: 1238994 - RNA, 19 nt, Artificial Sequence
  Description of Artificial Sequence: Synthetic oligonucleotide
  Sense strand starting at position 2991 of SEQ ID NO: 917505
gguaguuaugaggaugagu

SEQ ID NO: 1238995 - RNA, 19 nt, Artificial Sequence
  Description of Artificial Sequence: Synthetic oligonucleotide
  Antisense strand to SEQ ID NO: 1238994
acucauccucauaacuacc

SEQ ID NO: 1238996 - RNA, 19 nt, Artificial Sequence
  Description of Artificial Sequence: Synthetic oligonucleotide
  Sense strand starting at position 2993 of SEQ ID NO: 917505
uaguuaugaggaugaguuc

SEQ ID NO: 1238997 - RNA, 19 nt, Artificial Sequence
  Description of Artificial Sequence: Synthetic oligonucleotide
  Antisense strand to SEQ ID NO: 1238996
gaacucauccucauaacua

SEQ ID NO: 1238998 - RNA, 19 nt, Artificial Sequence
  Description of Artificial Sequence: Synthetic oligonucleotide
  Sense strand starting at position 2999 of SEQ ID NO: 917505
ugaggaugaguucaugcau

SEQ ID NO: 1238999 - RNA, 19 nt, Artificial Sequence
  Description of Artificial Sequence: Synthetic oligonucleotide
  Antisense strand to SEQ ID NO: 1238998
augcaugaacucauccuca

SEQ ID NO: 1239000 - RNA, 19 nt, Artificial Sequence
  Description of Artificial Sequence: Synthetic oligonucleotide
  Sense strand starting at position 3005 of SEQ ID NO: 917505
ugaguucaugcaugggaaa

SEQ ID NO: 1239001 - RNA, 19 nt, Artificial Sequence
  Description of Artificial Sequence: Synthetic oligonucleotide
  Antisense strand to SEQ ID NO: 1239000
uuucccaugcaugaacuca

SEQ ID NO: 1239002 - RNA, 19 nt, Artificial Sequence
  Description of Artificial Sequence: Synthetic oligonucleotide
  Sense strand starting at position 3205 of SEQ ID NO: 917505
auuacauccuugucuauag

SEQ ID NO: 1239003 - RNA, 19 nt, Artificial Sequence
  Description of Artificial Sequence: Synthetic oligonucleotide
  Antisense strand to SEQ ID NO: 1239002
cuauagacaaggauguaau

SEQ ID NO: 1239004 - RNA, 19 nt, Artificial Sequence
  Description of Artificial Sequence: Synthetic oligonucleotide
  Sense strand starting at position 3262 of SEQ ID NO: 917505
gggagcucauugucuagaa

SEQ ID NO: 1239005 - RNA, 19 nt, Artificial Sequence
  Description of Artificial Sequence: Synthetic oligonucleotide
  Antisense strand to SEQ ID NO: 1239004
uucuagacaaugagcuccc

SEQ ID NO: 1239006 - RNA, 19 nt, Artificial Sequence
  Description of Artificial Sequence: Synthetic oligonucleotide
  Sense strand starting at position 3263 of SEQ ID NO: 917505
ggagcucauugucuagaag

SEQ ID NO: 1239007 - RNA, 19 nt, Artificial Sequence
  Description of Artificial Sequence: Synthetic oligonucleotide
  Antisense strand to SEQ ID NO: 1239006
cuucuagacaaugagcucc

SEQ ID NO: 1239008 - RNA, 19 nt, Artificial Sequence
  Description of Artificial Sequence: Synthetic oligonucleotide
  Sense strand starting at position 3368 of SEQ ID NO: 917505
guagccuggguggagaaau

SEQ ID NO: 1239009 - RNA, 19 nt, Artificial Sequence
  Description of Artificial Sequence: Synthetic oligonucleotide
  Antisense strand to SEQ ID NO: 1239008
auuucuccacccaggcuac

SEQ ID NO: 1239010 - RNA, 19 nt, Artificial Sequence
  Description of Artificial Sequence: Synthetic oligonucleotide
  Sense strand starting at position 3405 of SEQ ID NO: 917505
ccuauaucacccugaggaa

SEQ ID NO: 1239011 - RNA, 19 nt, Artificial Sequence
  Description of Artificial Sequence: Synthetic oligonucleotide
  Antisense strand to SEQ ID NO: 1239010
uuccucagggugauauagg

SEQ ID NO: 1239012 - RNA, 19 nt, Artificial Sequence
  Description of Artificial Sequence: Synthetic oligonucleotide
  Sense strand starting at position 3484 of SEQ ID NO: 917505
gugauuaggcuucaggacu

SEQ ID NO: 1239013 - RNA, 19 nt, Artificial Sequence
  Description of Artificial Sequence: Synthetic oligonucleotide
  Antisense strand to SEQ ID NO: 1239012
aguccugaagccuaaucac

SEQ ID NO: 1239014 - RNA, 19 nt, Artificial Sequence
  Description of Artificial Sequence: Synthetic oligonucleotide
  Sense strand starting at position 3495 of SEQ ID NO: 917505
ucaggacuuugucuagaua

SEQ ID NO: 1239015 - RNA, 19 nt, Artificial Sequence
  Description of Artificial Sequence: Synthetic oligonucleotide
  Antisense strand to SEQ ID NO: 1239014
uaucuagacaaaguccuga

SEQ ID NO: 1239016 - RNA, 19 nt, Artificial Sequence
  Description of Artificial Sequence: Synthetic oligonucleotide
  Sense strand starting at position 3521 of SEQ ID NO: 917505
guccauaguuacgugauuu

SEQ ID NO: 1239017 - RNA, 19 nt, Artificial Sequence
  Description of Artificial Sequence: Synthetic oligonucleotide
  Antisense strand to SEQ ID NO: 1239016
aaaucacguaacuauggac

SEQ ID NO: 1239018 - RNA, 19 nt, Artificial Sequence
  Description of Artificial Sequence: Synthetic oligonucleotide
  Sense strand starting at position 3556 of SEQ ID NO: 917505
cuugguugcucauuugcaa

SEQ ID NO: 1239019 - RNA, 19 nt, Artificial Sequence
  Description of Artificial Sequence: Synthetic oligonucleotide
  Antisense strand to SEQ ID NO: 1239018
uugcaaaugagcaaccaag

SEQ ID NO: 1239020 - RNA, 19 nt, Artificial Sequence
  Description of Artificial Sequence: Synthetic oligonucleotide
  Sense strand starting at position 3563 of SEQ ID NO: 917505
gcucauuugcaauguuuag

SEQ ID NO: 1239021 - RNA, 19 nt, Artificial Sequence
  Description of Artificial Sequence: Synthetic oligonucleotide
  Antisense strand to SEQ ID NO: 1239020
cuaaacauugcaaaugagc

SEQ ID NO: 1239022 - RNA, 19 nt, Artificial Sequence
  Description of Artificial Sequence: Synthetic oligonucleotide
  Sense strand starting at position 3818 of SEQ ID NO: 917505
gcaagaguugcuguuugcu

SEQ ID NO: 1239023 - RNA, 19 nt, Artificial Sequence
  Description of Artificial Sequence: Synthetic oligonucleotide
  Antisense strand to SEQ ID NO: 1239022
agcaaacagcaacucuugc

SEQ ID NO: 1239024 - RNA, 19 nt, Artificial Sequence
  Description of Artificial Sequence: Synthetic oligonucleotide
  Sense strand starting at position 3881 of SEQ ID NO: 917505
agucgcuguguuuccaauu

SEQ ID NO: 1239025 - RNA, 19 nt, Artificial Sequence
  Description of Artificial Sequence: Synthetic oligonucleotide
  Antisense strand to SEQ ID NO: 1239024
aauuggaaacacagcgacu

SEQ ID NO: 1239026 - RNA, 19 nt, Artificial Sequence
  Description of Artificial Sequence: Synthetic oligonucleotide
  Sense strand starting at position 3962 of SEQ ID NO: 917506
uuguuaaggcaugagguaa

SEQ ID NO: 1239027 - RNA, 19 nt, Artificial Sequence
  Description of Artificial Sequence: Synthetic oligonucleotide
  Antisense strand to SEQ ID NO: 1239026
uuaccucaugccuuaacaa

SEQ ID NO: 1239028 - RNA, 19 nt, Artificial Sequence
  Description of Artificial Sequence: Synthetic oligonucleotide
  Sense strand starting at position 164 of SEQ ID NO: 917506
ccgggauuacaggagugua

SEQ ID NO: 1239029 - RNA, 19 nt, Artificial Sequence
  Description of Artificial Sequence: Synthetic oligonucleotide
  Antisense strand to SEQ ID NO: 1239028
uacacuccuguaaucccgg

SEQ ID NO: 1239030 - RNA, 19 nt, Artificial Sequence
  Description of Artificial Sequence: Synthetic oligonucleotide
  Sense strand starting at position 582 of SEQ ID NO: 917506
ugucucuuuguccagggaa

SEQ ID NO: 1239031 - RNA, 19 nt, Artificial Sequence
  Description of Artificial Sequence: Synthetic oligonucleotide
  Antisense strand to SEQ ID NO: 1239030
uucccuggacaaagagaca

SEQ ID NO: 1239032 - RNA, 19 nt, Artificial Sequence
  Description of Artificial Sequence: Synthetic oligonucleotide
  Sense strand starting at position 653 of SEQ ID NO: 917506
uuguuccuuggugaugaga

SEQ ID NO: 1239033 - RNA, 19 nt, Artificial Sequence
  Description of Artificial Sequence: Synthetic oligonucleotide
  Antisense strand to SEQ ID NO: 1239032
ucucaucaccaaggaacaa

SEQ ID NO: 1239034 - RNA, 19 nt, Artificial Sequence
  Description of Artificial Sequence: Synthetic oligonucleotide
  Sense strand starting at position 673 of SEQ ID NO: 917506
ggaagauaguggagguaaa

SEQ ID NO: 1239035 - RNA, 19 nt, Artificial Sequence
  Description of Artificial Sequence: Synthetic oligonucleotide
  Antisense strand to SEQ ID NO: 1239034
uuuaccuccacuaucuucc

SEQ ID NO: 1239036 - RNA, 19 nt, Artificial Sequence
  Description of Artificial Sequence: Synthetic oligonucleotide
  Sense strand starting at position 886 of SEQ ID NO: 917506
cuuaaauugcuauagauug

SEQ ID NO: 1239037 - RNA, 19 nt, Artificial Sequence
  Description of Artificial Sequence: Synthetic oligonucleotide
  Antisense strand to SEQ ID NO: 1239036
caaucuauagcaauuuaag

SEQ ID NO: 1239038 - RNA, 19 nt, Artificial Sequence
  Description of Artificial Sequence: Synthetic oligonucleotide
  Sense strand starting at position 906 of SEQ ID NO: 917506
aaagaauggcgugggaacu

SEQ ID NO: 1239039 - RNA, 19 nt, Artificial Sequence
  Description of Artificial Sequence: Synthetic oligonucleotide
  Antisense strand to SEQ ID NO: 1239038
aguucccacgccauucuuu

SEQ ID NO: 1239040 - RNA, 19 nt, Artificial Sequence
  Description of Artificial Sequence: Synthetic oligonucleotide
  Sense strand starting at position 912 of SEQ ID NO: 917506
uggcgugggaacuauuaaa

SEQ ID NO: 1239041 - RNA, 19 nt, Artificial Sequence
  Description of Artificial Sequence: Synthetic oligonucleotide
  Antisense strand to SEQ ID NO: 1239040
uuuaauaguucccacgcca

SEQ ID NO: 1239042 - RNA, 19 nt, Artificial Sequence
  Description of Artificial Sequence: Synthetic oligonucleotide
  Sense strand starting at position 1039 of SEQ ID NO: 917506
ggaagaugauuucauagug

SEQ ID NO: 1239043 - RNA, 19 nt, Artificial Sequence
  Description of Artificial Sequence: Synthetic oligonucleotide
  Antisense strand to SEQ ID NO: 1239042
cacuaugaaaucaucuucc

SEQ ID NO: 1239044 - RNA, 19 nt, Artificial Sequence
  Description of Artificial Sequence: Synthetic oligonucleotide
  Sense strand starting at position 1112 of SEQ ID NO: 917506
ucaggaagugugggcaaau

SEQ ID NO: 1239045 - RNA, 19 nt, Artificial Sequence
  Description of Artificial Sequence: Synthetic oligonucleotide
  Antisense strand to SEQ ID NO: 1239044
auuugcccacacuuccuga

SEQ ID NO: 1239046 - RNA, 19 nt, Artificial Sequence
  Description of Artificial Sequence: Synthetic oligonucleotide
  Sense strand starting at position 1113 of SEQ ID NO: 917506
caggaagugugggcaaauu

SEQ ID NO: 1239047 - RNA, 19 nt, Artificial Sequence
  Description of Artificial Sequence: Synthetic oligonucleotide
  Antisense strand to SEQ ID NO: 1239046
aauuugcccacacuuccug

SEQ ID NO: 1239048 - RNA, 19 nt, Artificial Sequence
  Description of Artificial Sequence: Synthetic oligonucleotide
  Sense strand starting at position 1122 of SEQ ID NO: 917506
ugggcaaauuagucaucca

SEQ ID NO: 1239049 - RNA, 19 nt, Artificial Sequence
  Description of Artificial Sequence: Synthetic oligonucleotide
  Antisense strand to SEQ ID NO: 1239048
uggaugacuaauuugccca

SEQ ID NO: 1239050 - RNA, 19 nt, Artificial Sequence
  Description of Artificial Sequence: Synthetic oligonucleotide
  Sense strand starting at position 1493 of SEQ ID NO: 917506
ccugguuggugaccugaaa

SEQ ID NO: 1239051 - RNA, 19 nt, Artificial Sequence
  Description of Artificial Sequence: Synthetic oligonucleotide
  Antisense strand to SEQ ID NO: 1239050
uuucaggucaccaaccagg

SEQ ID NO: 1239052 - RNA, 19 nt, Artificial Sequence
  Description of Artificial Sequence: Synthetic oligonucleotide
  Sense strand starting at position 2264 of SEQ ID NO: 917506
ugucgaguacuagaaauca

SEQ ID NO: 1239053 - RNA, 19 nt, Artificial Sequence
  Description of Artificial Sequence: Synthetic oligonucleotide
  Antisense strand to SEQ ID NO: 1239052
ugauuucuaguacucgaca

SEQ ID NO: 1239054 - RNA, 19 nt, Artificial Sequence
  Description of Artificial Sequence: Synthetic oligonucleotide
  Sense strand starting at position 2372 of SEQ ID NO: 917506
cuauaugauagugauggca

SEQ ID NO: 1239055 - RNA, 19 nt, Artificial Sequence
  Description of Artificial Sequence: Synthetic oligonucleotide
  Antisense strand to SEQ ID NO: 1239054
ugccaucacuaucauauag

SEQ ID NO: 1239056 - RNA, 19 nt, Artificial Sequence
  Description of Artificial Sequence: Synthetic oligonucleotide
  Sense strand starting at position 2375 of SEQ ID NO: 917506
uaugauagugauggcauga

SEQ ID NO: 1239057 - RNA, 19 nt, Artificial Sequence
  Description of Artificial Sequence: Synthetic oligonucleotide
  Antisense strand to SEQ ID NO: 1239056
ucaugccaucacuaucaua

SEQ ID NO: 1239058 - RNA, 19 nt, Artificial Sequence
  Description of Artificial Sequence: Synthetic oligonucleotide
  Sense strand starting at position 2380 of SEQ ID NO: 917506
uagugauggcaugaagugu

SEQ ID NO: 1239059 - RNA, 19 nt, Artificial Sequence
  Description of Artificial Sequence: Synthetic oligonucleotide
  Antisense strand to SEQ ID NO: 1239058
acacuucaugccaucacua

SEQ ID NO: 1239060 - RNA, 19 nt, Artificial Sequence
  Description of Artificial Sequence: Synthetic oligonucleotide
  Sense strand starting at position 2391 of SEQ ID NO: 917506
ugaagugugcuggaauuac

SEQ ID NO: 1239061 - RNA, 19 nt, Artificial Sequence
  Description of Artificial Sequence: Synthetic oligonucleotide
  Antisense strand to SEQ ID NO: 1239060
guaauuccagcacacuuca

SEQ ID NO: 1239062 - RNA, 19 nt, Artificial Sequence
  Description of Artificial Sequence: Synthetic oligonucleotide
  Sense strand starting at position 2482 of SEQ ID NO: 917506
gguagacuuuaccuaggca

SEQ ID NO: 1239063 - RNA, 19 nt, Artificial Sequence
  Description of Artificial Sequence: Synthetic oligonucleotide
  Antisense strand to SEQ ID NO: 1239062
ugccuagguaaagucuacc

SEQ ID NO: 1239064 - RNA, 19 nt, Artificial Sequence
  Description of Artificial Sequence: Synthetic oligonucleotide
  Sense strand starting at position 2486 of SEQ ID NO: 917506
gacuuuaccuaggcagaga

SEQ ID NO: 1239065 - RNA, 19 nt, Artificial Sequence
  Description of Artificial Sequence: Synthetic oligonucleotide
  Antisense strand to SEQ ID NO: 1239064
ucucugccuagguaaaguc

SEQ ID NO: 1239066 - RNA, 19 nt, Artificial Sequence
  Description of Artificial Sequence: Synthetic oligonucleotide
  Sense strand starting at position 2566 of SEQ ID NO: 917506
ggugaugcuguagagguaa

SEQ ID NO: 1239067 - RNA, 19 nt, Artificial Sequence
  Description of Artificial Sequence: Synthetic oligonucleotide
  Antisense strand to SEQ ID NO: 1239066
uuaccucuacagcaucacc

SEQ ID NO: 1239068 - RNA, 19 nt, Artificial Sequence
  Description of Artificial Sequence: Synthetic oligonucleotide
  Sense strand starting at position 2777 of SEQ ID NO: 917506
ucgguaaacaucugaagaa

SEQ ID NO: 1239069 - RNA, 19 nt, Artificial Sequence
  Description of Artificial Sequence: Synthetic oligonucleotide
  Antisense strand to SEQ ID NO: 1239068
uucuucagauguuuaccga

SEQ ID NO: 1239070 - RNA, 19 nt, Artificial Sequence
  Description of Artificial Sequence: Synthetic oligonucleotide
  Sense strand starting at position 2816 of SEQ ID NO: 917506
gcagaaacaucacuuguca

SEQ ID NO: 1239071 - RNA, 19 nt, Artificial Sequence
  Description of Artificial Sequence: Synthetic oligonucleotide
  Antisense strand to SEQ ID NO: 1239070
ugacaagugauguuucugc

SEQ ID NO: 1239072 - RNA, 19 nt, Artificial Sequence
  Description of Artificial Sequence: Synthetic oligonucleotide
  Sense strand starting at position 2851 of SEQ ID NO: 917506
gugagaaauaaaugcugaa

SEQ ID NO: 1239073 - RNA, 19 nt, Artificial Sequence
  Description of Artificial Sequence: Synthetic oligonucleotide
  Antisense strand to SEQ ID NO: 1239072
uucagcauuuauuucucac

SEQ ID NO: 1239074 - RNA, 19 nt, Artificial Sequence
  Description of Artificial Sequence: Synthetic oligonucleotide
  Sense strand starting at position 2878 of SEQ ID NO: 917506
aacaguagccacggagaaa

SEQ ID NO: 1239075 - RNA, 19 nt, Artificial Sequence
  Description of Artificial Sequence: Synthetic oligonucleotide
  Antisense strand to SEQ ID NO: 1239074
uuucuccguggcuacuguu

SEQ ID NO: 1239076 - RNA, 19 nt, Artificial Sequence
  Description of Artificial Sequence: Synthetic oligonucleotide
  Sense strand starting at position 2923 of SEQ ID NO: 917506
aagggaugaugccuuugau

SEQ ID NO: 1239077 - RNA, 19 nt, Artificial Sequence
  Description of Artificial Sequence: Synthetic oligonucleotide
  Antisense strand to SEQ ID NO: 1239076
aucaaaggcaucaucccuu

SEQ ID NO: 1239078 - RNA, 19 nt, Artificial Sequence
  Description of Artificial Sequence: Synthetic oligonucleotide
  Sense strand starting at position 2926 of SEQ ID NO: 917506
ggaugaugccuuugaugag

SEQ ID NO: 1239079 - RNA, 19 nt, Artificial Sequence
  Description of Artificial Sequence: Synthetic oligonucleotide
  Antisense strand to SEQ ID NO: 1239078
cucaucaaaggcaucaucc

SEQ ID NO: 1239080 - RNA, 19 nt, Artificial Sequence
  Description of Artificial Sequence: Synthetic oligonucleotide
  Sense strand starting at position 2930 of SEQ ID NO: 917506
gaugccuuugaugagcaga

SEQ ID NO: 1239081 - RNA, 19 nt, Artificial Sequence
  Description of Artificial Sequence: Synthetic oligonucleotide
  Antisense strand to SEQ ID NO: 1239080
ucugcucaucaaaggcauc

SEQ ID NO: 1239082 - RNA, 19 nt, Artificial Sequence
  Description of Artificial Sequence: Synthetic oligonucleotide
  Sense strand starting at position 2933 of SEQ ID NO: 917506
gccuuugaugagcagaagu

SEQ ID NO: 1239083 - RNA, 19 nt, Artificial Sequence
  Description of Artificial Sequence: Synthetic oligonucleotide
  Antisense strand to SEQ ID NO: 1239082
acuucugcucaucaaaggc

SEQ ID NO: 1239084 - RNA, 19 nt, Artificial Sequence
  Description of Artificial Sequence: Synthetic oligonucleotide
  Sense strand starting at position 2935 of SEQ ID NO: 917506
cuuugaugagcagaaguua

SEQ ID NO: 1239085 - RNA, 19 nt, Artificial Sequence
  Description of Artificial Sequence: Synthetic oligonucleotide
  Antisense strand to SEQ ID NO: 1239084
uaacuucugcucaucaaag

SEQ ID NO: 1239086 - RNA, 19 nt, Artificial Sequence
  Description of Artificial Sequence: Synthetic oligonucleotide
  Sense strand starting at position 3236 of SEQ ID NO: 917506
gcucgugaugggcuuaguu

SEQ ID NO: 1239087 - RNA, 19 nt, Artificial Sequence
  Description of Artificial Sequence: Synthetic oligonucleotide
  Antisense strand to SEQ ID NO: 1239086
aacuaagcccaucacgagc

SEQ ID NO: 1239088 - RNA, 19 nt, Artificial Sequence
  Description of Artificial Sequence: Synthetic oligonucleotide
  Sense strand starting at position 3253 of SEQ ID NO: 917506
uugcauuaucacuagaguu

SEQ ID NO: 1239089 - RNA, 19 nt, Artificial Sequence
  Description of Artificial Sequence: Synthetic oligonucleotide
  Antisense strand to SEQ ID NO: 1239088
aacucuagugauaaugcaa

SEQ ID NO: 1239090 - RNA, 19 nt, Artificial Sequence
  Description of Artificial Sequence: Synthetic oligonucleotide
  Sense strand starting at position 3255 of SEQ ID NO: 917506
gcauuaucacuagaguuac

SEQ ID NO: 1239091 - RNA, 19 nt, Artificial Sequence
  Description of Artificial Sequence: Synthetic oligonucleotide
  Antisense strand to SEQ ID NO: 1239090
guaacucuagugauaaugc

SEQ ID NO: 1239092 - RNA, 19 nt, Artificial Sequence
  Description of Artificial Sequence: Synthetic oligonucleotide
  Sense strand starting at position 3269 of SEQ ID NO: 917506
guuacauugccagacucuu

SEQ ID NO: 1239093 - RNA, 19 nt, Artificial Sequence
  Description of Artificial Sequence: Synthetic oligonucleotide
  Antisense strand to SEQ ID NO: 1239092
aagagucuggcaauguaac

SEQ ID NO: 1239094 - RNA, 19 nt, Artificial Sequence
  Description of Artificial Sequence: Synthetic oligonucleotide
  Sense strand starting at position 3425 of SEQ ID NO: 917506
uuuaucuuccagggacacu

SEQ ID NO: 1239095 - RNA, 19 nt, Artificial Sequence
  Description of Artificial Sequence: Synthetic oligonucleotide
  Antisense strand to SEQ ID NO: 1239094
agugucccuggaagauaaa

SEQ ID NO: 1239096 - RNA, 19 nt, Artificial Sequence
  Description of Artificial Sequence: Synthetic oligonucleotide
  Sense strand starting at position 3447 of SEQ ID NO: 917506
agcauuggaucugcugaga

SEQ ID NO: 1239097 - RNA, 19 nt, Artificial Sequence
  Description of Artificial Sequence: Synthetic oligonucleotide
  Antisense strand to SEQ ID NO: 1239096
ucucagcagauccaaugcu

SEQ ID NO: 1239098 - RNA, 19 nt, Artificial Sequence
  Description of Artificial Sequence: Synthetic oligonucleotide
  Sense strand starting at position 3589 of SEQ ID NO: 917506
uucccaaguguauauucua

SEQ ID NO: 1239099 - RNA, 19 nt, Artificial Sequence
  Description of Artificial Sequence: Synthetic oligonucleotide
  Antisense strand to SEQ ID NO: 1239098
uagaauauacacuugggaa

SEQ ID NO: 1239100 - RNA, 19 nt, Artificial Sequence
  Description of Artificial Sequence: Synthetic oligonucleotide
  Sense strand starting at position 3653 of SEQ ID NO: 917506
gugaauaggaauugcaaga

SEQ ID NO: 1239101 - RNA, 19 nt, Artificial Sequence
  Description of Artificial Sequence: Synthetic oligonucleotide
  Antisense strand to SEQ ID NO: 1239100
ucuugcaauuccuauucac

SEQ ID NO: 1239102 - RNA, 19 nt, Artificial Sequence
  Description of Artificial Sequence: Synthetic oligonucleotide
  Sense strand starting at position 3802 of SEQ ID NO: 917506
guuuauaugguuuauacag

SEQ ID NO: 1239103 - RNA, 19 nt, Artificial Sequence
  Description of Artificial Sequence: Synthetic oligonucleotide
  Antisense strand to SEQ ID NO: 1239102
cuguauaaaccauauaaac

SEQ ID NO: 1239104 - RNA, 19 nt, Artificial Sequence
  Description of Artificial Sequence: Synthetic oligonucleotide
  Sense strand starting at position 3811 of SEQ ID NO: 917506
guuuauacaguuuaaccua

SEQ ID NO: 1239105 - RNA, 19 nt, Artificial Sequence
  Description of Artificial Sequence: Synthetic oligonucleotide
  Antisense strand to SEQ ID NO: 1239104
uagguuaaacuguauaaac

SEQ ID NO: 1239106 - RNA, 19 nt, Artificial Sequence
  Description of Artificial Sequence: Synthetic oligonucleotide
  Sense strand starting at position 3836 of SEQ ID NO: 917507
cugguauggauguaccuau

SEQ ID NO: 1239107 - RNA, 19 nt, Artificial Sequence
  Description of Artificial Sequence: Synthetic oligonucleotide
  Antisense strand to SEQ ID NO: 1239106
auagguacauccauaccag

SEQ ID NO: 1239108 - RNA, 19 nt, Artificial Sequence
  Description of Artificial Sequence: Synthetic oligonucleotide
  Sense strand starting at position 7 of SEQ ID NO: 917507
acacaaacuuaguuuguua

SEQ ID NO: 1239109 - RNA, 19 nt, Artificial Sequence
  Description of Artificial Sequence: Synthetic oligonucleotide
  Antisense strand to SEQ ID NO: 1239108
uaacaaacuaaguuugugu

SEQ ID NO: 1239110 - RNA, 19 nt, Artificial Sequence
  Description of Artificial Sequence: Synthetic oligonucleotide
  Sense strand starting at position 120 of SEQ ID NO: 917507
aggauaaacugcucuuggu

SEQ ID NO: 1239111 - RNA, 19 nt, Artificial Sequence
  Description of Artificial Sequence: Synthetic oligonucleotide
  Antisense strand to SEQ ID NO: 1239110
accaagagcaguuuauccu

SEQ ID NO: 1239112 - RNA, 19 nt, Artificial Sequence
  Description of Artificial Sequence: Synthetic oligonucleotide
  Sense strand starting at position 245 of SEQ ID NO: 917507
auaugaauugucuaguuug

SEQ ID NO: 1239113 - RNA, 19 nt, Artificial Sequence
  Description of Artificial Sequence: Synthetic oligonucleotide
  Antisense strand to SEQ ID NO: 1239112
caaacuagacaauucauau

SEQ ID NO: 1239114 - RNA, 19 nt, Artificial Sequence
  Description of Artificial Sequence: Synthetic oligonucleotide
  Sense strand starting at position 434 of SEQ ID NO: 917507
ccgggauuacaggagugua

SEQ ID NO: 1239115 - RNA, 19 nt, Artificial Sequence
  Description of Artificial Sequence: Synthetic oligonucleotide
  Antisense strand to SEQ ID NO: 1239114
uacacuccuguaaucccgg

SEQ ID NO: 1239116 - RNA, 19 nt, Artificial Sequence
  Description of Artificial Sequence: Synthetic oligonucleotide
  Sense strand starting at position 852 of SEQ ID NO: 917507
ugucucuuuguccagggaa

SEQ ID NO: 1239117 - RNA, 19 nt, Artificial Sequence
  Description of Artificial Sequence: Synthetic oligonucleotide
  Antisense strand to SEQ ID NO: 1239116
uucccuggacaaagagaca

SEQ ID NO: 1239118 - RNA, 19 nt, Artificial Sequence
  Description of Artificial Sequence: Synthetic oligonucleotide
  Sense strand starting at position 923 of SEQ ID NO: 917507
uuguuccuuggugaugaga

SEQ ID NO: 1239119 - RNA, 19 nt, Artificial Sequence
  Description of Artificial Sequence: Synthetic oligonucleotide
  Antisense strand to SEQ ID NO: 1239118
ucucaucaccaaggaacaa

SEQ ID NO: 1239120 - RNA, 19 nt, Artificial Sequence
  Description of Artificial Sequence: Synthetic oligonucleotide
  Sense strand starting at position 943 of SEQ ID NO: 917507
ggaagauaguggagguaaa

SEQ ID NO: 1239121 - RNA, 19 nt, Artificial Sequence
  Description of Artificial Sequence: Synthetic oligonucleotide
  Antisense strand to SEQ ID NO: 1239120
uuuaccuccacuaucuucc

SEQ ID NO: 1239122 - RNA, 19 nt, Artificial Sequence
  Description of Artificial Sequence: Synthetic oligonucleotide
  Sense strand starting at position 1156 of SEQ ID NO: 917507
cuuaaauugcuauagauug

SEQ ID NO: 1239123 - RNA, 19 nt, Artificial Sequence
  Description of Artificial Sequence: Synthetic oligonucleotide
  Antisense strand to SEQ ID NO: 1239122
caaucuauagcaauuuaag

SEQ ID NO: 1239124 - RNA, 19 nt, Artificial Sequence
  Description of Artificial Sequence: Synthetic oligonucleotide
  Sense strand starting at position 1176 of SEQ ID NO: 917507
aaagaauggcgugggaacu

SEQ ID NO: 1239125 - RNA, 19 nt, Artificial Sequence
  Description of Artificial Sequence: Synthetic oligonucleotide
  Antisense strand to SEQ ID NO: 1239124
aguucccacgccauucuuu

SEQ ID NO: 1239126 - RNA, 19 nt, Artificial Sequence
  Description of Artificial Sequence: Synthetic oligonucleotide
  Sense strand starting at position 1182 of SEQ ID NO: 917507
uggcgugggaacuauuaaa

SEQ ID NO: 1239127 - RNA, 19 nt, Artificial Sequence
  Description of Artificial Sequence: Synthetic oligonucleotide
  Antisense strand to SEQ ID NO: 1239126
uuuaauaguucccacgcca

SEQ ID NO: 1239128 - RNA, 19 nt, Artificial Sequence
  Description of Artificial Sequence: Synthetic oligonucleotide
  Sense strand starting at position 1309 of SEQ ID NO: 917507
ggaagaugauuucauagug

SEQ ID NO: 1239129 - RNA, 19 nt, Artificial Sequence
  Description of Artificial Sequence: Synthetic oligonucleotide
  Antisense strand to SEQ ID NO: 1239128
cacuaugaaaucaucuucc

SEQ ID NO: 1239130 - RNA, 19 nt, Artificial Sequence
  Description of Artificial Sequence: Synthetic oligonucleotide
  Sense strand starting at position 1382 of SEQ ID NO: 917507
ucaggaagugugggcaaau

SEQ ID NO: 1239131 - RNA, 19 nt, Artificial Sequence
  Description of Artificial Sequence: Synthetic oligonucleotide
  Antisense strand to SEQ ID NO: 1239130
auuugcccacacuuccuga

SEQ ID NO: 1239132 - RNA, 19 nt, Artificial Sequence
  Description of Artificial Sequence: Synthetic oligonucleotide
  Sense strand starting at position 1383 of SEQ ID NO: 917507
caggaagugugggcaaauu

SEQ ID NO: 1239133 - RNA, 19 nt, Artificial Sequence
  Description of Artificial Sequence: Synthetic oligonucleotide
  Antisense strand to SEQ ID NO: 1239132
aauuugcccacacuuccug

SEQ ID NO: 1239134 - RNA, 19 nt, Artificial Sequence
  Description of Artificial Sequence: Synthetic oligonucleotide
  Sense strand starting at position 1392 of SEQ ID NO: 917507
ugggcaaauuagucaucca

SEQ ID NO: 1239135 - RNA, 19 nt, Artificial Sequence
  Description of Artificial Sequence: Synthetic oligonucleotide
  Antisense strand to SEQ ID NO: 1239134
uggaugacuaauuugccca

SEQ ID NO: 1239136 - RNA, 19 nt, Artificial Sequence
  Description of Artificial Sequence: Synthetic oligonucleotide
  Sense strand starting at position 1763 of SEQ ID NO: 917507
ccugguuggugaccugaaa

SEQ ID NO: 1239137 - RNA, 19 nt, Artificial Sequence
  Description of Artificial Sequence: Synthetic oligonucleotide
  Antisense strand to SEQ ID NO: 1239136
uuucaggucaccaaccagg

SEQ ID NO: 1239138 - RNA, 19 nt, Artificial Sequence
  Description of Artificial Sequence: Synthetic oligonucleotide
  Sense strand starting at position 2534 of SEQ ID NO: 917507
ugucgaguacuagaaauca

SEQ ID NO: 1239139 - RNA, 19 nt, Artificial Sequence
  Description of Artificial Sequence: Synthetic oligonucleotide
  Antisense strand to SEQ ID NO: 1239138
ugauuucuaguacucgaca

SEQ ID NO: 1239140 - RNA, 19 nt, Artificial Sequence
  Description of Artificial Sequence: Synthetic oligonucleotide
  Sense strand starting at position 2642 of SEQ ID NO: 917507
cuauaugauagugauggca

SEQ ID NO: 1239141 - RNA, 19 nt, Artificial Sequence
  Description of Artificial Sequence: Synthetic oligonucleotide
  Antisense strand to SEQ ID NO: 1239140
ugccaucacuaucauauag

SEQ ID NO: 1239142 - RNA, 19 nt, Artificial Sequence
  Description of Artificial Sequence: Synthetic oligonucleotide
  Sense strand starting at position 2645 of SEQ ID NO: 917507
uaugauagugauggcauga

SEQ ID NO: 1239143 - RNA, 19 nt, Artificial Sequence
  Description of Artificial Sequence: Synthetic oligonucleotide
  Antisense strand to SEQ ID NO: 1239142
ucaugccaucacuaucaua

SEQ ID NO: 1239144 - RNA, 19 nt, Artificial Sequence
  Description of Artificial Sequence: Synthetic oligonucleotide
  Sense strand starting at position 2650 of SEQ ID NO: 917507
uagugauggcaugaagugu

SEQ ID NO: 1239145 - RNA, 19 nt, Artificial Sequence
  Description of Artificial Sequence: Synthetic oligonucleotide
  Antisense strand to SEQ ID NO: 1239144
acacuucaugccaucacua

SEQ ID NO: 1239146 - RNA, 19 nt, Artificial Sequence
  Description of Artificial Sequence: Synthetic oligonucleotide
  Sense strand starting at position 2661 of SEQ ID NO: 917507
ugaagugugcuggaauuac

SEQ ID NO: 1239147 - RNA, 19 nt, Artificial Sequence
  Description of Artificial Sequence: Synthetic oligonucleotide
  Antisense strand to SEQ ID NO: 1239146
guaauuccagcacacuuca

SEQ ID NO: 1239148 - RNA, 19 nt, Artificial Sequence
  Description of Artificial Sequence: Synthetic oligonucleotide
  Sense strand starting at position 2752 of SEQ ID NO: 917507
gguagacuuuaccuaggca

SEQ ID NO: 1239149 - RNA, 19 nt, Artificial Sequence
  Description of Artificial Sequence: Synthetic oligonucleotide
  Antisense strand to SEQ ID NO: 1239148
ugccuagguaaagucuacc

SEQ ID NO: 1239150 - RNA, 19 nt, Artificial Sequence
  Description of Artificial Sequence: Synthetic oligonucleotide
  Sense strand starting at position 2756 of SEQ ID NO: 917507
gacuuuaccuaggcagaga

SEQ ID NO: 1239151 - RNA, 19 nt, Artificial Sequence
  Description of Artificial Sequence: Synthetic oligonucleotide
  Antisense strand to SEQ ID NO: 1239150
ucucugccuagguaaaguc

SEQ ID NO: 1239152 - RNA, 19 nt, Artificial Sequence
  Description of Artificial Sequence: Synthetic oligonucleotide
  Sense strand starting at position 2836 of SEQ ID NO: 917507
ggugaugcuguagagguaa

SEQ ID NO: 1239153 - RNA, 19 nt, Artificial Sequence
  Description of Artificial Sequence: Synthetic oligonucleotide
  Antisense strand to SEQ ID NO: 1239152
uuaccucuacagcaucacc

SEQ ID NO: 1239154 - RNA, 19 nt, Artificial Sequence
  Description of Artificial Sequence: Synthetic oligonucleotide
  Sense strand starting at position 3047 of SEQ ID NO: 917507
ucgguaaacaucugaagaa

SEQ ID NO: 1239155 - RNA, 19 nt, Artificial Sequence
  Description of Artificial Sequence: Synthetic oligonucleotide
  Antisense strand to SEQ ID NO: 1239154
uucuucagauguuuaccga

SEQ ID NO: 1239156 - RNA, 19 nt, Artificial Sequence
  Description of Artificial Sequence: Synthetic oligonucleotide
  Sense strand starting at position 3086 of SEQ ID NO: 917507
gcagaaacaucacuuguca

SEQ ID NO: 1239157 - RNA, 19 nt, Artificial Sequence
  Description of Artificial Sequence: Synthetic oligonucleotide
  Antisense strand to SEQ ID NO: 1239156
ugacaagugauguuucugc

SEQ ID NO: 1239158 - RNA, 19 nt, Artificial Sequence
  Description of Artificial Sequence: Synthetic oligonucleotide
  Sense strand starting at position 3121 of SEQ ID NO: 917507
gugagaaauaaaugcugaa

SEQ ID NO: 1239159 - RNA, 19 nt, Artificial Sequence
  Description of Artificial Sequence: Synthetic oligonucleotide
  Antisense strand to SEQ ID NO: 1239158
uucagcauuuauuucucac

SEQ ID NO: 1239160 - RNA, 19 nt, Artificial Sequence
  Description of Artificial Sequence: Synthetic oligonucleotide
  Sense strand starting at position 3148 of SEQ ID NO: 917507
aacaguagccacggagaaa

SEQ ID NO: 1239161 - RNA, 19 nt, Artificial Sequence
  Description of Artificial Sequence: Synthetic oligonucleotide
  Antisense strand to SEQ ID NO: 1239160
uuucuccguggcuacuguu

SEQ ID NO: 1239162 - RNA, 19 nt, Artificial Sequence
  Description of Artificial Sequence: Synthetic oligonucleotide
  Sense strand starting at position 3193 of SEQ ID NO: 917507
aagggaugaugccuuugau

SEQ ID NO: 1239163 - RNA, 19 nt, Artificial Sequence
  Description of Artificial Sequence: Synthetic oligonucleotide
  Antisense strand to SEQ ID NO: 1239162
aucaaaggcaucaucccuu

SEQ ID NO: 1239164 - RNA, 19 nt, Artificial Sequence
  Description of Artificial Sequence: Synthetic oligonucleotide
  Sense strand starting at position 3196 of SEQ ID NO: 917507
ggaugaugccuuugaugag

SEQ ID NO: 1239165 - RNA, 19 nt, Artificial Sequence
  Description of Artificial Sequence: Synthetic oligonucleotide
  Antisense strand to SEQ ID NO: 1239164
cucaucaaaggcaucaucc

SEQ ID NO: 1239166 - RNA, 19 nt, Artificial Sequence
  Description of Artificial Sequence: Synthetic oligonucleotide
  Sense strand starting at position 3200 of SEQ ID NO: 917507
gaugccuuugaugagcaga

SEQ ID NO: 1239167 - RNA, 19 nt, Artificial Sequence
  Description of Artificial Sequence: Synthetic oligonucleotide
  Antisense strand to SEQ ID NO: 1239166
ucugcucaucaaaggcauc

SEQ ID NO: 1239168 - RNA, 19 nt, Artificial Sequence
  Description of Artificial Sequence: Synthetic oligonucleotide
  Sense strand starting at position 3203 of SEQ ID NO: 917507
gccuuugaugagcagaagu

SEQ ID NO: 1239169 - RNA, 19 nt, Artificial Sequence
  Description of Artificial Sequence: Synthetic oligonucleotide
  Antisense strand to SEQ ID NO: 1239168
acuucugcucaucaaaggc

SEQ ID NO: 1239170 - RNA, 19 nt, Artificial Sequence
  Description of Artificial Sequence: Synthetic oligonucleotide
  Sense strand starting at position 3205 of SEQ ID NO: 917507
cuuugaugagcagaaguua

SEQ ID NO: 1239171 - RNA, 19 nt, Artificial Sequence
  Description of Artificial Sequence: Synthetic oligonucleotide
  Antisense strand to SEQ ID NO: 1239170
uaacuucugcucaucaaag

SEQ ID NO: 1239172 - RNA, 19 nt, Artificial Sequence
  Description of Artificial Sequence: Synthetic oligonucleotide
  Sense strand starting at position 3506 of SEQ ID NO: 917507
gcucgugaugggcuuaguu

SEQ ID NO: 1239173 - RNA, 19 nt, Artificial Sequence
  Description of Artificial Sequence: Synthetic oligonucleotide
  Antisense strand to SEQ ID NO: 1239172
aacuaagcccaucacgagc

SEQ ID NO: 1239174 - RNA, 19 nt, Artificial Sequence
  Description of Artificial Sequence: Synthetic oligonucleotide
  Sense strand starting at position 3523 of SEQ ID NO: 917507
uugcauuaucacuagaguu

SEQ ID NO: 1239175 - RNA, 19 nt, Artificial Sequence
  Description of Artificial Sequence: Synthetic oligonucleotide
  Antisense strand to SEQ ID NO: 1239174
aacucuagugauaaugcaa

SEQ ID NO: 1239176 - RNA, 19 nt, Artificial Sequence
  Description of Artificial Sequence: Synthetic oligonucleotide
  Sense strand starting at position 3525 of SEQ ID NO: 917507
gcauuaucacuagaguuac

SEQ ID NO: 1239177 - RNA, 19 nt, Artificial Sequence
  Description of Artificial Sequence: Synthetic oligonucleotide
  Antisense strand to SEQ ID NO: 1239176
guaacucuagugauaaugc

SEQ ID NO: 1239178 - RNA, 19 nt, Artificial Sequence
  Description of Artificial Sequence: Synthetic oligonucleotide
  Sense strand starting at position 3539 of SEQ ID NO: 917507
guuacauugccagacucuu

SEQ ID NO: 1239179 - RNA, 19 nt, Artificial Sequence
  Description of Artificial Sequence: Synthetic oligonucleotide
  Antisense strand to SEQ ID NO: 1239178
aagagucuggcaauguaac

SEQ ID NO: 1239180 - RNA, 19 nt, Artificial Sequence
  Description of Artificial Sequence: Synthetic oligonucleotide
  Sense strand starting at position 3695 of SEQ ID NO: 917507
uuuaucuuccagggacacu

SEQ ID NO: 1239181 - RNA, 19 nt, Artificial Sequence
  Description of Artificial Sequence: Synthetic oligonucleotide
  Antisense strand to SEQ ID NO: 1239180
agugucccuggaagauaaa

SEQ ID NO: 1239182 - RNA, 19 nt, Artificial Sequence
  Description of Artificial Sequence: Synthetic oligonucleotide
  Sense strand starting at position 3717 of SEQ ID NO: 917507
agcauuggaucugcugaga

SEQ ID NO: 1239183 - RNA, 19 nt, Artificial Sequence
  Description of Artificial Sequence: Synthetic oligonucleotide
  Antisense strand to SEQ ID NO: 1239182
ucucagcagauccaaugcu

SEQ ID NO: 1239184 - RNA, 19 nt, Artificial Sequence
  Description of Artificial Sequence: Synthetic oligonucleotide
  Sense strand starting at position 3859 of SEQ ID NO: 917507
uucccaaguguauauucua

SEQ ID NO: 1239185 - RNA, 19 nt, Artificial Sequence
  Description of Artificial Sequence: Synthetic oligonucleotide
  Antisense strand to SEQ ID NO: 1239184
uagaauauacacuugggaa

SEQ ID NO: 1239186 - RNA, 19 nt, Artificial Sequence
  Description of Artificial Sequence: Synthetic oligonucleotide
  Sense strand starting at position 3923 of SEQ ID NO: 917508
gugaauaggaauugcaaga

SEQ ID NO: 1239187 - RNA, 19 nt, Artificial Sequence
  Description of Artificial Sequence: Synthetic oligonucleotide
  Antisense strand to SEQ ID NO: 1239186
ucuugcaauuccuauucac

SEQ ID NO: 1239188 - RNA, 19 nt, Artificial Sequence
  Description of Artificial Sequence: Synthetic oligonucleotide
  Sense strand starting at position 78 of SEQ ID NO: 917508
ucgaguacauuugcauauu

SEQ ID NO: 1239189 - RNA, 19 nt, Artificial Sequence
  Description of Artificial Sequence: Synthetic oligonucleotide
  Antisense strand to SEQ ID NO: 1239188
aauaugcaaauguacucga

SEQ ID NO: 1239190 - RNA, 19 nt, Artificial Sequence
  Description of Artificial Sequence: Synthetic oligonucleotide
  Sense strand starting at position 265 of SEQ ID NO: 917508
cggauuuauccauguagug

SEQ ID NO: 1239191 - RNA, 19 nt, Artificial Sequence
  Description of Artificial Sequence: Synthetic oligonucleotide
  Antisense strand to SEQ ID NO: 1239190
cacuacauggauaaauccg

SEQ ID NO: 1239192 - RNA, 19 nt, Artificial Sequence
  Description of Artificial Sequence: Synthetic oligonucleotide
  Sense strand starting at position 289 of SEQ ID NO: 917508
uuuacauugguguaaagau

SEQ ID NO: 1239193 - RNA, 19 nt, Artificial Sequence
  Description of Artificial Sequence: Synthetic oligonucleotide
  Antisense strand to SEQ ID NO: 1239192
aucuuuacaccaauguaaa

SEQ ID NO: 1239194 - RNA, 19 nt, Artificial Sequence
  Description of Artificial Sequence: Synthetic oligonucleotide
  Sense strand starting at position 501 of SEQ ID NO: 917508
gucagcuauguacagauaa

SEQ ID NO: 1239195 - RNA, 19 nt, Artificial Sequence
  Description of Artificial Sequence: Synthetic oligonucleotide
  Antisense strand to SEQ ID NO: 1239194
uuaucuguacauagcugac

SEQ ID NO: 1239196 - RNA, 19 nt, Artificial Sequence
  Description of Artificial Sequence: Synthetic oligonucleotide
  Sense strand starting at position 597 of SEQ ID NO: 917508
ggguguuugcaugagaaug

SEQ ID NO: 1239197 - RNA, 19 nt, Artificial Sequence
  Description of Artificial Sequence: Synthetic oligonucleotide
  Antisense strand to SEQ ID NO: 1239196
cauucucaugcaaacaccc

SEQ ID NO: 1239198 - RNA, 19 nt, Artificial Sequence
  Description of Artificial Sequence: Synthetic oligonucleotide
  Sense strand starting at position 719 of SEQ ID NO: 917508
ugaaacguuguagaugaga

SEQ ID NO: 1239199 - RNA, 19 nt, Artificial Sequence
  Description of Artificial Sequence: Synthetic oligonucleotide
  Antisense strand to SEQ ID NO: 1239198
ucucaucuacaacguuuca

SEQ ID NO: 1239200 - RNA, 19 nt, Artificial Sequence
  Description of Artificial Sequence: Synthetic oligonucleotide
  Sense strand starting at position 918 of SEQ ID NO: 917508
gguuguacggaucauggau

SEQ ID NO: 1239201 - RNA, 19 nt, Artificial Sequence
  Description of Artificial Sequence: Synthetic oligonucleotide
  Antisense strand to SEQ ID NO: 1239200
auccaugauccguacaacc

SEQ ID NO: 1239202 - RNA, 19 nt, Artificial Sequence
  Description of Artificial Sequence: Synthetic oligonucleotide
  Sense strand starting at position 925 of SEQ ID NO: 917508
cggaucauggauugguaaa

SEQ ID NO: 1239203 - RNA, 19 nt, Artificial Sequence
  Description of Artificial Sequence: Synthetic oligonucleotide
  Antisense strand to SEQ ID NO: 1239202
uuuaccaauccaugauccg

SEQ ID NO: 1239204 - RNA, 19 nt, Artificial Sequence
  Description of Artificial Sequence: Synthetic oligonucleotide
  Sense strand starting at position 927 of SEQ ID NO: 917508
gaucauggauugguaaauc

SEQ ID NO: 1239205 - RNA, 19 nt, Artificial Sequence
  Description of Artificial Sequence: Synthetic oligonucleotide
  Antisense strand to SEQ ID NO: 1239204
gauuuaccaauccaugauc

SEQ ID NO: 1239206 - RNA, 19 nt, Artificial Sequence
  Description of Artificial Sequence: Synthetic oligonucleotide
  Sense strand starting at position 946 of SEQ ID NO: 917508
auugaaauuuaucagucag

SEQ ID NO: 1239207 - RNA, 19 nt, Artificial Sequence
  Description of Artificial Sequence: Synthetic oligonucleotide
  Antisense strand to SEQ ID NO: 1239206
cugacugauaaauuucaau

SEQ ID NO: 1239208 - RNA, 19 nt, Artificial Sequence
  Description of Artificial Sequence: Synthetic oligonucleotide
  Sense strand starting at position 978 of SEQ ID NO: 917508
gguacuaauuaauuaugca

SEQ ID NO: 1239209 - RNA, 19 nt, Artificial Sequence
  Description of Artificial Sequence: Synthetic oligonucleotide
  Antisense strand to SEQ ID NO: 1239208
ugcauaauuaauuaguacc

SEQ ID NO: 1239210 - RNA, 19 nt, Artificial Sequence
  Description of Artificial Sequence: Synthetic oligonucleotide
  Sense strand starting at position 1047 of SEQ ID NO: 917508
cugcaauaaccucaagagu

SEQ ID NO: 1239211 - RNA, 19 nt, Artificial Sequence
  Description of Artificial Sequence: Synthetic oligonucleotide
  Antisense strand to SEQ ID NO: 1239210
acucuugagguuauugcag

SEQ ID NO: 1239212 - RNA, 19 nt, Artificial Sequence
  Description of Artificial Sequence: Synthetic oligonucleotide
  Sense strand starting at position 1304 of SEQ ID NO: 917508
gauggaaugucuuccuuaa

SEQ ID NO: 1239213 - RNA, 19 nt, Artificial Sequence
  Description of Artificial Sequence: Synthetic oligonucleotide
  Antisense strand to SEQ ID NO: 1239212
uuaaggaagacauuccauc

SEQ ID NO: 1239214 - RNA, 19 nt, Artificial Sequence
  Description of Artificial Sequence: Synthetic oligonucleotide
  Sense strand starting at position 2125 of SEQ ID NO: 917508
uuugguaauuugcuaccau

SEQ ID NO: 1239215 - RNA, 19 nt, Artificial Sequence
  Description of Artificial Sequence: Synthetic oligonucleotide
  Antisense strand to SEQ ID NO: 1239214
augguagcaaauuaccaaa

SEQ ID NO: 1239216 - RNA, 19 nt, Artificial Sequence
  Description of Artificial Sequence: Synthetic oligonucleotide
  Sense strand starting at position 2302 of SEQ ID NO: 917508
cgcgcucuaaaguuucuaa

SEQ ID NO: 1239217 - RNA, 19 nt, Artificial Sequence
  Description of Artificial Sequence: Synthetic oligonucleotide
  Antisense strand to SEQ ID NO: 1239216
uuagaaacuuuagagcgcg

SEQ ID NO: 1239218 - RNA, 19 nt, Artificial Sequence
  Description of Artificial Sequence: Synthetic oligonucleotide
  Sense strand starting at position 2357 of SEQ ID NO: 917508
agaagcaggaauuguaaca

SEQ ID NO: 1239219 - RNA, 19 nt, Artificial Sequence
  Description of Artificial Sequence: Synthetic oligonucleotide
  Antisense strand to SEQ ID NO: 1239218
uguuacaauuccugcuucu

SEQ ID NO: 1239220 - RNA, 19 nt, Artificial Sequence
  Description of Artificial Sequence: Synthetic oligonucleotide
  Sense strand starting at position 2461 of SEQ ID NO: 917508
uuuacuuuccgauacugau

SEQ ID NO: 1239221 - RNA, 19 nt, Artificial Sequence
  Description of Artificial Sequence: Synthetic oligonucleotide
  Antisense strand to SEQ ID NO: 1239220
aucaguaucggaaaguaaa

SEQ ID NO: 1239222 - RNA, 19 nt, Artificial Sequence
  Description of Artificial Sequence: Synthetic oligonucleotide
  Sense strand starting at position 2498 of SEQ ID NO: 917508
gguuaaguaagagagcuau

SEQ ID NO: 1239223 - RNA, 19 nt, Artificial Sequence
  Description of Artificial Sequence: Synthetic oligonucleotide
  Antisense strand to SEQ ID NO: 1239222
auagcucucuuacuuaacc

SEQ ID NO: 1239224 - RNA, 19 nt, Artificial Sequence
  Description of Artificial Sequence: Synthetic oligonucleotide
  Sense strand starting at position 2509 of SEQ ID NO: 917508
agagcuaucaaguacgaau

SEQ ID NO: 1239225 - RNA, 19 nt, Artificial Sequence
  Description of Artificial Sequence: Synthetic oligonucleotide
  Antisense strand to SEQ ID NO: 1239224
auucguacuugauagcucu

SEQ ID NO: 1239226 - RNA, 19 nt, Artificial Sequence
  Description of Artificial Sequence: Synthetic oligonucleotide
  Sense strand starting at position 2523 of SEQ ID NO: 917508
cgaauuaucuaugccaaga

SEQ ID NO: 1239227 - RNA, 19 nt, Artificial Sequence
  Description of Artificial Sequence: Synthetic oligonucleotide
  Antisense strand to SEQ ID NO: 1239226
ucuuggcauagauaauucg

SEQ ID NO: 1239228 - RNA, 19 nt, Artificial Sequence
  Description of Artificial Sequence: Synthetic oligonucleotide
  Sense strand starting at position 2585 of SEQ ID NO: 917508
gggaacguggcgucuaguu

SEQ ID NO: 1239229 - RNA, 19 nt, Artificial Sequence
  Description of Artificial Sequence: Synthetic oligonucleotide
  Antisense strand to SEQ ID NO: 1239228
aacuagacgccacguuccc

SEQ ID NO: 1239230 - RNA, 19 nt, Artificial Sequence
  Description of Artificial Sequence: Synthetic oligonucleotide
  Sense strand starting at position 2786 of SEQ ID NO: 917508
gucaacucucuaggaucua

SEQ ID NO: 1239231 - RNA, 19 nt, Artificial Sequence
  Description of Artificial Sequence: Synthetic oligonucleotide
  Antisense strand to SEQ ID NO: 1239230
uagauccuagagaguugac

SEQ ID NO: 1239232 - RNA, 19 nt, Artificial Sequence
  Description of Artificial Sequence: Synthetic oligonucleotide
  Sense strand starting at position 2803 of SEQ ID NO: 917508
uaacauccuguguagugau

SEQ ID NO: 1239233 - RNA, 19 nt, Artificial Sequence
  Description of Artificial Sequence: Synthetic oligonucleotide
  Antisense strand to SEQ ID NO: 1239232
aucacuacacaggauguua

SEQ ID NO: 1239234 - RNA, 19 nt, Artificial Sequence
  Description of Artificial Sequence: Synthetic oligonucleotide
  Sense strand starting at position 2810 of SEQ ID NO: 917508
cuguguagugaugacggaa

SEQ ID NO: 1239235 - RNA, 19 nt, Artificial Sequence
  Description of Artificial Sequence: Synthetic oligonucleotide
  Antisense strand to SEQ ID NO: 1239234
uuccgucaucacuacacag

SEQ ID NO: 1239236 - RNA, 19 nt, Artificial Sequence
  Description of Artificial Sequence: Synthetic oligonucleotide
  Sense strand starting at position 2813 of SEQ ID NO: 917508
uguagugaugacggaagaa

SEQ ID NO: 1239237 - RNA, 19 nt, Artificial Sequence
  Description of Artificial Sequence: Synthetic oligonucleotide
  Antisense strand to SEQ ID NO: 1239236
uucuuccgucaucacuaca

SEQ ID NO: 1239238 - RNA, 19 nt, Artificial Sequence
  Description of Artificial Sequence: Synthetic oligonucleotide
  Sense strand starting at position 2861 of SEQ ID NO: 917508
aaaccucuguguuuggaaa

SEQ ID NO: 1239239 - RNA, 19 nt, Artificial Sequence
  Description of Artificial Sequence: Synthetic oligonucleotide
  Antisense strand to SEQ ID NO: 1239238
uuuccaaacacagagguuu

SEQ ID NO: 1239240 - RNA, 19 nt, Artificial Sequence
  Description of Artificial Sequence: Synthetic oligonucleotide
  Sense strand starting at position 2971 of SEQ ID NO: 917508
ggcaaucuaguugaucuuu

SEQ ID NO: 1239241 - RNA, 19 nt, Artificial Sequence
  Description of Artificial Sequence: Synthetic oligonucleotide
  Antisense strand to SEQ ID NO: 1239240
aaagaucaacuagauugcc

SEQ ID NO: 1239242 - RNA, 19 nt, Artificial Sequence
  Description of Artificial Sequence: Synthetic oligonucleotide
  Sense strand starting at position 2976 of SEQ ID NO: 917508
ucuaguugaucuuuagaau

SEQ ID NO: 1239243 - RNA, 19 nt, Artificial Sequence
  Description of Artificial Sequence: Synthetic oligonucleotide
  Antisense strand to SEQ ID NO: 1239242
auucuaaagaucaacuaga

SEQ ID NO: 1239244 - RNA, 19 nt, Artificial Sequence
  Description of Artificial Sequence: Synthetic oligonucleotide
  Sense strand starting at position 2982 of SEQ ID NO: 917508
ugaucuuuagaauaugcau

SEQ ID NO: 1239245 - RNA, 19 nt, Artificial Sequence
  Description of Artificial Sequence: Synthetic oligonucleotide
  Antisense strand to SEQ ID NO: 1239244
augcauauucuaaagauca

SEQ ID NO: 1239246 - RNA, 19 nt, Artificial Sequence
  Description of Artificial Sequence: Synthetic oligonucleotide
  Sense strand starting at position 2996 of SEQ ID NO: 917508
ugcaucagauucuuaagga

SEQ ID NO: 1239247 - RNA, 19 nt, Artificial Sequence
  Description of Artificial Sequence: Synthetic oligonucleotide
  Antisense strand to SEQ ID NO: 1239246
uccuuaagaaucugaugca

SEQ ID NO: 1239248 - RNA, 19 nt, Artificial Sequence
  Description of Artificial Sequence: Synthetic oligonucleotide
  Sense strand starting at position 3034 of SEQ ID NO: 917508
ccaggaaggaacuguagua

SEQ ID NO: 1239249 - RNA, 19 nt, Artificial Sequence
  Description of Artificial Sequence: Synthetic oligonucleotide
  Antisense strand to SEQ ID NO: 1239248
uacuacaguuccuuccugg

SEQ ID NO: 1239250 - RNA, 19 nt, Artificial Sequence
  Description of Artificial Sequence: Synthetic oligonucleotide
  Sense strand starting at position 3041 of SEQ ID NO: 917508
ggaacuguaguagggauaa

SEQ ID NO: 1239251 - RNA, 19 nt, Artificial Sequence
  Description of Artificial Sequence: Synthetic oligonucleotide
  Antisense strand to SEQ ID NO: 1239250
uuaucccuacuacaguucc

SEQ ID NO: 1239252 - RNA, 19 nt, Artificial Sequence
  Description of Artificial Sequence: Synthetic oligonucleotide
  Sense strand starting at position 3144 of SEQ ID NO: 917508
ugaguaggcaaguaagacu

SEQ ID NO: 1239253 - RNA, 19 nt, Artificial Sequence
  Description of Artificial Sequence: Synthetic oligonucleotide
  Antisense strand to SEQ ID NO: 1239252
agucuuacuugccuacuca

SEQ ID NO: 1239254 - RNA, 19 nt, Artificial Sequence
  Description of Artificial Sequence: Synthetic oligonucleotide
  Sense strand starting at position 3202 of SEQ ID NO: 917508
auggucuuaccauauaugu

SEQ ID NO: 1239255 - RNA, 19 nt, Artificial Sequence
  Description of Artificial Sequence: Synthetic oligonucleotide
  Antisense strand to SEQ ID NO: 1239254
acauauaugguaagaccau

SEQ ID NO: 1239256 - RNA, 19 nt, Artificial Sequence
  Description of Artificial Sequence: Synthetic oligonucleotide
  Sense strand starting at position 3228 of SEQ ID NO: 917508
gccaaauauugauugacag

SEQ ID NO: 1239257 - RNA, 19 nt, Artificial Sequence
  Description of Artificial Sequence: Synthetic oligonucleotide
  Antisense strand to SEQ ID NO: 1239256
cugucaaucaauauuuggc

SEQ ID NO: 1239258 - RNA, 19 nt, Artificial Sequence
  Description of Artificial Sequence: Synthetic oligonucleotide
  Sense strand starting at position 3268 of SEQ ID NO: 917508
gccuuaauagcugaaacua

SEQ ID NO: 1239259 - RNA, 19 nt, Artificial Sequence
  Description of Artificial Sequence: Synthetic oligonucleotide
  Antisense strand to SEQ ID NO: 1239258
uaguuucagcuauuaaggc

SEQ ID NO: 1239260 - RNA, 19 nt, Artificial Sequence
  Description of Artificial Sequence: Synthetic oligonucleotide
  Sense strand starting at position 3446 of SEQ ID NO: 917508
gcauccugcuauuuauagu

SEQ ID NO: 1239261 - RNA, 19 nt, Artificial Sequence
  Description of Artificial Sequence: Synthetic oligonucleotide
  Antisense strand to SEQ ID NO: 1239260
acuauaaauagcaggaugc

SEQ ID NO: 1239262 - RNA, 19 nt, Artificial Sequence
  Description of Artificial Sequence: Synthetic oligonucleotide
  Sense strand starting at position 3468 of SEQ ID NO: 917508
guuucugcucaugaaucaa

SEQ ID NO: 1239263 - RNA, 19 nt, Artificial Sequence
  Description of Artificial Sequence: Synthetic oligonucleotide
  Antisense strand to SEQ ID NO: 1239262
uugauucaugagcagaaac

SEQ ID NO: 1239264 - RNA, 19 nt, Artificial Sequence
  Description of Artificial Sequence: Synthetic oligonucleotide
  Sense strand starting at position 3583 of SEQ ID NO: 917508
ugacuuuaguacucagauu

SEQ ID NO: 1239265 - RNA, 19 nt, Artificial Sequence
  Description of Artificial Sequence: Synthetic oligonucleotide
  Antisense strand to SEQ ID NO: 1239264
aaucugaguacuaaaguca

SEQ ID NO: 1239266 - RNA, 19 nt, Artificial Sequence
  Description of Artificial Sequence: Synthetic oligonucleotide
  Sense strand starting at position 3746 of SEQ ID NO: 917508
gcaugauuucugcagccuc

SEQ ID NO: 1239267 - RNA, 19 nt, Artificial Sequence
  Description of Artificial Sequence: Synthetic oligonucleotide
  Antisense strand to SEQ ID NO: 1239266
gaggcugcagaaaucaugc

SEQ ID NO: 1239268 - RNA, 19 nt, Artificial Sequence
  Description of Artificial Sequence: Synthetic oligonucleotide
  Sense strand starting at position 3746 of SEQ ID NO: 917509
gcaugauuucugcagccuc

SEQ ID NO: 1239269 - RNA, 19 nt, Artificial Sequence
  Description of Artificial Sequence: Synthetic oligonucleotide
  Antisense strand to SEQ ID NO: 1239268
gaggcugcagaaaucaugc

SEQ ID NO: 1239270 - RNA, 19 nt, Artificial Sequence
  Description of Artificial Sequence: Synthetic oligonucleotide
  Sense strand starting at position 527 of SEQ ID NO: 917509
aagauaguugcacaaguau

SEQ ID NO: 1239271 - RNA, 19 nt, Artificial Sequence
  Description of Artificial Sequence: Synthetic oligonucleotide
  Antisense strand to SEQ ID NO: 1239270
auacuugugcaacuaucuu

SEQ ID NO: 1239272 - RNA, 19 nt, Artificial Sequence
  Description of Artificial Sequence: Synthetic oligonucleotide
  Sense strand starting at position 612 of SEQ ID NO: 917509
guggauaaacuguggcaua

SEQ ID NO: 1239273 - RNA, 19 nt, Artificial Sequence
  Description of Artificial Sequence: Synthetic oligonucleotide
  Antisense strand to SEQ ID NO: 1239272
uaugccacaguuuauccac

SEQ ID NO: 1239274 - RNA, 19 nt, Artificial Sequence
  Description of Artificial Sequence: Synthetic oligonucleotide
  Sense strand starting at position 1020 of SEQ ID NO: 917509
acaugaacuuauguggagu

SEQ ID NO: 1239275 - RNA, 19 nt, Artificial Sequence
  Description of Artificial Sequence: Synthetic oligonucleotide
  Antisense strand to SEQ ID NO: 1239274
acuccacauaaguucaugu

SEQ ID NO: 1239276 - RNA, 19 nt, Artificial Sequence
  Description of Artificial Sequence: Synthetic oligonucleotide
  Sense strand starting at position 1023 of SEQ ID NO: 917509
ugaacuuauguggagucau

SEQ ID NO: 1239277 - RNA, 19 nt, Artificial Sequence
  Description of Artificial Sequence: Synthetic oligonucleotide
  Antisense strand to SEQ ID NO: 1239276
augacuccacauaaguuca

SEQ ID NO: 1239278 - RNA, 19 nt, Artificial Sequence
  Description of Artificial Sequence: Synthetic oligonucleotide
  Sense strand starting at position 1077 of SEQ ID NO: 917509
gugaacagccauuaaguca

SEQ ID NO: 1239279 - RNA, 19 nt, Artificial Sequence
  Description of Artificial Sequence: Synthetic oligonucleotide
  Antisense strand to SEQ ID NO: 1239278
ugacuuaauggcuguucac

SEQ ID NO: 1239280 - RNA, 19 nt, Artificial Sequence
  Description of Artificial Sequence: Synthetic oligonucleotide
  Sense strand starting at position 1085 of SEQ ID NO: 917509
ccauuaagucauuggugua

SEQ ID NO: 1239281 - RNA, 19 nt, Artificial Sequence
  Description of Artificial Sequence: Synthetic oligonucleotide
  Antisense strand to SEQ ID NO: 1239280
uacaccaaugacuuaaugg

SEQ ID NO: 1239282 - RNA, 19 nt, Artificial Sequence
  Description of Artificial Sequence: Synthetic oligonucleotide
  Sense strand starting at position 1169 of SEQ ID NO: 917509
augcaauagcuacaaguuu

SEQ ID NO: 1239283 - RNA, 19 nt, Artificial Sequence
  Description of Artificial Sequence: Synthetic oligonucleotide
  Antisense strand to SEQ ID NO: 1239282
aaacuuguagcuauugcau

SEQ ID NO: 1239284 - RNA, 19 nt, Artificial Sequence
  Description of Artificial Sequence: Synthetic oligonucleotide
  Sense strand starting at position 1188 of SEQ ID NO: 917509
uguucugcagaguaaauga

SEQ ID NO: 1239285 - RNA, 19 nt, Artificial Sequence
  Description of Artificial Sequence: Synthetic oligonucleotide
  Antisense strand to SEQ ID NO: 1239284
ucauuuacucugcagaaca

SEQ ID NO: 1239286 - RNA, 19 nt, Artificial Sequence
  Description of Artificial Sequence: Synthetic oligonucleotide
  Sense strand starting at position 1197 of SEQ ID NO: 917509
gaguaaaugacaggucaug

SEQ ID NO: 1239287 - RNA, 19 nt, Artificial Sequence
  Description of Artificial Sequence: Synthetic oligonucleotide
  Antisense strand to SEQ ID NO: 1239286
caugaccugucauuuacuc

SEQ ID NO: 1239288 - RNA, 19 nt, Artificial Sequence
  Description of Artificial Sequence: Synthetic oligonucleotide
  Sense strand starting at position 1214 of SEQ ID NO: 917509
ugaacuaauuccguuggaa

SEQ ID NO: 1239289 - RNA, 19 nt, Artificial Sequence
  Description of Artificial Sequence: Synthetic oligonucleotide
  Antisense strand to SEQ ID NO: 1239288
uuccaacggaauuaguuca

SEQ ID NO: 1239290 - RNA, 19 nt, Artificial Sequence
  Description of Artificial Sequence: Synthetic oligonucleotide
  Sense strand starting at position 1216 of SEQ ID NO: 917509
aacuaauuccguuggaaga

SEQ ID NO: 1239291 - RNA, 19 nt, Artificial Sequence
  Description of Artificial Sequence: Synthetic oligonucleotide
  Antisense strand to SEQ ID NO: 1239290
ucuuccaacggaauuaguu

SEQ ID NO: 1239292 - RNA, 19 nt, Artificial Sequence
  Description of Artificial Sequence: Synthetic oligonucleotide
  Sense strand starting at position 1217 of SEQ ID NO: 917509
acuaauuccguuggaagag

SEQ ID NO: 1239293 - RNA, 19 nt, Artificial Sequence
  Description of Artificial Sequence: Synthetic oligonucleotide
  Antisense strand to SEQ ID NO: 1239292
cucuuccaacggaauuagu

SEQ ID NO: 1239294 - RNA, 19 nt, Artificial Sequence
  Description of Artificial Sequence: Synthetic oligonucleotide
  Sense strand starting at position 1298 of SEQ ID NO: 917509
guaugaugucaucauuacg

SEQ ID NO: 1239295 - RNA, 19 nt, Artificial Sequence
  Description of Artificial Sequence: Synthetic oligonucleotide
  Antisense strand to SEQ ID NO: 1239294
cguaaugaugacaucauac

SEQ ID NO: 1239296 - RNA, 19 nt, Artificial Sequence
  Description of Artificial Sequence: Synthetic oligonucleotide
  Sense strand starting at position 1301 of SEQ ID NO: 917509
ugaugucaucauuacgaaa

SEQ ID NO: 1239297 - RNA, 19 nt, Artificial Sequence
  Description of Artificial Sequence: Synthetic oligonucleotide
  Antisense strand to SEQ ID NO: 1239296
uuucguaaugaugacauca

SEQ ID NO: 1239298 - RNA, 19 nt, Artificial Sequence
  Description of Artificial Sequence: Synthetic oligonucleotide
  Sense strand starting at position 1374 of SEQ ID NO: 917509
gcguuaagugccacgcgua

SEQ ID NO: 1239299 - RNA, 19 nt, Artificial Sequence
  Description of Artificial Sequence: Synthetic oligonucleotide
  Antisense strand to SEQ ID NO: 1239298
uacgcguggcacuuaacgc

SEQ ID NO: 1239300 - RNA, 19 nt, Artificial Sequence
  Description of Artificial Sequence: Synthetic oligonucleotide
  Sense strand starting at position 2121 of SEQ ID NO: 917509
gguccauucccaggacuuu

SEQ ID NO: 1239301 - RNA, 19 nt, Artificial Sequence
  Description of Artificial Sequence: Synthetic oligonucleotide
  Antisense strand to SEQ ID NO: 1239300
aaaguccugggaauggacc

SEQ ID NO: 1239302 - RNA, 19 nt, Artificial Sequence
  Description of Artificial Sequence: Synthetic oligonucleotide
  Sense strand starting at position 2134 of SEQ ID NO: 917509
gacuuuggguucucggaca

SEQ ID NO: 1239303 - RNA, 19 nt, Artificial Sequence
  Description of Artificial Sequence: Synthetic oligonucleotide
  Antisense strand to SEQ ID NO: 1239302
uguccgagaacccaaaguc

SEQ ID NO: 1239304 - RNA, 19 nt, Artificial Sequence
  Description of Artificial Sequence: Synthetic oligonucleotide
  Sense strand starting at position 2194 of SEQ ID NO: 917509
gaacuagggcucuggaguu

SEQ ID NO: 1239305 - RNA, 19 nt, Artificial Sequence
  Description of Artificial Sequence: Synthetic oligonucleotide
  Antisense strand to SEQ ID NO: 1239304
aacuccagagcccuaguuc

SEQ ID NO: 1239306 - RNA, 19 nt, Artificial Sequence
  Description of Artificial Sequence: Synthetic oligonucleotide
  Sense strand starting at position 2200 of SEQ ID NO: 917509
gggcucuggaguugccaaa

SEQ ID NO: 1239307 - RNA, 19 nt, Artificial Sequence
  Description of Artificial Sequence: Synthetic oligonucleotide
  Antisense strand to SEQ ID NO: 1239306
uuuggcaacuccagagccc

SEQ ID NO: 1239308 - RNA, 19 nt, Artificial Sequence
  Description of Artificial Sequence: Synthetic oligonucleotide
  Sense strand starting at position 2309 of SEQ ID NO: 917509
cgcaguucucaaguguuac

SEQ ID NO: 1239309 - RNA, 19 nt, Artificial Sequence
  Description of Artificial Sequence: Synthetic oligonucleotide
  Antisense strand to SEQ ID NO: 1239308
guaacacuugagaacugcg

SEQ ID NO: 1239310 - RNA, 19 nt, Artificial Sequence
  Description of Artificial Sequence: Synthetic oligonucleotide
  Sense strand starting at position 2333 of SEQ ID NO: 917509
guuggaaucaccugggaga

SEQ ID NO: 1239311 - RNA, 19 nt, Artificial Sequence
  Description of Artificial Sequence: Synthetic oligonucleotide
  Antisense strand to SEQ ID NO: 1239310
ucucccaggugauuccaac

SEQ ID NO: 1239312 - RNA, 19 nt, Artificial Sequence
  Description of Artificial Sequence: Synthetic oligonucleotide
  Sense strand starting at position 2780 of SEQ ID NO: 917509
uuaggaaacccgugacuua

SEQ ID NO: 1239313 - RNA, 19 nt, Artificial Sequence
  Description of Artificial Sequence: Synthetic oligonucleotide
  Antisense strand to SEQ ID NO: 1239312
uaagucacggguuuccuaa

SEQ ID NO: 1239314 - RNA, 19 nt, Artificial Sequence
  Description of Artificial Sequence: Synthetic oligonucleotide
  Sense strand starting at position 2933 of SEQ ID NO: 917509
uaauacuaguggcuagaaa

SEQ ID NO: 1239315 - RNA, 19 nt, Artificial Sequence
  Description of Artificial Sequence: Synthetic oligonucleotide
  Antisense strand to SEQ ID NO: 1239314
uuucuagccacuaguauua

SEQ ID NO: 1239316 - RNA, 19 nt, Artificial Sequence
  Description of Artificial Sequence: Synthetic oligonucleotide
  Sense strand starting at position 2975 of SEQ ID NO: 917509
gaaggugugguccagggua

SEQ ID NO: 1239317 - RNA, 19 nt, Artificial Sequence
  Description of Artificial Sequence: Synthetic oligonucleotide
  Antisense strand to SEQ ID NO: 1239316
uacccuggaccacaccuuc

SEQ ID NO: 1239318 - RNA, 19 nt, Artificial Sequence
  Description of Artificial Sequence: Synthetic oligonucleotide
  Sense strand starting at position 3002 of SEQ ID NO: 917509
cugugagcucaauggaaau

SEQ ID NO: 1239319 - RNA, 19 nt, Artificial Sequence
  Description of Artificial Sequence: Synthetic oligonucleotide
  Antisense strand to SEQ ID NO: 1239318
auuuccauugagcucacag

SEQ ID NO: 1239320 - RNA, 19 nt, Artificial Sequence
  Description of Artificial Sequence: Synthetic oligonucleotide
  Sense strand starting at position 3072 of SEQ ID NO: 917509
acgggaaccacaggugauu

SEQ ID NO: 1239321 - RNA, 19 nt, Artificial Sequence
  Description of Artificial Sequence: Synthetic oligonucleotide
  Antisense strand to SEQ ID NO: 1239320
aaucaccugugguucccgu

SEQ ID NO: 1239322 - RNA, 19 nt, Artificial Sequence
  Description of Artificial Sequence: Synthetic oligonucleotide
  Sense strand starting at position 3083 of SEQ ID NO: 917509
aggugauuccuaugcacag

SEQ ID NO: 1239323 - RNA, 19 nt, Artificial Sequence
  Description of Artificial Sequence: Synthetic oligonucleotide
  Antisense strand to SEQ ID NO: 1239322
cugugcauaggaaucaccu

SEQ ID NO: 1239324 - RNA, 19 nt, Artificial Sequence
  Description of Artificial Sequence: Synthetic oligonucleotide
  Sense strand starting at position 3085 of SEQ ID NO: 917509
gugauuccuaugcacagga

SEQ ID NO: 1239325 - RNA, 19 nt, Artificial Sequence
  Description of Artificial Sequence: Synthetic oligonucleotide
  Antisense strand to SEQ ID NO: 1239324
uccugugcauaggaaucac

SEQ ID NO: 1239326 - RNA, 19 nt, Artificial Sequence
  Description of Artificial Sequence: Synthetic oligonucleotide
  Sense strand starting at position 3113 of SEQ ID NO: 917509
aagagugauuuagaggauu

SEQ ID NO: 1239327 - RNA, 19 nt, Artificial Sequence
  Description of Artificial Sequence: Synthetic oligonucleotide
  Antisense strand to SEQ ID NO: 1239326
aauccucuaaaucacucuu

SEQ ID NO: 1239328 - RNA, 19 nt, Artificial Sequence
  Description of Artificial Sequence: Synthetic oligonucleotide
  Sense strand starting at position 3330 of SEQ ID NO: 917509
aggccaauacgugauaguu

SEQ ID NO: 1239329 - RNA, 19 nt, Artificial Sequence
  Description of Artificial Sequence: Synthetic oligonucleotide
  Antisense strand to SEQ ID NO: 1239328
aacuaucacguauuggccu

SEQ ID NO: 1239330 - RNA, 19 nt, Artificial Sequence
  Description of Artificial Sequence: Synthetic oligonucleotide
  Sense strand starting at position 3444 of SEQ ID NO: 917509
gcuggaucucuugaaguug

SEQ ID NO: 1239331 - RNA, 19 nt, Artificial Sequence
  Description of Artificial Sequence: Synthetic oligonucleotide
  Antisense strand to SEQ ID NO: 1239330
caacuucaagagauccagc

SEQ ID NO: 1239332 - RNA, 19 nt, Artificial Sequence
  Description of Artificial Sequence: Synthetic oligonucleotide
  Sense strand starting at position 3453 of SEQ ID NO: 917509
cuugaaguugcggaaacau

SEQ ID NO: 1239333 - RNA, 19 nt, Artificial Sequence
  Description of Artificial Sequence: Synthetic oligonucleotide
  Antisense strand to SEQ ID NO: 1239332
auguuuccgcaacuucaag

SEQ ID NO: 1239334 - RNA, 19 nt, Artificial Sequence
  Description of Artificial Sequence: Synthetic oligonucleotide
  Sense strand starting at position 3536 of SEQ ID NO: 917509
uaagcaguuccacgaauuu

SEQ ID NO: 1239335 - RNA, 19 nt, Artificial Sequence
  Description of Artificial Sequence: Synthetic oligonucleotide
  Antisense strand to SEQ ID NO: 1239334
aaauucguggaacugcuua

SEQ ID NO: 1239336 - RNA, 19 nt, Artificial Sequence
  Description of Artificial Sequence: Synthetic oligonucleotide
  Sense strand starting at position 3600 of SEQ ID NO: 917509
uuauccuacuugguaugau

SEQ ID NO: 1239337 - RNA, 19 nt, Artificial Sequence
  Description of Artificial Sequence: Synthetic oligonucleotide
  Antisense strand to SEQ ID NO: 1239336
aucauaccaaguaggauaa

SEQ ID NO: 1239338 - RNA, 19 nt, Artificial Sequence
  Description of Artificial Sequence: Synthetic oligonucleotide
  Sense strand starting at position 3603 of SEQ ID NO: 917509
uccuacuugguaugaucua

SEQ ID NO: 1239339 - RNA, 19 nt, Artificial Sequence
  Description of Artificial Sequence: Synthetic oligonucleotide
  Antisense strand to SEQ ID NO: 1239338
uagaucauaccaaguagga

SEQ ID NO: 1239340 - RNA, 19 nt, Artificial Sequence
  Description of Artificial Sequence: Synthetic oligonucleotide
  Sense strand starting at position 3646 of SEQ ID NO: 917509
uuguaacugccauauagca

SEQ ID NO: 1239341 - RNA, 19 nt, Artificial Sequence
  Description of Artificial Sequence: Synthetic oligonucleotide
  Antisense strand to SEQ ID NO: 1239340
ugcuauauggcaguuacaa

SEQ ID NO: 1239342 - RNA, 19 nt, Artificial Sequence
  Description of Artificial Sequence: Synthetic oligonucleotide
  Sense strand starting at position 3679 of SEQ ID NO: 917509
uuaauacuugaguacgcua

SEQ ID NO: 1239343 - RNA, 19 nt, Artificial Sequence
  Description of Artificial Sequence: Synthetic oligonucleotide
  Antisense strand to SEQ ID NO: 1239342
uagcguacucaaguauuaa

SEQ ID NO: 1239344 - RNA, 19 nt, Artificial Sequence
  Description of Artificial Sequence: Synthetic oligonucleotide
  Sense strand starting at position 3704 of SEQ ID NO: 917509
uauuucuccugugagagau

SEQ ID NO: 1239345 - RNA, 19 nt, Artificial Sequence
  Description of Artificial Sequence: Synthetic oligonucleotide
  Antisense strand to SEQ ID NO: 1239344
aucucucacaggagaaaua

SEQ ID NO: 1239346 - RNA, 19 nt, Artificial Sequence
  Description of Artificial Sequence: Synthetic oligonucleotide
  Sense strand starting at position 3708 of SEQ ID NO: 917509
ucuccugugagagauagua

SEQ ID NO: 1239347 - RNA, 19 nt, Artificial Sequence
  Description of Artificial Sequence: Synthetic oligonucleotide
  Antisense strand to SEQ ID NO: 1239346
uacuaucucucacaggaga

SEQ ID NO: 1239348 - RNA, 19 nt, Artificial Sequence
  Description of Artificial Sequence: Synthetic oligonucleotide
  Sense strand starting at position 3886 of SEQ ID NO: 917510
auccauaguguauacgaga

SEQ ID NO: 1239349 - RNA, 19 nt, Artificial Sequence
  Description of Artificial Sequence: Synthetic oligonucleotide
  Antisense strand to SEQ ID NO: 1239348
ucucguauacacuauggau

SEQ ID NO: 1239350 - RNA, 19 nt, Artificial Sequence
  Description of Artificial Sequence: Synthetic oligonucleotide
  Sense strand starting at position 100 of SEQ ID NO: 917510
acauaaauaggcugucacu

SEQ ID NO: 1239351 - RNA, 19 nt, Artificial Sequence
  Description of Artificial Sequence: Synthetic oligonucleotide
  Antisense strand to SEQ ID NO: 1239350
agugacagccuauuuaugu

SEQ ID NO: 1239352 - RNA, 19 nt, Artificial Sequence
  Description of Artificial Sequence: Synthetic oligonucleotide
  Sense strand starting at position 106 of SEQ ID NO: 917510
auaggcugucacuauuaca

SEQ ID NO: 1239353 - RNA, 19 nt, Artificial Sequence
  Description of Artificial Sequence: Synthetic oligonucleotide
  Antisense strand to SEQ ID NO: 1239352
uguaauagugacagccuau

SEQ ID NO: 1239354 - RNA, 19 nt, Artificial Sequence
  Description of Artificial Sequence: Synthetic oligonucleotide
  Sense strand starting at position 571 of SEQ ID NO: 917510
cgaauauucuagcaauacu

SEQ ID NO: 1239355 - RNA, 19 nt, Artificial Sequence
  Description of Artificial Sequence: Synthetic oligonucleotide
  Antisense strand to SEQ ID NO: 1239354
aguauugcuagaauauucg

SEQ ID NO: 1239356 - RNA, 19 nt, Artificial Sequence
  Description of Artificial Sequence: Synthetic oligonucleotide
  Sense strand starting at position 590 of SEQ ID NO: 917510
ucauuaguauaccuacaga

SEQ ID NO: 1239357 - RNA, 19 nt, Artificial Sequence
  Description of Artificial Sequence: Synthetic oligonucleotide
  Antisense strand to SEQ ID NO: 1239356
ucuguagguauacuaauga

SEQ ID NO: 1239358 - RNA, 19 nt, Artificial Sequence
  Description of Artificial Sequence: Synthetic oligonucleotide
  Sense strand starting at position 879 of SEQ ID NO: 917510
uuguaacaacuuggauauu

SEQ ID NO: 1239359 - RNA, 19 nt, Artificial Sequence
  Description of Artificial Sequence: Synthetic oligonucleotide
  Antisense strand to SEQ ID NO: 1239358
aauauccaaguuguuacaa

SEQ ID NO: 1239360 - RNA, 19 nt, Artificial Sequence
  Description of Artificial Sequence: Synthetic oligonucleotide
  Sense strand starting at position 888 of SEQ ID NO: 917510
cuuggauauucuuuagcaa

SEQ ID NO: 1239361 - RNA, 19 nt, Artificial Sequence
  Description of Artificial Sequence: Synthetic oligonucleotide
  Antisense strand to SEQ ID NO: 1239360
uugcuaaagaauauccaag

SEQ ID NO: 1239362 - RNA, 19 nt, Artificial Sequence
  Description of Artificial Sequence: Synthetic oligonucleotide
  Sense strand starting at position 889 of SEQ ID NO: 917510
uuggauauucuuuagcaaa

SEQ ID NO: 1239363 - RNA, 19 nt, Artificial Sequence
  Description of Artificial Sequence: Synthetic oligonucleotide
  Antisense strand to SEQ ID NO: 1239362
uuugcuaaagaauauccaa

SEQ ID NO: 1239364 - RNA, 19 nt, Artificial Sequence
  Description of Artificial Sequence: Synthetic oligonucleotide
  Sense strand starting at position 923 of SEQ ID NO: 917510
uuaacuuuacaaggcagaa

SEQ ID NO: 1239365 - RNA, 19 nt, Artificial Sequence
  Description of Artificial Sequence: Synthetic oligonucleotide
  Antisense strand to SEQ ID NO: 1239364
uucugccuuguaaaguuaa

SEQ ID NO: 1239366 - RNA, 19 nt, Artificial Sequence
  Description of Artificial Sequence: Synthetic oligonucleotide
  Sense strand starting at position 1033 of SEQ ID NO: 917510
ccgagagacucuccugacu

SEQ ID NO: 1239367 - RNA, 19 nt, Artificial Sequence
  Description of Artificial Sequence: Synthetic oligonucleotide
  Antisense strand to SEQ ID NO: 1239366
agucaggagagucucucgg

SEQ ID NO: 1239368 - RNA, 19 nt, Artificial Sequence
  Description of Artificial Sequence: Synthetic oligonucleotide
  Sense strand starting at position 1035 of SEQ ID NO: 917510
gagagacucuccugacuug

SEQ ID NO: 1239369 - RNA, 19 nt, Artificial Sequence
  Description of Artificial Sequence: Synthetic oligonucleotide
  Antisense strand to SEQ ID NO: 1239368
caagucaggagagucucuc

SEQ ID NO: 1239370 - RNA, 19 nt, Artificial Sequence
  Description of Artificial Sequence: Synthetic oligonucleotide
  Sense strand starting at position 1054 of SEQ ID NO: 917510
gggaccuucuccgguauuu

SEQ ID NO: 1239371 - RNA, 19 nt, Artificial Sequence
  Description of Artificial Sequence: Synthetic oligonucleotide
  Antisense strand to SEQ ID NO: 1239370
aaauaccggagaagguccc

SEQ ID NO: 1239372 - RNA, 19 nt, Artificial Sequence
  Description of Artificial Sequence: Synthetic oligonucleotide
  Sense strand starting at position 1221 of SEQ ID NO: 917510
aagcguuagccgucugaaa

SEQ ID NO: 1239373 - RNA, 19 nt, Artificial Sequence
  Description of Artificial Sequence: Synthetic oligonucleotide
  Antisense strand to SEQ ID NO: 1239372
uuucagacggcuaacgcuu

SEQ ID NO: 1239374 - RNA, 19 nt, Artificial Sequence
  Description of Artificial Sequence: Synthetic oligonucleotide
  Sense strand starting at position 1273 of SEQ ID NO: 917510
guuucuuuguuggugguau

SEQ ID NO: 1239375 - RNA, 19 nt, Artificial Sequence
  Description of Artificial Sequence: Synthetic oligonucleotide
  Antisense strand to SEQ ID NO: 1239374
auaccaccaacaaagaaac

SEQ ID NO: 1239376 - RNA, 19 nt, Artificial Sequence
  Description of Artificial Sequence: Synthetic oligonucleotide
  Sense strand starting at position 1351 of SEQ ID NO: 917510
acucccauauaggagaaau

SEQ ID NO: 1239377 - RNA, 19 nt, Artificial Sequence
  Description of Artificial Sequence: Synthetic oligonucleotide
  Antisense strand to SEQ ID NO: 1239376
auuucuccuauaugggagu

SEQ ID NO: 1239378 - RNA, 19 nt, Artificial Sequence
  Description of Artificial Sequence: Synthetic oligonucleotide
  Sense strand starting at position 2214 of SEQ ID NO: 917510
ggaggaguucgcggacaag

SEQ ID NO: 1239379 - RNA, 19 nt, Artificial Sequence
  Description of Artificial Sequence: Synthetic oligonucleotide
  Antisense strand to SEQ ID NO: 1239378
cuuguccgcgaacuccucc

SEQ ID NO: 1239380 - RNA, 19 nt, Artificial Sequence
  Description of Artificial Sequence: Synthetic oligonucleotide
  Sense strand starting at position 2502 of SEQ ID NO: 917510
caggauggucucgguaacu

SEQ ID NO: 1239381 - RNA, 19 nt, Artificial Sequence
  Description of Artificial Sequence: Synthetic oligonucleotide
  Antisense strand to SEQ ID NO: 1239380
aguuaccgagaccauccug

SEQ ID NO: 1239382 - RNA, 19 nt, Artificial Sequence
  Description of Artificial Sequence: Synthetic oligonucleotide
  Sense strand starting at position 2628 of SEQ ID NO: 917510
gcagcacuuugauuacagu

SEQ ID NO: 1239383 - RNA, 19 nt, Artificial Sequence
  Description of Artificial Sequence: Synthetic oligonucleotide
  Antisense strand to SEQ ID NO: 1239382
acuguaaucaaagugcugc

SEQ ID NO: 1239384 - RNA, 19 nt, Artificial Sequence
  Description of Artificial Sequence: Synthetic oligonucleotide
  Sense strand starting at position 2644 of SEQ ID NO: 917510
aguaacuuacauggaaguu

SEQ ID NO: 1239385 - RNA, 19 nt, Artificial Sequence
  Description of Artificial Sequence: Synthetic oligonucleotide
  Antisense strand to SEQ ID NO: 1239384
aacuuccauguaaguuacu

SEQ ID NO: 1239386 - RNA, 19 nt, Artificial Sequence
  Description of Artificial Sequence: Synthetic oligonucleotide
  Sense strand starting at position 2941 of SEQ ID NO: 917510
acagucugcagggaucuua

SEQ ID NO: 1239387 - RNA, 19 nt, Artificial Sequence
  Description of Artificial Sequence: Synthetic oligonucleotide
  Antisense strand to SEQ ID NO: 1239386
uaagaucccugcagacugu

SEQ ID NO: 1239388 - RNA, 19 nt, Artificial Sequence
  Description of Artificial Sequence: Synthetic oligonucleotide
  Sense strand starting at position 2992 of SEQ ID NO: 917510
ccaggcuuucgucacaacu

SEQ ID NO: 1239389 - RNA, 19 nt, Artificial Sequence
  Description of Artificial Sequence: Synthetic oligonucleotide
  Antisense strand to SEQ ID NO: 1239388
aguugugacgaaagccugg

SEQ ID NO: 1239390 - RNA, 19 nt, Artificial Sequence
  Description of Artificial Sequence: Synthetic oligonucleotide
  Sense strand starting at position 3001 of SEQ ID NO: 917510
cgucacaacucagugagua

SEQ ID NO: 1239391 - RNA, 19 nt, Artificial Sequence
  Description of Artificial Sequence: Synthetic oligonucleotide
  Antisense strand to SEQ ID NO: 1239390
uacucacugaguugugacg

SEQ ID NO: 1239392 - RNA, 19 nt, Artificial Sequence
  Description of Artificial Sequence: Synthetic oligonucleotide
  Sense strand starting at position 3002 of SEQ ID NO: 917510
gucacaacucagugaguag

SEQ ID NO: 1239393 - RNA, 19 nt, Artificial Sequence
  Description of Artificial Sequence: Synthetic oligonucleotide
  Antisense strand to SEQ ID NO: 1239392
cuacucacugaguugugac

SEQ ID NO: 1239394 - RNA, 19 nt, Artificial Sequence
  Description of Artificial Sequence: Synthetic oligonucleotide
  Sense strand starting at position 3046 of SEQ ID NO: 917510
cucugaugaugugugauua

SEQ ID NO: 1239395 - RNA, 19 nt, Artificial Sequence
  Description of Artificial Sequence: Synthetic oligonucleotide
  Antisense strand to SEQ ID NO: 1239394
uaaucacacaucaucagag

SEQ ID NO: 1239396 - RNA, 19 nt, Artificial Sequence
  Description of Artificial Sequence: Synthetic oligonucleotide
  Sense strand starting at position 3047 of SEQ ID NO: 917510
ucugaugaugugugauuaa

SEQ ID NO: 1239397 - RNA, 19 nt, Artificial Sequence
  Description of Artificial Sequence: Synthetic oligonucleotide
  Antisense strand to SEQ ID NO: 1239396
uuaaucacacaucaucaga

SEQ ID NO: 1239398 - RNA, 19 nt, Artificial Sequence
  Description of Artificial Sequence: Synthetic oligonucleotide
  Sense strand starting at position 3166 of SEQ ID NO: 917510
cuguuccugcaguguuuaa

SEQ ID NO: 1239399 - RNA, 19 nt, Artificial Sequence
  Description of Artificial Sequence: Synthetic oligonucleotide
  Antisense strand to SEQ ID NO: 1239398
uuaaacacugcaggaacag

SEQ ID NO: 1239400 - RNA, 19 nt, Artificial Sequence
  Description of Artificial Sequence: Synthetic oligonucleotide
  Sense strand starting at position 3191 of SEQ ID NO: 917510
ggagauauauucugauuau

SEQ ID NO: 1239401 - RNA, 19 nt, Artificial Sequence
  Description of Artificial Sequence: Synthetic oligonucleotide
  Antisense strand to SEQ ID NO: 1239400
auaaucagaauauaucucc

SEQ ID NO: 1239402 - RNA, 19 nt, Artificial Sequence
  Description of Artificial Sequence: Synthetic oligonucleotide
  Sense strand starting at position 3303 of SEQ ID NO: 917510
cuagucauguuacuagguu

SEQ ID NO: 1239403 - RNA, 19 nt, Artificial Sequence
  Description of Artificial Sequence: Synthetic oligonucleotide
  Antisense strand to SEQ ID NO: 1239402
aaccuaguaacaugacuag

SEQ ID NO: 1239404 - RNA, 19 nt, Artificial Sequence
  Description of Artificial Sequence: Synthetic oligonucleotide
  Sense strand starting at position 3307 of SEQ ID NO: 917510
ucauguuacuagguuagga

SEQ ID NO: 1239405 - RNA, 19 nt, Artificial Sequence
  Description of Artificial Sequence: Synthetic oligonucleotide
  Antisense strand to SEQ ID NO: 1239404
uccuaaccuaguaacauga

SEQ ID NO: 1239406 - RNA, 19 nt, Artificial Sequence
  Description of Artificial Sequence: Synthetic oligonucleotide
  Sense strand starting at position 3312 of SEQ ID NO: 917510
uuacuagguuaggauaaua

SEQ ID NO: 1239407 - RNA, 19 nt, Artificial Sequence
  Description of Artificial Sequence: Synthetic oligonucleotide
  Antisense strand to SEQ ID NO: 1239406
uauuauccuaaccuaguaa

SEQ ID NO: 1239408 - RNA, 19 nt, Artificial Sequence
  Description of Artificial Sequence: Synthetic oligonucleotide
  Sense strand starting at position 3367 of SEQ ID NO: 917510
agauucuuauuguagcaau

SEQ ID NO: 1239409 - RNA, 19 nt, Artificial Sequence
  Description of Artificial Sequence: Synthetic oligonucleotide
  Antisense strand to SEQ ID NO: 1239408
auugcuacaauaagaaucu

SEQ ID NO: 1239410 - RNA, 19 nt, Artificial Sequence
  Description of Artificial Sequence: Synthetic oligonucleotide
  Sense strand starting at position 3481 of SEQ ID NO: 917510
aggucaguaacuuagggua

SEQ ID NO: 1239411 - RNA, 19 nt, Artificial Sequence
  Description of Artificial Sequence: Synthetic oligonucleotide
  Antisense strand to SEQ ID NO: 1239410
uacccuaaguuacugaccu

SEQ ID NO: 1239412 - RNA, 19 nt, Artificial Sequence
  Description of Artificial Sequence: Synthetic oligonucleotide
  Sense strand starting at position 3484 of SEQ ID NO: 917510
ucaguaacuuaggguauuu

SEQ ID NO: 1239413 - RNA, 19 nt, Artificial Sequence
  Description of Artificial Sequence: Synthetic oligonucleotide
  Antisense strand to SEQ ID NO: 1239412
aaauacccuaaguuacuga

SEQ ID NO: 1239414 - RNA, 19 nt, Artificial Sequence
  Description of Artificial Sequence: Synthetic oligonucleotide
  Sense strand starting at position 3678 of SEQ ID NO: 917510
acauguuugcuggaugugu

SEQ ID NO: 1239415 - RNA, 19 nt, Artificial Sequence
  Description of Artificial Sequence: Synthetic oligonucleotide
  Antisense strand to SEQ ID NO: 1239414
acacauccagcaaacaugu

SEQ ID NO: 1239416 - RNA, 19 nt, Artificial Sequence
  Description of Artificial Sequence: Synthetic oligonucleotide
  Sense strand starting at position 3680 of SEQ ID NO: 917510
auguuugcuggauguguau

SEQ ID NO: 1239417 - RNA, 19 nt, Artificial Sequence
  Description of Artificial Sequence: Synthetic oligonucleotide
  Antisense strand to SEQ ID NO: 1239416
auacacauccagcaaacau

SEQ ID NO: 1239418 - RNA, 19 nt, Artificial Sequence
  Description of Artificial Sequence: Synthetic oligonucleotide
  Sense strand starting at position 3682 of SEQ ID NO: 917510
guuugcuggauguguauau

SEQ ID NO: 1239419 - RNA, 19 nt, Artificial Sequence
  Description of Artificial Sequence: Synthetic oligonucleotide
  Antisense strand to SEQ ID NO: 1239418
auauacacauccagcaaac

SEQ ID NO: 1239420 - RNA, 19 nt, Artificial Sequence
  Description of Artificial Sequence: Synthetic oligonucleotide
  Sense strand starting at position 3689 of SEQ ID NO: 917510
ggauguguauauuucguaa

SEQ ID NO: 1239421 - RNA, 19 nt, Artificial Sequence
  Description of Artificial Sequence: Synthetic oligonucleotide
  Antisense strand to SEQ ID NO: 1239420
uuacgaaauauacacaucc

SEQ ID NO: 1239422 - RNA, 19 nt, Artificial Sequence
  Description of Artificial Sequence: Synthetic oligonucleotide
  Sense strand starting at position 3691 of SEQ ID NO: 917510
auguguauauuucguaaac

SEQ ID NO: 1239423 - RNA, 19 nt, Artificial Sequence
  Description of Artificial Sequence: Synthetic oligonucleotide
  Antisense strand to SEQ ID NO: 1239422
guuuacgaaauauacacau

SEQ ID NO: 1239424 - RNA, 19 nt, Artificial Sequence
  Description of Artificial Sequence: Synthetic oligonucleotide
  Sense strand starting at position 3693 of SEQ ID NO: 917510
guguauauuucguaaaccu

SEQ ID NO: 1239425 - RNA, 19 nt, Artificial Sequence
  Description of Artificial Sequence: Synthetic oligonucleotide
  Antisense strand to SEQ ID NO: 1239424
agguuuacgaaauauacac

SEQ ID NO: 1239426 - RNA, 19 nt, Artificial Sequence
  Description of Artificial Sequence: Synthetic oligonucleotide
  Sense strand starting at position 3981 of SEQ ID NO: 917510
guugaaaugcucuguuuga

SEQ ID NO: 1239427 - RNA, 19 nt, Artificial Sequence
  Description of Artificial Sequence: Synthetic oligonucleotide
  Antisense strand to SEQ ID NO: 1239426
ucaaacagagcauuucaac

SEQ ID NO: 1239428 - RNA, 19 nt, Artificial Sequence
  Description of Artificial Sequence: Synthetic oligonucleotide
  Sense strand starting at position 3982 of SEQ ID NO: 917510
uugaaaugcucuguuugau

SEQ ID NO: 1239429 - RNA, 19 nt, Artificial Sequence
  Description of Artificial Sequence: Synthetic oligonucleotide
  Antisense strand to SEQ ID NO: 1239428
aucaaacagagcauuucaa

SEQ ID NO: 1239430 - RNA, 19 nt, Artificial Sequence
  Description of Artificial Sequence: Synthetic oligonucleotide
  Sense strand starting at position 3982 of SEQ ID NO: 917511
uugaaaugcucuguuugau

SEQ ID NO: 1239431 - RNA, 19 nt, Artificial Sequence
  Description of Artificial Sequence: Synthetic oligonucleotide
  Antisense strand to SEQ ID NO: 1239430
aucaaacagagcauuucaa

SEQ ID NO: 1239432 - RNA, 19 nt, Artificial Sequence
  Description of Artificial Sequence: Synthetic oligonucleotide
  Sense strand starting at position 31 of SEQ ID NO: 917511
ccacuccuuuggguauuaa

SEQ ID NO: 1239433 - RNA, 19 nt, Artificial Sequence
  Description of Artificial Sequence: Synthetic oligonucleotide
  Antisense strand to SEQ ID NO: 1239432
uuaauacccaaaggagugg

SEQ ID NO: 1239434 - RNA, 19 nt, Artificial Sequence
  Description of Artificial Sequence: Synthetic oligonucleotide
  Sense strand starting at position 89 of SEQ ID NO: 917511
agaaauuacuuuccaguga

SEQ ID NO: 1239435 - RNA, 19 nt, Artificial Sequence
  Description of Artificial Sequence: Synthetic oligonucleotide
  Antisense strand to SEQ ID NO: 1239434
ucacuggaaaguaauuucu

SEQ ID NO: 1239436 - RNA, 19 nt, Artificial Sequence
  Description of Artificial Sequence: Synthetic oligonucleotide
  Sense strand starting at position 256 of SEQ ID NO: 917511
cugugagucaagggucaga

SEQ ID NO: 1239437 - RNA, 19 nt, Artificial Sequence
  Description of Artificial Sequence: Synthetic oligonucleotide
  Antisense strand to SEQ ID NO: 1239436
ucugacccuugacucacag

SEQ ID NO: 1239438 - RNA, 19 nt, Artificial Sequence
  Description of Artificial Sequence: Synthetic oligonucleotide
  Sense strand starting at position 269 of SEQ ID NO: 917511
gucagaaagcuccagugau

SEQ ID NO: 1239439 - RNA, 19 nt, Artificial Sequence
  Description of Artificial Sequence: Synthetic oligonucleotide
  Antisense strand to SEQ ID NO: 1239438
aucacuggagcuuucugac

SEQ ID NO: 1239440 - RNA, 19 nt, Artificial Sequence
  Description of Artificial Sequence: Synthetic oligonucleotide
  Sense strand starting at position 615 of SEQ ID NO: 917511
cagguuucuccacagagca

SEQ ID NO: 1239441 - RNA, 19 nt, Artificial Sequence
  Description of Artificial Sequence: Synthetic oligonucleotide
  Antisense strand to SEQ ID NO: 1239440
ugcucuguggagaaaccug

SEQ ID NO: 1239442 - RNA, 19 nt, Artificial Sequence
  Description of Artificial Sequence: Synthetic oligonucleotide
  Sense strand starting at position 823 of SEQ ID NO: 917511
cagggaguugcugaucuga

SEQ ID NO: 1239443 - RNA, 19 nt, Artificial Sequence
  Description of Artificial Sequence: Synthetic oligonucleotide
  Antisense strand to SEQ ID NO: 1239442
ucagaucagcaacucccug

SEQ ID NO: 1239444 - RNA, 19 nt, Artificial Sequence
  Description of Artificial Sequence: Synthetic oligonucleotide
  Sense strand starting at position 825 of SEQ ID NO: 917511
gggaguugcugaucugaau

SEQ ID NO: 1239445 - RNA, 19 nt, Artificial Sequence
  Description of Artificial Sequence: Synthetic oligonucleotide
  Antisense strand to SEQ ID NO: 1239444
auucagaucagcaacuccc

SEQ ID NO: 1239446 - RNA, 19 nt, Artificial Sequence
  Description of Artificial Sequence: Synthetic oligonucleotide
  Sense strand starting at position 831 of SEQ ID NO: 917511
ugcugaucugaaugaauuc

SEQ ID NO: 1239447 - RNA, 19 nt, Artificial Sequence
  Description of Artificial Sequence: Synthetic oligonucleotide
  Antisense strand to SEQ ID NO: 1239446
gaauucauucagaucagca

SEQ ID NO: 1239448 - RNA, 19 nt, Artificial Sequence
  Description of Artificial Sequence: Synthetic oligonucleotide
  Sense strand starting at position 1124 of SEQ ID NO: 917511
guccaugucugaccuaaac

SEQ ID NO: 1239449 - RNA, 19 nt, Artificial Sequence
  Description of Artificial Sequence: Synthetic oligonucleotide
  Antisense strand to SEQ ID NO: 1239448
guuuaggucagacauggac

SEQ ID NO: 1239450 - RNA, 19 nt, Artificial Sequence
  Description of Artificial Sequence: Synthetic oligonucleotide
  Sense strand starting at position 1745 of SEQ ID NO: 917511
auuccuggccaguaucuaa

SEQ ID NO: 1239451 - RNA, 19 nt, Artificial Sequence
  Description of Artificial Sequence: Synthetic oligonucleotide
  Antisense strand to SEQ ID NO: 1239450
uuagauacuggccaggaau

SEQ ID NO: 1239452 - RNA, 19 nt, Artificial Sequence
  Description of Artificial Sequence: Synthetic oligonucleotide
  Sense strand starting at position 1784 of SEQ ID NO: 917511
uugaaaucccuuugcagag

SEQ ID NO: 1239453 - RNA, 19 nt, Artificial Sequence
  Description of Artificial Sequence: Synthetic oligonucleotide
  Antisense strand to SEQ ID NO: 1239452
cucugcaaagggauuucaa

SEQ ID NO: 1239454 - RNA, 19 nt, Artificial Sequence
  Description of Artificial Sequence: Synthetic oligonucleotide
  Sense strand starting at position 1785 of SEQ ID NO: 917511
ugaaaucccuuugcagaga

SEQ ID NO: 1239455 - RNA, 19 nt, Artificial Sequence
  Description of Artificial Sequence: Synthetic oligonucleotide
  Antisense strand to SEQ ID NO: 1239454
ucucugcaaagggauuuca

SEQ ID NO: 1239456 - RNA, 19 nt, Artificial Sequence
  Description of Artificial Sequence: Synthetic oligonucleotide
  Sense strand starting at position 1832 of SEQ ID NO: 917511
gugcaagggcaucaauaaa

SEQ ID NO: 1239457 - RNA, 19 nt, Artificial Sequence
  Description of Artificial Sequence: Synthetic oligonucleotide
  Antisense strand to SEQ ID NO: 1239456
uuuauugaugcccuugcac

SEQ ID NO: 1239458 - RNA, 19 nt, Artificial Sequence
  Description of Artificial Sequence: Synthetic oligonucleotide
  Sense strand starting at position 1912 of SEQ ID NO: 917511
gcugcaaucagaggacauc

SEQ ID NO: 1239459 - RNA, 19 nt, Artificial Sequence
  Description of Artificial Sequence: Synthetic oligonucleotide
  Antisense strand to SEQ ID NO: 1239458
gauguccucugauugcagc

SEQ ID NO: 1239460 - RNA, 19 nt, Artificial Sequence
  Description of Artificial Sequence: Synthetic oligonucleotide
  Sense strand starting at position 1955 of SEQ ID NO: 917511
ccacgaauucuccaagguc

SEQ ID NO: 1239461 - RNA, 19 nt, Artificial Sequence
  Description of Artificial Sequence: Synthetic oligonucleotide
  Antisense strand to SEQ ID NO: 1239460
gaccuuggagaauucgugg

SEQ ID NO: 1239462 - RNA, 19 nt, Artificial Sequence
  Description of Artificial Sequence: Synthetic oligonucleotide
  Sense strand starting at position 2003 of SEQ ID NO: 917511
cuuguauuccacuggagac

SEQ ID NO: 1239463 - RNA, 19 nt, Artificial Sequence
  Description of Artificial Sequence: Synthetic oligonucleotide
  Antisense strand to SEQ ID NO: 1239462
gucuccaguggaauacaag

SEQ ID NO: 1239464 - RNA, 19 nt, Artificial Sequence
  Description of Artificial Sequence: Synthetic oligonucleotide
  Sense strand starting at position 2078 of SEQ ID NO: 917511
guuauaucugcugaacaca

SEQ ID NO: 1239465 - RNA, 19 nt, Artificial Sequence
  Description of Artificial Sequence: Synthetic oligonucleotide
  Antisense strand to SEQ ID NO: 1239464
uguguucagcagauauaac

SEQ ID NO: 1239466 - RNA, 19 nt, Artificial Sequence
  Description of Artificial Sequence: Synthetic oligonucleotide
  Sense strand starting at position 2133 of SEQ ID NO: 917511
uuuaaaugccuuugggaga

SEQ ID NO: 1239467 - RNA, 19 nt, Artificial Sequence
  Description of Artificial Sequence: Synthetic oligonucleotide
  Antisense strand to SEQ ID NO: 1239466
ucucccaaaggcauuuaaa

SEQ ID NO: 1239468 - RNA, 19 nt, Artificial Sequence
  Description of Artificial Sequence: Synthetic oligonucleotide
  Sense strand starting at position 2156 of SEQ ID NO: 917511
gauccagaauacuugugua

SEQ ID NO: 1239469 - RNA, 19 nt, Artificial Sequence
  Description of Artificial Sequence: Synthetic oligonucleotide
  Antisense strand to SEQ ID NO: 1239468
uacacaaguauucuggauc

SEQ ID NO: 1239470 - RNA, 19 nt, Artificial Sequence
  Description of Artificial Sequence: Synthetic oligonucleotide
  Sense strand starting at position 2160 of SEQ ID NO: 917511
cagaauacuuguguaauga

SEQ ID NO: 1239471 - RNA, 19 nt, Artificial Sequence
  Description of Artificial Sequence: Synthetic oligonucleotide
  Antisense strand to SEQ ID NO: 1239470
ucauuacacaaguauucug

SEQ ID NO: 1239472 - RNA, 19 nt, Artificial Sequence
  Description of Artificial Sequence: Synthetic oligonucleotide
  Sense strand starting at position 2195 of SEQ ID NO: 917511
gguucuaauccagggagca

SEQ ID NO: 1239473 - RNA, 19 nt, Artificial Sequence
  Description of Artificial Sequence: Synthetic oligonucleotide
  Antisense strand to SEQ ID NO: 1239472
ugcucccuggauuagaacc

SEQ ID NO: 1239474 - RNA, 19 nt, Artificial Sequence
  Description of Artificial Sequence: Synthetic oligonucleotide
  Sense strand starting at position 2196 of SEQ ID NO: 917511
guucuaauccagggagcag

SEQ ID NO: 1239475 - RNA, 19 nt, Artificial Sequence
  Description of Artificial Sequence: Synthetic oligonucleotide
  Antisense strand to SEQ ID NO: 1239474
cugcucccuggauuagaac

SEQ ID NO: 1239476 - RNA, 19 nt, Artificial Sequence
  Description of Artificial Sequence: Synthetic oligonucleotide
  Sense strand starting at position 2212 of SEQ ID NO: 917511
cagagaucucugcaugguc

SEQ ID NO: 1239477 - RNA, 19 nt, Artificial Sequence
  Description of Artificial Sequence: Synthetic oligonucleotide
  Antisense strand to SEQ ID NO: 1239476
gaccaugcagagaucucug

SEQ ID NO: 1239478 - RNA, 19 nt, Artificial Sequence
  Description of Artificial Sequence: Synthetic oligonucleotide
  Sense strand starting at position 2214 of SEQ ID NO: 917511
gagaucucugcauggucaa

SEQ ID NO: 1239479 - RNA, 19 nt, Artificial Sequence
  Description of Artificial Sequence: Synthetic oligonucleotide
  Antisense strand to SEQ ID NO: 1239478
uugaccaugcagagaucuc

SEQ ID NO: 1239480 - RNA, 19 nt, Artificial Sequence
  Description of Artificial Sequence: Synthetic oligonucleotide
  Sense strand starting at position 2427 of SEQ ID NO: 917511
cagcgauuugccuaucuca

SEQ ID NO: 1239481 - RNA, 19 nt, Artificial Sequence
  Description of Artificial Sequence: Synthetic oligonucleotide
  Antisense strand to SEQ ID NO: 1239480
ugagauaggcaaaucgcug

SEQ ID NO: 1239482 - RNA, 19 nt, Artificial Sequence
  Description of Artificial Sequence: Synthetic oligonucleotide
  Sense strand starting at position 2803 of SEQ ID NO: 917511
ccggucuuccuggaggaca

SEQ ID NO: 1239483 - RNA, 19 nt, Artificial Sequence
  Description of Artificial Sequence: Synthetic oligonucleotide
  Antisense strand to SEQ ID NO: 1239482
uguccuccaggaagaccgg

SEQ ID NO: 1239484 - RNA, 19 nt, Artificial Sequence
  Description of Artificial Sequence: Synthetic oligonucleotide
  Sense strand starting at position 2937 of SEQ ID NO: 917511
ccgcgucuggcuguuauua

SEQ ID NO: 1239485 - RNA, 19 nt, Artificial Sequence
  Description of Artificial Sequence: Synthetic oligonucleotide
  Antisense strand to SEQ ID NO: 1239484
uaauaacagccagacgcgg

SEQ ID NO: 1239486 - RNA, 19 nt, Artificial Sequence
  Description of Artificial Sequence: Synthetic oligonucleotide
  Sense strand starting at position 2938 of SEQ ID NO: 917511
cgcgucuggcuguuauuaa

SEQ ID NO: 1239487 - RNA, 19 nt, Artificial Sequence
  Description of Artificial Sequence: Synthetic oligonucleotide
  Antisense strand to SEQ ID NO: 1239486
uuaauaacagccagacgcg

SEQ ID NO: 1239488 - RNA, 19 nt, Artificial Sequence
  Description of Artificial Sequence: Synthetic oligonucleotide
  Sense strand starting at position 3060 of SEQ ID NO: 917511
cuguuaaggacagguacua

SEQ ID NO: 1239489 - RNA, 19 nt, Artificial Sequence
  Description of Artificial Sequence: Synthetic oligonucleotide
  Antisense strand to SEQ ID NO: 1239488
uaguaccuguccuuaacag

SEQ ID NO: 1239490 - RNA, 19 nt, Artificial Sequence
  Description of Artificial Sequence: Synthetic oligonucleotide
  Sense strand starting at position 3098 of SEQ ID NO: 917511
augccagaugcuuaacaca

SEQ ID NO: 1239491 - RNA, 19 nt, Artificial Sequence
  Description of Artificial Sequence: Synthetic oligonucleotide
  Antisense strand to SEQ ID NO: 1239490
uguguuaagcaucuggcau

SEQ ID NO: 1239492 - RNA, 19 nt, Artificial Sequence
  Description of Artificial Sequence: Synthetic oligonucleotide
  Sense strand starting at position 3134 of SEQ ID NO: 917511
gcucauuaagcaggacaaa

SEQ ID NO: 1239493 - RNA, 19 nt, Artificial Sequence
  Description of Artificial Sequence: Synthetic oligonucleotide
  Antisense strand to SEQ ID NO: 1239492
uuuguccugcuuaaugagc

SEQ ID NO: 1239494 - RNA, 19 nt, Artificial Sequence
  Description of Artificial Sequence: Synthetic oligonucleotide
  Sense strand starting at position 3234 of SEQ ID NO: 917511
gucuauguugcuucuugua

SEQ ID NO: 1239495 - RNA, 19 nt, Artificial Sequence
  Description of Artificial Sequence: Synthetic oligonucleotide
  Antisense strand to SEQ ID NO: 1239494
uacaagaagcaacauagac

SEQ ID NO: 1239496 - RNA, 19 nt, Artificial Sequence
  Description of Artificial Sequence: Synthetic oligonucleotide
  Sense strand starting at position 3241 of SEQ ID NO: 917511
uugcuucuuguauguauuu

SEQ ID NO: 1239497 - RNA, 19 nt, Artificial Sequence
  Description of Artificial Sequence: Synthetic oligonucleotide
  Antisense strand to SEQ ID NO: 1239496
aaauacauacaagaagcaa

SEQ ID NO: 1239498 - RNA, 19 nt, Artificial Sequence
  Description of Artificial Sequence: Synthetic oligonucleotide
  Sense strand starting at position 3242 of SEQ ID NO: 917511
ugcuucuuguauguauuua

SEQ ID NO: 1239499 - RNA, 19 nt, Artificial Sequence
  Description of Artificial Sequence: Synthetic oligonucleotide
  Antisense strand to SEQ ID NO: 1239498
uaaauacauacaagaagca

SEQ ID NO: 1239500 - RNA, 19 nt, Artificial Sequence
  Description of Artificial Sequence: Synthetic oligonucleotide
  Sense strand starting at position 3250 of SEQ ID NO: 917511
guauguauuuacuuguaug

SEQ ID NO: 1239501 - RNA, 19 nt, Artificial Sequence
  Description of Artificial Sequence: Synthetic oligonucleotide
  Antisense strand to SEQ ID NO: 1239500
cauacaaguaaauacauac

SEQ ID NO: 1239502 - RNA, 19 nt, Artificial Sequence
  Description of Artificial Sequence: Synthetic oligonucleotide
  Sense strand starting at position 3272 of SEQ ID NO: 917511
guucucagccgggacauau

SEQ ID NO: 1239503 - RNA, 19 nt, Artificial Sequence
  Description of Artificial Sequence: Synthetic oligonucleotide
  Antisense strand to SEQ ID NO: 1239502
auaugucccggcugagaac

SEQ ID NO: 1239504 - RNA, 19 nt, Artificial Sequence
  Description of Artificial Sequence: Synthetic oligonucleotide
  Sense strand starting at position 3313 of SEQ ID NO: 917511
ugucuuguugccucuguau

SEQ ID NO: 1239505 - RNA, 19 nt, Artificial Sequence
  Description of Artificial Sequence: Synthetic oligonucleotide
  Antisense strand to SEQ ID NO: 1239504
auacagaggcaacaagaca

SEQ ID NO: 1239506 - RNA, 19 nt, Artificial Sequence
  Description of Artificial Sequence: Synthetic oligonucleotide
  Sense strand starting at position 3399 of SEQ ID NO: 917511
guuagcuaaccacauagau

SEQ ID NO: 1239507 - RNA, 19 nt, Artificial Sequence
  Description of Artificial Sequence: Synthetic oligonucleotide
  Antisense strand to SEQ ID NO: 1239506
aucuaugugguuagcuaac

SEQ ID NO: 1239508 - RNA, 19 nt, Artificial Sequence
  Description of Artificial Sequence: Synthetic oligonucleotide
  Sense strand starting at position 3460 of SEQ ID NO: 917511
aauaaugugccagguaaag

SEQ ID NO: 1239509 - RNA, 19 nt, Artificial Sequence
  Description of Artificial Sequence: Synthetic oligonucleotide
  Antisense strand to SEQ ID NO: 1239508
cuuuaccuggcacauuauu

SEQ ID NO: 1239510 - RNA, 19 nt, Artificial Sequence
  Description of Artificial Sequence: Synthetic oligonucleotide
  Sense strand starting at position 3786 of SEQ ID NO: 917512
cuccuauggucugugaaag

SEQ ID NO: 1239511 - RNA, 19 nt, Artificial Sequence
  Description of Artificial Sequence: Synthetic oligonucleotide
  Antisense strand to SEQ ID NO: 1239510
cuuucacagaccauaggag

SEQ ID NO: 1239512 - RNA, 19 nt, Artificial Sequence
  Description of Artificial Sequence: Synthetic oligonucleotide
  Sense strand starting at position 5 of SEQ ID NO: 917512
gaaugaacagucgguaaag

SEQ ID NO: 1239513 - RNA, 19 nt, Artificial Sequence
  Description of Artificial Sequence: Synthetic oligonucleotide
  Antisense strand to SEQ ID NO: 1239512
cuuuaccgacuguucauuc

SEQ ID NO: 1239514 - RNA, 19 nt, Artificial Sequence
  Description of Artificial Sequence: Synthetic oligonucleotide
  Sense strand starting at position 6 of SEQ ID NO: 917512
aaugaacagucgguaaaga

SEQ ID NO: 1239515 - RNA, 19 nt, Artificial Sequence
  Description of Artificial Sequence: Synthetic oligonucleotide
  Antisense strand to SEQ ID NO: 1239514
ucuuuaccgacuguucauu

SEQ ID NO: 1239516 - RNA, 19 nt, Artificial Sequence
  Description of Artificial Sequence: Synthetic oligonucleotide
  Sense strand starting at position 14 of SEQ ID NO: 917512
gucgguaaagaguaucaca

SEQ ID NO: 1239517 - RNA, 19 nt, Artificial Sequence
  Description of Artificial Sequence: Synthetic oligonucleotide
  Antisense strand to SEQ ID NO: 1239516
ugugauacucuuuaccgac

SEQ ID NO: 1239518 - RNA, 19 nt, Artificial Sequence
  Description of Artificial Sequence: Synthetic oligonucleotide
  Sense strand starting at position 38 of SEQ ID NO: 917512
ccugaaaucuagucuuuga

SEQ ID NO: 1239519 - RNA, 19 nt, Artificial Sequence
  Description of Artificial Sequence: Synthetic oligonucleotide
  Antisense strand to SEQ ID NO: 1239518
ucaaagacuagauuucagg

SEQ ID NO: 1239520 - RNA, 19 nt, Artificial Sequence
  Description of Artificial Sequence: Synthetic oligonucleotide
  Sense strand starting at position 45 of SEQ ID NO: 917512
ucuagucuuugacaaugaa

SEQ ID NO: 1239521 - RNA, 19 nt, Artificial Sequence
  Description of Artificial Sequence: Synthetic oligonucleotide
  Antisense strand to SEQ ID NO: 1239520
uucauugucaaagacuaga

SEQ ID NO: 1239522 - RNA, 19 nt, Artificial Sequence
  Description of Artificial Sequence: Synthetic oligonucleotide
  Sense strand starting at position 48 of SEQ ID NO: 917512
agucuuugacaaugaacua

SEQ ID NO: 1239523 - RNA, 19 nt, Artificial Sequence
  Description of Artificial Sequence: Synthetic oligonucleotide
  Antisense strand to SEQ ID NO: 1239522
uaguucauugucaaagacu

SEQ ID NO: 1239524 - RNA, 19 nt, Artificial Sequence
  Description of Artificial Sequence: Synthetic oligonucleotide
  Sense strand starting at position 245 of SEQ ID NO: 917512
aauguaaacugugagaaag

SEQ ID NO: 1239525 - RNA, 19 nt, Artificial Sequence
  Description of Artificial Sequence: Synthetic oligonucleotide
  Antisense strand to SEQ ID NO: 1239524
cuuucucacaguuuacauu

SEQ ID NO: 1239526 - RNA, 19 nt, Artificial Sequence
  Description of Artificial Sequence: Synthetic oligonucleotide
  Sense strand starting at position 247 of SEQ ID NO: 917512
uguaaacugugagaaagaa

SEQ ID NO: 1239527 - RNA, 19 nt, Artificial Sequence
  Description of Artificial Sequence: Synthetic oligonucleotide
  Antisense strand to SEQ ID NO: 1239526
uucuuucucacaguuuaca

SEQ ID NO: 1239528 - RNA, 19 nt, Artificial Sequence
  Description of Artificial Sequence: Synthetic oligonucleotide
  Sense strand starting at position 267 of SEQ ID NO: 917512
aaucauccaguugggaaau

SEQ ID NO: 1239529 - RNA, 19 nt, Artificial Sequence
  Description of Artificial Sequence: Synthetic oligonucleotide
  Antisense strand to SEQ ID NO: 1239528
auuucccaacuggaugauu

SEQ ID NO: 1239530 - RNA, 19 nt, Artificial Sequence
  Description of Artificial Sequence: Synthetic oligonucleotide
  Sense strand starting at position 517 of SEQ ID NO: 917512
gggccagugaggcaugaaa

SEQ ID NO: 1239531 - RNA, 19 nt, Artificial Sequence
  Description of Artificial Sequence: Synthetic oligonucleotide
  Antisense strand to SEQ ID NO: 1239530
uuucaugccucacuggccc

SEQ ID NO: 1239532 - RNA, 19 nt, Artificial Sequence
  Description of Artificial Sequence: Synthetic oligonucleotide
  Sense strand starting at position 519 of SEQ ID NO: 917512
gccagugaggcaugaaaca

SEQ ID NO: 1239533 - RNA, 19 nt, Artificial Sequence
  Description of Artificial Sequence: Synthetic oligonucleotide
  Antisense strand to SEQ ID NO: 1239532
uguuucaugccucacuggc

SEQ ID NO: 1239534 - RNA, 19 nt, Artificial Sequence
  Description of Artificial Sequence: Synthetic oligonucleotide
  Sense strand starting at position 600 of SEQ ID NO: 917512
ggugaugacucauaaauua

SEQ ID NO: 1239535 - RNA, 19 nt, Artificial Sequence
  Description of Artificial Sequence: Synthetic oligonucleotide
  Antisense strand to SEQ ID NO: 1239534
uaauuuaugagucaucacc

SEQ ID NO: 1239536 - RNA, 19 nt, Artificial Sequence
  Description of Artificial Sequence: Synthetic oligonucleotide
  Sense strand starting at position 655 of SEQ ID NO: 917512
acgaauuugucucaucaug

SEQ ID NO: 1239537 - RNA, 19 nt, Artificial Sequence
  Description of Artificial Sequence: Synthetic oligonucleotide
  Antisense strand to SEQ ID NO: 1239536
caugaugagacaaauucgu

SEQ ID NO: 1239538 - RNA, 19 nt, Artificial Sequence
  Description of Artificial Sequence: Synthetic oligonucleotide
  Sense strand starting at position 926 of SEQ ID NO: 917512
uaacgugcauucccagaga

SEQ ID NO: 1239539 - RNA, 19 nt, Artificial Sequence
  Description of Artificial Sequence: Synthetic oligonucleotide
  Antisense strand to SEQ ID NO: 1239538
ucucugggaaugcacguua

SEQ ID NO: 1239540 - RNA, 19 nt, Artificial Sequence
  Description of Artificial Sequence: Synthetic oligonucleotide
  Sense strand starting at position 929 of SEQ ID NO: 917512
cgugcauucccagagacaa

SEQ ID NO: 1239541 - RNA, 19 nt, Artificial Sequence
  Description of Artificial Sequence: Synthetic oligonucleotide
  Antisense strand to SEQ ID NO: 1239540
uugucucugggaaugcacg

SEQ ID NO: 1239542 - RNA, 19 nt, Artificial Sequence
  Description of Artificial Sequence: Synthetic oligonucleotide
  Sense strand starting at position 987 of SEQ ID NO: 917512
gugccucucagaggagaaa

SEQ ID NO: 1239543 - RNA, 19 nt, Artificial Sequence
  Description of Artificial Sequence: Synthetic oligonucleotide
  Antisense strand to SEQ ID NO: 1239542
uuucuccucugagaggcac

SEQ ID NO: 1239544 - RNA, 19 nt, Artificial Sequence
  Description of Artificial Sequence: Synthetic oligonucleotide
  Sense strand starting at position 1103 of SEQ ID NO: 917512
cgaggaaaucugcacuuga

SEQ ID NO: 1239545 - RNA, 19 nt, Artificial Sequence
  Description of Artificial Sequence: Synthetic oligonucleotide
  Antisense strand to SEQ ID NO: 1239544
ucaagugcagauuuccucg

SEQ ID NO: 1239546 - RNA, 19 nt, Artificial Sequence
  Description of Artificial Sequence: Synthetic oligonucleotide
  Sense strand starting at position 1710 of SEQ ID NO: 917512
aggcgaauuuggagacugu

SEQ ID NO: 1239547 - RNA, 19 nt, Artificial Sequence
  Description of Artificial Sequence: Synthetic oligonucleotide
  Antisense strand to SEQ ID NO: 1239546
acagucuccaaauucgccu

SEQ ID NO: 1239548 - RNA, 19 nt, Artificial Sequence
  Description of Artificial Sequence: Synthetic oligonucleotide
  Sense strand starting at position 1719 of SEQ ID NO: 917512
uggagacugucauuaggau

SEQ ID NO: 1239549 - RNA, 19 nt, Artificial Sequence
  Description of Artificial Sequence: Synthetic oligonucleotide
  Antisense strand to SEQ ID NO: 1239548
auccuaaugacagucucca

SEQ ID NO: 1239550 - RNA, 19 nt, Artificial Sequence
  Description of Artificial Sequence: Synthetic oligonucleotide
  Sense strand starting at position 2463 of SEQ ID NO: 917512
uuaagauaacccggguaug

SEQ ID NO: 1239551 - RNA, 19 nt, Artificial Sequence
  Description of Artificial Sequence: Synthetic oligonucleotide
  Antisense strand to SEQ ID NO: 1239550
cauacccggguuaucuuaa

SEQ ID NO: 1239552 - RNA, 19 nt, Artificial Sequence
  Description of Artificial Sequence: Synthetic oligonucleotide
  Sense strand starting at position 2511 of SEQ ID NO: 917512
acguauauuggaugaauca

SEQ ID NO: 1239553 - RNA, 19 nt, Artificial Sequence
  Description of Artificial Sequence: Synthetic oligonucleotide
  Antisense strand to SEQ ID NO: 1239552
ugauucauccaauauacgu

SEQ ID NO: 1239554 - RNA, 19 nt, Artificial Sequence
  Description of Artificial Sequence: Synthetic oligonucleotide
  Sense strand starting at position 2520 of SEQ ID NO: 917512
ggaugaaucaccggaguca

SEQ ID NO: 1239555 - RNA, 19 nt, Artificial Sequence
  Description of Artificial Sequence: Synthetic oligonucleotide
  Antisense strand to SEQ ID NO: 1239554
ugacuccggugauucaucc

SEQ ID NO: 1239556 - RNA, 19 nt, Artificial Sequence
  Description of Artificial Sequence: Synthetic oligonucleotide
  Sense strand starting at position 2666 of SEQ ID NO: 917512
uggccuguuggcgauaaau

SEQ ID NO: 1239557 - RNA, 19 nt, Artificial Sequence
  Description of Artificial Sequence: Synthetic oligonucleotide
  Antisense strand to SEQ ID NO: 1239556
auuuaucgccaacaggcca

SEQ ID NO: 1239558 - RNA, 19 nt, Artificial Sequence
  Description of Artificial Sequence: Synthetic oligonucleotide
  Sense strand starting at position 2668 of SEQ ID NO: 917512
gccuguuggcgauaaauuu

SEQ ID NO: 1239559 - RNA, 19 nt, Artificial Sequence
  Description of Artificial Sequence: Synthetic oligonucleotide
  Antisense strand to SEQ ID NO: 1239558
aaauuuaucgccaacaggc

SEQ ID NO: 1239560 - RNA, 19 nt, Artificial Sequence
  Description of Artificial Sequence: Synthetic oligonucleotide
  Sense strand starting at position 2676 of SEQ ID NO: 917512
gcgauaaauuuauaauagg

SEQ ID NO: 1239561 - RNA, 19 nt, Artificial Sequence
  Description of Artificial Sequence: Synthetic oligonucleotide
  Antisense strand to SEQ ID NO: 1239560
ccuauuauaaauuuaucgc

SEQ ID NO: 1239562 - RNA, 19 nt, Artificial Sequence
  Description of Artificial Sequence: Synthetic oligonucleotide
  Sense strand starting at position 2749 of SEQ ID NO: 917512
ugaugaugauauuaccaga

SEQ ID NO: 1239563 - RNA, 19 nt, Artificial Sequence
  Description of Artificial Sequence: Synthetic oligonucleotide
  Antisense strand to SEQ ID NO: 1239562
ucugguaauaucaucauca

SEQ ID NO: 1239564 - RNA, 19 nt, Artificial Sequence
  Description of Artificial Sequence: Synthetic oligonucleotide
  Sense strand starting at position 2752 of SEQ ID NO: 917512
ugaugauauuaccagagac

SEQ ID NO: 1239565 - RNA, 19 nt, Artificial Sequence
  Description of Artificial Sequence: Synthetic oligonucleotide
  Antisense strand to SEQ ID NO: 1239564
gucucugguaauaucauca

SEQ ID NO: 1239566 - RNA, 19 nt, Artificial Sequence
  Description of Artificial Sequence: Synthetic oligonucleotide
  Sense strand starting at position 2967 of SEQ ID NO: 917512
uagaaagcuugugauauuu

SEQ ID NO: 1239567 - RNA, 19 nt, Artificial Sequence
  Description of Artificial Sequence: Synthetic oligonucleotide
  Antisense strand to SEQ ID NO: 1239566
aaauaucacaagcuuucua

SEQ ID NO: 1239568 - RNA, 19 nt, Artificial Sequence
  Description of Artificial Sequence: Synthetic oligonucleotide
  Sense strand starting at position 2986 of SEQ ID NO: 917512
ucugauugaacucgugaug

SEQ ID NO: 1239569 - RNA, 19 nt, Artificial Sequence
  Description of Artificial Sequence: Synthetic oligonucleotide
  Antisense strand to SEQ ID NO: 1239568
caucacgaguucaaucaga

SEQ ID NO: 1239570 - RNA, 19 nt, Artificial Sequence
  Description of Artificial Sequence: Synthetic oligonucleotide
  Sense strand starting at position 3037 of SEQ ID NO: 917512
gguugaggaucugaauuca

SEQ ID NO: 1239571 - RNA, 19 nt, Artificial Sequence
  Description of Artificial Sequence: Synthetic oligonucleotide
  Antisense strand to SEQ ID NO: 1239570
ugaauucagauccucaacc

SEQ ID NO: 1239572 - RNA, 19 nt, Artificial Sequence
  Description of Artificial Sequence: Synthetic oligonucleotide
  Sense strand starting at position 3143 of SEQ ID NO: 917512
auagacuucugguacauga

SEQ ID NO: 1239573 - RNA, 19 nt, Artificial Sequence
  Description of Artificial Sequence: Synthetic oligonucleotide
  Antisense strand to SEQ ID NO: 1239572
ucauguaccagaagucuau

SEQ ID NO: 1239574 - RNA, 19 nt, Artificial Sequence
  Description of Artificial Sequence: Synthetic oligonucleotide
  Sense strand starting at position 3159 of SEQ ID NO: 917512
ugaauacuguuuccauagu

SEQ ID NO: 1239575 - RNA, 19 nt, Artificial Sequence
  Description of Artificial Sequence: Synthetic oligonucleotide
  Antisense strand to SEQ ID NO: 1239574
acuauggaaacaguauuca

SEQ ID NO: 1239576 - RNA, 19 nt, Artificial Sequence
  Description of Artificial Sequence: Synthetic oligonucleotide
  Sense strand starting at position 3302 of SEQ ID NO: 917512
gggcuuuccucucuauacu

SEQ ID NO: 1239577 - RNA, 19 nt, Artificial Sequence
  Description of Artificial Sequence: Synthetic oligonucleotide
  Antisense strand to SEQ ID NO: 1239576
aguauagagaggaaagccc

SEQ ID NO: 1239578 - RNA, 19 nt, Artificial Sequence
  Description of Artificial Sequence: Synthetic oligonucleotide
  Sense strand starting at position 3372 of SEQ ID NO: 917512
ggacaaggguuucuacauc

SEQ ID NO: 1239579 - RNA, 19 nt, Artificial Sequence
  Description of Artificial Sequence: Synthetic oligonucleotide
  Antisense strand to SEQ ID NO: 1239578
gauguagaaacccuugucc

SEQ ID NO: 1239580 - RNA, 19 nt, Artificial Sequence
  Description of Artificial Sequence: Synthetic oligonucleotide
  Sense strand starting at position 3412 of SEQ ID NO: 917512
gggccuuguccgaguguca

SEQ ID NO: 1239581 - RNA, 19 nt, Artificial Sequence
  Description of Artificial Sequence: Synthetic oligonucleotide
  Antisense strand to SEQ ID NO: 1239580
ugacacucggacaaggccc

SEQ ID NO: 1239582 - RNA, 19 nt, Artificial Sequence
  Description of Artificial Sequence: Synthetic oligonucleotide
  Sense strand starting at position 3441 of SEQ ID NO: 917512
cugugugcccguccugaua

SEQ ID NO: 1239583 - RNA, 19 nt, Artificial Sequence
  Description of Artificial Sequence: Synthetic oligonucleotide
  Antisense strand to SEQ ID NO: 1239582
uaucaggacgggcacacag

SEQ ID NO: 1239584 - RNA, 19 nt, Artificial Sequence
  Description of Artificial Sequence: Synthetic oligonucleotide
  Sense strand starting at position 3444 of SEQ ID NO: 917512
ugugcccguccugauaaau

SEQ ID NO: 1239585 - RNA, 19 nt, Artificial Sequence
  Description of Artificial Sequence: Synthetic oligonucleotide
  Antisense strand to SEQ ID NO: 1239584
auuuaucaggacgggcaca

SEQ ID NO: 1239586 - RNA, 19 nt, Artificial Sequence
  Description of Artificial Sequence: Synthetic oligonucleotide
  Sense strand starting at position 3456 of SEQ ID NO: 917512
gauaaauagcuguggucau

SEQ ID NO: 1239587 - RNA, 19 nt, Artificial Sequence
  Description of Artificial Sequence: Synthetic oligonucleotide
  Antisense strand to SEQ ID NO: 1239586
augaccacagcuauuuauc

SEQ ID NO: 1239588 - RNA, 19 nt, Artificial Sequence
  Description of Artificial Sequence: Synthetic oligonucleotide
  Sense strand starting at position 3494 of SEQ ID NO: 917512
guucuauuccagcaaacag

SEQ ID NO: 1239589 - RNA, 19 nt, Artificial Sequence
  Description of Artificial Sequence: Synthetic oligonucleotide
  Antisense strand to SEQ ID NO: 1239588
cuguuugcuggaauagaac

SEQ ID NO: 1239590 - RNA, 19 nt, Artificial Sequence
  Description of Artificial Sequence: Synthetic oligonucleotide
  Sense strand starting at position 3882 of SEQ ID NO: 917513
auugcagugaacugggauu

SEQ ID NO: 1239591 - RNA, 19 nt, Artificial Sequence
  Description of Artificial Sequence: Synthetic oligonucleotide
  Antisense strand to SEQ ID NO: 1239590
aaucccaguucacugcaau

SEQ ID NO: 1239592 - RNA, 19 nt, Artificial Sequence
  Description of Artificial Sequence: Synthetic oligonucleotide
  Sense strand starting at position 47 of SEQ ID NO: 917513
aguuuagcaccugacaaau

SEQ ID NO: 1239593 - RNA, 19 nt, Artificial Sequence
  Description of Artificial Sequence: Synthetic oligonucleotide
  Antisense strand to SEQ ID NO: 1239592
auuugucaggugcuaaacu

SEQ ID NO: 1239594 - RNA, 19 nt, Artificial Sequence
  Description of Artificial Sequence: Synthetic oligonucleotide
  Sense strand starting at position 69 of SEQ ID NO: 917513
aguuacuauuuggugcuaa

SEQ ID NO: 1239595 - RNA, 19 nt, Artificial Sequence
  Description of Artificial Sequence: Synthetic oligonucleotide
  Antisense strand to SEQ ID NO: 1239594
uuagcaccaaauaguaacu

SEQ ID NO: 1239596 - RNA, 19 nt, Artificial Sequence
  Description of Artificial Sequence: Synthetic oligonucleotide
  Sense strand starting at position 114 of SEQ ID NO: 917513
gcaguacacgucguaucau

SEQ ID NO: 1239597 - RNA, 19 nt, Artificial Sequence
  Description of Artificial Sequence: Synthetic oligonucleotide
  Antisense strand to SEQ ID NO: 1239596
augauacgacguguacugc

SEQ ID NO: 1239598 - RNA, 19 nt, Artificial Sequence
  Description of Artificial Sequence: Synthetic oligonucleotide
  Sense strand starting at position 161 of SEQ ID NO: 917513
uaggcuauguaccuugaau

SEQ ID NO: 1239599 - RNA, 19 nt, Artificial Sequence
  Description of Artificial Sequence: Synthetic oligonucleotide
  Antisense strand to SEQ ID NO: 1239598
auucaagguacauagccua

SEQ ID NO: 1239600 - RNA, 19 nt, Artificial Sequence
  Description of Artificial Sequence: Synthetic oligonucleotide
  Sense strand starting at position 163 of SEQ ID NO: 917513
ggcuauguaccuugaauaa

SEQ ID NO: 1239601 - RNA, 19 nt, Artificial Sequence
  Description of Artificial Sequence: Synthetic oligonucleotide
  Antisense strand to SEQ ID NO: 1239600
uuauucaagguacauagcc

SEQ ID NO: 1239602 - RNA, 19 nt, Artificial Sequence
  Description of Artificial Sequence: Synthetic oligonucleotide
  Sense strand starting at position 334 of SEQ ID NO: 917513
accagauagguuggugguu

SEQ ID NO: 1239603 - RNA, 19 nt, Artificial Sequence
  Description of Artificial Sequence: Synthetic oligonucleotide
  Antisense strand to SEQ ID NO: 1239602
aaccaccaaccuaucuggu

SEQ ID NO: 1239604 - RNA, 19 nt, Artificial Sequence
  Description of Artificial Sequence: Synthetic oligonucleotide
  Sense strand starting at position 339 of SEQ ID NO: 917513
auagguuggugguugaaau

SEQ ID NO: 1239605 - RNA, 19 nt, Artificial Sequence
  Description of Artificial Sequence: Synthetic oligonucleotide
  Antisense strand to SEQ ID NO: 1239604
auuucaaccaccaaccuau

SEQ ID NO: 1239606 - RNA, 19 nt, Artificial Sequence
  Description of Artificial Sequence: Synthetic oligonucleotide
  Sense strand starting at position 340 of SEQ ID NO: 917513
uagguuggugguugaaauc

SEQ ID NO: 1239607 - RNA, 19 nt, Artificial Sequence
  Description of Artificial Sequence: Synthetic oligonucleotide
  Antisense strand to SEQ ID NO: 1239606
gauuucaaccaccaaccua

SEQ ID NO: 1239608 - RNA, 19 nt, Artificial Sequence
  Description of Artificial Sequence: Synthetic oligonucleotide
  Sense strand starting at position 412 of SEQ ID NO: 917513
uguccauaugagggacaua

SEQ ID NO: 1239609 - RNA, 19 nt, Artificial Sequence
  Description of Artificial Sequence: Synthetic oligonucleotide
  Antisense strand to SEQ ID NO: 1239608
uaugucccucauauggaca

SEQ ID NO: 1239610 - RNA, 19 nt, Artificial Sequence
  Description of Artificial Sequence: Synthetic oligonucleotide
  Sense strand starting at position 627 of SEQ ID NO: 917513
cuagaaagucuugaguugu

SEQ ID NO: 1239611 - RNA, 19 nt, Artificial Sequence
  Description of Artificial Sequence: Synthetic oligonucleotide
  Antisense strand to SEQ ID NO: 1239610
acaacucaagacuuucuag

SEQ ID NO: 1239612 - RNA, 19 nt, Artificial Sequence
  Description of Artificial Sequence: Synthetic oligonucleotide
  Sense strand starting at position 680 of SEQ ID NO: 917513
ucaccaaauucuguggaca

SEQ ID NO: 1239613 - RNA, 19 nt, Artificial Sequence
  Description of Artificial Sequence: Synthetic oligonucleotide
  Antisense strand to SEQ ID NO: 1239612
uguccacagaauuugguga

SEQ ID NO: 1239614 - RNA, 19 nt, Artificial Sequence
  Description of Artificial Sequence: Synthetic oligonucleotide
  Sense strand starting at position 683 of SEQ ID NO: 917513
ccaaauucuguggacaguu

SEQ ID NO: 1239615 - RNA, 19 nt, Artificial Sequence
  Description of Artificial Sequence: Synthetic oligonucleotide
  Antisense strand to SEQ ID NO: 1239614
aacuguccacagaauuugg

SEQ ID NO: 1239616 - RNA, 19 nt, Artificial Sequence
  Description of Artificial Sequence: Synthetic oligonucleotide
  Sense strand starting at position 691 of SEQ ID NO: 917513
uguggacaguucuuuggaa

SEQ ID NO: 1239617 - RNA, 19 nt, Artificial Sequence
  Description of Artificial Sequence: Synthetic oligonucleotide
  Antisense strand to SEQ ID NO: 1239616
uuccaaagaacuguccaca

SEQ ID NO: 1239618 - RNA, 19 nt, Artificial Sequence
  Description of Artificial Sequence: Synthetic oligonucleotide
  Sense strand starting at position 692 of SEQ ID NO: 917513
guggacaguucuuuggaaa

SEQ ID NO: 1239619 - RNA, 19 nt, Artificial Sequence
  Description of Artificial Sequence: Synthetic oligonucleotide
  Antisense strand to SEQ ID NO: 1239618
uuuccaaagaacuguccac

SEQ ID NO: 1239620 - RNA, 19 nt, Artificial Sequence
  Description of Artificial Sequence: Synthetic oligonucleotide
  Sense strand starting at position 693 of SEQ ID NO: 917513
uggacaguucuuuggaaag

SEQ ID NO: 1239621 - RNA, 19 nt, Artificial Sequence
  Description of Artificial Sequence: Synthetic oligonucleotide
  Antisense strand to SEQ ID NO: 1239620
cuuuccaaagaacugucca

SEQ ID NO: 1239622 - RNA, 19 nt, Artificial Sequence
  Description of Artificial Sequence: Synthetic oligonucleotide
  Sense strand starting at position 699 of SEQ ID NO: 917513
guucuuuggaaaggucuca

SEQ ID NO: 1239623 - RNA, 19 nt, Artificial Sequence
  Description of Artificial Sequence: Synthetic oligonucleotide
  Antisense strand to SEQ ID NO: 1239622
ugagaccuuuccaaagaac

SEQ ID NO: 1239624 - RNA, 19 nt, Artificial Sequence
  Description of Artificial Sequence: Synthetic oligonucleotide
  Sense strand starting at position 861 of SEQ ID NO: 917513
guaguauuaugaccuaaag

SEQ ID NO: 1239625 - RNA, 19 nt, Artificial Sequence
  Description of Artificial Sequence: Synthetic oligonucleotide
  Antisense strand to SEQ ID NO: 1239624
cuuuaggucauaauacuac

SEQ ID NO: 1239626 - RNA, 19 nt, Artificial Sequence
  Description of Artificial Sequence: Synthetic oligonucleotide
  Sense strand starting at position 870 of SEQ ID NO: 917513
ugaccuaaagcucauugua

SEQ ID NO: 1239627 - RNA, 19 nt, Artificial Sequence
  Description of Artificial Sequence: Synthetic oligonucleotide
  Antisense strand to SEQ ID NO: 1239626
uacaaugagcuuuagguca

SEQ ID NO: 1239628 - RNA, 19 nt, Artificial Sequence
  Description of Artificial Sequence: Synthetic oligonucleotide
  Sense strand starting at position 1138 of SEQ ID NO: 917513
ggaaacagcuguucgaaga

SEQ ID NO: 1239629 - RNA, 19 nt, Artificial Sequence
  Description of Artificial Sequence: Synthetic oligonucleotide
  Antisense strand to SEQ ID NO: 1239628
ucuucgaacagcuguuucc

SEQ ID NO: 1239630 - RNA, 19 nt, Artificial Sequence
  Description of Artificial Sequence: Synthetic oligonucleotide
  Sense strand starting at position 1329 of SEQ ID NO: 917513
gaccaaaggaggugaguuu

SEQ ID NO: 1239631 - RNA, 19 nt, Artificial Sequence
  Description of Artificial Sequence: Synthetic oligonucleotide
  Antisense strand to SEQ ID NO: 1239630
aaacucaccuccuuugguc

SEQ ID NO: 1239632 - RNA, 19 nt, Artificial Sequence
  Description of Artificial Sequence: Synthetic oligonucleotide
  Sense strand starting at position 2094 of SEQ ID NO: 917513
ggcuuucugcggagggauu

SEQ ID NO: 1239633 - RNA, 19 nt, Artificial Sequence
  Description of Artificial Sequence: Synthetic oligonucleotide
  Antisense strand to SEQ ID NO: 1239632
aaucccuccgcagaaagcc

SEQ ID NO: 1239634 - RNA, 19 nt, Artificial Sequence
  Description of Artificial Sequence: Synthetic oligonucleotide
  Sense strand starting at position 2105 of SEQ ID NO: 917513
gagggauuacgcugacgaa

SEQ ID NO: 1239635 - RNA, 19 nt, Artificial Sequence
  Description of Artificial Sequence: Synthetic oligonucleotide
  Antisense strand to SEQ ID NO: 1239634
uucgucagcguaaucccuc

SEQ ID NO: 1239636 - RNA, 19 nt, Artificial Sequence
  Description of Artificial Sequence: Synthetic oligonucleotide
  Sense strand starting at position 2106 of SEQ ID NO: 917513
agggauuacgcugacgaaa

SEQ ID NO: 1239637 - RNA, 19 nt, Artificial Sequence
  Description of Artificial Sequence: Synthetic oligonucleotide
  Antisense strand to SEQ ID NO: 1239636
uuucgucagcguaaucccu

SEQ ID NO: 1239638 - RNA, 19 nt, Artificial Sequence
  Description of Artificial Sequence: Synthetic oligonucleotide
  Sense strand starting at position 2295 of SEQ ID NO: 917513
cguaguccgcucucccaaa

SEQ ID NO: 1239639 - RNA, 19 nt, Artificial Sequence
  Description of Artificial Sequence: Synthetic oligonucleotide
  Antisense strand to SEQ ID NO: 1239638
uuugggagagcggacuacg

SEQ ID NO: 1239640 - RNA, 19 nt, Artificial Sequence
  Description of Artificial Sequence: Synthetic oligonucleotide
  Sense strand starting at position 2520 of SEQ ID NO: 917513
acccguucugacuagucaa

SEQ ID NO: 1239641 - RNA, 19 nt, Artificial Sequence
  Description of Artificial Sequence: Synthetic oligonucleotide
  Antisense strand to SEQ ID NO: 1239640
uugacuagucagaacgggu

SEQ ID NO: 1239642 - RNA, 19 nt, Artificial Sequence
  Description of Artificial Sequence: Synthetic oligonucleotide
  Sense strand starting at position 2647 of SEQ ID NO: 917513
ggucauguggcuuaaggga

SEQ ID NO: 1239643 - RNA, 19 nt, Artificial Sequence
  Description of Artificial Sequence: Synthetic oligonucleotide
  Antisense strand to SEQ ID NO: 1239642
ucccuuaagccacaugacc

SEQ ID NO: 1239644 - RNA, 19 nt, Artificial Sequence
  Description of Artificial Sequence: Synthetic oligonucleotide
  Sense strand starting at position 2752 of SEQ ID NO: 917513
uguguccuaggauaacaau

SEQ ID NO: 1239645 - RNA, 19 nt, Artificial Sequence
  Description of Artificial Sequence: Synthetic oligonucleotide
  Antisense strand to SEQ ID NO: 1239644
auuguuauccuaggacaca

SEQ ID NO: 1239646 - RNA, 19 nt, Artificial Sequence
  Description of Artificial Sequence: Synthetic oligonucleotide
  Sense strand starting at position 2905 of SEQ ID NO: 917513
acaagucucguguagaaga

SEQ ID NO: 1239647 - RNA, 19 nt, Artificial Sequence
  Description of Artificial Sequence: Synthetic oligonucleotide
  Antisense strand to SEQ ID NO: 1239646
ucuucuacacgagacuugu

SEQ ID NO: 1239648 - RNA, 19 nt, Artificial Sequence
  Description of Artificial Sequence: Synthetic oligonucleotide
  Sense strand starting at position 2907 of SEQ ID NO: 917513
aagucucguguagaagaaa

SEQ ID NO: 1239649 - RNA, 19 nt, Artificial Sequence
  Description of Artificial Sequence: Synthetic oligonucleotide
  Antisense strand to SEQ ID NO: 1239648
uuucuucuacacgagacuu

SEQ ID NO: 1239650 - RNA, 19 nt, Artificial Sequence
  Description of Artificial Sequence: Synthetic oligonucleotide
  Sense strand starting at position 2910 of SEQ ID NO: 917513
ucucguguagaagaaauua

SEQ ID NO: 1239651 - RNA, 19 nt, Artificial Sequence
  Description of Artificial Sequence: Synthetic oligonucleotide
  Antisense strand to SEQ ID NO: 1239650
uaauuucuucuacacgaga

SEQ ID NO: 1239652 - RNA, 19 nt, Artificial Sequence
  Description of Artificial Sequence: Synthetic oligonucleotide
  Sense strand starting at position 3137 of SEQ ID NO: 917513
aguaguacuuccuccugaa

SEQ ID NO: 1239653 - RNA, 19 nt, Artificial Sequence
  Description of Artificial Sequence: Synthetic oligonucleotide
  Antisense strand to SEQ ID NO: 1239652
uucaggaggaaguacuacu

SEQ ID NO: 1239654 - RNA, 19 nt, Artificial Sequence
  Description of Artificial Sequence: Synthetic oligonucleotide
  Sense strand starting at position 3141 of SEQ ID NO: 917513
guacuuccuccugaaauag

SEQ ID NO: 1239655 - RNA, 19 nt, Artificial Sequence
  Description of Artificial Sequence: Synthetic oligonucleotide
  Antisense strand to SEQ ID NO: 1239654
cuauuucaggaggaaguac

SEQ ID NO: 1239656 - RNA, 19 nt, Artificial Sequence
  Description of Artificial Sequence: Synthetic oligonucleotide
  Sense strand starting at position 3596 of SEQ ID NO: 917513
uauauuauagaguaacggu

SEQ ID NO: 1239657 - RNA, 19 nt, Artificial Sequence
  Description of Artificial Sequence: Synthetic oligonucleotide
  Antisense strand to SEQ ID NO: 1239656
accguuacucuauaauaua

SEQ ID NO: 1239658 - RNA, 19 nt, Artificial Sequence
  Description of Artificial Sequence: Synthetic oligonucleotide
  Sense strand starting at position 3703 of SEQ ID NO: 917513
aguaccuuccagugggauu

SEQ ID NO: 1239659 - RNA, 19 nt, Artificial Sequence
  Description of Artificial Sequence: Synthetic oligonucleotide
  Antisense strand to SEQ ID NO: 1239658
aaucccacuggaagguacu

SEQ ID NO: 1239660 - RNA, 19 nt, Artificial Sequence
  Description of Artificial Sequence: Synthetic oligonucleotide
  Sense strand starting at position 3704 of SEQ ID NO: 917513
guaccuuccagugggauua

SEQ ID NO: 1239661 - RNA, 19 nt, Artificial Sequence
  Description of Artificial Sequence: Synthetic oligonucleotide
  Antisense strand to SEQ ID NO: 1239660
uaaucccacuggaagguac

SEQ ID NO: 1239662 - RNA, 19 nt, Artificial Sequence
  Description of Artificial Sequence: Synthetic oligonucleotide
  Sense strand starting at position 3705 of SEQ ID NO: 917513
uaccuuccagugggauuaa

SEQ ID NO: 1239663 - RNA, 19 nt, Artificial Sequence
  Description of Artificial Sequence: Synthetic oligonucleotide
  Antisense strand to SEQ ID NO: 1239662
uuaaucccacuggaaggua

SEQ ID NO: 1239664 - RNA, 19 nt, Artificial Sequence
  Description of Artificial Sequence: Synthetic oligonucleotide
  Sense strand starting at position 3748 of SEQ ID NO: 917513
agcagugugggacagaaau

SEQ ID NO: 1239665 - RNA, 19 nt, Artificial Sequence
  Description of Artificial Sequence: Synthetic oligonucleotide
  Antisense strand to SEQ ID NO: 1239664
auuucugucccacacugcu

SEQ ID NO: 1239666 - RNA, 19 nt, Artificial Sequence
  Description of Artificial Sequence: Synthetic oligonucleotide
  Sense strand starting at position 3861 of SEQ ID NO: 917513
gcuucuguaugauuaggau

SEQ ID NO: 1239667 - RNA, 19 nt, Artificial Sequence
  Description of Artificial Sequence: Synthetic oligonucleotide
  Antisense strand to SEQ ID NO: 1239666
auccuaaucauacagaagc

SEQ ID NO: 1239668 - RNA, 19 nt, Artificial Sequence
  Description of Artificial Sequence: Synthetic oligonucleotide
  Sense strand starting at position 3920 of SEQ ID NO: 917513
gcucgugcaccuucuacua

SEQ ID NO: 1239669 - RNA, 19 nt, Artificial Sequence
  Description of Artificial Sequence: Synthetic oligonucleotide
  Antisense strand to SEQ ID NO: 1239668
uaguagaaggugcacgagc

SEQ ID NO: 1239670 - RNA, 19 nt, Artificial Sequence
  Description of Artificial Sequence: Synthetic oligonucleotide
  Sense strand starting at position 3971 of SEQ ID NO: 917514
ggcccaaaccugggauaua

SEQ ID NO: 1239671 - RNA, 19 nt, Artificial Sequence
  Description of Artificial Sequence: Synthetic oligonucleotide
  Antisense strand to SEQ ID NO: 1239670
uauaucccagguuugggcc

SEQ ID NO: 1239672 - RNA, 19 nt, Artificial Sequence
  Description of Artificial Sequence: Synthetic oligonucleotide
  Sense strand starting at position 98 of SEQ ID NO: 917514
ucaccaaguccuggucaau

SEQ ID NO: 1239673 - RNA, 19 nt, Artificial Sequence
  Description of Artificial Sequence: Synthetic oligonucleotide
  Antisense strand to SEQ ID NO: 1239672
auugaccaggacuugguga

SEQ ID NO: 1239674 - RNA, 19 nt, Artificial Sequence
  Description of Artificial Sequence: Synthetic oligonucleotide
  Sense strand starting at position 101 of SEQ ID NO: 917514
ccaaguccuggucaauacu

SEQ ID NO: 1239675 - RNA, 19 nt, Artificial Sequence
  Description of Artificial Sequence: Synthetic oligonucleotide
  Antisense strand to SEQ ID NO: 1239674
aguauugaccaggacuugg

SEQ ID NO: 1239676 - RNA, 19 nt, Artificial Sequence
  Description of Artificial Sequence: Synthetic oligonucleotide
  Sense strand starting at position 120 of SEQ ID NO: 917514
acugcagaauguuucucaa

SEQ ID NO: 1239677 - RNA, 19 nt, Artificial Sequence
  Description of Artificial Sequence: Synthetic oligonucleotide
  Antisense strand to SEQ ID NO: 1239676
uugagaaacauucugcagu

SEQ ID NO: 1239678 - RNA, 19 nt, Artificial Sequence
  Description of Artificial Sequence: Synthetic oligonucleotide
  Sense strand starting at position 123 of SEQ ID NO: 917514
gcagaauguuucucaagca

SEQ ID NO: 1239679 - RNA, 19 nt, Artificial Sequence
  Description of Artificial Sequence: Synthetic oligonucleotide
  Antisense strand to SEQ ID NO: 1239678
ugcuugagaaacauucugc

SEQ ID NO: 1239680 - RNA, 19 nt, Artificial Sequence
  Description of Artificial Sequence: Synthetic oligonucleotide
  Sense strand starting at position 332 of SEQ ID NO: 917514
ggcuuaaccuggccuauau

SEQ ID NO: 1239681 - RNA, 19 nt, Artificial Sequence
  Description of Artificial Sequence: Synthetic oligonucleotide
  Antisense strand to SEQ ID NO: 1239680
auauaggccagguuaagcc

SEQ ID NO: 1239682 - RNA, 19 nt, Artificial Sequence
  Description of Artificial Sequence: Synthetic oligonucleotide
  Sense strand starting at position 362 of SEQ ID NO: 917514
ugucuuccugcugaauguu

SEQ ID NO: 1239683 - RNA, 19 nt, Artificial Sequence
  Description of Artificial Sequence: Synthetic oligonucleotide
  Antisense strand to SEQ ID NO: 1239682
aacauucagcaggaagaca

SEQ ID NO: 1239684 - RNA, 19 nt, Artificial Sequence
  Description of Artificial Sequence: Synthetic oligonucleotide
  Sense strand starting at position 368 of SEQ ID NO: 917514
ccugcugaauguuccuauu

SEQ ID NO: 1239685 - RNA, 19 nt, Artificial Sequence
  Description of Artificial Sequence: Synthetic oligonucleotide
  Antisense strand to SEQ ID NO: 1239684
aauaggaacauucagcagg

SEQ ID NO: 1239686 - RNA, 19 nt, Artificial Sequence
  Description of Artificial Sequence: Synthetic oligonucleotide
  Sense strand starting at position 370 of SEQ ID NO: 917514
ugcugaauguuccuauuga

SEQ ID NO: 1239687 - RNA, 19 nt, Artificial Sequence
  Description of Artificial Sequence: Synthetic oligonucleotide
  Antisense strand to SEQ ID NO: 1239686
ucaauaggaacauucagca

SEQ ID NO: 1239688 - RNA, 19 nt, Artificial Sequence
  Description of Artificial Sequence: Synthetic oligonucleotide
  Sense strand starting at position 450 of SEQ ID NO: 917514
cuggcuaaccucuauuguu

SEQ ID NO: 1239689 - RNA, 19 nt, Artificial Sequence
  Description of Artificial Sequence: Synthetic oligonucleotide
  Antisense strand to SEQ ID NO: 1239688
aacaauagagguuagccag

SEQ ID NO: 1239690 - RNA, 19 nt, Artificial Sequence
  Description of Artificial Sequence: Synthetic oligonucleotide
  Sense strand starting at position 720 of SEQ ID NO: 917514
agugaaugcuuaguaaguu

SEQ ID NO: 1239691 - RNA, 19 nt, Artificial Sequence
  Description of Artificial Sequence: Synthetic oligonucleotide
  Antisense strand to SEQ ID NO: 1239690
aacuuacuaagcauucacu

SEQ ID NO: 1239692 - RNA, 19 nt, Artificial Sequence
  Description of Artificial Sequence: Synthetic oligonucleotide
  Sense strand starting at position 728 of SEQ ID NO: 917514
cuuaguaaguuucuaugga

SEQ ID NO: 1239693 - RNA, 19 nt, Artificial Sequence
  Description of Artificial Sequence: Synthetic oligonucleotide
  Antisense strand to SEQ ID NO: 1239692
uccauagaaacuuacuaag

SEQ ID NO: 1239694 - RNA, 19 nt, Artificial Sequence
  Description of Artificial Sequence: Synthetic oligonucleotide
  Sense strand starting at position 785 of SEQ ID NO: 917514
gucaacaaguucuugcuua

SEQ ID NO: 1239695 - RNA, 19 nt, Artificial Sequence
  Description of Artificial Sequence: Synthetic oligonucleotide
  Antisense strand to SEQ ID NO: 1239694
uaagcaagaacuuguugac

SEQ ID NO: 1239696 - RNA, 19 nt, Artificial Sequence
  Description of Artificial Sequence: Synthetic oligonucleotide
  Sense strand starting at position 789 of SEQ ID NO: 917514
acaaguucuugcuuaaugu

SEQ ID NO: 1239697 - RNA, 19 nt, Artificial Sequence
  Description of Artificial Sequence: Synthetic oligonucleotide
  Antisense strand to SEQ ID NO: 1239696
acauuaagcaagaacuugu

SEQ ID NO: 1239698 - RNA, 19 nt, Artificial Sequence
  Description of Artificial Sequence: Synthetic oligonucleotide
  Sense strand starting at position 824 of SEQ ID NO: 917514
acuacuaacuaggaguaaa

SEQ ID NO: 1239699 - RNA, 19 nt, Artificial Sequence
  Description of Artificial Sequence: Synthetic oligonucleotide
  Antisense strand to SEQ ID NO: 1239698
uuuacuccuaguuaguagu

SEQ ID NO: 1239700 - RNA, 19 nt, Artificial Sequence
  Description of Artificial Sequence: Synthetic oligonucleotide
  Sense strand starting at position 928 of SEQ ID NO: 917514
gcacaaagcgcuugagaaa

SEQ ID NO: 1239701 - RNA, 19 nt, Artificial Sequence
  Description of Artificial Sequence: Synthetic oligonucleotide
  Antisense strand to SEQ ID NO: 1239700
uuucucaagcgcuuugugc

SEQ ID NO: 1239702 - RNA, 19 nt, Artificial Sequence
  Description of Artificial Sequence: Synthetic oligonucleotide
  Sense strand starting at position 929 of SEQ ID NO: 917514
cacaaagcgcuugagaaau

SEQ ID NO: 1239703 - RNA, 19 nt, Artificial Sequence
  Description of Artificial Sequence: Synthetic oligonucleotide
  Antisense strand to SEQ ID NO: 1239702
auuucucaagcgcuuugug

SEQ ID NO: 1239704 - RNA, 19 nt, Artificial Sequence
  Description of Artificial Sequence: Synthetic oligonucleotide
  Sense strand starting at position 935 of SEQ ID NO: 917514
gcgcuugagaaauauaugu

SEQ ID NO: 1239705 - RNA, 19 nt, Artificial Sequence
  Description of Artificial Sequence: Synthetic oligonucleotide
  Antisense strand to SEQ ID NO: 1239704
acauauauuucucaagcgc

SEQ ID NO: 1239706 - RNA, 19 nt, Artificial Sequence
  Description of Artificial Sequence: Synthetic oligonucleotide
  Sense strand starting at position 999 of SEQ ID NO: 917514
gugugcuuaacaggucaga

SEQ ID NO: 1239707 - RNA, 19 nt, Artificial Sequence
  Description of Artificial Sequence: Synthetic oligonucleotide
  Antisense strand to SEQ ID NO: 1239706
ucugaccuguuaagcacac

SEQ ID NO: 1239708 - RNA, 19 nt, Artificial Sequence
  Description of Artificial Sequence: Synthetic oligonucleotide
  Sense strand starting at position 1002 of SEQ ID NO: 917514
ugcuuaacaggucagaaua

SEQ ID NO: 1239709 - RNA, 19 nt, Artificial Sequence
  Description of Artificial Sequence: Synthetic oligonucleotide
  Antisense strand to SEQ ID NO: 1239708
uauucugaccuguuaagca

SEQ ID NO: 1239710 - RNA, 19 nt, Artificial Sequence
  Description of Artificial Sequence: Synthetic oligonucleotide
  Sense strand starting at position 1028 of SEQ ID NO: 917514
caguuugugccagaauaaa

SEQ ID NO: 1239711 - RNA, 19 nt, Artificial Sequence
  Description of Artificial Sequence: Synthetic oligonucleotide
  Antisense strand to SEQ ID NO: 1239710
uuuauucuggcacaaacug

SEQ ID NO: 1239712 - RNA, 19 nt, Artificial Sequence
  Description of Artificial Sequence: Synthetic oligonucleotide
  Sense strand starting at position 1055 of SEQ ID NO: 917514
gcuaaagugcaaggagauu

SEQ ID NO: 1239713 - RNA, 19 nt, Artificial Sequence
  Description of Artificial Sequence: Synthetic oligonucleotide
  Antisense strand to SEQ ID NO: 1239712
aaucuccuugcacuuuagc

SEQ ID NO: 1239714 - RNA, 19 nt, Artificial Sequence
  Description of Artificial Sequence: Synthetic oligonucleotide
  Sense strand starting at position 1113 of SEQ ID NO: 917514
gagccauuccaauggugag

SEQ ID NO: 1239715 - RNA, 19 nt, Artificial Sequence
  Description of Artificial Sequence: Synthetic oligonucleotide
  Antisense strand to SEQ ID NO: 1239714
cucaccauuggaauggcuc

SEQ ID NO: 1239716 - RNA, 19 nt, Artificial Sequence
  Description of Artificial Sequence: Synthetic oligonucleotide
  Sense strand starting at position 1248 of SEQ ID NO: 917514
cugggccuuguccagagau

SEQ ID NO: 1239717 - RNA, 19 nt, Artificial Sequence
  Description of Artificial Sequence: Synthetic oligonucleotide
  Antisense strand to SEQ ID NO: 1239716
aucucuggacaaggcccag

SEQ ID NO: 1239718 - RNA, 19 nt, Artificial Sequence
  Description of Artificial Sequence: Synthetic oligonucleotide
  Sense strand starting at position 1250 of SEQ ID NO: 917514
gggccuuguccagagauuc

SEQ ID NO: 1239719 - RNA, 19 nt, Artificial Sequence
  Description of Artificial Sequence: Synthetic oligonucleotide
  Antisense strand to SEQ ID NO: 1239718
gaaucucuggacaaggccc

SEQ ID NO: 1239720 - RNA, 19 nt, Artificial Sequence
  Description of Artificial Sequence: Synthetic oligonucleotide
  Sense strand starting at position 1273 of SEQ ID NO: 917514
uuggccauucuguaggauu

SEQ ID NO: 1239721 - RNA, 19 nt, Artificial Sequence
  Description of Artificial Sequence: Synthetic oligonucleotide
  Antisense strand to SEQ ID NO: 1239720
aauccuacagaauggccaa

SEQ ID NO: 1239722 - RNA, 19 nt, Artificial Sequence
  Description of Artificial Sequence: Synthetic oligonucleotide
  Sense strand starting at position 1372 of SEQ ID NO: 917514
ggcuaucuggguuagaauc

SEQ ID NO: 1239723 - RNA, 19 nt, Artificial Sequence
  Description of Artificial Sequence: Synthetic oligonucleotide
  Antisense strand to SEQ ID NO: 1239722
gauucuaacccagauagcc

SEQ ID NO: 1239724 - RNA, 19 nt, Artificial Sequence
  Description of Artificial Sequence: Synthetic oligonucleotide
  Sense strand starting at position 1400 of SEQ ID NO: 917514
ccacuuacuguguaacuga

SEQ ID NO: 1239725 - RNA, 19 nt, Artificial Sequence
  Description of Artificial Sequence: Synthetic oligonucleotide
  Antisense strand to SEQ ID NO: 1239724
ucaguuacacaguaagugg

SEQ ID NO: 1239726 - RNA, 19 nt, Artificial Sequence
  Description of Artificial Sequence: Synthetic oligonucleotide
  Sense strand starting at position 1411 of SEQ ID NO: 917514
guaacugaacucgagcaau

SEQ ID NO: 1239727 - RNA, 19 nt, Artificial Sequence
  Description of Artificial Sequence: Synthetic oligonucleotide
  Antisense strand to SEQ ID NO: 1239726
auugcucgaguucaguuac

SEQ ID NO: 1239728 - RNA, 19 nt, Artificial Sequence
  Description of Artificial Sequence: Synthetic oligonucleotide
  Sense strand starting at position 1421 of SEQ ID NO: 917514
ucgagcaauuucuaaaccu

SEQ ID NO: 1239729 - RNA, 19 nt, Artificial Sequence
  Description of Artificial Sequence: Synthetic oligonucleotide
  Antisense strand to SEQ ID NO: 1239728
agguuuagaaauugcucga

SEQ ID NO: 1239730 - RNA, 19 nt, Artificial Sequence
  Description of Artificial Sequence: Synthetic oligonucleotide
  Sense strand starting at position 1496 of SEQ ID NO: 917514
cggguuuagaaaggcuuaa

SEQ ID NO: 1239731 - RNA, 19 nt, Artificial Sequence
  Description of Artificial Sequence: Synthetic oligonucleotide
  Antisense strand to SEQ ID NO: 1239730
uuaagccuuucuaaacccg

SEQ ID NO: 1239732 - RNA, 19 nt, Artificial Sequence
  Description of Artificial Sequence: Synthetic oligonucleotide
  Sense strand starting at position 1650 of SEQ ID NO: 917514
agaauuagggcaugaugca

SEQ ID NO: 1239733 - RNA, 19 nt, Artificial Sequence
  Description of Artificial Sequence: Synthetic oligonucleotide
  Antisense strand to SEQ ID NO: 1239732
ugcaucaugcccuaauucu

SEQ ID NO: 1239734 - RNA, 19 nt, Artificial Sequence
  Description of Artificial Sequence: Synthetic oligonucleotide
  Sense strand starting at position 1663 of SEQ ID NO: 917514
gaugcagauuuccagagua

SEQ ID NO: 1239735 - RNA, 19 nt, Artificial Sequence
  Description of Artificial Sequence: Synthetic oligonucleotide
  Antisense strand to SEQ ID NO: 1239734
uacucuggaaaucugcauc

SEQ ID NO: 1239736 - RNA, 19 nt, Artificial Sequence
  Description of Artificial Sequence: Synthetic oligonucleotide
  Sense strand starting at position 1725 of SEQ ID NO: 917514
ccaaacaaguuguuuaaag

SEQ ID NO: 1239737 - RNA, 19 nt, Artificial Sequence
  Description of Artificial Sequence: Synthetic oligonucleotide
  Antisense strand to SEQ ID NO: 1239736
cuuuaaacaacuuguuugg

SEQ ID NO: 1239738 - RNA, 19 nt, Artificial Sequence
  Description of Artificial Sequence: Synthetic oligonucleotide
  Sense strand starting at position 2692 of SEQ ID NO: 917514
auagaauguaaugguuaag

SEQ ID NO: 1239739 - RNA, 19 nt, Artificial Sequence
  Description of Artificial Sequence: Synthetic oligonucleotide
  Antisense strand to SEQ ID NO: 1239738
cuuaaccauuacauucuau

SEQ ID NO: 1239740 - RNA, 19 nt, Artificial Sequence
  Description of Artificial Sequence: Synthetic oligonucleotide
  Sense strand starting at position 3272 of SEQ ID NO: 917514
cuccauguuggucauacua

SEQ ID NO: 1239741 - RNA, 19 nt, Artificial Sequence
  Description of Artificial Sequence: Synthetic oligonucleotide
  Antisense strand to SEQ ID NO: 1239740
uaguaugaccaacauggag

SEQ ID NO: 1239742 - RNA, 19 nt, Artificial Sequence
  Description of Artificial Sequence: Synthetic oligonucleotide
  Sense strand starting at position 3413 of SEQ ID NO: 917514
aguguugauuuaugaauga

SEQ ID NO: 1239743 - RNA, 19 nt, Artificial Sequence
  Description of Artificial Sequence: Synthetic oligonucleotide
  Antisense strand to SEQ ID NO: 1239742
ucauucauaaaucaacacu

SEQ ID NO: 1239744 - RNA, 19 nt, Artificial Sequence
  Description of Artificial Sequence: Synthetic oligonucleotide
  Sense strand starting at position 3422 of SEQ ID NO: 917514
uuaugaaugagauggucua

SEQ ID NO: 1239745 - RNA, 19 nt, Artificial Sequence
  Description of Artificial Sequence: Synthetic oligonucleotide
  Antisense strand to SEQ ID NO: 1239744
uagaccaucucauucauaa

SEQ ID NO: 1239746 - RNA, 19 nt, Artificial Sequence
  Description of Artificial Sequence: Synthetic oligonucleotide
  Sense strand starting at position 3459 of SEQ ID NO: 917514
uugacaguguucuuaguaa

SEQ ID NO: 1239747 - RNA, 19 nt, Artificial Sequence
  Description of Artificial Sequence: Synthetic oligonucleotide
  Antisense strand to SEQ ID NO: 1239746
uuacuaagaacacugucaa

SEQ ID NO: 1239748 - RNA, 19 nt, Artificial Sequence
  Description of Artificial Sequence: Synthetic oligonucleotide
  Sense strand starting at position 3601 of SEQ ID NO: 917514
agaucuugugccuauauca

SEQ ID NO: 1239749 - RNA, 19 nt, Artificial Sequence
  Description of Artificial Sequence: Synthetic oligonucleotide
  Antisense strand to SEQ ID NO: 1239748
ugauauaggcacaagaucu

SEQ ID NO: 1239750 - RNA, 19 nt, Artificial Sequence
  Description of Artificial Sequence: Synthetic oligonucleotide
  Sense strand starting at position 3684 of SEQ ID NO: 917515
gucucccucuguuuauaau

SEQ ID NO: 1239751 - RNA, 19 nt, Artificial Sequence
  Description of Artificial Sequence: Synthetic oligonucleotide
  Antisense strand to SEQ ID NO: 1239750
auuauaaacagagggagac

SEQ ID NO: 1239752 - RNA, 19 nt, Artificial Sequence
  Description of Artificial Sequence: Synthetic oligonucleotide
  Sense strand starting at position 3 of SEQ ID NO: 917515
acuacuaaugguuguuauu

SEQ ID NO: 1239753 - RNA, 19 nt, Artificial Sequence
  Description of Artificial Sequence: Synthetic oligonucleotide
  Antisense strand to SEQ ID NO: 1239752
aauaacaaccauuaguagu

SEQ ID NO: 1239754 - RNA, 19 nt, Artificial Sequence
  Description of Artificial Sequence: Synthetic oligonucleotide
  Sense strand starting at position 60 of SEQ ID NO: 917515
cagcaaagguguuccuagu

SEQ ID NO: 1239755 - RNA, 19 nt, Artificial Sequence
  Description of Artificial Sequence: Synthetic oligonucleotide
  Antisense strand to SEQ ID NO: 1239754
acuaggaacaccuuugcug

SEQ ID NO: 1239756 - RNA, 19 nt, Artificial Sequence
  Description of Artificial Sequence: Synthetic oligonucleotide
  Sense strand starting at position 163 of SEQ ID NO: 917515
ggaggagucucugaggaca

SEQ ID NO: 1239757 - RNA, 19 nt, Artificial Sequence
  Description of Artificial Sequence: Synthetic oligonucleotide
  Antisense strand to SEQ ID NO: 1239756
uguccucagagacuccucc

SEQ ID NO: 1239758 - RNA, 19 nt, Artificial Sequence
  Description of Artificial Sequence: Synthetic oligonucleotide
  Sense strand starting at position 284 of SEQ ID NO: 917515
gauguaaauugguaagaaa

SEQ ID NO: 1239759 - RNA, 19 nt, Artificial Sequence
  Description of Artificial Sequence: Synthetic oligonucleotide
  Antisense strand to SEQ ID NO: 1239758
uuucuuaccaauuuacauc

SEQ ID NO: 1239760 - RNA, 19 nt, Artificial Sequence
  Description of Artificial Sequence: Synthetic oligonucleotide
  Sense strand starting at position 287 of SEQ ID NO: 917515
guaaauugguaagaaagga

SEQ ID NO: 1239761 - RNA, 19 nt, Artificial Sequence
  Description of Artificial Sequence: Synthetic oligonucleotide
  Antisense strand to SEQ ID NO: 1239760
uccuuucuuaccaauuuac

SEQ ID NO: 1239762 - RNA, 19 nt, Artificial Sequence
  Description of Artificial Sequence: Synthetic oligonucleotide
  Sense strand starting at position 395 of SEQ ID NO: 917515
ggcucaagagccuguaauc

SEQ ID NO: 1239763 - RNA, 19 nt, Artificial Sequence
  Description of Artificial Sequence: Synthetic oligonucleotide
  Antisense strand to SEQ ID NO: 1239762
gauuacaggcucuugagcc

SEQ ID NO: 1239764 - RNA, 19 nt, Artificial Sequence
  Description of Artificial Sequence: Synthetic oligonucleotide
  Sense strand starting at position 708 of SEQ ID NO: 917515
ugaaguuagguccaagcaa

SEQ ID NO: 1239765 - RNA, 19 nt, Artificial Sequence
  Description of Artificial Sequence: Synthetic oligonucleotide
  Antisense strand to SEQ ID NO: 1239764
uugcuuggaccuaacuuca

SEQ ID NO: 1239766 - RNA, 19 nt, Artificial Sequence
  Description of Artificial Sequence: Synthetic oligonucleotide
  Sense strand starting at position 890 of SEQ ID NO: 917515
cggaaagugucguuaauaa

SEQ ID NO: 1239767 - RNA, 19 nt, Artificial Sequence
  Description of Artificial Sequence: Synthetic oligonucleotide
  Antisense strand to SEQ ID NO: 1239766
uuauuaacgacacuuuccg

SEQ ID NO: 1239768 - RNA, 19 nt, Artificial Sequence
  Description of Artificial Sequence: Synthetic oligonucleotide
  Sense strand starting at position 955 of SEQ ID NO: 917515
aaaugcuuguggguaaaug

SEQ ID NO: 1239769 - RNA, 19 nt, Artificial Sequence
  Description of Artificial Sequence: Synthetic oligonucleotide
  Antisense strand to SEQ ID NO: 1239768
cauuuacccacaagcauuu

SEQ ID NO: 1239770 - RNA, 19 nt, Artificial Sequence
  Description of Artificial Sequence: Synthetic oligonucleotide
  Sense strand starting at position 956 of SEQ ID NO: 917515
aaugcuuguggguaaauga

SEQ ID NO: 1239771 - RNA, 19 nt, Artificial Sequence
  Description of Artificial Sequence: Synthetic oligonucleotide
  Antisense strand to SEQ ID NO: 1239770
ucauuuacccacaagcauu

SEQ ID NO: 1239772 - RNA, 19 nt, Artificial Sequence
  Description of Artificial Sequence: Synthetic oligonucleotide
  Sense strand starting at position 1037 of SEQ ID NO: 917515
ucaguaaaguaucuacaaa

SEQ ID NO: 1239773 - RNA, 19 nt, Artificial Sequence
  Description of Artificial Sequence: Synthetic oligonucleotide
  Antisense strand to SEQ ID NO: 1239772
uuuguagauacuuuacuga

SEQ ID NO: 1239774 - RNA, 19 nt, Artificial Sequence
  Description of Artificial Sequence: Synthetic oligonucleotide
  Sense strand starting at position 1097 of SEQ ID NO: 917515
cgcaccuucuaagauuuau

SEQ ID NO: 1239775 - RNA, 19 nt, Artificial Sequence
  Description of Artificial Sequence: Synthetic oligonucleotide
  Antisense strand to SEQ ID NO: 1239774
auaaaucuuagaaggugcg

SEQ ID NO: 1239776 - RNA, 19 nt, Artificial Sequence
  Description of Artificial Sequence: Synthetic oligonucleotide
  Sense strand starting at position 1227 of SEQ ID NO: 917515
agggcauuccaaugaagca

SEQ ID NO: 1239777 - RNA, 19 nt, Artificial Sequence
  Description of Artificial Sequence: Synthetic oligonucleotide
  Antisense strand to SEQ ID NO: 1239776
ugcuucauuggaaugcccu

SEQ ID NO: 1239778 - RNA, 19 nt, Artificial Sequence
  Description of Artificial Sequence: Synthetic oligonucleotide
  Sense strand starting at position 1526 of SEQ ID NO: 917515
gugcgcucccggaagcauu

SEQ ID NO: 1239779 - RNA, 19 nt, Artificial Sequence
  Description of Artificial Sequence: Synthetic oligonucleotide
  Antisense strand to SEQ ID NO: 1239778
aaugcuuccgggagcgcac

SEQ ID NO: 1239780 - RNA, 19 nt, Artificial Sequence
  Description of Artificial Sequence: Synthetic oligonucleotide
  Sense strand starting at position 2227 of SEQ ID NO: 917515
ugcauuaugccugcauguu

SEQ ID NO: 1239781 - RNA, 19 nt, Artificial Sequence
  Description of Artificial Sequence: Synthetic oligonucleotide
  Antisense strand to SEQ ID NO: 1239780
aacaugcaggcauaaugca

SEQ ID NO: 1239782 - RNA, 19 nt, Artificial Sequence
  Description of Artificial Sequence: Synthetic oligonucleotide
  Sense strand starting at position 2228 of SEQ ID NO: 917515
gcauuaugccugcauguuu

SEQ ID NO: 1239783 - RNA, 19 nt, Artificial Sequence
  Description of Artificial Sequence: Synthetic oligonucleotide
  Antisense strand to SEQ ID NO: 1239782
aaacaugcaggcauaaugc

SEQ ID NO: 1239784 - RNA, 19 nt, Artificial Sequence
  Description of Artificial Sequence: Synthetic oligonucleotide
  Sense strand starting at position 2257 of SEQ ID NO: 917515
ucuugucagugcccagaau

SEQ ID NO: 1239785 - RNA, 19 nt, Artificial Sequence
  Description of Artificial Sequence: Synthetic oligonucleotide
  Antisense strand to SEQ ID NO: 1239784
auucugggcacugacaaga

SEQ ID NO: 1239786 - RNA, 19 nt, Artificial Sequence
  Description of Artificial Sequence: Synthetic oligonucleotide
  Sense strand starting at position 2268 of SEQ ID NO: 917515
cccagaauguugcuacauu

SEQ ID NO: 1239787 - RNA, 19 nt, Artificial Sequence
  Description of Artificial Sequence: Synthetic oligonucleotide
  Antisense strand to SEQ ID NO: 1239786
aauguagcaacauucuggg

SEQ ID NO: 1239788 - RNA, 19 nt, Artificial Sequence
  Description of Artificial Sequence: Synthetic oligonucleotide
  Sense strand starting at position 2277 of SEQ ID NO: 917515
uugcuacauucgcuaauga

SEQ ID NO: 1239789 - RNA, 19 nt, Artificial Sequence
  Description of Artificial Sequence: Synthetic oligonucleotide
  Antisense strand to SEQ ID NO: 1239788
ucauuagcgaauguagcaa

SEQ ID NO: 1239790 - RNA, 19 nt, Artificial Sequence
  Description of Artificial Sequence: Synthetic oligonucleotide
  Sense strand starting at position 2278 of SEQ ID NO: 917515
ugcuacauucgcuaaugau

SEQ ID NO: 1239791 - RNA, 19 nt, Artificial Sequence
  Description of Artificial Sequence: Synthetic oligonucleotide
  Antisense strand to SEQ ID NO: 1239790
aucauuagcgaauguagca

SEQ ID NO: 1239792 - RNA, 19 nt, Artificial Sequence
  Description of Artificial Sequence: Synthetic oligonucleotide
  Sense strand starting at position 2284 of SEQ ID NO: 917515
auucgcuaaugauuguaaa

SEQ ID NO: 1239793 - RNA, 19 nt, Artificial Sequence
  Description of Artificial Sequence: Synthetic oligonucleotide
  Antisense strand to SEQ ID NO: 1239792
uuuacaaucauuagcgaau

SEQ ID NO: 1239794 - RNA, 19 nt, Artificial Sequence
  Description of Artificial Sequence: Synthetic oligonucleotide
  Sense strand starting at position 2285 of SEQ ID NO: 917515
uucgcuaaugauuguaaau

SEQ ID NO: 1239795 - RNA, 19 nt, Artificial Sequence
  Description of Artificial Sequence: Synthetic oligonucleotide
  Antisense strand to SEQ ID NO: 1239794
auuuacaaucauuagcgaa

SEQ ID NO: 1239796 - RNA, 19 nt, Artificial Sequence
  Description of Artificial Sequence: Synthetic oligonucleotide
  Sense strand starting at position 2328 of SEQ ID NO: 917515
gaauauuuauggcacgcau

SEQ ID NO: 1239797 - RNA, 19 nt, Artificial Sequence
  Description of Artificial Sequence: Synthetic oligonucleotide
  Antisense strand to SEQ ID NO: 1239796
augcgugccauaaauauuc

SEQ ID NO: 1239798 - RNA, 19 nt, Artificial Sequence
  Description of Artificial Sequence: Synthetic oligonucleotide
  Sense strand starting at position 2462 of SEQ ID NO: 917515
gugauuauuauacagugua

SEQ ID NO: 1239799 - RNA, 19 nt, Artificial Sequence
  Description of Artificial Sequence: Synthetic oligonucleotide
  Antisense strand to SEQ ID NO: 1239798
uacacuguauaauaaucac

SEQ ID NO: 1239800 - RNA, 19 nt, Artificial Sequence
  Description of Artificial Sequence: Synthetic oligonucleotide
  Sense strand starting at position 2783 of SEQ ID NO: 917515
acagaccucaugcgugaau

SEQ ID NO: 1239801 - RNA, 19 nt, Artificial Sequence
  Description of Artificial Sequence: Synthetic oligonucleotide
  Antisense strand to SEQ ID NO: 1239800
auucacgcaugaggucugu

SEQ ID NO: 1239802 - RNA, 19 nt, Artificial Sequence
  Description of Artificial Sequence: Synthetic oligonucleotide
  Sense strand starting at position 2784 of SEQ ID NO: 917515
cagaccucaugcgugaauu

SEQ ID NO: 1239803 - RNA, 19 nt, Artificial Sequence
  Description of Artificial Sequence: Synthetic oligonucleotide
  Antisense strand to SEQ ID NO: 1239802
aauucacgcaugaggucug

SEQ ID NO: 1239804 - RNA, 19 nt, Artificial Sequence
  Description of Artificial Sequence: Synthetic oligonucleotide
  Sense strand starting at position 2785 of SEQ ID NO: 917515
agaccucaugcgugaauuu

SEQ ID NO: 1239805 - RNA, 19 nt, Artificial Sequence
  Description of Artificial Sequence: Synthetic oligonucleotide
  Antisense strand to SEQ ID NO: 1239804
aaauucacgcaugaggucu

SEQ ID NO: 1239806 - RNA, 19 nt, Artificial Sequence
  Description of Artificial Sequence: Synthetic oligonucleotide
  Sense strand starting at position 2812 of SEQ ID NO: 917515
auauguaguuccucuauaa

SEQ ID NO: 1239807 - RNA, 19 nt, Artificial Sequence
  Description of Artificial Sequence: Synthetic oligonucleotide
  Antisense strand to SEQ ID NO: 1239806
uuauagaggaacuacauau

SEQ ID NO: 1239808 - RNA, 19 nt, Artificial Sequence
  Description of Artificial Sequence: Synthetic oligonucleotide
  Sense strand starting at position 3261 of SEQ ID NO: 917515
aauggagcagcuuauagau

SEQ ID NO: 1239809 - RNA, 19 nt, Artificial Sequence
  Description of Artificial Sequence: Synthetic oligonucleotide
  Antisense strand to SEQ ID NO: 1239808
aucuauaagcugcuccauu

SEQ ID NO: 1239810 - RNA, 19 nt, Artificial Sequence
  Description of Artificial Sequence: Synthetic oligonucleotide
  Sense strand starting at position 3270 of SEQ ID NO: 917515
gcuuauagauguccuucua

SEQ ID NO: 1239811 - RNA, 19 nt, Artificial Sequence
  Description of Artificial Sequence: Synthetic oligonucleotide
  Antisense strand to SEQ ID NO: 1239810
uagaaggacaucuauaagc

SEQ ID NO: 1239812 - RNA, 19 nt, Artificial Sequence
  Description of Artificial Sequence: Synthetic oligonucleotide
  Sense strand starting at position 3324 of SEQ ID NO: 917515
cuuacagugucuuccuaaa

SEQ ID NO: 1239813 - RNA, 19 nt, Artificial Sequence
  Description of Artificial Sequence: Synthetic oligonucleotide
  Antisense strand to SEQ ID NO: 1239812
uuuaggaagacacuguaag

SEQ ID NO: 1239814 - RNA, 19 nt, Artificial Sequence
  Description of Artificial Sequence: Synthetic oligonucleotide
  Sense strand starting at position 3346 of SEQ ID NO: 917515
gaaugacugcuuuaaaggu

SEQ ID NO: 1239815 - RNA, 19 nt, Artificial Sequence
  Description of Artificial Sequence: Synthetic oligonucleotide
  Antisense strand to SEQ ID NO: 1239814
accuuuaaagcagucauuc

SEQ ID NO: 1239816 - RNA, 19 nt, Artificial Sequence
  Description of Artificial Sequence: Synthetic oligonucleotide
  Sense strand starting at position 3353 of SEQ ID NO: 917515
ugcuuuaaagguugugaac

SEQ ID NO: 1239817 - RNA, 19 nt, Artificial Sequence
  Description of Artificial Sequence: Synthetic oligonucleotide
  Antisense strand to SEQ ID NO: 1239816
guucacaaccuuuaaagca

SEQ ID NO: 1239818 - RNA, 19 nt, Artificial Sequence
  Description of Artificial Sequence: Synthetic oligonucleotide
  Sense strand starting at position 3517 of SEQ ID NO: 917515
gucuguggcuaggcauuaa

SEQ ID NO: 1239819 - RNA, 19 nt, Artificial Sequence
  Description of Artificial Sequence: Synthetic oligonucleotide
  Antisense strand to SEQ ID NO: 1239818
uuaaugccuagccacagac

SEQ ID NO: 1239820 - RNA, 19 nt, Artificial Sequence
  Description of Artificial Sequence: Synthetic oligonucleotide
  Sense strand starting at position 3541 of SEQ ID NO: 917515
aggaaaggcucuuuccaau

SEQ ID NO: 1239821 - RNA, 19 nt, Artificial Sequence
  Description of Artificial Sequence: Synthetic oligonucleotide
  Antisense strand to SEQ ID NO: 1239820
auuggaaagagccuuuccu

SEQ ID NO: 1239822 - RNA, 19 nt, Artificial Sequence
  Description of Artificial Sequence: Synthetic oligonucleotide
  Sense strand starting at position 3547 of SEQ ID NO: 917515
ggcucuuuccaaugaguau

SEQ ID NO: 1239823 - RNA, 19 nt, Artificial Sequence
  Description of Artificial Sequence: Synthetic oligonucleotide
  Antisense strand to SEQ ID NO: 1239822
auacucauuggaaagagcc

SEQ ID NO: 1239824 - RNA, 19 nt, Artificial Sequence
  Description of Artificial Sequence: Synthetic oligonucleotide
  Sense strand starting at position 3854 of SEQ ID NO: 917515
uguggaacugugcaguuau

SEQ ID NO: 1239825 - RNA, 19 nt, Artificial Sequence
  Description of Artificial Sequence: Synthetic oligonucleotide
  Antisense strand to SEQ ID NO: 1239824
auaacugcacaguuccaca

SEQ ID NO: 1239826 - RNA, 19 nt, Artificial Sequence
  Description of Artificial Sequence: Synthetic oligonucleotide
  Sense strand starting at position 3907 of SEQ ID NO: 917515
ugaggacauuugcaaggua

SEQ ID NO: 1239827 - RNA, 19 nt, Artificial Sequence
  Description of Artificial Sequence: Synthetic oligonucleotide
  Antisense strand to SEQ ID NO: 1239826
uaccuugcaaauguccuca

SEQ ID NO: 1239828 - RNA, 19 nt, Artificial Sequence
  Description of Artificial Sequence: Synthetic oligonucleotide
  Sense strand starting at position 3943 of SEQ ID NO: 917515
ggauguacagucuguagga

SEQ ID NO: 1239829 - RNA, 19 nt, Artificial Sequence
  Description of Artificial Sequence: Synthetic oligonucleotide
  Antisense strand to SEQ ID NO: 1239828
uccuacagacuguacaucc

SEQ ID NO: 1239830 - RNA, 19 nt, Artificial Sequence
  Description of Artificial Sequence: Synthetic oligonucleotide
  Sense strand starting at position 3969 of SEQ ID NO: 917516
agaagccuggcauaugaua

SEQ ID NO: 1239831 - RNA, 19 nt, Artificial Sequence
  Description of Artificial Sequence: Synthetic oligonucleotide
  Antisense strand to SEQ ID NO: 1239830
uaucauaugccaggcuucu

SEQ ID NO: 1239832 - RNA, 19 nt, Artificial Sequence
  Description of Artificial Sequence: Synthetic oligonucleotide
  Sense strand starting at position 43 of SEQ ID NO: 917516
gggcuaauguguguaaccu

SEQ ID NO: 1239833 - RNA, 19 nt, Artificial Sequence
  Description of Artificial Sequence: Synthetic oligonucleotide
  Antisense strand to SEQ ID NO: 1239832
agguuacacacauuagccc

SEQ ID NO: 1239834 - RNA, 19 nt, Artificial Sequence
  Description of Artificial Sequence: Synthetic oligonucleotide
  Sense strand starting at position 44 of SEQ ID NO: 917516
ggcuaauguguguaaccuu

SEQ ID NO: 1239835 - RNA, 19 nt, Artificial Sequence
  Description of Artificial Sequence: Synthetic oligonucleotide
  Antisense strand to SEQ ID NO: 1239834
aagguuacacacauuagcc

SEQ ID NO: 1239836 - RNA, 19 nt, Artificial Sequence
  Description of Artificial Sequence: Synthetic oligonucleotide
  Sense strand starting at position 47 of SEQ ID NO: 917516
uaauguguguaaccuugua

SEQ ID NO: 1239837 - RNA, 19 nt, Artificial Sequence
  Description of Artificial Sequence: Synthetic oligonucleotide
  Antisense strand to SEQ ID NO: 1239836
uacaagguuacacacauua

SEQ ID NO: 1239838 - RNA, 19 nt, Artificial Sequence
  Description of Artificial Sequence: Synthetic oligonucleotide
  Sense strand starting at position 289 of SEQ ID NO: 917516
acuagaucacagggucuaa

SEQ ID NO: 1239839 - RNA, 19 nt, Artificial Sequence
  Description of Artificial Sequence: Synthetic oligonucleotide
  Antisense strand to SEQ ID NO: 1239838
uuagacccugugaucuagu

SEQ ID NO: 1239840 - RNA, 19 nt, Artificial Sequence
  Description of Artificial Sequence: Synthetic oligonucleotide
  Sense strand starting at position 349 of SEQ ID NO: 917516
ucuauauacuugucugcua

SEQ ID NO: 1239841 - RNA, 19 nt, Artificial Sequence
  Description of Artificial Sequence: Synthetic oligonucleotide
  Antisense strand to SEQ ID NO: 1239840
uagcagacaaguauauaga

SEQ ID NO: 1239842 - RNA, 19 nt, Artificial Sequence
  Description of Artificial Sequence: Synthetic oligonucleotide
  Sense strand starting at position 437 of SEQ ID NO: 917516
acuacuaaugguuguuauu

SEQ ID NO: 1239843 - RNA, 19 nt, Artificial Sequence
  Description of Artificial Sequence: Synthetic oligonucleotide
  Antisense strand to SEQ ID NO: 1239842
aauaacaaccauuaguagu

SEQ ID NO: 1239844 - RNA, 19 nt, Artificial Sequence
  Description of Artificial Sequence: Synthetic oligonucleotide
  Sense strand starting at position 494 of SEQ ID NO: 917516
cagcaaagguguuccuagu

SEQ ID NO: 1239845 - RNA, 19 nt, Artificial Sequence
  Description of Artificial Sequence: Synthetic oligonucleotide
  Antisense strand to SEQ ID NO: 1239844
acuaggaacaccuuugcug

SEQ ID NO: 1239846 - RNA, 19 nt, Artificial Sequence
  Description of Artificial Sequence: Synthetic oligonucleotide
  Sense strand starting at position 597 of SEQ ID NO: 917516
ggaggagucucugaggaca

SEQ ID NO: 1239847 - RNA, 19 nt, Artificial Sequence
  Description of Artificial Sequence: Synthetic oligonucleotide
  Antisense strand to SEQ ID NO: 1239846
uguccucagagacuccucc

SEQ ID NO: 1239848 - RNA, 19 nt, Artificial Sequence
  Description of Artificial Sequence: Synthetic oligonucleotide
  Sense strand starting at position 718 of SEQ ID NO: 917516
gauguaaauugguaagaaa

SEQ ID NO: 1239849 - RNA, 19 nt, Artificial Sequence
  Description of Artificial Sequence: Synthetic oligonucleotide
  Antisense strand to SEQ ID NO: 1239848
uuucuuaccaauuuacauc

SEQ ID NO: 1239850 - RNA, 19 nt, Artificial Sequence
  Description of Artificial Sequence: Synthetic oligonucleotide
  Sense strand starting at position 721 of SEQ ID NO: 917516
guaaauugguaagaaagga

SEQ ID NO: 1239851 - RNA, 19 nt, Artificial Sequence
  Description of Artificial Sequence: Synthetic oligonucleotide
  Antisense strand to SEQ ID NO: 1239850
uccuuucuuaccaauuuac

SEQ ID NO: 1239852 - RNA, 19 nt, Artificial Sequence
  Description of Artificial Sequence: Synthetic oligonucleotide
  Sense strand starting at position 829 of SEQ ID NO: 917516
ggcucaagagccuguaauc

SEQ ID NO: 1239853 - RNA, 19 nt, Artificial Sequence
  Description of Artificial Sequence: Synthetic oligonucleotide
  Antisense strand to SEQ ID NO: 1239852
gauuacaggcucuugagcc

SEQ ID NO: 1239854 - RNA, 19 nt, Artificial Sequence
  Description of Artificial Sequence: Synthetic oligonucleotide
  Sense strand starting at position 1142 of SEQ ID NO: 917516
ugaaguuagguccaagcaa

SEQ ID NO: 1239855 - RNA, 19 nt, Artificial Sequence
  Description of Artificial Sequence: Synthetic oligonucleotide
  Antisense strand to SEQ ID NO: 1239854
uugcuuggaccuaacuuca

SEQ ID NO: 1239856 - RNA, 19 nt, Artificial Sequence
  Description of Artificial Sequence: Synthetic oligonucleotide
  Sense strand starting at position 1324 of SEQ ID NO: 917516
cggaaagugucguuaauaa

SEQ ID NO: 1239857 - RNA, 19 nt, Artificial Sequence
  Description of Artificial Sequence: Synthetic oligonucleotide
  Antisense strand to SEQ ID NO: 1239856
uuauuaacgacacuuuccg

SEQ ID NO: 1239858 - RNA, 19 nt, Artificial Sequence
  Description of Artificial Sequence: Synthetic oligonucleotide
  Sense strand starting at position 1389 of SEQ ID NO: 917516
aaaugcuuguggguaaaug

SEQ ID NO: 1239859 - RNA, 19 nt, Artificial Sequence
  Description of Artificial Sequence: Synthetic oligonucleotide
  Antisense strand to SEQ ID NO: 1239858
cauuuacccacaagcauuu

SEQ ID NO: 1239860 - RNA, 19 nt, Artificial Sequence
  Description of Artificial Sequence: Synthetic oligonucleotide
  Sense strand starting at position 1390 of SEQ ID NO: 917516
aaugcuuguggguaaauga

SEQ ID NO: 1239861 - RNA, 19 nt, Artificial Sequence
  Description of Artificial Sequence: Synthetic oligonucleotide
  Antisense strand to SEQ ID NO: 1239860
ucauuuacccacaagcauu

SEQ ID NO: 1239862 - RNA, 19 nt, Artificial Sequence
  Description of Artificial Sequence: Synthetic oligonucleotide
  Sense strand starting at position 1471 of SEQ ID NO: 917516
ucaguaaaguaucuacaaa

SEQ ID NO: 1239863 - RNA, 19 nt, Artificial Sequence
  Description of Artificial Sequence: Synthetic oligonucleotide
  Antisense strand to SEQ ID NO: 1239862
uuuguagauacuuuacuga

SEQ ID NO: 1239864 - RNA, 19 nt, Artificial Sequence
  Description of Artificial Sequence: Synthetic oligonucleotide
  Sense strand starting at position 1531 of SEQ ID NO: 917516
cgcaccuucuaagauuuau

SEQ ID NO: 1239865 - RNA, 19 nt, Artificial Sequence
  Description of Artificial Sequence: Synthetic oligonucleotide
  Antisense strand to SEQ ID NO: 1239864
auaaaucuuagaaggugcg

SEQ ID NO: 1239866 - RNA, 19 nt, Artificial Sequence
  Description of Artificial Sequence: Synthetic oligonucleotide
  Sense strand starting at position 1661 of SEQ ID NO: 917516
agggcauuccaaugaagca

SEQ ID NO: 1239867 - RNA, 19 nt, Artificial Sequence
  Description of Artificial Sequence: Synthetic oligonucleotide
  Antisense strand to SEQ ID NO: 1239866
ugcuucauuggaaugcccu

SEQ ID NO: 1239868 - RNA, 19 nt, Artificial Sequence
  Description of Artificial Sequence: Synthetic oligonucleotide
  Sense strand starting at position 1960 of SEQ ID NO: 917516
gugcgcucccggaagcauu

SEQ ID NO: 1239869 - RNA, 19 nt, Artificial Sequence
  Description of Artificial Sequence: Synthetic oligonucleotide
  Antisense strand to SEQ ID NO: 1239868
aaugcuuccgggagcgcac

SEQ ID NO: 1239870 - RNA, 19 nt, Artificial Sequence
  Description of Artificial Sequence: Synthetic oligonucleotide
  Sense strand starting at position 2661 of SEQ ID NO: 917516
ugcauuaugccugcauguu

SEQ ID NO: 1239871 - RNA, 19 nt, Artificial Sequence
  Description of Artificial Sequence: Synthetic oligonucleotide
  Antisense strand to SEQ ID NO: 1239870
aacaugcaggcauaaugca

SEQ ID NO: 1239872 - RNA, 19 nt, Artificial Sequence
  Description of Artificial Sequence: Synthetic oligonucleotide
  Sense strand starting at position 2691 of SEQ ID NO: 917516
ucuugucagugcccagaau

SEQ ID NO: 1239873 - RNA, 19 nt, Artificial Sequence
  Description of Artificial Sequence: Synthetic oligonucleotide
  Antisense strand to SEQ ID NO: 1239872
auucugggcacugacaaga

SEQ ID NO: 1239874 - RNA, 19 nt, Artificial Sequence
  Description of Artificial Sequence: Synthetic oligonucleotide
  Sense strand starting at position 2702 of SEQ ID NO: 917516
cccagaauguugcuacauu

SEQ ID NO: 1239875 - RNA, 19 nt, Artificial Sequence
  Description of Artificial Sequence: Synthetic oligonucleotide
  Antisense strand to SEQ ID NO: 1239874
aauguagcaacauucuggg

SEQ ID NO: 1239876 - RNA, 19 nt, Artificial Sequence
  Description of Artificial Sequence: Synthetic oligonucleotide
  Sense strand starting at position 2711 of SEQ ID NO: 917516
uugcuacauucgcuaauga

SEQ ID NO: 1239877 - RNA, 19 nt, Artificial Sequence
  Description of Artificial Sequence: Synthetic oligonucleotide
  Antisense strand to SEQ ID NO: 1239876
ucauuagcgaauguagcaa

SEQ ID NO: 1239878 - RNA, 19 nt, Artificial Sequence
  Description of Artificial Sequence: Synthetic oligonucleotide
  Sense strand starting at position 2712 of SEQ ID NO: 917516
ugcuacauucgcuaaugau

SEQ ID NO: 1239879 - RNA, 19 nt, Artificial Sequence
  Description of Artificial Sequence: Synthetic oligonucleotide
  Antisense strand to SEQ ID NO: 1239878
aucauuagcgaauguagca

SEQ ID NO: 1239880 - RNA, 19 nt, Artificial Sequence
  Description of Artificial Sequence: Synthetic oligonucleotide
  Sense strand starting at position 2718 of SEQ ID NO: 917516
auucgcuaaugauuguaaa

SEQ ID NO: 1239881 - RNA, 19 nt, Artificial Sequence
  Description of Artificial Sequence: Synthetic oligonucleotide
  Antisense strand to SEQ ID NO: 1239880
uuuacaaucauuagcgaau

SEQ ID NO: 1239882 - RNA, 19 nt, Artificial Sequence
  Description of Artificial Sequence: Synthetic oligonucleotide
  Sense strand starting at position 2719 of SEQ ID NO: 917516
uucgcuaaugauuguaaau

SEQ ID NO: 1239883 - RNA, 19 nt, Artificial Sequence
  Description of Artificial Sequence: Synthetic oligonucleotide
  Antisense strand to SEQ ID NO: 1239882
auuuacaaucauuagcgaa

SEQ ID NO: 1239884 - RNA, 19 nt, Artificial Sequence
  Description of Artificial Sequence: Synthetic oligonucleotide
  Sense strand starting at position 2762 of SEQ ID NO: 917516
gaauauuuauggcacgcau

SEQ ID NO: 1239885 - RNA, 19 nt, Artificial Sequence
  Description of Artificial Sequence: Synthetic oligonucleotide
  Antisense strand to SEQ ID NO: 1239884
augcgugccauaaauauuc

SEQ ID NO: 1239886 - RNA, 19 nt, Artificial Sequence
  Description of Artificial Sequence: Synthetic oligonucleotide
  Sense strand starting at position 2896 of SEQ ID NO: 917516
gugauuauuauacagugua

SEQ ID NO: 1239887 - RNA, 19 nt, Artificial Sequence
  Description of Artificial Sequence: Synthetic oligonucleotide
  Antisense strand to SEQ ID NO: 1239886
uacacuguauaauaaucac

SEQ ID NO: 1239888 - RNA, 19 nt, Artificial Sequence
  Description of Artificial Sequence: Synthetic oligonucleotide
  Sense strand starting at position 3217 of SEQ ID NO: 917516
acagaccucaugcgugaau

SEQ ID NO: 1239889 - RNA, 19 nt, Artificial Sequence
  Description of Artificial Sequence: Synthetic oligonucleotide
  Antisense strand to SEQ ID NO: 1239888
auucacgcaugaggucugu

SEQ ID NO: 1239890 - RNA, 19 nt, Artificial Sequence
  Description of Artificial Sequence: Synthetic oligonucleotide
  Sense strand starting at position 3218 of SEQ ID NO: 917516
cagaccucaugcgugaauu

SEQ ID NO: 1239891 - RNA, 19 nt, Artificial Sequence
  Description of Artificial Sequence: Synthetic oligonucleotide
  Antisense strand to SEQ ID NO: 1239890
aauucacgcaugaggucug

SEQ ID NO: 1239892 - RNA, 19 nt, Artificial Sequence
  Description of Artificial Sequence: Synthetic oligonucleotide
  Sense strand starting at position 3219 of SEQ ID NO: 917516
agaccucaugcgugaauuu

SEQ ID NO: 1239893 - RNA, 19 nt, Artificial Sequence
  Description of Artificial Sequence: Synthetic oligonucleotide
  Antisense strand to SEQ ID NO: 1239892
aaauucacgcaugaggucu

SEQ ID NO: 1239894 - RNA, 19 nt, Artificial Sequence
  Description of Artificial Sequence: Synthetic oligonucleotide
  Sense strand starting at position 3246 of SEQ ID NO: 917516
auauguaguuccucuauaa

SEQ ID NO: 1239895 - RNA, 19 nt, Artificial Sequence
  Description of Artificial Sequence: Synthetic oligonucleotide
  Antisense strand to SEQ ID NO: 1239894
uuauagaggaacuacauau

SEQ ID NO: 1239896 - RNA, 19 nt, Artificial Sequence
  Description of Artificial Sequence: Synthetic oligonucleotide
  Sense strand starting at position 3695 of SEQ ID NO: 917516
aauggagcagcuuauagau

SEQ ID NO: 1239897 - RNA, 19 nt, Artificial Sequence
  Description of Artificial Sequence: Synthetic oligonucleotide
  Antisense strand to SEQ ID NO: 1239896
aucuauaagcugcuccauu

SEQ ID NO: 1239898 - RNA, 19 nt, Artificial Sequence
  Description of Artificial Sequence: Synthetic oligonucleotide
  Sense strand starting at position 3704 of SEQ ID NO: 917516
gcuuauagauguccuucua

SEQ ID NO: 1239899 - RNA, 19 nt, Artificial Sequence
  Description of Artificial Sequence: Synthetic oligonucleotide
  Antisense strand to SEQ ID NO: 1239898
uagaaggacaucuauaagc

SEQ ID NO: 1239900 - RNA, 19 nt, Artificial Sequence
  Description of Artificial Sequence: Synthetic oligonucleotide
  Sense strand starting at position 3758 of SEQ ID NO: 917516
cuuacagugucuuccuaaa

SEQ ID NO: 1239901 - RNA, 19 nt, Artificial Sequence
  Description of Artificial Sequence: Synthetic oligonucleotide
  Antisense strand to SEQ ID NO: 1239900
uuuaggaagacacuguaag

SEQ ID NO: 1239902 - RNA, 19 nt, Artificial Sequence
  Description of Artificial Sequence: Synthetic oligonucleotide
  Sense strand starting at position 3780 of SEQ ID NO: 917516
gaaugacugcuuuaaaggu

SEQ ID NO: 1239903 - RNA, 19 nt, Artificial Sequence
  Description of Artificial Sequence: Synthetic oligonucleotide
  Antisense strand to SEQ ID NO: 1239902
accuuuaaagcagucauuc

SEQ ID NO: 1239904 - RNA, 19 nt, Artificial Sequence
  Description of Artificial Sequence: Synthetic oligonucleotide
  Sense strand starting at position 3787 of SEQ ID NO: 917516
ugcuuuaaagguugugaac

SEQ ID NO: 1239905 - RNA, 19 nt, Artificial Sequence
  Description of Artificial Sequence: Synthetic oligonucleotide
  Antisense strand to SEQ ID NO: 1239904
guucacaaccuuuaaagca

SEQ ID NO: 1239906 - RNA, 19 nt, Artificial Sequence
  Description of Artificial Sequence: Synthetic oligonucleotide
  Sense strand starting at position 3951 of SEQ ID NO: 917516
gucuguggcuaggcauuaa

SEQ ID NO: 1239907 - RNA, 19 nt, Artificial Sequence
  Description of Artificial Sequence: Synthetic oligonucleotide
  Antisense strand to SEQ ID NO: 1239906
uuaaugccuagccacagac

SEQ ID NO: 1239908 - RNA, 19 nt, Artificial Sequence
  Description of Artificial Sequence: Synthetic oligonucleotide
  Sense strand starting at position 3975 of SEQ ID NO: 917516
aggaaaggcucuuuccaau

SEQ ID NO: 1239909 - RNA, 19 nt, Artificial Sequence
  Description of Artificial Sequence: Synthetic oligonucleotide
  Antisense strand to SEQ ID NO: 1239908
auuggaaagagccuuuccu

SEQ ID NO: 1239910 - RNA, 19 nt, Artificial Sequence
  Description of Artificial Sequence: Synthetic oligonucleotide
  Sense strand starting at position 3981 of SEQ ID NO: 917515
ggcucuuuccaaugaguau

SEQ ID NO: 1239911 - RNA, 19 nt, Artificial Sequence
  Description of Artificial Sequence: Synthetic oligonucleotide
  Antisense strand to SEQ ID NO: 1239910
auacucauuggaaagagcc

SEQ ID NO: 1239912 - RNA, 19 nt, Artificial Sequence
  Description of Artificial Sequence: Synthetic oligonucleotide
  Sense strand starting at position 3969 of SEQ ID NO: 917517
agaagccuggcauaugaua

SEQ ID NO: 1239913 - RNA, 19 nt, Artificial Sequence
  Description of Artificial Sequence: Synthetic oligonucleotide
  Antisense strand to SEQ ID NO: 1239912
uaucauaugccaggcuucu

SEQ ID NO: 1239914 - RNA, 19 nt, Artificial Sequence
  Description of Artificial Sequence: Synthetic oligonucleotide
  Sense strand starting at position 94 of SEQ ID NO: 917517
ugugccacagauuauauua

SEQ ID NO: 1239915 - RNA, 19 nt, Artificial Sequence
  Description of Artificial Sequence: Synthetic oligonucleotide
  Antisense strand to SEQ ID NO: 1239914
uaauauaaucuguggcaca

SEQ ID NO: 1239916 - RNA, 19 nt, Artificial Sequence
  Description of Artificial Sequence: Synthetic oligonucleotide
  Sense strand starting at position 207 of SEQ ID NO: 917517
aacgacccaugguuagaua

SEQ ID NO: 1239917 - RNA, 19 nt, Artificial Sequence
  Description of Artificial Sequence: Synthetic oligonucleotide
  Antisense strand to SEQ ID NO: 1239916
uaucuaaccaugggucguu

SEQ ID NO: 1239918 - RNA, 19 nt, Artificial Sequence
  Description of Artificial Sequence: Synthetic oligonucleotide
  Sense strand starting at position 216 of SEQ ID NO: 917517
ugguuagauaguggauaag

SEQ ID NO: 1239919 - RNA, 19 nt, Artificial Sequence
  Description of Artificial Sequence: Synthetic oligonucleotide
  Antisense strand to SEQ ID NO: 1239918
cuuauccacuaucuaacca

SEQ ID NO: 1239920 - RNA, 19 nt, Artificial Sequence
  Description of Artificial Sequence: Synthetic oligonucleotide
  Sense strand starting at position 496 of SEQ ID NO: 917517
acgaaauacgugggaccua

SEQ ID NO: 1239921 - RNA, 19 nt, Artificial Sequence
  Description of Artificial Sequence: Synthetic oligonucleotide
  Antisense strand to SEQ ID NO: 1239920
uaggucccacguauuucgu

SEQ ID NO: 1239922 - RNA, 19 nt, Artificial Sequence
  Description of Artificial Sequence: Synthetic oligonucleotide
  Sense strand starting at position 829 of SEQ ID NO: 917517
cucauuucuuagcaaggaa

SEQ ID NO: 1239923 - RNA, 19 nt, Artificial Sequence
  Description of Artificial Sequence: Synthetic oligonucleotide
  Antisense strand to SEQ ID NO: 1239922
uuccuugcuaagaaaugag

SEQ ID NO: 1239924 - RNA, 19 nt, Artificial Sequence
  Description of Artificial Sequence: Synthetic oligonucleotide
  Sense strand starting at position 1099 of SEQ ID NO: 917517
gugauucuagcauaguaau

SEQ ID NO: 1239925 - RNA, 19 nt, Artificial Sequence
  Description of Artificial Sequence: Synthetic oligonucleotide
  Antisense strand to SEQ ID NO: 1239924
auuacuaugcuagaaucac

SEQ ID NO: 1239926 - RNA, 19 nt, Artificial Sequence
  Description of Artificial Sequence: Synthetic oligonucleotide
  Sense strand starting at position 1123 of SEQ ID NO: 917517
guguguucuccagcgaauc

SEQ ID NO: 1239927 - RNA, 19 nt, Artificial Sequence
  Description of Artificial Sequence: Synthetic oligonucleotide
  Antisense strand to SEQ ID NO: 1239926
gauucgcuggagaacacac

SEQ ID NO: 1239928 - RNA, 19 nt, Artificial Sequence
  Description of Artificial Sequence: Synthetic oligonucleotide
  Sense strand starting at position 1195 of SEQ ID NO: 917517
uaaauuaagguguaacugu

SEQ ID NO: 1239929 - RNA, 19 nt, Artificial Sequence
  Description of Artificial Sequence: Synthetic oligonucleotide
  Antisense strand to SEQ ID NO: 1239928
acaguuacaccuuaauuua

SEQ ID NO: 1239930 - RNA, 19 nt, Artificial Sequence
  Description of Artificial Sequence: Synthetic oligonucleotide
  Sense strand starting at position 1215 of SEQ ID NO: 917517
agcucuaagaauuacguga

SEQ ID NO: 1239931 - RNA, 19 nt, Artificial Sequence
  Description of Artificial Sequence: Synthetic oligonucleotide
  Antisense strand to SEQ ID NO: 1239930
ucacguaauucuuagagcu

SEQ ID NO: 1239932 - RNA, 19 nt, Artificial Sequence
  Description of Artificial Sequence: Synthetic oligonucleotide
  Sense strand starting at position 1299 of SEQ ID NO: 917517
auggguucuuuggcaagaa

SEQ ID NO: 1239933 - RNA, 19 nt, Artificial Sequence
  Description of Artificial Sequence: Synthetic oligonucleotide
  Antisense strand to SEQ ID NO: 1239932
uucuugccaaagaacccau

SEQ ID NO: 1239934 - RNA, 19 nt, Artificial Sequence
  Description of Artificial Sequence: Synthetic oligonucleotide
  Sense strand starting at position 1303 of SEQ ID NO: 917517
guucuuuggcaagaauguu

SEQ ID NO: 1239935 - RNA, 19 nt, Artificial Sequence
  Description of Artificial Sequence: Synthetic oligonucleotide
  Antisense strand to SEQ ID NO: 1239934
aacauucuugccaaagaac

SEQ ID NO: 1239936 - RNA, 19 nt, Artificial Sequence
  Description of Artificial Sequence: Synthetic oligonucleotide
  Sense strand starting at position 1311 of SEQ ID NO: 917517
gcaagaauguucccuucua

SEQ ID NO: 1239937 - RNA, 19 nt, Artificial Sequence
  Description of Artificial Sequence: Synthetic oligonucleotide
  Antisense strand to SEQ ID NO: 1239936
uagaagggaacauucuugc

SEQ ID NO: 1239938 - RNA, 19 nt, Artificial Sequence
  Description of Artificial Sequence: Synthetic oligonucleotide
  Sense strand starting at position 1413 of SEQ ID NO: 917517
ucaauaauuccauagggcu

SEQ ID NO: 1239939 - RNA, 19 nt, Artificial Sequence
  Description of Artificial Sequence: Synthetic oligonucleotide
  Antisense strand to SEQ ID NO: 1239938
agcccuauggaauuauuga

SEQ ID NO: 1239940 - RNA, 19 nt, Artificial Sequence
  Description of Artificial Sequence: Synthetic oligonucleotide
  Sense strand starting at position 1434 of SEQ ID NO: 917517
ggcauuaaccucuacgagu

SEQ ID NO: 1239941 - RNA, 19 nt, Artificial Sequence
  Description of Artificial Sequence: Synthetic oligonucleotide
  Antisense strand to SEQ ID NO: 1239940
acucguagagguuaaugcc

SEQ ID NO: 1239942 - RNA, 19 nt, Artificial Sequence
  Description of Artificial Sequence: Synthetic oligonucleotide
  Sense strand starting at position 1448 of SEQ ID NO: 917517
cgaguauuauaaccuaagu

SEQ ID NO: 1239943 - RNA, 19 nt, Artificial Sequence
  Description of Artificial Sequence: Synthetic oligonucleotide
  Antisense strand to SEQ ID NO: 1239942
acuuagguuauaauacucg

SEQ ID NO: 1239944 - RNA, 19 nt, Artificial Sequence
  Description of Artificial Sequence: Synthetic oligonucleotide
  Sense strand starting at position 1503 of SEQ ID NO: 917517
agaaaucacucuucuaggu

SEQ ID NO: 1239945 - RNA, 19 nt, Artificial Sequence
  Description of Artificial Sequence: Synthetic oligonucleotide
  Antisense strand to SEQ ID NO: 1239944
accuagaagagugauuucu

SEQ ID NO: 1239946 - RNA, 19 nt, Artificial Sequence
  Description of Artificial Sequence: Synthetic oligonucleotide
  Sense strand starting at position 1508 of SEQ ID NO: 917517
ucacucuucuaggucauca

SEQ ID NO: 1239947 - RNA, 19 nt, Artificial Sequence
  Description of Artificial Sequence: Synthetic oligonucleotide
  Antisense strand to SEQ ID NO: 1239946
ugaugaccuagaagaguga

SEQ ID NO: 1239948 - RNA, 19 nt, Artificial Sequence
  Description of Artificial Sequence: Synthetic oligonucleotide
  Sense strand starting at position 1510 of SEQ ID NO: 917517
acucuucuaggucaucaga

SEQ ID NO: 1239949 - RNA, 19 nt, Artificial Sequence
  Description of Artificial Sequence: Synthetic oligonucleotide
  Antisense strand to SEQ ID NO: 1239948
ucugaugaccuagaagagu

SEQ ID NO: 1239950 - RNA, 19 nt, Artificial Sequence
  Description of Artificial Sequence: Synthetic oligonucleotide
  Sense strand starting at position 1512 of SEQ ID NO: 917517
ucuucuaggucaucagaaa

SEQ ID NO: 1239951 - RNA, 19 nt, Artificial Sequence
  Description of Artificial Sequence: Synthetic oligonucleotide
  Antisense strand to SEQ ID NO: 1239950
uuucugaugaccuagaaga

SEQ ID NO: 1239952 - RNA, 19 nt, Artificial Sequence
  Description of Artificial Sequence: Synthetic oligonucleotide
  Sense strand starting at position 1524 of SEQ ID NO: 917517
ucagaaaccuuaguccaga

SEQ ID NO: 1239953 - RNA, 19 nt, Artificial Sequence
  Description of Artificial Sequence: Synthetic oligonucleotide
  Antisense strand to SEQ ID NO: 1239952
ucuggacuaagguuucuga

SEQ ID NO: 1239954 - RNA, 19 nt, Artificial Sequence
  Description of Artificial Sequence: Synthetic oligonucleotide
  Sense strand starting at position 3149 of SEQ ID NO: 917517
gguaauaaguaguuacaca

SEQ ID NO: 1239955 - RNA, 19 nt, Artificial Sequence
  Description of Artificial Sequence: Synthetic oligonucleotide
  Antisense strand to SEQ ID NO: 1239954
uguguaacuacuuauuacc

SEQ ID NO: 1239956 - RNA, 19 nt, Artificial Sequence
  Description of Artificial Sequence: Synthetic oligonucleotide
  Sense strand starting at position 3226 of SEQ ID NO: 917517
gacauaaauuuaggaugua

SEQ ID NO: 1239957 - RNA, 19 nt, Artificial Sequence
  Description of Artificial Sequence: Synthetic oligonucleotide
  Antisense strand to SEQ ID NO: 1239956
uacauccuaaauuuauguc

SEQ ID NO: 1239958 - RNA, 19 nt, Artificial Sequence
  Description of Artificial Sequence: Synthetic oligonucleotide
  Sense strand starting at position 3264 of SEQ ID NO: 917517
cuacuuugagcacauugua

SEQ ID NO: 1239959 - RNA, 19 nt, Artificial Sequence
  Description of Artificial Sequence: Synthetic oligonucleotide
  Antisense strand to SEQ ID NO: 1239958
uacaaugugcucaaaguag

SEQ ID NO: 1239960 - RNA, 19 nt, Artificial Sequence
  Description of Artificial Sequence: Synthetic oligonucleotide
  Sense strand starting at position 3271 of SEQ ID NO: 917517
gagcacauuguauguauca

SEQ ID NO: 1239961 - RNA, 19 nt, Artificial Sequence
  Description of Artificial Sequence: Synthetic oligonucleotide
  Antisense strand to SEQ ID NO: 1239960
ugauacauacaaugugcuc

SEQ ID NO: 1239962 - RNA, 19 nt, Artificial Sequence
  Description of Artificial Sequence: Synthetic oligonucleotide
  Sense strand starting at position 3272 of SEQ ID NO: 917517
agcacauuguauguaucaa

SEQ ID NO: 1239963 - RNA, 19 nt, Artificial Sequence
  Description of Artificial Sequence: Synthetic oligonucleotide
  Antisense strand to SEQ ID NO: 1239962
uugauacauacaaugugcu

SEQ ID NO: 1239964 - RNA, 19 nt, Artificial Sequence
  Description of Artificial Sequence: Synthetic oligonucleotide
  Sense strand starting at position 3383 of SEQ ID NO: 917517
auugaauaccuuggucaag

SEQ ID NO: 1239965 - RNA, 19 nt, Artificial Sequence
  Description of Artificial Sequence: Synthetic oligonucleotide
  Antisense strand to SEQ ID NO: 1239964
cuugaccaagguauucaau

SEQ ID NO: 1239966 - RNA, 19 nt, Artificial Sequence
  Description of Artificial Sequence: Synthetic oligonucleotide
  Sense strand starting at position 3384 of SEQ ID NO: 917517
uugaauaccuuggucaaga

SEQ ID NO: 1239967 - RNA, 19 nt, Artificial Sequence
  Description of Artificial Sequence: Synthetic oligonucleotide
  Antisense strand to SEQ ID NO: 1239966
ucuugaccaagguauucaa

SEQ ID NO: 1239968 - RNA, 19 nt, Artificial Sequence
  Description of Artificial Sequence: Synthetic oligonucleotide
  Sense strand starting at position 3385 of SEQ ID NO: 917517
ugaauaccuuggucaagau

SEQ ID NO: 1239969 - RNA, 19 nt, Artificial Sequence
  Description of Artificial Sequence: Synthetic oligonucleotide
  Antisense strand to SEQ ID NO: 1239968
aucuugaccaagguauuca

SEQ ID NO: 1239970 - RNA, 19 nt, Artificial Sequence
  Description of Artificial Sequence: Synthetic oligonucleotide
  Sense strand starting at position 3394 of SEQ ID NO: 917517
uggucaagauaucuccauu

SEQ ID NO: 1239971 - RNA, 19 nt, Artificial Sequence
  Description of Artificial Sequence: Synthetic oligonucleotide
  Antisense strand to SEQ ID NO: 1239970
aauggagauaucuugacca

SEQ ID NO: 1239972 - RNA, 19 nt, Artificial Sequence
  Description of Artificial Sequence: Synthetic oligonucleotide
  Sense strand starting at position 3470 of SEQ ID NO: 917517
uuugcaaagugguugauau

SEQ ID NO: 1239973 - RNA, 19 nt, Artificial Sequence
  Description of Artificial Sequence: Synthetic oligonucleotide
  Antisense strand to SEQ ID NO: 1239972
auaucaaccacuuugcaaa

SEQ ID NO: 1239974 - RNA, 19 nt, Artificial Sequence
  Description of Artificial Sequence: Synthetic oligonucleotide
  Sense strand starting at position 3471 of SEQ ID NO: 917517
uugcaaagugguugauaua

SEQ ID NO: 1239975 - RNA, 19 nt, Artificial Sequence
  Description of Artificial Sequence: Synthetic oligonucleotide
  Antisense strand to SEQ ID NO: 1239974
uauaucaaccacuuugcaa

SEQ ID NO: 1239976 - RNA, 19 nt, Artificial Sequence
  Description of Artificial Sequence: Synthetic oligonucleotide
  Sense strand starting at position 3472 of SEQ ID NO: 917517
ugcaaagugguugauauaa

SEQ ID NO: 1239977 - RNA, 19 nt, Artificial Sequence
  Description of Artificial Sequence: Synthetic oligonucleotide
  Antisense strand to SEQ ID NO: 1239976
uuauaucaaccacuuugca

SEQ ID NO: 1239978 - RNA, 19 nt, Artificial Sequence
  Description of Artificial Sequence: Synthetic oligonucleotide
  Sense strand starting at position 3494 of SEQ ID NO: 917517
cuaagagcucuuggaguua

SEQ ID NO: 1239979 - RNA, 19 nt, Artificial Sequence
  Description of Artificial Sequence: Synthetic oligonucleotide
  Antisense strand to SEQ ID NO: 1239978
uaacuccaagagcucuuag

SEQ ID NO: 1239980 - RNA, 19 nt, Artificial Sequence
  Description of Artificial Sequence: Synthetic oligonucleotide
  Sense strand starting at position 3499 of SEQ ID NO: 917517
agcucuuggaguuaagaca

SEQ ID NO: 1239981 - RNA, 19 nt, Artificial Sequence
  Description of Artificial Sequence: Synthetic oligonucleotide
  Antisense strand to SEQ ID NO: 1239980
ugucuuaacuccaagagcu

SEQ ID NO: 1239982 - RNA, 19 nt, Artificial Sequence
  Description of Artificial Sequence: Synthetic oligonucleotide
  Sense strand starting at position 3624 of SEQ ID NO: 917517
aguauuauagcucauugca

SEQ ID NO: 1239983 - RNA, 19 nt, Artificial Sequence
  Description of Artificial Sequence: Synthetic oligonucleotide
  Antisense strand to SEQ ID NO: 1239982
ugcaaugagcuauaauacu

SEQ ID NO: 1239984 - RNA, 19 nt, Artificial Sequence
  Description of Artificial Sequence: Synthetic oligonucleotide
  Sense strand starting at position 3844 of SEQ ID NO: 917517
gaguaacugcuguauaaac

SEQ ID NO: 1239985 - RNA, 19 nt, Artificial Sequence
  Description of Artificial Sequence: Synthetic oligonucleotide
  Antisense strand to SEQ ID NO: 1239984
guuuauacagcaguuacuc

SEQ ID NO: 1239986 - RNA, 19 nt, Artificial Sequence
  Description of Artificial Sequence: Synthetic oligonucleotide
  Sense strand starting at position 3879 of SEQ ID NO: 917517
cugugaaucaaugggcuca

SEQ ID NO: 1239987 - RNA, 19 nt, Artificial Sequence
  Description of Artificial Sequence: Synthetic oligonucleotide
  Antisense strand to SEQ ID NO: 1239986
ugagcccauugauucacag

SEQ ID NO: 1239988 - RNA, 19 nt, Artificial Sequence
  Description of Artificial Sequence: Synthetic oligonucleotide
  Sense strand starting at position 3881 of SEQ ID NO: 917517
gugaaucaaugggcucaca

SEQ ID NO: 1239989 - RNA, 19 nt, Artificial Sequence
  Description of Artificial Sequence: Synthetic oligonucleotide
  Antisense strand to SEQ ID NO: 1239988
ugugagcccauugauucac

SEQ ID NO: 1239990 - RNA, 19 nt, Artificial Sequence
  Description of Artificial Sequence: Synthetic oligonucleotide
  Sense strand starting at position 3932 of SEQ ID NO: 917517
auugcaauacagugagaca

SEQ ID NO: 1239991 - RNA, 19 nt, Artificial Sequence
  Description of Artificial Sequence: Synthetic oligonucleotide
  Antisense strand to SEQ ID NO: 1239990
ugucucacuguauugcaau

SEQ ID NO: 1239992 - RNA, 19 nt, Artificial Sequence
  Description of Artificial Sequence: Synthetic oligonucleotide
  Sense strand starting at position 3941 of SEQ ID NO: 917517
cagugagacacgugucaag

SEQ ID NO: 1239993 - RNA, 19 nt, Artificial Sequence
  Description of Artificial Sequence: Synthetic oligonucleotide
  Antisense strand to SEQ ID NO: 1239992
cuugacacgugucucacug

SEQ ID NO: 1239994 - RNA, 19 nt, Artificial Sequence
  Description of Artificial Sequence: Synthetic oligonucleotide
  Sense strand starting at position 3941 of SEQ ID NO: 917518
cagugagacacgugucaag

SEQ ID NO: 1239995 - RNA, 19 nt, Artificial Sequence
  Description of Artificial Sequence: Synthetic oligonucleotide
  Antisense strand to SEQ ID NO: 1239994
cuugacacgugucucacug

SEQ ID NO: 1239996 - RNA, 19 nt, Artificial Sequence
  Description of Artificial Sequence: Synthetic oligonucleotide
  Sense strand starting at position 26 of SEQ ID NO: 917518
aguacuagcccgugaguag

SEQ ID NO: 1239997 - RNA, 19 nt, Artificial Sequence
  Description of Artificial Sequence: Synthetic oligonucleotide
  Antisense strand to SEQ ID NO: 1239996
cuacucacgggcuaguacu

SEQ ID NO: 1239998 - RNA, 19 nt, Artificial Sequence
  Description of Artificial Sequence: Synthetic oligonucleotide
  Sense strand starting at position 144 of SEQ ID NO: 917518
cguaacgugugacuacaaa

SEQ ID NO: 1239999 - RNA, 19 nt, Artificial Sequence
  Description of Artificial Sequence: Synthetic oligonucleotide
  Antisense strand to SEQ ID NO: 1239998
uuuguagucacacguuacg

SEQ ID NO: 1240000 - RNA, 19 nt, Artificial Sequence
  Description of Artificial Sequence: Synthetic oligonucleotide
  Sense strand starting at position 234 of SEQ ID NO: 917518
uucguaauuguugaagaua

SEQ ID NO: 1240001 - RNA, 19 nt, Artificial Sequence
  Description of Artificial Sequence: Synthetic oligonucleotide
  Antisense strand to SEQ ID NO: 1240000
uaucuucaacaauuacgaa

SEQ ID NO: 1240002 - RNA, 19 nt, Artificial Sequence
  Description of Artificial Sequence: Synthetic oligonucleotide
  Sense strand starting at position 249 of SEQ ID NO: 917518
gauagugaagcacaucauu

SEQ ID NO: 1240003 - RNA, 19 nt, Artificial Sequence
  Description of Artificial Sequence: Synthetic oligonucleotide
  Antisense strand to SEQ ID NO: 1240002
aaugaugugcuucacuauc

SEQ ID NO: 1240004 - RNA, 19 nt, Artificial Sequence
  Description of Artificial Sequence: Synthetic oligonucleotide
  Sense strand starting at position 265 of SEQ ID NO: 917518
auugacuauuagguuguaa

SEQ ID NO: 1240005 - RNA, 19 nt, Artificial Sequence
  Description of Artificial Sequence: Synthetic oligonucleotide
  Antisense strand to SEQ ID NO: 1240004
uuacaaccuaauagucaau

SEQ ID NO: 1240006 - RNA, 19 nt, Artificial Sequence
  Description of Artificial Sequence: Synthetic oligonucleotide
  Sense strand starting at position 267 of SEQ ID NO: 917518
ugacuauuagguuguaaau

SEQ ID NO: 1240007 - RNA, 19 nt, Artificial Sequence
  Description of Artificial Sequence: Synthetic oligonucleotide
  Antisense strand to SEQ ID NO: 1240006
auuuacaaccuaauaguca

SEQ ID NO: 1240008 - RNA, 19 nt, Artificial Sequence
  Description of Artificial Sequence: Synthetic oligonucleotide
  Sense strand starting at position 367 of SEQ ID NO: 917518
auauguacauaguucuaga

SEQ ID NO: 1240009 - RNA, 19 nt, Artificial Sequence
  Description of Artificial Sequence: Synthetic oligonucleotide
  Antisense strand to SEQ ID NO: 1240008
ucuagaacuauguacauau

SEQ ID NO: 1240010 - RNA, 19 nt, Artificial Sequence
  Description of Artificial Sequence: Synthetic oligonucleotide
  Sense strand starting at position 504 of SEQ ID NO: 917518
ugaguacuacacugaaguc

SEQ ID NO: 1240011 - RNA, 19 nt, Artificial Sequence
  Description of Artificial Sequence: Synthetic oligonucleotide
  Antisense strand to SEQ ID NO: 1240010
gacuucaguguaguacuca

SEQ ID NO: 1240012 - RNA, 19 nt, Artificial Sequence
  Description of Artificial Sequence: Synthetic oligonucleotide
  Sense strand starting at position 568 of SEQ ID NO: 917518
gccuuugggaaaggucaaa

SEQ ID NO: 1240013 - RNA, 19 nt, Artificial Sequence
  Description of Artificial Sequence: Synthetic oligonucleotide
  Antisense strand to SEQ ID NO: 1240012
uuugaccuuucccaaaggc

SEQ ID NO: 1240014 - RNA, 19 nt, Artificial Sequence
  Description of Artificial Sequence: Synthetic oligonucleotide
  Sense strand starting at position 587 of SEQ ID NO: 917518
cccagcuuucguuuguuua

SEQ ID NO: 1240015 - RNA, 19 nt, Artificial Sequence
  Description of Artificial Sequence: Synthetic oligonucleotide
  Antisense strand to SEQ ID NO: 1240014
uaaacaaacgaaagcuggg

SEQ ID NO: 1240016 - RNA, 19 nt, Artificial Sequence
  Description of Artificial Sequence: Synthetic oligonucleotide
  Sense strand starting at position 875 of SEQ ID NO: 917518
auguucugcuaugcauuua

SEQ ID NO: 1240017 - RNA, 19 nt, Artificial Sequence
  Description of Artificial Sequence: Synthetic oligonucleotide
  Antisense strand to SEQ ID NO: 1240016
uaaaugcauagcagaacau

SEQ ID NO: 1240018 - RNA, 19 nt, Artificial Sequence
  Description of Artificial Sequence: Synthetic oligonucleotide
  Sense strand starting at position 946 of SEQ ID NO: 917518
gagacuguugcuggaagua

SEQ ID NO: 1240019 - RNA, 19 nt, Artificial Sequence
  Description of Artificial Sequence: Synthetic oligonucleotide
  Antisense strand to SEQ ID NO: 1240018
uacuuccagcaacagucuc

SEQ ID NO: 1240020 - RNA, 19 nt, Artificial Sequence
  Description of Artificial Sequence: Synthetic oligonucleotide
  Sense strand starting at position 2258 of SEQ ID NO: 917518
gcguccuuuccagcgagga

SEQ ID NO: 1240021 - RNA, 19 nt, Artificial Sequence
  Description of Artificial Sequence: Synthetic oligonucleotide
  Antisense strand to SEQ ID NO: 1240020
uccucgcuggaaaggacgc

SEQ ID NO: 1240022 - RNA, 19 nt, Artificial Sequence
  Description of Artificial Sequence: Synthetic oligonucleotide
  Sense strand starting at position 2260 of SEQ ID NO: 917518
guccuuuccagcgaggaga

SEQ ID NO: 1240023 - RNA, 19 nt, Artificial Sequence
  Description of Artificial Sequence: Synthetic oligonucleotide
  Antisense strand to SEQ ID NO: 1240022
ucuccucgcuggaaaggac

SEQ ID NO: 1240024 - RNA, 19 nt, Artificial Sequence
  Description of Artificial Sequence: Synthetic oligonucleotide
  Sense strand starting at position 2296 of SEQ ID NO: 917518
ccaagagacccuuguauca

SEQ ID NO: 1240025 - RNA, 19 nt, Artificial Sequence
  Description of Artificial Sequence: Synthetic oligonucleotide
  Antisense strand to SEQ ID NO: 1240024
ugauacaagggucucuugg

SEQ ID NO: 1240026 - RNA, 19 nt, Artificial Sequence
  Description of Artificial Sequence: Synthetic oligonucleotide
  Sense strand starting at position 2325 of SEQ ID NO: 917518
cuaggugcccauuacagua

SEQ ID NO: 1240027 - RNA, 19 nt, Artificial Sequence
  Description of Artificial Sequence: Synthetic oligonucleotide
  Antisense strand to SEQ ID NO: 1240026
uacuguaaugggcaccuag

SEQ ID NO: 1240028 - RNA, 19 nt, Artificial Sequence
  Description of Artificial Sequence: Synthetic oligonucleotide
  Sense strand starting at position 2347 of SEQ ID NO: 917518
uugaguuugcgcuuauauc

SEQ ID NO: 1240029 - RNA, 19 nt, Artificial Sequence
  Description of Artificial Sequence: Synthetic oligonucleotide
  Antisense strand to SEQ ID NO: 1240028
gauauaagcgcaaacucaa

SEQ ID NO: 1240030 - RNA, 19 nt, Artificial Sequence
  Description of Artificial Sequence: Synthetic oligonucleotide
  Sense strand starting at position 2408 of SEQ ID NO: 917518
cuaccuguaaggugucaga

SEQ ID NO: 1240031 - RNA, 19 nt, Artificial Sequence
  Description of Artificial Sequence: Synthetic oligonucleotide
  Antisense strand to SEQ ID NO: 1240030
ucugacaccuuacagguag

SEQ ID NO: 1240032 - RNA, 19 nt, Artificial Sequence
  Description of Artificial Sequence: Synthetic oligonucleotide
  Sense strand starting at position 2500 of SEQ ID NO: 917518
gcucaaauucguuagcauu

SEQ ID NO: 1240033 - RNA, 19 nt, Artificial Sequence
  Description of Artificial Sequence: Synthetic oligonucleotide
  Antisense strand to SEQ ID NO: 1240032
aaugcuaacgaauuugagc

SEQ ID NO: 1240034 - RNA, 19 nt, Artificial Sequence
  Description of Artificial Sequence: Synthetic oligonucleotide
  Sense strand starting at position 2586 of SEQ ID NO: 917518
ccacccuagaugugaggaa

SEQ ID NO: 1240035 - RNA, 19 nt, Artificial Sequence
  Description of Artificial Sequence: Synthetic oligonucleotide
  Antisense strand to SEQ ID NO: 1240034
uuccucacaucuagggugg

SEQ ID NO: 1240036 - RNA, 19 nt, Artificial Sequence
  Description of Artificial Sequence: Synthetic oligonucleotide
  Sense strand starting at position 2587 of SEQ ID NO: 917518
cacccuagaugugaggaaa

SEQ ID NO: 1240037 - RNA, 19 nt, Artificial Sequence
  Description of Artificial Sequence: Synthetic oligonucleotide
  Antisense strand to SEQ ID NO: 1240036
uuuccucacaucuagggug

SEQ ID NO: 1240038 - RNA, 19 nt, Artificial Sequence
  Description of Artificial Sequence: Synthetic oligonucleotide
  Sense strand starting at position 2956 of SEQ ID NO: 917518
cuuuacagauguguaauaa

SEQ ID NO: 1240039 - RNA, 19 nt, Artificial Sequence
  Description of Artificial Sequence: Synthetic oligonucleotide
  Antisense strand to SEQ ID NO: 1240038
uuauuacacaucuguaaag

SEQ ID NO: 1240040 - RNA, 19 nt, Artificial Sequence
  Description of Artificial Sequence: Synthetic oligonucleotide
  Sense strand starting at position 2960 of SEQ ID NO: 917518
acagauguguaauaaugau

SEQ ID NO: 1240041 - RNA, 19 nt, Artificial Sequence
  Description of Artificial Sequence: Synthetic oligonucleotide
  Antisense strand to SEQ ID NO: 1240040
aucauuauuacacaucugu

SEQ ID NO: 1240042 - RNA, 19 nt, Artificial Sequence
  Description of Artificial Sequence: Synthetic oligonucleotide
  Sense strand starting at position 2966 of SEQ ID NO: 917518
guguaauaaugaucaacau

SEQ ID NO: 1240043 - RNA, 19 nt, Artificial Sequence
  Description of Artificial Sequence: Synthetic oligonucleotide
  Antisense strand to SEQ ID NO: 1240042
auguugaucauuauuacac

SEQ ID NO: 1240044 - RNA, 19 nt, Artificial Sequence
  Description of Artificial Sequence: Synthetic oligonucleotide
  Sense strand starting at position 2977 of SEQ ID NO: 917518
aucaacaucuagcuagaga

SEQ ID NO: 1240045 - RNA, 19 nt, Artificial Sequence
  Description of Artificial Sequence: Synthetic oligonucleotide
  Antisense strand to SEQ ID NO: 1240044
ucucuagcuagauguugau

SEQ ID NO: 1240046 - RNA, 19 nt, Artificial Sequence
  Description of Artificial Sequence: Synthetic oligonucleotide
  Sense strand starting at position 3204 of SEQ ID NO: 917518
gguaauuaacaagguaaac

SEQ ID NO: 1240047 - RNA, 19 nt, Artificial Sequence
  Description of Artificial Sequence: Synthetic oligonucleotide
  Antisense strand to SEQ ID NO: 1240046
guuuaccuuguuaauuacc

SEQ ID NO: 1240048 - RNA, 19 nt, Artificial Sequence
  Description of Artificial Sequence: Synthetic oligonucleotide
  Sense strand starting at position 3276 of SEQ ID NO: 917518
gugacaaaugucugcugaa

SEQ ID NO: 1240049 - RNA, 19 nt, Artificial Sequence
  Description of Artificial Sequence: Synthetic oligonucleotide
  Antisense strand to SEQ ID NO: 1240048
uucagcagacauuugucac

SEQ ID NO: 1240050 - RNA, 19 nt, Artificial Sequence
  Description of Artificial Sequence: Synthetic oligonucleotide
  Sense strand starting at position 3277 of SEQ ID NO: 917518
ugacaaaugucugcugaau

SEQ ID NO: 1240051 - RNA, 19 nt, Artificial Sequence
  Description of Artificial Sequence: Synthetic oligonucleotide
  Antisense strand to SEQ ID NO: 1240050
auucagcagacauuuguca

SEQ ID NO: 1240052 - RNA, 19 nt, Artificial Sequence
  Description of Artificial Sequence: Synthetic oligonucleotide
  Sense strand starting at position 3373 of SEQ ID NO: 917518
gucuauguuuaggucauua

SEQ ID NO: 1240053 - RNA, 19 nt, Artificial Sequence
  Description of Artificial Sequence: Synthetic oligonucleotide
  Antisense strand to SEQ ID NO: 1240052
uaaugaccuaaacauagac

SEQ ID NO: 1240054 - RNA, 19 nt, Artificial Sequence
  Description of Artificial Sequence: Synthetic oligonucleotide
  Sense strand starting at position 3416 of SEQ ID NO: 917518
uauagauacccagaguguu

SEQ ID NO: 1240055 - RNA, 19 nt, Artificial Sequence
  Description of Artificial Sequence: Synthetic oligonucleotide
  Antisense strand to SEQ ID NO: 1240054
aacacucuggguaucuaua

SEQ ID NO: 1240056 - RNA, 19 nt, Artificial Sequence
  Description of Artificial Sequence: Synthetic oligonucleotide
  Sense strand starting at position 3599 of SEQ ID NO: 917518
ucaucaguuccaugaggau

SEQ ID NO: 1240057 - RNA, 19 nt, Artificial Sequence
  Description of Artificial Sequence: Synthetic oligonucleotide
  Antisense strand to SEQ ID NO: 1240056
auccucauggaacugauga

SEQ ID NO: 1240058 - RNA, 19 nt, Artificial Sequence
  Description of Artificial Sequence: Synthetic oligonucleotide
  Sense strand starting at position 3675 of SEQ ID NO: 917518
gcaugugguaaauaugauu

SEQ ID NO: 1240059 - RNA, 19 nt, Artificial Sequence
  Description of Artificial Sequence: Synthetic oligonucleotide
  Antisense strand to SEQ ID NO: 1240058
aaucauauuuaccacaugc

SEQ ID NO: 1240060 - RNA, 19 nt, Artificial Sequence
  Description of Artificial Sequence: Synthetic oligonucleotide
  Sense strand starting at position 3686 of SEQ ID NO: 917518
auaugauucuauuccuagu

SEQ ID NO: 1240061 - RNA, 19 nt, Artificial Sequence
  Description of Artificial Sequence: Synthetic oligonucleotide
  Antisense strand to SEQ ID NO: 1240060
acuaggaauagaaucauau

SEQ ID NO: 1240062 - RNA, 19 nt, Artificial Sequence
  Description of Artificial Sequence: Synthetic oligonucleotide
  Sense strand starting at position 3702 of SEQ ID NO: 917518
aguguugugguucauggua

SEQ ID NO: 1240063 - RNA, 19 nt, Artificial Sequence
  Description of Artificial Sequence: Synthetic oligonucleotide
  Antisense strand to SEQ ID NO: 1240062
uaccaugaaccacaacacu

SEQ ID NO: 1240064 - RNA, 19 nt, Artificial Sequence
  Description of Artificial Sequence: Synthetic oligonucleotide
  Sense strand starting at position 3739 of SEQ ID NO: 917518
uauggucuugugugaacca

SEQ ID NO: 1240065 - RNA, 19 nt, Artificial Sequence
  Description of Artificial Sequence: Synthetic oligonucleotide
  Antisense strand to SEQ ID NO: 1240064
ugguucacacaagaccaua

SEQ ID NO: 1240066 - RNA, 19 nt, Artificial Sequence
  Description of Artificial Sequence: Synthetic oligonucleotide
  Sense strand starting at position 3750 of SEQ ID NO: 917518
gugaaccaguccuuuaaau

SEQ ID NO: 1240067 - RNA, 19 nt, Artificial Sequence
  Description of Artificial Sequence: Synthetic oligonucleotide
  Antisense strand to SEQ ID NO: 1240066
auuuaaaggacugguucac

SEQ ID NO: 1240068 - RNA, 19 nt, Artificial Sequence
  Description of Artificial Sequence: Synthetic oligonucleotide
  Sense strand starting at position 3780 of SEQ ID NO: 917518
agagcagucuuguuagagg

SEQ ID NO: 1240069 - RNA, 19 nt, Artificial Sequence
  Description of Artificial Sequence: Synthetic oligonucleotide
  Antisense strand to SEQ ID NO: 1240068
ccucuaacaagacugcucu

SEQ ID NO: 1240070 - RNA, 19 nt, Artificial Sequence
  Description of Artificial Sequence: Synthetic oligonucleotide
  Sense strand starting at position 3785 of SEQ ID NO: 917518
agucuuguuagaggauuag

SEQ ID NO: 1240071 - RNA, 19 nt, Artificial Sequence
  Description of Artificial Sequence: Synthetic oligonucleotide
  Antisense strand to SEQ ID NO: 1240070
cuaauccucuaacaagacu

SEQ ID NO: 1240072 - RNA, 19 nt, Artificial Sequence
  Description of Artificial Sequence: Synthetic oligonucleotide
  Sense strand starting at position 3855 of SEQ ID NO: 917518
gagugaauuggugaccugu

SEQ ID NO: 1240073 - RNA, 19 nt, Artificial Sequence
  Description of Artificial Sequence: Synthetic oligonucleotide
  Antisense strand to SEQ ID NO: 1240072
acaggucaccaauucacuc

SEQ ID NO: 1240074 - RNA, 19 nt, Artificial Sequence
  Description of Artificial Sequence: Synthetic oligonucleotide
  Sense strand starting at position 3857 of SEQ ID NO: 917518
gugaauuggugaccuguaa

SEQ ID NO: 1240075 - RNA, 19 nt, Artificial Sequence
  Description of Artificial Sequence: Synthetic oligonucleotide
  Antisense strand to SEQ ID NO: 1240074
uuacaggucaccaauucac

SEQ ID NO: 1240076 - RNA, 19 nt, Artificial Sequence
  Description of Artificial Sequence: Synthetic oligonucleotide
  Sense strand starting at position 3857 of SEQ ID NO: 917519
gugaauuggugaccuguaa

SEQ ID NO: 1240077 - RNA, 19 nt, Artificial Sequence
  Description of Artificial Sequence: Synthetic oligonucleotide
  Antisense strand to SEQ ID NO: 1240076
uuacaggucaccaauucac

SEQ ID NO: 1240078 - RNA, 19 nt, Artificial Sequence
  Description of Artificial Sequence: Synthetic oligonucleotide
  Sense strand starting at position 40 of SEQ ID NO: 917519
ugaagaacuuuagcaacua

SEQ ID NO: 1240079 - RNA, 19 nt, Artificial Sequence
  Description of Artificial Sequence: Synthetic oligonucleotide
  Antisense strand to SEQ ID NO: 1240078
uaguugcuaaaguucuuca

SEQ ID NO: 1240080 - RNA, 19 nt, Artificial Sequence
  Description of Artificial Sequence: Synthetic oligonucleotide
  Sense strand starting at position 165 of SEQ ID NO: 917519
acuacuauucuuugugcau

SEQ ID NO: 1240081 - RNA, 19 nt, Artificial Sequence
  Description of Artificial Sequence: Synthetic oligonucleotide
  Antisense strand to SEQ ID NO: 1240080
augcacaaagaauaguagu

SEQ ID NO: 1240082 - RNA, 19 nt, Artificial Sequence
  Description of Artificial Sequence: Synthetic oligonucleotide
  Sense strand starting at position 236 of SEQ ID NO: 917519
ccuaguguuuaugugguau

SEQ ID NO: 1240083 - RNA, 19 nt, Artificial Sequence
  Description of Artificial Sequence: Synthetic oligonucleotide
  Antisense strand to SEQ ID NO: 1240082
auaccacauaaacacuagg

SEQ ID NO: 1240084 - RNA, 19 nt, Artificial Sequence
  Description of Artificial Sequence: Synthetic oligonucleotide
  Sense strand starting at position 242 of SEQ ID NO: 917519
guuuaugugguauguacau

SEQ ID NO: 1240085 - RNA, 19 nt, Artificial Sequence
  Description of Artificial Sequence: Synthetic oligonucleotide
  Antisense strand to SEQ ID NO: 1240084
auguacauaccacauaaac

SEQ ID NO: 1240086 - RNA, 19 nt, Artificial Sequence
  Description of Artificial Sequence: Synthetic oligonucleotide
  Sense strand starting at position 248 of SEQ ID NO: 917519
gugguauguacauaguauu

SEQ ID NO: 1240087 - RNA, 19 nt, Artificial Sequence
  Description of Artificial Sequence: Synthetic oligonucleotide
  Antisense strand to SEQ ID NO: 1240086
aauacuauguacauaccac

SEQ ID NO: 1240088 - RNA, 19 nt, Artificial Sequence
  Description of Artificial Sequence: Synthetic oligonucleotide
  Sense strand starting at position 360 of SEQ ID NO: 917519
cuaacagaguuguuacuuu

SEQ ID NO: 1240089 - RNA, 19 nt, Artificial Sequence
  Description of Artificial Sequence: Synthetic oligonucleotide
  Antisense strand to SEQ ID NO: 1240088
aaaguaacaacucuguuag

SEQ ID NO: 1240090 - RNA, 19 nt, Artificial Sequence
  Description of Artificial Sequence: Synthetic oligonucleotide
  Sense strand starting at position 364 of SEQ ID NO: 917519
cagaguuguuacuuuguuu

SEQ ID NO: 1240091 - RNA, 19 nt, Artificial Sequence
  Description of Artificial Sequence: Synthetic oligonucleotide
  Antisense strand to SEQ ID NO: 1240090
aaacaaaguaacaacucug

SEQ ID NO: 1240092 - RNA, 19 nt, Artificial Sequence
  Description of Artificial Sequence: Synthetic oligonucleotide
  Sense strand starting at position 522 of SEQ ID NO: 917519
uuccacaauucuuugggua

SEQ ID NO: 1240093 - RNA, 19 nt, Artificial Sequence
  Description of Artificial Sequence: Synthetic oligonucleotide
  Antisense strand to SEQ ID NO: 1240092
uacccaaagaauuguggaa

SEQ ID NO: 1240094 - RNA, 19 nt, Artificial Sequence
  Description of Artificial Sequence: Synthetic oligonucleotide
  Sense strand starting at position 523 of SEQ ID NO: 917519
uccacaauucuuuggguau

SEQ ID NO: 1240095 - RNA, 19 nt, Artificial Sequence
  Description of Artificial Sequence: Synthetic oligonucleotide
  Antisense strand to SEQ ID NO: 1240094
auacccaaagaauugugga

SEQ ID NO: 1240096 - RNA, 19 nt, Artificial Sequence
  Description of Artificial Sequence: Synthetic oligonucleotide
  Sense strand starting at position 529 of SEQ ID NO: 917519
auucuuuggguaugacagu

SEQ ID NO: 1240097 - RNA, 19 nt, Artificial Sequence
  Description of Artificial Sequence: Synthetic oligonucleotide
  Antisense strand to SEQ ID NO: 1240096
acugucauacccaaagaau

SEQ ID NO: 1240098 - RNA, 19 nt, Artificial Sequence
  Description of Artificial Sequence: Synthetic oligonucleotide
  Sense strand starting at position 535 of SEQ ID NO: 917519
uggguaugacaguauuaug

SEQ ID NO: 1240099 - RNA, 19 nt, Artificial Sequence
  Description of Artificial Sequence: Synthetic oligonucleotide
  Antisense strand to SEQ ID NO: 1240098
cauaauacugucauaccca

SEQ ID NO: 1240100 - RNA, 19 nt, Artificial Sequence
  Description of Artificial Sequence: Synthetic oligonucleotide
  Sense strand starting at position 736 of SEQ ID NO: 917519
augcaagagcaauguacau

SEQ ID NO: 1240101 - RNA, 19 nt, Artificial Sequence
  Description of Artificial Sequence: Synthetic oligonucleotide
  Antisense strand to SEQ ID NO: 1240100
auguacauugcucuugcau

SEQ ID NO: 1240102 - RNA, 19 nt, Artificial Sequence
  Description of Artificial Sequence: Synthetic oligonucleotide
  Sense strand starting at position 763 of SEQ ID NO: 917519
uuuguaaacugaguuuaca

SEQ ID NO: 1240103 - RNA, 19 nt, Artificial Sequence
  Description of Artificial Sequence: Synthetic oligonucleotide
  Antisense strand to SEQ ID NO: 1240102
uguaaacucaguuuacaaa

SEQ ID NO: 1240104 - RNA, 19 nt, Artificial Sequence
  Description of Artificial Sequence: Synthetic oligonucleotide
  Sense strand starting at position 766 of SEQ ID NO: 917519
guaaacugaguuuacauca

SEQ ID NO: 1240105 - RNA, 19 nt, Artificial Sequence
  Description of Artificial Sequence: Synthetic oligonucleotide
  Antisense strand to SEQ ID NO: 1240104
ugauguaaacucaguuuac

SEQ ID NO: 1240106 - RNA, 19 nt, Artificial Sequence
  Description of Artificial Sequence: Synthetic oligonucleotide
  Sense strand starting at position 822 of SEQ ID NO: 917519
ucucuaacagcggaauuau

SEQ ID NO: 1240107 - RNA, 19 nt, Artificial Sequence
  Description of Artificial Sequence: Synthetic oligonucleotide
  Antisense strand to SEQ ID NO: 1240106
auaauuccgcuguuagaga

SEQ ID NO: 1240108 - RNA, 19 nt, Artificial Sequence
  Description of Artificial Sequence: Synthetic oligonucleotide
  Sense strand starting at position 966 of SEQ ID NO: 917519
gguuaaauucugcaugcuu

SEQ ID NO: 1240109 - RNA, 19 nt, Artificial Sequence
  Description of Artificial Sequence: Synthetic oligonucleotide
  Antisense strand to SEQ ID NO: 1240108
aagcaugcagaauuuaacc

SEQ ID NO: 1240110 - RNA, 19 nt, Artificial Sequence
  Description of Artificial Sequence: Synthetic oligonucleotide
  Sense strand starting at position 1020 of SEQ ID NO: 917519
acugaaucuugucuuguua

SEQ ID NO: 1240111 - RNA, 19 nt, Artificial Sequence
  Description of Artificial Sequence: Synthetic oligonucleotide
  Antisense strand to SEQ ID NO: 1240110
uaacaagacaagauucagu

SEQ ID NO: 1240112 - RNA, 19 nt, Artificial Sequence
  Description of Artificial Sequence: Synthetic oligonucleotide
  Sense strand starting at position 1029 of SEQ ID NO: 917519
ugucuuguuauguauaguc

SEQ ID NO: 1240113 - RNA, 19 nt, Artificial Sequence
  Description of Artificial Sequence: Synthetic oligonucleotide
  Antisense strand to SEQ ID NO: 1240112
gacuauacauaacaagaca

SEQ ID NO: 1240114 - RNA, 19 nt, Artificial Sequence
  Description of Artificial Sequence: Synthetic oligonucleotide
  Sense strand starting at position 1033 of SEQ ID NO: 917519
uuguuauguauagucguuu

SEQ ID NO: 1240115 - RNA, 19 nt, Artificial Sequence
  Description of Artificial Sequence: Synthetic oligonucleotide
  Antisense strand to SEQ ID NO: 1240114
aaacgacuauacauaacaa

SEQ ID NO: 1240116 - RNA, 19 nt, Artificial Sequence
  Description of Artificial Sequence: Synthetic oligonucleotide
  Sense strand starting at position 1052 of SEQ ID NO: 917519
uauuauuuaucugguugga

SEQ ID NO: 1240117 - RNA, 19 nt, Artificial Sequence
  Description of Artificial Sequence: Synthetic oligonucleotide
  Antisense strand to SEQ ID NO: 1240116
uccaaccagauaaauaaua

SEQ ID NO: 1240118 - RNA, 19 nt, Artificial Sequence
  Description of Artificial Sequence: Synthetic oligonucleotide
  Sense strand starting at position 1176 of SEQ ID NO: 917519
uaucgucaucguuaugaaa

SEQ ID NO: 1240119 - RNA, 19 nt, Artificial Sequence
  Description of Artificial Sequence: Synthetic oligonucleotide
  Antisense strand to SEQ ID NO: 1240118
uuucauaacgaugacgaua

SEQ ID NO: 1240120 - RNA, 19 nt, Artificial Sequence
  Description of Artificial Sequence: Synthetic oligonucleotide
  Sense strand starting at position 1240 of SEQ ID NO: 917519
gggagguugcuguaaugga

SEQ ID NO: 1240121 - RNA, 19 nt, Artificial Sequence
  Description of Artificial Sequence: Synthetic oligonucleotide
  Antisense strand to SEQ ID NO: 1240120
uccauuacagcaaccuccc

SEQ ID NO: 1240122 - RNA, 19 nt, Artificial Sequence
  Description of Artificial Sequence: Synthetic oligonucleotide
  Sense strand starting at position 1241 of SEQ ID NO: 917519
ggagguugcuguaauggaa

SEQ ID NO: 1240123 - RNA, 19 nt, Artificial Sequence
  Description of Artificial Sequence: Synthetic oligonucleotide
  Antisense strand to SEQ ID NO: 1240122
uuccauuacagcaaccucc

SEQ ID NO: 1240124 - RNA, 19 nt, Artificial Sequence
  Description of Artificial Sequence: Synthetic oligonucleotide
  Sense strand starting at position 1263 of SEQ ID NO: 917519
ugaagaaacucauaaaguu

SEQ ID NO: 1240125 - RNA, 19 nt, Artificial Sequence
  Description of Artificial Sequence: Synthetic oligonucleotide
  Antisense strand to SEQ ID NO: 1240124
aacuuuaugaguuucuuca

SEQ ID NO: 1240126 - RNA, 19 nt, Artificial Sequence
  Description of Artificial Sequence: Synthetic oligonucleotide
  Sense strand starting at position 1846 of SEQ ID NO: 917519
gaaacaacaccucguuguu

SEQ ID NO: 1240127 - RNA, 19 nt, Artificial Sequence
  Description of Artificial Sequence: Synthetic oligonucleotide
  Antisense strand to SEQ ID NO: 1240126
aacaacgagguguuguuuc

SEQ ID NO: 1240128 - RNA, 19 nt, Artificial Sequence
  Description of Artificial Sequence: Synthetic oligonucleotide
  Sense strand starting at position 2435 of SEQ ID NO: 917519
ggguccucuggcggaguua

SEQ ID NO: 1240129 - RNA, 19 nt, Artificial Sequence
  Description of Artificial Sequence: Synthetic oligonucleotide
  Antisense strand to SEQ ID NO: 1240128
uaacuccgccagaggaccc

SEQ ID NO: 1240130 - RNA, 19 nt, Artificial Sequence
  Description of Artificial Sequence: Synthetic oligonucleotide
  Sense strand starting at position 2436 of SEQ ID NO: 917519
gguccucuggcggaguuaa

SEQ ID NO: 1240131 - RNA, 19 nt, Artificial Sequence
  Description of Artificial Sequence: Synthetic oligonucleotide
  Antisense strand to SEQ ID NO: 1240130
uuaacuccgccagaggacc

SEQ ID NO: 1240132 - RNA, 19 nt, Artificial Sequence
  Description of Artificial Sequence: Synthetic oligonucleotide
  Sense strand starting at position 2701 of SEQ ID NO: 917519
ggcagaggcacuuaugcuu

SEQ ID NO: 1240133 - RNA, 19 nt, Artificial Sequence
  Description of Artificial Sequence: Synthetic oligonucleotide
  Antisense strand to SEQ ID NO: 1240132
aagcauaagugccucugcc

SEQ ID NO: 1240134 - RNA, 19 nt, Artificial Sequence
  Description of Artificial Sequence: Synthetic oligonucleotide
  Sense strand starting at position 2709 of SEQ ID NO: 917519
cacuuaugcuugucaggug

SEQ ID NO: 1240135 - RNA, 19 nt, Artificial Sequence
  Description of Artificial Sequence: Synthetic oligonucleotide
  Antisense strand to SEQ ID NO: 1240134
caccugacaagcauaagug

SEQ ID NO: 1240136 - RNA, 19 nt, Artificial Sequence
  Description of Artificial Sequence: Synthetic oligonucleotide
  Sense strand starting at position 2819 of SEQ ID NO: 917519
ugggaacgcuuccuuauuu

SEQ ID NO: 1240137 - RNA, 19 nt, Artificial Sequence
  Description of Artificial Sequence: Synthetic oligonucleotide
  Antisense strand to SEQ ID NO: 1240136
aaauaaggaagcguuccca

SEQ ID NO: 1240138 - RNA, 19 nt, Artificial Sequence
  Description of Artificial Sequence: Synthetic oligonucleotide
  Sense strand starting at position 2914 of SEQ ID NO: 917519
cugggugaguuuguagaaa

SEQ ID NO: 1240139 - RNA, 19 nt, Artificial Sequence
  Description of Artificial Sequence: Synthetic oligonucleotide
  Antisense strand to SEQ ID NO: 1240138
uuucuacaaacucacccag

SEQ ID NO: 1240140 - RNA, 19 nt, Artificial Sequence
  Description of Artificial Sequence: Synthetic oligonucleotide
  Sense strand starting at position 3014 of SEQ ID NO: 917519
aagcgaaugcgcuuccgau

SEQ ID NO: 1240141 - RNA, 19 nt, Artificial Sequence
  Description of Artificial Sequence: Synthetic oligonucleotide
  Antisense strand to SEQ ID NO: 1240140
aucggaagcgcauucgcuu

SEQ ID NO: 1240142 - RNA, 19 nt, Artificial Sequence
  Description of Artificial Sequence: Synthetic oligonucleotide
  Sense strand starting at position 3221 of SEQ ID NO: 917519
cgacucuuccuaugcagga

SEQ ID NO: 1240143 - RNA, 19 nt, Artificial Sequence
  Description of Artificial Sequence: Synthetic oligonucleotide
  Antisense strand to SEQ ID NO: 1240142
uccugcauaggaagagucg

SEQ ID NO: 1240144 - RNA, 19 nt, Artificial Sequence
  Description of Artificial Sequence: Synthetic oligonucleotide
  Sense strand starting at position 3501 of SEQ ID NO: 917519
gucgcagucacggaaagua

SEQ ID NO: 1240145 - RNA, 19 nt, Artificial Sequence
  Description of Artificial Sequence: Synthetic oligonucleotide
  Antisense strand to SEQ ID NO: 1240144
uacuuuccgugacugcgac

SEQ ID NO: 1240146 - RNA, 19 nt, Artificial Sequence
  Description of Artificial Sequence: Synthetic oligonucleotide
  Sense strand starting at position 3532 of SEQ ID NO: 917519
ggccuuugggaacgagaau

SEQ ID NO: 1240147 - RNA, 19 nt, Artificial Sequence
  Description of Artificial Sequence: Synthetic oligonucleotide
  Antisense strand to SEQ ID NO: 1240146
auucucguucccaaaggcc

SEQ ID NO: 1240148 - RNA, 19 nt, Artificial Sequence
  Description of Artificial Sequence: Synthetic oligonucleotide
  Sense strand starting at position 3607 of SEQ ID NO: 917519
cucugaugagauggcuuua

SEQ ID NO: 1240149 - RNA, 19 nt, Artificial Sequence
  Description of Artificial Sequence: Synthetic oligonucleotide
  Antisense strand to SEQ ID NO: 1240148
uaaagccaucucaucagag

SEQ ID NO: 1240150 - RNA, 19 nt, Artificial Sequence
  Description of Artificial Sequence: Synthetic oligonucleotide
  Sense strand starting at position 3637 of SEQ ID NO: 917519
cgacuuuccaaagggucua

SEQ ID NO: 1240151 - RNA, 19 nt, Artificial Sequence
  Description of Artificial Sequence: Synthetic oligonucleotide
  Antisense strand to SEQ ID NO: 1240150
uagacccuuuggaaagucg

SEQ ID NO: 1240152 - RNA, 19 nt, Artificial Sequence
  Description of Artificial Sequence: Synthetic oligonucleotide
  Sense strand starting at position 3848 of SEQ ID NO: 917519
gcaugugagcuguaaauga

SEQ ID NO: 1240153 - RNA, 19 nt, Artificial Sequence
  Description of Artificial Sequence: Synthetic oligonucleotide
  Antisense strand to SEQ ID NO: 1240152
ucauuuacagcucacaugc

SEQ ID NO: 1240154 - RNA, 19 nt, Artificial Sequence
  Description of Artificial Sequence: Synthetic oligonucleotide
  Sense strand starting at position 3852 of SEQ ID NO: 917519
gugagcuguaaaugaaaca

SEQ ID NO: 1240155 - RNA, 19 nt, Artificial Sequence
  Description of Artificial Sequence: Synthetic oligonucleotide
  Antisense strand to SEQ ID NO: 1240154
uguuucauuuacagcucac

SEQ ID NO: 1240156 - RNA, 19 nt, Artificial Sequence
  Description of Artificial Sequence: Synthetic oligonucleotide
  Sense strand starting at position 3963 of SEQ ID NO: 917520
gacucuuguagauggguuu

SEQ ID NO: 1240157 - RNA, 19 nt, Artificial Sequence
  Description of Artificial Sequence: Synthetic oligonucleotide
  Antisense strand to SEQ ID NO: 1240156
aaacccaucuacaagaguc

SEQ ID NO: 1240158 - RNA, 19 nt, Artificial Sequence
  Description of Artificial Sequence: Synthetic oligonucleotide
  Sense strand starting at position 13 of SEQ ID NO: 917520
gcaguuagaaauugaucag

SEQ ID NO: 1240159 - RNA, 19 nt, Artificial Sequence
  Description of Artificial Sequence: Synthetic oligonucleotide
  Antisense strand to SEQ ID NO: 1240158
cugaucaauuucuaacugc

SEQ ID NO: 1240160 - RNA, 19 nt, Artificial Sequence
  Description of Artificial Sequence: Synthetic oligonucleotide
  Sense strand starting at position 16 of SEQ ID NO: 917520
guuagaaauugaucaguuc

SEQ ID NO: 1240161 - RNA, 19 nt, Artificial Sequence
  Description of Artificial Sequence: Synthetic oligonucleotide
  Antisense strand to SEQ ID NO: 1240160
gaacugaucaauuucuaac

SEQ ID NO: 1240162 - RNA, 19 nt, Artificial Sequence
  Description of Artificial Sequence: Synthetic oligonucleotide
  Sense strand starting at position 19 of SEQ ID NO: 917520
agaaauugaucaguuccau

SEQ ID NO: 1240163 - RNA, 19 nt, Artificial Sequence
  Description of Artificial Sequence: Synthetic oligonucleotide
  Antisense strand to SEQ ID NO: 1240162
auggaacugaucaauuucu

SEQ ID NO: 1240164 - RNA, 19 nt, Artificial Sequence
  Description of Artificial Sequence: Synthetic oligonucleotide
  Sense strand starting at position 43 of SEQ ID NO: 917520
guaguuacagacugggaaa

SEQ ID NO: 1240165 - RNA, 19 nt, Artificial Sequence
  Description of Artificial Sequence: Synthetic oligonucleotide
  Antisense strand to SEQ ID NO: 1240164
uuucccagucuguaacuac

SEQ ID NO: 1240166 - RNA, 19 nt, Artificial Sequence
  Description of Artificial Sequence: Synthetic oligonucleotide
  Sense strand starting at position 199 of SEQ ID NO: 917520
ucauaaggcuucucuguga

SEQ ID NO: 1240167 - RNA, 19 nt, Artificial Sequence
  Description of Artificial Sequence: Synthetic oligonucleotide
  Antisense strand to SEQ ID NO: 1240166
ucacagagaagccuuauga

SEQ ID NO: 1240168 - RNA, 19 nt, Artificial Sequence
  Description of Artificial Sequence: Synthetic oligonucleotide
  Sense strand starting at position 202 of SEQ ID NO: 917520
uaaggcuucucugugaauu

SEQ ID NO: 1240169 - RNA, 19 nt, Artificial Sequence
  Description of Artificial Sequence: Synthetic oligonucleotide
  Antisense strand to SEQ ID NO: 1240168
aauucacagagaagccuua

SEQ ID NO: 1240170 - RNA, 19 nt, Artificial Sequence
  Description of Artificial Sequence: Synthetic oligonucleotide
  Sense strand starting at position 292 of SEQ ID NO: 917520
acugguguauguuuacaau

SEQ ID NO: 1240171 - RNA, 19 nt, Artificial Sequence
  Description of Artificial Sequence: Synthetic oligonucleotide
  Antisense strand to SEQ ID NO: 1240170
auuguaaacauacaccagu

SEQ ID NO: 1240172 - RNA, 19 nt, Artificial Sequence
  Description of Artificial Sequence: Synthetic oligonucleotide
  Sense strand starting at position 320 of SEQ ID NO: 917520
uggaucugcacaggaaauu

SEQ ID NO: 1240173 - RNA, 19 nt, Artificial Sequence
  Description of Artificial Sequence: Synthetic oligonucleotide
  Antisense strand to SEQ ID NO: 1240172
aauuuccugugcagaucca

SEQ ID NO: 1240174 - RNA, 19 nt, Artificial Sequence
  Description of Artificial Sequence: Synthetic oligonucleotide
  Sense strand starting at position 410 of SEQ ID NO: 917520
ugaagaaccuaagacauga

SEQ ID NO: 1240175 - RNA, 19 nt, Artificial Sequence
  Description of Artificial Sequence: Synthetic oligonucleotide
  Antisense strand to SEQ ID NO: 1240174
ucaugucuuagguucuuca

SEQ ID NO: 1240176 - RNA, 19 nt, Artificial Sequence
  Description of Artificial Sequence: Synthetic oligonucleotide
  Sense strand starting at position 466 of SEQ ID NO: 917520
augcuaagugcggaaauga

SEQ ID NO: 1240177 - RNA, 19 nt, Artificial Sequence
  Description of Artificial Sequence: Synthetic oligonucleotide
  Antisense strand to SEQ ID NO: 1240176
ucauuuccgcacuuagcau

SEQ ID NO: 1240178 - RNA, 19 nt, Artificial Sequence
  Description of Artificial Sequence: Synthetic oligonucleotide
  Sense strand starting at position 557 of SEQ ID NO: 917520
ucugcaugauuugaacuua

SEQ ID NO: 1240179 - RNA, 19 nt, Artificial Sequence
  Description of Artificial Sequence: Synthetic oligonucleotide
  Antisense strand to SEQ ID NO: 1240178
uaaguucaaaucaugcaga

SEQ ID NO: 1240180 - RNA, 19 nt, Artificial Sequence
  Description of Artificial Sequence: Synthetic oligonucleotide
  Sense strand starting at position 786 of SEQ ID NO: 917520
gagagaguauuugaaggca

SEQ ID NO: 1240181 - RNA, 19 nt, Artificial Sequence
  Description of Artificial Sequence: Synthetic oligonucleotide
  Antisense strand to SEQ ID NO: 1240180
ugccuucaaauacucucuc

SEQ ID NO: 1240182 - RNA, 19 nt, Artificial Sequence
  Description of Artificial Sequence: Synthetic oligonucleotide
  Sense strand starting at position 814 of SEQ ID NO: 917520
guuccacuucugcauauua

SEQ ID NO: 1240183 - RNA, 19 nt, Artificial Sequence
  Description of Artificial Sequence: Synthetic oligonucleotide
  Antisense strand to SEQ ID NO: 1240182
uaauaugcagaaguggaac

SEQ ID NO: 1240184 - RNA, 19 nt, Artificial Sequence
  Description of Artificial Sequence: Synthetic oligonucleotide
  Sense strand starting at position 883 of SEQ ID NO: 917520
agcuauuugcagcagugau

SEQ ID NO: 1240185 - RNA, 19 nt, Artificial Sequence
  Description of Artificial Sequence: Synthetic oligonucleotide
  Antisense strand to SEQ ID NO: 1240184
aucacugcugcaaauagcu

SEQ ID NO: 1240186 - RNA, 19 nt, Artificial Sequence
  Description of Artificial Sequence: Synthetic oligonucleotide
  Sense strand starting at position 1025 of SEQ ID NO: 917520
cuaagaugucuggguuauc

SEQ ID NO: 1240187 - RNA, 19 nt, Artificial Sequence
  Description of Artificial Sequence: Synthetic oligonucleotide
  Antisense strand to SEQ ID NO: 1240186
gauaacccagacaucuuag

SEQ ID NO: 1240188 - RNA, 19 nt, Artificial Sequence
  Description of Artificial Sequence: Synthetic oligonucleotide
  Sense strand starting at position 1026 of SEQ ID NO: 917520
uaagaugucuggguuaucu

SEQ ID NO: 1240189 - RNA, 19 nt, Artificial Sequence
  Description of Artificial Sequence: Synthetic oligonucleotide
  Antisense strand to SEQ ID NO: 1240188
agauaacccagacaucuua

SEQ ID NO: 1240190 - RNA, 19 nt, Artificial Sequence
  Description of Artificial Sequence: Synthetic oligonucleotide
  Sense strand starting at position 1030 of SEQ ID NO: 917520
augucuggguuaucuggau

SEQ ID NO: 1240191 - RNA, 19 nt, Artificial Sequence
  Description of Artificial Sequence: Synthetic oligonucleotide
  Antisense strand to SEQ ID NO: 1240190
auccagauaacccagacau

SEQ ID NO: 1240192 - RNA, 19 nt, Artificial Sequence
  Description of Artificial Sequence: Synthetic oligonucleotide
  Sense strand starting at position 1034 of SEQ ID NO: 917520
cuggguuaucuggauucag

SEQ ID NO: 1240193 - RNA, 19 nt, Artificial Sequence
  Description of Artificial Sequence: Synthetic oligonucleotide
  Antisense strand to SEQ ID NO: 1240192
cugaauccagauaacccag

SEQ ID NO: 1240194 - RNA, 19 nt, Artificial Sequence
  Description of Artificial Sequence: Synthetic oligonucleotide
  Sense strand starting at position 1043 of SEQ ID NO: 917520
cuggauucaguaggaaugu

SEQ ID NO: 1240195 - RNA, 19 nt, Artificial Sequence
  Description of Artificial Sequence: Synthetic oligonucleotide
  Antisense strand to SEQ ID NO: 1240194
acauuccuacugaauccag

SEQ ID NO: 1240196 - RNA, 19 nt, Artificial Sequence
  Description of Artificial Sequence: Synthetic oligonucleotide
  Sense strand starting at position 1054 of SEQ ID NO: 917520
aggaaugucugggaagaag

SEQ ID NO: 1240197 - RNA, 19 nt, Artificial Sequence
  Description of Artificial Sequence: Synthetic oligonucleotide
  Antisense strand to SEQ ID NO: 1240196
cuucuucccagacauuccu

SEQ ID NO: 1240198 - RNA, 19 nt, Artificial Sequence
  Description of Artificial Sequence: Synthetic oligonucleotide
  Sense strand starting at position 1080 of SEQ ID NO: 917520
auuugcuuucuccguuuga

SEQ ID NO: 1240199 - RNA, 19 nt, Artificial Sequence
  Description of Artificial Sequence: Synthetic oligonucleotide
  Antisense strand to SEQ ID NO: 1240198
ucaaacggagaaagcaaau

SEQ ID NO: 1240200 - RNA, 19 nt, Artificial Sequence
  Description of Artificial Sequence: Synthetic oligonucleotide
  Sense strand starting at position 1389 of SEQ ID NO: 917520
caggaugcgcauuacaaua

SEQ ID NO: 1240201 - RNA, 19 nt, Artificial Sequence
  Description of Artificial Sequence: Synthetic oligonucleotide
  Antisense strand to SEQ ID NO: 1240200
uauuguaaugcgcauccug

SEQ ID NO: 1240202 - RNA, 19 nt, Artificial Sequence
  Description of Artificial Sequence: Synthetic oligonucleotide
  Sense strand starting at position 1519 of SEQ ID NO: 917520
ccauaccuguccucggaga

SEQ ID NO: 1240203 - RNA, 19 nt, Artificial Sequence
  Description of Artificial Sequence: Synthetic oligonucleotide
  Antisense strand to SEQ ID NO: 1240202
ucuccgaggacagguaugg

SEQ ID NO: 1240204 - RNA, 19 nt, Artificial Sequence
  Description of Artificial Sequence: Synthetic oligonucleotide
  Sense strand starting at position 2606 of SEQ ID NO: 917520
cagacuugccucuauggga

SEQ ID NO: 1240205 - RNA, 19 nt, Artificial Sequence
  Description of Artificial Sequence: Synthetic oligonucleotide
  Antisense strand to SEQ ID NO: 1240204
ucccauagaggcaagucug

SEQ ID NO: 1240206 - RNA, 19 nt, Artificial Sequence
  Description of Artificial Sequence: Synthetic oligonucleotide
  Sense strand starting at position 2671 of SEQ ID NO: 917520
ucagacugaugcucggaau

SEQ ID NO: 1240207 - RNA, 19 nt, Artificial Sequence
  Description of Artificial Sequence: Synthetic oligonucleotide
  Antisense strand to SEQ ID NO: 1240206
auuccgagcaucagucuga

SEQ ID NO: 1240208 - RNA, 19 nt, Artificial Sequence
  Description of Artificial Sequence: Synthetic oligonucleotide
  Sense strand starting at position 2672 of SEQ ID NO: 917520
cagacugaugcucggaaua

SEQ ID NO: 1240209 - RNA, 19 nt, Artificial Sequence
  Description of Artificial Sequence: Synthetic oligonucleotide
  Antisense strand to SEQ ID NO: 1240208
uauuccgagcaucagucug

SEQ ID NO: 1240210 - RNA, 19 nt, Artificial Sequence
  Description of Artificial Sequence: Synthetic oligonucleotide
  Sense strand starting at position 2782 of SEQ ID NO: 917520
uuucuuagauggcuaaauu

SEQ ID NO: 1240211 - RNA, 19 nt, Artificial Sequence
  Description of Artificial Sequence: Synthetic oligonucleotide
  Antisense strand to SEQ ID NO: 1240210
aauuuagccaucuaagaaa

SEQ ID NO: 1240212 - RNA, 19 nt, Artificial Sequence
  Description of Artificial Sequence: Synthetic oligonucleotide
  Sense strand starting at position 2783 of SEQ ID NO: 917520
uucuuagauggcuaaauua

SEQ ID NO: 1240213 - RNA, 19 nt, Artificial Sequence
  Description of Artificial Sequence: Synthetic oligonucleotide
  Antisense strand to SEQ ID NO: 1240212
uaauuuagccaucuaagaa

SEQ ID NO: 1240214 - RNA, 19 nt, Artificial Sequence
  Description of Artificial Sequence: Synthetic oligonucleotide
  Sense strand starting at position 2809 of SEQ ID NO: 917520
aagguuacuuuagugcaaa

SEQ ID NO: 1240215 - RNA, 19 nt, Artificial Sequence
  Description of Artificial Sequence: Synthetic oligonucleotide
  Antisense strand to SEQ ID NO: 1240214
uuugcacuaaaguaaccuu

SEQ ID NO: 1240216 - RNA, 19 nt, Artificial Sequence
  Description of Artificial Sequence: Synthetic oligonucleotide
  Sense strand starting at position 2812 of SEQ ID NO: 917520
guuacuuuagugcaaaguu

SEQ ID NO: 1240217 - RNA, 19 nt, Artificial Sequence
  Description of Artificial Sequence: Synthetic oligonucleotide
  Antisense strand to SEQ ID NO: 1240216
aacuuugcacuaaaguaac

SEQ ID NO: 1240218 - RNA, 19 nt, Artificial Sequence
  Description of Artificial Sequence: Synthetic oligonucleotide
  Sense strand starting at position 2944 of SEQ ID NO: 917520
gaguuacuguaguuacuga

SEQ ID NO: 1240219 - RNA, 19 nt, Artificial Sequence
  Description of Artificial Sequence: Synthetic oligonucleotide
  Antisense strand to SEQ ID NO: 1240218
ucaguaacuacaguaacuc

SEQ ID NO: 1240220 - RNA, 19 nt, Artificial Sequence
  Description of Artificial Sequence: Synthetic oligonucleotide
  Sense strand starting at position 2952 of SEQ ID NO: 917520
guaguuacugacugaaugu

SEQ ID NO: 1240221 - RNA, 19 nt, Artificial Sequence
  Description of Artificial Sequence: Synthetic oligonucleotide
  Antisense strand to SEQ ID NO: 1240220
acauucagucaguaacuac

SEQ ID NO: 1240222 - RNA, 19 nt, Artificial Sequence
  Description of Artificial Sequence: Synthetic oligonucleotide
  Sense strand starting at position 2967 of SEQ ID NO: 917520
auguuaggugccuaccaga

SEQ ID NO: 1240223 - RNA, 19 nt, Artificial Sequence
  Description of Artificial Sequence: Synthetic oligonucleotide
  Antisense strand to SEQ ID NO: 1240222
ucugguaggcaccuaacau

SEQ ID NO: 1240224 - RNA, 19 nt, Artificial Sequence
  Description of Artificial Sequence: Synthetic oligonucleotide
  Sense strand starting at position 3286 of SEQ ID NO: 917520
uuccuacacccaggagaua

SEQ ID NO: 1240225 - RNA, 19 nt, Artificial Sequence
  Description of Artificial Sequence: Synthetic oligonucleotide
  Antisense strand to SEQ ID NO: 1240224
uaucuccuggguguaggaa

SEQ ID NO: 1240226 - RNA, 19 nt, Artificial Sequence
  Description of Artificial Sequence: Synthetic oligonucleotide
  Sense strand starting at position 3436 of SEQ ID NO: 917520
gaacauuccuuuccguuga

SEQ ID NO: 1240227 - RNA, 19 nt, Artificial Sequence
  Description of Artificial Sequence: Synthetic oligonucleotide
  Antisense strand to SEQ ID NO: 1240226
ucaacggaaaggaauguuc

SEQ ID NO: 1240228 - RNA, 19 nt, Artificial Sequence
  Description of Artificial Sequence: Synthetic oligonucleotide
  Sense strand starting at position 3750 of SEQ ID NO: 917520
aucaauagucguuauguga

SEQ ID NO: 1240229 - RNA, 19 nt, Artificial Sequence
  Description of Artificial Sequence: Synthetic oligonucleotide
  Antisense strand to SEQ ID NO: 1240228
ucacauaacgacuauugau

SEQ ID NO: 1240230 - RNA, 19 nt, Artificial Sequence
  Description of Artificial Sequence: Synthetic oligonucleotide
  Sense strand starting at position 3753 of SEQ ID NO: 917520
aauagucguuaugugauaa

SEQ ID NO: 1240231 - RNA, 19 nt, Artificial Sequence
  Description of Artificial Sequence: Synthetic oligonucleotide
  Antisense strand to SEQ ID NO: 1240230
uuaucacauaacgacuauu

SEQ ID NO: 1240232 - RNA, 19 nt, Artificial Sequence
  Description of Artificial Sequence: Synthetic oligonucleotide
  Sense strand starting at position 3791 of SEQ ID NO: 917520
gaauuaaguuagccgaaga

SEQ ID NO: 1240233 - RNA, 19 nt, Artificial Sequence
  Description of Artificial Sequence: Synthetic oligonucleotide
  Antisense strand to SEQ ID NO: 1240232
ucuucggcuaacuuaauuc

SEQ ID NO: 1240234 - RNA, 19 nt, Artificial Sequence
  Description of Artificial Sequence: Synthetic oligonucleotide
  Sense strand starting at position 3796 of SEQ ID NO: 917520
aaguuagccgaagaguagu

SEQ ID NO: 1240235 - RNA, 19 nt, Artificial Sequence
  Description of Artificial Sequence: Synthetic oligonucleotide
  Antisense strand to SEQ ID NO: 1240234
acuacucuucggcuaacuu

SEQ ID NO: 1240236 - RNA, 19 nt, Artificial Sequence
  Description of Artificial Sequence: Synthetic oligonucleotide
  Sense strand starting at position 3924 of SEQ ID NO: 917521
guguuugguagccaaggau

SEQ ID NO: 1240237 - RNA, 19 nt, Artificial Sequence
  Description of Artificial Sequence: Synthetic oligonucleotide
  Antisense strand to SEQ ID NO: 1240236
auccuuggcuaccaaacac

SEQ ID NO: 1240238 - RNA, 19 nt, Artificial Sequence
  Description of Artificial Sequence: Synthetic oligonucleotide
  Sense strand starting at position 59 of SEQ ID NO: 917521
ggcuccuaaucuuuaguga

SEQ ID NO: 1240239 - RNA, 19 nt, Artificial Sequence
  Description of Artificial Sequence: Synthetic oligonucleotide
  Antisense strand to SEQ ID NO: 1240238
ucacuaaagauuaggagcc

SEQ ID NO: 1240240 - RNA, 19 nt, Artificial Sequence
  Description of Artificial Sequence: Synthetic oligonucleotide
  Sense strand starting at position 60 of SEQ ID NO: 917521
gcuccuaaucuuuagugau

SEQ ID NO: 1240241 - RNA, 19 nt, Artificial Sequence
  Description of Artificial Sequence: Synthetic oligonucleotide
  Antisense strand to SEQ ID NO: 1240240
aucacuaaagauuaggagc

SEQ ID NO: 1240242 - RNA, 19 nt, Artificial Sequence
  Description of Artificial Sequence: Synthetic oligonucleotide
  Sense strand starting at position 263 of SEQ ID NO: 917521
gcuuuagagccagacagaa

SEQ ID NO: 1240243 - RNA, 19 nt, Artificial Sequence
  Description of Artificial Sequence: Synthetic oligonucleotide
  Antisense strand to SEQ ID NO: 1240242
uucugucuggcucuaaagc

SEQ ID NO: 1240244 - RNA, 19 nt, Artificial Sequence
  Description of Artificial Sequence: Synthetic oligonucleotide
  Sense strand starting at position 303 of SEQ ID NO: 917521
gccauuuaguaaucgugua

SEQ ID NO: 1240245 - RNA, 19 nt, Artificial Sequence
  Description of Artificial Sequence: Synthetic oligonucleotide
  Antisense strand to SEQ ID NO: 1240244
uacacgauuacuaaauggc

SEQ ID NO: 1240246 - RNA, 19 nt, Artificial Sequence
  Description of Artificial Sequence: Synthetic oligonucleotide
  Sense strand starting at position 338 of SEQ ID NO: 917521
guuucucaaccuuguaaag

SEQ ID NO: 1240247 - RNA, 19 nt, Artificial Sequence
  Description of Artificial Sequence: Synthetic oligonucleotide
  Antisense strand to SEQ ID NO: 1240246
cuuuacaagguugagaaac

SEQ ID NO: 1240248 - RNA, 19 nt, Artificial Sequence
  Description of Artificial Sequence: Synthetic oligonucleotide
  Sense strand starting at position 529 of SEQ ID NO: 917521
auauuaagccagugacgaa

SEQ ID NO: 1240249 - RNA, 19 nt, Artificial Sequence
  Description of Artificial Sequence: Synthetic oligonucleotide
  Antisense strand to SEQ ID NO: 1240248
uucgucacuggcuuaauau

SEQ ID NO: 1240250 - RNA, 19 nt, Artificial Sequence
  Description of Artificial Sequence: Synthetic oligonucleotide
  Sense strand starting at position 559 of SEQ ID NO: 917521
uuaccugaucaguguaaga

SEQ ID NO: 1240251 - RNA, 19 nt, Artificial Sequence
  Description of Artificial Sequence: Synthetic oligonucleotide
  Antisense strand to SEQ ID NO: 1240250
ucuuacacugaucagguaa

SEQ ID NO: 1240252 - RNA, 19 nt, Artificial Sequence
  Description of Artificial Sequence: Synthetic oligonucleotide
  Sense strand starting at position 596 of SEQ ID NO: 917521
guggcauacuccuuccaga

SEQ ID NO: 1240253 - RNA, 19 nt, Artificial Sequence
  Description of Artificial Sequence: Synthetic oligonucleotide
  Antisense strand to SEQ ID NO: 1240252
ucuggaaggaguaugccac

SEQ ID NO: 1240254 - RNA, 19 nt, Artificial Sequence
  Description of Artificial Sequence: Synthetic oligonucleotide
  Sense strand starting at position 708 of SEQ ID NO: 917521
gggaauacuagcuaguuac

SEQ ID NO: 1240255 - RNA, 19 nt, Artificial Sequence
  Description of Artificial Sequence: Synthetic oligonucleotide
  Antisense strand to SEQ ID NO: 1240254
guaacuagcuaguauuccc

SEQ ID NO: 1240256 - RNA, 19 nt, Artificial Sequence
  Description of Artificial Sequence: Synthetic oligonucleotide
  Sense strand starting at position 835 of SEQ ID NO: 917521
cuucucgauuucuaaagaa

SEQ ID NO: 1240257 - RNA, 19 nt, Artificial Sequence
  Description of Artificial Sequence: Synthetic oligonucleotide
  Antisense strand to SEQ ID NO: 1240256
uucuuuagaaaucgagaag

SEQ ID NO: 1240258 - RNA, 19 nt, Artificial Sequence
  Description of Artificial Sequence: Synthetic oligonucleotide
  Sense strand starting at position 892 of SEQ ID NO: 917521
acgcuagaauuaguucgaa

SEQ ID NO: 1240259 - RNA, 19 nt, Artificial Sequence
  Description of Artificial Sequence: Synthetic oligonucleotide
  Antisense strand to SEQ ID NO: 1240258
uucgaacuaauucuagcgu

SEQ ID NO: 1240260 - RNA, 19 nt, Artificial Sequence
  Description of Artificial Sequence: Synthetic oligonucleotide
  Sense strand starting at position 895 of SEQ ID NO: 917521
cuagaauuaguucgaauau

SEQ ID NO: 1240261 - RNA, 19 nt, Artificial Sequence
  Description of Artificial Sequence: Synthetic oligonucleotide
  Antisense strand to SEQ ID NO: 1240260
auauucgaacuaauucuag

SEQ ID NO: 1240262 - RNA, 19 nt, Artificial Sequence
  Description of Artificial Sequence: Synthetic oligonucleotide
  Sense strand starting at position 904 of SEQ ID NO: 917521
guucgaauauucucaaaug

SEQ ID NO: 1240263 - RNA, 19 nt, Artificial Sequence
  Description of Artificial Sequence: Synthetic oligonucleotide
  Antisense strand to SEQ ID NO: 1240262
cauuugagaauauucgaac

SEQ ID NO: 1240264 - RNA, 19 nt, Artificial Sequence
  Description of Artificial Sequence: Synthetic oligonucleotide
  Sense strand starting at position 988 of SEQ ID NO: 917521
guauccaauucuuagaaag

SEQ ID NO: 1240265 - RNA, 19 nt, Artificial Sequence
  Description of Artificial Sequence: Synthetic oligonucleotide
  Antisense strand to SEQ ID NO: 1240264
cuuucuaagaauuggauac

SEQ ID NO: 1240266 - RNA, 19 nt, Artificial Sequence
  Description of Artificial Sequence: Synthetic oligonucleotide
  Sense strand starting at position 998 of SEQ ID NO: 917521
cuuagaaagucugaaucaa

SEQ ID NO: 1240267 - RNA, 19 nt, Artificial Sequence
  Description of Artificial Sequence: Synthetic oligonucleotide
  Antisense strand to SEQ ID NO: 1240266
uugauucagacuuucuaag

SEQ ID NO: 1240268 - RNA, 19 nt, Artificial Sequence
  Description of Artificial Sequence: Synthetic oligonucleotide
  Sense strand starting at position 1009 of SEQ ID NO: 917521
ugaaucaauccagguauca

SEQ ID NO: 1240269 - RNA, 19 nt, Artificial Sequence
  Description of Artificial Sequence: Synthetic oligonucleotide
  Antisense strand to SEQ ID NO: 1240268
ugauaccuggauugauuca

SEQ ID NO: 1240270 - RNA, 19 nt, Artificial Sequence
  Description of Artificial Sequence: Synthetic oligonucleotide
  Sense strand starting at position 1128 of SEQ ID NO: 917521
guaguuuauccuuacuucu

SEQ ID NO: 1240271 - RNA, 19 nt, Artificial Sequence
  Description of Artificial Sequence: Synthetic oligonucleotide
  Antisense strand to SEQ ID NO: 1240270
agaaguaaggauaaacuac

SEQ ID NO: 1240272 - RNA, 19 nt, Artificial Sequence
  Description of Artificial Sequence: Synthetic oligonucleotide
  Sense strand starting at position 1222 of SEQ ID NO: 917521
cuuauuguaguguaagcau

SEQ ID NO: 1240273 - RNA, 19 nt, Artificial Sequence
  Description of Artificial Sequence: Synthetic oligonucleotide
  Antisense strand to SEQ ID NO: 1240272
augcuuacacuacaauaag

SEQ ID NO: 1240274 - RNA, 19 nt, Artificial Sequence
  Description of Artificial Sequence: Synthetic oligonucleotide
  Sense strand starting at position 1225 of SEQ ID NO: 917521
auuguaguguaagcaugaa

SEQ ID NO: 1240275 - RNA, 19 nt, Artificial Sequence
  Description of Artificial Sequence: Synthetic oligonucleotide
  Antisense strand to SEQ ID NO: 1240274
uucaugcuuacacuacaau

SEQ ID NO: 1240276 - RNA, 19 nt, Artificial Sequence
  Description of Artificial Sequence: Synthetic oligonucleotide
  Sense strand starting at position 1229 of SEQ ID NO: 917521
uaguguaagcaugaaguca

SEQ ID NO: 1240277 - RNA, 19 nt, Artificial Sequence
  Description of Artificial Sequence: Synthetic oligonucleotide
  Antisense strand to SEQ ID NO: 1240276
ugacuucaugcuuacacua

SEQ ID NO: 1240278 - RNA, 19 nt, Artificial Sequence
  Description of Artificial Sequence: Synthetic oligonucleotide
  Sense strand starting at position 1270 of SEQ ID NO: 917521
uccaaaucgcgggagcuuu

SEQ ID NO: 1240279 - RNA, 19 nt, Artificial Sequence
  Description of Artificial Sequence: Synthetic oligonucleotide
  Antisense strand to SEQ ID NO: 1240278
aaagcucccgcgauuugga

SEQ ID NO: 1240280 - RNA, 19 nt, Artificial Sequence
  Description of Artificial Sequence: Synthetic oligonucleotide
  Sense strand starting at position 1280 of SEQ ID NO: 917521
gggagcuuuaaggagcuua

SEQ ID NO: 1240281 - RNA, 19 nt, Artificial Sequence
  Description of Artificial Sequence: Synthetic oligonucleotide
  Antisense strand to SEQ ID NO: 1240280
uaagcuccuuaaagcuccc

SEQ ID NO: 1240282 - RNA, 19 nt, Artificial Sequence
  Description of Artificial Sequence: Synthetic oligonucleotide
  Sense strand starting at position 1291 of SEQ ID NO: 917521
ggagcuuagcacuagacca

SEQ ID NO: 1240283 - RNA, 19 nt, Artificial Sequence
  Description of Artificial Sequence: Synthetic oligonucleotide
  Antisense strand to SEQ ID NO: 1240282
uggucuagugcuaagcucc

SEQ ID NO: 1240284 - RNA, 19 nt, Artificial Sequence
  Description of Artificial Sequence: Synthetic oligonucleotide
  Sense strand starting at position 1388 of SEQ ID NO: 917521
cugcaauuacuccagaggu

SEQ ID NO: 1240285 - RNA, 19 nt, Artificial Sequence
  Description of Artificial Sequence: Synthetic oligonucleotide
  Antisense strand to SEQ ID NO: 1240284
accucuggaguaauugcag

SEQ ID NO: 1240286 - RNA, 19 nt, Artificial Sequence
  Description of Artificial Sequence: Synthetic oligonucleotide
  Sense strand starting at position 1611 of SEQ ID NO: 917521
caggguguaaggugaagaa

SEQ ID NO: 1240287 - RNA, 19 nt, Artificial Sequence
  Description of Artificial Sequence: Synthetic oligonucleotide
  Antisense strand to SEQ ID NO: 1240286
uucuucaccuuacacccug

SEQ ID NO: 1240288 - RNA, 19 nt, Artificial Sequence
  Description of Artificial Sequence: Synthetic oligonucleotide
  Sense strand starting at position 1623 of SEQ ID NO: 917521
ugaagaaauucucuuugcu

SEQ ID NO: 1240289 - RNA, 19 nt, Artificial Sequence
  Description of Artificial Sequence: Synthetic oligonucleotide
  Antisense strand to SEQ ID NO: 1240288
agcaaagagaauuucuuca

SEQ ID NO: 1240290 - RNA, 19 nt, Artificial Sequence
  Description of Artificial Sequence: Synthetic oligonucleotide
  Sense strand starting at position 2530 of SEQ ID NO: 917521
uccuucuugccaugggaga

SEQ ID NO: 1240291 - RNA, 19 nt, Artificial Sequence
  Description of Artificial Sequence: Synthetic oligonucleotide
  Antisense strand to SEQ ID NO: 1240290
ucucccauggcaagaagga

SEQ ID NO: 1240292 - RNA, 19 nt, Artificial Sequence
  Description of Artificial Sequence: Synthetic oligonucleotide
  Sense strand starting at position 2531 of SEQ ID NO: 917521
ccuucuugccaugggagaa

SEQ ID NO: 1240293 - RNA, 19 nt, Artificial Sequence
  Description of Artificial Sequence: Synthetic oligonucleotide
  Antisense strand to SEQ ID NO: 1240292
uucucccauggcaagaagg

SEQ ID NO: 1240294 - RNA, 19 nt, Artificial Sequence
  Description of Artificial Sequence: Synthetic oligonucleotide
  Sense strand starting at position 2912 of SEQ ID NO: 917521
uggccuucugcaggacaau

SEQ ID NO: 1240295 - RNA, 19 nt, Artificial Sequence
  Description of Artificial Sequence: Synthetic oligonucleotide
  Antisense strand to SEQ ID NO: 1240294
auuguccugcagaaggcca

SEQ ID NO: 1240296 - RNA, 19 nt, Artificial Sequence
  Description of Artificial Sequence: Synthetic oligonucleotide
  Sense strand starting at position 2921 of SEQ ID NO: 917521
gcaggacaaucauccaaau

SEQ ID NO: 1240297 - RNA, 19 nt, Artificial Sequence
  Description of Artificial Sequence: Synthetic oligonucleotide
  Antisense strand to SEQ ID NO: 1240296
auuuggaugauuguccugc

SEQ ID NO: 1240298 - RNA, 19 nt, Artificial Sequence
  Description of Artificial Sequence: Synthetic oligonucleotide
  Sense strand starting at position 3069 of SEQ ID NO: 917521
cuaccuggcuucucaaaug

SEQ ID NO: 1240299 - RNA, 19 nt, Artificial Sequence
  Description of Artificial Sequence: Synthetic oligonucleotide
  Antisense strand to SEQ ID NO: 1240298
cauuugagaagccagguag

SEQ ID NO: 1240300 - RNA, 19 nt, Artificial Sequence
  Description of Artificial Sequence: Synthetic oligonucleotide
  Sense strand starting at position 3087 of SEQ ID NO: 917521
gcaguaagaugagcuuugu

SEQ ID NO: 1240301 - RNA, 19 nt, Artificial Sequence
  Description of Artificial Sequence: Synthetic oligonucleotide
  Antisense strand to SEQ ID NO: 1240300
acaaagcucaucuuacugc

SEQ ID NO: 1240302 - RNA, 19 nt, Artificial Sequence
  Description of Artificial Sequence: Synthetic oligonucleotide
  Sense strand starting at position 3367 of SEQ ID NO: 917521
ggcugauccugucucagga

SEQ ID NO: 1240303 - RNA, 19 nt, Artificial Sequence
  Description of Artificial Sequence: Synthetic oligonucleotide
  Antisense strand to SEQ ID NO: 1240302
uccugagacaggaucagcc

SEQ ID NO: 1240304 - RNA, 19 nt, Artificial Sequence
  Description of Artificial Sequence: Synthetic oligonucleotide
  Sense strand starting at position 3433 of SEQ ID NO: 917521
cguguugaaaggcauauua

SEQ ID NO: 1240305 - RNA, 19 nt, Artificial Sequence
  Description of Artificial Sequence: Synthetic oligonucleotide
  Antisense strand to SEQ ID NO: 1240304
uaauaugccuuucaacacg

SEQ ID NO: 1240306 - RNA, 19 nt, Artificial Sequence
  Description of Artificial Sequence: Synthetic oligonucleotide
  Sense strand starting at position 3484 of SEQ ID NO: 917521
uccaguugccucuaggaca

SEQ ID NO: 1240307 - RNA, 19 nt, Artificial Sequence
  Description of Artificial Sequence: Synthetic oligonucleotide
  Antisense strand to SEQ ID NO: 1240306
uguccuagaggcaacugga

SEQ ID NO: 1240308 - RNA, 19 nt, Artificial Sequence
  Description of Artificial Sequence: Synthetic oligonucleotide
  Sense strand starting at position 3509 of SEQ ID NO: 917521
gcaagugguccugacagcu

SEQ ID NO: 1240309 - RNA, 19 nt, Artificial Sequence
  Description of Artificial Sequence: Synthetic oligonucleotide
  Antisense strand to SEQ ID NO: 1240308
agcugucaggaccacuugc

SEQ ID NO: 1240310 - RNA, 19 nt, Artificial Sequence
  Description of Artificial Sequence: Synthetic oligonucleotide
  Sense strand starting at position 3587 of SEQ ID NO: 917521
agcugacaucuacggucua

SEQ ID NO: 1240311 - RNA, 19 nt, Artificial Sequence
  Description of Artificial Sequence: Synthetic oligonucleotide
  Antisense strand to SEQ ID NO: 1240310
uagaccguagaugucagcu

SEQ ID NO: 1240312 - RNA, 19 nt, Artificial Sequence
  Description of Artificial Sequence: Synthetic oligonucleotide
  Sense strand starting at position 3696 of SEQ ID NO: 917521
guugaaaucuuccuguuuc

SEQ ID NO: 1240313 - RNA, 19 nt, Artificial Sequence
  Description of Artificial Sequence: Synthetic oligonucleotide
  Antisense strand to SEQ ID NO: 1240312
gaaacaggaagauuucaac

SEQ ID NO: 1240314 - RNA, 19 nt, Artificial Sequence
  Description of Artificial Sequence: Synthetic oligonucleotide
  Sense strand starting at position 3709 of SEQ ID NO: 917521
uguuucuuauuccuaguua

SEQ ID NO: 1240315 - RNA, 19 nt, Artificial Sequence
  Description of Artificial Sequence: Synthetic oligonucleotide
  Antisense strand to SEQ ID NO: 1240314
uaacuaggaauaagaaaca

SEQ ID NO: 1240316 - RNA, 19 nt, Artificial Sequence
  Description of Artificial Sequence: Synthetic oligonucleotide
  Sense strand starting at position 3727 of SEQ ID NO: 917522
auaagaaagccauacuguu

SEQ ID NO: 1240317 - RNA, 19 nt, Artificial Sequence
  Description of Artificial Sequence: Synthetic oligonucleotide
  Antisense strand to SEQ ID NO: 1240316
aacaguauggcuuucuuau

SEQ ID NO: 1240318 - RNA, 19 nt, Artificial Sequence
  Description of Artificial Sequence: Synthetic oligonucleotide
  Sense strand starting at position 35 of SEQ ID NO: 917522
aaugcuuauggagguuaau

SEQ ID NO: 1240319 - RNA, 19 nt, Artificial Sequence
  Description of Artificial Sequence: Synthetic oligonucleotide
  Antisense strand to SEQ ID NO: 1240318
auuaaccuccauaagcauu

SEQ ID NO: 1240320 - RNA, 19 nt, Artificial Sequence
  Description of Artificial Sequence: Synthetic oligonucleotide
  Sense strand starting at position 38 of SEQ ID NO: 917522
gcuuauggagguuaauaac

SEQ ID NO: 1240321 - RNA, 19 nt, Artificial Sequence
  Description of Artificial Sequence: Synthetic oligonucleotide
  Antisense strand to SEQ ID NO: 1240320
guuauuaaccuccauaagc

SEQ ID NO: 1240322 - RNA, 19 nt, Artificial Sequence
  Description of Artificial Sequence: Synthetic oligonucleotide
  Sense strand starting at position 146 of SEQ ID NO: 917522
aaacgagggucucuaauga

SEQ ID NO: 1240323 - RNA, 19 nt, Artificial Sequence
  Description of Artificial Sequence: Synthetic oligonucleotide
  Antisense strand to SEQ ID NO: 1240322
ucauuagagacccucguuu

SEQ ID NO: 1240324 - RNA, 19 nt, Artificial Sequence
  Description of Artificial Sequence: Synthetic oligonucleotide
  Sense strand starting at position 228 of SEQ ID NO: 917522
ccuaauauguuggcaauua

SEQ ID NO: 1240325 - RNA, 19 nt, Artificial Sequence
  Description of Artificial Sequence: Synthetic oligonucleotide
  Antisense strand to SEQ ID NO: 1240324
uaauugccaacauauuagg

SEQ ID NO: 1240326 - RNA, 19 nt, Artificial Sequence
  Description of Artificial Sequence: Synthetic oligonucleotide
  Sense strand starting at position 294 of SEQ ID NO: 917522
acaggcaaaucuuuacagu

SEQ ID NO: 1240327 - RNA, 19 nt, Artificial Sequence
  Description of Artificial Sequence: Synthetic oligonucleotide
  Antisense strand to SEQ ID NO: 1240326
acuguaaagauuugccugu

SEQ ID NO: 1240328 - RNA, 19 nt, Artificial Sequence
  Description of Artificial Sequence: Synthetic oligonucleotide
  Sense strand starting at position 457 of SEQ ID NO: 917522
ccugacaucuugucauaua

SEQ ID NO: 1240329 - RNA, 19 nt, Artificial Sequence
  Description of Artificial Sequence: Synthetic oligonucleotide
  Antisense strand to SEQ ID NO: 1240328
uauaugacaagaugucagg

SEQ ID NO: 1240330 - RNA, 19 nt, Artificial Sequence
  Description of Artificial Sequence: Synthetic oligonucleotide
  Sense strand starting at position 470 of SEQ ID NO: 917522
cauauauaacgccagagua

SEQ ID NO: 1240331 - RNA, 19 nt, Artificial Sequence
  Description of Artificial Sequence: Synthetic oligonucleotide
  Antisense strand to SEQ ID NO: 1240330
uacucuggcguuauauaug

SEQ ID NO: 1240332 - RNA, 19 nt, Artificial Sequence
  Description of Artificial Sequence: Synthetic oligonucleotide
  Sense strand starting at position 482 of SEQ ID NO: 917522
cagaguaugguucggaaac

SEQ ID NO: 1240333 - RNA, 19 nt, Artificial Sequence
  Description of Artificial Sequence: Synthetic oligonucleotide
  Antisense strand to SEQ ID NO: 1240332
guuuccgaaccauacucug

SEQ ID NO: 1240334 - RNA, 19 nt, Artificial Sequence
  Description of Artificial Sequence: Synthetic oligonucleotide
  Sense strand starting at position 731 of SEQ ID NO: 917522
gucuuacaaucuuuacagu

SEQ ID NO: 1240335 - RNA, 19 nt, Artificial Sequence
  Description of Artificial Sequence: Synthetic oligonucleotide
  Antisense strand to SEQ ID NO: 1240334
acuguaaagauuguaagac

SEQ ID NO: 1240336 - RNA, 19 nt, Artificial Sequence
  Description of Artificial Sequence: Synthetic oligonucleotide
  Sense strand starting at position 826 of SEQ ID NO: 917522
gccagauccuucuuuauga

SEQ ID NO: 1240337 - RNA, 19 nt, Artificial Sequence
  Description of Artificial Sequence: Synthetic oligonucleotide
  Antisense strand to SEQ ID NO: 1240336
ucauaaagaaggaucuggc

SEQ ID NO: 1240338 - RNA, 19 nt, Artificial Sequence
  Description of Artificial Sequence: Synthetic oligonucleotide
  Sense strand starting at position 833 of SEQ ID NO: 917522
ccuucuuuaugacuuugua

SEQ ID NO: 1240339 - RNA, 19 nt, Artificial Sequence
  Description of Artificial Sequence: Synthetic oligonucleotide
  Antisense strand to SEQ ID NO: 1240338
uacaaagucauaaagaagg

SEQ ID NO: 1240340 - RNA, 19 nt, Artificial Sequence
  Description of Artificial Sequence: Synthetic oligonucleotide
  Sense strand starting at position 837 of SEQ ID NO: 917522
cuuuaugacuuuguauaag

SEQ ID NO: 1240341 - RNA, 19 nt, Artificial Sequence
  Description of Artificial Sequence: Synthetic oligonucleotide
  Antisense strand to SEQ ID NO: 1240340
cuuauacaaagucauaaag

SEQ ID NO: 1240342 - RNA, 19 nt, Artificial Sequence
  Description of Artificial Sequence: Synthetic oligonucleotide
  Sense strand starting at position 896 of SEQ ID NO: 917522
ucaagacuacggcauugau

SEQ ID NO: 1240343 - RNA, 19 nt, Artificial Sequence
  Description of Artificial Sequence: Synthetic oligonucleotide
  Antisense strand to SEQ ID NO: 1240342
aucaaugccguagucuuga

SEQ ID NO: 1240344 - RNA, 19 nt, Artificial Sequence
  Description of Artificial Sequence: Synthetic oligonucleotide
  Sense strand starting at position 1002 of SEQ ID NO: 917522
ccggcacaaucuucccaaa

SEQ ID NO: 1240345 - RNA, 19 nt, Artificial Sequence
  Description of Artificial Sequence: Synthetic oligonucleotide
  Antisense strand to SEQ ID NO: 1240344
uuugggaagauugugccgg

SEQ ID NO: 1240346 - RNA, 19 nt, Artificial Sequence
  Description of Artificial Sequence: Synthetic oligonucleotide
  Sense strand starting at position 1157 of SEQ ID NO: 917522
acauacaggccacgugaua

SEQ ID NO: 1240347 - RNA, 19 nt, Artificial Sequence
  Description of Artificial Sequence: Synthetic oligonucleotide
  Antisense strand to SEQ ID NO: 1240346
uaucacguggccuguaugu

SEQ ID NO: 1240348 - RNA, 19 nt, Artificial Sequence
  Description of Artificial Sequence: Synthetic oligonucleotide
  Sense strand starting at position 1164 of SEQ ID NO: 917522
ggccacgugauauacauau

SEQ ID NO: 1240349 - RNA, 19 nt, Artificial Sequence
  Description of Artificial Sequence: Synthetic oligonucleotide
  Antisense strand to SEQ ID NO: 1240348
auauguauaucacguggcc

SEQ ID NO: 1240350 - RNA, 19 nt, Artificial Sequence
  Description of Artificial Sequence: Synthetic oligonucleotide
  Sense strand starting at position 1277 of SEQ ID NO: 917522
gaggcuggucgaggacuaa

SEQ ID NO: 1240351 - RNA, 19 nt, Artificial Sequence
  Description of Artificial Sequence: Synthetic oligonucleotide
  Antisense strand to SEQ ID NO: 1240350
uuaguccucgaccagccuc

SEQ ID NO: 1240352 - RNA, 19 nt, Artificial Sequence
  Description of Artificial Sequence: Synthetic oligonucleotide
  Sense strand starting at position 1308 of SEQ ID NO: 917522
gaggaucuaccuggaaguu

SEQ ID NO: 1240353 - RNA, 19 nt, Artificial Sequence
  Description of Artificial Sequence: Synthetic oligonucleotide
  Antisense strand to SEQ ID NO: 1240352
aacuuccagguagauccuc

SEQ ID NO: 1240354 - RNA, 19 nt, Artificial Sequence
  Description of Artificial Sequence: Synthetic oligonucleotide
  Sense strand starting at position 1755 of SEQ ID NO: 917522
agagaauggccuuaagcug

SEQ ID NO: 1240355 - RNA, 19 nt, Artificial Sequence
  Description of Artificial Sequence: Synthetic oligonucleotide
  Antisense strand to SEQ ID NO: 1240354
cagcuuaaggccauucucu

SEQ ID NO: 1240356 - RNA, 19 nt, Artificial Sequence
  Description of Artificial Sequence: Synthetic oligonucleotide
  Sense strand starting at position 1779 of SEQ ID NO: 917522
ucuuguaagggucaaugca

SEQ ID NO: 1240357 - RNA, 19 nt, Artificial Sequence
  Description of Artificial Sequence: Synthetic oligonucleotide
  Antisense strand to SEQ ID NO: 1240356
ugcauugacccuuacaaga

SEQ ID NO: 1240358 - RNA, 19 nt, Artificial Sequence
  Description of Artificial Sequence: Synthetic oligonucleotide
  Sense strand starting at position 2130 of SEQ ID NO: 917522
gcuuauuacccugauugag

SEQ ID NO: 1240359 - RNA, 19 nt, Artificial Sequence
  Description of Artificial Sequence: Synthetic oligonucleotide
  Antisense strand to SEQ ID NO: 1240358
cucaaucaggguaauaagc

SEQ ID NO: 1240360 - RNA, 19 nt, Artificial Sequence
  Description of Artificial Sequence: Synthetic oligonucleotide
  Sense strand starting at position 2305 of SEQ ID NO: 917522
uccuguagugaccauucua

SEQ ID NO: 1240361 - RNA, 19 nt, Artificial Sequence
  Description of Artificial Sequence: Synthetic oligonucleotide
  Antisense strand to SEQ ID NO: 1240360
uagaauggucacuacagga

SEQ ID NO: 1240362 - RNA, 19 nt, Artificial Sequence
  Description of Artificial Sequence: Synthetic oligonucleotide
  Sense strand starting at position 2322 of SEQ ID NO: 917522
uaaagauccuuuguaaggu

SEQ ID NO: 1240363 - RNA, 19 nt, Artificial Sequence
  Description of Artificial Sequence: Synthetic oligonucleotide
  Antisense strand to SEQ ID NO: 1240362
accuuacaaaggaucuuua

SEQ ID NO: 1240364 - RNA, 19 nt, Artificial Sequence
  Description of Artificial Sequence: Synthetic oligonucleotide
  Sense strand starting at position 2346 of SEQ ID NO: 917522
gguaauguuagauaauguu

SEQ ID NO: 1240365 - RNA, 19 nt, Artificial Sequence
  Description of Artificial Sequence: Synthetic oligonucleotide
  Antisense strand to SEQ ID NO: 1240364
aacauuaucuaacauuacc

SEQ ID NO: 1240366 - RNA, 19 nt, Artificial Sequence
  Description of Artificial Sequence: Synthetic oligonucleotide
  Sense strand starting at position 2588 of SEQ ID NO: 917522
uguggcauguauuuauaca

SEQ ID NO: 1240367 - RNA, 19 nt, Artificial Sequence
  Description of Artificial Sequence: Synthetic oligonucleotide
  Antisense strand to SEQ ID NO: 1240366
uguauaaauacaugccaca

SEQ ID NO: 1240368 - RNA, 19 nt, Artificial Sequence
  Description of Artificial Sequence: Synthetic oligonucleotide
  Sense strand starting at position 3032 of SEQ ID NO: 917522
gcauaaacucacugauaug

SEQ ID NO: 1240369 - RNA, 19 nt, Artificial Sequence
  Description of Artificial Sequence: Synthetic oligonucleotide
  Antisense strand to SEQ ID NO: 1240368
cauaucagugaguuuaugc

SEQ ID NO: 1240370 - RNA, 19 nt, Artificial Sequence
  Description of Artificial Sequence: Synthetic oligonucleotide
  Sense strand starting at position 3038 of SEQ ID NO: 917522
acucacugauauguggaau

SEQ ID NO: 1240371 - RNA, 19 nt, Artificial Sequence
  Description of Artificial Sequence: Synthetic oligonucleotide
  Antisense strand to SEQ ID NO: 1240370
auuccacauaucagugagu

SEQ ID NO: 1240372 - RNA, 19 nt, Artificial Sequence
  Description of Artificial Sequence: Synthetic oligonucleotide
  Sense strand starting at position 3153 of SEQ ID NO: 917522
uguuacaguuagguagaau

SEQ ID NO: 1240373 - RNA, 19 nt, Artificial Sequence
  Description of Artificial Sequence: Synthetic oligonucleotide
  Antisense strand to SEQ ID NO: 1240372
auucuaccuaacuguaaca

SEQ ID NO: 1240374 - RNA, 19 nt, Artificial Sequence
  Description of Artificial Sequence: Synthetic oligonucleotide
  Sense strand starting at position 3154 of SEQ ID NO: 917522
guuacaguuagguagaaug

SEQ ID NO: 1240375 - RNA, 19 nt, Artificial Sequence
  Description of Artificial Sequence: Synthetic oligonucleotide
  Antisense strand to SEQ ID NO: 1240374
cauucuaccuaacuguaac

SEQ ID NO: 1240376 - RNA, 19 nt, Artificial Sequence
  Description of Artificial Sequence: Synthetic oligonucleotide
  Sense strand starting at position 3299 of SEQ ID NO: 917522
acagauggauauguuaauu

SEQ ID NO: 1240377 - RNA, 19 nt, Artificial Sequence
  Description of Artificial Sequence: Synthetic oligonucleotide
  Antisense strand to SEQ ID NO: 1240376
aauuaacauauccaucugu

SEQ ID NO: 1240378 - RNA, 19 nt, Artificial Sequence
  Description of Artificial Sequence: Synthetic oligonucleotide
  Sense strand starting at position 3312 of SEQ ID NO: 917522
uuaauugcuugacuauagu

SEQ ID NO: 1240379 - RNA, 19 nt, Artificial Sequence
  Description of Artificial Sequence: Synthetic oligonucleotide
  Antisense strand to SEQ ID NO: 1240378
acuauagucaagcaauuaa

SEQ ID NO: 1240380 - RNA, 19 nt, Artificial Sequence
  Description of Artificial Sequence: Synthetic oligonucleotide
  Sense strand starting at position 3315 of SEQ ID NO: 917522
auugcuugacuauaguaau

SEQ ID NO: 1240381 - RNA, 19 nt, Artificial Sequence
  Description of Artificial Sequence: Synthetic oligonucleotide
  Antisense strand to SEQ ID NO: 1240380
auuacuauagucaagcaau

SEQ ID NO: 1240382 - RNA, 19 nt, Artificial Sequence
  Description of Artificial Sequence: Synthetic oligonucleotide
  Sense strand starting at position 3333 of SEQ ID NO: 917522
ucaucucacuguguacaua

SEQ ID NO: 1240383 - RNA, 19 nt, Artificial Sequence
  Description of Artificial Sequence: Synthetic oligonucleotide
  Antisense strand to SEQ ID NO: 1240382
uauguacacagugagauga

SEQ ID NO: 1240384 - RNA, 19 nt, Artificial Sequence
  Description of Artificial Sequence: Synthetic oligonucleotide
  Sense strand starting at position 3351 of SEQ ID NO: 917522
auacauguugugcacauua

SEQ ID NO: 1240385 - RNA, 19 nt, Artificial Sequence
  Description of Artificial Sequence: Synthetic oligonucleotide
  Antisense strand to SEQ ID NO: 1240384
uaaugugcacaacauguau

SEQ ID NO: 1240386 - RNA, 19 nt, Artificial Sequence
  Description of Artificial Sequence: Synthetic oligonucleotide
  Sense strand starting at position 3353 of SEQ ID NO: 917522
acauguugugcacauuaaa

SEQ ID NO: 1240387 - RNA, 19 nt, Artificial Sequence
  Description of Artificial Sequence: Synthetic oligonucleotide
  Antisense strand to SEQ ID NO: 1240386
uuuaaugugcacaacaugu

SEQ ID NO: 1240388 - RNA, 19 nt, Artificial Sequence
  Description of Artificial Sequence: Synthetic oligonucleotide
  Sense strand starting at position 3356 of SEQ ID NO: 917522
uguugugcacauuaaauau

SEQ ID NO: 1240389 - RNA, 19 nt, Artificial Sequence
  Description of Artificial Sequence: Synthetic oligonucleotide
  Antisense strand to SEQ ID NO: 1240388
auauuuaaugugcacaaca

SEQ ID NO: 1240390 - RNA, 19 nt, Artificial Sequence
  Description of Artificial Sequence: Synthetic oligonucleotide
  Sense strand starting at position 3421 of SEQ ID NO: 917522
cuuguuugaaauggaguuu

SEQ ID NO: 1240391 - RNA, 19 nt, Artificial Sequence
  Description of Artificial Sequence: Synthetic oligonucleotide
  Antisense strand to SEQ ID NO: 1240390
aaacuccauuucaaacaag

SEQ ID NO: 1240392 - RNA, 19 nt, Artificial Sequence
  Description of Artificial Sequence: Synthetic oligonucleotide
  Sense strand starting at position 3807 of SEQ ID NO: 917522
ucuauuaugguggagcuaa

SEQ ID NO: 1240393 - RNA, 19 nt, Artificial Sequence
  Description of Artificial Sequence: Synthetic oligonucleotide
  Antisense strand to SEQ ID NO: 1240392
uuagcuccaccauaauaga

SEQ ID NO: 1240394 - RNA, 19 nt, Artificial Sequence
  Description of Artificial Sequence: Synthetic oligonucleotide
  Sense strand starting at position 3907 of SEQ ID NO: 917522
cugagacuugugugacaug

SEQ ID NO: 1240395 - RNA, 19 nt, Artificial Sequence
  Description of Artificial Sequence: Synthetic oligonucleotide
  Antisense strand to SEQ ID NO: 1240394
caugucacacaagucucag

SEQ ID NO: 1240396 - RNA, 19 nt, Artificial Sequence
  Description of Artificial Sequence: Synthetic oligonucleotide
  Sense strand starting at position 3928 of SEQ ID NO: 917523
acggguucucauuagucca

SEQ ID NO: 1240397 - RNA, 19 nt, Artificial Sequence
  Description of Artificial Sequence: Synthetic oligonucleotide
  Antisense strand to SEQ ID NO: 1240396
uggacuaaugagaacccgu

SEQ ID NO: 1240398 - RNA, 19 nt, Artificial Sequence
  Description of Artificial Sequence: Synthetic oligonucleotide
  Sense strand starting at position 197 of SEQ ID NO: 917523
cuacuaacagcuggagaaa

SEQ ID NO: 1240399 - RNA, 19 nt, Artificial Sequence
  Description of Artificial Sequence: Synthetic oligonucleotide
  Antisense strand to SEQ ID NO: 1240398
uuucuccagcuguuaguag

SEQ ID NO: 1240400 - RNA, 19 nt, Artificial Sequence
  Description of Artificial Sequence: Synthetic oligonucleotide
  Sense strand starting at position 218 of SEQ ID NO: 917523
gcuccaccucuauaugaga

SEQ ID NO: 1240401 - RNA, 19 nt, Artificial Sequence
  Description of Artificial Sequence: Synthetic oligonucleotide
  Antisense strand to SEQ ID NO: 1240400
ucucauauagagguggagc

SEQ ID NO: 1240402 - RNA, 19 nt, Artificial Sequence
  Description of Artificial Sequence: Synthetic oligonucleotide
  Sense strand starting at position 225 of SEQ ID NO: 917523
cucuauaugagauggaguu

SEQ ID NO: 1240403 - RNA, 19 nt, Artificial Sequence
  Description of Artificial Sequence: Synthetic oligonucleotide
  Antisense strand to SEQ ID NO: 1240402
aacuccaucucauauagag

SEQ ID NO: 1240404 - RNA, 19 nt, Artificial Sequence
  Description of Artificial Sequence: Synthetic oligonucleotide
  Sense strand starting at position 316 of SEQ ID NO: 917523
auguguuuccucuauguaa

SEQ ID NO: 1240405 - RNA, 19 nt, Artificial Sequence
  Description of Artificial Sequence: Synthetic oligonucleotide
  Antisense strand to SEQ ID NO: 1240404
uuacauagaggaaacacau

SEQ ID NO: 1240406 - RNA, 19 nt, Artificial Sequence
  Description of Artificial Sequence: Synthetic oligonucleotide
  Sense strand starting at position 516 of SEQ ID NO: 917523
gccaguaagaggcauacau

SEQ ID NO: 1240407 - RNA, 19 nt, Artificial Sequence
  Description of Artificial Sequence: Synthetic oligonucleotide
  Antisense strand to SEQ ID NO: 1240406
auguaugccucuuacuggc

SEQ ID NO: 1240408 - RNA, 19 nt, Artificial Sequence
  Description of Artificial Sequence: Synthetic oligonucleotide
  Sense strand starting at position 647 of SEQ ID NO: 917523
uugaaacugucaucuguua

SEQ ID NO: 1240409 - RNA, 19 nt, Artificial Sequence
  Description of Artificial Sequence: Synthetic oligonucleotide
  Antisense strand to SEQ ID NO: 1240408
uaacagaugacaguuucaa

SEQ ID NO: 1240410 - RNA, 19 nt, Artificial Sequence
  Description of Artificial Sequence: Synthetic oligonucleotide
  Sense strand starting at position 810 of SEQ ID NO: 917523
gacugaacugcauaaguau

SEQ ID NO: 1240411 - RNA, 19 nt, Artificial Sequence
  Description of Artificial Sequence: Synthetic oligonucleotide
  Antisense strand to SEQ ID NO: 1240410
auacuuaugcaguucaguc

SEQ ID NO: 1240412 - RNA, 19 nt, Artificial Sequence
  Description of Artificial Sequence: Synthetic oligonucleotide
  Sense strand starting at position 949 of SEQ ID NO: 917523
aguaguucgaauuaccuga

SEQ ID NO: 1240413 - RNA, 19 nt, Artificial Sequence
  Description of Artificial Sequence: Synthetic oligonucleotide
  Antisense strand to SEQ ID NO: 1240412
ucagguaauucgaacuacu

SEQ ID NO: 1240414 - RNA, 19 nt, Artificial Sequence
  Description of Artificial Sequence: Synthetic oligonucleotide
  Sense strand starting at position 951 of SEQ ID NO: 917523
uaguucgaauuaccugaaa

SEQ ID NO: 1240415 - RNA, 19 nt, Artificial Sequence
  Description of Artificial Sequence: Synthetic oligonucleotide
  Antisense strand to SEQ ID NO: 1240414
uuucagguaauucgaacua

SEQ ID NO: 1240416 - RNA, 19 nt, Artificial Sequence
  Description of Artificial Sequence: Synthetic oligonucleotide
  Sense strand starting at position 1167 of SEQ ID NO: 917523
cuaccuaaggcuugugaag

SEQ ID NO: 1240417 - RNA, 19 nt, Artificial Sequence
  Description of Artificial Sequence: Synthetic oligonucleotide
  Antisense strand to SEQ ID NO: 1240416
cuucacaagccuuagguag

SEQ ID NO: 1240418 - RNA, 19 nt, Artificial Sequence
  Description of Artificial Sequence: Synthetic oligonucleotide
  Sense strand starting at position 1208 of SEQ ID NO: 917523
ggaccuaaaucguuaucac

SEQ ID NO: 1240419 - RNA, 19 nt, Artificial Sequence
  Description of Artificial Sequence: Synthetic oligonucleotide
  Antisense strand to SEQ ID NO: 1240418
gugauaacgauuuaggucc

SEQ ID NO: 1240420 - RNA, 19 nt, Artificial Sequence
  Description of Artificial Sequence: Synthetic oligonucleotide
  Sense strand starting at position 1219 of SEQ ID NO: 917523
guuaucacugcugagggaa

SEQ ID NO: 1240421 - RNA, 19 nt, Artificial Sequence
  Description of Artificial Sequence: Synthetic oligonucleotide
  Antisense strand to SEQ ID NO: 1240420
uucccucagcagugauaac

SEQ ID NO: 1240422 - RNA, 19 nt, Artificial Sequence
  Description of Artificial Sequence: Synthetic oligonucleotide
  Sense strand starting at position 1415 of SEQ ID NO: 917523
auugucugagucuacuuau

SEQ ID NO: 1240423 - RNA, 19 nt, Artificial Sequence
  Description of Artificial Sequence: Synthetic oligonucleotide
  Antisense strand to SEQ ID NO: 1240422
auaaguagacucagacaau

SEQ ID NO: 1240424 - RNA, 19 nt, Artificial Sequence
  Description of Artificial Sequence: Synthetic oligonucleotide
  Sense strand starting at position 1428 of SEQ ID NO: 917523
acuuaucgcccuuagacaa

SEQ ID NO: 1240425 - RNA, 19 nt, Artificial Sequence
  Description of Artificial Sequence: Synthetic oligonucleotide
  Antisense strand to SEQ ID NO: 1240424
uugucuaagggcgauaagu

SEQ ID NO: 1240426 - RNA, 19 nt, Artificial Sequence
  Description of Artificial Sequence: Synthetic oligonucleotide
  Sense strand starting at position 1471 of SEQ ID NO: 917523
gaaauuacgccugagcaca

SEQ ID NO: 1240427 - RNA, 19 nt, Artificial Sequence
  Description of Artificial Sequence: Synthetic oligonucleotide
  Antisense strand to SEQ ID NO: 1240426
ugugcucaggcguaauuuc

SEQ ID NO: 1240428 - RNA, 19 nt, Artificial Sequence
  Description of Artificial Sequence: Synthetic oligonucleotide
  Sense strand starting at position 1893 of SEQ ID NO: 917523
uaacgaagagauuguagau

SEQ ID NO: 1240429 - RNA, 19 nt, Artificial Sequence
  Description of Artificial Sequence: Synthetic oligonucleotide
  Antisense strand to SEQ ID NO: 1240428
aucuacaaucucuucguua

SEQ ID NO: 1240430 - RNA, 19 nt, Artificial Sequence
  Description of Artificial Sequence: Synthetic oligonucleotide
  Sense strand starting at position 2011 of SEQ ID NO: 917523
agcuuccggccgucagauu

SEQ ID NO: 1240431 - RNA, 19 nt, Artificial Sequence
  Description of Artificial Sequence: Synthetic oligonucleotide
  Antisense strand to SEQ ID NO: 1240430
aaucugacggccggaagcu

SEQ ID NO: 1240432 - RNA, 19 nt, Artificial Sequence
  Description of Artificial Sequence: Synthetic oligonucleotide
  Sense strand starting at position 2268 of SEQ ID NO: 917523
gcggcauuuguugacagua

SEQ ID NO: 1240433 - RNA, 19 nt, Artificial Sequence
  Description of Artificial Sequence: Synthetic oligonucleotide
  Antisense strand to SEQ ID NO: 1240432
uacugucaacaaaugccgc

SEQ ID NO: 1240434 - RNA, 19 nt, Artificial Sequence
  Description of Artificial Sequence: Synthetic oligonucleotide
  Sense strand starting at position 2394 of SEQ ID NO: 917523
cuaauuaccguggagcaaa

SEQ ID NO: 1240435 - RNA, 19 nt, Artificial Sequence
  Description of Artificial Sequence: Synthetic oligonucleotide
  Antisense strand to SEQ ID NO: 1240434
uuugcuccacgguaauuag

SEQ ID NO: 1240436 - RNA, 19 nt, Artificial Sequence
  Description of Artificial Sequence: Synthetic oligonucleotide
  Sense strand starting at position 2468 of SEQ ID NO: 917523
agcagaaaucuuuaaugua

SEQ ID NO: 1240437 - RNA, 19 nt, Artificial Sequence
  Description of Artificial Sequence: Synthetic oligonucleotide
  Antisense strand to SEQ ID NO: 1240436
uacauuaaagauuucugcu

SEQ ID NO: 1240438 - RNA, 19 nt, Artificial Sequence
  Description of Artificial Sequence: Synthetic oligonucleotide
  Sense strand starting at position 2521 of SEQ ID NO: 917523
caaugaucagcgugagaug

SEQ ID NO: 1240439 - RNA, 19 nt, Artificial Sequence
  Description of Artificial Sequence: Synthetic oligonucleotide
  Antisense strand to SEQ ID NO: 1240438
caucucacgcugaucauug

SEQ ID NO: 1240440 - RNA, 19 nt, Artificial Sequence
  Description of Artificial Sequence: Synthetic oligonucleotide
  Sense strand starting at position 2522 of SEQ ID NO: 917523
aaugaucagcgugagauga

SEQ ID NO: 1240441 - RNA, 19 nt, Artificial Sequence
  Description of Artificial Sequence: Synthetic oligonucleotide
  Antisense strand to SEQ ID NO: 1240440
ucaucucacgcugaucauu

SEQ ID NO: 1240442 - RNA, 19 nt, Artificial Sequence
  Description of Artificial Sequence: Synthetic oligonucleotide
  Sense strand starting at position 2530 of SEQ ID NO: 917523
gcgugagaugaucauugau

SEQ ID NO: 1240443 - RNA, 19 nt, Artificial Sequence
  Description of Artificial Sequence: Synthetic oligonucleotide
  Antisense strand to SEQ ID NO: 1240442
aucaaugaucaucucacgc

SEQ ID NO: 1240444 - RNA, 19 nt, Artificial Sequence
  Description of Artificial Sequence: Synthetic oligonucleotide
  Sense strand starting at position 2532 of SEQ ID NO: 917523
gugagaugaucauugauua

SEQ ID NO: 1240445 - RNA, 19 nt, Artificial Sequence
  Description of Artificial Sequence: Synthetic oligonucleotide
  Antisense strand to SEQ ID NO: 1240444
uaaucaaugaucaucucac

SEQ ID NO: 1240446 - RNA, 19 nt, Artificial Sequence
  Description of Artificial Sequence: Synthetic oligonucleotide
  Sense strand starting at position 2545 of SEQ ID NO: 917523
ugauuaaacuugcuugaga

SEQ ID NO: 1240447 - RNA, 19 nt, Artificial Sequence
  Description of Artificial Sequence: Synthetic oligonucleotide
  Antisense strand to SEQ ID NO: 1240446
ucucaagcaaguuuaauca

SEQ ID NO: 1240448 - RNA, 19 nt, Artificial Sequence
  Description of Artificial Sequence: Synthetic oligonucleotide
  Sense strand starting at position 2547 of SEQ ID NO: 917523
auuaaacuugcuugagaug

SEQ ID NO: 1240449 - RNA, 19 nt, Artificial Sequence
  Description of Artificial Sequence: Synthetic oligonucleotide
  Antisense strand to SEQ ID NO: 1240448
caucucaagcaaguuuaau

SEQ ID NO: 1240450 - RNA, 19 nt, Artificial Sequence
  Description of Artificial Sequence: Synthetic oligonucleotide
  Sense strand starting at position 2556 of SEQ ID NO: 917523
gcuugagauggcuagucaa

SEQ ID NO: 1240451 - RNA, 19 nt, Artificial Sequence
  Description of Artificial Sequence: Synthetic oligonucleotide
  Antisense strand to SEQ ID NO: 1240450
uugacuagccaucucaagc

SEQ ID NO: 1240452 - RNA, 19 nt, Artificial Sequence
  Description of Artificial Sequence: Synthetic oligonucleotide
  Sense strand starting at position 2568 of SEQ ID NO: 917523
uagucaaacgucgaaacuu

SEQ ID NO: 1240453 - RNA, 19 nt, Artificial Sequence
  Description of Artificial Sequence: Synthetic oligonucleotide
  Antisense strand to SEQ ID NO: 1240452
aaguuucgacguuugacua

SEQ ID NO: 1240454 - RNA, 19 nt, Artificial Sequence
  Description of Artificial Sequence: Synthetic oligonucleotide
  Sense strand starting at position 2578 of SEQ ID NO: 917523
ucgaaacuugcuugagaug

SEQ ID NO: 1240455 - RNA, 19 nt, Artificial Sequence
  Description of Artificial Sequence: Synthetic oligonucleotide
  Antisense strand to SEQ ID NO: 1240454
caucucaagcaaguuucga

SEQ ID NO: 1240456 - RNA, 19 nt, Artificial Sequence
  Description of Artificial Sequence: Synthetic oligonucleotide
  Sense strand starting at position 2706 of SEQ ID NO: 917523
cuuauuagguucucugaca

SEQ ID NO: 1240457 - RNA, 19 nt, Artificial Sequence
  Description of Artificial Sequence: Synthetic oligonucleotide
  Antisense strand to SEQ ID NO: 1240456
ugucagagaaccuaauaag

SEQ ID NO: 1240458 - RNA, 19 nt, Artificial Sequence
  Description of Artificial Sequence: Synthetic oligonucleotide
  Sense strand starting at position 3059 of SEQ ID NO: 917523
uguugaaauacagacguuu

SEQ ID NO: 1240459 - RNA, 19 nt, Artificial Sequence
  Description of Artificial Sequence: Synthetic oligonucleotide
  Antisense strand to SEQ ID NO: 1240458
aaacgucuguauuucaaca

SEQ ID NO: 1240460 - RNA, 19 nt, Artificial Sequence
  Description of Artificial Sequence: Synthetic oligonucleotide
  Sense strand starting at position 3095 of SEQ ID NO: 917523
ugggaauuguuugauuuaa

SEQ ID NO: 1240461 - RNA, 19 nt, Artificial Sequence
  Description of Artificial Sequence: Synthetic oligonucleotide
  Antisense strand to SEQ ID NO: 1240460
uuaaaucaaacaauuccca

SEQ ID NO: 1240462 - RNA, 19 nt, Artificial Sequence
  Description of Artificial Sequence: Synthetic oligonucleotide
  Sense strand starting at position 3440 of SEQ ID NO: 917523
uuugauuaucagugaguug

SEQ ID NO: 1240463 - RNA, 19 nt, Artificial Sequence
  Description of Artificial Sequence: Synthetic oligonucleotide
  Antisense strand to SEQ ID NO: 1240462
caacucacugauaaucaaa

SEQ ID NO: 1240464 - RNA, 19 nt, Artificial Sequence
  Description of Artificial Sequence: Synthetic oligonucleotide
  Sense strand starting at position 3449 of SEQ ID NO: 917523
cagugaguugcacauuugu

SEQ ID NO: 1240465 - RNA, 19 nt, Artificial Sequence
  Description of Artificial Sequence: Synthetic oligonucleotide
  Antisense strand to SEQ ID NO: 1240464
acaaaugugcaacucacug

SEQ ID NO: 1240466 - RNA, 19 nt, Artificial Sequence
  Description of Artificial Sequence: Synthetic oligonucleotide
  Sense strand starting at position 3457 of SEQ ID NO: 917523
ugcacauuuguuuggcaua

SEQ ID NO: 1240467 - RNA, 19 nt, Artificial Sequence
  Description of Artificial Sequence: Synthetic oligonucleotide
  Antisense strand to SEQ ID NO: 1240466
uaugccaaacaaaugugca

SEQ ID NO: 1240468 - RNA, 19 nt, Artificial Sequence
  Description of Artificial Sequence: Synthetic oligonucleotide
  Sense strand starting at position 3468 of SEQ ID NO: 917523
uuggcauauuuauuggcua

SEQ ID NO: 1240469 - RNA, 19 nt, Artificial Sequence
  Description of Artificial Sequence: Synthetic oligonucleotide
  Antisense strand to SEQ ID NO: 1240468
uagccaauaaauaugccaa

SEQ ID NO: 1240470 - RNA, 19 nt, Artificial Sequence
  Description of Artificial Sequence: Synthetic oligonucleotide
  Sense strand starting at position 3471 of SEQ ID NO: 917523
gcauauuuauuggcuaucu

SEQ ID NO: 1240471 - RNA, 19 nt, Artificial Sequence
  Description of Artificial Sequence: Synthetic oligonucleotide
  Antisense strand to SEQ ID NO: 1240470
agauagccaauaaauaugc

SEQ ID NO: 1240472 - RNA, 19 nt, Artificial Sequence
  Description of Artificial Sequence: Synthetic oligonucleotide
  Sense strand starting at position 3714 of SEQ ID NO: 917523
uggugaaagacauguuaau

SEQ ID NO: 1240473 - RNA, 19 nt, Artificial Sequence
  Description of Artificial Sequence: Synthetic oligonucleotide
  Antisense strand to SEQ ID NO: 1240472
auuaacaugucuuucacca

SEQ ID NO: 1240474 - RNA, 19 nt, Artificial Sequence
  Description of Artificial Sequence: Synthetic oligonucleotide
  Sense strand starting at position 3815 of SEQ ID NO: 917523
cuaaauugaguccagguuu

SEQ ID NO: 1240475 - RNA, 19 nt, Artificial Sequence
  Description of Artificial Sequence: Synthetic oligonucleotide
  Antisense strand to SEQ ID NO: 1240474
aaaccuggacucaauuuag

SEQ ID NO: 1240476 - RNA, 19 nt, Artificial Sequence
  Description of Artificial Sequence: Synthetic oligonucleotide
  Sense strand starting at position 3921 of SEQ ID NO: 917524
ccagaagacuuguuacagu

SEQ ID NO: 1240477 - RNA, 19 nt, Artificial Sequence
  Description of Artificial Sequence: Synthetic oligonucleotide
  Antisense strand to SEQ ID NO: 1240476
acuguaacaagucuucugg

SEQ ID NO: 1240478 - RNA, 19 nt, Artificial Sequence
  Description of Artificial Sequence: Synthetic oligonucleotide
  Sense strand starting at position 30 of SEQ ID NO: 917524
guaucaucauaaguugaug

SEQ ID NO: 1240479 - RNA, 19 nt, Artificial Sequence
  Description of Artificial Sequence: Synthetic oligonucleotide
  Antisense strand to SEQ ID NO: 1240478
caucaacuuaugaugauac

SEQ ID NO: 1240480 - RNA, 19 nt, Artificial Sequence
  Description of Artificial Sequence: Synthetic oligonucleotide
  Sense strand starting at position 199 of SEQ ID NO: 917524
uuggaaauguauuccacaa

SEQ ID NO: 1240481 - RNA, 19 nt, Artificial Sequence
  Description of Artificial Sequence: Synthetic oligonucleotide
  Antisense strand to SEQ ID NO: 1240480
uuguggaauacauuuccaa

SEQ ID NO: 1240482 - RNA, 19 nt, Artificial Sequence
  Description of Artificial Sequence: Synthetic oligonucleotide
  Sense strand starting at position 241 of SEQ ID NO: 917524
cagggauagucgucccaaa

SEQ ID NO: 1240483 - RNA, 19 nt, Artificial Sequence
  Description of Artificial Sequence: Synthetic oligonucleotide
  Antisense strand to SEQ ID NO: 1240482
uuugggacgacuaucccug

SEQ ID NO: 1240484 - RNA, 19 nt, Artificial Sequence
  Description of Artificial Sequence: Synthetic oligonucleotide
  Sense strand starting at position 264 of SEQ ID NO: 917524
aacguucuauagguacaaa

SEQ ID NO: 1240485 - RNA, 19 nt, Artificial Sequence
  Description of Artificial Sequence: Synthetic oligonucleotide
  Antisense strand to SEQ ID NO: 1240484
uuuguaccuauagaacguu

SEQ ID NO: 1240486 - RNA, 19 nt, Artificial Sequence
  Description of Artificial Sequence: Synthetic oligonucleotide
  Sense strand starting at position 267 of SEQ ID NO: 917524
guucuauagguacaaagua

SEQ ID NO: 1240487 - RNA, 19 nt, Artificial Sequence
  Description of Artificial Sequence: Synthetic oligonucleotide
  Antisense strand to SEQ ID NO: 1240486
uacuuuguaccuauagaac

SEQ ID NO: 1240488 - RNA, 19 nt, Artificial Sequence
  Description of Artificial Sequence: Synthetic oligonucleotide
  Sense strand starting at position 372 of SEQ ID NO: 917524
ccaaauacuugguugaaag

SEQ ID NO: 1240489 - RNA, 19 nt, Artificial Sequence
  Description of Artificial Sequence: Synthetic oligonucleotide
  Antisense strand to SEQ ID NO: 1240488
cuuucaaccaaguauuugg

SEQ ID NO: 1240490 - RNA, 19 nt, Artificial Sequence
  Description of Artificial Sequence: Synthetic oligonucleotide
  Sense strand starting at position 382 of SEQ ID NO: 917524
gguugaaagcuguacaaau

SEQ ID NO: 1240491 - RNA, 19 nt, Artificial Sequence
  Description of Artificial Sequence: Synthetic oligonucleotide
  Antisense strand to SEQ ID NO: 1240490
auuuguacagcuuucaacc

SEQ ID NO: 1240492 - RNA, 19 nt, Artificial Sequence
  Description of Artificial Sequence: Synthetic oligonucleotide
  Sense strand starting at position 431 of SEQ ID NO: 917524
cuuucaagaguggguggua

SEQ ID NO: 1240493 - RNA, 19 nt, Artificial Sequence
  Description of Artificial Sequence: Synthetic oligonucleotide
  Antisense strand to SEQ ID NO: 1240492
uaccacccacucuugaaag

SEQ ID NO: 1240494 - RNA, 19 nt, Artificial Sequence
  Description of Artificial Sequence: Synthetic oligonucleotide
  Sense strand starting at position 440 of SEQ ID NO: 917524
gugggugguacagauucuu

SEQ ID NO: 1240495 - RNA, 19 nt, Artificial Sequence
  Description of Artificial Sequence: Synthetic oligonucleotide
  Antisense strand to SEQ ID NO: 1240494
aagaaucuguaccacccac

SEQ ID NO: 1240496 - RNA, 19 nt, Artificial Sequence
  Description of Artificial Sequence: Synthetic oligonucleotide
  Sense strand starting at position 445 of SEQ ID NO: 917524
ugguacagauucuucucau

SEQ ID NO: 1240497 - RNA, 19 nt, Artificial Sequence
  Description of Artificial Sequence: Synthetic oligonucleotide
  Antisense strand to SEQ ID NO: 1240496
augagaagaaucuguacca

SEQ ID NO: 1240498 - RNA, 19 nt, Artificial Sequence
  Description of Artificial Sequence: Synthetic oligonucleotide
  Sense strand starting at position 446 of SEQ ID NO: 917524
gguacagauucuucucauu

SEQ ID NO: 1240499 - RNA, 19 nt, Artificial Sequence
  Description of Artificial Sequence: Synthetic oligonucleotide
  Antisense strand to SEQ ID NO: 1240498
aaugagaagaaucuguacc

SEQ ID NO: 1240500 - RNA, 19 nt, Artificial Sequence
  Description of Artificial Sequence: Synthetic oligonucleotide
  Sense strand starting at position 637 of SEQ ID NO: 917524
gcagcagauguauacagaa

SEQ ID NO: 1240501 - RNA, 19 nt, Artificial Sequence
  Description of Artificial Sequence: Synthetic oligonucleotide
  Antisense strand to SEQ ID NO: 1240500
uucuguauacaucugcugc

SEQ ID NO: 1240502 - RNA, 19 nt, Artificial Sequence
  Description of Artificial Sequence: Synthetic oligonucleotide
  Sense strand starting at position 737 of SEQ ID NO: 917524
uggagaaauugcccaauau

SEQ ID NO: 1240503 - RNA, 19 nt, Artificial Sequence
  Description of Artificial Sequence: Synthetic oligonucleotide
  Antisense strand to SEQ ID NO: 1240502
auauugggcaauuucucca

SEQ ID NO: 1240504 - RNA, 19 nt, Artificial Sequence
  Description of Artificial Sequence: Synthetic oligonucleotide
  Sense strand starting at position 843 of SEQ ID NO: 917524
uagguuaaauccuugaagu

SEQ ID NO: 1240505 - RNA, 19 nt, Artificial Sequence
  Description of Artificial Sequence: Synthetic oligonucleotide
  Antisense strand to SEQ ID NO: 1240504
acuucaaggauuuaaccua

SEQ ID NO: 1240506 - RNA, 19 nt, Artificial Sequence
  Description of Artificial Sequence: Synthetic oligonucleotide
  Sense strand starting at position 844 of SEQ ID NO: 917524
agguuaaauccuugaagua

SEQ ID NO: 1240507 - RNA, 19 nt, Artificial Sequence
  Description of Artificial Sequence: Synthetic oligonucleotide
  Antisense strand to SEQ ID NO: 1240506
uacuucaaggauuuaaccu

SEQ ID NO: 1240508 - RNA, 19 nt, Artificial Sequence
  Description of Artificial Sequence: Synthetic oligonucleotide
  Sense strand starting at position 845 of SEQ ID NO: 917524
gguuaaauccuugaaguau

SEQ ID NO: 1240509 - RNA, 19 nt, Artificial Sequence
  Description of Artificial Sequence: Synthetic oligonucleotide
  Antisense strand to SEQ ID NO: 1240508
auacuucaaggauuuaacc

SEQ ID NO: 1240510 - RNA, 19 nt, Artificial Sequence
  Description of Artificial Sequence: Synthetic oligonucleotide
  Sense strand starting at position 1373 of SEQ ID NO: 917524
cguuccuucccagaaggau

SEQ ID NO: 1240511 - RNA, 19 nt, Artificial Sequence
  Description of Artificial Sequence: Synthetic oligonucleotide
  Antisense strand to SEQ ID NO: 1240510
auccuucugggaaggaacg

SEQ ID NO: 1240512 - RNA, 19 nt, Artificial Sequence
  Description of Artificial Sequence: Synthetic oligonucleotide
  Sense strand starting at position 1917 of SEQ ID NO: 917524
gcaggacuugugggagcaa

SEQ ID NO: 1240513 - RNA, 19 nt, Artificial Sequence
  Description of Artificial Sequence: Synthetic oligonucleotide
  Antisense strand to SEQ ID NO: 1240512
uugcucccacaaguccugc

SEQ ID NO: 1240514 - RNA, 19 nt, Artificial Sequence
  Description of Artificial Sequence: Synthetic oligonucleotide
  Sense strand starting at position 2289 of SEQ ID NO: 917524
uggaaaugauuccuuagcu

SEQ ID NO: 1240515 - RNA, 19 nt, Artificial Sequence
  Description of Artificial Sequence: Synthetic oligonucleotide
  Antisense strand to SEQ ID NO: 1240514
agcuaaggaaucauuucca

SEQ ID NO: 1240516 - RNA, 19 nt, Artificial Sequence
  Description of Artificial Sequence: Synthetic oligonucleotide
  Sense strand starting at position 2290 of SEQ ID NO: 917524
ggaaaugauuccuuagcug

SEQ ID NO: 1240517 - RNA, 19 nt, Artificial Sequence
  Description of Artificial Sequence: Synthetic oligonucleotide
  Antisense strand to SEQ ID NO: 1240516
cagcuaaggaaucauuucc

SEQ ID NO: 1240518 - RNA, 19 nt, Artificial Sequence
  Description of Artificial Sequence: Synthetic oligonucleotide
  Sense strand starting at position 2323 of SEQ ID NO: 917524
gcccucucuguguacagaa

SEQ ID NO: 1240519 - RNA, 19 nt, Artificial Sequence
  Description of Artificial Sequence: Synthetic oligonucleotide
  Antisense strand to SEQ ID NO: 1240518
uucuguacacagagagggc

SEQ ID NO: 1240520 - RNA, 19 nt, Artificial Sequence
  Description of Artificial Sequence: Synthetic oligonucleotide
  Sense strand starting at position 2425 of SEQ ID NO: 917524
aagaaugcacauuguuaga

SEQ ID NO: 1240521 - RNA, 19 nt, Artificial Sequence
  Description of Artificial Sequence: Synthetic oligonucleotide
  Antisense strand to SEQ ID NO: 1240520
ucuaacaaugugcauucuu

SEQ ID NO: 1240522 - RNA, 19 nt, Artificial Sequence
  Description of Artificial Sequence: Synthetic oligonucleotide
  Sense strand starting at position 2427 of SEQ ID NO: 917524
gaaugcacauuguuagaag

SEQ ID NO: 1240523 - RNA, 19 nt, Artificial Sequence
  Description of Artificial Sequence: Synthetic oligonucleotide
  Antisense strand to SEQ ID NO: 1240522
cuucuaacaaugugcauuc

SEQ ID NO: 1240524 - RNA, 19 nt, Artificial Sequence
  Description of Artificial Sequence: Synthetic oligonucleotide
  Sense strand starting at position 2508 of SEQ ID NO: 917524
aacgguagauaccuguaau

SEQ ID NO: 1240525 - RNA, 19 nt, Artificial Sequence
  Description of Artificial Sequence: Synthetic oligonucleotide
  Antisense strand to SEQ ID NO: 1240524
auuacagguaucuaccguu

SEQ ID NO: 1240526 - RNA, 19 nt, Artificial Sequence
  Description of Artificial Sequence: Synthetic oligonucleotide
  Sense strand starting at position 2509 of SEQ ID NO: 917524
acgguagauaccuguaauu

SEQ ID NO: 1240527 - RNA, 19 nt, Artificial Sequence
  Description of Artificial Sequence: Synthetic oligonucleotide
  Antisense strand to SEQ ID NO: 1240526
aauuacagguaucuaccgu

SEQ ID NO: 1240528 - RNA, 19 nt, Artificial Sequence
  Description of Artificial Sequence: Synthetic oligonucleotide
  Sense strand starting at position 2544 of SEQ ID NO: 917524
uaggguccaucaguuugau

SEQ ID NO: 1240529 - RNA, 19 nt, Artificial Sequence
  Description of Artificial Sequence: Synthetic oligonucleotide
  Antisense strand to SEQ ID NO: 1240528
aucaaacugauggacccua

SEQ ID NO: 1240530 - RNA, 19 nt, Artificial Sequence
  Description of Artificial Sequence: Synthetic oligonucleotide
  Sense strand starting at position 2557 of SEQ ID NO: 917524
uuugauucguaacccaaau

SEQ ID NO: 1240531 - RNA, 19 nt, Artificial Sequence
  Description of Artificial Sequence: Synthetic oligonucleotide
  Antisense strand to SEQ ID NO: 1240530
auuuggguuacgaaucaaa

SEQ ID NO: 1240532 - RNA, 19 nt, Artificial Sequence
  Description of Artificial Sequence: Synthetic oligonucleotide
  Sense strand starting at position 2669 of SEQ ID NO: 917524
agagguugcuaagcaauga

SEQ ID NO: 1240533 - RNA, 19 nt, Artificial Sequence
  Description of Artificial Sequence: Synthetic oligonucleotide
  Antisense strand to SEQ ID NO: 1240532
ucauugcuuagcaaccucu

SEQ ID NO: 1240534 - RNA, 19 nt, Artificial Sequence
  Description of Artificial Sequence: Synthetic oligonucleotide
  Sense strand starting at position 2705 of SEQ ID NO: 917524
ccagaagcaucacugugaa

SEQ ID NO: 1240535 - RNA, 19 nt, Artificial Sequence
  Description of Artificial Sequence: Synthetic oligonucleotide
  Antisense strand to SEQ ID NO: 1240534
uucacagugaugcuucugg

SEQ ID NO: 1240536 - RNA, 19 nt, Artificial Sequence
  Description of Artificial Sequence: Synthetic oligonucleotide
  Sense strand starting at position 2708 of SEQ ID NO: 917524
gaagcaucacugugaagac

SEQ ID NO: 1240537 - RNA, 19 nt, Artificial Sequence
  Description of Artificial Sequence: Synthetic oligonucleotide
  Antisense strand to SEQ ID NO: 1240536
gucuucacagugaugcuuc

SEQ ID NO: 1240538 - RNA, 19 nt, Artificial Sequence
  Description of Artificial Sequence: Synthetic oligonucleotide
  Sense strand starting at position 3192 of SEQ ID NO: 917524
ugcugugucagagaaaugu

SEQ ID NO: 1240539 - RNA, 19 nt, Artificial Sequence
  Description of Artificial Sequence: Synthetic oligonucleotide
  Antisense strand to SEQ ID NO: 1240538
acauuucucugacacagca

SEQ ID NO: 1240540 - RNA, 19 nt, Artificial Sequence
  Description of Artificial Sequence: Synthetic oligonucleotide
  Sense strand starting at position 3196 of SEQ ID NO: 917524
gugucagagaaauguagua

SEQ ID NO: 1240541 - RNA, 19 nt, Artificial Sequence
  Description of Artificial Sequence: Synthetic oligonucleotide
  Antisense strand to SEQ ID NO: 1240540
uacuacauuucucugacac

SEQ ID NO: 1240542 - RNA, 19 nt, Artificial Sequence
  Description of Artificial Sequence: Synthetic oligonucleotide
  Sense strand starting at position 3218 of SEQ ID NO: 917524
gcgaguaaguauuuaauca

SEQ ID NO: 1240543 - RNA, 19 nt, Artificial Sequence
  Description of Artificial Sequence: Synthetic oligonucleotide
  Antisense strand to SEQ ID NO: 1240542
ugauuaaauacuuacucgc

SEQ ID NO: 1240544 - RNA, 19 nt, Artificial Sequence
  Description of Artificial Sequence: Synthetic oligonucleotide
  Sense strand starting at position 3274 of SEQ ID NO: 917524
agauucuguucucccugau

SEQ ID NO: 1240545 - RNA, 19 nt, Artificial Sequence
  Description of Artificial Sequence: Synthetic oligonucleotide
  Antisense strand to SEQ ID NO: 1240544
aucagggagaacagaaucu

SEQ ID NO: 1240546 - RNA, 19 nt, Artificial Sequence
  Description of Artificial Sequence: Synthetic oligonucleotide
  Sense strand starting at position 3515 of SEQ ID NO: 917524
ggcugcuagaaaugaucuu

SEQ ID NO: 1240547 - RNA, 19 nt, Artificial Sequence
  Description of Artificial Sequence: Synthetic oligonucleotide
  Antisense strand to SEQ ID NO: 1240546
aagaucauuucuagcagcc

SEQ ID NO: 1240548 - RNA, 19 nt, Artificial Sequence
  Description of Artificial Sequence: Synthetic oligonucleotide
  Sense strand starting at position 3623 of SEQ ID NO: 917524
auagaaauugguugucuca

SEQ ID NO: 1240549 - RNA, 19 nt, Artificial Sequence
  Description of Artificial Sequence: Synthetic oligonucleotide
  Antisense strand to SEQ ID NO: 1240548
ugagacaaccaauuucuau

SEQ ID NO: 1240550 - RNA, 19 nt, Artificial Sequence
  Description of Artificial Sequence: Synthetic oligonucleotide
  Sense strand starting at position 3625 of SEQ ID NO: 917524
agaaauugguugucucaca

SEQ ID NO: 1240551 - RNA, 19 nt, Artificial Sequence
  Description of Artificial Sequence: Synthetic oligonucleotide
  Antisense strand to SEQ ID NO: 1240550
ugugagacaaccaauuucu

SEQ ID NO: 1240552 - RNA, 19 nt, Artificial Sequence
  Description of Artificial Sequence: Synthetic oligonucleotide
  Sense strand starting at position 3626 of SEQ ID NO: 917524
gaaauugguugucucacag

SEQ ID NO: 1240553 - RNA, 19 nt, Artificial Sequence
  Description of Artificial Sequence: Synthetic oligonucleotide
  Antisense strand to SEQ ID NO: 1240552
cugugagacaaccaauuuc

SEQ ID NO: 1240554 - RNA, 19 nt, Artificial Sequence
  Description of Artificial Sequence: Synthetic oligonucleotide
  Sense strand starting at position 3650 of SEQ ID NO: 917524
gaggguaggugucccaaau

SEQ ID NO: 1240555 - RNA, 19 nt, Artificial Sequence
  Description of Artificial Sequence: Synthetic oligonucleotide
  Antisense strand to SEQ ID NO: 1240554
auuugggacaccuacccuc

SEQ ID NO: 1240556 - RNA, 19 nt, Artificial Sequence
  Description of Artificial Sequence: Synthetic oligonucleotide
  Sense strand starting at position 3769 of SEQ ID NO: 917525
gguauuggaucauuagggu

SEQ ID NO: 1240557 - RNA, 19 nt, Artificial Sequence
  Description of Artificial Sequence: Synthetic oligonucleotide
  Antisense strand to SEQ ID NO: 1240556
acccuaaugauccaauacc

SEQ ID NO: 1240558 - RNA, 19 nt, Artificial Sequence
  Description of Artificial Sequence: Synthetic oligonucleotide
  Sense strand starting at position 31 of SEQ ID NO: 917525
guaucaucauaaguugaug

SEQ ID NO: 1240559 - RNA, 19 nt, Artificial Sequence
  Description of Artificial Sequence: Synthetic oligonucleotide
  Antisense strand to SEQ ID NO: 1240558
caucaacuuaugaugauac

SEQ ID NO: 1240560 - RNA, 19 nt, Artificial Sequence
  Description of Artificial Sequence: Synthetic oligonucleotide
  Sense strand starting at position 200 of SEQ ID NO: 917525
uuggaaauguauuccacaa

SEQ ID NO: 1240561 - RNA, 19 nt, Artificial Sequence
  Description of Artificial Sequence: Synthetic oligonucleotide
  Antisense strand to SEQ ID NO: 1240560
uuguggaauacauuuccaa

SEQ ID NO: 1240562 - RNA, 19 nt, Artificial Sequence
  Description of Artificial Sequence: Synthetic oligonucleotide
  Sense strand starting at position 242 of SEQ ID NO: 917525
cagggauagucgucccaaa

SEQ ID NO: 1240563 - RNA, 19 nt, Artificial Sequence
  Description of Artificial Sequence: Synthetic oligonucleotide
  Antisense strand to SEQ ID NO: 1240562
uuugggacgacuaucccug

SEQ ID NO: 1240564 - RNA, 19 nt, Artificial Sequence
  Description of Artificial Sequence: Synthetic oligonucleotide
  Sense strand starting at position 265 of SEQ ID NO: 917525
aacguucuauagguacaaa

SEQ ID NO: 1240565 - RNA, 19 nt, Artificial Sequence
  Description of Artificial Sequence: Synthetic oligonucleotide
  Antisense strand to SEQ ID NO: 1240564
uuuguaccuauagaacguu

SEQ ID NO: 1240566 - RNA, 19 nt, Artificial Sequence
  Description of Artificial Sequence: Synthetic oligonucleotide
  Sense strand starting at position 268 of SEQ ID NO: 917525
guucuauagguacaaagua

SEQ ID NO: 1240567 - RNA, 19 nt, Artificial Sequence
  Description of Artificial Sequence: Synthetic oligonucleotide
  Antisense strand to SEQ ID NO: 1240566
uacuuuguaccuauagaac

SEQ ID NO: 1240568 - RNA, 19 nt, Artificial Sequence
  Description of Artificial Sequence: Synthetic oligonucleotide
  Sense strand starting at position 373 of SEQ ID NO: 917525
ccaaauacuugguugaaag

SEQ ID NO: 1240569 - RNA, 19 nt, Artificial Sequence
  Description of Artificial Sequence: Synthetic oligonucleotide
  Antisense strand to SEQ ID NO: 1240568
cuuucaaccaaguauuugg

SEQ ID NO: 1240570 - RNA, 19 nt, Artificial Sequence
  Description of Artificial Sequence: Synthetic oligonucleotide
  Sense strand starting at position 383 of SEQ ID NO: 917525
gguugaaagcuguacaaau

SEQ ID NO: 1240571 - RNA, 19 nt, Artificial Sequence
  Description of Artificial Sequence: Synthetic oligonucleotide
  Antisense strand to SEQ ID NO: 1240570
auuuguacagcuuucaacc

SEQ ID NO: 1240572 - RNA, 19 nt, Artificial Sequence
  Description of Artificial Sequence: Synthetic oligonucleotide
  Sense strand starting at position 432 of SEQ ID NO: 917525
cuuucaagaguggguggua

SEQ ID NO: 1240573 - RNA, 19 nt, Artificial Sequence
  Description of Artificial Sequence: Synthetic oligonucleotide
  Antisense strand to SEQ ID NO: 1240572
uaccacccacucuugaaag

SEQ ID NO: 1240574 - RNA, 19 nt, Artificial Sequence
  Description of Artificial Sequence: Synthetic oligonucleotide
  Sense strand starting at position 441 of SEQ ID NO: 917525
gugggugguacagauucuu

SEQ ID NO: 1240575 - RNA, 19 nt, Artificial Sequence
  Description of Artificial Sequence: Synthetic oligonucleotide
  Antisense strand to SEQ ID NO: 1240574
aagaaucuguaccacccac

SEQ ID NO: 1240576 - RNA, 19 nt, Artificial Sequence
  Description of Artificial Sequence: Synthetic oligonucleotide
  Sense strand starting at position 446 of SEQ ID NO: 917525
ugguacagauucuucucau

SEQ ID NO: 1240577 - RNA, 19 nt, Artificial Sequence
  Description of Artificial Sequence: Synthetic oligonucleotide
  Antisense strand to SEQ ID NO: 1240576
augagaagaaucuguacca

SEQ ID NO: 1240578 - RNA, 19 nt, Artificial Sequence
  Description of Artificial Sequence: Synthetic oligonucleotide
  Sense strand starting at position 447 of SEQ ID NO: 917525
gguacagauucuucucauu

SEQ ID NO: 1240579 - RNA, 19 nt, Artificial Sequence
  Description of Artificial Sequence: Synthetic oligonucleotide
  Antisense strand to SEQ ID NO: 1240578
aaugagaagaaucuguacc

SEQ ID NO: 1240580 - RNA, 19 nt, Artificial Sequence
  Description of Artificial Sequence: Synthetic oligonucleotide
  Sense strand starting at position 638 of SEQ ID NO: 917525
gcagcagauguauacagaa

SEQ ID NO: 1240581 - RNA, 19 nt, Artificial Sequence
  Description of Artificial Sequence: Synthetic oligonucleotide
  Antisense strand to SEQ ID NO: 1240580
uucuguauacaucugcugc

SEQ ID NO: 1240582 - RNA, 19 nt, Artificial Sequence
  Description of Artificial Sequence: Synthetic oligonucleotide
  Sense strand starting at position 738 of SEQ ID NO: 917525
uggagaaauugcccaauau

SEQ ID NO: 1240583 - RNA, 19 nt, Artificial Sequence
  Description of Artificial Sequence: Synthetic oligonucleotide
  Antisense strand to SEQ ID NO: 1240582
auauugggcaauuucucca

SEQ ID NO: 1240584 - RNA, 19 nt, Artificial Sequence
  Description of Artificial Sequence: Synthetic oligonucleotide
  Sense strand starting at position 844 of SEQ ID NO: 917525
uagguuaaauccuugaagu

SEQ ID NO: 1240585 - RNA, 19 nt, Artificial Sequence
  Description of Artificial Sequence: Synthetic oligonucleotide
  Antisense strand to SEQ ID NO: 1240584
acuucaaggauuuaaccua

SEQ ID NO: 1240586 - RNA, 19 nt, Artificial Sequence
  Description of Artificial Sequence: Synthetic oligonucleotide
  Sense strand starting at position 845 of SEQ ID NO: 917525
agguuaaauccuugaagua

SEQ ID NO: 1240587 - RNA, 19 nt, Artificial Sequence
  Description of Artificial Sequence: Synthetic oligonucleotide
  Antisense strand to SEQ ID NO: 1240586
uacuucaaggauuuaaccu

SEQ ID NO: 1240588 - RNA, 19 nt, Artificial Sequence
  Description of Artificial Sequence: Synthetic oligonucleotide
  Sense strand starting at position 846 of SEQ ID NO: 917525
gguuaaauccuugaaguau

SEQ ID NO: 1240589 - RNA, 19 nt, Artificial Sequence
  Description of Artificial Sequence: Synthetic oligonucleotide
  Antisense strand to SEQ ID NO: 1240588
auacuucaaggauuuaacc

SEQ ID NO: 1240590 - RNA, 19 nt, Artificial Sequence
  Description of Artificial Sequence: Synthetic oligonucleotide
  Sense strand starting at position 1374 of SEQ ID NO: 917525
cguuccuucccagaaggau

SEQ ID NO: 1240591 - RNA, 19 nt, Artificial Sequence
  Description of Artificial Sequence: Synthetic oligonucleotide
  Antisense strand to SEQ ID NO: 1240590
auccuucugggaaggaacg

SEQ ID NO: 1240592 - RNA, 19 nt, Artificial Sequence
  Description of Artificial Sequence: Synthetic oligonucleotide
  Sense strand starting at position 1918 of SEQ ID NO: 917525
gcaggacuugugggagcaa

SEQ ID NO: 1240593 - RNA, 19 nt, Artificial Sequence
  Description of Artificial Sequence: Synthetic oligonucleotide
  Antisense strand to SEQ ID NO: 1240592
uugcucccacaaguccugc

SEQ ID NO: 1240594 - RNA, 19 nt, Artificial Sequence
  Description of Artificial Sequence: Synthetic oligonucleotide
  Sense strand starting at position 2290 of SEQ ID NO: 917525
uggaaaugauuccuuagcu

SEQ ID NO: 1240595 - RNA, 19 nt, Artificial Sequence
  Description of Artificial Sequence: Synthetic oligonucleotide
  Antisense strand to SEQ ID NO: 1240594
agcuaaggaaucauuucca

SEQ ID NO: 1240596 - RNA, 19 nt, Artificial Sequence
  Description of Artificial Sequence: Synthetic oligonucleotide
  Sense strand starting at position 2291 of SEQ ID NO: 917525
ggaaaugauuccuuagcug

SEQ ID NO: 1240597 - RNA, 19 nt, Artificial Sequence
  Description of Artificial Sequence: Synthetic oligonucleotide
  Antisense strand to SEQ ID NO: 1240596
cagcuaaggaaucauuucc

SEQ ID NO: 1240598 - RNA, 19 nt, Artificial Sequence
  Description of Artificial Sequence: Synthetic oligonucleotide
  Sense strand starting at position 2324 of SEQ ID NO: 917525
gcccucucuguguacagaa

SEQ ID NO: 1240599 - RNA, 19 nt, Artificial Sequence
  Description of Artificial Sequence: Synthetic oligonucleotide
  Antisense strand to SEQ ID NO: 1240598
uucuguacacagagagggc

SEQ ID NO: 1240600 - RNA, 19 nt, Artificial Sequence
  Description of Artificial Sequence: Synthetic oligonucleotide
  Sense strand starting at position 2426 of SEQ ID NO: 917525
aagaaugcacauuguuaga

SEQ ID NO: 1240601 - RNA, 19 nt, Artificial Sequence
  Description of Artificial Sequence: Synthetic oligonucleotide
  Antisense strand to SEQ ID NO: 1240600
ucuaacaaugugcauucuu

SEQ ID NO: 1240602 - RNA, 19 nt, Artificial Sequence
  Description of Artificial Sequence: Synthetic oligonucleotide
  Sense strand starting at position 2428 of SEQ ID NO: 917525
gaaugcacauuguuagaag

SEQ ID NO: 1240603 - RNA, 19 nt, Artificial Sequence
  Description of Artificial Sequence: Synthetic oligonucleotide
  Antisense strand to SEQ ID NO: 1240602
cuucuaacaaugugcauuc

SEQ ID NO: 1240604 - RNA, 19 nt, Artificial Sequence
  Description of Artificial Sequence: Synthetic oligonucleotide
  Sense strand starting at position 2509 of SEQ ID NO: 917525
aacgguagauaccuguaau

SEQ ID NO: 1240605 - RNA, 19 nt, Artificial Sequence
  Description of Artificial Sequence: Synthetic oligonucleotide
  Antisense strand to SEQ ID NO: 1240604
auuacagguaucuaccguu

SEQ ID NO: 1240606 - RNA, 19 nt, Artificial Sequence
  Description of Artificial Sequence: Synthetic oligonucleotide
  Sense strand starting at position 2510 of SEQ ID NO: 917525
acgguagauaccuguaauu

SEQ ID NO: 1240607 - RNA, 19 nt, Artificial Sequence
  Description of Artificial Sequence: Synthetic oligonucleotide
  Antisense strand to SEQ ID NO: 1240606
aauuacagguaucuaccgu

SEQ ID NO: 1240608 - RNA, 19 nt, Artificial Sequence
  Description of Artificial Sequence: Synthetic oligonucleotide
  Sense strand starting at position 2545 of SEQ ID NO: 917525
uaggguccaucaguuugau

SEQ ID NO: 1240609 - RNA, 19 nt, Artificial Sequence
  Description of Artificial Sequence: Synthetic oligonucleotide
  Antisense strand to SEQ ID NO: 1240608
aucaaacugauggacccua

SEQ ID NO: 1240610 - RNA, 19 nt, Artificial Sequence
  Description of Artificial Sequence: Synthetic oligonucleotide
  Sense strand starting at position 2558 of SEQ ID NO: 917525
uuugauucguaacccaaau

SEQ ID NO: 1240611 - RNA, 19 nt, Artificial Sequence
  Description of Artificial Sequence: Synthetic oligonucleotide
  Antisense strand to SEQ ID NO: 1240610
auuuggguuacgaaucaaa

SEQ ID NO: 1240612 - RNA, 19 nt, Artificial Sequence
  Description of Artificial Sequence: Synthetic oligonucleotide
  Sense strand starting at position 2670 of SEQ ID NO: 917525
agagguugcuaagcaauga

SEQ ID NO: 1240613 - RNA, 19 nt, Artificial Sequence
  Description of Artificial Sequence: Synthetic oligonucleotide
  Antisense strand to SEQ ID NO: 1240612
ucauugcuuagcaaccucu

SEQ ID NO: 1240614 - RNA, 19 nt, Artificial Sequence
  Description of Artificial Sequence: Synthetic oligonucleotide
  Sense strand starting at position 2706 of SEQ ID NO: 917525
ccagaagcaucacugugaa

SEQ ID NO: 1240615 - RNA, 19 nt, Artificial Sequence
  Description of Artificial Sequence: Synthetic oligonucleotide
  Antisense strand to SEQ ID NO: 1240614
uucacagugaugcuucugg

SEQ ID NO: 1240616 - RNA, 19 nt, Artificial Sequence
  Description of Artificial Sequence: Synthetic oligonucleotide
  Sense strand starting at position 2709 of SEQ ID NO: 917525
gaagcaucacugugaagac

SEQ ID NO: 1240617 - RNA, 19 nt, Artificial Sequence
  Description of Artificial Sequence: Synthetic oligonucleotide
  Antisense strand to SEQ ID NO: 1240616
gucuucacagugaugcuuc

SEQ ID NO: 1240618 - RNA, 19 nt, Artificial Sequence
  Description of Artificial Sequence: Synthetic oligonucleotide
  Sense strand starting at position 3193 of SEQ ID NO: 917525
ugcugugucagagaaaugu

SEQ ID NO: 1240619 - RNA, 19 nt, Artificial Sequence
  Description of Artificial Sequence: Synthetic oligonucleotide
  Antisense strand to SEQ ID NO: 1240618
acauuucucugacacagca

SEQ ID NO: 1240620 - RNA, 19 nt, Artificial Sequence
  Description of Artificial Sequence: Synthetic oligonucleotide
  Sense strand starting at position 3197 of SEQ ID NO: 917525
gugucagagaaauguagua

SEQ ID NO: 1240621 - RNA, 19 nt, Artificial Sequence
  Description of Artificial Sequence: Synthetic oligonucleotide
  Antisense strand to SEQ ID NO: 1240620
uacuacauuucucugacac

SEQ ID NO: 1240622 - RNA, 19 nt, Artificial Sequence
  Description of Artificial Sequence: Synthetic oligonucleotide
  Sense strand starting at position 3219 of SEQ ID NO: 917525
gcgaguaaguauuuaauca

SEQ ID NO: 1240623 - RNA, 19 nt, Artificial Sequence
  Description of Artificial Sequence: Synthetic oligonucleotide
  Antisense strand to SEQ ID NO: 1240622
ugauuaaauacuuacucgc

SEQ ID NO: 1240624 - RNA, 19 nt, Artificial Sequence
  Description of Artificial Sequence: Synthetic oligonucleotide
  Sense strand starting at position 3275 of SEQ ID NO: 917525
agauucuguucucccugau

SEQ ID NO: 1240625 - RNA, 19 nt, Artificial Sequence
  Description of Artificial Sequence: Synthetic oligonucleotide
  Antisense strand to SEQ ID NO: 1240624
aucagggagaacagaaucu

SEQ ID NO: 1240626 - RNA, 19 nt, Artificial Sequence
  Description of Artificial Sequence: Synthetic oligonucleotide
  Sense strand starting at position 3516 of SEQ ID NO: 917525
ggcugcuagaaaugaucuu

SEQ ID NO: 1240627 - RNA, 19 nt, Artificial Sequence
  Description of Artificial Sequence: Synthetic oligonucleotide
  Antisense strand to SEQ ID NO: 1240626
aagaucauuucuagcagcc

SEQ ID NO: 1240628 - RNA, 19 nt, Artificial Sequence
  Description of Artificial Sequence: Synthetic oligonucleotide
  Sense strand starting at position 3624 of SEQ ID NO: 917525
auagaaauugguugucuca

SEQ ID NO: 1240629 - RNA, 19 nt, Artificial Sequence
  Description of Artificial Sequence: Synthetic oligonucleotide
  Antisense strand to SEQ ID NO: 1240628
ugagacaaccaauuucuau

SEQ ID NO: 1240630 - RNA, 19 nt, Artificial Sequence
  Description of Artificial Sequence: Synthetic oligonucleotide
  Sense strand starting at position 3626 of SEQ ID NO: 917525
agaaauugguugucucaca

SEQ ID NO: 1240631 - RNA, 19 nt, Artificial Sequence
  Description of Artificial Sequence: Synthetic oligonucleotide
  Antisense strand to SEQ ID NO: 1240630
ugugagacaaccaauuucu

SEQ ID NO: 1240632 - RNA, 19 nt, Artificial Sequence
  Description of Artificial Sequence: Synthetic oligonucleotide
  Sense strand starting at position 3627 of SEQ ID NO: 917525
gaaauugguugucucacag

SEQ ID NO: 1240633 - RNA, 19 nt, Artificial Sequence
  Description of Artificial Sequence: Synthetic oligonucleotide
  Antisense strand to SEQ ID NO: 1240632
cugugagacaaccaauuuc

SEQ ID NO: 1240634 - RNA, 19 nt, Artificial Sequence
  Description of Artificial Sequence: Synthetic oligonucleotide
  Sense strand starting at position 3651 of SEQ ID NO: 917525
gaggguaggugucccaaau

SEQ ID NO: 1240635 - RNA, 19 nt, Artificial Sequence
  Description of Artificial Sequence: Synthetic oligonucleotide
  Antisense strand to SEQ ID NO: 1240634
auuugggacaccuacccuc

SEQ ID NO: 1240636 - RNA, 19 nt, Artificial Sequence
  Description of Artificial Sequence: Synthetic oligonucleotide
  Sense strand starting at position 3770 of SEQ ID NO: 917526
gguauuggaucauuagggu

SEQ ID NO: 1240637 - RNA, 19 nt, Artificial Sequence
  Description of Artificial Sequence: Synthetic oligonucleotide
  Antisense strand to SEQ ID NO: 1240636
acccuaaugauccaauacc

SEQ ID NO: 1240638 - RNA, 19 nt, Artificial Sequence
  Description of Artificial Sequence: Synthetic oligonucleotide
  Sense strand starting at position 16 of SEQ ID NO: 917526
cucuguggugcccauuaga

SEQ ID NO: 1240639 - RNA, 19 nt, Artificial Sequence
  Description of Artificial Sequence: Synthetic oligonucleotide
  Antisense strand to SEQ ID NO: 1240638
ucuaaugggcaccacagag

SEQ ID NO: 1240640 - RNA, 19 nt, Artificial Sequence
  Description of Artificial Sequence: Synthetic oligonucleotide
  Sense strand starting at position 19 of SEQ ID NO: 917526
uguggugcccauuagagaa

SEQ ID NO: 1240641 - RNA, 19 nt, Artificial Sequence
  Description of Artificial Sequence: Synthetic oligonucleotide
  Antisense strand to SEQ ID NO: 1240640
uucucuaaugggcaccaca

SEQ ID NO: 1240642 - RNA, 19 nt, Artificial Sequence
  Description of Artificial Sequence: Synthetic oligonucleotide
  Sense strand starting at position 300 of SEQ ID NO: 917526
caccgaauuagcgagcagu

SEQ ID NO: 1240643 - RNA, 19 nt, Artificial Sequence
  Description of Artificial Sequence: Synthetic oligonucleotide
  Antisense strand to SEQ ID NO: 1240642
acugcucgcuaauucggug

SEQ ID NO: 1240644 - RNA, 19 nt, Artificial Sequence
  Description of Artificial Sequence: Synthetic oligonucleotide
  Sense strand starting at position 396 of SEQ ID NO: 917526
uacauuugaugugaggcua

SEQ ID NO: 1240645 - RNA, 19 nt, Artificial Sequence
  Description of Artificial Sequence: Synthetic oligonucleotide
  Antisense strand to SEQ ID NO: 1240644
uagccucacaucaaaugua

SEQ ID NO: 1240646 - RNA, 19 nt, Artificial Sequence
  Description of Artificial Sequence: Synthetic oligonucleotide
  Sense strand starting at position 455 of SEQ ID NO: 917526
ccaauaauauugucaucgu

SEQ ID NO: 1240647 - RNA, 19 nt, Artificial Sequence
  Description of Artificial Sequence: Synthetic oligonucleotide
  Antisense strand to SEQ ID NO: 1240646
acgaugacaauauuauugg

SEQ ID NO: 1240648 - RNA, 19 nt, Artificial Sequence
  Description of Artificial Sequence: Synthetic oligonucleotide
  Sense strand starting at position 458 of SEQ ID NO: 917526
auaauauugucaucgucca

SEQ ID NO: 1240649 - RNA, 19 nt, Artificial Sequence
  Description of Artificial Sequence: Synthetic oligonucleotide
  Antisense strand to SEQ ID NO: 1240648
uggacgaugacaauauuau

SEQ ID NO: 1240650 - RNA, 19 nt, Artificial Sequence
  Description of Artificial Sequence: Synthetic oligonucleotide
  Sense strand starting at position 463 of SEQ ID NO: 917526
auugucaucguccaacaga

SEQ ID NO: 1240651 - RNA, 19 nt, Artificial Sequence
  Description of Artificial Sequence: Synthetic oligonucleotide
  Antisense strand to SEQ ID NO: 1240650
ucuguuggacgaugacaau

SEQ ID NO: 1240652 - RNA, 19 nt, Artificial Sequence
  Description of Artificial Sequence: Synthetic oligonucleotide
  Sense strand starting at position 493 of SEQ ID NO: 917526
ggcucuuucguacacgcaa

SEQ ID NO: 1240653 - RNA, 19 nt, Artificial Sequence
  Description of Artificial Sequence: Synthetic oligonucleotide
  Antisense strand to SEQ ID NO: 1240652
uugcguguacgaaagagcc

SEQ ID NO: 1240654 - RNA, 19 nt, Artificial Sequence
  Description of Artificial Sequence: Synthetic oligonucleotide
  Sense strand starting at position 2000 of SEQ ID NO: 917526
ggagaaccaaaguguauua

SEQ ID NO: 1240655 - RNA, 19 nt, Artificial Sequence
  Description of Artificial Sequence: Synthetic oligonucleotide
  Antisense strand to SEQ ID NO: 1240654
uaauacacuuugguucucc

SEQ ID NO: 1240656 - RNA, 19 nt, Artificial Sequence
  Description of Artificial Sequence: Synthetic oligonucleotide
  Sense strand starting at position 2005 of SEQ ID NO: 917526
accaaaguguauuaaagga

SEQ ID NO: 1240657 - RNA, 19 nt, Artificial Sequence
  Description of Artificial Sequence: Synthetic oligonucleotide
  Antisense strand to SEQ ID NO: 1240656
uccuuuaauacacuuuggu

SEQ ID NO: 1240658 - RNA, 19 nt, Artificial Sequence
  Description of Artificial Sequence: Synthetic oligonucleotide
  Sense strand starting at position 2521 of SEQ ID NO: 917526
cugcgccucgcguaguaaa

SEQ ID NO: 1240659 - RNA, 19 nt, Artificial Sequence
  Description of Artificial Sequence: Synthetic oligonucleotide
  Antisense strand to SEQ ID NO: 1240658
uuuacuacgcgaggcgcag

SEQ ID NO: 1240660 - RNA, 19 nt, Artificial Sequence
  Description of Artificial Sequence: Synthetic oligonucleotide
  Sense strand starting at position 3380 of SEQ ID NO: 917526
gcuccagucuuucugcgua

SEQ ID NO: 1240661 - RNA, 19 nt, Artificial Sequence
  Description of Artificial Sequence: Synthetic oligonucleotide
  Antisense strand to SEQ ID NO: 1240660
uacgcagaaagacuggagc

SEQ ID NO: 1240662 - RNA, 19 nt, Artificial Sequence
  Description of Artificial Sequence: Synthetic oligonucleotide
  Sense strand starting at position 3635 of SEQ ID NO: 917526
guaaacuugcucuguggca

SEQ ID NO: 1240663 - RNA, 19 nt, Artificial Sequence
  Description of Artificial Sequence: Synthetic oligonucleotide
  Antisense strand to SEQ ID NO: 1240662
ugccacagagcaaguuuac

SEQ ID NO: 1240664 - RNA, 19 nt, Artificial Sequence
  Description of Artificial Sequence: Synthetic oligonucleotide
  Sense strand starting at position 3636 of SEQ ID NO: 917526
uaaacuugcucuguggcau

SEQ ID NO: 1240665 - RNA, 19 nt, Artificial Sequence
  Description of Artificial Sequence: Synthetic oligonucleotide
  Antisense strand to SEQ ID NO: 1240664
augccacagagcaaguuua

SEQ ID NO: 1240666 - RNA, 19 nt, Artificial Sequence
  Description of Artificial Sequence: Synthetic oligonucleotide
  Sense strand starting at position 3637 of SEQ ID NO: 917526
aaacuugcucuguggcauu

SEQ ID NO: 1240667 - RNA, 19 nt, Artificial Sequence
  Description of Artificial Sequence: Synthetic oligonucleotide
  Antisense strand to SEQ ID NO: 1240666
aaugccacagagcaaguuu

SEQ ID NO: 1240668 - RNA, 19 nt, Artificial Sequence
  Description of Artificial Sequence: Synthetic oligonucleotide
  Sense strand starting at position 3640 of SEQ ID NO: 917526
cuugcucuguggcauugaa

SEQ ID NO: 1240669 - RNA, 19 nt, Artificial Sequence
  Description of Artificial Sequence: Synthetic oligonucleotide
  Antisense strand to SEQ ID NO: 1240668
uucaaugccacagagcaag

SEQ ID NO: 1240670 - RNA, 19 nt, Artificial Sequence
  Description of Artificial Sequence: Synthetic oligonucleotide
  Sense strand starting at position 3805 of SEQ ID NO: 917526
gcguccugcuccguuuaca

SEQ ID NO: 1240671 - RNA, 19 nt, Artificial Sequence
  Description of Artificial Sequence: Synthetic oligonucleotide
  Antisense strand to SEQ ID NO: 1240670
uguaaacggagcaggacgc

SEQ ID NO: 1240672 - RNA, 19 nt, Artificial Sequence
  Description of Artificial Sequence: Synthetic oligonucleotide
  Sense strand starting at position 3813 of SEQ ID NO: 917526
cuccguuuacagcaguaaa

SEQ ID NO: 1240673 - RNA, 19 nt, Artificial Sequence
  Description of Artificial Sequence: Synthetic oligonucleotide
  Antisense strand to SEQ ID NO: 1240672
uuuacugcuguaaacggag

SEQ ID NO: 1240674 - RNA, 19 nt, Artificial Sequence
  Description of Artificial Sequence: Synthetic oligonucleotide
  Sense strand starting at position 3861 of SEQ ID NO: 917526
gguuguucggaagucguuu

SEQ ID NO: 1240675 - RNA, 19 nt, Artificial Sequence
  Description of Artificial Sequence: Synthetic oligonucleotide
  Antisense strand to SEQ ID NO: 1240674
aaacgacuuccgaacaacc

SEQ ID NO: 1240676 - RNA, 19 nt, Artificial Sequence
  Description of Artificial Sequence: Synthetic oligonucleotide
  Sense strand starting at position 3862 of SEQ ID NO: 917526
guuguucggaagucguuua

SEQ ID NO: 1240677 - RNA, 19 nt, Artificial Sequence
  Description of Artificial Sequence: Synthetic oligonucleotide
  Antisense strand to SEQ ID NO: 1240676
uaaacgacuuccgaacaac

SEQ ID NO: 1240678 - RNA, 19 nt, Artificial Sequence
  Description of Artificial Sequence: Synthetic oligonucleotide
  Sense strand starting at position 3863 of SEQ ID NO: 917526
uuguucggaagucguuuaa

SEQ ID NO: 1240679 - RNA, 19 nt, Artificial Sequence
  Description of Artificial Sequence: Synthetic oligonucleotide
  Antisense strand to SEQ ID NO: 1240678
uuaaacgacuuccgaacaa

SEQ ID NO: 1240680 - RNA, 19 nt, Artificial Sequence
  Description of Artificial Sequence: Synthetic oligonucleotide
  Sense strand starting at position 3867 of SEQ ID NO: 917526
ucggaagucguuuaaagac

SEQ ID NO: 1240681 - RNA, 19 nt, Artificial Sequence
  Description of Artificial Sequence: Synthetic oligonucleotide
  Antisense strand to SEQ ID NO: 1240680
gucuuuaaacgacuuccga

SEQ ID NO: 1240682 - RNA, 19 nt, Artificial Sequence
  Description of Artificial Sequence: Synthetic oligonucleotide
  Sense strand starting at position 3887 of SEQ ID NO: 917526
gugucacccucaggguaaa

SEQ ID NO: 1240683 - RNA, 19 nt, Artificial Sequence
  Description of Artificial Sequence: Synthetic oligonucleotide
  Antisense strand to SEQ ID NO: 1240682
uuuacccugagggugacac

SEQ ID NO: 1240684 - RNA, 19 nt, Artificial Sequence
  Description of Artificial Sequence: Synthetic oligonucleotide
  Sense strand starting at position 3923 of SEQ ID NO: 917526
gcgcauccuugggcugaga

SEQ ID NO: 1240685 - RNA, 19 nt, Artificial Sequence
  Description of Artificial Sequence: Synthetic oligonucleotide
  Antisense strand to SEQ ID NO: 1240684
ucucagcccaaggaugcgc

SEQ ID NO: 1240686 - RNA, 19 nt, Artificial Sequence
  Description of Artificial Sequence: Synthetic oligonucleotide
  Sense strand starting at position 3925 of SEQ ID NO: 917526
gcauccuugggcugagaag

SEQ ID NO: 1240687 - RNA, 19 nt, Artificial Sequence
  Description of Artificial Sequence: Synthetic oligonucleotide
  Antisense strand to SEQ ID NO: 1240686
cuucucagcccaaggaugc

SEQ ID NO: 1240688 - RNA, 19 nt, Artificial Sequence
  Description of Artificial Sequence: Synthetic oligonucleotide
  Sense strand starting at position 3926 of SEQ ID NO: 917527
cauccuugggcugagaagu

SEQ ID NO: 1240689 - RNA, 19 nt, Artificial Sequence
  Description of Artificial Sequence: Synthetic oligonucleotide
  Antisense strand to SEQ ID NO: 1240688
acuucucagcccaaggaug

SEQ ID NO: 1240690 - RNA, 19 nt, Artificial Sequence
  Description of Artificial Sequence: Synthetic oligonucleotide
  Sense strand starting at position 311 of SEQ ID NO: 917527
gguugaugagcuuguauuu

SEQ ID NO: 1240691 - RNA, 19 nt, Artificial Sequence
  Description of Artificial Sequence: Synthetic oligonucleotide
  Antisense strand to SEQ ID NO: 1240690
aaauacaagcucaucaacc

SEQ ID NO: 1240692 - RNA, 19 nt, Artificial Sequence
  Description of Artificial Sequence: Synthetic oligonucleotide
  Sense strand starting at position 320 of SEQ ID NO: 917527
gcuuguauuuggccuugaa

SEQ ID NO: 1240693 - RNA, 19 nt, Artificial Sequence
  Description of Artificial Sequence: Synthetic oligonucleotide
  Antisense strand to SEQ ID NO: 1240692
uucaaggccaaauacaagc

SEQ ID NO: 1240694 - RNA, 19 nt, Artificial Sequence
  Description of Artificial Sequence: Synthetic oligonucleotide
  Sense strand starting at position 572 of SEQ ID NO: 917527
gcuugauuggcugccgcau

SEQ ID NO: 1240695 - RNA, 19 nt, Artificial Sequence
  Description of Artificial Sequence: Synthetic oligonucleotide
  Antisense strand to SEQ ID NO: 1240694
augcggcagccaaucaagc

SEQ ID NO: 1240696 - RNA, 19 nt, Artificial Sequence
  Description of Artificial Sequence: Synthetic oligonucleotide
  Sense strand starting at position 1828 of SEQ ID NO: 917527
cagcgauuggcagagugaa

SEQ ID NO: 1240697 - RNA, 19 nt, Artificial Sequence
  Description of Artificial Sequence: Synthetic oligonucleotide
  Antisense strand to SEQ ID NO: 1240696
uucacucugccaaucgcug

SEQ ID NO: 1240698 - RNA, 19 nt, Artificial Sequence
  Description of Artificial Sequence: Synthetic oligonucleotide
  Sense strand starting at position 1914 of SEQ ID NO: 917527
gcgugauuggcaguagccu

SEQ ID NO: 1240699 - RNA, 19 nt, Artificial Sequence
  Description of Artificial Sequence: Synthetic oligonucleotide
  Antisense strand to SEQ ID NO: 1240698
aggcuacugccaaucacgc

SEQ ID NO: 1240700 - RNA, 19 nt, Artificial Sequence
  Description of Artificial Sequence: Synthetic oligonucleotide
  Sense strand starting at position 2069 of SEQ ID NO: 917527
guugcacuugcagaaaguu

SEQ ID NO: 1240701 - RNA, 19 nt, Artificial Sequence
  Description of Artificial Sequence: Synthetic oligonucleotide
  Antisense strand to SEQ ID NO: 1240700
aacuuucugcaagugcaac

SEQ ID NO: 1240702 - RNA, 19 nt, Artificial Sequence
  Description of Artificial Sequence: Synthetic oligonucleotide
  Sense strand starting at position 2345 of SEQ ID NO: 917527
accuguaguggugaugcua

SEQ ID NO: 1240703 - RNA, 19 nt, Artificial Sequence
  Description of Artificial Sequence: Synthetic oligonucleotide
  Antisense strand to SEQ ID NO: 1240702
uagcaucaccacuacaggu

SEQ ID NO: 1240704 - RNA, 19 nt, Artificial Sequence
  Description of Artificial Sequence: Synthetic oligonucleotide
  Sense strand starting at position 2360 of SEQ ID NO: 917527
gcuagaaacuucuuguuug

SEQ ID NO: 1240705 - RNA, 19 nt, Artificial Sequence
  Description of Artificial Sequence: Synthetic oligonucleotide
  Antisense strand to SEQ ID NO: 1240704
caaacaagaaguuucuagc

SEQ ID NO: 1240706 - RNA, 19 nt, Artificial Sequence
  Description of Artificial Sequence: Synthetic oligonucleotide
  Sense strand starting at position 2364 of SEQ ID NO: 917527
gaaacuucuuguuuggaca

SEQ ID NO: 1240707 - RNA, 19 nt, Artificial Sequence
  Description of Artificial Sequence: Synthetic oligonucleotide
  Antisense strand to SEQ ID NO: 1240706
uguccaaacaagaaguuuc

SEQ ID NO: 1240708 - RNA, 19 nt, Artificial Sequence
  Description of Artificial Sequence: Synthetic oligonucleotide
  Sense strand starting at position 2439 of SEQ ID NO: 917527
uaaagucuauugguugcaa

SEQ ID NO: 1240709 - RNA, 19 nt, Artificial Sequence
  Description of Artificial Sequence: Synthetic oligonucleotide
  Antisense strand to SEQ ID NO: 1240708
uugcaaccaauagacuuua

SEQ ID NO: 1240710 - RNA, 19 nt, Artificial Sequence
  Description of Artificial Sequence: Synthetic oligonucleotide
  Sense strand starting at position 2441 of SEQ ID NO: 917527
aagucuauugguugcaaga

SEQ ID NO: 1240711 - RNA, 19 nt, Artificial Sequence
  Description of Artificial Sequence: Synthetic oligonucleotide
  Antisense strand to SEQ ID NO: 1240710
ucuugcaaccaauagacuu

SEQ ID NO: 1240712 - RNA, 19 nt, Artificial Sequence
  Description of Artificial Sequence: Synthetic oligonucleotide
  Sense strand starting at position 2468 of SEQ ID NO: 917527
gugauuuggcuccgcgaaa

SEQ ID NO: 1240713 - RNA, 19 nt, Artificial Sequence
  Description of Artificial Sequence: Synthetic oligonucleotide
  Antisense strand to SEQ ID NO: 1240712
uuucgcggagccaaaucac

SEQ ID NO: 1240714 - RNA, 19 nt, Artificial Sequence
  Description of Artificial Sequence: Synthetic oligonucleotide
  Sense strand starting at position 2469 of SEQ ID NO: 917527
ugauuuggcuccgcgaaac

SEQ ID NO: 1240715 - RNA, 19 nt, Artificial Sequence
  Description of Artificial Sequence: Synthetic oligonucleotide
  Antisense strand to SEQ ID NO: 1240714
guuucgcggagccaaauca

SEQ ID NO: 1240716 - RNA, 19 nt, Artificial Sequence
  Description of Artificial Sequence: Synthetic oligonucleotide
  Sense strand starting at position 2580 of SEQ ID NO: 917527
ggaguuggauggaagugua

SEQ ID NO: 1240717 - RNA, 19 nt, Artificial Sequence
  Description of Artificial Sequence: Synthetic oligonucleotide
  Antisense strand to SEQ ID NO: 1240716
uacacuuccauccaacucc

SEQ ID NO: 1240718 - RNA, 19 nt, Artificial Sequence
  Description of Artificial Sequence: Synthetic oligonucleotide
  Sense strand starting at position 2583 of SEQ ID NO: 917527
guuggauggaaguguaauc

SEQ ID NO: 1240719 - RNA, 19 nt, Artificial Sequence
  Description of Artificial Sequence: Synthetic oligonucleotide
  Antisense strand to SEQ ID NO: 1240718
gauuacacuuccauccaac

SEQ ID NO: 1240720 - RNA, 19 nt, Artificial Sequence
  Description of Artificial Sequence: Synthetic oligonucleotide
  Sense strand starting at position 2588 of SEQ ID NO: 917527
auggaaguguaaucucacu

SEQ ID NO: 1240721 - RNA, 19 nt, Artificial Sequence
  Description of Artificial Sequence: Synthetic oligonucleotide
  Antisense strand to SEQ ID NO: 1240720
agugagauuacacuuccau

SEQ ID NO: 1240722 - RNA, 19 nt, Artificial Sequence
  Description of Artificial Sequence: Synthetic oligonucleotide
  Sense strand starting at position 2593 of SEQ ID NO: 917527
aguguaaucucacuacuca

SEQ ID NO: 1240723 - RNA, 19 nt, Artificial Sequence
  Description of Artificial Sequence: Synthetic oligonucleotide
  Antisense strand to SEQ ID NO: 1240722
ugaguagugagauuacacu

SEQ ID NO: 1240724 - RNA, 19 nt, Artificial Sequence
  Description of Artificial Sequence: Synthetic oligonucleotide
  Sense strand starting at position 2594 of SEQ ID NO: 917527
guguaaucucacuacucau

SEQ ID NO: 1240725 - RNA, 19 nt, Artificial Sequence
  Description of Artificial Sequence: Synthetic oligonucleotide
  Antisense strand to SEQ ID NO: 1240724
augaguagugagauuacac

SEQ ID NO: 1240726 - RNA, 19 nt, Artificial Sequence
  Description of Artificial Sequence: Synthetic oligonucleotide
  Sense strand starting at position 2726 of SEQ ID NO: 917527
ggcaucucugcagagagaa

SEQ ID NO: 1240727 - RNA, 19 nt, Artificial Sequence
  Description of Artificial Sequence: Synthetic oligonucleotide
  Antisense strand to SEQ ID NO: 1240726
uucucucugcagagaugcc

SEQ ID NO: 1240728 - RNA, 19 nt, Artificial Sequence
  Description of Artificial Sequence: Synthetic oligonucleotide
  Sense strand starting at position 2738 of SEQ ID NO: 917527
gagagaagccgcuaaauaa

SEQ ID NO: 1240729 - RNA, 19 nt, Artificial Sequence
  Description of Artificial Sequence: Synthetic oligonucleotide
  Antisense strand to SEQ ID NO: 1240728
uuauuuagcggcuucucuc

SEQ ID NO: 1240730 - RNA, 19 nt, Artificial Sequence
  Description of Artificial Sequence: Synthetic oligonucleotide
  Sense strand starting at position 2759 of SEQ ID NO: 917527
accguccuuuaaguagaau

SEQ ID NO: 1240731 - RNA, 19 nt, Artificial Sequence
  Description of Artificial Sequence: Synthetic oligonucleotide
  Antisense strand to SEQ ID NO: 1240730
auucuacuuaaaggacggu

SEQ ID NO: 1240732 - RNA, 19 nt, Artificial Sequence
  Description of Artificial Sequence: Synthetic oligonucleotide
  Sense strand starting at position 2772 of SEQ ID NO: 917527
uagaauuucuccuuccggu

SEQ ID NO: 1240733 - RNA, 19 nt, Artificial Sequence
  Description of Artificial Sequence: Synthetic oligonucleotide
  Antisense strand to SEQ ID NO: 1240732
accggaaggagaaauucua

SEQ ID NO: 1240734 - RNA, 19 nt, Artificial Sequence
  Description of Artificial Sequence: Synthetic oligonucleotide
  Sense strand starting at position 2801 of SEQ ID NO: 917527
guccacaguccacauguau

SEQ ID NO: 1240735 - RNA, 19 nt, Artificial Sequence
  Description of Artificial Sequence: Synthetic oligonucleotide
  Antisense strand to SEQ ID NO: 1240734
auacauguggacuguggac

SEQ ID NO: 1240736 - RNA, 19 nt, Artificial Sequence
  Description of Artificial Sequence: Synthetic oligonucleotide
  Sense strand starting at position 2825 of SEQ ID NO: 917527
aguuucuuugacugaucca

SEQ ID NO: 1240737 - RNA, 19 nt, Artificial Sequence
  Description of Artificial Sequence: Synthetic oligonucleotide
  Antisense strand to SEQ ID NO: 1240736
uggaucagucaaagaaacu

SEQ ID NO: 1240738 - RNA, 19 nt, Artificial Sequence
  Description of Artificial Sequence: Synthetic oligonucleotide
  Sense strand starting at position 2949 of SEQ ID NO: 917527
ccagucuaccucuaagaug

SEQ ID NO: 1240739 - RNA, 19 nt, Artificial Sequence
  Description of Artificial Sequence: Synthetic oligonucleotide
  Antisense strand to SEQ ID NO: 1240738
caucuuagagguagacugg

SEQ ID NO: 1240740 - RNA, 19 nt, Artificial Sequence
  Description of Artificial Sequence: Synthetic oligonucleotide
  Sense strand starting at position 3021 of SEQ ID NO: 917527
uccagagguuugguaucaa

SEQ ID NO: 1240741 - RNA, 19 nt, Artificial Sequence
  Description of Artificial Sequence: Synthetic oligonucleotide
  Antisense strand to SEQ ID NO: 1240740
uugauaccaaaccucugga

SEQ ID NO: 1240742 - RNA, 19 nt, Artificial Sequence
  Description of Artificial Sequence: Synthetic oligonucleotide
  Sense strand starting at position 3239 of SEQ ID NO: 917527
uccguaacauuacuuguaa

SEQ ID NO: 1240743 - RNA, 19 nt, Artificial Sequence
  Description of Artificial Sequence: Synthetic oligonucleotide
  Antisense strand to SEQ ID NO: 1240742
uuacaaguaauguuacgga

SEQ ID NO: 1240744 - RNA, 19 nt, Artificial Sequence
  Description of Artificial Sequence: Synthetic oligonucleotide
  Sense strand starting at position 3240 of SEQ ID NO: 917527
ccguaacauuacuuguaaa

SEQ ID NO: 1240745 - RNA, 19 nt, Artificial Sequence
  Description of Artificial Sequence: Synthetic oligonucleotide
  Antisense strand to SEQ ID NO: 1240744
uuuacaaguaauguuacgg

SEQ ID NO: 1240746 - RNA, 19 nt, Artificial Sequence
  Description of Artificial Sequence: Synthetic oligonucleotide
  Sense strand starting at position 3273 of SEQ ID NO: 917527
uaaugauuagaaugugauc

SEQ ID NO: 1240747 - RNA, 19 nt, Artificial Sequence
  Description of Artificial Sequence: Synthetic oligonucleotide
  Antisense strand to SEQ ID NO: 1240746
gaucacauucuaaucauua

SEQ ID NO: 1240748 - RNA, 19 nt, Artificial Sequence
  Description of Artificial Sequence: Synthetic oligonucleotide
  Sense strand starting at position 3438 of SEQ ID NO: 917527
uucacauuggugugaacga

SEQ ID NO: 1240749 - RNA, 19 nt, Artificial Sequence
  Description of Artificial Sequence: Synthetic oligonucleotide
  Antisense strand to SEQ ID NO: 1240748
ucguucacaccaaugugaa

SEQ ID NO: 1240750 - RNA, 19 nt, Artificial Sequence
  Description of Artificial Sequence: Synthetic oligonucleotide
  Sense strand starting at position 3443 of SEQ ID NO: 917527
auuggugugaacgauguuu

SEQ ID NO: 1240751 - RNA, 19 nt, Artificial Sequence
  Description of Artificial Sequence: Synthetic oligonucleotide
  Antisense strand to SEQ ID NO: 1240750
aaacaucguucacaccaau

SEQ ID NO: 1240752 - RNA, 19 nt, Artificial Sequence
  Description of Artificial Sequence: Synthetic oligonucleotide
  Sense strand starting at position 3480 of SEQ ID NO: 917527
gagacuuaggaaugucauu

SEQ ID NO: 1240753 - RNA, 19 nt, Artificial Sequence
  Description of Artificial Sequence: Synthetic oligonucleotide
  Antisense strand to SEQ ID NO: 1240752
aaugacauuccuaagucuc

SEQ ID NO: 1240754 - RNA, 19 nt, Artificial Sequence
  Description of Artificial Sequence: Synthetic oligonucleotide
  Sense strand starting at position 3590 of SEQ ID NO: 917527
gggaauuaaaggcaugugu

SEQ ID NO: 1240755 - RNA, 19 nt, Artificial Sequence
  Description of Artificial Sequence: Synthetic oligonucleotide
  Antisense strand to SEQ ID NO: 1240754
acacaugccuuuaauuccc

SEQ ID NO: 1240756 - RNA, 19 nt, Artificial Sequence
  Description of Artificial Sequence: Synthetic oligonucleotide
  Sense strand starting at position 3594 of SEQ ID NO: 917527
auuaaaggcauguguggaa

SEQ ID NO: 1240757 - RNA, 19 nt, Artificial Sequence
  Description of Artificial Sequence: Synthetic oligonucleotide
  Antisense strand to SEQ ID NO: 1240756
uuccacacaugccuuuaau

SEQ ID NO: 1240758 - RNA, 19 nt, Artificial Sequence
  Description of Artificial Sequence: Synthetic oligonucleotide
  Sense strand starting at position 3731 of SEQ ID NO: 917527
aagguugaucgagagcugu

SEQ ID NO: 1240759 - RNA, 19 nt, Artificial Sequence
  Description of Artificial Sequence: Synthetic oligonucleotide
  Antisense strand to SEQ ID NO: 1240758
acagcucucgaucaaccuu

SEQ ID NO: 1240760 - RNA, 19 nt, Artificial Sequence
  Description of Artificial Sequence: Synthetic oligonucleotide
  Sense strand starting at position 3746 of SEQ ID NO: 917527
cugugccaucucuauggau

SEQ ID NO: 1240761 - RNA, 19 nt, Artificial Sequence
  Description of Artificial Sequence: Synthetic oligonucleotide
  Antisense strand to SEQ ID NO: 1240760
auccauagagauggcacag

SEQ ID NO: 1240762 - RNA, 19 nt, Artificial Sequence
  Description of Artificial Sequence: Synthetic oligonucleotide
  Sense strand starting at position 3748 of SEQ ID NO: 917527
gugccaucucuauggauag

SEQ ID NO: 1240763 - RNA, 19 nt, Artificial Sequence
  Description of Artificial Sequence: Synthetic oligonucleotide
  Antisense strand to SEQ ID NO: 1240762
cuauccauagagauggcac

SEQ ID NO: 1240764 - RNA, 19 nt, Artificial Sequence
  Description of Artificial Sequence: Synthetic oligonucleotide
  Sense strand starting at position 3779 of SEQ ID NO: 917527
gcaucauauuuggaauuau

SEQ ID NO: 1240765 - RNA, 19 nt, Artificial Sequence
  Description of Artificial Sequence: Synthetic oligonucleotide
  Antisense strand to SEQ ID NO: 1240764
auaauuccaaauaugaugc

SEQ ID NO: 1240766 - RNA, 19 nt, Artificial Sequence
  Description of Artificial Sequence: Synthetic oligonucleotide
  Sense strand starting at position 3843 of SEQ ID NO: 917527
auuugaauuucuuggcaau

SEQ ID NO: 1240767 - RNA, 19 nt, Artificial Sequence
  Description of Artificial Sequence: Synthetic oligonucleotide
  Antisense strand to SEQ ID NO: 1240766
auugccaagaaauucaaau

SEQ ID NO: 1240768 - RNA, 19 nt, Artificial Sequence
  Description of Artificial Sequence: Synthetic oligonucleotide
  Sense strand starting at position 3856 of SEQ ID NO: 917528
ggcaauaagcauuaauucu

SEQ ID NO: 1240769 - RNA, 19 nt, Artificial Sequence
  Description of Artificial Sequence: Synthetic oligonucleotide
  Antisense strand to SEQ ID NO: 1240768
agaauuaaugcuuauugcc

SEQ ID NO: 1240770 - RNA, 19 nt, Artificial Sequence
  Description of Artificial Sequence: Synthetic oligonucleotide
  Sense strand starting at position 33 of SEQ ID NO: 917528
aaugaucguuaaguuaaag

SEQ ID NO: 1240771 - RNA, 19 nt, Artificial Sequence
  Description of Artificial Sequence: Synthetic oligonucleotide
  Antisense strand to SEQ ID NO: 1240770
cuuuaacuuaacgaucauu

SEQ ID NO: 1240772 - RNA, 19 nt, Artificial Sequence
  Description of Artificial Sequence: Synthetic oligonucleotide
  Sense strand starting at position 39 of SEQ ID NO: 917528
cguuaaguuaaagaugauc

SEQ ID NO: 1240773 - RNA, 19 nt, Artificial Sequence
  Description of Artificial Sequence: Synthetic oligonucleotide
  Antisense strand to SEQ ID NO: 1240772
gaucaucuuuaacuuaacg

SEQ ID NO: 1240774 - RNA, 19 nt, Artificial Sequence
  Description of Artificial Sequence: Synthetic oligonucleotide
  Sense strand starting at position 113 of SEQ ID NO: 917528
gcauacuacuuggugaaca

SEQ ID NO: 1240775 - RNA, 19 nt, Artificial Sequence
  Description of Artificial Sequence: Synthetic oligonucleotide
  Antisense strand to SEQ ID NO: 1240774
uguucaccaaguaguaugc

SEQ ID NO: 1240776 - RNA, 19 nt, Artificial Sequence
  Description of Artificial Sequence: Synthetic oligonucleotide
  Sense strand starting at position 126 of SEQ ID NO: 917528
ugaacaagauaguacuaga

SEQ ID NO: 1240777 - RNA, 19 nt, Artificial Sequence
  Description of Artificial Sequence: Synthetic oligonucleotide
  Antisense strand to SEQ ID NO: 1240776
ucuaguacuaucuuguuca

SEQ ID NO: 1240778 - RNA, 19 nt, Artificial Sequence
  Description of Artificial Sequence: Synthetic oligonucleotide
  Sense strand starting at position 129 of SEQ ID NO: 917528
acaagauaguacuagagga

SEQ ID NO: 1240779 - RNA, 19 nt, Artificial Sequence
  Description of Artificial Sequence: Synthetic oligonucleotide
  Antisense strand to SEQ ID NO: 1240778
uccucuaguacuaucuugu

SEQ ID NO: 1240780 - RNA, 19 nt, Artificial Sequence
  Description of Artificial Sequence: Synthetic oligonucleotide
  Sense strand starting at position 191 of SEQ ID NO: 917528
acucaugagccauaagugu

SEQ ID NO: 1240781 - RNA, 19 nt, Artificial Sequence
  Description of Artificial Sequence: Synthetic oligonucleotide
  Antisense strand to SEQ ID NO: 1240780
acacuuauggcucaugagu

SEQ ID NO: 1240782 - RNA, 19 nt, Artificial Sequence
  Description of Artificial Sequence: Synthetic oligonucleotide
  Sense strand starting at position 216 of SEQ ID NO: 917528
auguguuuccagcagacau

SEQ ID NO: 1240783 - RNA, 19 nt, Artificial Sequence
  Description of Artificial Sequence: Synthetic oligonucleotide
  Antisense strand to SEQ ID NO: 1240782
augucugcuggaaacacau

SEQ ID NO: 1240784 - RNA, 19 nt, Artificial Sequence
  Description of Artificial Sequence: Synthetic oligonucleotide
  Sense strand starting at position 218 of SEQ ID NO: 917528
guguuuccagcagacauaa

SEQ ID NO: 1240785 - RNA, 19 nt, Artificial Sequence
  Description of Artificial Sequence: Synthetic oligonucleotide
  Antisense strand to SEQ ID NO: 1240784
uuaugucugcuggaaacac

SEQ ID NO: 1240786 - RNA, 19 nt, Artificial Sequence
  Description of Artificial Sequence: Synthetic oligonucleotide
  Sense strand starting at position 284 of SEQ ID NO: 917528
uuagccauuguuuaaggaa

SEQ ID NO: 1240787 - RNA, 19 nt, Artificial Sequence
  Description of Artificial Sequence: Synthetic oligonucleotide
  Antisense strand to SEQ ID NO: 1240786
uuccuuaaacaauggcuaa

SEQ ID NO: 1240788 - RNA, 19 nt, Artificial Sequence
  Description of Artificial Sequence: Synthetic oligonucleotide
  Sense strand starting at position 287 of SEQ ID NO: 917528
gccauuguuuaaggaagaa

SEQ ID NO: 1240789 - RNA, 19 nt, Artificial Sequence
  Description of Artificial Sequence: Synthetic oligonucleotide
  Antisense strand to SEQ ID NO: 1240788
uucuuccuuaaacaauggc

SEQ ID NO: 1240790 - RNA, 19 nt, Artificial Sequence
  Description of Artificial Sequence: Synthetic oligonucleotide
  Sense strand starting at position 741 of SEQ ID NO: 917528
gauucuugguccugggaua

SEQ ID NO: 1240791 - RNA, 19 nt, Artificial Sequence
  Description of Artificial Sequence: Synthetic oligonucleotide
  Antisense strand to SEQ ID NO: 1240790
uaucccaggaccaagaauc

SEQ ID NO: 1240792 - RNA, 19 nt, Artificial Sequence
  Description of Artificial Sequence: Synthetic oligonucleotide
  Sense strand starting at position 857 of SEQ ID NO: 917528
gagguucgguccuucuauu

SEQ ID NO: 1240793 - RNA, 19 nt, Artificial Sequence
  Description of Artificial Sequence: Synthetic oligonucleotide
  Antisense strand to SEQ ID NO: 1240792
aauagaaggaccgaaccuc

SEQ ID NO: 1240794 - RNA, 19 nt, Artificial Sequence
  Description of Artificial Sequence: Synthetic oligonucleotide
  Sense strand starting at position 1154 of SEQ ID NO: 917528
gccgauaucgcccacauuu

SEQ ID NO: 1240795 - RNA, 19 nt, Artificial Sequence
  Description of Artificial Sequence: Synthetic oligonucleotide
  Antisense strand to SEQ ID NO: 1240794
aaaugugggcgauaucggc

SEQ ID NO: 1240796 - RNA, 19 nt, Artificial Sequence
  Description of Artificial Sequence: Synthetic oligonucleotide
  Sense strand starting at position 1706 of SEQ ID NO: 917528
guauuaaucccgggucggu

SEQ ID NO: 1240797 - RNA, 19 nt, Artificial Sequence
  Description of Artificial Sequence: Synthetic oligonucleotide
  Antisense strand to SEQ ID NO: 1240796
accgacccgggauuaauac

SEQ ID NO: 1240798 - RNA, 19 nt, Artificial Sequence
  Description of Artificial Sequence: Synthetic oligonucleotide
  Sense strand starting at position 2262 of SEQ ID NO: 917528
gggucaggagcccgagauu

SEQ ID NO: 1240799 - RNA, 19 nt, Artificial Sequence
  Description of Artificial Sequence: Synthetic oligonucleotide
  Antisense strand to SEQ ID NO: 1240798
aaucucgggcuccugaccc

SEQ ID NO: 1240800 - RNA, 19 nt, Artificial Sequence
  Description of Artificial Sequence: Synthetic oligonucleotide
  Sense strand starting at position 2727 of SEQ ID NO: 917528
ggaaacuuguccucgggaa

SEQ ID NO: 1240801 - RNA, 19 nt, Artificial Sequence
  Description of Artificial Sequence: Synthetic oligonucleotide
  Antisense strand to SEQ ID NO: 1240800
uucccgaggacaaguuucc

SEQ ID NO: 1240802 - RNA, 19 nt, Artificial Sequence
  Description of Artificial Sequence: Synthetic oligonucleotide
  Sense strand starting at position 2728 of SEQ ID NO: 917528
gaaacuuguccucgggaag

SEQ ID NO: 1240803 - RNA, 19 nt, Artificial Sequence
  Description of Artificial Sequence: Synthetic oligonucleotide
  Antisense strand to SEQ ID NO: 1240802
cuucccgaggacaaguuuc

SEQ ID NO: 1240804 - RNA, 19 nt, Artificial Sequence
  Description of Artificial Sequence: Synthetic oligonucleotide
  Sense strand starting at position 3031 of SEQ ID NO: 917528
guccucaaugguugaugga

SEQ ID NO: 1240805 - RNA, 19 nt, Artificial Sequence
  Description of Artificial Sequence: Synthetic oligonucleotide
  Antisense strand to SEQ ID NO: 1240804
uccaucaaccauugaggac

SEQ ID NO: 1240806 - RNA, 19 nt, Artificial Sequence
  Description of Artificial Sequence: Synthetic oligonucleotide
  Sense strand starting at position 3248 of SEQ ID NO: 917528
uuccaagacucacguaaag

SEQ ID NO: 1240807 - RNA, 19 nt, Artificial Sequence
  Description of Artificial Sequence: Synthetic oligonucleotide
  Antisense strand to SEQ ID NO: 1240806
cuuuacgugagucuuggaa

SEQ ID NO: 1240808 - RNA, 19 nt, Artificial Sequence
  Description of Artificial Sequence: Synthetic oligonucleotide
  Sense strand starting at position 3296 of SEQ ID NO: 917528
uggcgguucuuagugggau

SEQ ID NO: 1240809 - RNA, 19 nt, Artificial Sequence
  Description of Artificial Sequence: Synthetic oligonucleotide
  Antisense strand to SEQ ID NO: 1240808
aucccacuaagaaccgcca

SEQ ID NO: 1240810 - RNA, 19 nt, Artificial Sequence
  Description of Artificial Sequence: Synthetic oligonucleotide
  Sense strand starting at position 3297 of SEQ ID NO: 917528
ggcgguucuuagugggauu

SEQ ID NO: 1240811 - RNA, 19 nt, Artificial Sequence
  Description of Artificial Sequence: Synthetic oligonucleotide
  Antisense strand to SEQ ID NO: 1240810
aaucccacuaagaaccgcc

SEQ ID NO: 1240812 - RNA, 19 nt, Artificial Sequence
  Description of Artificial Sequence: Synthetic oligonucleotide
  Sense strand starting at position 3298 of SEQ ID NO: 917528
gcgguucuuagugggauua

SEQ ID NO: 1240813 - RNA, 19 nt, Artificial Sequence
  Description of Artificial Sequence: Synthetic oligonucleotide
  Antisense strand to SEQ ID NO: 1240812
uaaucccacuaagaaccgc

SEQ ID NO: 1240814 - RNA, 19 nt, Artificial Sequence
  Description of Artificial Sequence: Synthetic oligonucleotide
  Sense strand starting at position 3300 of SEQ ID NO: 917528
gguucuuagugggauuaca

SEQ ID NO: 1240815 - RNA, 19 nt, Artificial Sequence
  Description of Artificial Sequence: Synthetic oligonucleotide
  Antisense strand to SEQ ID NO: 1240814
uguaaucccacuaagaacc

SEQ ID NO: 1240816 - RNA, 19 nt, Artificial Sequence
  Description of Artificial Sequence: Synthetic oligonucleotide
  Sense strand starting at position 3312 of SEQ ID NO: 917528
gauuacaacugaggauguu

SEQ ID NO: 1240817 - RNA, 19 nt, Artificial Sequence
  Description of Artificial Sequence: Synthetic oligonucleotide
  Antisense strand to SEQ ID NO: 1240816
aacauccucaguuguaauc

SEQ ID NO: 1240818 - RNA, 19 nt, Artificial Sequence
  Description of Artificial Sequence: Synthetic oligonucleotide
  Sense strand starting at position 3318 of SEQ ID NO: 917528
aacugaggauguugguuau

SEQ ID NO: 1240819 - RNA, 19 nt, Artificial Sequence
  Description of Artificial Sequence: Synthetic oligonucleotide
  Antisense strand to SEQ ID NO: 1240818
auaaccaacauccucaguu

SEQ ID NO: 1240820 - RNA, 19 nt, Artificial Sequence
  Description of Artificial Sequence: Synthetic oligonucleotide
  Sense strand starting at position 3371 of SEQ ID NO: 917528
ucacgauuaucugacacca

SEQ ID NO: 1240821 - RNA, 19 nt, Artificial Sequence
  Description of Artificial Sequence: Synthetic oligonucleotide
  Antisense strand to SEQ ID NO: 1240820
uggugucagauaaucguga

SEQ ID NO: 1240822 - RNA, 19 nt, Artificial Sequence
  Description of Artificial Sequence: Synthetic oligonucleotide
  Sense strand starting at position 3373 of SEQ ID NO: 917528
acgauuaucugacaccauu

SEQ ID NO: 1240823 - RNA, 19 nt, Artificial Sequence
  Description of Artificial Sequence: Synthetic oligonucleotide
  Antisense strand to SEQ ID NO: 1240822
aauggugucagauaaucgu

SEQ ID NO: 1240824 - RNA, 19 nt, Artificial Sequence
  Description of Artificial Sequence: Synthetic oligonucleotide
  Sense strand starting at position 3463 of SEQ ID NO: 917528
ugagguuaaucacccguga

SEQ ID NO: 1240825 - RNA, 19 nt, Artificial Sequence
  Description of Artificial Sequence: Synthetic oligonucleotide
  Antisense strand to SEQ ID NO: 1240824
ucacgggugauuaaccuca

SEQ ID NO: 1240826 - RNA, 19 nt, Artificial Sequence
  Description of Artificial Sequence: Synthetic oligonucleotide
  Sense strand starting at position 3465 of SEQ ID NO: 917528
agguuaaucacccgugaaa

SEQ ID NO: 1240827 - RNA, 19 nt, Artificial Sequence
  Description of Artificial Sequence: Synthetic oligonucleotide
  Antisense strand to SEQ ID NO: 1240826
uuucacgggugauuaaccu

SEQ ID NO: 1240828 - RNA, 19 nt, Artificial Sequence
  Description of Artificial Sequence: Synthetic oligonucleotide
  Sense strand starting at position 3467 of SEQ ID NO: 917528
guuaaucacccgugaaaga

SEQ ID NO: 1240829 - RNA, 19 nt, Artificial Sequence
  Description of Artificial Sequence: Synthetic oligonucleotide
  Antisense strand to SEQ ID NO: 1240828
ucuuucacgggugauuaac

SEQ ID NO: 1240830 - RNA, 19 nt, Artificial Sequence
  Description of Artificial Sequence: Synthetic oligonucleotide
  Sense strand starting at position 3476 of SEQ ID NO: 917528
ccgugaaagacugaugugu

SEQ ID NO: 1240831 - RNA, 19 nt, Artificial Sequence
  Description of Artificial Sequence: Synthetic oligonucleotide
  Antisense strand to SEQ ID NO: 1240830
acacaucagucuuucacgg

SEQ ID NO: 1240832 - RNA, 19 nt, Artificial Sequence
  Description of Artificial Sequence: Synthetic oligonucleotide
  Sense strand starting at position 3481 of SEQ ID NO: 917528
aaagacugauguguaaacu

SEQ ID NO: 1240833 - RNA, 19 nt, Artificial Sequence
  Description of Artificial Sequence: Synthetic oligonucleotide
  Antisense strand to SEQ ID NO: 1240832
aguuuacacaucagucuuu

SEQ ID NO: 1240834 - RNA, 19 nt, Artificial Sequence
  Description of Artificial Sequence: Synthetic oligonucleotide
  Sense strand starting at position 3518 of SEQ ID NO: 917528
aggauaaucuaguagaagu

SEQ ID NO: 1240835 - RNA, 19 nt, Artificial Sequence
  Description of Artificial Sequence: Synthetic oligonucleotide
  Antisense strand to SEQ ID NO: 1240834
acuucuacuagauuauccu

SEQ ID NO: 1240836 - RNA, 19 nt, Artificial Sequence
  Description of Artificial Sequence: Synthetic oligonucleotide
  Sense strand starting at position 3574 of SEQ ID NO: 917528
ggcuuuccaccuuguacua

SEQ ID NO: 1240837 - RNA, 19 nt, Artificial Sequence
  Description of Artificial Sequence: Synthetic oligonucleotide
  Antisense strand to SEQ ID NO: 1240836
uaguacaagguggaaagcc

SEQ ID NO: 1240838 - RNA, 19 nt, Artificial Sequence
  Description of Artificial Sequence: Synthetic oligonucleotide
  Sense strand starting at position 3678 of SEQ ID NO: 917528
uuaggaaacuuuguaacua

SEQ ID NO: 1240839 - RNA, 19 nt, Artificial Sequence
  Description of Artificial Sequence: Synthetic oligonucleotide
  Antisense strand to SEQ ID NO: 1240838
uaguuacaaaguuuccuaa

SEQ ID NO: 1240840 - RNA, 19 nt, Artificial Sequence
  Description of Artificial Sequence: Synthetic oligonucleotide
  Sense strand starting at position 3955 of SEQ ID NO: 917528
ccaaauaagcucugugaua

SEQ ID NO: 1240841 - RNA, 19 nt, Artificial Sequence
  Description of Artificial Sequence: Synthetic oligonucleotide
  Antisense strand to SEQ ID NO: 1240840
uaucacagagcuuauuugg

SEQ ID NO: 1240842 - RNA, 19 nt, Artificial Sequence
  Description of Artificial Sequence: Synthetic oligonucleotide
  Sense strand starting at position 3960 of SEQ ID NO: 917528
uaagcucugugauaaauga

SEQ ID NO: 1240843 - RNA, 19 nt, Artificial Sequence
  Description of Artificial Sequence: Synthetic oligonucleotide
  Antisense strand to SEQ ID NO: 1240842
ucauuuaucacagagcuua

SEQ ID NO: 1240844 - RNA, 19 nt, Artificial Sequence
  Description of Artificial Sequence: Synthetic oligonucleotide
  Sense strand starting at position 3967 of SEQ ID NO: 917529
ugugauaaaugauagauug

SEQ ID NO: 1240845 - RNA, 19 nt, Artificial Sequence
  Description of Artificial Sequence: Synthetic oligonucleotide
  Antisense strand to SEQ ID NO: 1240844
caaucuaucauuuaucaca

SEQ ID NO: 1240846 - RNA, 19 nt, Artificial Sequence
  Description of Artificial Sequence: Synthetic oligonucleotide
  Sense strand starting at position 5 of SEQ ID NO: 917529
gagacauaauguguccaga

SEQ ID NO: 1240847 - RNA, 19 nt, Artificial Sequence
  Description of Artificial Sequence: Synthetic oligonucleotide
  Antisense strand to SEQ ID NO: 1240846
ucuggacacauuaugucuc

SEQ ID NO: 1240848 - RNA, 19 nt, Artificial Sequence
  Description of Artificial Sequence: Synthetic oligonucleotide
  Sense strand starting at position 7 of SEQ ID NO: 917529
gacauaauguguccagagu

SEQ ID NO: 1240849 - RNA, 19 nt, Artificial Sequence
  Description of Artificial Sequence: Synthetic oligonucleotide
  Antisense strand to SEQ ID NO: 1240848
acucuggacacauuauguc

SEQ ID NO: 1240850 - RNA, 19 nt, Artificial Sequence
  Description of Artificial Sequence: Synthetic oligonucleotide
  Sense strand starting at position 8 of SEQ ID NO: 917529
acauaauguguccagagug

SEQ ID NO: 1240851 - RNA, 19 nt, Artificial Sequence
  Description of Artificial Sequence: Synthetic oligonucleotide
  Antisense strand to SEQ ID NO: 1240850
cacucuggacacauuaugu

SEQ ID NO: 1240852 - RNA, 19 nt, Artificial Sequence
  Description of Artificial Sequence: Synthetic oligonucleotide
  Sense strand starting at position 159 of SEQ ID NO: 917529
aaugaucguuaaguuaaag

SEQ ID NO: 1240853 - RNA, 19 nt, Artificial Sequence
  Description of Artificial Sequence: Synthetic oligonucleotide
  Antisense strand to SEQ ID NO: 1240852
cuuuaacuuaacgaucauu

SEQ ID NO: 1240854 - RNA, 19 nt, Artificial Sequence
  Description of Artificial Sequence: Synthetic oligonucleotide
  Sense strand starting at position 165 of SEQ ID NO: 917529
cguuaaguuaaagaugauc

SEQ ID NO: 1240855 - RNA, 19 nt, Artificial Sequence
  Description of Artificial Sequence: Synthetic oligonucleotide
  Antisense strand to SEQ ID NO: 1240854
gaucaucuuuaacuuaacg

SEQ ID NO: 1240856 - RNA, 19 nt, Artificial Sequence
  Description of Artificial Sequence: Synthetic oligonucleotide
  Sense strand starting at position 239 of SEQ ID NO: 917529
gcauacuacuuggugaaca

SEQ ID NO: 1240857 - RNA, 19 nt, Artificial Sequence
  Description of Artificial Sequence: Synthetic oligonucleotide
  Antisense strand to SEQ ID NO: 1240856
uguucaccaaguaguaugc

SEQ ID NO: 1240858 - RNA, 19 nt, Artificial Sequence
  Description of Artificial Sequence: Synthetic oligonucleotide
  Sense strand starting at position 252 of SEQ ID NO: 917529
ugaacaagauaguacuaga

SEQ ID NO: 1240859 - RNA, 19 nt, Artificial Sequence
  Description of Artificial Sequence: Synthetic oligonucleotide
  Antisense strand to SEQ ID NO: 1240858
ucuaguacuaucuuguuca

SEQ ID NO: 1240860 - RNA, 19 nt, Artificial Sequence
  Description of Artificial Sequence: Synthetic oligonucleotide
  Sense strand starting at position 255 of SEQ ID NO: 917529
acaagauaguacuagagga

SEQ ID NO: 1240861 - RNA, 19 nt, Artificial Sequence
  Description of Artificial Sequence: Synthetic oligonucleotide
  Antisense strand to SEQ ID NO: 1240860
uccucuaguacuaucuugu

SEQ ID NO: 1240862 - RNA, 19 nt, Artificial Sequence
  Description of Artificial Sequence: Synthetic oligonucleotide
  Sense strand starting at position 317 of SEQ ID NO: 917529
acucaugagccauaagugu

SEQ ID NO: 1240863 - RNA, 19 nt, Artificial Sequence
  Description of Artificial Sequence: Synthetic oligonucleotide
  Antisense strand to SEQ ID NO: 1240862
acacuuauggcucaugagu

SEQ ID NO: 1240864 - RNA, 19 nt, Artificial Sequence
  Description of Artificial Sequence: Synthetic oligonucleotide
  Sense strand starting at position 342 of SEQ ID NO: 917529
auguguuuccagcagacau

SEQ ID NO: 1240865 - RNA, 19 nt, Artificial Sequence
  Description of Artificial Sequence: Synthetic oligonucleotide
  Antisense strand to SEQ ID NO: 1240864
augucugcuggaaacacau

SEQ ID NO: 1240866 - RNA, 19 nt, Artificial Sequence
  Description of Artificial Sequence: Synthetic oligonucleotide
  Sense strand starting at position 344 of SEQ ID NO: 917529
guguuuccagcagacauaa

SEQ ID NO: 1240867 - RNA, 19 nt, Artificial Sequence
  Description of Artificial Sequence: Synthetic oligonucleotide
  Antisense strand to SEQ ID NO: 1240866
uuaugucugcuggaaacac

SEQ ID NO: 1240868 - RNA, 19 nt, Artificial Sequence
  Description of Artificial Sequence: Synthetic oligonucleotide
  Sense strand starting at position 410 of SEQ ID NO: 917529
uuagccauuguuuaaggaa

SEQ ID NO: 1240869 - RNA, 19 nt, Artificial Sequence
  Description of Artificial Sequence: Synthetic oligonucleotide
  Antisense strand to SEQ ID NO: 1240868
uuccuuaaacaauggcuaa

SEQ ID NO: 1240870 - RNA, 19 nt, Artificial Sequence
  Description of Artificial Sequence: Synthetic oligonucleotide
  Sense strand starting at position 413 of SEQ ID NO: 917529
gccauuguuuaaggaagaa

SEQ ID NO: 1240871 - RNA, 19 nt, Artificial Sequence
  Description of Artificial Sequence: Synthetic oligonucleotide
  Antisense strand to SEQ ID NO: 1240870
uucuuccuuaaacaauggc

SEQ ID NO: 1240872 - RNA, 19 nt, Artificial Sequence
  Description of Artificial Sequence: Synthetic oligonucleotide
  Sense strand starting at position 867 of SEQ ID NO: 917529
gauucuugguccugggaua

SEQ ID NO: 1240873 - RNA, 19 nt, Artificial Sequence
  Description of Artificial Sequence: Synthetic oligonucleotide
  Antisense strand to SEQ ID NO: 1240872
uaucccaggaccaagaauc

SEQ ID NO: 1240874 - RNA, 19 nt, Artificial Sequence
  Description of Artificial Sequence: Synthetic oligonucleotide
  Sense strand starting at position 983 of SEQ ID NO: 917529
gagguucgguccuucuauu

SEQ ID NO: 1240875 - RNA, 19 nt, Artificial Sequence
  Description of Artificial Sequence: Synthetic oligonucleotide
  Antisense strand to SEQ ID NO: 1240874
aauagaaggaccgaaccuc

SEQ ID NO: 1240876 - RNA, 19 nt, Artificial Sequence
  Description of Artificial Sequence: Synthetic oligonucleotide
  Sense strand starting at position 1280 of SEQ ID NO: 917529
gccgauaucgcccacauuu

SEQ ID NO: 1240877 - RNA, 19 nt, Artificial Sequence
  Description of Artificial Sequence: Synthetic oligonucleotide
  Antisense strand to SEQ ID NO: 1240876
aaaugugggcgauaucggc

SEQ ID NO: 1240878 - RNA, 19 nt, Artificial Sequence
  Description of Artificial Sequence: Synthetic oligonucleotide
  Sense strand starting at position 1832 of SEQ ID NO: 917529
guauuaaucccgggucggu

SEQ ID NO: 1240879 - RNA, 19 nt, Artificial Sequence
  Description of Artificial Sequence: Synthetic oligonucleotide
  Antisense strand to SEQ ID NO: 1240878
accgacccgggauuaauac

SEQ ID NO: 1240880 - RNA, 19 nt, Artificial Sequence
  Description of Artificial Sequence: Synthetic oligonucleotide
  Sense strand starting at position 2388 of SEQ ID NO: 917529
gggucaggagcccgagauu

SEQ ID NO: 1240881 - RNA, 19 nt, Artificial Sequence
  Description of Artificial Sequence: Synthetic oligonucleotide
  Antisense strand to SEQ ID NO: 1240880
aaucucgggcuccugaccc

SEQ ID NO: 1240882 - RNA, 19 nt, Artificial Sequence
  Description of Artificial Sequence: Synthetic oligonucleotide
  Sense strand starting at position 2853 of SEQ ID NO: 917529
ggaaacuuguccucgggaa

SEQ ID NO: 1240883 - RNA, 19 nt, Artificial Sequence
  Description of Artificial Sequence: Synthetic oligonucleotide
  Antisense strand to SEQ ID NO: 1240882
uucccgaggacaaguuucc

SEQ ID NO: 1240884 - RNA, 19 nt, Artificial Sequence
  Description of Artificial Sequence: Synthetic oligonucleotide
  Sense strand starting at position 2854 of SEQ ID NO: 917529
gaaacuuguccucgggaag

SEQ ID NO: 1240885 - RNA, 19 nt, Artificial Sequence
  Description of Artificial Sequence: Synthetic oligonucleotide
  Antisense strand to SEQ ID NO: 1240884
cuucccgaggacaaguuuc

SEQ ID NO: 1240886 - RNA, 19 nt, Artificial Sequence
  Description of Artificial Sequence: Synthetic oligonucleotide
  Sense strand starting at position 3157 of SEQ ID NO: 917529
guccucaaugguugaugga

SEQ ID NO: 1240887 - RNA, 19 nt, Artificial Sequence
  Description of Artificial Sequence: Synthetic oligonucleotide
  Antisense strand to SEQ ID NO: 1240886
uccaucaaccauugaggac

SEQ ID NO: 1240888 - RNA, 19 nt, Artificial Sequence
  Description of Artificial Sequence: Synthetic oligonucleotide
  Sense strand starting at position 3374 of SEQ ID NO: 917529
uuccaagacucacguaaag

SEQ ID NO: 1240889 - RNA, 19 nt, Artificial Sequence
  Description of Artificial Sequence: Synthetic oligonucleotide
  Antisense strand to SEQ ID NO: 1240888
cuuuacgugagucuuggaa

SEQ ID NO: 1240890 - RNA, 19 nt, Artificial Sequence
  Description of Artificial Sequence: Synthetic oligonucleotide
  Sense strand starting at position 3422 of SEQ ID NO: 917529
uggcgguucuuagugggau

SEQ ID NO: 1240891 - RNA, 19 nt, Artificial Sequence
  Description of Artificial Sequence: Synthetic oligonucleotide
  Antisense strand to SEQ ID NO: 1240890
aucccacuaagaaccgcca

SEQ ID NO: 1240892 - RNA, 19 nt, Artificial Sequence
  Description of Artificial Sequence: Synthetic oligonucleotide
  Sense strand starting at position 3423 of SEQ ID NO: 917529
ggcgguucuuagugggauu

SEQ ID NO: 1240893 - RNA, 19 nt, Artificial Sequence
  Description of Artificial Sequence: Synthetic oligonucleotide
  Antisense strand to SEQ ID NO: 1240892
aaucccacuaagaaccgcc

SEQ ID NO: 1240894 - RNA, 19 nt, Artificial Sequence
  Description of Artificial Sequence: Synthetic oligonucleotide
  Sense strand starting at position 3424 of SEQ ID NO: 917529
gcgguucuuagugggauua

SEQ ID NO: 1240895 - RNA, 19 nt, Artificial Sequence
  Description of Artificial Sequence: Synthetic oligonucleotide
  Antisense strand to SEQ ID NO: 1240894
uaaucccacuaagaaccgc

SEQ ID NO: 1240896 - RNA, 19 nt, Artificial Sequence
  Description of Artificial Sequence: Synthetic oligonucleotide
  Sense strand starting at position 3426 of SEQ ID NO: 917529
gguucuuagugggauuaca

SEQ ID NO: 1240897 - RNA, 19 nt, Artificial Sequence
  Description of Artificial Sequence: Synthetic oligonucleotide
  Antisense strand to SEQ ID NO: 1240896
uguaaucccacuaagaacc

SEQ ID NO: 1240898 - RNA, 19 nt, Artificial Sequence
  Description of Artificial Sequence: Synthetic oligonucleotide
  Sense strand starting at position 3438 of SEQ ID NO: 917529
gauuacaacugaggauguu

SEQ ID NO: 1240899 - RNA, 19 nt, Artificial Sequence
  Description of Artificial Sequence: Synthetic oligonucleotide
  Antisense strand to SEQ ID NO: 1240898
aacauccucaguuguaauc

SEQ ID NO: 1240900 - RNA, 19 nt, Artificial Sequence
  Description of Artificial Sequence: Synthetic oligonucleotide
  Sense strand starting at position 3444 of SEQ ID NO: 917529
aacugaggauguugguuau

SEQ ID NO: 1240901 - RNA, 19 nt, Artificial Sequence
  Description of Artificial Sequence: Synthetic oligonucleotide
  Antisense strand to SEQ ID NO: 1240900
auaaccaacauccucaguu

SEQ ID NO: 1240902 - RNA, 19 nt, Artificial Sequence
  Description of Artificial Sequence: Synthetic oligonucleotide
  Sense strand starting at position 3497 of SEQ ID NO: 917529
ucacgauuaucugacacca

SEQ ID NO: 1240903 - RNA, 19 nt, Artificial Sequence
  Description of Artificial Sequence: Synthetic oligonucleotide
  Antisense strand to SEQ ID NO: 1240902
uggugucagauaaucguga

SEQ ID NO: 1240904 - RNA, 19 nt, Artificial Sequence
  Description of Artificial Sequence: Synthetic oligonucleotide
  Sense strand starting at position 3499 of SEQ ID NO: 917529
acgauuaucugacaccauu

SEQ ID NO: 1240905 - RNA, 19 nt, Artificial Sequence
  Description of Artificial Sequence: Synthetic oligonucleotide
  Antisense strand to SEQ ID NO: 1240904
aauggugucagauaaucgu

SEQ ID NO: 1240906 - RNA, 19 nt, Artificial Sequence
  Description of Artificial Sequence: Synthetic oligonucleotide
  Sense strand starting at position 3589 of SEQ ID NO: 917529
ugagguuaaucacccguga

SEQ ID NO: 1240907 - RNA, 19 nt, Artificial Sequence
  Description of Artificial Sequence: Synthetic oligonucleotide
  Antisense strand to SEQ ID NO: 1240906
ucacgggugauuaaccuca

SEQ ID NO: 1240908 - RNA, 19 nt, Artificial Sequence
  Description of Artificial Sequence: Synthetic oligonucleotide
  Sense strand starting at position 3591 of SEQ ID NO: 917529
agguuaaucacccgugaaa

SEQ ID NO: 1240909 - RNA, 19 nt, Artificial Sequence
  Description of Artificial Sequence: Synthetic oligonucleotide
  Antisense strand to SEQ ID NO: 1240908
uuucacgggugauuaaccu

SEQ ID NO: 1240910 - RNA, 19 nt, Artificial Sequence
  Description of Artificial Sequence: Synthetic oligonucleotide
  Sense strand starting at position 3593 of SEQ ID NO: 917529
guuaaucacccgugaaaga

SEQ ID NO: 1240911 - RNA, 19 nt, Artificial Sequence
  Description of Artificial Sequence: Synthetic oligonucleotide
  Antisense strand to SEQ ID NO: 1240910
ucuuucacgggugauuaac

SEQ ID NO: 1240912 - RNA, 19 nt, Artificial Sequence
  Description of Artificial Sequence: Synthetic oligonucleotide
  Sense strand starting at position 3602 of SEQ ID NO: 917529
ccgugaaagacugaugugu

SEQ ID NO: 1240913 - RNA, 19 nt, Artificial Sequence
  Description of Artificial Sequence: Synthetic oligonucleotide
  Antisense strand to SEQ ID NO: 1240912
acacaucagucuuucacgg

SEQ ID NO: 1240914 - RNA, 19 nt, Artificial Sequence
  Description of Artificial Sequence: Synthetic oligonucleotide
  Sense strand starting at position 3607 of SEQ ID NO: 917529
aaagacugauguguaaacu

SEQ ID NO: 1240915 - RNA, 19 nt, Artificial Sequence
  Description of Artificial Sequence: Synthetic oligonucleotide
  Antisense strand to SEQ ID NO: 1240914
aguuuacacaucagucuuu

SEQ ID NO: 1240916 - RNA, 19 nt, Artificial Sequence
  Description of Artificial Sequence: Synthetic oligonucleotide
  Sense strand starting at position 3644 of SEQ ID NO: 917529
aggauaaucuaguagaagu

SEQ ID NO: 1240917 - RNA, 19 nt, Artificial Sequence
  Description of Artificial Sequence: Synthetic oligonucleotide
  Antisense strand to SEQ ID NO: 1240916
acuucuacuagauuauccu

SEQ ID NO: 1240918 - RNA, 19 nt, Artificial Sequence
  Description of Artificial Sequence: Synthetic oligonucleotide
  Sense strand starting at position 3700 of SEQ ID NO: 917529
ggcuuuccaccuuguacua

SEQ ID NO: 1240919 - RNA, 19 nt, Artificial Sequence
  Description of Artificial Sequence: Synthetic oligonucleotide
  Antisense strand to SEQ ID NO: 1240918
uaguacaagguggaaagcc

SEQ ID NO: 1240920 - RNA, 19 nt, Artificial Sequence
  Description of Artificial Sequence: Synthetic oligonucleotide
  Sense strand starting at position 3804 of SEQ ID NO: 917530
uuaggaaacuuuguaacua

SEQ ID NO: 1240921 - RNA, 19 nt, Artificial Sequence
  Description of Artificial Sequence: Synthetic oligonucleotide
  Antisense strand to SEQ ID NO: 1240920
uaguuacaaaguuuccuaa

SEQ ID NO: 1240922 - RNA, 19 nt, Artificial Sequence
  Description of Artificial Sequence: Synthetic oligonucleotide
  Sense strand starting at position 1 of SEQ ID NO: 917530
cguuaaguuaaagaugauc

SEQ ID NO: 1240923 - RNA, 19 nt, Artificial Sequence
  Description of Artificial Sequence: Synthetic oligonucleotide
  Antisense strand to SEQ ID NO: 1240922
gaucaucuuuaacuuaacg

SEQ ID NO: 1240924 - RNA, 19 nt, Artificial Sequence
  Description of Artificial Sequence: Synthetic oligonucleotide
  Sense strand starting at position 75 of SEQ ID NO: 917530
gcauacuacuuggugaaca

SEQ ID NO: 1240925 - RNA, 19 nt, Artificial Sequence
  Description of Artificial Sequence: Synthetic oligonucleotide
  Antisense strand to SEQ ID NO: 1240924
uguucaccaaguaguaugc

SEQ ID NO: 1240926 - RNA, 19 nt, Artificial Sequence
  Description of Artificial Sequence: Synthetic oligonucleotide
  Sense strand starting at position 88 of SEQ ID NO: 917530
ugaacaagauaguacuaga

SEQ ID NO: 1240927 - RNA, 19 nt, Artificial Sequence
  Description of Artificial Sequence: Synthetic oligonucleotide
  Antisense strand to SEQ ID NO: 1240926
ucuaguacuaucuuguuca

SEQ ID NO: 1240928 - RNA, 19 nt, Artificial Sequence
  Description of Artificial Sequence: Synthetic oligonucleotide
  Sense strand starting at position 91 of SEQ ID NO: 917530
acaagauaguacuagagga

SEQ ID NO: 1240929 - RNA, 19 nt, Artificial Sequence
  Description of Artificial Sequence: Synthetic oligonucleotide
  Antisense strand to SEQ ID NO: 1240928
uccucuaguacuaucuugu

SEQ ID NO: 1240930 - RNA, 19 nt, Artificial Sequence
  Description of Artificial Sequence: Synthetic oligonucleotide
  Sense strand starting at position 153 of SEQ ID NO: 917530
acucaugagccauaagugu

SEQ ID NO: 1240931 - RNA, 19 nt, Artificial Sequence
  Description of Artificial Sequence: Synthetic oligonucleotide
  Antisense strand to SEQ ID NO: 1240930
acacuuauggcucaugagu

SEQ ID NO: 1240932 - RNA, 19 nt, Artificial Sequence
  Description of Artificial Sequence: Synthetic oligonucleotide
  Sense strand starting at position 178 of SEQ ID NO: 917530
auguguuuccagcagacau

SEQ ID NO: 1240933 - RNA, 19 nt, Artificial Sequence
  Description of Artificial Sequence: Synthetic oligonucleotide
  Antisense strand to SEQ ID NO: 1240932
augucugcuggaaacacau

SEQ ID NO: 1240934 - RNA, 19 nt, Artificial Sequence
  Description of Artificial Sequence: Synthetic oligonucleotide
  Sense strand starting at position 180 of SEQ ID NO: 917530
guguuuccagcagacauaa

SEQ ID NO: 1240935 - RNA, 19 nt, Artificial Sequence
  Description of Artificial Sequence: Synthetic oligonucleotide
  Antisense strand to SEQ ID NO: 1240934
uuaugucugcuggaaacac

SEQ ID NO: 1240936 - RNA, 19 nt, Artificial Sequence
  Description of Artificial Sequence: Synthetic oligonucleotide
  Sense strand starting at position 246 of SEQ ID NO: 917530
uuagccauuguuuaaggaa

SEQ ID NO: 1240937 - RNA, 19 nt, Artificial Sequence
  Description of Artificial Sequence: Synthetic oligonucleotide
  Antisense strand to SEQ ID NO: 1240936
uuccuuaaacaauggcuaa

SEQ ID NO: 1240938 - RNA, 19 nt, Artificial Sequence
  Description of Artificial Sequence: Synthetic oligonucleotide
  Sense strand starting at position 249 of SEQ ID NO: 917530
gccauuguuuaaggaagaa

SEQ ID NO: 1240939 - RNA, 19 nt, Artificial Sequence
  Description of Artificial Sequence: Synthetic oligonucleotide
  Antisense strand to SEQ ID NO: 1240938
uucuuccuuaaacaauggc

SEQ ID NO: 1240940 - RNA, 19 nt, Artificial Sequence
  Description of Artificial Sequence: Synthetic oligonucleotide
  Sense strand starting at position 703 of SEQ ID NO: 917530
gauucuugguccugggaua

SEQ ID NO: 1240941 - RNA, 19 nt, Artificial Sequence
  Description of Artificial Sequence: Synthetic oligonucleotide
  Antisense strand to SEQ ID NO: 1240940
uaucccaggaccaagaauc

SEQ ID NO: 1240942 - RNA, 19 nt, Artificial Sequence
  Description of Artificial Sequence: Synthetic oligonucleotide
  Sense strand starting at position 819 of SEQ ID NO: 917530
gagguucgguccuucuauu

SEQ ID NO: 1240943 - RNA, 19 nt, Artificial Sequence
  Description of Artificial Sequence: Synthetic oligonucleotide
  Antisense strand to SEQ ID NO: 1240942
aauagaaggaccgaaccuc

SEQ ID NO: 1240944 - RNA, 19 nt, Artificial Sequence
  Description of Artificial Sequence: Synthetic oligonucleotide
  Sense strand starting at position 1116 of SEQ ID NO: 917530
gccgauaucgcccacauuu

SEQ ID NO: 1240945 - RNA, 19 nt, Artificial Sequence
  Description of Artificial Sequence: Synthetic oligonucleotide
  Antisense strand to SEQ ID NO: 1240944
aaaugugggcgauaucggc

SEQ ID NO: 1240946 - RNA, 19 nt, Artificial Sequence
  Description of Artificial Sequence: Synthetic oligonucleotide
  Sense strand starting at position 1668 of SEQ ID NO: 917530
guauuaaucccgggucggu

SEQ ID NO: 1240947 - RNA, 19 nt, Artificial Sequence
  Description of Artificial Sequence: Synthetic oligonucleotide
  Antisense strand to SEQ ID NO: 1240946
accgacccgggauuaauac

SEQ ID NO: 1240948 - RNA, 19 nt, Artificial Sequence
  Description of Artificial Sequence: Synthetic oligonucleotide
  Sense strand starting at position 2224 of SEQ ID NO: 917530
gggucaggagcccgagauu

SEQ ID NO: 1240949 - RNA, 19 nt, Artificial Sequence
  Description of Artificial Sequence: Synthetic oligonucleotide
  Antisense strand to SEQ ID NO: 1240948
aaucucgggcuccugaccc

SEQ ID NO: 1240950 - RNA, 19 nt, Artificial Sequence
  Description of Artificial Sequence: Synthetic oligonucleotide
  Sense strand starting at position 2689 of SEQ ID NO: 917530
ggaaacuuguccucgggaa

SEQ ID NO: 1240951 - RNA, 19 nt, Artificial Sequence
  Description of Artificial Sequence: Synthetic oligonucleotide
  Antisense strand to SEQ ID NO: 1240950
uucccgaggacaaguuucc

SEQ ID NO: 1240952 - RNA, 19 nt, Artificial Sequence
  Description of Artificial Sequence: Synthetic oligonucleotide
  Sense strand starting at position 2690 of SEQ ID NO: 917530
gaaacuuguccucgggaag

SEQ ID NO: 1240953 - RNA, 19 nt, Artificial Sequence
  Description of Artificial Sequence: Synthetic oligonucleotide
  Antisense strand to SEQ ID NO: 1240952
cuucccgaggacaaguuuc

SEQ ID NO: 1240954 - RNA, 19 nt, Artificial Sequence
  Description of Artificial Sequence: Synthetic oligonucleotide
  Sense strand starting at position 2993 of SEQ ID NO: 917530
guccucaaugguugaugga

SEQ ID NO: 1240955 - RNA, 19 nt, Artificial Sequence
  Description of Artificial Sequence: Synthetic oligonucleotide
  Antisense strand to SEQ ID NO: 1240954
uccaucaaccauugaggac

SEQ ID NO: 1240956 - RNA, 19 nt, Artificial Sequence
  Description of Artificial Sequence: Synthetic oligonucleotide
  Sense strand starting at position 3210 of SEQ ID NO: 917530
uuccaagacucacguaaag

SEQ ID NO: 1240957 - RNA, 19 nt, Artificial Sequence
  Description of Artificial Sequence: Synthetic oligonucleotide
  Antisense strand to SEQ ID NO: 1240956
cuuuacgugagucuuggaa

SEQ ID NO: 1240958 - RNA, 19 nt, Artificial Sequence
  Description of Artificial Sequence: Synthetic oligonucleotide
  Sense strand starting at position 3258 of SEQ ID NO: 917530
uggcgguucuuagugggau

SEQ ID NO: 1240959 - RNA, 19 nt, Artificial Sequence
  Description of Artificial Sequence: Synthetic oligonucleotide
  Antisense strand to SEQ ID NO: 1240958
aucccacuaagaaccgcca

SEQ ID NO: 1240960 - RNA, 19 nt, Artificial Sequence
  Description of Artificial Sequence: Synthetic oligonucleotide
  Sense strand starting at position 3259 of SEQ ID NO: 917530
ggcgguucuuagugggauu

SEQ ID NO: 1240961 - RNA, 19 nt, Artificial Sequence
  Description of Artificial Sequence: Synthetic oligonucleotide
  Antisense strand to SEQ ID NO: 1240960
aaucccacuaagaaccgcc

SEQ ID NO: 1240962 - RNA, 19 nt, Artificial Sequence
  Description of Artificial Sequence: Synthetic oligonucleotide
  Sense strand starting at position 3260 of SEQ ID NO: 917530
gcgguucuuagugggauua

SEQ ID NO: 1240963 - RNA, 19 nt, Artificial Sequence
  Description of Artificial Sequence: Synthetic oligonucleotide
  Antisense strand to SEQ ID NO: 1240962
uaaucccacuaagaaccgc

SEQ ID NO: 1240964 - RNA, 19 nt, Artificial Sequence
  Description of Artificial Sequence: Synthetic oligonucleotide
  Sense strand starting at position 3262 of SEQ ID NO: 917530
gguucuuagugggauuaca

SEQ ID NO: 1240965 - RNA, 19 nt, Artificial Sequence
  Description of Artificial Sequence: Synthetic oligonucleotide
  Antisense strand to SEQ ID NO: 1240964
uguaaucccacuaagaacc

SEQ ID NO: 1240966 - RNA, 19 nt, Artificial Sequence
  Description of Artificial Sequence: Synthetic oligonucleotide
  Sense strand starting at position 3274 of SEQ ID NO: 917530
gauuacaacugaggauguu

SEQ ID NO: 1240967 - RNA, 19 nt, Artificial Sequence
  Description of Artificial Sequence: Synthetic oligonucleotide
  Antisense strand to SEQ ID NO: 1240966
aacauccucaguuguaauc

SEQ ID NO: 1240968 - RNA, 19 nt, Artificial Sequence
  Description of Artificial Sequence: Synthetic oligonucleotide
  Sense strand starting at position 3280 of SEQ ID NO: 917530
aacugaggauguugguuau

SEQ ID NO: 1240969 - RNA, 19 nt, Artificial Sequence
  Description of Artificial Sequence: Synthetic oligonucleotide
  Antisense strand to SEQ ID NO: 1240968
auaaccaacauccucaguu

SEQ ID NO: 1240970 - RNA, 19 nt, Artificial Sequence
  Description of Artificial Sequence: Synthetic oligonucleotide
  Sense strand starting at position 3333 of SEQ ID NO: 917530
ucacgauuaucugacacca

SEQ ID NO: 1240971 - RNA, 19 nt, Artificial Sequence
  Description of Artificial Sequence: Synthetic oligonucleotide
  Antisense strand to SEQ ID NO: 1240970
uggugucagauaaucguga

SEQ ID NO: 1240972 - RNA, 19 nt, Artificial Sequence
  Description of Artificial Sequence: Synthetic oligonucleotide
  Sense strand starting at position 3335 of SEQ ID NO: 917530
acgauuaucugacaccauu

SEQ ID NO: 1240973 - RNA, 19 nt, Artificial Sequence
  Description of Artificial Sequence: Synthetic oligonucleotide
  Antisense strand to SEQ ID NO: 1240972
aauggugucagauaaucgu

SEQ ID NO: 1240974 - RNA, 19 nt, Artificial Sequence
  Description of Artificial Sequence: Synthetic oligonucleotide
  Sense strand starting at position 3425 of SEQ ID NO: 917530
ugagguuaaucacccguga

SEQ ID NO: 1240975 - RNA, 19 nt, Artificial Sequence
  Description of Artificial Sequence: Synthetic oligonucleotide
  Antisense strand to SEQ ID NO: 1240974
ucacgggugauuaaccuca

SEQ ID NO: 1240976 - RNA, 19 nt, Artificial Sequence
  Description of Artificial Sequence: Synthetic oligonucleotide
  Sense strand starting at position 3427 of SEQ ID NO: 917530
agguuaaucacccgugaaa

SEQ ID NO: 1240977 - RNA, 19 nt, Artificial Sequence
  Description of Artificial Sequence: Synthetic oligonucleotide
  Antisense strand to SEQ ID NO: 1240976
uuucacgggugauuaaccu

SEQ ID NO: 1240978 - RNA, 19 nt, Artificial Sequence
  Description of Artificial Sequence: Synthetic oligonucleotide
  Sense strand starting at position 3429 of SEQ ID NO: 917530
guuaaucacccgugaaaga

SEQ ID NO: 1240979 - RNA, 19 nt, Artificial Sequence
  Description of Artificial Sequence: Synthetic oligonucleotide
  Antisense strand to SEQ ID NO: 1240978
ucuuucacgggugauuaac

SEQ ID NO: 1240980 - RNA, 19 nt, Artificial Sequence
  Description of Artificial Sequence: Synthetic oligonucleotide
  Sense strand starting at position 3438 of SEQ ID NO: 917530
ccgugaaagacugaugugu

SEQ ID NO: 1240981 - RNA, 19 nt, Artificial Sequence
  Description of Artificial Sequence: Synthetic oligonucleotide
  Antisense strand to SEQ ID NO: 1240980
acacaucagucuuucacgg

SEQ ID NO: 1240982 - RNA, 19 nt, Artificial Sequence
  Description of Artificial Sequence: Synthetic oligonucleotide
  Sense strand starting at position 3443 of SEQ ID NO: 917530
aaagacugauguguaaacu

SEQ ID NO: 1240983 - RNA, 19 nt, Artificial Sequence
  Description of Artificial Sequence: Synthetic oligonucleotide
  Antisense strand to SEQ ID NO: 1240982
aguuuacacaucagucuuu

SEQ ID NO: 1240984 - RNA, 19 nt, Artificial Sequence
  Description of Artificial Sequence: Synthetic oligonucleotide
  Sense strand starting at position 3480 of SEQ ID NO: 917530
aggauaaucuaguagaagu

SEQ ID NO: 1240985 - RNA, 19 nt, Artificial Sequence
  Description of Artificial Sequence: Synthetic oligonucleotide
  Antisense strand to SEQ ID NO: 1240984
acuucuacuagauuauccu

SEQ ID NO: 1240986 - RNA, 19 nt, Artificial Sequence
  Description of Artificial Sequence: Synthetic oligonucleotide
  Sense strand starting at position 3536 of SEQ ID NO: 917530
ggcuuuccaccuuguacua

SEQ ID NO: 1240987 - RNA, 19 nt, Artificial Sequence
  Description of Artificial Sequence: Synthetic oligonucleotide
  Antisense strand to SEQ ID NO: 1240986
uaguacaagguggaaagcc

SEQ ID NO: 1240988 - RNA, 19 nt, Artificial Sequence
  Description of Artificial Sequence: Synthetic oligonucleotide
  Sense strand starting at position 3640 of SEQ ID NO: 917530
uuaggaaacuuuguaacua

SEQ ID NO: 1240989 - RNA, 19 nt, Artificial Sequence
  Description of Artificial Sequence: Synthetic oligonucleotide
  Antisense strand to SEQ ID NO: 1240988
uaguuacaaaguuuccuaa

SEQ ID NO: 1240990 - RNA, 19 nt, Artificial Sequence
  Description of Artificial Sequence: Synthetic oligonucleotide
  Sense strand starting at position 3917 of SEQ ID NO: 917530
ccaaauaagcucugugaua

SEQ ID NO: 1240991 - RNA, 19 nt, Artificial Sequence
  Description of Artificial Sequence: Synthetic oligonucleotide
  Antisense strand to SEQ ID NO: 1240990
uaucacagagcuuauuugg

SEQ ID NO: 1240992 - RNA, 19 nt, Artificial Sequence
  Description of Artificial Sequence: Synthetic oligonucleotide
  Sense strand starting at position 3922 of SEQ ID NO: 917530
uaagcucugugauaaauga

SEQ ID NO: 1240993 - RNA, 19 nt, Artificial Sequence
  Description of Artificial Sequence: Synthetic oligonucleotide
  Antisense strand to SEQ ID NO: 1240992
ucauuuaucacagagcuua

SEQ ID NO: 1240994 - RNA, 19 nt, Artificial Sequence
  Description of Artificial Sequence: Synthetic oligonucleotide
  Sense strand starting at position 3929 of SEQ ID NO: 917530
ugugauaaaugauagauug

SEQ ID NO: 1240995 - RNA, 19 nt, Artificial Sequence
  Description of Artificial Sequence: Synthetic oligonucleotide
  Antisense strand to SEQ ID NO: 1240994
caaucuaucauuuaucaca

SEQ ID NO: 1240996 - RNA, 19 nt, Artificial Sequence
  Description of Artificial Sequence: Synthetic oligonucleotide
  Sense strand starting at position 3983 of SEQ ID NO: 917530
gcuacuaauucccuagugu

SEQ ID NO: 1240997 - RNA, 19 nt, Artificial Sequence
  Description of Artificial Sequence: Synthetic oligonucleotide
  Antisense strand to SEQ ID NO: 1240996
acacuagggaauuaguagc

SEQ ID NO: 1240998 - RNA, 19 nt, Artificial Sequence
  Description of Artificial Sequence: Synthetic oligonucleotide
  Sense strand starting at position 3983 of SEQ ID NO: 917531
gcuacuaauucccuagugu

SEQ ID NO: 1240999 - RNA, 19 nt, Artificial Sequence
  Description of Artificial Sequence: Synthetic oligonucleotide
  Antisense strand to SEQ ID NO: 1240998
acacuagggaauuaguagc

SEQ ID NO: 1241000 - RNA, 19 nt, Artificial Sequence
  Description of Artificial Sequence: Synthetic oligonucleotide
  Sense strand starting at position 33 of SEQ ID NO: 917531
agaacugaaucccagauaa

SEQ ID NO: 1241001 - RNA, 19 nt, Artificial Sequence
  Description of Artificial Sequence: Synthetic oligonucleotide
  Antisense strand to SEQ ID NO: 1241000
uuaucugggauucaguucu

SEQ ID NO: 1241002 - RNA, 19 nt, Artificial Sequence
  Description of Artificial Sequence: Synthetic oligonucleotide
  Sense strand starting at position 59 of SEQ ID NO: 917531
agaaguaaagcuuguuaaa

SEQ ID NO: 1241003 - RNA, 19 nt, Artificial Sequence
  Description of Artificial Sequence: Synthetic oligonucleotide
  Antisense strand to SEQ ID NO: 1241002
uuuaacaagcuuuacuucu

SEQ ID NO: 1241004 - RNA, 19 nt, Artificial Sequence
  Description of Artificial Sequence: Synthetic oligonucleotide
  Sense strand starting at position 61 of SEQ ID NO: 917531
aaguaaagcuuguuaaaga

SEQ ID NO: 1241005 - RNA, 19 nt, Artificial Sequence
  Description of Artificial Sequence: Synthetic oligonucleotide
  Antisense strand to SEQ ID NO: 1241004
ucuuuaacaagcuuuacuu

SEQ ID NO: 1241006 - RNA, 19 nt, Artificial Sequence
  Description of Artificial Sequence: Synthetic oligonucleotide
  Sense strand starting at position 117 of SEQ ID NO: 917531
acacaaggauugguguuaa

SEQ ID NO: 1241007 - RNA, 19 nt, Artificial Sequence
  Description of Artificial Sequence: Synthetic oligonucleotide
  Antisense strand to SEQ ID NO: 1241006
uuaacaccaauccuugugu

SEQ ID NO: 1241008 - RNA, 19 nt, Artificial Sequence
  Description of Artificial Sequence: Synthetic oligonucleotide
  Sense strand starting at position 138 of SEQ ID NO: 917531
gcauuaagugaauagcuga

SEQ ID NO: 1241009 - RNA, 19 nt, Artificial Sequence
  Description of Artificial Sequence: Synthetic oligonucleotide
  Antisense strand to SEQ ID NO: 1241008
ucagcuauucacuuaaugc

SEQ ID NO: 1241010 - RNA, 19 nt, Artificial Sequence
  Description of Artificial Sequence: Synthetic oligonucleotide
  Sense strand starting at position 190 of SEQ ID NO: 917531
acacauagaucacugucua

SEQ ID NO: 1241011 - RNA, 19 nt, Artificial Sequence
  Description of Artificial Sequence: Synthetic oligonucleotide
  Antisense strand to SEQ ID NO: 1241010
uagacagugaucuaugugu

SEQ ID NO: 1241012 - RNA, 19 nt, Artificial Sequence
  Description of Artificial Sequence: Synthetic oligonucleotide
  Sense strand starting at position 304 of SEQ ID NO: 917531
uuaggaauaguuugacaac

SEQ ID NO: 1241013 - RNA, 19 nt, Artificial Sequence
  Description of Artificial Sequence: Synthetic oligonucleotide
  Antisense strand to SEQ ID NO: 1241012
guugucaaacuauuccuaa

SEQ ID NO: 1241014 - RNA, 19 nt, Artificial Sequence
  Description of Artificial Sequence: Synthetic oligonucleotide
  Sense strand starting at position 314 of SEQ ID NO: 917531
uuugacaacuaguuuaugu

SEQ ID NO: 1241015 - RNA, 19 nt, Artificial Sequence
  Description of Artificial Sequence: Synthetic oligonucleotide
  Antisense strand to SEQ ID NO: 1241014
acauaaacuaguugucaaa

SEQ ID NO: 1241016 - RNA, 19 nt, Artificial Sequence
  Description of Artificial Sequence: Synthetic oligonucleotide
  Sense strand starting at position 316 of SEQ ID NO: 917531
ugacaacuaguuuauguua

SEQ ID NO: 1241017 - RNA, 19 nt, Artificial Sequence
  Description of Artificial Sequence: Synthetic oligonucleotide
  Antisense strand to SEQ ID NO: 1241016
uaacauaaacuaguuguca

SEQ ID NO: 1241018 - RNA, 19 nt, Artificial Sequence
  Description of Artificial Sequence: Synthetic oligonucleotide
  Sense strand starting at position 327 of SEQ ID NO: 917531
uuauguuaucuccucgugu

SEQ ID NO: 1241019 - RNA, 19 nt, Artificial Sequence
  Description of Artificial Sequence: Synthetic oligonucleotide
  Antisense strand to SEQ ID NO: 1241018
acacgaggagauaacauaa

SEQ ID NO: 1241020 - RNA, 19 nt, Artificial Sequence
  Description of Artificial Sequence: Synthetic oligonucleotide
  Sense strand starting at position 340 of SEQ ID NO: 917531
ucgugugaugcuagcugga

SEQ ID NO: 1241021 - RNA, 19 nt, Artificial Sequence
  Description of Artificial Sequence: Synthetic oligonucleotide
  Antisense strand to SEQ ID NO: 1241020
uccagcuagcaucacacga

SEQ ID NO: 1241022 - RNA, 19 nt, Artificial Sequence
  Description of Artificial Sequence: Synthetic oligonucleotide
  Sense strand starting at position 357 of SEQ ID NO: 917531
gaggacugucaggguacau

SEQ ID NO: 1241023 - RNA, 19 nt, Artificial Sequence
  Description of Artificial Sequence: Synthetic oligonucleotide
  Antisense strand to SEQ ID NO: 1241022
auguacccugacaguccuc

SEQ ID NO: 1241024 - RNA, 19 nt, Artificial Sequence
  Description of Artificial Sequence: Synthetic oligonucleotide
  Sense strand starting at position 401 of SEQ ID NO: 917531
ggcaaauaucaacgucaaa

SEQ ID NO: 1241025 - RNA, 19 nt, Artificial Sequence
  Description of Artificial Sequence: Synthetic oligonucleotide
  Antisense strand to SEQ ID NO: 1241024
uuugacguugauauuugcc

SEQ ID NO: 1241026 - RNA, 19 nt, Artificial Sequence
  Description of Artificial Sequence: Synthetic oligonucleotide
  Sense strand starting at position 529 of SEQ ID NO: 917531
cuuuaaaucuuguucugga

SEQ ID NO: 1241027 - RNA, 19 nt, Artificial Sequence
  Description of Artificial Sequence: Synthetic oligonucleotide
  Antisense strand to SEQ ID NO: 1241026
uccagaacaagauuuaaag

SEQ ID NO: 1241028 - RNA, 19 nt, Artificial Sequence
  Description of Artificial Sequence: Synthetic oligonucleotide
  Sense strand starting at position 530 of SEQ ID NO: 917531
uuuaaaucuuguucuggaa

SEQ ID NO: 1241029 - RNA, 19 nt, Artificial Sequence
  Description of Artificial Sequence: Synthetic oligonucleotide
  Antisense strand to SEQ ID NO: 1241028
uuccagaacaagauuuaaa

SEQ ID NO: 1241030 - RNA, 19 nt, Artificial Sequence
  Description of Artificial Sequence: Synthetic oligonucleotide
  Sense strand starting at position 539 of SEQ ID NO: 917531
uguucuggaacuugagaga

SEQ ID NO: 1241031 - RNA, 19 nt, Artificial Sequence
  Description of Artificial Sequence: Synthetic oligonucleotide
  Antisense strand to SEQ ID NO: 1241030
ucucucaaguuccagaaca

SEQ ID NO: 1241032 - RNA, 19 nt, Artificial Sequence
  Description of Artificial Sequence: Synthetic oligonucleotide
  Sense strand starting at position 554 of SEQ ID NO: 917531
gagaguuccagugguauaa

SEQ ID NO: 1241033 - RNA, 19 nt, Artificial Sequence
  Description of Artificial Sequence: Synthetic oligonucleotide
  Antisense strand to SEQ ID NO: 1241032
uuauaccacuggaacucuc

SEQ ID NO: 1241034 - RNA, 19 nt, Artificial Sequence
  Description of Artificial Sequence: Synthetic oligonucleotide
  Sense strand starting at position 558 of SEQ ID NO: 917531
guuccagugguauaaaugu

SEQ ID NO: 1241035 - RNA, 19 nt, Artificial Sequence
  Description of Artificial Sequence: Synthetic oligonucleotide
  Antisense strand to SEQ ID NO: 1241034
acauuuauaccacuggaac

SEQ ID NO: 1241036 - RNA, 19 nt, Artificial Sequence
  Description of Artificial Sequence: Synthetic oligonucleotide
  Sense strand starting at position 801 of SEQ ID NO: 917531
acgacauaggcuugaaggu

SEQ ID NO: 1241037 - RNA, 19 nt, Artificial Sequence
  Description of Artificial Sequence: Synthetic oligonucleotide
  Antisense strand to SEQ ID NO: 1241036
accuucaagccuaugucgu

SEQ ID NO: 1241038 - RNA, 19 nt, Artificial Sequence
  Description of Artificial Sequence: Synthetic oligonucleotide
  Sense strand starting at position 817 of SEQ ID NO: 917531
ggugauuccugguccuaga

SEQ ID NO: 1241039 - RNA, 19 nt, Artificial Sequence
  Description of Artificial Sequence: Synthetic oligonucleotide
  Antisense strand to SEQ ID NO: 1241038
ucuaggaccaggaaucacc

SEQ ID NO: 1241040 - RNA, 19 nt, Artificial Sequence
  Description of Artificial Sequence: Synthetic oligonucleotide
  Sense strand starting at position 825 of SEQ ID NO: 917531
cugguccuagaaugagaau

SEQ ID NO: 1241041 - RNA, 19 nt, Artificial Sequence
  Description of Artificial Sequence: Synthetic oligonucleotide
  Antisense strand to SEQ ID NO: 1241040
auucucauucuaggaccag

SEQ ID NO: 1241042 - RNA, 19 nt, Artificial Sequence
  Description of Artificial Sequence: Synthetic oligonucleotide
  Sense strand starting at position 952 of SEQ ID NO: 917531
acccuaauguuaccgagaa

SEQ ID NO: 1241043 - RNA, 19 nt, Artificial Sequence
  Description of Artificial Sequence: Synthetic oligonucleotide
  Antisense strand to SEQ ID NO: 1241042
uucucgguaacauuagggu

SEQ ID NO: 1241044 - RNA, 19 nt, Artificial Sequence
  Description of Artificial Sequence: Synthetic oligonucleotide
  Sense strand starting at position 1289 of SEQ ID NO: 917531
ccauuaaacucgcccagau

SEQ ID NO: 1241045 - RNA, 19 nt, Artificial Sequence
  Description of Artificial Sequence: Synthetic oligonucleotide
  Antisense strand to SEQ ID NO: 1241044
aucugggcgaguuuaaugg

SEQ ID NO: 1241046 - RNA, 19 nt, Artificial Sequence
  Description of Artificial Sequence: Synthetic oligonucleotide
  Sense strand starting at position 2288 of SEQ ID NO: 917531
gggucaggagcccgagauu

SEQ ID NO: 1241047 - RNA, 19 nt, Artificial Sequence
  Description of Artificial Sequence: Synthetic oligonucleotide
  Antisense strand to SEQ ID NO: 1241046
aaucucgggcuccugaccc

SEQ ID NO: 1241048 - RNA, 19 nt, Artificial Sequence
  Description of Artificial Sequence: Synthetic oligonucleotide
  Sense strand starting at position 2700 of SEQ ID NO: 917531
gggacaacugugggaacuu

SEQ ID NO: 1241049 - RNA, 19 nt, Artificial Sequence
  Description of Artificial Sequence: Synthetic oligonucleotide
  Antisense strand to SEQ ID NO: 1241048
aaguucccacaguuguccc

SEQ ID NO: 1241050 - RNA, 19 nt, Artificial Sequence
  Description of Artificial Sequence: Synthetic oligonucleotide
  Sense strand starting at position 3050 of SEQ ID NO: 917531
guccggaaugguugaugga

SEQ ID NO: 1241051 - RNA, 19 nt, Artificial Sequence
  Description of Artificial Sequence: Synthetic oligonucleotide
  Antisense strand to SEQ ID NO: 1241050
uccaucaaccauuccggac

SEQ ID NO: 1241052 - RNA, 19 nt, Artificial Sequence
  Description of Artificial Sequence: Synthetic oligonucleotide
  Sense strand starting at position 3263 of SEQ ID NO: 917531
ccggacuccacguaaagau

SEQ ID NO: 1241053 - RNA, 19 nt, Artificial Sequence
  Description of Artificial Sequence: Synthetic oligonucleotide
  Antisense strand to SEQ ID NO: 1241052
aucuuuacguggaguccgg

SEQ ID NO: 1241054 - RNA, 19 nt, Artificial Sequence
  Description of Artificial Sequence: Synthetic oligonucleotide
  Sense strand starting at position 3328 of SEQ ID NO: 917531
uacaauugaggauguuagu

SEQ ID NO: 1241055 - RNA, 19 nt, Artificial Sequence
  Description of Artificial Sequence: Synthetic oligonucleotide
  Antisense strand to SEQ ID NO: 1241054
acuaacauccucaauugua

SEQ ID NO: 1241056 - RNA, 19 nt, Artificial Sequence
  Description of Artificial Sequence: Synthetic oligonucleotide
  Sense strand starting at position 3334 of SEQ ID NO: 917531
ugaggauguuaguuuggau

SEQ ID NO: 1241057 - RNA, 19 nt, Artificial Sequence
  Description of Artificial Sequence: Synthetic oligonucleotide
  Antisense strand to SEQ ID NO: 1241056
auccaaacuaacauccuca

SEQ ID NO: 1241058 - RNA, 19 nt, Artificial Sequence
  Description of Artificial Sequence: Synthetic oligonucleotide
  Sense strand starting at position 3341 of SEQ ID NO: 917531
guuaguuuggaugaaaguu

SEQ ID NO: 1241059 - RNA, 19 nt, Artificial Sequence
  Description of Artificial Sequence: Synthetic oligonucleotide
  Antisense strand to SEQ ID NO: 1241058
aacuuucauccaaacuaac

SEQ ID NO: 1241060 - RNA, 19 nt, Artificial Sequence
  Description of Artificial Sequence: Synthetic oligonucleotide
  Sense strand starting at position 3347 of SEQ ID NO: 917531
uuggaugaaaguuggugaa

SEQ ID NO: 1241061 - RNA, 19 nt, Artificial Sequence
  Description of Artificial Sequence: Synthetic oligonucleotide
  Antisense strand to SEQ ID NO: 1241060
uucaccaacuuucauccaa

SEQ ID NO: 1241062 - RNA, 19 nt, Artificial Sequence
  Description of Artificial Sequence: Synthetic oligonucleotide
  Sense strand starting at position 3369 of SEQ ID NO: 917531
cuuaccuuaugucuggaaa

SEQ ID NO: 1241063 - RNA, 19 nt, Artificial Sequence
  Description of Artificial Sequence: Synthetic oligonucleotide
  Antisense strand to SEQ ID NO: 1241062
uuuccagacauaagguaag

SEQ ID NO: 1241064 - RNA, 19 nt, Artificial Sequence
  Description of Artificial Sequence: Synthetic oligonucleotide
  Sense strand starting at position 3370 of SEQ ID NO: 917531
uuaccuuaugucuggaaau

SEQ ID NO: 1241065 - RNA, 19 nt, Artificial Sequence
  Description of Artificial Sequence: Synthetic oligonucleotide
  Antisense strand to SEQ ID NO: 1241064
auuuccagacauaagguaa

SEQ ID NO: 1241066 - RNA, 19 nt, Artificial Sequence
  Description of Artificial Sequence: Synthetic oligonucleotide
  Sense strand starting at position 3431 of SEQ ID NO: 917531
acuucugugguaugguaaa

SEQ ID NO: 1241067 - RNA, 19 nt, Artificial Sequence
  Description of Artificial Sequence: Synthetic oligonucleotide
  Antisense strand to SEQ ID NO: 1241066
uuuaccauaccacagaagu

SEQ ID NO: 1241068 - RNA, 19 nt, Artificial Sequence
  Description of Artificial Sequence: Synthetic oligonucleotide
  Sense strand starting at position 3444 of SEQ ID NO: 917531
gguaaaggcacagguuuau

SEQ ID NO: 1241069 - RNA, 19 nt, Artificial Sequence
  Description of Artificial Sequence: Synthetic oligonucleotide
  Antisense strand to SEQ ID NO: 1241068
auaaaccugugccuuuacc

SEQ ID NO: 1241070 - RNA, 19 nt, Artificial Sequence
  Description of Artificial Sequence: Synthetic oligonucleotide
  Sense strand starting at position 3560 of SEQ ID NO: 917531
auacgcuaacaguaacaau

SEQ ID NO: 1241071 - RNA, 19 nt, Artificial Sequence
  Description of Artificial Sequence: Synthetic oligonucleotide
  Antisense strand to SEQ ID NO: 1241070
auuguuacuguuagcguau

SEQ ID NO: 1241072 - RNA, 19 nt, Artificial Sequence
  Description of Artificial Sequence: Synthetic oligonucleotide
  Sense strand starting at position 3798 of SEQ ID NO: 917531
ugucauggauaugccuaau

SEQ ID NO: 1241073 - RNA, 19 nt, Artificial Sequence
  Description of Artificial Sequence: Synthetic oligonucleotide
  Antisense strand to SEQ ID NO: 1241072
auuaggcauauccaugaca

SEQ ID NO: 1241074 - RNA, 19 nt, Artificial Sequence
  Description of Artificial Sequence: Synthetic oligonucleotide
  Sense strand starting at position 3838 of SEQ ID NO: 917531
cucaguuacucuuuggaaa

SEQ ID NO: 1241075 - RNA, 19 nt, Artificial Sequence
  Description of Artificial Sequence: Synthetic oligonucleotide
  Antisense strand to SEQ ID NO: 1241074
uuuccaaagaguaacugag

SEQ ID NO: 1241076 - RNA, 19 nt, Artificial Sequence
  Description of Artificial Sequence: Synthetic oligonucleotide
  Sense strand starting at position 3839 of SEQ ID NO: 917531
ucaguuacucuuuggaaau

SEQ ID NO: 1241077 - RNA, 19 nt, Artificial Sequence
  Description of Artificial Sequence: Synthetic oligonucleotide
  Antisense strand to SEQ ID NO: 1241076
auuuccaaagaguaacuga

SEQ ID NO: 1241078 - RNA, 19 nt, Artificial Sequence
  Description of Artificial Sequence: Synthetic oligonucleotide
  Sense strand starting at position 3952 of SEQ ID NO: 917531
auuugaaggucugacagaa

SEQ ID NO: 1241079 - RNA, 19 nt, Artificial Sequence
  Description of Artificial Sequence: Synthetic oligonucleotide
  Antisense strand to SEQ ID NO: 1241078
uucugucagaccuucaaau

SEQ ID NO: 1241080 - DNA, 4001 bp, Homo sapiens
gctggtctcgaactcctgacctccggtgatccacctgcctcggcctcccaaagtgctgggattacaggcgtgagccaccgcgcctggcctaaaatctttttttttttttttttgagacaaggtcttgctctgttgcccaggctggaatgcagtggtgcgatctcagctcagggcaacctctgcctcccgggttcaagcgactgtcccacctcagcctttttagtggctgggagtacgggcgtgcgtcaacacgctcagctaatttttgtatttttggtagagatggggtttcaccatgttgcccaggctgatcttgaactcctggactccagtggtccacctacctcagcctcccaaagtgataggatgacaggtgtgagccaccgggcatggccaggatctaaatctagagcctacaagaattcctgcaagccaggaacataggaaatccacagagaagtgggaagggatataaacaggcaattcaaaaaagggaaaacccacgtttaataaacacatgaaaatgtaggccgggagcagtggctcacgtctgtaattcctttatgcactgcccgtcgggaagtgtaatccctgcacttcgggaggccgaggcgggtggatcacctgaggtcaggagttcaagaccagactggccaacccccccatctttgctaaaaatacaaaaaattagctgggtgtggtggcgcgcgtctgtaatcccagctactcaggaggctgaggcagaagaatcgcttgaacccgaggcggaggttgcagtgagccgagatcatgccactgcattcctgcccgagcaacaagagcaaaactccgtctcaaaagaaagaaagaaagaaagaaagaaaatgtacacgatgggataccaccttacaccccccagactgataaacattacaaaaccagccgccactgaacgatggagggataccgggaaacaggaagctttatgcactgcccgtcgggaagtataaactagtgtgaccattccaaagaacaatccagcaaaattagatatgaccaggacccaactctggggtggatacccagagaaatgcaacaatatgcacaaggagacaactgccagaatattcgttacagtgtggcttgtgggggtgttaatactagaaaaaaatctatccaccactaggggaataagtctatgcacacagcacccctcatgcaagcactcagaagtgaaaacaagatgactagcatggatggactcaaaaacacaatgttgaggaaaaaggtttaaagaaaaatcacagcatattatattgaagaattcgaaaccgctatatagatttcaaagtaacacttgcacaaatttacccaaggtggaccgtaaagccacttatataacacaccagagtggctgtctgaaaaggggagtgaaaggggtctgggaataggaacgaagagaggaagtgataaaataaacaaggagccttgcattggcccacagggtgtcaagaactgagaaggatcaactcaattttgtgcacctgaggttcttcttttcaaaaaaagaatgccagttgcgagggtgagggtcccacaccgcaggagatggcacaagtccggccaagaacggagggggccgcggccggtgcggagcggcctagagcggcgggagggcggacgccccttcgagagctcctctttctctcagaagtcacgggggcgagacgggggcgccagggcggcggacgaggcacggagggcaggaaagcccattccctacagcccggaactcctgctcccaaacctcctccccgaccgccctgcttacctggcgccagctccgggcgcgggccccgcgaccgccatgacctgagacccgagggactctggagcccagctgcccctagttcagtactgggtagagtccgaggaggggcggggccccggctaccacagagacggcgtttgatagagaggaaggtgcgggagacgcggactctcccggaagcgaccgacgtctctaaaagtaccagagagtggactcggctgacccggcggctacagcgcccccatattttctgggagacttcccttttgacaataggtatccgagagtgtaactactttatggcaagtattttagattctgtgtataatagatgttttacatattctcccagagaagccagcatgatctttaaaaaagtataaattaggcttccagccgggcccggtgggttactcctgtaatcccagcactttggaaggccaaggcgggaggatcgcttgagcccaggaattcaagaccagcctgggcaacatggcaagaccccgcctttacaaaagacaaaagcattagccggggatggtggcgagcgcctgtggtccgagctactctggaggctgaggcaggagaatcacttgggcccggaaggtcaaggctgcagtgagccgtgactgtgccactgcactccagcctgggcgacaaagagagaccctgtctcaaaaacaaataaatagatgataatgatcgatagataagatagatagttgaatgaatgaaatgcttatcagttgactgattagtacccaaagggaggtgggaaatggctcaaaaaaaacccaaacagcatgatcccacaggtccctaaatttgaatctggatgtgtcttctcactttcctccaatccttattaagtttcaactgcaagccaaacactctacaacatgcatgtatcacttgtctttatgaaagttgcagtctagctgggtaggtcaatcagttgacaattacagatttttttttttttttttttttttttgatacggagtgttgcttttgttgccccggctagagtgcaatggcgcgatatcggctcacggcaacctcagcctcccggattgaagccatcctcctgcctcagcctcccgagtagctaggattacaggcatgtgccaccacgcccagctaatttagtatttttagtagagacagggtttctccatattggtcaggctggtcttgaactcctaacctcaggtgatctgcccgccttggctttccaaagtgttgggattacaagagtgagccaccgctcctggcctttttttgtttttgtttttgttttagacggagtttcgctcttgtggctcaggctggagtgcaatggtgctatcttggctcactgcaacctgtgcctcccgggttcaagcgattctcctgcctcagcctcccgagtagctgggattacaggcatgcaccactatacccggctaattttgtatttttagtagagacgtggtttctccatgttggtcaggctggtctcgaactcccgacctcaggtgatccacccaccttggcctctcaaaatgctgggattacaggtgtgaatcaccgtgcccggcctacagctgtctttatgaagtgctatgacaaacataccatacagcaggggttctcaactttggcgccattaagttttggggcctgatcattctttgctgtgtaggctttcctatgcaatgtaggatgtttagctgtatcccaggcctctacgcactagatgccggtggcattccttctgacctaggcatcccaaaatgtctctaaacattgccaaatgtcccttaggggagaaaggaccaaaattccagctttaccccaccccctagcattgagaaccactgccccagaaccaaagagaaaggcatttaactcagcatggggaaaagtggaatctagaaagactttgaagaggaaataactttattcaagtatgtctttcttattttgaaaaccaaaaaaataggatgcaatttttgaaaaattaataaggcaaccaaagtattaaagcaagcaacgtcacctctctagggtaatctaggtttacagatcttgtcccctttcagtctcaaaaatgtcctagtttggtattcggtggcattactgtcccagggtgcctcagcattgtctattactgtaaacttttaagaagtagcaggctgggcacggtggc

SEQ ID NO: 1241081 - DNA, 4001 bp, Homo sapiens
gaaatgttcttgggtctcacaacacatcccactagttccagtgccatgatcagggccaggggcatggcaagccctccatgaaggtttgctcacctaagtgaacccggctccaagaatcaaagaggacttgggatagtggaaatgggtctgggcctcagcctcagcacatcttatggtagccaataatcttctgctcagatgaagacatacgctagtattttgttctttcaggaagtgtctcttgagacttttttcactaattagtaaggcaagtaatagatggtccccaactccctatctcccactccattatcaacaaagtgggttattctctatgagtatgatgtgcaactttgattctctgcctaataaatgccctttactgccaaataaatgttaaataatcagccatcaattccacagagaccatcaaagtgaaaaacattagatgtcaacgttcccagaatcaccacatctgggagagaagtcctgttaatatgcagtttgacaagtgcaatcaggacattctgccacgtgttcagatccaacccagagctgggaggcatgggttctaggtgactgggcccctgcagagctgccagcactctgctgtctgcaatgagaataaaaaggaatagaagagaaaagagaccaggtgcagtggctcacacctgtaatcccaacactttggggtgccaaggcaggtggaatctgtgagctccaggagtttgagaccaacctgaacaatgtagtgaaaacccatatctacacaaaatacaaaaatcagctcagtgtggtggcaggtgcctgtagtcccagctactggggaggctgagacgggaggatcgctggagccctgggaatgagccaagattgtgccactgcactccagcctgggcaacagagtgaaacccttgtctcaaaaaagaaaaaaaaaagagagagagagagagaaaagatccccgtttgtcatcatcactctgggcactccaaagtgaggtctcctgtgtctggatgtaatttttggatattttctaatcagcacaaattaaacaaaaggaatagaaagagggaagtaaaaatgccaataccttcccacaccaacaaaactaaatgaaatacccacgtgtcctgggtccacgatctccaaccaatacctggcttcagtgcaaacaagactgacaatatgttgcaggtggattcaggtaatttaagattactgtttaaaccgaggatccatgggaggaagaaaacagaaacaaaacccgaaacacccactgatacatttcagacttaaacaacataagaacttggcacaggtaatgccaagttatggtttcaacacactatgtacatctttagcatactggaggtgttttctttaaatacatgccagggagttcacactcagggaactaggcacggattttctgattcttttccacctacacagataggcccttgacctaagaggatcccgtccaagattacaacatatattactattgtcactattactaatgtcattcagatccatcttgtatgttagcaaaatggtcagataatagagattggtgtaggaattcaaccatctccctggcatctgtatttcagaagcccccaaaagttataacttcctgaaataccaaacctgagagtctcgctggtccaggttgggattgaggctgaggatagcaagggcaaccaaagagccctagagttctcagggggccgccgaggtcccccggaagccacaatgctgggccttgggcccgggccagcagaggggattgcggcctcggccgcgccctggccccctgccccatccccgcgcagcctgagccgtcggggcccggccaggggtggaccgggcggtactcaccgcaggttgcggtcgaccatgtcccaccaggcggccacgcagctacgggctgggggcccgggcggctcgggcgatgcggccgcctggcagtcctgcgcgtccatcccgcgccgtgtcccgatacgccgccaccgccgcgggagctgcagtccggagcagccgcccgcgaccttcccgccccggcggcaccgcgcccgccctcctcctccgcgcggtcaggcaggctggtacggcgggggagacgcggcccgagggtgcgctccgcccgggtcaggctgttcgcggccacacacacacacacagatgtcctaagcttatagctagctatgctacattttattttaaattgatttccattatacttctgtgtgtgtgtgggtgtgaggcgcgcgcaacgcagtaaaatatgttttcaccatggtactactaacacaaaagtttgaccgccacagcttttgattttcatgaagaatataagctttcctctacttaaacctcacttttttctttttctctttttctgaagcctccttgtctccaattccccatccacccccaaaatcctcacagccccccaccctgtcacccttactatagaaagaatttctttggctccctttgatttactaatgatttgtctgtccacgtggggttatgaacacaattactccatgtagcaaaaaattaagaccttttcggtattttgtttacgtagcagcatgtagcagaacctcatcattgtaccaaggagttcacaccttgaaactttgaccttggtacaggtttacatcttggtgcaggtttacattgtgcaactgtctcctaggagcaggaactgtctaccagagctactctagggaagccacggcctgcatgtgtggggacaaaggaggaagaaagggaattaggttttatttggatacattcggatgccagcatcaaggcttcatcttggaggcaaggtgcaaatcttaagaggtgaaatgggttttttgtagtgtctgtgttcagagggcacagcagggggctgtcagcaccagaaagtgcgtggaaacccatctgcttgaggatagtaagatggtctgggggaaaatacccacacttttcaagaaagggaagttttctttgagtactagctcatttcatggaactgtcagggcaaagggggattttgttcactgcctgttaatactcttatacttgctctgggaatgtttgttttctttgtttctttctctttccttccttcctttctttctttctttctttctttctttctttctttctttctttctctttctttctttctttctttctttctttctttctttctttctttctttctttctttctttctttctttctttcttgtcatggtcttaccctgtcactgaggctggagtgcagtggtgcaatcatagctcactgtacttgaactcacttgaactcctggactcaagcaatccttccactccagcctcccaagtagctgggactacaagcatgcaccactatgcctggtgcgcgcgcgcacgcacgcttgtgtgtatagagatgagatctcactatgttgcccaggctgctatcaaactcctggcctcaagcaattctcccacttcggcctcccaaagtgctgggattacaggtctctgtcaccacacctggctggaatgttcagtttctgattcacacacatcaagatagaagaggaattagctcagaaaggaccaatgggatccaagcctgactgatgagccagcagcaggtgggttttcacagagccacaacctgcatgatgagaaagcttcaagcagatgtcggctctacccttggagttcttcataaacgtggtctggaatctcccagaacttgttcagggaagctctggatgggactctggggccatgccaagtggagatggagggatcaaagatggggaggagagcttggaggagagaagaacagctgcatatggtcccagagtctatttccatctacttgctcaggttgagagaggatatttccatctacttgctggatgaacaaagttgtaagccccaagtctagggatatgtttgaaatgctcagcaaaaatctctgaaattggaaatcactatgg

SEQ ID NO: 1241082 - DNA, 4001 bp, Homo sapiens
ctaaactctgaaggccagagttccaattttagcactgtcacttaccagcaatgtgactgtgggcacattatttagcttttctgtgtcagagcttcctcatctttaaaagggaggtaataatatctacctcatagggttgctataaagattaaaagtgttaatgcatctaaagcacatagaatattgcctagcacaaactcccaatcaactttctttccccccagctaaatcataagttgtctacattcccagtgttttgcaagtagcaactctcagtggatgtttgaagtttgaaagaaaaactggggttgcagctgggagtgatacatcaatggttttagccagatgagagttgtcaatatcaatcgatctaatcctagggagactcagaatccttttaatattctactggaattccttgtaggcttgaagcacggggaccaagaccacaggattttgtcagccttaagagacaaattttctctctaaatcacagactgtgacaagtcagatcataacacctggatcccacattgtcctgttactgtacaaagcagagttcaggagaaacgctacccaaggaacagcatcatagactgctcagcagagagtccttggtgggagaattactttgctttccttcttcaccaaaaatgttacaagtaaacactggaaatggtgcctggcacactgtatgtgctcaaaactatgcgggaggtaagggctggagtgggaaattgaggcaaggagcagaaaagacattcagccatgaacttaacctggctaggacggtctctgtcaacttgatgggggtgaagcacaaggggttctgtgctgggagagaatcctgttctagacctctgtgatcttgggcaagtctcctaatttctatggacaccagcttcttcatttttaaaaaggagctgaactacctgcatgtcctccagctctaatattctgcctccctaagtcctttaaagcattgcaaatttcctcttggaaaagtcatcttagaaagtaaaacattcccctggacatttctttcaagcccagcaagctattaattatggtcataaagttaattagttccccggacttccagttctacaggtctgaaaaacaggattactgggtccaggaaaggcccagttctggtgaaaccaaggctcggctgggagctgagtcattcttctcgtagcaactttttcttactcctatcagattgcgaactgctagtcacaccacctacaggtggtatcccaaacctgatgcccttgaaagagtggtagcaaatcccaatagctctaaatctgaaaccattgcattaaagatgttgttacgattattaaaagcattatcaactaggatcacatgcggctacgtgtctcggtgggcgacagctaaagaaacttgcaagcccgttgttccacaccaatttcagcgcgatggagacctctccagtctctccacatcttctctttgccgggcggagggaggaggctctctccatccccacgactgccgttctggggggcaagtcgagacgagcacgcctggctgctacctccgcacccgcgtcccacaagcttgctttcggggatctcacacatcaacatggaatctctccagaggccagaggagaatgaggggcactcgcgaggactaaggtagaaagccaggatccccgggctgcgggcgagcgcgtctcccatggctccccaggctcagccgctgcctcttctgggcaaatgcaaagcaagcaacgcacccaccccccgccctccccggaggccgacctggaaaaggaagagcgggaaggtgtctacaactgttcctcagccacagacagtcccaggatcatggcccagagagagagagagaaagagagaaagggacaggattaactcactgctgctccagatcatcggccatagtaaacaagccttgccaggtcctggcgagcccgcccagcgcctgacgccagcaccagctgacccgggaggccgcggggagcaagggggcgtggccgcgcagggggcagggctcgcggcgggccggcggtcggcggtgggaccctcaaaactctgcaacttggtttcagctagtggggcccttgctgtgttttcaatcactggcatgtgtcccggcagagatgtctctgacggtctcagaatgggacagtaatcctggtcacacatttgggggagtccttgcaggagctccgacagccctcccttctctcataactaaaaagtggtagaactacgcctgcacgctcgcacccactctttgggcttcccattgtaactgtgtcctcctgaaatcgacccttgttaatgttccttctagtaagaggcttaaatgtttgtggagacaacgccattggttgaatgctcctacaaagggcctggatgccagatttcgaaactaaaatacaggacacctagttaaatgtaaattccagatttaaataaagcaaatacttttttagaataagtatgggccatgcagtatttgggacataagtaggcatcctgtattttctctggcaaacctaaacctatatgacatctgccaaaatgggcatatctctgctctgatgttgactctgaccccaacctattttccagggaaaatatagctcaactccaggtcaccctcagtttggaggataacagttgaaggactcaccaataaggctaggtctcctttcggtatgtaaatgcggggacagggagataaggctggcttggcccagaggtcctgagtgcacttcagtttgctcagcagaggagctaaatcttgaggctggctgctgaatttgcttgtaccggtaaacagggcctgacctccctggaactgtcagatttcagatcatccccttagttaaaaccagactaggggtggggcgcggtggctcacgcctgtaatccctgcaccttgggaggccaaagtgggtggatcacttgcagtcagtagttcgagaccagtctggccaacatggtgaaaccccatctcttactaaaaatacaaaaaattagccaggtgtggtagcaggcacctgtaatcctagctactggggaggctgcggcagggagaattgcttgaacccaggaggcggaggttgcagtgagccaaaattgtgacactgcactccagcctgagagacagagtgagactccatctcaaaaaccaaaaacaaacaagcaaacaaacaaaaaaaaccagactggggagtggtggaggatgggtgagagaatgctggtgcacaggggtttatcaaagcatttttctttagccttcctgcaggacccagatgattctgagatttcttctttgtagcaacacagtgttaagctgatcattataaagacttaacgtttaggagaaccagcatttatagagtttaggggcttaggaatttgccagatgtggtacaaagtagttcaactagcagaggacttgtctctttcatgcaacctttttttttttgagactgattctcactgtcacctaagctggaatgcagtgtcatgatcatggctcactgcagccttgaactcctgggctcaaggggtcctcttgcctcagtcttctaagtagctaggactacatgtgcccagctaattttttttttagtttttgtaaagatggggtcttgttattttgcccaggctggtctcaaactccttggctcaagctatctttctgccttggggtctcaaagtgctgggattacaggggtgagccaacaaacttggcttcgttcaatctttcaacaaagcacagtggttctaaacttcagtatgcatagaatcatctggtggatttattagaaattcagatttctgggctgggcatggtggctcacgcctgtaatcccatcactttgggaggccgaggcagatggatcacgaggtcaagagtttgagaccagcctggccaacatggtgaaaccccatctctactaagaatacaaaaattagccaggtgtggtggcg

SEQ ID NO: 1241083 - DNA, 4001 bp, Homo sapiens
caacctctaaattaaacgcaatgacttaaatacacacaattaaactgtattccttttccagggacctgaaaaccctttactaacactgttctcattcatcttcagaagacccataaaggtagccatggttactgttactaaatgtacagatataaaatgcaggcacacagaatcagtgacctggctatgtcataatatcagtaatagaaccagtactaaaatccctattatcttctgcactttcgccaagtgccccttctaaatctgatcatgcatgtaaaattacttaaaatactcaaaccagccatggggctcctggtttttgcctgacggaattacttggtcaaagggttacccagtaccagggtcaatttgtataatttccagtactgtggcacctagatttatcaaatttataaaattttcaaagaggaagctacagaagaaaatgaccacagaccctgtaaactgtggtctaacctagtctatccacacaaacacacacacacaaacacacacacacaaaactatcagcttctgtataagcaacggtctgccaactcaaccctggagccaacccagacctaatctgcactacctgccacgtatcctgttgaactctaattaaaaccaagacatcctcatcttcccttctttaaaccaaacctatacacttgaatcgagctacacctacctcatgacaatcccaccttaatctactcaaaccgattcaaaatccccaatatatatcaacctgcctcgcctctctcaccaatattcaccaaactcttaaccacccaaattgccactagatgccactaaattagagacctctctctcatcaagtcccttcaaataaaggtctctcttcatctcacctcctcatctaatcgagcagacattttaccctaccccagtcctattcgtgcagataccgataccaaccccatccaccccttcgcgcaactatacccctaactccgacccagcccaactcgcccccctcaggccagcaacgccgtaggttgtagtgggatttaactccttctgcagcgcatgcgccgaaaccacagatacaaacaaggagggggtgggggaaggaggaaggagcttaagacactcctggagagtagtgcacaccctcccatttgggctcgcgctgctgccgttaaggcgggaaccggcgcgatctccattccagcgcgaacctcatcaaccaccgtgcgcgcggatccagaggctcgcgctggcggcctgagcgagctcgcgccgagcccggatactgcgcctgcgccgcggcagaggctcgtctctaccgggtccgctctcctccgacaccccagcaacgccgactcctcacccctttgagccgcttgaccagggcactcttctgcccgctcttggctaggcctcgctgctccagtgcggccttcaggtcggtcacccgcagcgcctgaagaggcttcccgtccagagtcacctcctccagctccgccatcttgcgtgaggtactcgggtccgtcccgacggcttcgggcatcttcggtaatttccgccaacgcccttcgaacgtaccgagatgaccccgcccactgccatactctacccctcgattaccactcagaactccccgggttcctccggatgtcctcggatgtttccgtctccacatcgttaccaatcaattctttccatccgccctgcagcgccccttttctcgccctgctttcaggctcggttttcttcgtcttgccgaagctttgaatcgaatatattcggaaaccctcgaccctggtataaccataatcggagatgttcgtttatttccggacctagagatgaggcgctggggcgcttgggtgtttggggcgggtccgaggccggaagtgcgtgggctgccgggctggcccagcttagggttttcaggaaatttggaagctgccgcagtagttggagtctaaggactcgtgacaatcttcgggtgcccttcgagagaaaaggggaggtaagcggggtagaagtacctctatgggccgggtcagactcggtgtttgcggattaccttaatagggcaagccccccactccttaacgcaaacagcttctgccctctgtcctctgaatcatagccactcccatcttaggctttttttggggaggggcggggggctggtgcggaatcggaataacaagctccgtgggggtgcgcaagaagcatcgccgtgtcttcggacccagactatgaactgatctatgacgctgaacttgagtttgagtttgccttggaagccatgtggcaagattctgggaaagttcttccttgctccgcagaagagagtaagttcccttggaggaactgcttcctgtagggcaagaactggaaaatgcaagcgccctgaacttttttggtacttgaactaatattaattgtttaggggcttctttctttgtcactaccaatcctccaacttgatgcagaagaaacacaaacagtaaaataggtcacagacaaatagtttagagatttaagagatacgttagagatttaagagactgaaaactattaaagtcaaattggctgatctttccgttgcattcatgatgcaaaatcagtggcaaggtgccgggcgcggtggcttacgcctataatcccagcactttgggaggccgaggcgggcggatcacttgaggtcaggagttggagaccagtctggccaatatggtgaaaccccgtctctactaaaaatacaaacaaattagccgggcgtggtggcgtacgcctatagtcccagctactcgggaggctgaggcaggagaatcgcttgaacccaggaagcagtggttgagatcacgccattgcactacagcctgggtgacagagcaagactccgtctcaaaaaaaaaaaaaaaaaaaaaaaaaattgcaaggcaccaatagataccatactaaaaaaaaaaaaaaattttttttttgtcactccactctgggtccctccactctgacgcaggctggagtgcagtggcgcgatcagggctcactgcagcctcaacctcccgggctcaggtgatgctcctacctcagtctcctacgtagctaggactacaggtaggcacctctacgctcaactaatttttttattttttgtagggatgaggttttgccatgttgcccaggctggtctcgaacacctgggctcaagcgatcctcttgcctcggcctctcaaagtgctgagattactttggaagtgcaagaaccaccgcgtctggcccatactaaatattaaggacaattgtttaaagacatggattgtcataaaatagtataacacttgttagatctctaagccaacaaaccaactggactcttttttaagaacgtctcaaacacccgggcttctggttctttcatgcgttaccttattttgagcaaggtccttactctgctttttaacttttcctggtgctttacaggaaatgtaaggaggtaacggatgttatggagttgttggcatatttcagaggcttatatgcacattgaaggctctttcatcataaataatgttttttctttcttcccccactgttgatagctgcaaaacaattagcatcagccttgaccagctgcacgtactagattttaaaatgtgtgcattttcattttggagaagatgtaatggaccaacattaatcattgtttttttctttacccaacctggcacatagaagtaagaggaagagaatgaacaagaaatatattggttatttttaggttctttataagaaagatggaggaagacagtgggtggggaagaatgggtttgaaaaaggcaggcaaataggaaatgaagttatttttggtgatttttctaaggtagttggataataatctaaataaaggactcttattattttgggtctttgaattcataaaaagtaattttctctgtagatgctaattgagtgtggtaagatgtcttgttgcttgaaagttgtattttcgt

SEQ ID NO: 1241084 - DNA, 4001 bp, Homo sapiens
caggtctgttttcacttgtgtccatggtcacttcctccttctcctcactgacaggaggggggagtggtggtgggggggcgggcagaaaagaaccaaggggaagagagagcaagatgttagttactgggtcaggaaaccctcctgcctcatcacttgggtgggattaggagggctgcttttctgatcaaggttagagaccttgtcccaatgggaaaagtgggaaatagattttccttggggaaagagcgtggatcacagcaaccacatccacctattgcccagatgagttaaaagttgtcatttgtggggttaggactccaactattctcaggtaataactcaccagagtactcctatatgaaaggagaaaaaccctcctctgaaaatagtcccacaaaagtgactgtgatttgcccacaaccctgtggcctcagtctccctggccaaaggcacctttatatggcaaaattgcacgagaaacgaagggaagcccgattcccttaaaaagacaagaaagaatggccaaggctttggcaaaaaagcctgacctgtgtttaatcaactgcttaataagtaaaggcctgctgatcctcaggatctggagacaccagcatggagaaaatggtggggggtggggggtgcggggcggggggtgggagctgcagggaagaagcaggcctggtgaaggttcaagcttcaaggaccctctctcattcaaaaggaaaaattaaaactgctgaattgagtatgagagctcagagattagggccacttttacctgctcagaggtgtagaaactgttcctacattcggctttcacccagtttctcccactccctcattccaacttccaagagataaagagagcaggcctcctagtcaggacacaccctcccccacacaggcagcttcccccaagaacaccaaacccactctcccactcttaatctcacaagttagctcccatttcaggcaaagaatcccagagattcacttcagataaactatctttccacctttgatttctgtcttcgtccccaacttctatctcaaatctcaccccctctaccacccaaacaccaagcaaaaaaaatcaaatcaagatgatcagaggcctaaggctcaggagaggggaaaccaagcctcccaggccgataaccaccaccagaaaagtcagcattcccaacaggctgactgactgacactcagaggtcagaagaacctccctagagcagtcaagaagggatgcactaggggggttagggggaggggaaaatcggaactgtgcccccagctaaacaggcccccagagaaacacgagatttagctgcttacatctagagaaaaggcttatacaaaaaaaatatctatttcccatacagaaagggcatgtggggccaattagaaactgggcaggcaggacaaagggggaaggcagaatgactgaaaacaaaccaaaacgaaagacggaatgaaagccatgaggaagagaaggaagacgaagggagctagggcggcggggaaaaggcatacatggaaatgtgaagctctcacccttctttgctttctgataacatgattttttttctccccctggaagtgctgtttatccctttctggaatggaagaaataacaaaaaccaaacaaaaaaaatcctaaaaaaaataaagaaaaaaaaccacaccttccttgttccaagatcccaccacctcctccccagccacccgatccagagagagaaaattgagatgtagcaaccggggatccaaaaaatggtaaatggaaggggaggtggtggtggtgcggggaggctaaaacagatctggcttttaagagataagcgttaagtcctcacggcaaaccccgagttcggctggattggtctctctggagaaggaggaagagggccaggctgctggtagtggctggctctattgtattggcggagcggcagcgatcagccggagacatgcaggggagccatcttgccacttacccagcagcctgtgtgtgcggatgggggagggccttgctgcagcaggggaggggaaagaaaagagggagggagctgagtgagcaaggttcttatcctttggcaggccacagggagccgactgctggctccagaggcctggccttcttttctcaagttacagcagctacagaggcttaaccccccagggctggagtgctccctcctggtcttcccagggggcaggggagggggctgggtggaggacatgtaaagttacagctgcttgattggaagattctagaaaatagagagaatagaaggcaggcaaacagtagaggtgggagtgaaaaaggattaaataagaacgataaagccaaagttgaaaagtgattaaagaaggatggtaatgaaagctggatagagggtggggcatgagcaatgttttatgtgcctaccatcctctatccagtaatctaggcatggaacactgaaaccagaccaaccagtcagatgctgcaggtagggaggtgggatgggaattgtcactatccaatcactacagtaactggctgctcaccccggcaatgaccacgtgttactactccaacatgtccttttcccagggatggtggagggaagtggatagcagggagagttcttttttcaaataccagtagaaggggggcagggttggtgtctctgaagagatgacagacaactttgttttatagagtctttaataaggtcaccctgccccagggtccactcgggccagaaaaagaaaggataaacagggcaaggggaccttgggtagctgaagcttgaaggccacttcttgaagcaagggctccaaggtgaggctctaaagtagataagacagtgaagtgagagtgctgctatatggggcggggaagatcagctgggcagaaagcgactgggaactaagcagaaaatattaatcatgggaatcttcactagaccaaagtgggaaacagatgctaatagttcaaaaagtgctcagtagatactcaaaatgcttatttgttgactgcagagatgttccttttgtgtcctagtggcagtagaagtttacactaagataaacttctgagaaccaaagctcagtgtctcgtgtaacatttgagcttttaagctaggaatgaaattttctccccgctgcttaaaatcttacacttacaatgccaactgcatgctaaagtggccatatttatacattactttaaatgtttcctttcacatagtggtccctgtctgctcagggttaagagtgaagactctggagtcagactggctagccccactctgttaaaagttgtgtgatagtaggcaagttcctggttctgtatatctgtcttgtaatctgcaaagtgggcatagtgacaatacctatttcatggaacagtgtagttaagtgttagctcttaagagtctggcttggaggacaccccaagtgaaggtacagatacatgtaaaatacatgcacacttaataggccattatctcatctgatgccacctctggggctctgagtttcctcaaaagagtagactgcttgttttctgaggcaaagccattcagtgattggcatgacaggttttcagcaatgcccttatcactctgtataataactgctactttatctgccccccatctctaccctgcataattcctcaagggtagggattgcatctcttggcccctagcccagggcctaacacaaagtaatgttccctaactatttctgaattagggtgtcattgtgggtaccaagtggacacttactaaatgcttgctaacctaaaagttttcttattgaaaaaaaaattttttggctgggcatggtggctcacgcctgtaatcccagcactttgggaggctgaggtgggcggatcaccagcctgaccaacatggagaaaccctgtctctactaaaaacacaaaattggctgggcgtggtggtgcatgcctgtaatcccagctactcgggaggctgaggcaggagaat

SEQ ID NO: 1241085 - DNA, 4001 bp, Homo sapiens
ggaacgaacaggccctgcagggggcagcagctgcagctggagcaatggtgggcgggcaggcaccaaaacctctgcactgtcacaggcccagccacctggcacctcctagctgccatggaaatacagtgagaaaaccagttggaattctttttattaaaaaaaaaagtgacttcctggtccatacataaataagaacattgaaactacttgaaaattttttgttgttgttgtttgttttttgtttttgtttttgttttagatggagtttcactcttgtcccccaggctggagtacaatggcgtgatctcggctcactgcaacctctgcctccagggttccagcgattctcctgcctcagactcccgagtaggtgggactacaggtgtgcaccacctcacctggctaatttttgtatttttagtagagacggggtttcaccatgttggccaggctggtctcgaactcttgatccgcctgcctcggcctcccaaagtgctaggattacaggtgttagccaccgcgtccggcctgttttttttgttttgttttgtttgtttttaatattatgtgtcttttctctttccttacaatgcctttttttttttttttttttgagacggagtctcactctattgcccaggctggagtgcgtggcacgatcttggctcactgcaaactccgcctcctgggttcatgccattcttctgcctcagcgtcccgagtagctgggacgacaggcgcccgctaccacgcccggctaattttttgtatttttagtagagacgagttttcaccgtgttagccaggatggccttgatctcctgacgtcgtgatccgcccgcctcggcttctcaaagtgctgggattacaggcgtgagccagcgcgcccagcccttacaatgtcttttaactgagcactaggtttgagggacctctcagttttggagcggcaggggcaattccccaaccaactttccattccattcctgtctccttacactaacctccggaatgttggaagctacatcctttctccgtatgaaaagcgcagggacgaaaaaaaataaaaataaaaaaataagtgtaactcccctcaaagggccgggcgcagtggctcaccctgcaatcctagctcttggggaggcagaggcgggaggatagcttgggtccaggagttcaagacctacctgggcaacatagcccggggtggtggtggtggggcgggaggagggacacacacacaagcgaaaagagcggggcggggcgaaggggacacacacacacacacagtggaaagcgcaggaacagggatgggcagaggggaacaattagcggaggtgagtcacctggcggcaggaagagcgtgcctcgcacccggcccgcgcgcaccggctcgcgccgcaccccgggcgggaggaagtagcgctcgtgccgcacccggcacagcagccgcccggggtcggggtcgtggccatccagcacctccagctccacggccaagggcgttcgcacgtcgcgcttcaccagccgcaccaagggtttctcgggctccaaggcccagagcagccccatgggctcaagccccgcgaagctgccgcccagcgcgggcgcgcgctccaggtccagctcgccaagggtgtcggcgcggtagcgcgcgtgggcctggaaaagcgcgcccttctcgtcgcgcagggacgcgcgcagcgtgaccggctgctccggggctaggccgcgcacggcgattcgcaccggttcgtcccagcagcagcggcccgcgggctccaggatcagcgtcgccgccatccgagcaggaacccaaataatccggccaaactgcctcagctgtggagacccctgcaactctgcccaactcttcctctcgggctgccgtcgcaggctaaacgcccactagggcagagctgtctgctaatgtgagcggggaaggccagagtccagccgatcagccagaccaaatatagacacactggaacttgcttaaagtctcctgtgttgaaacctccactttatgttggaaagcaacttcctaggtttgcttttcagaagcttgctggctcgcggaatgggctgggccaggactggttcgtcccggctactcgggaggctgaggcaggagaatggcgtgatcccggggggtggagcttgcagttggccaagatcatgccactgcactacagcctgggcgacagagcgaaagtccgtctcagaaaaaaaaaaaaacaacaacaaccaggcagctagcagtctccaggctccaaactcctgatggcgaagaggaatgcaggactggagttggttttgatcactttgttgaataattcacactcattactaatcttagggcttttctttcaaaatctgcaccatggtgttttgctttcgtgttctctgtatatgcctatcctccacatcactcccacatcgaagggtgctggcttcttactagctgtgtgacctctgagctttattccttacaggtgtaaaaatagccaaatgaggtaatagttattaatttctcgaactcctgactttgtgatccgcccgcctcggcctcccaaagtgctgggatttacaggcgatgagccaccgcgcccggccaatagttattattttcttatactggtttctcatttttgtcccagtcaggcaagtgttacctctcatctttttttttttttttttttttttttaaagagacagggtctcactacgttgccagtctggagtacagcggcggtttaccatcactgcgcacttacaagcctcaaactcctgggctaaagccatcttcctgcctcagcctctcaaacacctcaagggactaccggcgctccccatgcattgggcttttttctactttttcataggctattggttccaaccagaggtggtttttttttttcatcaaacttaagctttaggcccctcccaagcccttgtacctgatttcataatttcctatcttggtaattagagaaacctataaatgcgtaagcttcaaactcacaaaacctgtgtttgcctctgctcctaataaggctgtcctcaaggtaagcctttttatctctttccaaatgctctcatgtcccatgtcccatgtcattatcatacaactccctgttagttgtaattacctttgtataggttctgtggcacacatcaagtatattctgtgcatagaagtctcaggaactaaagaaggtaaataatagtagctaattgttaatacttacaagaaccgtagtagtaaattaaggcccagagaatttaactgattttctgaagatcatacagctgggaagtggaagttgggtgaggtggctcacgcctataatcccagtttacttggaggctgaggtggcagggtttcttaaggccaggagtttcagaccaacctggataagaccctgtctctaacaagaaaaaggggccaggcgcggtggctcgcgcctgtaatcccagcactttgggaggccgaggcgggtggatcacgaggtcagcagatcgacaccatcctggctaacacagtgaaactccgtctctactaaaaaaaaaccaaaaatacaaaaaattcgccgggcgtggtggcaggcgcctgtagtcccagctactcgggaggctggggcaggagaatggcgtgaaccctggaggcagtgcttgcagtgagccaagatggcgccactgcactccagcctgggcaaaaaaaaaaaaaaaaaaaaaaaaaaaaaaaaaaaaaagaaagaagaaaaagaaaagaaaaagggagagggttcatatgtttgaaatctgattctcaaggctgggctctgaacaactatgtttaactgtctctcacaggatgttgaagaagatttggaaaagaaactcatattggtggatatataaactggtatgaccttttcatggcaatctatgcaaaaatatttaaaagatcccttctctttgactcacagttccacgtctaggaatttgttttaagtata

SEQ ID NO: 1241086 - DNA, 4001 bp, Homo sapiens
ggcccagccacctggcacctcctagctgccatggaaatacagtgagaaaaccagtcggaattcttatttaaaaaaaaaaaaaagtggcttcctagtcaatacataaataagaacattaaaaaattgaaactacctgaattttttttttttttttttaagatagagtcactcttgtcccccaggctggagtgcaatggcatgatctcagctcactgcaacctctgcctcccgggttccagcgattctcctgcctcaacctcctaagtagttgggactacaggcatgcaccaccacgcctggctaatttttctatttttagtagagatggggtttcaccatgttggccaggctggtctcgaactcctgacctcaggtgatccgccggcctcggcctcccaaagcgctaggattacaggcgttagccaccgcgcccggcctgttttgtttttaatataagtgtctttttcctttccttacaatgtcttttttttgagacggagtctcgctctgtcgcccaggctggagtgcagtggcgcgatctcagctcactacaaactctgcctcccgggttcacaccattctcctgcctcagcctcccgagtagctgggactacaggcgcccgctactacgcccagctactgttttgtatttttagtagagacggggtttcaccgtgttagtcaggatggcctcaatcttttgatctcgtgatctgcccgccgagacttcccaaagtgctgggattacaagcgtgagccactgcgcctggcccttacaatgtcttttaactgagcactaggtttgagggacctctcagttttggagcggcagggacacttccccaatcagctttccattccattcctgtttctttacactaacctccggaaggttggaagctacatcccttcttcgtgtgaaaagggcagggacggaaaaaaaaaaaaagtgtaactcccctcaaagtgccgggcgcggtggctcaccctgtaatcccagctcttagggaggcagaggcgggaagatagctggagaccaggaattcgaaacctgcctgggcaatatagcccgggggcgcggcgggggggcatacacataagcgaaaagcgtggggcgggggagacacacaaagtgaaaggcgaacgaacacggaacaattagcggaggtgagtcacctggcggcaggaagagcgtgcctcgcacccggcccacgcgcaccggctcgcgccgcaccccgggcgggaggaagtagcgctcgtgccgcgtctggcacagcagccgcccggggtcggggtcgtggccatccagcacctccagctccacggccaagggcgttcgcacgtcgcgcttcaccagccgcaccaaaggtttctcgggctccaaggcccagagcagccccatgggctcaagccccgcgaagctgccgcccagcgcgggcgcgcgctccaggtccagctcgccaagagtgtcggcgcggtagcgcgcgtgggcctggaaaagcgcgcccttctcgtcgcgcagggacgcgcgcagcgtgaccggctgctccggggctaggccgcgcacggcgattcgcaccggttcgtcccagcagcagcggcccgcaggctccaggatcagcgtcgccgccatccgagcaggaaccctaatgatctgaccaacctgcctcagctgtggagaccccaggaactgcgccgaactcttcaggctccattggtacagccgggacgctcgaaggacagcaggagatgaggccattttgaattcagacctgagaacaactgaatgggggtggggagaaagaagcttgttagacatcctctcgggctgccgtcgcaggctaagcgcccactagggcagagctgtctgctaacgtgagcggggaaggccagagtccagccgatcagccagaccaaatatagacacactggaacttgcttaaagtctcctgtgttgaaacctccactttatgttggaaagctacttcctaggtttgcttttcagaagcttgctggcctgcggaatgggctggaccagggctggttcttaaagaaccaggcagctagcagtctccaggctccaaactcctgatggcgaagaggaatgcagagctggagttagttttgatcactttgttgaataattcacactcattactaatcttagggcttttctttcaaaatctgcaccatggtgttttgcttttgtgttctctgtatatgcctatcctccacatcaatcccacatcgaagggtgctggcttcttactagctgtgtgacctctgagcttcattccttacaagtgtaaaaatagccaaatggggtaataggtagtaatttctcaaactcctgactttgtaatccgcccgcctcagcctcccaaaatgctaggatttacaggcatgagccaccgcgcccggctaatagttattattttgttttactggtttctcaattattgtcccagtcaggcaagggttactttttttttttgagagacagggtctcactacattgccagactggagtacagcggcagtttaccatcactgcacttacaaacctccaactcctggtgctcaagccatcttcctgactcagcctctcaaatacctcaaaggactaccggagctccccatgcatcgcgcttttttctactttttcgtaagctattggtttcaccagaggtgtggtgtttttttttttcatcacttaagctttaggcccctgccaagcccttgtacctgattttataatttcctacctgtgtaattagagaaagctataaatgtgtaggcttcaaacccacaaaacctgtgtttgcctctgctcctaataaggctgtcctcaaggtaagcctttttatctcgttccaaatctctcatgtcccacgtcattaatcatacaattccctgtcagttctaattacctttgtataacacctcaagtatgttctgtgcctagaactctcaggaagtaagaaggcaaataattctgtgtctggaattggttccttctggtggattcttggtctcgctgacatcaagaatgaagccgcagaccctcgcagtgactgttacagttcttaatacagttctgaaaagtagtgtgtctggagtttgtttcctctgatgttcagatgcgtccggaatgtgttccttctggtgggttcatggtctcgcttctcaccgacttcaagagtaaagccacagaccttcaaggtgagtgttacagctcataaaggcagcaggtccagagttgtttttcttgttcctctcagtgggttcatggtcttggcttcaggagtgaagctgtataccttcacggtgttacagctctgaaatgcagtatggacccaaagaaggagcagtagcaaggtttattgtgaagtacaaaagaacaaagcttccatcagcctggagcggaactcacgcaggttaccactactagctggggtgaccagcttttattcccttatttggccctgctcatgtcctgctgattggtccattttacagagcgctgattttccattttacagagtgctgattggttcgttttacaaagtgctgattggttcgtttttacccagtgctgattggtgcgtttacaaacctttagctagacacagagtgctgattggtgcatttacaatcctttagctagacaaaaaagttctccaagtccccacccaacccagaagcccagcggtcttcacctctcaatagtagctaatggttaatacttacaagaaccctatcagtaaattaaggcccagagaatttaactgattttctgaagatcacacagctagaaagtggaagttgggcaagatggctcacgcctgtaatcccagtttacttggaggctgaggtggcagggttgcttaaggccaggagtttcgcaccaacctggacaacatagcaagaccctgtctctaaaaagaaaaaggggatgggcgcggtggctcacacctgtaatcccagaactttgggaggct

SEQ ID NO: 1241087 - DNA, 4001 bp, Homo sapiens
aggtcctagagaacaaaatattataaatgtaagccattatacaatttaaagaatttgctttcctggctggacactgtggttcatgcttgtaatctcagcactttaggaggccaaggcaggaggattgcttgaggccaggagttcaagaccagcctggacaatgtagtgagaccccatctctacaatctttttttttttttaattagtcagtgtggtggtgtatgcctgtagtcctagctacttgggaggcaatggagggaggatcacttgagccccagaggtcaaggctgcagtgaggtgtgaccacaccactgcactccagcgtgggcaacagagacagacactgtctcaaaaaaaaaaaaaaaaaaaagaaagaaagaaaagaaaaaagattgaaacaaaactttatgttctgttgcatcagccctctggtttttagtgtactgatatttcagatgtctatgtagaaagggaggaaagaaaaagaaatacccagagatggttttaggtgagaaaggcagtggagtctgaagtgtgacctgtgataaagcagcacatgaagaagtggagaagagacagtgtgcctagaacactagagaagacgacatggtaatagcttcattcactgtcatcattctgccttagacaagtcaggctgatgcctgtagaaatctgtagggtagtgattaatagcaaagtggataatgtacctgacgacctgaacctgttttttcatctgcagaataacaataccaacttcattgggatattatagagactaactgatagaatgcaagtaaaaaccgtagtacacagcctaacaaaaaatccttttttttcttttttctttttttgagacggagtctcgctctgtcacccaggctggagtgcagtggtgcgatctcggctcactgcaacctccatctcccaggttcaagcgattctcgtgcctcagcctcccgagtggctgggactacaggcgtgtgccaccaggctggactaatttttgtattttcggtagagtcagcgtttcaccatgctggccagtctggtctcaaactcctgatctcaagtgatccgcccatctcggcctcccaaagtgctgggattacaggcgttagtcaccacgcccggtaccaaaccctctattttggtagagtggccactgacatagtcaatgttagcttctctgatcttgctccaaaaccaaaccagtgctaaatcagcactggaaacaaacggagactcaggccactgacgctcacaccacccgccagcagcctggctcacctggcggcaggaagagcgtggcgcgcacccggcccgctcgcaccgactggcgccgcacccctggcgggaggaagtggcgctcgtgctgcgcctggcacagcagccgtccaggctcggggtcgtggccgtccagcacctccaactccacgacaaaaggaatctgtacgtcccgcttcaggaagcgccaaaaaggcttctcgggttccagggcccagagcagccccatgggctcgagtcccgcgaagctgccgcccagcgcgggtgcgcgctccaggtccagctcgccgcgggcgtcggcgcagtagcgcgcgtgggcccggaagagcgcgcccttctcgtcgcgcagggacgcgcgcagcgtaacccgctgctccggggccaggccgcgcacggcaatgcgcaccggctcgttccagcagcagcggcctgggggctccaggatcagcgttgctgacatcttggagccggagcggggaattcaaaggtcgaggcccgagacccgtccaagatcgtggcaagcgcgccgaatgtccggacggcgtccggcgtcccctggtgccggaagctgccggtggctgagcagtcccagaaagcccctgggacttcagaccggttaacccggcgctccggactcgtctgaggcaaaagtagccaggctcctcttcagggtcgtctccttgggccccggggcgcgcaaggtgtggcgcccaacccaccccgtagaaagcctctctgcctcacaccaccctcggttgttggaatgaaagttgttggatgatcaatttgtggtgaaaccaaaagccaatgagatcaagccaaattccagcctttcatgggctccatggaaggttttgtttttaactttttttttttttgaaacagagtctcctctgtcgcccaggctggagtgcagtggcgcttcggctcactgcaatctccgcctcctgggttcaagcgattctcctgcctcagcctcccgagtacctgggattacaggcgcgcgccaccatgccgctaatttttgtatttttagtaaagagggagttacaccatgttggccaggctggtcttgaactcctgacttcaagtgatcttcccgccttggcctcccaaagtgctagggattacaggcgtgagccgctgcgcccggcctgcttttttgttgtatttgagacagggtctctctctgtcatccaggctgcaaggcggtggctcgatcacaggtcactgcagcctccacctcccaggctcaagtgatcctcctgtctcagccttcggagtagctgtgactacagacagcgcaccaccatgccacgttaatttttaaatgtttatttttagagaggaggtgtcaccctgtttcccaggctggtctcgaactcctgagcacaaactatcctcctgcctctgtagtcccaaagtgctagtgatacgtgacagcatgctggctgccctcgctcgctgtcggcgcctcctcggccttggcgcccactctggccgcgcttgaggagcccttcagcccgccgctgcactgtgggagcccctttctgggctggccaaggccggagtcggctccctcagcttactgggaggtgtggagggagaggcgcgggcgggaaccggggctgcccgcggggcttgcgggccagcgcgagtcccgggtgggcgtgggctcggcggccccgcacttggagcggccggccggcccgcaagccccgggcagtgaggggcttagcacctggggcagcagctgctgtgctcgatttctcagcgggccttagctgcctccccgcggcgcagggctcgggacctgcagcccgccatgcctgagcccccgcccccgccgtgagcttctgcgcggtccgagcctcctcaacgagctccgctccctgctccactaacgcccagtcccatcgaccgcccaagggctgagaagtgcgggcgcacggcgcgggactggcaggcagctccacctgcgaaccccgtgcggcatccactgggtgaagccagctggactcctgagtctggtggggacttggagaatctttatgtctagctaagggattgtaaacacaccaatcagcaccctgtgtctagctcagggtttgtgaatacaccaatcggcactctgtatctagctaatctagtggggaggtggagaacttttgtgtctagctcagggattgtaaacgaaccaatcagcaccctgtcaaaacggaccaatcggctctctgtaaaatgggccaatcagcaggatgtgggtggggccagataagggaataaaagcaggctgccagagctagcagtggcaacttgttggggttcttttctacgttgcgggaaggtttgttctatttagttttgtaataaaggtagctcagtttttgggcccgcactgctgttgtgagctgtaacactcattgcgaaggtccgcagcttcacttctgaagcctaccagaccacgaactcaccaggaggaacgaacaactccagacatgccgccttaagagctgtaacactcaccgcaaaggtttgcagcttcacttctgagccagcaagaccacgaacccaccagaaggaacaaactctgagcacatgggaacatcagaaggtacaatctccagacacgctgcctttaagaactgtaacatctccgcgagggtctgtggcttcgttgttgaagtcagtgagaccaagaccagtctggaaac

SEQ ID NO: 1241088 - DNA, 4001 bp, Homo sapiens
gctttcttaactatcatttgctttccttccgtatccaacaatctgcaaagttcaaatatgtcttctaataagcaaatcaactgatttcctagtaatgggtcatcccctaatatttatgaggactgggtcaggagtatacacagaggcccagacaccctatacctaaatatttcaaaattataaatcaaatgaacaaactgttaaatacagtatattattttctcctgccttgataaatataccaccataacaattcataagttcaggctcaaatttaaaatcttggaatccactggagttctgtactggaaagtgacataggggagaggtcagcccgtgggccctgcaccacactccttctcttccatcactggctccttcgtggaccttaaggggcctctcacacatatgtgtggacaccccagcttgcatgtttaaggcctaggtatatatacaccgacgaacccagaaaagaggcttagggcctggaagcaggatcagagctgtttggcagagaattctggggtgccggatcccaagagcactaggggttgtgggggagagaaccctgcagaacatcttatatcttaacattagaatgtctggatctctttaaacctggatgataacaaagagtatatataattccatttttaattataccaaaatttgttgtcgttgttgttgttgggtttttttttgagatggggtttcattcttgttgcccagtctagagtgcaatggtgtaatctcgactcactgcaacctctgcctcctgagttcgagcaattctcctgcctcagcctcccgagtagctgggattacaggtgtgcaccaccatgcccagctaatttttgtatctttagtagatggggtttcaccatgttggccaggctggtctcaaactcctgacctcaggtgatctgcccgccttggcctcccaaagtactgggattacagacgtgagccaccgcacctggccaaaatgttttaattaattaattatttctgttatcagataaggactttctttacaaaaccataataccattatcatacccaacaaaattaatgattacttcatataatcaaatacaccattctcattcaaatgtctccagttgtctcaaaaaatatctctttatagtcattttctctatatacatttacattaatcttattaaggaggaaaattgaactccagagagagtaactgccttattcagaatcataaggccactctgtggtagatgcagagctggaactttttttagtcctgtgctctttgaattttggtccacaattacaaagacaactaaatagtcaagtcttcagggattagagagagatgggagaaaatggaaataataatcctagtacaaaaactttttttgagacaggggtctcactaaatgttgcccaggctggtcttgaactcctggggtcaagcaatcccccggcctcagcctcccaggtagctgggactacaggtgcacatcaccatgcccagcttccaccctagtaacctttgaaggagacttggtatctcctggcatgtttctagttctcagtgttctggcagggcttttggattcagccctgcatcagctctatcccctctcttctgcactcaggtgatcaccagaacgcacctttggatgctgcagcataaagtccacggcttcttcaaagtactccagatgtacatcattcagatcttcggggaggtcttcaaatctgaaataagccagggcaagcacagcaaaaccatgtccggccaggaggctggccctgtattcacaaaggcccctgctgctcccaaacagatcaatgatcccaggaaagggccccctgcctggagaacatcacaaatcacagggagctttagtttctcaaaagacagtaagcaaacaagtttttgaagccaaggagattgggggtagagagattggcagagaaagaacaaaatgtcttattttctcaaacaataatgataatatagagggataaaaaactacatattgggtacaatgtatactactcaggcgacaggtgcactaaaatctcagcgttcatcactgtacagttcatccgtgtaaccccaaaccacctgtacaccaaaaggtattgaaattaaaaaaaaaatttttttttgacagtctcactctgtcgcccaggctgaagtgcagtggtgcaatctcagctcactgcaacctctgccccctgggttcaagcaattctcctgcctcagccccccaagtatctggaattacagacatgcaacagacacccggctaattttttttgtatttttagtagagactgggttttgccatgttggccaggctggtcttgaactcctgacctcaggtgatctgcccaccttggcctcccaaagtgctgcgattacaggtgtgagccaccgcaaccggcctaaaactttttaatgatataaattattgtcacaccactgcactccagcctgggtgacagagtgagactctatctcaaaaataataataataataatattattttcacaaacaaaaataaaccaagttagaaataacataatgaggccaggtgtggtggttcatgcctataatcccagtgctttgggaggtcaagataagaggaccacttgaggccaggaattcacgaccagcctgggcaacataacaagacccatctctacaaaaaagtttaaaaaactagctgggcatgatggcacttgcctatagtcttagctactcaggaggaagaggcgggaggatcatctgagcccaagagttccagtttgtggtgacctgtgatcacaccactgcactgtagcctgtagatcactgtaaccttgaatccttgggctcaagtgaccctccagcctcaagaagccaccctcccaagtagctaggcccctatgcttggctaatttttaactttttatagaaatagggtctcactatgctgcctgggctagtctcaaactcctggcctcaagcaatcctcccactgcaatgctcccacctcggcctcttcaagtgctgggattttaagtgcgagccactgcactcagcctgtttgtttgtttgtttgtttgtttgtttgtttgttgagacaaggtttcactcttgttgcccaggctgcagtgcaatggtgcgatctcggctcactgcaacctccgtctccccccgggttcaagcgattctcctgcctcagcctcccgagtagttggtattacaggcatgtgccaccacacctggctaattttgtatttttagtagagatggggtttcaccatgttggtgaggctggtctcaaactcctgacctcagatgatccgcccaccttggcctcccgaagtgttgggattacaggcgtaagccactgcgcccagtcttgttttttttttcgttgttgctggttttttttgttttttgtttttttttttttttttttatcagacagagtctctctctgttgcccaggctggagtgatgtggtgtgattttggctcactgcaacctccacctgccgggttcaagcaattctcctgcctcagcctcctgagtagctgggattacaggcgcccgccaccatgcccggctaattttttgtatttttagtagagacagggtttcaccatcttggccaggctggtcttgaactcctgacctcgtgatccacccaccttggcctcccaaagtgccgggattagaggcgtgagccaccgcgcctggccgccttgtttttttttttgagatggagtcttgctctgtcctccaggctggagtgcaacggtgcgatcttggctcactgcaacctctgccccctgggttcaagagattctcctgcctcagcctcctgagattacaggcacccaccaccatgcccggctaacttttgtatttttagtagagacggggtttcaccatgttggtcaggctggtctcgaactcctgacctcaggtgatccacctgcctcggcctcccaaagtgctggg

SEQ ID NO: 1241089 - DNA, 4001 bp, Homo sapiens
tcagctcttactaggaagatgacaggaagagggggagtttaagcaactggcacattacaaagaagtcagttcgaagtcaggggaccttcccatgtccgatgtagatgaccgatgtcgctgtatagggcccagccctgcataggccttgggcaccgcggcccaggtcatcctgctttgaggaagcccattgtgtgtgttttagattacctctgcctgtctgatgaagtgagtaaaagggctccgtttcagggcctaggattcctgagtgagctaatacaggatgcctttggctgaaaaaaaaaacttcagtcggctctataaactaccccccttttaagtttaaaaaagggaatgaatgttaccatttttggacatgagcgttctccctcaagcccagccctaaccgcactatccaaagggacgcgccatcctgtcccccccccacccaaaaccccattcccagatcagcctgggggtggggagggtatgaaacggggagggaccggatggaagtgggcagccgggaggagggggagggaaaggggtattcagggtacgtggccgcctgggggcacaggctcaccgcgcaggcaggaagcagcggtagggttgaggcgccctccccccaccaccacgagtggtttctgacctcttcctgccactggccactgtgcccgggtcccatcgccagctccgagcccagctcccgtggcggggcgcgcacccggcacaccgcgcctgcctgggatgcagctccgtggctaagtagggatccccagtgactggccccaaatatcccctaagactgaccctcgttctgcagcccctcaactcgaaccgagctgcccacctttcccgggggtcggaggggcaggacgtagcgcaagcccatgtcggggttacagcttccaacccactgagttaagcaataaaacggtctgctgtcctgaccccgcccccacagggcccgcgggggagcccgcgtacgccccccagttttctcgtccccagccgcactccagctggtccttctccaggcagatccggaggcggccgccgatctctccggcgctctcccctccgcctaaggggcagcagggtcccgggaggcccgccgctcaggttgaacccagggcggcccaggaagcggcgctgccaccgcacgccatatggagaggtggccaggggcggaagaaaagggaaaatcgatccggagcaagcagccccgagccggggtctcagccccagcctgaagaccaccgcccccgagcacagcccacgcggggatggttgcaacagccgcagggtggcctggaccacggacccccaaggagacctgcccgccagcggcgccacctccccgcgctccggcccggcgttcccgggctccggggcaggggcgctcccgcttccgccaggcgcctgtaacccaacaccccacctcgcaacggccgcaccgcccccgccccctcccgtgcgcgcccggaaccggttcagagcccggagccgagagcccggcaggcagagcgggtcggggctgggggctgggggctgggggctgcagcgggcgggggcggctgctaacctttctctgctgcttctcccaggccgggtccaggagcaggtcccggtcccagtcctcttctggctgcatgtaatcgttggtttgctgagaatcataatggtccatgatggtgcgcgcgtgctagggtctggatttcttcctccaccttctctctgagcaacggctgctgccctggcgtggggagggagtagggctgggctgggctgggctggcggggccgggctcgctcccctgcgcccggttccgccgcggcgctgctggcgaaggctgctactggcggcgacagcggcggctgggctcgcggactgcctgcctctgggcgggcgcttggacctaatctccacgcacactgaactaggcggacacactagcgctgcgggagccgaggcgggcgggggcggggggaaggggcagagccctcccgaggctctccattggccaggccgagttgcccaaacttccccccatcgcctctcattgggaattcctggcatccgtcagccgggctgcggcgcatataggtggactgggcggccccctcccggcgcgcacacccccgcccactcccgcggtgcccgttcccccgcggctcatgtgacgccagcttaagctgaacgggaccgaagccgggagacgcctccccgagctcggggactgagtggcagcgcgcttgggaaccccaggagccgccgggattggacccgttccccgccaccgttattgcgctcccacgcgcgctccaaaccccggggtgggagggggctggagaaaggacgcgaggaaacccgaagaacattcattttctctttcccagggaacctgggtctgggcaggtcggcaccctaggaaagggggcggagtggggcaatggaaaggaatttcttgggaatttcacgactccaccgccgccccccccggccccgccccaccccaccccaccctacaaggcgcgacccggctgatccctgccctgcaggaacccggtttctcgccagcgaactgctctcagaggctaccgagcgttcccgcctcgccgcaggaactcttctagctcgccctcgggctctggggaccgctccacagcggggcctcccggaattccctgccggtctccgcgggcacacttggctggctgctgcgaccaaaactaccttcgcgtggcagggtcctccctcctcctcacagacaccccgacatcaccctcaaaactggaagggacaaccccgagtgatctaggtaaatctactccgtacccccctcccacatacacacgcctgacagatggggaaactgaggctcaaagagccgagcgcggaaagagcttctggacttcacaggccaatccggtaaccttatgcctgacaaacaaaaccttattgtcattggaggaggatggagggcgggagtgactaaatagctctaacttctgcttgccacctgccaggactcctttccctgggcttagtaagaggagagtctaaacgcgctaatgcccgggaaggagcaggcctcgcgttctggcaggctcctctatgggatcccggttccgaagaacagtagcaaataaacctctcctaggttatgcactgtcttgtgaacaacagatgtgccagtcttccaccccagcacccagcacatagtagagcttaatttatggatttgaggctggccacggtggcggtggctcacacctgtaatcccagcactttgagaggctgaggcgggcagatcgcttgagcccaggagttggagaccagcctggccaacgtggcaaaaccccgtccttactaaaaatacaaaaatcagccgggcatggtggtacacgcctgtagtcccagctacttgggaagctgaggcgggagactcccttgagcctgggaggtcgaggttgcagtgaggtgcattttcaccattgcactccggcctgggtgacaaaacaagactgtctcaaaatatatacatacatatatgcatttggccctttatatccacaggcttcagaacccgcagatacccaggctgactgtgagggacttgagcatcctcagattttggtatccatggggatgctgaaaccaataccctgccaatactaagggaggactgtatttgtaggatgaatggctgcatcaactgcaaaaatttaaatttaaatttaaatttaaaatgcaaatatgtcaattcagaagtgagtgaaggagttagaagaagaagttcactgacaggaagggccctgaattatgggctggattttgtcctctaccttctctccaggcgatggtggatacctgaaagccacccatggaaaaggtgaagaaagtgccccctggttctcagaagagccactgctgctgttgtgagcagatatcggatggtgtctctggctgcatcattcgtcaaccacacatattcatat

SEQ ID NO: 1241090 - DNA, 4001 bp, Homo sapiens
atatatatttgacatagttttaatcacacttcatacataattaactcatacagtaagcttctgcccatattaacataatcttcattgctatcactttttttttttttttttttgaggcagggtctcgctctgtcgcccaggctggagtgcagtggcacaaactcagatcactgcagcctccgcttcccaggctcaagcgatcctccccccttggcctcccaaagtgctaggatttcgggcacgacactaccgccggctaaattttgtattttgtgtagagctgggtttccccatgttgcccaggctggtcttgaactactgggctcaagtggtcagcccgcctcagctttccaaactgctggaattacagtattatttttaaaaccacatatttcattattttaaaaacgatgctcttttcttgagtatttaggtatttccatttttgtttcatgttagtaaaacaaaaatttgctaaaaacgttgctaaaaatgatcatcatactagtttagtcttaacatcctgtcttcttgtcctgtctagtttttgatactgctctcctcgtattcccaaataattctctccatctcctcctattcccgtctccatgtttacttgcatcagtgctcctcaaacatctcagaatgcaagccattagacttcaattccttttttttacttcatacatttatcttatcatcctcctgctgtctttttcaaatatagctttttgcttatttcttccaagtacagccaaaataattatctttgactagaagcctcgaactgtttattacgctttcaaaataattttaataagaaaatataaataaggaagggcctcgcatagaacaataagagaatgtcattaaccaaggactatgtttaatccaattctggagttcctggggtccaatttttaaataggctcttttaaccacttagtcaataaatagttattaaatacctactacacgtcaggaagtgcctagagatataaaaagatttttcaaatgtttcattttcataaatacatatatgatgtaattgcctgttacttccctctctgttgagcccatcacaaggactcttaatctagggtcccaggaccacattgattgtctgccaattccctgaaactgtgtataagtaccttaagatttgtgcatttgtggttttcatccagccattaaagagatctatgccatccgaaaggttgagaacctcctctctattgtttacaagttggtttgtttaaaacatgtcaaatctaaccttcgagtttaggggagccaacaaaggatttccagaatcttatctatagggtttcacctcttaatgtgcccagtctccctaattcttgagcagcgatagccctgtcttaaacatctttccattttcagcaccaaaataaactccgttcaatattttatgatgaaattcgtcatcgagcatttacattcggttggctgccttcctcaactgaggagcccagggtaagcggggtctaggtcacggttgtcatcccctacacagatgatcccaaagggtttgttgggtttggggtgatgacaaggggcggcgacgagggcaattcaacagaagctttctgggcctctctgggagtcagaccccgatcctcggattcgcatcgcccagggaggaaataataagagctgttatttgcaagggcgctggttgaagaaaaggggaggcccggagctgcccagcgagtcggcgatgaggacccaggcagtgcctggggctctgccacccgccctcccctcgggtcgaacacagctggcgtcacggccactcacttggtaaaggcctctcccaggtcgatcacgaccgccgtcttctccccgccgctccccaggccctcgtagagcggcatggtagtaaggcagactgagagaagagggtcgcagtctccgcggccaacaagtctcggcgctcgcggggcggggccggggctccggcgctcgggcgtcggcgacggcgggggcctcgcgcggccgcggcgcgccgggcccgggctgtcccaggctgtgcctcattccgcgttggacccacccttgcaggtgctgccgtcgccaggactaggggaaaagaggcgctggcgggcgcgaatccgagtgcgggggcgcggaggccgcggcgatcaggcgcgccggtcgccctgagggggcggagccggcctccctatccttccctcccaccacgccccaaagccgcacccacgcgcggctgtgaagaggttcggtctcagctcactgtgaagaggtcactgaggacctggctgccaaggggcagccgagagacgacgcaattccgaacctttgattcatgctcttggggggcagaagatgctgagaccctattctgtgctaggcgttttgcctaatatttaatcttctcaagaaataacaagaatatgtgttttcttatctgtggggaccgacgctcagagagattaactttcccaatgtcccacggcagagccaggaacaaacccacagacttcctaattgcaaagcctatgctaatgatgctttagagaataatacgtacagacaatactttagttagtagtctttctgaaagtttttattttactccagaattaagcagctagagtagcgtctgtgaatcttgaatctgtccatagaggagcggtcgggatggtttaatagaagaaacattgaagcaaaggcccctattaggttggtgcaaaagtaattgctgtttttgccactacttttaacatttacattactgtttacatctttgtcacttcacagctttctgtgaaaatatttttttcctgcaaatattagctctaactgtatctatgcataggagtggaaaagactgtcaaaggagaggctgtgcaataagaaaagaggttcaagggtaaatcggtgaggactagcaacatttagctggtgtactgggttgaatgatgcccccccccccaaaattcttgtccactgggaacctcagaatgtgaccctatttggaaatagagtcttggcagatgtaatcaagttaagatgaggttatactgtattaagatgtcccaactgtccgagcgcaggatcacacctgtaatcccagcactttgggaggccgaagcgggaggatcccttgagcccaagaagtctaaagcggcagtgagtcgggattgtgccgctgcactccagcctgggcaacaacaagagtgagagcctgtctctcaaaaaaaaaaaaaaaaaaaaaaaaggccctactctaatggttggtaactagagttagcggggtagttggggataagctatttccataacaaaaactaaggctgtaacaatgcagaaatttggaatgtgatattagtaaaattcatgtttaagtccaaattactgatcaatgatcctccttgaaagcaaattcctggagacaggagaatgaagttggagttgtgacggggaagaaaactttaagaaacgtgggaagagattaaattttttgcttaatagagtcagattatttgaataggaccccttacttgagttcagattctgtttctgccactttctgtcaagtccctaatacctctgatcgtccacttccttatctgtaaactgttctgctgcttcacaaggtatttgtaaggatcaatttgaaattatgtttctgaaactattgaaatgatgaagtttgttattacctattctatgttttccatgacagctcaccagctgtatttgttagctagggactgccgtaacaaagtaccacaaacggtggttcaaggaaacaaaaaatttattctttcacacttctggaggtgagaagtcagaaatcaaggtgtcagcaagagcaaggtcatgccctctttgaaggctcttgaggaggatcctttcttgtctttttttttttttctttttttgagatggagtctcgctctgtcacccaggttcgatctcagctcactgcagcctccgccccaccaggttca

SEQ ID NO: 1241091 - DNA, 4001 bp, Homo sapiens
gagatcgtgccattgcactccagcctgggcaaaaagaatgaaactctgtctcaaaaaaaaaaaaaaaaaaaaaaagaaaagaaaagaaaaagaggtattggctgggtatggtcactcatgcctgtaatcccagcacactggtgggaggccgaggcagaaggatcacttgagcctgggagtttgagaccagcctgggcaacatagctctctgttaaaagagaaaaaaaaaaaaaaagctgggtgtggcggcatgcacctgtggtcccagctacttgggaggctgaggaaggaggatcatttgagcctgggaggttaaggctgcaataagctgtgactgtgccaccatccttcagaaaaaaaaaagaaaaagggaaagaggtattgacaattcacattcatgtttcaaagattccttccaggttagaatttgaattttaagtaccacagtcccaggaatgagacacttaagaagttctgcagtcctggccgggtgcggtggctcacacctgtaatcccagcacttggggaggctgaggcggatggatcacgaggccaggagttcaagaccagcctggccaagatggtgaaaccctgtctctactaaaaatacaaaaaaaaaaaaaaaaaaaaaagaagttttgcagtcctaactcattatctgtgggattagcgacacactgggaaggcaatagccaatacctacagaaggcagagggtaaattgagcttgcatttgtgtgtgcctgttgagggaagattagccacattaaagcagaggtagaggctgccaacagtttgtccatcccctcaaataatcctttattgctctaggaagaataccaggctccacattcagtgttcccatcacctattctggaatggataaagagtttttaataagaaaaacgtcagctggaaaaggtaaatgttctttcaaaaccaaaaaagaatagaaagaaattaagtggagaactgagggaagcttggagaaagaggtctgaagaaagtgcagcagctgcagaggaagcatttatatatgttatatacatgacatcaggtcatctaaatgccagctcttcaatcaatgttagcctttctataagaaacctgacttggtttgatgatgccacaacggcgagcactggggaagccctctatttcccttggaagagagaagctcattaatatgtgtatctagatgctcaggcaccactgactaataataacagcagggtgatcttccatttacaccatgttttaccgattgcacagcattttcatactcattgctctacaaactacctctttgccatgcagctaccaaatagccagcggcttctagttcacatttgtcaagaacacgtcccttgttcctatgcccacaacctaggttaccaccccaaagcctgcaggccacatacctgagtatgcttacggaaaaacaccccttgcaccttcccaaaaatttcataatccactgatatcagggtgtttccttctgccatgctcaaacctgtcagaaaccaggaaagcagaagagtgaagggctattattccaggacccgcaagcctgagtcagaaagggccacacccacccctgtccatccttaaccattgcgacctctccccgacttcaaggtcctggaaatggaaacgtgagtggatgtgataaggtgtgtgtgaaggaagaaccagacgccgggagagggagcttcggatcgcagctgcccgctgaagcctcttctggggaaataacctgaggaccgatgacctccttacatccatgcccggtcccgctccctcactaccagaattccctgctactaactcccagaatcccctgctactaacattttagggctaatcgacctgagaagcacaccctgggggcccctggcggctcaccctccttgtcttccccaccggctgccaggatcactccgggaccaccacgccaacggctcaccaaggcgcgcaaacctccgcgcccggaagtttagtgtgtagctgctccttcgctgtcgctcatgcccatcacctccagctgaccaatcagagacggcgcctcggcccgggcccgcccagaaggtgggatttcaggacgcggttgtccggcaacccaaaagctttgggttggggatctgtccaggaactcggctgggcctccacaaacctagccctcatcgcatctcagtcaacaagcgcaaccctcttctcattttctcatgaggagaaaggcatagacgaagaagtacatggggatacattcaatcattcaattaaatactgactgacagctactgtgtgccaggcacctgttctaggtgaccaggcaaacatcagtgaacaaaacaggatccctgtcctgaggagcttaattctggaggtgagagacaaacagcacacattaaacatcataaatagcttgtaatctcagcactttgggaggccgacacgggcgaatcacttgaggtcaggagttcgagagcagcctggccaacatggtgaaaccccgtttctaccaaaaatacaaaaattggccgggcatggtggcgggcgcctgtaatcccagctactcgggaggctgaggcaggagaatcgcttgaacctgggaggtggaggctgcagtgagccgagattgccccactgcactccagcctgggcaacagagggagactctgactcaaataaataaattaataaataaaaaaataaacatcataaatatgttgagtaggatacatttaacctttctgtcctttttcattcagttctccttaaagtttgggtcataacaatctggaataggggattacggggcataagtgcacaggaggtcccaatggaggttatgtctgcttctgggcttctggaagctactcaccggtctcctttactaagaaaatgtcaaataatgcttgaacaaataaccagctaactacacaaataaagcaagagcacaagcaaaataactcatggctccagaattacagttgagtcagtcaatctaagccaaatggccaaactacacgaatttattttgggaacagggaattgtcaagggggatgtggatgaagatggttaaaattagagttgatgtgtaaacatttgaatccagctacccttatgattcatgtgtgtgaaggaaaactgtggtgtttattgatcctctgtggattgactgtatacattacacctcttcataacgtaaagactccttatgtgaatatgccaggttggcagacttgacaatgagatatgggtttgtgacagtaggcacggaaattcatcattctgctagttccccgctagagtgaggatccatatcctagagaatcatacaaccttagtgctgagaggtggggggttggtggtgaacaagctggattgaatgttgtacttggcaatatttgaaaataactctaaatagagtatcttgctaatggtatttctttctctaaaattcatttaaaaaatagtttatagaattcaaaacttactgagtgtctaatacgaatggggcactctaggatatacaaagatgaatgatataaaatctttgccctcaaagagtttttaatttagtgtaggggcacaaatgcatgcaaataatgacaataaaatatatggcatgataatttaattccatgaaaatccattgagagctcatcaggaaccagccctgtgctataacaaggacagaaaatattacaaaggagcaaacaaattaattctgattgggaagacagggaaagagttcttggaggaaacagcatttaatccaaggtcacacaaccagtaagtgatggagctgggatttggttccagagtcaatccccatgaatgctatgctctaccagctcccagtatgtggagcttagagtaatgtagtaccatggagatgaagaagtacaagtagccagttgtggctagaccaggggtttgctaccctgcttgtgcatcaggatctttggggaagctttaaaaatgttaatcctcag

SEQ ID NO: 1241092 - DNA, 4001 bp, Homo sapiens
aggccacaatgaactggacaatgacggggagatgaggatatgtgggcagcaaatgtggagatttccattaagaagtcttgtggagaagaggagaaatgaatgggactgtaatatgaaagttaggtcaagggaagtaaggtttgttttgcaggggaaagttgagtatatgttaaaaccaaagagacagagtttatggagaggtataacttgaagttaacaagatgcagacagggtgccgtctctcacgtctataatctcagtactttgtgagactgaggcgggaggatctcttttgactccaggggtttgagaccagcctgggtaacaaagggagaccctgtctctacagaaaaaaaaaaaagaagtaagctgggtgtggggggcacacacctgtagtcccagctactcgggaggctgaggtgggaggatcacttgagctgtggaagttgaggctccagtgagcagtgattgtgccactgcacttcagcctgggcaacagagtgaggccctgtctcaaaaacaaaggccaggcccggtggctcatgcttgtaatcccagcactttgggaggctgagacaggcggatcacctggggtcaggagttcaagaccagcctggccaacatggtgaaactctgtctctactaaaaatacaaaaaattagccaggtgtagtggcagacgcctgtaatctcagctactcgggaggctgaggcaggagaatcacttgaacccaggaggcagaggtggcagtgagctaagagtgcgccactgcacttcagcctgggcaacaaaacagggcgagattccgtctcaaaaaacaaaaaacaaacaactttaaaaaaccccaaaaaccaacaaaacagaaaacaaaacaaaacaaaaatgcaggggtaaagtgatggagtcaattcccggagggtactgaaaaggactaattcaagagaactcaatggaactcaatggaaagtcgcccttctttctcatagaggagagggaaggagagagagagaggagagagggagacagacagagacagaaacagaggagagagggagaggaggaagaagagagagagacagagagagagagaaagagaaaaagaaagccggtaaattctgctgagggaagctgtgggagttgataatcgggaccctgagtggagtgggaaacgtctggagctgcatatacggagaggcggtagagtcaactagggatgaaaacgaggaattaaaaaaaaaaaaaagactgatctggagggtccaccaaggaatttccttgtaacgggtaacagctgtaatatgacatgttgaagtattaacactgatgactgctgtctacattattttccatgtgcatgaattgagtagttacagggaaaaagcgaactgcctgttccaaacggcttacacagatgaactgaagcgaagaagaaaaatgaactttcttttgatgtcaacaagatagagtatcatttactgttgaagccaggttatactgattattttcgatctggtagttaactttatcatcattacatttggctgagtcattcctgggccctaagtagagacggctagaattaccacgtgagtaaaacattataatatcaaaataattagattggccacaaaaactaccacggaaagatactgcgtagcaaaaacgttggcagcaagttccaaagccttggcgaggacaagcaaggagcgcgcgcgtgcagccatacctggggcccgcccagcgcagccgagcgcgcggagaaaggccagcagcagccccgctcccgccaggcgggcggacgccggcatcctgcggcggaagcacgcggaggcacagccagggcctccgccctttgccagacaagggcacaccccaaggtctgggagcgtcgttctcagaaaagtacaagttcttctttgaaggagctccagaaaagcctctcccgcccctccccggctccccaagggcagggctggaccgagctgcagagttggccggacactgactgggtcaagtgaccttgggctgaccgcacccccacccccggtcgccccgggtcgctggtgcactgcgcctgcgcgcgtctccccgaggagttcgcggcgaggggcggagcttggcgcgccagtgcctcggtttccaggcaccgggaataacagaagccagctgagagcgcctgcgcggctgtcggttgatggggaggtcaggtctgggaaactaggccctggggttttccctgagcaggagcggtgcccgagggcctcaggtacgcagaagggcggggagacatgggatcagcacctccacctcctaagggaccgaagggcaggagagcgagaggacttgtccccagaggtggagtccgaagtgggggcgccccagttgacccttcgggacaaaacgtgacttcagccttaaggatctaaaaccggccgcggtcaggtcaggtggccctcaacgctcaggttacaaaacttttacagtctgcgccacggggactcctgggatgagggtttgacagccaggcacctgctccaggccctagcagcttttgtgctctttggaatcaagcacggttccagcaggagggaagccctgagagttctttgtgccagtcactacctctgggccacagctttctcacctgtaaaatggtgaggctggactctgcgggaacccttcagtttacaggggaagaaacgggggccagcaagggagaagtcgcttgtcctgttacaggcctagaacctgactttctagtcaggtgctctttccacctactatagagtatactgtgcgtggcagaggctggtgctggaggaaaggaaagctaggtggcaggaacacctgtagcaccttcgtttttctaccctcagggcctaacacagtgtcttgtgcataatcactcaccaaatggtttttgaagggaagctttggcaggtccagcaacactgtccccagaaaagtttaagggaatgtgggcagggcaaatgtagaaatagtttgctttagcagccgagagtgaacctcagacaaactcttcccgtgtatctggtttaaatctcccgtaggcgtcagtccaggccctgaatggctggtctccagcggttggcgtcacatctgcctgtgggcgttatgctcccacataatacaacggaagctccagggccccactcagccaagcaagactcttacgaacaaggtgactcttcccagcagtccttgaaggggcacctgaggaacaatttccagaagcagcttttgagcaacaaagagttgattctggataaagtctatactcaccccaaatggaacacccaaacaaaagcccggagctactcctatccccactgtactggaatcagccagcaagatccagaaagtgattcccagggccaaggaaatggtttgttttactcgtcaggccctcaatcctggtatcccaaagccaataaccaggactttatcccctttacaaagaaacgagttggagtggaccgggcgttcccattgaaacccatggtccacaggaagtcgtgcagtacaggtgaggctggcactgatggggaccataatgtctacccaaggccccctgagccgagagagttttcatctaggaactttggtgtgaggaaccagggcaacttttctgtggttggtactgttcttgctgccacgcaggcggagaaggccgtggcaaactttgacaggacggagtgggtgcagatccgaagactagaagctgcaggggagagcttagaggaggaaatccgaagaaagcagattctcctgaggggaaagctgaagaagacagaggaggaactcagaaggatccagacgcaaaaggaacaggccaaggaaaatgaaaacggagagctacagaaaattatactccccaggagcagagttaaaggtaataaaagcaacaccatgtacaaacctatcttctccccagaatttgagtttgaggaagaatttagtagagacaggagagaggatga

SEQ ID NO: 1241093 - DNA, 4001 bp, Homo sapiens
acgctccaaatttcatgttaaagtgtgacttctgataccatctcatgccagttagaatggcaattattaaaaagtcaggaaataacagatgttagagaggatgtggagaaataggaatgcttttacactgttggcgagagtgtaaattagttcaaccattgtgaaagacagtgtggcaattcctcaaggatctagaaccagatataccatttaacccagcaatcccattactgagtatatactcaaaggattataaatcattctactataaagacacatgcacacgtatgtttactgcaacactattttcaatagcaaagacttggaaccaacccaaatgcccatcaacgatagactggataaagaaaatgtggcacatacataccatggaatactatgcagccataaaaaagaatgagtttatgtgctttgcagggacatggatgaagctggaagccaccattctcagcaaactaacacaggaacagaaaaccaaacactgcatgctctcactcataagtgggagttgaacaatgagaacaaatggacacagggagaagaacatcacacaccaatgcttgttgagggatggggggcaagggaagggagagcattagggcaaatacctaatgcatgtgggtcttaaaacctagatgatgggttgatgggtgcagcaaaccaccatggcacatgtatacctatgtaacaaacctgcacattctgcacatgtatcctagaacttaaaatttaaaaaaaaaaaaccctcttagaaaaaataacattcaggctgggcacggtggctcatgcctgtaatcccagcactttgggaggctaaggtgggtggatcacctgaggtcaggagttcgagaccagtctggccaaaatggtgaaacccgatctctactaaaaatacaaaaattagccaggcatggtggtgggcacctgtagtcccagcttctcaggaggctgaggaaggataatcgcttgagcctgggaggcagaggttgcagtgagccaagattgggccaccgtactctagtctgggcgagagagcaagaccctgtctcaaaaaaaaaaaaaaaaaaaaaaaaaacacacacacacacacacgcacacaaaaacacttaaatgtattaatcttatcctaaattattttatgttttattttatacttatagaagccttcccatgtatcacataaaattctcatgcttaaaaaaaatgtgacttccaatgctggaggtaggaaagtaaaatggcacagctgctatggaaaacaatatacaggttcctcagaaaattaaaaatagaactaccatatgatctagtaatcccacttctaggtatttatccaaattatcaaaatcgggctcttgaagatatctttgcattcccatgttaactgcagcattatttacaataaccaaaaggtggaaaaaaaatgtaaatatttcccaacagacgcatggcccaaaaaaggaaggaaatcctgtcatatgctacaccatggatgagcattgagaattttatactaagtgaaataagccagtcacaggacaaatacagaatgattccacttacgaggtatctaaagtagtaaaattcttagaagaaaaaaaatagaatgttagttgccaggtgctgagggattagggaaatgaggagttcctgttcaatggatatataatttcagtcatacaagatgaaaaagttctagaggtatgctgtacaataatgtgcatatagttaataatactgtagctccttctagcaaatcttacctctgtgtctttcagtgttccatttttatattttcagtcctctaataactttttaaatttttcctatattaattttccttggtgtgtttttcttttttggacaggatattgacagacacaagacttggtactaggagtgataccaaaaaagaaagataaaatgggaatctgagattgatgtgggcatgaccctagtcttaaacacactgctgaactcccatccaatggagaatggcatgtaatgacatcacaattagttactactcaatgttgattgcagtgaactgccctattgacccaagtgtgtaaggggatgaagtgactgctgtgataattactatgagtacctcaaagactgagaggtgaaatagctatatttaatttaatgtaattaagctaatttaatgtaaactgggaaatttacatgatgaggccaaagtcttgaaattcacagttcaaacagggagcttataatggtggacctaaaagaatctctcctttgttttaaccatacaaccaagctcactgaaaacaaaatttaattgaaatgcttgcagagtgacaacataagttgaatacatagatacgtcaagggaaagggaagaaactgactgggaagggggaaaactttgagacttgaaatagagaattcctggtgaatttggatgattttaaacatgtaaacattccaaaatatcccctagtctcctttactagtgaaagagcccagagctctcctgtctgagaagtctatgcacctcaagcttgagaccttacaatgagctcagctggggaacttatcctgaaaacggatgcctagactcctcaagacatactcctaccaccccttattggctctagatgcaaagaagaatcagatctcaacacgctccagagcaaaaagttccaaatctgaattggaaggaaataacttctactccaaaatatttgcaacattttactaattcatattagcaaaagaaagccaaagaaaccatactaataacagaaatgatgaaacagcaacaaaaataaagtggatatactttatagaatgaaattcaacaggaatttgtatttaacaaaatagcttcaaaatatataaacgaaattgtaagagatataaaaggataaatagaaaacttcaaagtctacttgttggtataaaacgcttcattcagtaactgatagaacaatttaaaaaacaattagtaaggaaatagaaaacttaagaaatgttaatcaaattaacctaatgtacacatgtaaaaacatccaacaattgcagcacagttatgaagttcaaatgtgcatgggacatataccaaaatacataatatccatgggcataatggaagtatcagcaaatcctaaaaataagaattggggccaggcatggtggctcacacctgtaatcctagcactttgagaggttgaggcaggtggatcacctgaggtcaggagttcgagaccagcctgaccaacatggtgaaaccttgtctctattaaaaatacaaaaattagccaggcgtggtggtgggcatctgtaatcccagctactcaggaggctgaggcagaagaattgcttgaatccaggaggcagaggttgcggtgagcctagatcacaacattgcactccagcctgggcaacagagcaaaactctgtctcaaaaaaaaaaaaaaaaaaaaaaaaaaaaaaagaattgcacagtgtatgtcccttaatgactacagaatttaaaaagaaaattatataactacaaagagctatttacagagcaggagcatcgctgtcttataaaagcatcaccattttaaggttcaccttgatcaaaaactacctaaatccaaagtgcatcagcctaatggctaaggccagcatgaccataaaccacaaatgacatctccaaccagaaacattccaaccataagataaacctctccccaaccagagacatgccagccccaagataacctcccctccagctggagagatgtcagccccaagataacctcccctccagccagagacattccaaccctgccataaacttctcccccacacagaaacattccaagcctgtgataaactctctcaccctaaaaccaataaaaactcttagtccataggagcaagcactcctaaccaaaaaaaaaaaaaaaaattgtccagaagcccctctcaggtttattctccaaaataaacttgtctttgactgt

SEQ ID NO: 1241094 - DNA, 4001 bp, Homo sapiens
tattctcctggatattgcatttgcacctcctcaatcttctgagttttcctcatttatgtatagtgccagcagctgaaaatccattctcattgtctctcaatcacagtagaattagttaaccaagtacctttcctttctaatataaagtatttaaggtttttttccttttcttgtcctagactggctatgtggatgctggaagatggggaaaacttgtttcaagctgaacattatccttgccattaacttgcttaaagaggctggattcatctgggcagttttcactgctgcaagttaggcaccttattccacaaggtgcaagtagcatggaagagaaaagcaaagttcataggcaaaacttccaagaacaaagatctctgaattgggatgaaattctaactgccagatttgctctctatatctctcttgatatgttttctacttactatggagtgacagttgttgtggatgggaggattgaaaatgggaagaactaatcaaagatataatgttgtggaaaggactgataagctacaccaacctgtgtcatattattctttttcttggagctcagcatgagagcaggcaataacaggagaataactttaaaaaaatctttaaaaccagactcattgtcttcattcctaggacttacagagaccaaagctcctgaagtaccatcattctaccatggatactgtgaagtggtaccaccgtaaatccatgtcctctaatgtcagcggactatcaggtgagccaacagccctcttctgcatgtttgataaactcttcctttccccacagctatttcaaattcatcaagaccgctctctacccatcttccctcttattccaatgccctaatgcactgttttcctatctgtctgtcactaatatctgtcccattagagtcatggaagtaattcagctggctatagcctgcagtctttttccttgaggaaatagaacagaaatatcagaaggcatccctagaagatccttagcaaccttgcacacacagtgccaaatatgtggggtgtaagtgtgtgtaaagccacaatgtcataatataaagtggatttctttctctggaatatgatacacacacacacacacacacacgccaaattcaaagataaaatggtttctgggcctttcaccatctgaatctgcctatatccacctcttctctaccttactacctctctagtctcattagcccctcatggttccagatcatctctcccacctacttgaggactgtttctattaattttccctattctcaactgcatcttcatcttctactactttatctattccttactggcaattgaggtgactacctcatcctgattttcccaggactgtcctggttttaaaactgaaagtgctgcacccagcaatcccctcagtctcaaccaaactggaatggttggtcaccctacctacatccatgctcaagtcactcatatctttaaaaatgaaaacacgccgggcgcggtggctcacgcctgtaataccagcactttgggaggccgaggagggcggatcacgaggtcaggagatcgagaccatcctggctaacatggtgaaaccccgtttctactaaaaatacaaaaaaatcagccaggcgtggtggcgggcacctgcagtcccagctactcaggaggctgagggaggagaatggtgtgaacccaggaggcagagcttgcagtcagctgagatcgcgccactgcactccagcctgggcgacagagtgagactccatctcaaaacaaacaaacaaacaaaaaaaatgaaaacaaaacaaaaattaagagacttcacattatccagtggactactctggataccaaattatgcatagaaccaaactttatgaatgacttaccatcagaagaaacagtagtttccatggccatttctgtctagatggtttataccatgctttatcaatggtttgtagctgaggccacagaacaaagggaaacataagccctctcccttttgtctctcaggtgactaaattctagatttagctacttagcaacaaggaactttcaattctacagaaataataataggctctgaagaatatcttgctctcatcctgccatttctatactcacttccgaatttaatacaattggaattgggttgtctcctcacctccagtctatgtcccctgacagcacaggtttgtaattttgctggtgtcattgcattggtctagactgtctaatcacttttcccattgaactgaattatagtaactttatagggcaagatcaaattccacttccattatcaaatctttcctaaataatccagaaaacattaacatcctgtaactctctttataactttaatatgcaatacatttttgtgtgacaaaatttatatccttgctattttctgtttcatacgtgagttttaaaaattgcatctcctattagactataatgttttggagaaaagtatgctcaaaatgattggtggagaatttatggtatagtgtttggtaaaatatataatcaataagatgagttcaatttataaaaactacataggataaagactaatttaataaaatattaactctaactttgggaatttctgttatagatttttgtcaactcctaatttacctggtagaatcagagcctcatgggataaccatcaattagaagcagttttaattacagaccccttccatttcctgccaggaaaagattctactatttatgctggtttctttagaaatctgacaaggttccttttgataaactgttttgctcatacatgcaaaactggagacacctctgccttaggaggggtagatacaaagaggtttgtcttccgctggactcagtggataacatctacttctataccagacatcatttacaatgaggtatacatagccccaaaaaattagagtagaggaaaccacatacattcaatcatggaaaaagcttagtagcaagccagtagcactagtaagcagagcgaagaaactctacgcagggagaaagataattgaggaagaatagaatgcctgcttcaggcagaacaaatagtaacctgcaagatccataggtgggaaaagaatgaaaccttcccaaaggagcttggcttgatctctctagctgtaagaaggagtaaatttatttcttcttcttctttttctttttcttttttttttttgacagggtctcactctgtcacccgggctggagtgcagctgttttttgtttgtttgtttgtttgtatcttttatagagatagggtttgtccatgttggtcaggctggtctcaaactcctgggctcaagtgatctggcctcccaaattgctaggattacaggcacccggacaacatttatttctttgtggaatcagcactaagaacttctggttccagaaaagatagagtagacacatttcttcctattattcctagtaagtatagtaagtcctcaatgtcatgaataggttcttggaaactgcaactttaggtgaaacaatgtacagtaggtcctgaaataacattgttttgtccaatgtgtttcattataacactgatgagacaaataaaaatttgttttgttgtatgttactttgcactgttaaagtcacagtttctgagaacctattgctgatgtgaggacttactgtgcaagtaaaaacactgtattttaaatagaaaacaaacataagaaggttaagaaaggtagagaaaatcatgcagagaaggtacctaccctgggatctaaggaataacatggtggtgaatccctgagttttcttttaacctcaagcaatctggagaagcctataacattttaatgccaacagacatagaacaaaaagactcaagaagtttgctgtctgtagccaaaggactcagaaatgagcagtctggcgagacagaaaacttttagaaaataaccatccttctccacccaaatgtcatgggaaaacttgtatccccacatg

SEQ ID NO: 1241095 - DNA, 4001 bp, Homo sapiens
agtgcacaagaacaagcagcttgctgggccctgaaataggccactggagtccctgcaacatggaaaccttaacccaggaggcatatttagtgagttaccctggtgaagaaatggatggctgacccaactaaattttttttttttagacggagtcttgctcagtcgcccaggctggagtgcagtgacacgatctcggctcactgcagcctccgtctcccgggttcaagctgttctcctcctcagcctcccaagtagctgggactacaggcacacaccactacgcccaggtaatttttttgtatttttggtagagatggggtttcaccatgttggccaggctggcattgaacgcctgacctcaagtgattcgcccacctcagcctcccaaagtgctgggattacaggtgtgagccaccgcacccggccccaactaatattcttacaggtcctttgtctgacaagaaaatgactgcatagcagaaagtaagaatatgcacactcttctagtacagatcaaatcgcacatccctgaggccagttgagaaatggccaagcaaagaatgacccaataaggtagaatatgatgtaaccaggaaaaatgacaagtatagactacattaaaatctgtatataaattaatatggagggagttaacagtgtacaaagtaatatgcacatatttacaatcaccaaaaaagtaaaactggcaaataaagacagaaagacccgtaaccaggtgtgaagagatagtgctttaagttcacaggattttttttcctataaagcagtggtactcaacgtatggtccccagaccaacagcaactgcatcacttgggtgcatgttagaaacgccaattcttggtcctcataccagacttacagaatcagaaactttggggatggggtccagtactgtgtgttgttactagctctccaggtgactctggtgcatgctaaagtttgagaaccactgtagtaagaaaattattttatttattttcctttttttcttttaatacagacgggagtctcactatgttgcccagcctggtgttgaactcctgccctcaagcaatcctcccatcttggcctcccaaagtgctgggattacaggcatcagccaccacatccagccccaagaaaattattaaataaaacatatgaagccacagataaagtctaattcacttcaactctgcaaatatttcttgagcacctactaagtgccaagtatcatggaggtaaacaataaatacttgttgaatgactttcttgttagtagaaagtaaatgccacttaaccctgggagagggctgttctaggtgtcttatctaaaggttgctctccacacacactggctgctgttagcacatatctactgtgtgatctggaagcccagggccctgcaagatgctggagataagcagcggtctggggcacgttcgcaagaccgggtggagggccaggatatgggcatcgccccctgctcttgcccagaccacgctccagctccagctgcttctgcctcggaactcacagggccaccagggggtgaaggcgtctgggtgagccacctccggccctcctccagctctgcccactcgggtgcctgcaagactgtgccactgaagtggacaggtcacatgaaagcccactggtgtgccaaactggagaagtcactgcaggggggcggggcaatgcgagtcacccgagccacgtggccgcgcgccgggcccaggtgacaaggtcatggggctgtccctcccggcgcccagggcggctgcacaaccggagcagaggccgactcccggcgtgtccatgccggttccctcgcgctccaggcgcggtgcggccctgccaggctggtcggcccgagctctgcgccggcctccggcgagctgcccctactcaccccgagggaagcagagccgcggcgcccggcttccggccgcaacccggtagcggggaattagctgggaaccgtgcggggacagccacctgactgcgcttagtgaagccgaggcgcgcgcggcctgccgggacttgtagttcctggttccccacgccgcgatcccgcgggcagtactgtggaggcacaggggtctcgggcttactccgtcaggtggccttgttgctttgccagggcgacggacttggaatattactgaaatattttcttcaagacattctaactacgtcccaggttcgtgtttaatgaaagatgaagtggatttgtagattttttttttttgagactgagtctcgctctgtcgcccaagcagtacagctaatttttgtattttttttagagatggggtttcaccatgttggccaagccggtctcaaactcctgacctcaaatgatccgcccgcccaaagtgctgggattacaagagtgagccactgcgcccgacctcgtagattttattcattcattcattcattcattcattcattttgagacagagtctcactctgtcgcccaagctggagtgcagtggcccatctcgcctcactgcaacctccgcctcccgggttcaagtgattctcctgcctcagcctcctgagtagctgggattacaggagtgtgctaccacgccctgctaattttttgtatttttaggagtgacggggtttcgccattttgcccaggctggtcttgaactcctgaactcaggcaatccacccgccttgacttcccaaagtgctgggattacaagcctgagccacctcaccgggccatagattttaaataagatattggaactagtaggcgaagaagaaatttactgacaattgatgtatgctggcggggcggtggctcacgcctgtaatcccagcaggccaaggctagcagatcacctgaggtcgggagtttgagaccaacctgaccaacatggagaaaccccgtccctactaataatagcaaaaattagccaggcctagtggtgcatgcctgtaatcccagctactcaggaggctgaggcactagaaacccgggaggcagaagttgcggtgagccgaggtcacgccattgcactccagcctaggcaacaacagcgaaactccgtctcaaaaataataataataatgctggctgggcaggacgcagtagctcacacctgtaatcccagcactttgggaggctgaggcgggcagatcacctgaggctaggggttggagaccagccaggccgacatagtgaaaccccatttctactaaaaatagaaaaattaagccgggtgcggtggctcattcctgtaatcccagcaccttgggaggccaaggtgggcggaccacttgaggccgggaatttgagaccagcctggccaacatagtgaaatctgtctctgctaaaaatacaaaaattagcctggtgtggtggtgcacgtctggaatttcagctactcaggaagctgaggcaggagaatcgcttgaacccgggaggcggaggttgcagtgagctgagatcacgccactgcactccagcctaggcaacagagtgagactctgtctccaaaaagaaaaaaaagaaaaagaaaaattagcccagcatagtggcgggcacctgttatcccaactactcgggaggctgaggtgggagaattgcttgaacccaggaggtggaggttgcagtgagctgagattgggccactgcactccagcctgggcaacagagcaagactcgtctcaaaataaataaataaataaatataatatgctagctaatcttagttatctttggcccttattcattcattcactgatctccattatcaaatgttgacttataagatgcactttgaagacatgtatcaaaaacatttctctttttttttttgagacagggtctggctgtgttgcccaagctggagtgtagaggctccatcactgtagcctcaacttcctgtcctcaaggtaccctcctgcctcagtctgtggagtagctgggactacaagcacatactgccacgcctggctaaattttttaaattttttc

SEQ ID NO: 1241096 - DNA, 4001 bp, Homo sapiens
cagcccagttctgaaaggtgtctcaagcctaagtacgaaaaggaggcaaggcacctccgcttgccattcactttaggttgaaccatttgaaattgcttgtgtcctactgcttttatctagactcagcagtctcgtatggtttttgttggttggttggtttgttttttgagacagagtcttgctctgtcgcccaggctggagttcagtggcgcgatctcggcttactgcaacctctgcctcccgggttcaagtgattctcatgcctcagcctcccgagtagctgggattacaggctcccgccaccacgcccagctaatttttttttttttgtatttttagtagaagacagggtctcgccaagttgcccaggctggtctcgagctcctgggctcaaacgatctcccgccttggcctcccaaagtgctgggattacaggcgtgagccacagcgcccagcctcctgttgtccaacctattatcttgctgggacagctacccagaagatctggctcccatcccctatttgtttctgagcctcagttttcttatctgtcaaacgggaaccaaagcgtcatgaagcaagtgaaagatagatccaagctcacaaggaggcacttcggaatgaatgtctccaaatctggccaatttgctcgggagattcccggagccggggaccgcggccggcagcttgaagggcggcgcgaggcagcgctcgagcagcagggggcgccaggacccgcggcgtcccgcacctccctggccaccagggctgcgatctcgccacctgcctcaactccaagcagaagctgcacagccgtcccagcattttgtccccacctcttcccggatttaggcgtggaccagcaaggattggccgcgcccggtgattttcccaccttgcctccaagcagtgaaaagaaaaccaggggcaggccatttctagaattggattgaagaccttcttcctccccaaacagaaactggacatgggtttactttgggactcagtgagagcccggtggagggtgccttctgggagtctgtgggtacaactgctctacatcccctaagagggagagaaaggcaggaaatgaattccccaggggcctcctagaatttcccctttggaaaactggaaaatccggtgatggatttattgtagaacccgtagaccacggatgttcataaagtctgtcagaacccggacagaaacgagaagcatccaggactcagctttctccctgagcagacccagaagggtagagtgacttgcccagggtcactgcagttcctagccaggctcaatggtcctttctttctctgctcccagcaacgaaaacacatcgaaaagaagaccccacaaaccccaaccccgaaaatgctccccaggtagagaccctcccgcagcagaggctcggctcaccctgccgctggcccaggccactgcgagcagcgccgcgagcgcacagagcacgatccccagcagcagcagcagcagcgggtactgctggctcaggctgtagtaggtctcgtagaagaggtcttcgctggggggcggccgggggctgaagaggcgggccatgatctccccagccccgagccccggggctggctagggccgggcgccgggttacctccttcggcccggcgggccccacctgagcttttctcacccgctcaaagccgctaccaccccgcgcccccaacctcgtggcaatcccgtctcctttttcaggccctccctgcggcctcccagcccgctcccagctggcgatgaggggatccctcagtcctttcctcctcctccctcaaacccggattgtagaggtgccctagaaaagcctcatcgccaggagggcaggatttggggttggtgcgagggagccccgggttcccctgatccccgaactcactgcccgcggcgctggcgcagcggagtgggctaggtccggggagggagccggggacctgatggcggagtcacgctcgccgctgcgctctggctcagagtcccgggcgacaggcgcttccctcccggcgccgcggccccctcccacttccccgacgggacagcccggccccttcctgtgccaaagccggactcccctggtctcctcccgcacttggttttgtctctcctaacaccatcgcctccccgcttcagccccttcagggaagggcaatgtggaccctgggagagatgcgaaggggtgggctggggtggacccaatgggatgtgtccaaatggaggtgaacgtttggtagtggggagaccgagggcggggggctgaagcctggcgagaatgtagggaagaatgtgggtcctggtggggatctaggtcagagttgggggcgctcattctcttgacctctccgcttggctggcaaccactaccaccgggtttgaactgttcatgctccgtgggaggggttgcgcctgtgtatagctttaggagccatagctttccactcccgaacagcaactgggaatcaaaagggaagcaatgtccaggaagcaacctgagtgtgtggtggaggcaggtatgtggcgtcatgatctctaagagcctgggggcaccgtgcggggccaggtctgtgatctttcacatcaactcatccctcgccagagccctgcaagtgagtcttgagagcccggaagaaaagggaccacagcctctatccccagagtttagggttagggtggggtcgccatcctaggctttagaggaagcactgccctgagattagagagtggtctggggaaccaggcctctaggattccttcctgttgtagccggctgtgccctgaccttgtgtgccaggccattgcccactcccagcccccagcatccccacttcctgccatagcagagctgtggtgcctccctatccctcactggcagctcccacccccatcccagtccctccctgcccctggctgagctcagactgactagcattccatcatgtttattgactcctgggggacaggtcacaaagtcagtttgtgggcaggccagactgccctagaaggaagtcaggggcctcaaggggtggcactcttccttaactcgtaactcttggaggcaagcttggaaggtgctttatttcccgctatgattataccaaccctgtggcctgctccaggcttcaggatctttagggccttcttgcgaacctactggtggggggtgctgcaagcccctccccttgcccgaaggtgccaagccccatgtgggcaaggcagttgtctgttgcatagtcaagtagttgttgtctccaacttgcaccccagagcagttgtatatgttaacgagcggtcgccctttaagagaaatagtgatggtggcaggagggtttagctgtcagaaaggccaagttgggggtgggtggggagtatgaagtctctacttgtcagtggctgtgtcaaggtgtgccctgtgctcctcccctcagagctcctctccagaattgtgttagcagaagctctagagagtggcaattgacatttgagaccctgatcttttttgctgggaggtcctctggactgctgaaacaatggaacttagggggctcacagagctggtgttgtggaaagttagaagattcagggacaaatccaagctttgttgtgtgacctcagagggctcctttctcagggggtgtcggttttcccatttatgaaatgagaaggttgagttagatcatcttctcccctcccctccacaaagtaccctgaatctagatataggtctggaggaggagtctggtggaagaattgaacagggaaaagaaagaggtagagaatgggtacctgttactggatttggctccggggtcctgcaggaccagttcatgccttgtctctcagccccctgcaaacagcacagagcatccagttctgccctggagcctggcactcccactgcactcctctcagccccaagttttcgctggcaaggggacagcatttataggactcttagtgcatcccctaatcct

SEQ ID NO: 1241097 - DNA, 4001 bp, Homo sapiens
tgcagggggacaggtgtgggctccagggacaaacctcttttattcccactcacttggagagccaggggctccctcaggctatagggtggcctggtgggggtggcctggcgggggcagcctggtggccggagtgcgggatgggctccagcctgctgcatcctccgtgctcccgtgtgcagctgcgagtgagcggggctgtggggggactgggtggggggcacagcagggagtgcccagatccagaaccatctccacagctgggagcgcggagccaggtgaatgctgtgtacagcacctgtgggggccccagcccgccctgcagaagtgcatggcgcccaccagagctggcagctcatagggaggggcctgggcctcacgggagcagagaggtctaaggagggtcaggggccggggctgccccacgctgagggcgccctggagggtgaagagcagtagagcgctggacatgccccctggcggcccaggacaaggtggcggggcagaggcagtgtggagggagcatgggctgaggaccacctctaggacctgggggatctctggagcgagggatgtgcttgcctgctgcttaggacggagagcaaggggggaggtcccccactgttccaggaagaactttctaggaagccacagtcccttccggcaggaggggctcggacagccctgagccacacagggtgctgggctgactcccttcgtcttgggccccagccctcctctctggagctcaggaaggaggccacagaacccggagaagggacggtgcgggggcccttgttccattattggcagcagccccaggcaggctccaaaccccagacgcgtgcatcccaaagttgacccctttgtgcctggagctgtaagtcagcccatgggcagcagacttggctgccctggcatggggcatgtagccccagggtggcggcccgagagagtgcccagtgtgcagctcagtcagaacagatgggggcgctgagagcagctgccggctggcagaggcccagccctgggccctgggggacaaagcaggtctggcctcctcggtggcactgccagccacggggtcaccctggccagaagtctgtggccctccctctcccatgtctggctaggatcgtcccaagcaccctccctcaggcgcggccccaattgccccccaggacggcctggcccccttccacctctgcctctccttggctgactcaccggggtcacccccacccagcaggcagcttttaccccctccaccacctgcagaccttgcggggagccaggtaagccctatcccagacccagacaggccccaggtgatcactgtaaatgaggaaggggggtgtcttgggggtcctcaaaccatcctggggctgggtcctctggttcccccatggagggtccagcgtcacacccatggcatgcgccaccccctaaggatcgggtgtccccaactcagcgacttgtatttatagctgtgccctggcccgctgccggggtggtggagtaggggtgggtggaaggagggcggtgtgtgtgggtcgggggttgtgtgagtggtgcgtgtgcgtgcgtgggtggggtggccctgggaaaggtgctcccggaaggaaggcatccaagcgggtgagtgaccggccagggcatgggaggacaggggccgtctgggtcgggggaggggggctcgctgggcggtgggggagggacccggcgccccagcccgcacctggcagcggctgatgatgtcggcgtccgtggccagcaggtccaccaccttgcctttgccctcgtccccccactgcgcgcccagcaccaccgtcacgcgggagccggtcgccgccgcctcctgctgcagccgcccccgcttgacgccgcctgcgccggggggccggtcgttggaggctcgggtccccgacatgctggcttggctcttccgctgcgctggcccggccaggagcccgccgccgccggcgtccgcgccattaaatggagccgggccggggcagggggcggggcagggggcgggccgggggagggccagggcgggcgcagtgacgccccggtgacctccggccgccacatccccgccccctcgccgctgcccgggaagcccagttgagtctcgagcactttaggggtgaggggccgcacggaccaacggccaggcaggcagatggcctggggagccgcccccacgaatttgccaacggaggcagtttctcgctagcccgtcggggaccagggcttgtgcaccgcgacctcaccccccaccaagcccttgccgggcccaggacttcggggttccagcaactgcaggggtggtcgttccctccagggaaggagtgcggtttgcaaaaggggagctgcgtcctgcaccccacctagagggtccgcactctcgaggagcgcacctgccccccgtggaaccccgagtgccctgggcgcgggcgcgccccctggcggccgcgaagagccgcgcagcgcgtcctctccgaggactttgtgtccccgcaactgcccgcacttctgccccacggcaggggccccgcgtcccgcccgggcgcgctgtggctcgggcctggctgtagcgagcaggcgggctccagcatggagctccggccctcagcacccaagtctggggtaaagggacccatcctgtcagcgtcacctggctggcatgggagcaacccccagggatgcacgccaccgtggggcccaggttcccaagaggtcccacaccagaccttcccggcccagcctgtggagggactaggccccagagggaggcgatggtctgcgaggctcccgtgttcccggctggttgtcctgtctcacccatcccgccccacccctcccaagtagatgaggcttggaggaagccagccctggtggccaagagaagggtcctggggccccaagggcggaaaagagaatcaggttcttgcttcagagcagggaggcggggtcctttgttccctccctgacggctctcagttgccaaagagcctggagccacgaggccccttgggctcagggcaactccaaggctagtgacagggagtccatggagacgggacactccctgtgaggaaggagtggagcttgggcctgtcacagcaaaggtcgctcacactgagttagtgattcaggtgcagccaaggacaccactgcccacccctgcctgcagcctccccacccctcctctcttggcacctgaccgtgccccagcctgggggagaggggctgtttgaagcctggcctcctgccccctgcacccatgtccccagtcccctcttcttccactgggcacatcgacacttcctctccctcagcatccttgcggggaaaatgccgttgtatgggttccaagcagtcagtggggcctcagtggaaaagcagtcttcatgcatgaacttcctagtgccaccttgggggtgacagctggtcgggggtgaacagaccaccggccccagcttgggaaggggctggagcagggttggagggctctgagatttggcagaacctggagcctgctgagaaggggctgcacctgagggtggggcagtgggtctgggggtgtcaaggagggaatttggggcacagcagagagctgtgcaggtagggaagaggcagactgcaacaggagaaaccaagagcgtcatggaggtttgtttccagatgagagaaaccgacaatgttaaatgtccaccaggaaccacaaagtcccatcagacaaggaggtgctgccaaggcctggggggggccaccagctctgagcccttcctggggacccctggggctctgggctagcagatgtcagatagaggcttgggggactgggggacatgctagaccacctcactaagggggcttggactgaccctgcagaggcgaacgctagtgactcactgacttctccaggcccggactataaatagccacgggcccgggtaggggcagggagttggggcttttctaaaaacagtcctgcc

SEQ ID NO: 1241098 - DNA, 4001 bp, Homo sapiens
atcctgctgcagggggcccctcagggtctgcttgttccaggcagcccggccctgagccccgagtcctgtcaccatccccccagtgccgagcccccagggcagccgcactcactctgtctttcctgcctcatggggataagtgatgggcagaagagccagggcgagtgtgtgccacgggacagccctgctcaggcacggctcccaccacagcccctcaggccaagctccagggtccccacgtccagccggcaggcctctctgccaggcacccctcggctgccctgctcctctgaaagcagagctgaggcacctgagctctgggaaggccatgggcacatccatccttcagccaccactcagggtcctctaggggctgcagagtcctgcatttacctaagatgcccactgctgcccctacaggtggagaggaagcccagccctgctgctcctaggaaaggagccccctgcatggccaatgggctgagccacatgctgtgagctgccatggacagtcacccatgttgcacactgcacaactctagggggtgctgtcacagagccatggcatgaatgatggcgcctagaggtgtagcagctgcagggccacatcatgccacctttccactgtttgccaggtcagggacagtagattaaggtaagcgcccaactctcagaagcacagtgatgcaagggtgcgagtgagagagacgatatgaagatggatggtgcagaacacctgccttgagtgacctgtacccaaaggctcagaccaggctgggggcccagagttaggggcaccaagggagcctggtggccccctggcgctctctacctgcctccaggtttctcttggggtcttcccctctgtggtgcaggcttgggtcaggacacagctctgagcccccacggacactgagccccccccccccccccactctctgcctagtctggcttgtcactcacagtccctaggggacatccgtgccagctgcctccctggtggcagggagtttaggaaaagaggctctctccatcctggacaaggcccactcaggaaccaaacacagctctgacccctgctttgtccctgcgggtccacccaactcacccctctgggggccagggaaggcacggccctgtggccagccctatctccactgccccactcaggcccctcccctccaggaggctgtgcgcaccctcacacccgcagcacctctcggggccactccccagtcctcccaccattgctggtccctccaggcattttatatatgtacatatatttataagtaaatatctctctacacctctctccatatcatctatctatctatagtctccagggctgccaaaacaaaatacacagcctggacagctttaaacaatggaatttttttttgagacagggtctcactctgtcgcccaggttggagtgcaatggtgtgatcctggctcactgcaacctctgcctcctgagttcaagctattctaccacctcaccctccccagtagctgggactacaggcgcccaccagcatgcccagataatttttgtatttttagtagaaaccgggtttcacttggccaggctggtcttgaactcctgaccctaagtgatccgctcgcctcggcctcccaaagtgctggagttacagatgtacgccaccgcacccacccgctcccctccaggtgttaaggatccggctcctgcagtcctcctgggcaggcaggtgtggcctcctgcatttgacccgtggctcctccaagccctctcctctcccagcgtcaccctagttgggcctccacaggcactgggaaggtgaggggtgggctgagctggcacggagtggccactcagtaactggagactccttggaggcagccaggggagggctgtgctgtgagctggggacgagctgagggtcagggccaggttcgtgggcctctgcccacctccttgcctctgggttgccaccccacagctcctccccaccatgccgacgccacgctcctccccacgacgccgacgccacgctcctccccacgacgccgacgccacgctcctccccacgacgccgacgccacgctcctccccacgacgccgacgccacgctcctccccacgacgccgacgccacgctcctccccacgacgccgacgccacgctcctcccgacgccgacgccacgctcctccccacgacgccgacgccacgctcctccccacgacgccgacgccacgctcctccccacgacgccgacgccacgctcctccccacgacgccgacgccacgctcctccccaccacgccgacgccacgctcctccccaccacgccgacgccacgctcctccccacgacgccgacgccacgctcctcccccacgccgacgctacctcctccctcccacgccgacgccatgctgctgacacgtgcaaggcgtctccacacacaggctttgtccttgctcctcacctccacactgcccagatggcgcatgccctgcccctgcactgagcttgtcacccgtgcgggtcccagccttgccctgcagccatcgtcctgctcctgtccaccccgtccctaaatccttgggatgccacctgccatctgcctggcttgggggctgtccattgacctcctttgacctgccagggccccctccactcccggcccacttgccactgcccttctctgccctgcagtccataggccctttactgccatggatgactcctctggccacagcgtctgcttggcccagggttcccaaggaggcccctttctcccctgcaatgcagcccccatcgtcagccctacctgcagcaacacctggacgaggctcgctacctcccatgctccagagccttctcctccccacagcgttagcggactgcatgtctgacggcgccgtgcctcaacgccactgcactctgcccgcttccccctcggccctagctgtgccaggcccatgctataccacctcctggttcagctctcatgcaggcttggggaggaggggacagtggagtggctgtttgcacctctccccctggaatgggagcgaccagctctcctgcctctgtgtccatccccagccctggcccagggcctggctgtcagcgagctcacgccaggcagtgaaggcagcagagtggcaagcgcagggggaggccggcggtgcttttcagaggccgtgaggctcctgggcccaacctcttggcactggcactcaatggcagtttgtacgacgactgtgcccggcacagagcaaggggccctggcgcccagtgtgcacacacctgtgactaccagtgtggtgcagtgggttcacccacttacactgcttcactcccttctgggctctgcttgcaggctcccaccattcattcattccttcaacccaaaggaattgttctctgccccttttggtagtggggtgaggtctgggacagaaccgaggtcactgctacaggtgtgcaggtctcagctgcccgggactggtgttcctgcaatgaggcagggctgtgtgtaactgcagggaccctctgtcctggagccacggcccagtaaccagcaccatcaacagtgcagaggtggggtagggggaagacctctttctggaagcaaccccaggcattccctggccaaggcagctgcccctctgactcccagaaggtctctggtgcaccctggagcctaaggcaaagcgttacctgatggccccttggaaagggtgcccagagccccaacagccacagcacaggggccctcaatgcacaggatgccagctcccacctggcgctgccacaccacagagaaacaccctgtgatctcacacccctgcatacatggccatagctttccacccgtctgctggctggacactggctctagctagacctggagggcacgggaggctgggagtgcgctatggagacccagggcaggccccttcagcccgtgtactgggcatggccagacataaacagcccagtgccc

SEQ ID NO: 1241099 - DNA, 4001 bp, Homo sapiens
gggcaggtttggactggacaggaagacgagagcaggggagagtccgcccatctccagcctgctgagaggaaactgcaggtggaaaaggcctggaccaaatccaggctgggaaaggcagtagttggcagggtgcttgtcaggaatgcacgttcctgggccgcagggttggggagggtctgggaaccggtgtgctggacagaactcccaaggtctctgatcttgcaagtctcctaccaaagctccagcgagagccactgaccttattccctaagagcggatggttccgtaggctggacacagggagggactgccccagacgggctgggaaccatgaagccagcacaagcctctgtggaggcagggggtggatgagatggtcctggaccctgcagcttgggagtctctgggtgcccgtgagtgaggaggaagcagagcagaaaggctgtgcagggaagctgggggcagggtagtggtcccatgcctgggggccctgcccttctccctctgaggaggtcgacctgcagccatgtgggcagggccagtcatagtgaaagaggagggggccaggggcctccagcccaccggagccatcatcctcccgctgctgtgcccaaacaccttgggctcccatctgcgacaccgtgaagcaggtgctgtaggggcctccctgctctggagccccccagacaagcctcccaccctaagtgcgcaccagacagacaggccacaggaggggccttggtagtgcctgctgcagctggggggcatgcccaggccaggggcacccctctcacctgcagcattgtcggcaccattagcattgacctgttttccccaaggagtggggtccagcctgcaccagtgccggccagcccaaccccctggccagtggctgccaatgccctgggtgtggtcagctgcagcagcatagacccagcgcccaagggactgccctgcccccctcagccctgccctccaagatgctgagacacccaggccccggaaccaggcccagtgcagggacagacacacaaagagcagcaggtacacatgccgtagcctgcggctcagagggaggctactgaccatccctgggggcatgccagtaggtagcacccactttcccttgcccagcactgcgggaccctgtggcctgactttgaccccattcaggcccctcaccaggccccagacctcaggcctagccctgccacagcctccacctagccagcgaccccaccacacagccacacagtagacgcagcccagccctgcctggaagccccggaccaaagtggagagcccagactcctggaccagcctggctgctctcccgcaaagcaggtgagagggcaagcctggtgcaggtgccccgggtcccggcggccccggctttcacgccccttgcagacaccagccctgctccagagtgcggtagcacctcccaggaggccgcctctcgaccagacagcgtcccaggagcggggcaggagcgagaaggagagacagacagggaccgcgagtgacagagggagtgagcgacagagacgagtcagccaccgagaaacaaagtgagcgacagagacagtctcagaggccgggagaggagcaggaacctacagccacggacaggtagaacgcgaggcatgggagaagagactccagcggccgggaaggcccagaaccacgcgcgagtcccgcaggcgtctccgagtcccccgcccccaaggcccgcactgcgcgcccctggacacgccccggcgcgcgccctcgcgcgtagcccacccgccccaggggagcgggctgcaggcggggaggggcgcaccgctgccgggggttccgggccaggtgggcagcaccatgtggaagcagtcgcacatcgcggcggccaggcggtgcgggcctggcggcccgtcgcgtccagtcgctggtcccggctccggcgcacggggcgggcgggcgggagccgcgctctgccccgctgccctgcgctgccgcgggcggccgacctcggactgcggacaccgcgcgccaggctacccagccgctcagctaggaccccgcccggctccgcccagccctgccgggccactgcggagcgcgctcgcgggcggtgccgtcggcctcattcagcccattggctgccgtcgccgcggccccgcccctcccagccaggccccgccccaccccgcgcccccggcccgcctgtcgcgtccgcagaattaactttggactcccgccagggagcgacctctggatccccgcaccgaggctcctggacttgccgctgtcttcacctcccattccgggggagacagacactttagtcagaagctggggtggggggcagcctgcggggacaacaggggtcgcgggcaccgcaggaggtgatctggcagcataaggacaagatagaattctgcaggggctggtgggtggcagatacgaggacgcggctgagagcgtgcagcgggaacagggcgccccgggcagggctgcggggtgggcgccgcgtgcgggagcgcccagcgctgggggcagtcctggagccagaaccccgcccagagtcatcctttctgctgattcttgtcaagagcctagggcctaggacacagcggcaaccagcaccccactggccctgccccaggggctccaggtctggcgtagacacaagcaagcctgtaaggatgaggcgttctgcagggcggcactgccctgggggcgggggaacggaggtcctggagggctcctggcagtgtaagctgggaccttaggggtgagacatgtgccaggcagtgtaggaagcgttctggagagaggggacagagtagcgtgtgtgcagagaatgggggcaaaagggctggggttgaaagtcaggcccagtgggcgggggcagggcagcaaggaggctgagggggctcctgtcggtaggaggtgccacttaaggctccaagcagggtctctgagcgtggtgagagctgaggaaagactgcgcaggtggctaggggtgttggcatggggcacagctggaaacaggagcagtggaaccacggccatggtatgggagggagtgaaaggatatgcaggcagaggggacttggtgaggatcagagtgcagagggtgggagcctccctgggatctagcttgggcaccacacagaggcagcacacctgggggtgtggacagggagggcaggggcccaagggagttctaagagtttggtgacgcctggcctggtgtagacccaaaccgggcataccccagaaggagtggagttctgcagggattgtcggggaaggcagggctggaagagacccaggagaggaccgccacctccatgaggagctgcctggcaatgtccaggggtgtgggtcagatgcagggacacacacacacacggacacacatacggatacacacacacatacatacatacagagataaagacacagagacacacagacacacacggacagagacacagacacacagatacacaggtacacatacagacacacacacagaggcacacacagacacacacagagacacacagacacacatggacagagacacagacacagagatacacaggtacacatagaggcacactcacacacacacagacacacacacagagacacacagacacatacacatagagacacaaacacacatgctctgtcatacacacacacacacacacacacacacggacaccttttcctggggtgggaagaggccaggctgtaccggaagggccaggcagacacacacactcatagataagatcacaaactcaccaagacacagacacaggccacctgagatatttgatacactcaggcctgcatgcatgaacacccacaccaggatacagacccatgcacgtgtatacatacacacaggggcacacgcattcctgggctcatttggagaccacgcacagctagcgggcccaggtgagccacccgggcacgatgactcaccctagacagtt

SEQ ID NO: 1241100 - DNA, 4001 bp, Homo sapiens
acttcatggatgggacttatgagacccagacacaggaaatccatttagcatcccacaatggcaaagaaattccaggactcgatactgctttacataggactccaaagcagcaacatctgccttctcccttcaaggtctgtaactcctcaaaactgttctctccagctacttaacaggttaaacaaaacacagttaatctctctgacagcccagcttagacttacctgtccagtttagtttgacgctccattcataaaagaagataagtttccctttgcgattgttaatggatgcctctccatcaagcttactcacttccgtcacctcacacttgccttcttcattttgaacctgcactgccaggaacagtgttttcagcttatccgtggaccaatttgaagcatctctctccgtcctgcaaagcagaaacagagctatgaaccagcagtcaaacggaggatacgctgctctatgcaagagaatacgaggttaaaggaggcctgacaaatagtttgaaaagaacacaaaaactcccagtcgcactccagtatgtccacaaacatgtcattcttttttaggaagacaaggggttgcacactgtcaacaaagacagctgctgtagaaaatggtataaactcaatggaaaattatgctctcctttctcggcatgatggtgcgggggaatacttgatactttaacatggcgcccccatttgaccaagtggaaaactgcacatattgctgagatcaggaacacagactggaccatgaaagaatagtacttagctaaaaggcccagaaaggattaaaccaataaccctgacctcattggcacggtgttctgacctatcagattcgcacttgcattataaacttcctacacattcactgtcccctagatggccacaaaaacgttaagtccagggcttcaaaacaaacaacaaaaattaggtcaagtactctgcatgttaagaagagagaatacaaagtgagatatggaaaagaaacatcactatctgccttcctacttatcaactattagagaaaacaacagcaaaaaaggctgcaacaaagtaacggtacaatacaaacattacgaaaaaagttcagtggaattcaaaaataaggaaactaatattactttgggaagatttcatgaaggagggcagttattttaagaacggtcaggttataaaaccacggctgctcggcaacctggagttccaacacacccgacctgatagttccgggtgagaggccgcagctatctgagctctgagcacctgcacaacacgttctcaatctcccgcgggaccgctgcagcggtcccctatgaatgacttttaattttaccgcaggccgcaaaataggaattacagacccctggccttaggcctttcacagctatctcccaacacaatcaaaggaggttccagtctcagtgactcctctggccacgtgtaataagcacctccctgctcgggctggatgcagcagccagggcgttatctcctagtctctctgacaaccctcctctggggcgcagccctccacgtccatctccctcccctcaaacactgagaaggtgaccgcggagtggagaggcctggggctacggacccctgccacaggaaggacccacccccatctccggacagggctacctcagccccagctctgtccgggccgaggttctaggaaccctgaaaccctggcccggccgcaggtctcccaaggccggcctgcttttctggccctcaccagtgccagttgttgacgttggtggcgtccgcccgctcctccacgatccagcgtgggtctccctcaccccacttggccatcggctctcctatcgcggcgccaccagctccggagcagccgtagccacagcctcaggaccgcttagtgccagccgcccggcagcgcctggaaactactagaagcggccgcaagcacctcctggcttgcttttccctccaccccctcccctccttaacttccggctcctccccactcccaccggttacttccgtcccaactcgccgcaccgtgggttccgcctgatttagagatccttcagactccatcgggttctccccaaaaagcgtcccgaaacccaactgctcatacaaccattcctcacccataggaaaacaaagaacacgtctcattgcttccctggaccctaaatcgcccttgctgagcctcatgggaattgtagtcttgctacgtgactcgctggataaccgcggaaggtctcgcggaaaggagaggaaatgacctagcacggtgcttggggtttctgggggctgtagtcaagaagccttgtggttcgtcgggacagcgcctgacagcagaggcagaagaaactacgacttccagcatgccctgcggtctcgttattcgtgttttctctccgccctacgattattcccttccgcccccttctctaagctgcacagcctgaatagaagggctggtccagcggcggcggaggctggcgctgtcctgagagggagggctctgtgcggaagaggtgagggtgtcccaagccccttgggtcgcgtatctggctggatccagcctctccgcatcttgatcttttcccctcttctaggaggcatccctacaccctatgactacaggcctgattctcttctttcagtcagggcgacccttgggcgctggagtacgcttgggactggggctgcgagtgagcaccagcgattggttcggaagcggacatttggttcagaacgagcatttaactctgccagggatccgctgggctctgacgactgcggtagatccatggcttcctggacgttcacccgtagagtcatcctagcttaactcttgttccctggtctcagttcacaagcctcacctgtatcttcctggctcggaagataattgaaaccaagtctgacttctcagtaggtggtttttggagttttctgaggcagggagcatgttgtggttttcttgctgattcttctgttttcctttgtaaagttcctgttctcccctgaggtctctcaccctgccttgtgggctgtcagtaaacaagagacgataaagacaaacctctgaagtattttaaatcatgttgaagcacctgtcactcttaagagtgacaatcgtacctgattactttataactctagagccactagatcattatctatacttgccaagtaaacctagcttctcatttggcgttataaatacaaattgatggcagttgtctactgccattgcatggttaaaaagattccagaaatcctctggtagattattgtgtttgttagacacattctatgtctatctgtagataattactatagtgaaggaatgatctctagttttctggaaagtgaaaaataggtagaaggaccatgcaagacactagaaatggtctaggagccagaaagcctggattgtaatttgaaataggagcatttaacaaagtggctttgatactgaactcttttgtgcctcactttccccatgagtaacatggaaatggaatctcccaggcctaccttacaagattgttctgaggatcaaacgaatgacagagtgatttatgaactgacatgtgtgccagagacatttatatgttctatacacatcttcagcatttgtggctactcagaatttttgtattttttttaatctttaggattgctaaaaaatattttcttttttagcttttcccaaggtaccaggatgatgtattaataataaaagttactattgagtgttaattttgggtcaggcactaagcactttacatgtattaactggtttactcctcagaaccatttctaaggtaggtcatctgttatgcccatttaacagacgggaaaaccaagacagaaaaatgtcagtatgatattccatattaaaaggaaataacatttagtatttactttctgctagacacttttatagatgttccctgcaaccctgtgagataggatataattttctccaag

SEQ ID NO: 1241101 - DNA, 4001 bp, Homo sapiens
gggcgctccatcctgtctcccaggctccatttccccgacagccgccactactccgcgtatgctagggagcgtcccccgatccccgaaccccacccctccgccgcgcggcggcagccgccccgcccgcgggcacctggagcgcccgggcaggagtcggcacgcacgcggccagcctgccccgcccccccacccgcgcattctccgaattcctgcgggcggagcctgggcccgggtgggggcgcggcgcgcacaaacctccaggggcaccgccgtgaaaggggggagcaagttgggggggatgcgccttcactgccccacttggtcccttccctacgaggcctcctgccgcaaaaaaccgaggttcaaatgcttgagaaacggactcacgagataccaggggggttgaatttagcagaaataaggagccctggttcatctgaaaactagcaggaaggggacagtgctctggggccgcccccatccatccctcttgcttctttcctagtcccgcgtcttcacctcggaccccggggcaccggcactttgggccgtcggggcagtggagaaccgaataccgtgacgggtcccttcccgtccctaaccacttctctcactcaccgaagtagtcctccctggcctctggctcccgcatccgggcccgggcggcctccggaacgaaaggacctggtggctcctccagacccgacggctcaatccccgagggttctccgcgggctccggcttctcgcccaccggtgcccaccgtcaggcgaagcaaagctgttagctcgtcctggtaccgggcgcccacggcgcagtccccgtagccggtcacagagtgtcgtccgggttgcgccccccgtctctccaagggccccgccgctcccactccggccccggctagagctccagggctgcccagggccgggggatacgagtggcggctttcctggcagccgaaccccgcgggccgctgagcgtacaatcggtccagggcggcgtggagctccgggtaggcggacgggacccctccgggagaatagcctgccggtgctccggccaggggtgggccaaacaggcacggccccgctggcaaggggctcccgtggcgctggtcgtagcccatgctgatgccgctggtgcgattgctgcagggccggctacctccagctccgccagcccccgccccgtccagcagcaggctgccccgggggctggacggcttgctcgcgtcgctggccgagctactggcgaagctagagcgggggctgagggccggggccgtgggctccagccgaaaatcggggggcaacgactgaggtagaggcaaggcccgggtgggcggcggccccgcgggaaaagagccttcgtagcgcggcgcctcaaaggagccgcgctgatttcgctcagcgtccagggaaccttgctcccgggccggctccaacggctcatccccaggtcccccagtagctcctcggggccctgacttcctaggtccccccaacccacttaggcgccccttgcccggcccgggggtcccgtcagacccagaccggctagattcaccctttctgcggccgaacttctccagcaggcgactggctttctctcctaaccgctccatgccctcgggcctggggcctctcgccccctccccgcctggcaccctgcggcgtctcggcggccggttctctttccctgcagccggactctggttccccaggggcacaggggaggcacaggggcttagcgggcggcctggatgccctgcgccaggaatcccacagcatcccccagcgggaggggctgcgtccccccgcgcatctggggctgagcggggctagcagggtctctggccgcggctgtccagtccgcaggtctatctgttcacgcgtcgactcgcccgactgccccactctccccggcccccgcccccctagctctcacgctagccacagaccgaacttctctcccaaacttttgtctgcctggccggatctactttcctaggggggcggagcgcggtgtgtgcgagagcgccgggggtgtccgcgcagggatagctggtgtgcgtgcagcggaaggcgctaactgccctggatgtggagacccgcggactggacgtgagaggcgggcaggggcagttggggcagctgcccctacaacactgaagaattggaataggaaagagtgtgggggtaggggacggggactctttgtctgcagttggaatgcgcggaggggcatggtggaatgtgtcgcgtcccgggaccggacgacaggaggcatgttctgcgctagcaccgtgactttgttcccagcgtggggactgtgggagagatggagagagactggtacagaaatggtgagacaaggagagagccataaagaggaagacagagagaaagaagacaaatgcataaagaggttcagagacgtgtacgtaaagatagccctgaaaggcgacgaagcccacagagagaggtggaagagggaagaggtagcgaaagaaagggagagctgaggagcaaagaggagtgtggacgatgcagagaccgaagggtgcgcagacaaaggaaaggacaagcttgtccagagagaatgagagacaaacagataaactgcaataaaaaggcaccaccttctggacccaaaagttttgtgatttgtaaaagcagtgaaaaggagtcaggaaaatgggactaatctctactttgagagggagggaaagagatatagtgtgtatgtagaagcagtgaaaaggagtgaggaaaaggtttgggactaatctctaccttaagggtaggacagttagagggatagacaccccctggtgttgggaaatgagatttttctcatttcaggtgactgtggagatcgaaggcctggttttagggctagcgaacaccttctccctttggttttggtccacagaagactggtgatacagagtaagtattaagaggaagaaaagaaatgccgtgtagaggaaattgcaaatgaaaatgatcaggatggaaaagaggctgatattgactattttaaaaggatcaagaataaggaaaagaaaccctggctgaagcagccgggcgcggtggctcacgcctgtaatcccaccactttgggaggctgaggcgggcggatcacttgaagtcaagagttcagaccagcctggccaacatggtgaagccctatctctactaaaaatacaaaaattagccaggcgtggtggcgcacgcctatagtcccagccactcgagaggctgaggcgggagaatcgcttgaacccgggagacagaggttgcagtgagccaatatcacggccactgcactccagcctgggcgacagagcaagactccgtctcaaaaaaattctcaaaaataaataataattttttttaaagaaaccctagatgaagctaaacatacctaattaaataccagccaacggccgggagcggtggctcacgcctgtaatcccagcactttggaaggcagaggcggcgggatcacgaggtcaggagtttgcaaccagcctggccagtatggtgaaaccccgtctctactaagaatacaaaaattagccggtgtggtggcgtgcacctgtagtcccagctacttgggaggctgaggcagaagaatcgcgtgaacccaggaggcggaggttgcagagagccgagattgtgccattgcactcaggcctgggcgatagagggagattccgtctcaaaaaaattttttaaaaaccagccaactacttttgcccagactaaaacatcaggggcaaggggtggaggaagtagaatggagaaggaaaatgactcctttgtatttagatagtaaatgagtatgaaaattatatgcaaacaagtcatgcatattattttcatctcaacattttgaacaccttttataatcttagtgtagccttagggaatgtggaaagaaacgaggttaatatcttttgggaaattaatttgtgccaaactatttggcttctt

SEQ ID NO: 1241102 - DNA, 4001 bp, Homo sapiens
tgctatgtaatgtcggtgaagaagtcgtaaaatggaggcggagaccctgaaaagtgcctgagagagcattcaggccagcagtgtttcactctggctgcatatcaggatcacctaggcagcttttaaaaaacatcaatgctttggccctcctccaggcctattatcacaatctgtggtgatgggatccaaacactgttttttgttttgttttgttttttagttcttcccagctgatctgctaggctaccatgattgagaatcactgatttaatcctatcttttgtttttacagaaaagaaaactgagtcccaagtgattctaaccagtagcagaaaggggattaagactcaggactggccgggcgcggcggcttacgcctgtaatcccagcactttgggaggccgaggtgggcggatcacaaggtcaggagatcgagaccatactggctaacacagtgaaaccccgtctctactaaaaacacaccaaaaaattagccgggcatgtggcgggcgcctgtagtcccagctaggcaggagaatggcgtgaaccaggaggcggagcttgcagtaagccgagatcgcaccactggactccagcctgggcaacagagtgagactccatctcaaaaaaaaaaaaaagaagacgactcaggaccccaggctgggcatggtggctcacgcctataatctagcactttgggaggctgaggcaggaggatcacttgaggccaggaattcgagaccagcctggccaacatggcaaaaccttttatctactaaacatacaaaaattagccaggcatggtggcgcatgcctgtagtcctagctacttgggaggctgaggcactagaatcacttgaacctgggaggcggaggttgcagtgagccgagatcattccactttgtcagagcgagactctgtctcaaaaaaaaaaaaaaaaaaaagactcaggaccccacactcctagctcaggctggaaggcctggctgtgcctgcagagttagggaggggctaggtcatagaagcctgggttgacaggcttttgagcccagacttgatcccataggcagagggaagccactgtaaacagttgctctggggaggaatgggatgaaagtgattcatctggtgacaggcttctttccccaaccttctctcaatatccatttagtccctgatcccgctcctcagcctcacagtgagacttctcagctgaaagcactttacttaccttctccaaaatcaagtgaccacagacacagcatttctcagctgcctcctgaaaccctgaaaactaaagtaaaagacaagacgaacggaggctgttatcaaactgagaatgatgggtggtactccaatgggccaccaagaagggggtcagtatggaaaccaattccaggtccaggtgacccttactcaccagataatcttcctcacagtacacagagccattgacactgtagaaagccttgcaacgcaaagttcgccctagaaacaatagagaaggggctggaacctatcccacagcccaggtgcaagacttctggggtcactgctccccgctgctgcataatatatttaaacctggactttgtgcttttcctcctaactgctgtctgtccttccccgcacaaaaattccatctgatgcaattccaatttgctttggcttcattccagccaacttcccctctcctctgcttgctgctcctccagctcctgcctccttaacagttttctagggcccctcccctaaacaaactgccttcctctccagtgcataggaagccacctgggagagtaaagccaactacgtgctggaatacgtgagctcttaataaggtgctatatgatttgcatagagagaaccacattgttaacaggcctttccctctgggacccttcaacctagaagcctctttgcctgagcatatctatcctgctctcaaatgcctgtctccttccagggacagactccatggaggtcaggactggagttactgcagaaggacaaagtgctttgtttggaagcaaagcaggtcccctctcctgtttgtataaggctgcttccctaagcttagagggacccagagtcactggggtaagagacaacccaggatcttcttccagcagacaaggcaggacaattccccatgtgaccaacccccaggaactgctcccaggtgtctacattatcagggatagggaaggagtgagaacaggtggagcatgagcaattttcccacctttgccttcttcccctcaaaatccctacttccaactctgtccagtgggttaggaaagctgacttagaagctcatgagacacaggggaggaaagatagggaaagagatatagccagaagaggccctgtaaacagaaggatagacagacagatgagcctaaagagaaccaggcagaaactgggggagtgagaaaagctgagtgctgaagtcagacaggcagagataggagattaaaggtttagcaaaggaatcagaatgggtaagcagtaaggagggggtaatgagggaggggaggggggcagttaaggccgctgggagcatcccccctttccaagtgggcctcctgagctaacagtggcaggcattcctggagcgtgatgtcatcagcttggcatggcccggtggcctgcactccagtgaggtggctgaactctgaccagccaagagaaaacccccctctccgccccaaacagctccccactcccccagcctgcccccaccctccccacattccagtctttcactgtcgccccaggcaacttggctgcccaagaccaagccccaccaagaagctggagggccaggcaagtccaggatgggcaagcagggaagcacgagagggagaaacagaggtgaggaaggaaggagggactccagaaaggggacccaccaggcggagggagagccaagtagaggacagacagggaagcaagagaggcagagcagctgcggacctccagacacttggtggggatccaacagctgctctgtgagcaaatgaagaggcacaagctctcctcctgttccccatagcacttgtaagtgtgtatgtgggcaggggaggggagtgcttgagtattggggctacactcaccacaagagcagcaaacaaagcactgggtgtggtagaggctgtccagggcctggcaggcattgctctgcccatagatgcctttgttgcacttgatacaggtgcctgagaagagaaaagtgtcacactctactcccccaggtcaaaaccagggattcccaagctttcctgactgccctttcctgatgtgccaggggtcacagtctccctttgatgggctcccttctgagtagagaagataacgagtaatgagatgcagcaagatcttggctgagcagatccattcttgtttatttaattactcaacagatattttctgagcatctgttttgtgcttaacacagcaccactacctaaggaaacctggagaaagtcgaagatatggtccctggcattcagatgcttagtttctgttggggagaaaagactacacaggcaaggtatgatctctgttgcagtgtgtaggatgaacggtcaaagatgccagtccacaggtgctcagcagcagacttgaaaatactttctagagaaagcaggctaggcccagaaatcgtctctgggacttcagtttcccatcagtcaaacgagctgttcagttatagaatgatttctctccactgcagacttccaaggatggagaaaaggatctggcttggcagagggctccgtgcagaggggaccatgtgagcatgattcctgtggggaggtggctgctgagaatgcagggtgtgttccaggaaccagggttgaacaggaaagcagggagagtagcagagcccctgatgcctcctagtcaccttctatcatgggaagaatacagaactgaactgcttgctattccccaaaatcccccactaagatatatacacctggctctgggactt

SEQ ID NO: 1241103 - DNA, 4001 bp, Homo sapiens
tttgagatggagtttcactctgttgcccaggctggagcgaagtggtgcaatctcggctcactgcaacctccgccccctgggttcaagtgattttcctgcctcagcctccagagcagctgagattataggcgcctgccaccacgcccggttaatttttgtacttttagtagagacagggtttcactatgttggccaggctggtctcgaactcctgacctcaggtgatccacccacctcggcctcccaaagtgctagtattacaccacgcccaccctaaatctctgttttttgatggatgcattttagatggtacactgggttaaatagcgtctacccccaccaaattcctgtcctcttagaacctgtgaatgtggccttatttggaaatagggtctttgcagatgtaatcaagttaaaatgaagccatattggatagggtgagtcctcatccaacaactggtgtccttatgagaagagggaagttttgacacagagacacaggggagagaacaccatgtgaagaaggtggcagagattggagtctactgccaaggggtgccaagaattattggcaactaccagaagctaggagaggggcaagcaacagttcttcccctggagcttccagtagaaaccaaccctgctgacaccttgatcttggacttctgccctcaagaactgcgagagaataatttctgttttataaggtcatccagtttgtggcaattggttaccacagccctagaaaactaatacagattgtacgtactgtagcctcatcctattttaagcagatttgtcctgttcgaaagtgcagtcattagcctcagagaagtctgtccagggtgagattagatttctctgtagctctagaggacagaattcagatggacgggtcctacccacagggaatgataaaatcatggctttcttttgacaactgatcatattagcatgaagggccccagagccctttttctgaatatcttcattttccagggataaagacacagaaaggtgaggaaacttaatggaactcggggacccaaacagtgtctggtccataatagatgctcaaaaaccatatattgaagggatggatgaatgaaaaacgcttcatgggcaatataaaaatttgatttactcacgcctgtaatcccttttggatttactcggcctgtaatttgggaggccgagacgggtgggtcacgaggtcaggagatcgatcgagaccatcctggctaacacagtgaaaccccgtctctgctaaaaatacaaaaaattagccgggcgcggtgtcgggcgcctgtagtcccagctactcggaggctgaggcaggagaatggcgtgaacccgggaggcggagcttgcagtgagccgagatcgcgccactgcactccagcctgggcgacagagcaaggctccgtctcaaaaaaaaaaaattgatttattttctcgtttagctgcctgcttcaaaatcgatggaagggtagaaagagaacctaggagggggcaagagacctggagtctctgtccaggttctggcctcaactctctatgtgatcttgggcaagtccctgcctcttagcctcagtttcccctcattaaaaggaggaacaggggatggaccagtgatttccagacacctgagcttccatgtagaatctcttgaccagcctgggtgcggactggggtccagggggcattggtggtgcccaggacgcgggaccctccctgaggaaaggccccgacagcgccctggggcgcagaccctcgctgggtttgcggaccgggggccgagggctgggagctgagagctggcgtgaggctctgggccgccgccgccgctcaccttcccgatgtttccgctgctgtaggaatccaacaggtttataaacaccctctgggtccggataaccttctccgtgagagcagcagtttcctcttcttcagccatggtgggagccgcgctggttgctaaggtgaaagcgccactcgcttgccaaggaggcggggcccgggccagggaggcggggcaggttctctctgggggcggggccttggctccgggcagtttgccgggcggggaggggcgtgtcgtgggcgaagcagggagtgccgggcggggcggtgcgtgtcgtgcccggcgctaatcagggcgtgccaggcgggacggggcaggctgtgccggtcgctgggcggggcgtgccgggtagggcggggcgagtcgtgccggggggttgggcggggcatgccgggcagggcggggtgtgtagtgcagtgggctgggcggggcgcgccgggcgaagcggggctcagggctcgcaactgcgcgcgctgtcggctgctgggcgccaggcggatgtccctgcgagtgctttccgcggcgccgcgcgtgcagcccgggtctcaccctggcttgctgcccactgggagcccttgggcagtgcatggtttctttccgaagctccctgggcgtctgtcccggggggccatgtgattgctgtgcctttttaatctccattgttcggaaagtctggaaacacatccctgtgtccgcttgacccgatgactaaaaataatgagaattctgaagaagagggaatggcccacagcctaggcctctccccgacacgtgggagttactcagcacgctcccatggggtggtctggccggggcgacgggacgtaagcctcagctgcgaagaaaagctgttgccatggagtttcgggctcccgaacacccgagcgacgctagcgtggtcccgccttgcggcaggtgcggcttggtccgccggctcagctcccttgggggttgtttccagacgcacgttccgggaagacccctggtgtcggctgggggcgaccagagcccgtaggcgcccgggattcgctcacattcaccaagggaagaaatttagacttgaccgttccacaagagattatacatgcagttgctgagataaatccacaaattaaaagataacattcacctcggtgatcactggaccataaaggttgtggtggactaagaatacgcagttcccttggaatagcctgatcatattgaactgttttcatgccttaagcattaactccttaaatgcaaatatttaacacttgcagcaattgtgtgtgcgtggtttcttctcgttctttttattatttttaatagagacagggtctcactatgtttgttgcccaggctagtctctaactccggagctcaagaaactctcctgcctcgtcctcccaaagtgctggtattacaggcatgagccaccacgccagcgttcttgttctttttatttttaatttatttttttgagatggagtctcgctctgtcacccagactggagtgcaatggcataatctcagctcactgcaacctcgcctcccgggttcaagcgattctcctgcctcagccttcgaagtagctgggactacaggcgcctaccaccgttcccggctaatttttgtatttttagtagagacaggttttcagcatgttggtcacgctggtcttgaacttctggcctcaagtgatccacccgcctcggcctctcaaagtgctgtgatttacaggtgtgaggcaccccacctggccttcttctttttaaaaaatactggttgtttcaaaaaacggaggtggcccaacatcttcagacagcttggaggctctgggctttcaggcactcatgagacttggctttgagtttcagctctccagtgatttgtgggaggctgggaccaatcttttaactttccctatgctgttaaattgtctgtaaaataggagtgataccaccagcctaacaaggctgttaggattaaataagacatatgtgaagcattttctgaagtggtcgccaaaggtgaaattattgcttttttttcctgcaaggctaaggcacacttgtacagatgggagcctttatatttcgtttttctgtccccaccccattttcttttctatacatgcaactctcattaaaacttg

SEQ ID NO: 1241104 - DNA, 4001 bp, Homo sapiens
tcatttcccactcttaaattagttgtacaattttgacattttcatttaagtactgtatctgctgtatcacatgtttccaccataatctgcacatagttggaagtcagtaagagtagtaatagctgacatttattgagcaattcttgggtattaggcagtgcatgcacttttacatacatctctaatcctcaccacaatattacaaagatggtggtatcaccacgtacagatgaagcaatttggctgagattacggcagagctgtaacagagctcagattaacacaagattgcttgttgcttaaagcttatgttctgaaactgggctttaagagtttcgtcagaaaatgaattgtttggggatactaatctgcagtgtttcattagtaaaaaaattaaaaaattgattaatggtcatttaaccataaggcacttatcaactcataattgaaccacgagtagactgagttcttgtcatttgaaaaccaagcttttgaaattctttatattttatttttttggttcaggaactaatttaaaagccaaaaataagttggcaaactatgcaattggcaaacttagataatataaaggtgtattgaaaatttaatccttagaatggtatgatggcaccaaagaatggaaatgggaggtgattatccaacaaagatcctatgaattttagtgggtggatgccctaaaataagcaaagggactcattctttatattgtttttatgtaaatccttcactgaagtttcatttgggtaacccataattttatgaactgtagaaggaactggaaccctgaaaatcagtttatgatctaagtaaatattatcttaggttgggtgtttcatactgtgtgcctctaacagaaagataaagtcattctagaacaatgacggaactaaaatatgaacatttgacagtgtttctcctcacaatgtttcagtgagcactagaacctaagctgataactgtttaaatcttctcacctcttgtgagttttcagcacctgagcatttttgttaagcagaggctgtattaccacataatagaaatattgaaatgagatgtttaggagtctgtcattggaaactaacctggattgcgcaaagacaatcgtttgagaagctcacttgaatgtatctcacatactagaaataaaacgaatacccaaacagaaacttaactaacgagggaaaataatgcagtctgtagacaataaaactttgcagaatgtcagactgcaaatgattcgctcttaaccagcaagggtagctttatcgcctcaggaaatcttaaagtccctgtgctcatttcctgatggaattgcaagtctcatgtcacagaaaacaccccctttcctttttcccttgagcagccagtacccgaggaaagcaatgcatctttcccagcaccagatacggaccacgaagcttcctcctggaggaaggaatctcgaattctggcttgacgccccttatggcaggagacagagcgcaggataaagtactcaaaaaggaaaatgccgggggcgtggaacagataacccagcttcaggctgtctgcagaattataatgtaatggccagaaacccaaaatcacatttctcaaagagggataaagaaggaaaaaagccaccggcaacccatgcttctaagacaagctgtaacgcgaaggggataggtgggcagacctgatgagggtcgccctggccgcggattccagcggacaagcgacctcccgcgttcttactcccagcacctcagagggctcggataccccgtatccagtgggcacctcttgcccactccgcggtccgcggaccggacattgcccccgaccctcctcccccgcaggctccccgccctgcctttacttacgtagggcgtcggggtccttggccaacactgctcccgaggtggcggcgcgctcgcggggcccgccgcccaggcctccagggagccgcggtcgcacccggagcaaggcgccctctgcagagcccgccgccgggtgcgccccctccccaccgcgcggggacagacagcaggcagcgccaatgcgagcggagcggagcgggcgggcaggggcggggcgaccgccggaggcgcggggcggcgcgggcgccgggacccacctgcagcagcagcctgcctgcctgccgcggggaagcccatcgtgctccgcccgggcgccaatctccactgccagaccacatcagcgccgaggcggggaccgcaagagagccagccggaaggttcggggggcgggggaaggcgggggggaccagggcaatgaaccccgcgttttctgagacgctaaatagtgaggtccggtttcaaattatagacagtcgcattacacatctcctctcctccccctcagaatatttaaagacaaggcagacatcgcattttaaaagcaggattcaaaactgtgcatagaatagcgaggtcatgtttgtttgaagcgaaaattacatatataaatggaaacagaaagaaacccgactttctcaggagtggcttgagtgtcagatcatcgtggttcatcgccaaacaggctttcaaacctttgtctcccagtgggaagcaggtggaggtgattggtgcagaactttggcctgcaggagcagctgcatctctatgcggacaaggtgagaaaggcacaggaacccagctccatccatcttataccttacatagttccaaaaataagttgaggtagcttacaagttacccatgattcccttcaggacattccctatgagggcattcctgggagctccagctgtaaaatctagtaggatccatcacaatcccagcctcctcctctggcccccatagcatagcatccagatgaagaacctggtaaggtgaagtgaagaactactgaaaagcagccgcgttcatctcctttcttcaacaggatcacgaccttagggagtgtaaatgtcaggtgtccatttttgtattttttccggaaatgttttatatttgtaagattctgtagtttccacagaggcttatcaaggaaagaactcttgagacacaaaagcaaagccaaatataagctgtcaagatcttaaaattacagataaaagaggcaagagttgtaaaacaggaaaatccataagcatctagtttagttgtaattaagaattcagggatgggcgcagtagctcacacctgtaatcccagcactttgggaggccaaggcaggaggatggcttgagtccaagagtttgagaccagcctgggcaacatagggagacaaaaaaatctaaaaaattagctgggcatggtggtgcacgtatggtcccagttactcaggagctcaggaggctgagaagggaggatcacttgggcccagaaggtcaaggctgctgtgagccactactgcaccactgcacgccagcctgggcaacaaagtgagaccctgcctcaaaaaaaaaaaaaaattcagtcagccttgttcactcagcaaacacgtctatcgaaatggtctgcgtatctctctatgggttgctagcgctgcttgttgccagttttgaactttaagccaaaagaaatccattatgcttataagcaattgagaactattccttattgagatccaaggtttctcaaaactagcagacctgggagtttgcaagagtttcaggcaaaaaataagatgagcttatttaggtgaagacagggtaaaatagctgtcttatttttatttttatttgagacagggtcttgctcaggctggagtgcagtggtacaatccctggctcaagcaatcctcccacctcagcctcccatgcagctgggaccacaggtatgcgaccacatgcccaggttcttcttcttttttttttttttgtagagatggcgtctccctatgttgcccaggctggtcttgaactcctgagctcaagtgatcctcctgccttgacctcctacagtgctaggattacaggtgtgagcccccatgcctggccttcacttgcc

SEQ ID NO: 1241105 - DNA, 4001 bp, Homo sapiens
cactttaaacaaaagagacaagaattaagcaaacagaaaactcattacaatgctgccttttgcttttttttactcctagaaattcatgttaccaaacaagtctttcttcattgctcttcttcagaaataatactttaagaaaattctaaaaggcactaagtgattttatccagatttataatctagctacaagacatactttcccttcccccatcaccatctagcactcttccctgtcaccttagagctttcgacttagatgtgttcacacccagcagtcccagcagagctttctgctcacattatatgacataaaaaagcaggcaatgaacaattcatgcttctaagtgcttgcgataaagccaggctgagctgacctctcccatcctatacagctgcatgtcagaaacataagcttaaaggactgagagtagcaagcatgtgcgtgatgtggtataaacaaacaaattaaaacctgaggcctttcctctggctggtgcctaatgggactagcatacttaactctgtgcaaaaaaaaaaaaaaaaaaaaaaaaaaaaaatcactccaagctagctaaaggtattgcttttcctgctttccatgatatatctctttagccccaataaacagactaaaagaagaggaattcaatggttgccattctttcgtgtaagactttttgagtaaaaactatcaatttggcagcattaagccacaagaccactccctgattctaagtggacatattgatcaattgaactgacatgtgcctcctcctttctctcccctagtagcaatcagctgtaccagggaaatccatttcatttcccaaaacaaaaggcaacattctgctccttatctgacactgtcagactaattttttagaaaataataataataataaagatgcctaaaaacagagctaggagttgaaatgaaaatgatacgtgtttagagttttggaattgagttgaggttatgactgagtccagaggtctgtaatccctacaaccactgaggaccctgatatttattcatcatacccagatttttgttaaagttaagcaagggatggcaacaccactgccacttcagaggctctcccagggttacccttcactgcaactgccgcagagaggagacttgttcctttctcagttacaagtcagcctgcaaacaactccagctatttcagagactagctagagatggaaaaatatgtggcagtctttcaactaactctgaaggacatgggttgaagaactaccatatagatcaaaaggctcaaataatttcatttggtttaggtttttatgcttttaataaattctgtcttgaatatgcaagagatcccctttcacatcagggttatgtcaaatgcttattcagcatttgttccttgccatgaagaaactgaaacccaaccgaggtaaataatgaatttcatactgcaaatcactgaatatttcataattcacaagagcaaagagggggccaattagctctgcctcccaaaaagaaatctatatttttacaatgcttaaatactgttaactactcattttaaagcttatctggggttttgcaattgaaaaatcatcttatgtttatgaaaaattctgtaagaacacttaaaaataacagacagagctggagcaagaataattctacatattttaattcctatatgactcttacaggcctttgtcttaacccggcagcctgaaaaacgatttaggtaaaacagcccttctttccccagtccattttaagcagagacaacatcccccaatctccgccttagcagacaccgactaaccaacaaaacagccgtgcaattaaggcccagacatttaacactcaccatctcctgatcccaccgtcttcttttgatgtttacagcacatctgtaggatgcaatactaggagatgccttgtttgacctgctgcatgatgctgtgacatcagttcagatgatgcagctcattatgggaaagactgctgttgctatggcaactgggatgtgctaggaatccttgctgcatttccagtggagcctgagacaatacggaagccctgtaagaaacagacgatatgcaaaatttagaccaaaggaagaggattcctcattggactaaaatccataggtttaaaagggatttccctgaaagcattttggaaaaaacaaaaattatctccccctttgttgttatacatttagaaaaaaaaggtgggaggagaaaatagaattagtactaagcaaataaaaactgaaatgtacaatgtttccttattagacaatttgatcactttttcctccctggtcagcactgggatagctttttaaaagttattaaaaagaatttttgctcatctgtcaaagaccaaaagaacaaaacagcgagcacaaaaataattaaaaatggaatataaacagctgaccaaatgactctaactctcaagtaaacaagttttaattctcaaaacatgggcaaacccttggccaatgaagtctgtcctggttattttccctgatgaacaccaacccacagaaccttcccatgcagaataaacccagctttcacctggtcatcagataggcagcaaagggaagtttggaatctagaggggcacaacacaccaccctcaacttctactgacccttcctttggcctgcagggaacccctccttctcatggccaaaacgcatgtgagtcttttctgggatcaaacctagtggttggaacaagtagcagacctgctagaaacttcctaaatcgttggcattccaaacattggggtctgttttcttcttttctgaacaataaaactgcctaccacacagattatttgtgcccctccccaaccccaaaagctggaactgtgtgaaaagccacatttaaacaagacacggtaaggcatttctccagttggtaaaagaaaagcaaatctaaagcaatcacttctttccagtcctgagcagaaatcaacgtcatgtggtgagaactggggagaaggagatatggacagagcagcctatgttttgcatatttaatatttgcaggccattgatagagaaaagcagaatcaagttgacctgtatccactccgtcttcacaactctgaaaaagaacaacattccaaaagcttaaaacatgagacaattatgttgtctcctcctgcttgagattttaaaatggcactgttaaccaccagcataggcggtgtgggatgagtggcagaaggaattcaggcagtgtctctgtaaacaggagctaataaaatgcctgagaagtgccaatatcccagcagcgtgcaccatcagcctcgcacagagcaaccctgccctagatgggaagacagacttgttcttgcttcatctagagaggaattaagagaccaaaagcaggaggtgaatctgcctgcttaggtcctttgtggcatcagcagagcctgactccctccctttatcttagacctcagaccacatgccacacacaaggggagaagtagcaggcagctaccccagtacaaagagtacagatctgagagtcaggaaacccaactgtaaatgtcaggtcctcctagagcatctgtgtgatatcaggccaattgattaacttcttggggcctcaagtttttcatctgcagagatgattgatttagctaataaccatagttttcaggtttttcattagtaatataacctttcttttaatgatacagatcaaagctggactgccttggttgaggcaagataagaagcccagagcccagactgatgagccattctcaaccactgcctccaacctcatttgctgtaagctgactctttaagatacctctgaagaacccttcagtctctggagaagataaagagacatggacctattacagaacaagattagtctttccagagctgaaatccacatgctataaagaggagaggacagggtgggagcaggtgttccagatttgaatatggcttctcaagatggta

SEQ ID NO: 1241106 - DNA, 4001 bp, Homo sapiens
cctaggcatccctcaaaacccagttcccacatcaccaactacaggcatccccagaaagagcacttcgcatgctcttcctgtgagcagtcctctgctacccttccagatgggccttcctgaggggaggagggtcctctctgggacctccaggccaggcagagacccctgacgacctctgtggaatggatcccaacatgggtctttccacagccagcttagacgctctccccccaggccacctttctggcctcccgaggcaagggctggacacccacaaagggttgctttgcactgattgtcttaagctacacttagaatggcaggaaggcccactgccttgtgtctaatgccaggacagggaagaccacaccttacccaaagagggaaatgccccaagtacttagcaggatggaaagcaggccagactcgaggaaggcaccgcaggactccgagggcagggctccgagccgcgcacgcctcaggcacagggggctctgacgacactgagtgggcgtggcctggaggcagagggctggactcaaagacctctggatgtccccccacccccacacgggcctgagcccctccaaggcctgctgctgacagagtcagacagctgtccagagccatgtgtaaaaatacatctgtgctcacacagggtggtgtacgtctgcacagaaacgtatacaccaggccagcacagggctgcctgtgggggcggagggaccccgacttcccacagcctccgtacctgccgcctgcctttaccataagcacatattcttgctactattattaagtcacaacttaaaaaaaaatactctgttttcgaaagggctcctccatctgcctccagaaccctggtgtatgagaagtctacacagctcccgggagaggcaaccggacccccaccaacggactccgtccgcccttcgctcggatgagggactcaaagcagtcaagaagtggccacctggagcaaggccgagagacccaggagtgaatgtggggcggcctctggctgcagagcaggggcccaagctcacccgctgaccaaggcagcactcagaggccgtcccgacaggaccaagctcgctagcgccccaggatactcaatctaaggggcaagccccagctgccctccaagccttggcctctgggatgggcgggcaggacctccagggcccacccaagacaggaagcagttccggggcccaggagggtcacagtcctttgtggctagcctgggtaccccgccaccacgtacaacttttcgtccgtgggaaacgaagtctccttccggggccctcccacaaacttgaaggccggccgcggcgagtctttctccaaccccggggcacctccgccggctgcctcgctggcccagcgcccggggagccccacggcccgcaggggcaccccgagccccagctccaggcccggcggcgtcccttctctcgggtcccggcctcgcccggcggagcggcctccccaaggtcatgagggaggctggggccggcagcctgcacccccggcgcccggcgtggggccgccctcccttggccgggcccgcgcgccccgcgccctccccgcccaggcccgctcggccacttcctgctcccgctcctccattctggcggcgccgcggctcgcgccccggcccgaccggccgcgaacaaagcggcccggcccgcggggaggaaatccaggcccgggcggccacggcgggcggggactcaccgggccgccgcgtccgggcgcgagcgcgggcctagccgggccgcggcctccggcgcccgccgctccgcatccccgcgggccggcgctgggcggggccgggctggaggccgcggcgggcgggggcgctgctcggggccgggcctcgcgtgccgccgccgctcggtgcccggtgcccagcgctcggtgctcggccgcctgctcccgtcttcgggccgcgctgcgtgcgctgggccagccgcctgccgcgctcggtcctgccgccgccgccggcccgccctctccccgccccgcgcccgccccgcgcccggagccgcccgcccacatccgcctccgccgcccggggcgtccccaccgcgcggccggcggcgagggcggagcgcgctcggggagcgcgcggccgggctgaggggcagctcccgacgacctggggcctgggctgggccgctaacggagcccggccaccagccagcccgtcccggggccacgccctctctggcctcagtttccccgtctgtaaagtgacccggcgcttctgggctcgctctgccgtgaccctagcagaaggggcccgagacaggtcagggacgaatcccggacttctgcctccgcgcgcggggcgggggtggcttaggttgactttcaggctgccccactctggggggcgtggagggggcggccaagagtgacctaaaaggcccaatcccaagaccttgtgcctctgggggaagtgcgggaggatgccaggacaggaggtcagttggaggtgggcctccaaggagcaggaaggctccgaggggagtcaaccattcacctaggtactggcagctacactcacaaaagggggactttgctggggagtgggagaagaggggcacaccttgcctggctcccaccttgagctgggagcagacaccagacagaggaggagcggtgtctagggtgggctgtgacagctgacagcccagagccctccctgctgggtggacttggtcagcccggacacccagtccgaagtccactgggaggcagatggcccgggtatggaatgagtaagtgggacacagacccctttctcctggacactcacaggagagtgcaggtgactgccaccccgaccccttcctagccagaagttcctccgacaactgcccctcccccattccagaggcccacagttgataataacccttttgtgaaagacagactcttgtgagttaccttcctgaggctgctaagtattggggttgggggagcatttttattttcagccagagtgagttcagctggcagcaggggagggggtgggaggagatgcagacagaggcagcaggttcggcccagtgctcaggacagagtctgcagccaaaactcgggcttcatccctgcctcttggggctgaccaagagaaggactctctccccctgcatgagggcactcgctcctcagacaggggactccccattcctgcctctcgcctgagcacctctgctccctcccagctcagactttgtaaccccaggaagggcccacctccagggggccaagtcagaggcccagtggtctgcgccgcttgggtgggatacctgacacaagggttgcccccagagcctgggcgtctggtgtctgtctctcacccagcaaacctgcaccatgagccacctggggctccctctgggactgtcccacctgcccactgctccccgaggaagagttcctggtatctgtccaccatcctgggctctgccatgcaaggatggaggaaggaattcagggaggaagcagagggtaagagggccatgagacaaggccagcaagtggccgaggcttggggatgtgggagggagcagggcaccctctcatggaagaggcagtgacattgcgggctgttcttgaagtggttggacctcttgcttattttgcactggctgtctccaaggaggcctcccagtcttcccagcctggtgccctggcatctgctggtgcctgcaacccactgtgggccccacactccagtcctgtcttcaccttggcatgaactgccctcccccaagacggggatctcccagtgggcagggccatctccctctcctccagcgtcccagagggaaagcagagtcctctcttcaagaacaccccctcccaccccagacagaatggtcaggagagaacccagccccacggctgctgctgggactgctgaggtgctctgtggccagatgtttccgacaaaaactgctgcaccagggaagggcccgacggct

SEQ ID NO: 1241107 - DNA, 4001 bp, Homo sapiens
tcttctgtgagctcctatacatcccacaatgccccatcttgtgacacctacttttgccacacctccctgtctgctccagctgtgtttggggtctccccactaccagatgtgaaacccatctgctagagggtgtacgtaaagccggggggctgctggcatgagatcactagaacttaggagggaacaagtctggaaaaagaagtcaggagagggcggaccgattccgcctggggcagaagagagtgacttggccagaggacctggacctgaacaggaagcccaccctagcaggacagaggagcaaaacagccacccagactccaccgcaccccgctgagcaacggagggtgggtgaggcagaagggcctgcacagggttggaaggggtggggctatgtccccagctcccatcccacccagctgctggccaggcccctcgggcagcacctcctccataggctgcaaggccaaatgagtgaggagggggacacaggggctgggggacttggctcagccagctctgcagctccaaggcaaacatgccctgtgcccaggcggtacggattccccccacccccaaagctcaggcctgaagcaggcaccaggccaagccaagcagccctgccctgccctcaggagcccttgggcagtgccctgggccgccagcgtgccagaccctggaacagcccagtgtcctcgctgccttccaggaaagccaggagagaggctggcagcagctcccccgcctgccagggcccacaccaggaagccactcagatggccggccctgcacagggcctcatcctcctggcctccccgaggccgtgccctccatgccatgggaagacatggggcccaggacactcaccctaggccagcccaggagccccaggggaggcagcccctcccacccagcagggcacaggcactcacagaccctggggctactacccccatctctccctccccaggcccagccctggcagcgggtactaacctcgtttgtgcagccaaccctccttcacaatagccacgtcgctcatggtgcccgaggctcccgcgacgctcacgcgctcctctcaggctggcgctccccgagcccagctggcctggccacagcctctgggagaagcaaaggaagctgaatgtgaggccacgcctggctaagggcagctcctcgccctgggtgagccagagacccactgcacgtgcctgggggctccacccgcacctgccttcccaggtgggctgccatccctctaagctctctgacccccatctgcccgcctgccttccctctccccaaaacactcagggctgccaagtgtcaaatccatgtaattgaacacagttccctggacctgggcctctccttattctaggcttagagcctccagcccctgccaccaccacccgcaacagccaggccctgagagctgctgccttgctcacctccccattcccacctcccccagccgttggacaaatcacccccatccccaaaaggccttcccagcctccctaacctgatgcaccagctgacaggctgcctcctccaggcagcccctttgacttctttgacccaggctggctcggccttccctaagcccctggtgacagatggccccgtttgctctccctgtccatggtgttcctacccatggatcctgggacagggcacagggctcctccctgctccccagactaggaaagcaaagaaattcaaacatgaggaagacaggaccaggatgcaggccactggcgcaaacgggagtccagagccctccagcgcaagcccaaaaacctcctgggagaaaccccaggcccctcctaaaccacagcgcccctgccggtctgaatctggttcattcatttggccaacatgtaccgggcgtctcaggttttgccaggcccagtgctgggcgctggagacaaagagaggttcagacaagtccgtcagtgaggagcacccagtccagggtggttacagacccataattacagcagtcgggaggcagcaagtaagtgggggagcactggacaggcccccgccctgcagcggcccaccagccaaccctcacctgagcacactttatccattgatcctgcatggcttcctcatttcccctctgatggatgaactcctaggcatccctcaaaacccagttcccacatcaccaactacaggcatccccagaaagagcacttcgcatgctcttcctgtgagcagtcctctgctacccttccagatgggccttcctgaggggaggagggtcctctctgggacctccaggccaggcagagacccctgacgacctctgtggaatggatcccaacatgggtctttccacagccagcttagacgctctccccccaggccacctttctggcctcccgaggcaagggctggacacccacaaagggttgctttgcactgattgtcttaagctacacttagaatggcaggaaggcccactgccttgtgtctaatgccaggacagggaagaccacaccttacccaaagagggaaatgccccaagtacttagcaggatggaaagcaggccagactcgaggaaggcaccgcaggactccgagggcagggctccgagccgcgcacgcctcaggcacagggggctctgacgacactgagtgggcgtggcctggaggcagagggctggactcaaagacctctggatgtccccccacccccacacgggcctgagcccctccaaggcctgctgctgacagagtcagacagctgtccagagccatgtgtaaaaatacatctgtgctcacacagggtggtgtacgtctgcacagaaacgtatacaccaggccagcacagggctgcctgtgggggcggagggaccccgacttcccacagcctccgtacctgccgcctgcctttaccataagcacatattcttgctactattattaagtcacaacttaaaaaaaaatactctgttttcgaaagggctcctccatctgcctccagaaccctggtgtatgagaagtctacacagctcccgggagaggcaaccggacccccaccaacggactccgtccgcccttcgctcggatgagggactcaaagcagtcaagaagtggccacctggagcaaggccgagagacccaggagtgaatgtggggcggcctctggctgcagagcaggggcccaagctcacccgctgaccaaggcagcactcagaggccgtcccgacaggaccaagctcgctagcgccccaggatactcaatctaaggggcaagccccagctgccctccaagccttggcctctgggatgggcgggcaggacctccagggcccacccaagacaggaagcagttccggggcccaggagggtcacagtcctttgtggctagcctgggtaccccgccaccacgtacaacttttcgtccgtgggaaacgaagtctccttccggggccctcccacaaacttgaaggccggccgcggcgagtctttctccaaccccggggcacctccgccggctgcctcgctggcccagcgcccggggagccccacggcccgcaggggcaccccgagccccagctccaggcccggcggcgtcccttctctcgggtcccggcctcgcccggcggagcggcctccccaaggtcatgagggaggctggggccggcagcctgcacccccggcgcccggcgtggggccgccctcccttggccgggcccgcgcgccccgcgccctccccgcccaggcccgctcggccacttcctgctcccgctcctccattctggcggcgccgcggctcgcgccccggcccgaccggccgcgaacaaagcggcccggcccgcggggaggaaatccaggcccgggcggccacggcgggcggggactcaccgggccgccgcgtccgggcgcgagcgcgggcctagccgggccgcggcctccggcgcccgccgctccgcatccccgcgggccggcgctgggcggggccgggctggaggccgcggcgggcg

SEQ ID NO: 1241108 - DNA, 4001 bp, Homo sapiens
ggttcaagcgattctcctgcctcaacttcctgagtagctgggattacagtcgcccgccaccacacccggctaatttttgtatttttagtagagaaggggttttaccatgttggtcaggctggtctcgaactcctgacctcaggtgatccacccaccttggcctcccaaagtgcagggattacaggcaggagctacagcgcctggcccgtaggctactttttatcgaacttttaatcaaagattcacgttacaactcctagttggctgaggattactctatctgttcttttccaggtcacttcagaagtttctccaaatgaatcagaaaatacatagtgtctgtttctgaaataaaagtacatggaaagagagattcttctccttgatggaaaaggacaaaatactttcttaaggttctcaatgactcattgtgatgggaggggaagaggaggcaaaggaaaaaagccaatttcagtaaaagatttcaagaagttggtaagaaaaatatagggtggaaactttgttttcctgctactaaaaaaagatactagaacagaacaaggatcgcagcaagaaatatgagtgaggccagaccatctgccaaacccttcaaactcatcctttctaccttccccattaaatagcatatttaaaaatgaatctttgctgactctgccaagaatcttaaaactgcccaagtttctttactagaactcacggaaacctggtgaatactaatattacctaaaagctcagcaatatagaggaaattctcagactggatgtaatgaataagaacggcactgttgtttcttgcagactgtttcttgcctgcggtaaatcttgccacatactctaaatccttggtaggccatgaacaggggaaagactataaacagagttggagattacaggcctcaggcatgcaactcctgtagctttaccatttctccttaggttggcttcagagaggactcaatcccccaagtgcagagatgagggtgtgtagcactagaagagctgattttggggtgggaacttagacttcttgtcttacctggctcccactttctatcacccgttttaaagatgtttggtaccttgaacatacatggaacatactggtagctttaactgtgtgcccttatctaccctatctatgtagatgtgccctatctatgtaaactgtaacttagctgagaaaaagtttaactcaaagttttggcaagaaaggggacagccagtccatggaaaatacaaagagccacacttagggaaaatagcttagcaaatggctgcctttggtgaaaatctagagtccacctctagaaggaaattcaaagttcatacactgaccctcgcccctcgcgtcccccctcccccttacctcagatcaccacggatagtgaagtagggtgggggaagggagcaatggcaaagtggacgctcacggcaggggacagagtaaccaaaaagagtagtttctgggggagagagagaaggctggtgcagaggtaaaaaggaaagacggtgggcggatggagagatgagggcaagagagtgacagcagggagcgggcagagctggagaaggagagtgggcgagagccagaaaagaggaggcttaggagtaaaagggtagagggccaagggtaacagcccagggttggatccgggaccagggaggttatgaagtgagggctgggcatgggacagggccgcacaggtcgggtaggaggtctggccaaaaaggggttgggccaagaaggtggtcccgcccgaggatggctcagggagcggacggaaaggatccaattcctagcttcatggtgccttggcaccaccctcactcgcctgcaggatccgggctcgcactgccgccgccgccaatagcgccgccatggctctcggccgccctagctccgcaccccgcgcctctactgcccagaagcactacagctgccaggcctcgccctccatcctgccaggcttcctcattggtggggaggactattttctccagccaatcactggtccgaacacctgattcctctcctcacacccccgtcctggggataagtgattggttaggagcgaaaatgctctcgccctctgccacctcagccaatgacgtaggcggaggtagagaagacgcccctgacttggacactccctaccgagcacacggggaagacgcccccctaacctggaactccgattggccaagggcggaaccgaggccccacccccccactgaaaaaagtaaataagacccttcaagaattttgcagtcgctccacctcaacatccgcgtaaggggcgtggctatacttaggggcggggctaggcaaagattgccctatgaggcgagggaatgagactgggctgcgagttggggatagggtttctctttgggggcgtggcttatggaacctcgttttcccgccgacggttggccacgtcacgtgacatgggttggaagatggcgtctcccacagacggtaagagccggcttagagatctttgcctgcagcctccttctttgctctactgggaacatccactctgtctctgcccctcgaacatacatttctttcttgggctcttctcctttcccttttattttttttcttgagatccatcgccgtcttcagctcaccggttcttcacagcagctccggaggtgcccagtttccccgctctgtaccaggcgtgtggaggagggcactagggagggactcattctgggtaaaaggacaggggggtcgccctgtgccttccttatctctatttgggcgaggctgagggtcgaggaggagatgtttctggaggacgtggcttactgtagttttttccttggggtacccattgaaaggatcagttctcttctgattgagcgcacggatggaatgattctcacaaaccctcgcagggctgctggctgacctcatctcgatactgaaccgcaagagaaacatgatctctctcctgtctcctcagtttgggaccattgccgtggcagcaagagaagcgggggacgttctcggcccctcgccctgagagtcgcgaggagaatcagtattgagcttttaagtgtcgtcttgcacaggtcgcaacctgtcttccatctgctttacgtgttgtttcttaaggctgagtgaattaacgatttctgtttatatattgtgtaaaatgcaagtcatttcaagtaacaattaagttgttttggtatactcccatgcttttcctcttggttctgctttagagagttagggtcttgcagtcatttttaaactcatttttagttctaccatcctcatcccaactatatatcgattttattgatatataggtttccttcccttagacaaaaacattttatatttggaaggaatcttggaagttcattgcaggaatgaagaaattgaagccaaggtgagctatattaagtacctgctacatgaaaggcataatgctaggtgctttgggagaccaaaagatgactcaaacatataaacatttttttttttcagtttcagttctctttttagatgtcacctcccaaagagtctttcttagaacacagtatctggagttgccctttcccaccattattcattatctcagtatcttccttgtcagcatagttactctgttaactttgccccttttgcgctagattgtaaattccaagtttgtcttgttcatagttggatccaggtttagcacagtgcctgacgaacagtaggtctttaattaacatttattgaaagattgattagatatatgcagaaataatatattacttgatcttaagttttaagtttaaccgagtcttaaattttgtgagcgcaggtacatactgtattagaaattatggctgggcgtggtggttcacacttctaatcccagcactttgggaggctgaggcaggcagatcgcctgagctcaggaattgaagaccagcctagacaacatggtgaaaccccatctctacaaaaa

SEQ ID NO: 1241109 - DNA, 4001 bp, Homo sapiens
cactgcacttcagcctgggtgacacagtgagacgctgtctcagtaaaaaaaagtatatatattatatatacacacacatatatacacacacacatatatatatatatgaaacattctctttgaaagagaatgatcttttatcttatcaacttctccaagtgtggagattcctggacaaaataccaaaagtttgctgatgtataaccagtctctataataaaagggctatatgaaaccctctgacagtactatcagctgagttttccaggtacctaggcactggtaaaacacttttaagcattttgtcatgatttctttaataggccatacttaatactgcactataattcaacacactctcagaggtgatgttagtggacctattctatcatatgctaaactgaacgacaccactgagcttttataaaaggttttctctttcctcccttgccagactgttaaccaccactttccccaccagtctcatcagctggcttgtaatagtaacttctcttaattactactttaatctgctttgagctgaggaactaaacacccaagctttcatgtactcaacacatactgtacttagtactgttttaggtcctgtactagacacataatggctcattccctgatggctgacattctaaaaagcatgtacatattatggtaaaatgtaggtaaaaggagctgaatgagagtctgaagcgctctggagagaaaaagtatattattattggggtgtggactttctgtattttgacaactctaagaccactttttttccctaacaaatgaaggtgctgaaaagctgagctcaagtatgcaatcattaacacttaatactgtagcatcccaattttatcagagctgttaggaagcttggaaagaatgcctcatctagacatctgtggacaacaccaagagcaaattaagggactgcatatcctcaacgttaaagtggattgtaaagaaagaaaatataaattggactacagttttggttccccgttttccctcttgcctgttatgttcccttaaaaaaataatttttaaaaaatctatttacttgagaacaggttatgagactggctaattttttgtatttttggcggaaacgggggtcttgccatgccccaggctggtctcgaacccctgggttcaagcgatccacccgcctcggcctccgaagtgcgggattacaggcttgagccaccgctcccggactgtgttccccttcttaatctccatggggaaaagctgagagagagaacggtgcctgtattccatatatacttgtttgccatttattttcaacacggagggattctcagaatccttcaatgacctccttctaaaagagccagaggagaagacagggactagttttacgcacagtggcttaacaaacagcgccgcatccctgtcagttctgggattcctcgggagtggttttttttaagctgcagaagtctaccctaccgtctacaaagacgttctatggggttttacaaaaacccaaacagaaatgtgaggagacagttacagtaagaaataaacacggattcccaggctcttttgactgagcgcccccgccaggaatggccgcctaaagaaacaggcatctcaacgctttattgctaagtgtgacggttagtggggagttcgactctgcagccaaaggaggtcaggaatcgttcaataacaatcggtctggaggtgaaaagaggcgaagaagacacgtaagtccctccaagacgcggggcaaagcgatggagagacgcgcgccactcctctctctgtaccttttgggcaccaggacccttgccacgggctgcgtgggccgccgagaagtcgatgaccccttccaggtctgcggtcccgggccggctctgacggtagaagcggaaaagtttccgaaaggcgtcctccccgggctcagtcgccagagtcgccacagagcccacggccgctgccatcttccccatctcgcggcctataccctctgatccggaagcagattctctcgtgttccggatccggaaattttttccggggccgcgacctcggctcgagaaggtgctttagtctgaagatggcggcctcagcagcgagaggtgctgcggcgctgcgtagaagtatcaatcagccggttgcttttgtgagaagaattccttggactgcggcgtcgagtgagtgatggagatgtgggagtagtggaatttttaggtccaagtgatcctcaaagcttctgctttttgcagggtacttaagtcagcgtggtggctgaattaggagactgctcctgagcatgcaagtgagcagaaagaaattttgtttgcagttaaccgtttagggatgtcccttgagcttttggggtcacgaatgcaccggctcttgcctttaggagtgatttggtgtaaagatttattacttggtaaccaagatttacaatttagaagggataattttgactgtagtgtggaggatggattcaaggtggcaagattgtaggcgtgcagaggagctaaaaggcaatttcattaatttacttaaaacgtgaggacctgaattagggcgatggtagaaggatggtggtcagatgcattaatgttttaaaagcaaattagatgccgtttcgtgatggcttaagtgggagaagtgtacggaataaaggaaagggagaaatgatttctgggtttttagcattggtgaattgtttgtttagaagttaggagcaggccaagagaagatgagtaaagtttgaatgtgttgactttgagaaacttgtgaggtttccgtcaggcaattggacaaaggttgtatatcattgtggctgagaagtggactccgaagctagaccgttggggttagaattccaacttggccatttaatcgttgttatcacttgaataactgaagttagtatgggaaaagggctcacaactgggcctcagtttactcatcgataaaatggagtcaataatacccaactcataggattgttgagaggattgagtttatatgcaaacttcttagacttgtgttagatacagtgtaagtactcagcaaatgatagttattttcacggtaactaaaattgaaacttacgggagaggcctagtctacagataaaggttggaataattagttctgaaatctttcaccaccttcaatttttgtcagctgcagttttgagatgaggtttttatatttgcttaccaacatgtaaacattcgtggtcactctttttgtagatattcatgtttcaggtcaacccctggaaacaaaatggagcaagatttagtttcttctaagtttttagtggctcagatgtgagtagtagaatgggaaataggttggtttgtgccccgtgttttaaacatgtggttggtgaagaccaagcccagtaaagtctcccgtagtccctgtgaaactttatggaaaggctgaggagtttcattagcatcttgcggatgcaagtttccagacaataaagggctagtttaaaacccttaaaaagagtcagcattatgtacagcttcgaaacagtttctctttgttgttccattgattcagcaaatatttatttgagtatctattctgtggtaggcattgttcttggtgcttgcagctgtttttccttcaccattttaggcaatttaggaagagggttaccttccagagctggtttgttttgaaatcagtgtcttctaggactttaattatctggtataaaacatatgtttaacattattttgttctccagtatcatattctgtgagaccttgatcttgccagttggtttgacttaaccattagagcccttcaaaatttagtctctgtggattgttggaaggattagtggacttttacttattcatttagccaatattgaggccctgctgtttattggtcactgtaaacatagtggtttatatgctgagggagcttacaattagtggtggggatgaagagacttagaacaaatataggca

SEQ ID NO: 1241110 - DNA, 4001 bp, Homo sapiens
gaaaaaggtcccctagggcagcagtccccaacctttttggcaccagggaccagttttgtggaagacagttcttccatggactgatgggagtggggaaggtttcaggattaagctgtcccatctcagatgtcagccacttaaggagtgcacacccacccaggcccctcgctggcgcagtgacaataggggtccctaggagaatctgatctgatctgaagggaggcagagccaggcaggagtgggctcgcctcttcctgggcggccacttcctaacaggccagggacccggatggtgggtagaggggggggtgttggggacactttccctagtgttctaaagatggagctttaggcaccaggacaaggcaaggctttgggggaagggcatggagcaggcgcttcctgggaagaccacccactgctgggcatcacaagggctgtggggacaggggtgcctcccatccctcccaggacacagcctggctgggaccatgggaccaagctcccctaggttcccccccactccctgcctcctagaatattctccagaggccaaagtcccagtcctgcagtgcctccatgccggtggggtccgccctcaaggcacagcagtccctgaaggcgcttcagagactctgtgaacccccagcccagtggcagtagcagcccggccttaccatgtctgagacggcgtgaccttcttgcaccaggactgacaccatctgcaggaagaagctgcctcagccgagccgggagcaacccccaccggggccacacggtctcaggggtccaggcccatcaccgaccccgccggcgctcccaggcaccttgtccgccgggaactcaacggcgccgccggcgcacggggtccggttctggctccagttggctgcgacgtcgaagtccgtgttggggacccagagtttggagaccgcctgggtcagtgctggggaggaggcgactgagtgcccgggatgctctccgggatgctcccttctcagggaaggccacccacccagagaagtgcggaaggtccgcgcggatcacccgggacgcataggaaccccatccccgggggcccggacccagaccctggtccctcccggccagactgtgggcgccctgcccgggcgctctccaacggacttctactgatacctgcagagcccgctcaaacgcgccctgcaggacgcctgcctagatagcctcccggcactgcccccagtttgcctggcgctggagcagaggacagcgttgttaaggacagtgacaactggggcatggaggaggatggggcagcacagacctcttctcggccttggaatcaggaaggcttcccggaggagtcctacctgggccgggaagagctgcgacagagcgcaacccggtatgagaagtaagaaggggctgggggcggcaggaccaggtcaggccggccctgaatgtggtgggtggggttgtcctgagggagccgcgaggggtttagggaagggggcgccagggacacgcgccggcctggtgtgaaggcggaggagggctcagtgctcccttggggaccgggaagctgaggcggtctgccgagccccgcaggcgcacactcgctgctctcggcaggttctggggaccgcgcccatttcgcagacggaaaaaccgcgagggcaggagccgccggaggccggggctggccgaggttcccggagcccctcctctcctctcccgcaccgcccgatgcactggccgcgcacttccgggctgcgcactcgccagacgagggaggcagggccgagtttcacgcccccaaccctccaaagccctccctgcccactcctcggaagatcttcaccctccaggcctagagcgacctcggccctgggtcctgacagaccgctaccgtccgggcccgcaccggtgtggtcccggctcaccgcagagctgcagccacagcaggacccggcccaggacgcccatctcgcctcggctccttgcaccccaccaggagactttgccccactggacccacgtgaccaggcaggtcgggtgggggcaccagggtcggttacacatttacctccagacccgcccagggccgactcttcaggcccctgggaggcaccttctcagcctccccttacccgcccctgcagggcctgaacaccttaggttctcaggaagaagggcaaagaagaagggcttggcgagactgacctaccctgtaaaatgggtgtcttgccgggagggggaataaacgacctttgaattcacccctttctctgtcctgtgtgctgctagggctgagctagtctgctcaccattggaactgggtgtccacttctccacgcagtgcccctgtcccatgggctgtgggtggtggttggatgatagaaggaagatcctggatggaacatggtatgtggatggtataggagggtggattgtggatgatggtggagagtagtggatggtgagtaggggacagctgatggacagcaacattgatggtgcatggtgtacggcatatggacgcatggcagatgaatggtaaatggttgacggggtggatggtgagtgatagagggtggatgggtgatgaatggatggatgaggatggtgagtgaaaaatgaatgaatggccgggcgtggtggctcatgcctgtaatcccagcactttgggagggtgaggcaggcggatcgcgaggtcaggagatcaagaccatcctggctaacgcggtgaaaccccgtctatactaaaaatatacaaaaaaattaaccgggcatggtagaaggcgcctgtagtcccagctacttggggggctgaggcagaacggcgtgaacccaggaggtggagcttgcagtgagccacgatcgtgcgctgcactccagcctgagcgacagagcgagactccgtctcaaaaaaaaaaaaaaaaaaaggaaaaggaatggatggtaatcagggagtggtggatggataatggcataaatggatacatggccgacaggtagatcataaagagtgggtgttggcggggcacggtggctcacgcctgtaaccgcagcactttgggaggccaaggcgggcagatcacctgaggtcgggagttcgagaccagcctgaccaacatggagaaaccccatctctactaaaaatacaaaattagataggcatggtggcacatgcctgtaatcccagctacttgggaggctaaggcaggagaatcgtttgaacctggaaggcggaggttgtggtgatcggagatcacgccactgtgctccagcctgggcaacaagagtgaaaccccatctcaaaaaaaaaaaagtgggtgttaaatggtggatgtttggtgagtgatgaatgctgaatggatggatggtggatggtgaatagatagatggtaaatggatagatggtggatgatggttgcataaatggtgaattgtggatggagatggacggtggatagtgaatagatggtggatagtgaatagacagtggatagtggataatgggtggatagtagatggtggataggatgataaatggatgggtaatggatggtagataagtagataatggataaatggtggatgatggatggtaggtggatgatggttggtgggtggtggataatggacaagtgaatggtgatgagtagatggtgaatattaagtggatggatgggcggcagatggtagatagtggatgatagatggtggatggtggatggtaagatgaatagtggttggtggatggtgggtggtggatggtgggtggatggaaggatgggtggtgaatgagtgaatggtggatggtgaataggtggatggtggatggtggatggtgaatggccgatggtggatgtgaatggtgatgggtggtggatgaatggatggatgaatggcgaatggtggatggcagattgtggataagtggatggtggatggatggatggtggatgggtgaatgggtggatggatgaatggtggatggtagacagtggatgagg

SEQ ID NO: 1241111 - DNA, 4001 bp, Homo sapiens
tgacttcatttttctctccaggcctaggtttgttcatcaagaaaataaaagagttgctagctctaaaaatctgaagtttcatggttctcattaaacataatagaggctttgctagtttcaatagcaaaggtccagtgaccctcagttacagagacaaattttgtataagtttagttgggggcctgtaatcttgattccctaagacatccaggaaccaaatctcagcaagcgtacaccaaaaccaccaatatctaacatctgctccctcactcaaaactttctcaatatattcaactctaaattcctcaaaaagcaaggtaaaatggaattgggagaaaaccagtaagagacagatcgtttgtggtgtaaaagtgaatctgcctaagccaagggtgcaaagcctcacatctggtggcaaaagtcctatagatatatccttctgtacccaaacacgtaactgtctgtcagctttttgtcagtggaattagtcccagctgttctctgtcctttttttcttttcttttctttttttttttttttttttttttttttgagacggagtctcgctctgtcgcccaggccggactgcggactgcagtggcgcaatctcggctcactgcaagctccgcctcccgggttcacgccattctcctgcctcagcctcccgagtagctgggactacaggcgcccgccaccgcgcccggctaattttttgtatttttagtagagacggggtttcaccttgttagccaggatggtctcgatctcctgacctcatgatccacccgcctcggcctcccaaagtgctgggattacaggcgtgagccaccgcgcccggcctgttttttttttttttttgagacagagtcttgttctatcgcccaggctagatcgcagtggtgctatcttggctcactgcaacctccacctcccaggttcaggcaattctcctgcctcagcctcccaagtagctgggattacaggcggccaccaccacgcttggctaattttgtgtatttggtagagacggggtttcgccatgtcggccaggctggtctcgaactcctgacctcagttgatccggctacctcggcttcccaaagtgcggggattacaggtgtgagccaccacacctggccccaactgttctttagagtaactttatcttctgtatcaaatgaatctgttagtattcacaagaattattctctccctctccccacaggcaatgttcagtattcaaaagattcatcaaattttacacaccagggagttaacttgacagtttatgatgagtaactatagttatcattttcatcaatgtggcttcacacttttatacatcctagggcaaaatcccccaaagtaagagcctaacacccaaggcatattcatccctttattgcttttccttccttcttcccttcaacctgccagtgagccttcttttgatcttgggatgtgttccactttgtttgaaagagcatccaaaacttttctaagaagagaaattagcagggaaggttagaaggaaacaatgctaaaaacatactgtttctttccttgttaagccacgtgtaatgcctgtaacaggggtggacgacgggggaggactcccgatggccttcagcaaatggctcccccaggcctttggggattttatcacaatttagaaatccctcctaaacttccacttcctcccagtctcactaatttctctttatccacacataggccatcccaaaagaaacctgttttcattttaaactttagaatctgatccattttctttttaattcatgagcttgagcctggaggctttaaagggaggaaaatggtttcattaaaatggatggatggctagaaataatatataaaacaaattgaacaatagtttacccaggaggaagaatcttacaaaaatctggcagtttcccttcaacgggagatgggttccagctgtttgttcctggagatgggttccagttgtgtgaacctggaggcctctccaggttctgattatatagtgttcctaatatatagtgtcccagtcctggcagggacatgaaaaccaaggacactgctcttgaacaaacgaggagggtcattcaccttttcgctgggcatgattgggttagatattaacccacctgaatggattagagatttgttctggaagacaaagtttgagaaacatggccttctgtccaaaagttgcccttttctgctgtctgtggtgcttactcttgttcatggcaggactgaggtttccctattcacacataatagtctggatccataagatagcatctctgatctccctgggccaactccaagaactgccttggaagatgtcacagagtaagatatggtcttccagtaggatgcttttccactgtactatttatcatttatcatatcacatcctatttatcgtatcacatcatttggtttcatgaacggatgctaagcacgttattccatcgatttcatacagccaggaaagcacttccagagaaggttgtgtgacagctattagtacactgcccctccccctacactcaacttctcagcttctaacccccagaagcaggcttgccatgtttcctgggtttctccttcttccatctttacctgtccacaagagactaaccctgaacattcaatcttctgatccttgtaatgtagttgcaaaattgcttatctccatcatcaaagcagggctgtagatccattgcttgcgtaaaaacagtgggccaaaggtcaccaggatcaccttatagatctcatagtttccaatatcagacagcagcagggtaccaactgtttcacagacccccagcatttgcccacagtggtgttggatctaggacagtgttatctttttaaaaatcctcaatcctctgttgtcacccacctagctgccaagtattcagtctggctgcacttgagaaggtgtcaagaaaagacaggctgcctgctagtaaaacaaatgcacttgaaatcacaataattataatattcagtgcaatctttcattttgtgaagctctcacatacatgactacattcaaccaacaccaggactgtgtgaggtaggcattatgtaaatatgctctgctcatgaggaaactccaagaacaaacagcagatgaatggtggagtcagactttgaacccttcataagcaaggagaaaactgacctgtctttccaggcttagctcaagcaacaccacctctgagtcccgaaaagcggtaccctgccacagcatacaacccatatgcgcctgcacacacacagccccatggcctgaagcaccaattcaagcaccgactcacacaaacagagcagcctctgattttagagttctgcagtagtgctgaggtggggcaaccagcagcctctgaatatagttaggtcccttctctgcctctgggccttcactggacaacctttggaggatacacaatctgcccacaatgcaaaaagacagttttatgtttttcttttaaacttggcacaaggaagttttgttgaaatgaaaagtagggtttgggggaaaaattactatttcattagaatgcatctaagcacttagtcatttgtgtttaaaatacaacaaggaattatattctatgattaaggaacatcacatctttgtcagtaattttaatacaaatgaaggaatcgccaattgcaaaaaacctcatatattttttaaatgttcagacagctttaacttgaaagtcattcccctttcctggagatttttttctctctctccctcaagccaataatgtccctgcacacagacacgggatgcacgggtcctgtttccaaggaccctagtgttagagcactttcctccttcatacagagtatatatgtatcattctgtcttaggactaattataaaattagatgatgggaagaatggactaaataatttctatatttctttattattctaacactttaggtctataagcatgaacttattc

SEQ ID NO: 1241112 - DNA, 4001 bp, Homo sapiens
gactctgtccacccctcatattaaagaagagccaactgaggaacagagaaagagacatgtattgcccaaggaactcattgcattcgccggcctggaagctttccaatgcaccacacaattttttttttttttttttttaagacggagtcttgctctgtcacccaggctagagtgcagtgacgcaatctctgttcactgtaacctccgcctcccaggttcaagagagtctcctgtctcagcctcccgagtagctggggttacaggtgctcaccaccgtgcccggctaatttttgtatttttagtagagacgaggtttcaccatcttggccaggctggtctcgaactcctgatcttgtgatgcacccacctcggcctcccaaagtgctgggattacaggcatgagccaccgtgccgggcccacacaacttttatattccatactagtactttctagacaatcagagctaactttaaaggggccactgaaagttgctgttcgaaggaaacctacattgactattaccataaattcaaaaattattttactctgcttgtcatcagtaaaagaattgcttgaattgaagcgtatgtaataaacctatcctcttgcaaaacttgttagtggctctgtggttaagtaagtcttgaatacctgaggctgcttctgggaaggtggtcctgtgccacagataatgatgtcccttgggtttctactgattacattatgacttgattataagatttttactgtcacgagggagggtcttggctcatctgagatttccctagccccctgagtggtgctgaaattgttttaataaagatgttgcgctttactcatgtgctgctattagcatttgacgtgctgtctcagagcgagaaaacggaggatcccaaccttccagtaggaaggcttagagaagaggctgttggcaagtgtctctaagaattgcacaacactggctgagggtgggttaagggtgaggaggcagaggagagtaaacagaaaacaccgatccccaaatgttagttacgcttgcaaaaaactaaggcctgcttcaaaaagctggtgattagcctgaataactagcaaagctttcttagttgtgggcaagtgcaggcctcctagggcttcccttaggttcggcgattctgtggtccccctccaagcctactaatcaatagaagctggcatctgtgcccagctgcgcaaagtaaacctgagtgggaatgtaaagtcgttaactcatacaaatacgggactttcacgtccctccccattcctccctctccagccccgtcccgcaaactcctccccaaggagtcccaagctgcctctactaggaaaggactccccggcctaaacgccccttatgaagctaccagagaggaggaggaggagcaggagtgtgaacctacctcggcctcagaacaagtccgcagaaacgggcaggacaatggaaagaagttttgtttctcacccgcttcttcctccctagtacgatgatggggagccggtagaaaacgcaaagatgttcttttgaatcctgctttgcatctaggtggggttggcgtccttgtgtgagtgtgtgtacacggacggagatgggggcgtggtgaggtgtggagggtcggcgtgccagcctctgcgtagttgggaccgcgccccgcttctccgaggaggcccctcccgcctggatccgcccttggagctggcgccgcagcagcacccgccccaggggccgcaggggcagcccaggcaaagaacgagcctgggatccgcgctccttcctcagctggaccccaacgggcagcagccgcgagagcactgcctccacggagagcagatggcgggaaactggcttctgctcccaattgccaggcggcccttcagagactacccctggctgagcgtccaggaacccatgaaacttggtcttgacactggtcgacagcaccatctgccacgtacttattcgctgctgctttctttggcaggacagcccatcgcgagacagtttgtgtttcaaatttaacggagactttttttcagtagttgacaaaagggggtggaaaaacagtagccacgagggctcgtccgggatttgaacccgggacctctcgcacccaaagcgagaatcatacccctagaccaacgagccactgtagctgagtggtgcttcctatcactctgaatttctcttttccgcctgctgttctgaaggttttttgttttgtttcttttcctctgttgtgacatttcccttaggccttatttagttattccttccatcttcaccaagtttcaagtgtggcttattctctggcttattctcctcgatccagatgcaggatggggtgaaggaaggcagctttttagactttaggtcacatgcttgtgtctcactgagcccggggagcgatttaagcccgctagggcctggagggaacctggagggggctgaaatagagatcgagggccagagctgagctcggttgcaaggctgtagggtactgagccccaggacagacgcgcgatacgtatatatctgccggcctttggacttaacgtagaagccaaaatataacacacttcggtaagacaacagtgccttcccccaacggtgggacgattcgggtctactatctttcagaaaggtaaccaacttttcaagacgcgattaacgcagcccacctcgcggctaagctgtttccttcggacaagggtgagagacagaaacagatttgatcacgtcaagatacagagattttttgcacaaacgaagagcaaccgtaaaccccaaaacagcagcgtctccttcgagccggaatcgaaccagcgacctaaggatgaccacacattaagtactacagtcctccgctctaccagctgagctatcgaaggaagcacggaaacaactctcctaaaaatccctactcgagacatccttaaccagagacgggaaagaaagaaatctctttatacccggaaagtaattactgcagagtcacaaagccagcttgtaagacagtcctgcgtccgaggttctgaggacaacctttctaaatctggattcccctgcctcactgaggggctcccaagcagagcaggcgcccctgaaactcgggcataccgaggctgctcatcctctgggcgcccgagggctgttggcctcactgggcgcggacccaggggcctcgcgagcgtggatgcgtgtgtttgtgtgtagggtggggaccggcacctgggcgtcggagaactgggggctgaggcggtgggacgcacacaattctgactgcgcaactgtgaacgccggagagggcgggcctccaggcttaggcccgggctccctgatgtcctcacttcctgcgcttccctcccaatctcggctcttccgcttacacgtccacagacacgggagggagagggtgtggaatggagcagtggtccccaacatttttggcactagggaccggtttcgtggaagacagtttttccacggaccgcgggggcggggggaagagttgggggatggtttcgggatgaaactgttccacctcagatcatcaggcatcacttagattctcataaggagtgcagtttagatccctggcatgcgcagttcccaatagggttcgcgctcctgtgagattctaatgccaccactgatctcacaggaggcggagctcaggcggtactggtagctagcccggagttcacctcctgctgtacagccgggtccctaacaggccatggacaggtgcgcggcccaagggttgggaacccctgaaatagaggacatctgggcaaacccaatgtttctgtgtgaattcgcttttggagataatatttgcagctcattcaaaaggaaggccacatttctctgcgttaaaatcaaatttagtgacccaagtctcgcccctaaagtcgggcccttaatttcccaaaaccccactggcacatgaaaccttgcctcacaacgtgcatctctcttctggac

SEQ ID NO: 1241113 - DNA, 4001 bp, Homo sapiens
ttggcaatttttttttaaagggaagaaaccttaaaagtggctcaaatattgaaagacggttcaaatatcttgtttggggtctatgtatatttatgtccttctaaacaatggttttaaccacggtgattttgccctcggaagacatttagcaacgttcagagacactgttgttgtcacaactgcagcattgctactggcatctagtggttagaggacagagacgctgctgaacttccaacaattcacaggacagacccacaccaaatgatccggtccaaaacgtcaacagtgctgagattgagaaaccctgctctaaacctatgtatgggctgggtcgttgagctttagcctcaaggacttcctgattatctgccccttgaaatatcctctgtgtataccagatggcagaggttctttggttcatatgcacgaagttactagctttcaattttggtagatgtcttttggtggtggtggtggtggattttcagcagcagaatgcttttgttttttaaaaatcttatctggaaaccaaatatgccaagtaaatataagtgggactactgtaatgtgtaggtgggggggcggggggggccctcctctgagatccctagaactctactggtctggaaacctctggactagtatactgtatcactaaggcattagaagagctccaggaaaaacagcaacatagttaaaagaatatgtttagttctctggaaacaattacttctgtggagtttcccacattcctcagaagtatggacacacaagacattcctgaattcactgagtgcctactgtataccaagcaatgtgttaacaccagagatacagcgaacaaaatggacgtggccctgcgctcctgaagtttgcattctaatggcagatacacagtaaaatttaaaatatttctatatgaaatatatattatcaatgacacacacattgcgtaccaattgtgtaaagttccacaaaggaaaaccacagaatatacaattggagccctcattcctaagtacttcttggtcctgtcccataaattaaaggcaaaaagtctgcgagttccatgggatctcagaaactgatggtcgcataaaaccctccgtaatttcaaagcccagaaatagagaatgcagacaaattatgaaacaataacgaaataaacaccccctctttgaggtatcgactgggcattgcccccaccccagcacatctccctctaaaccgccgggagtgggggcaggaatgctccaaagctgagatctaaatgtgtctctgattgaacgtccgtttttcaaccaaagacaccggtgagcgagagctgccaggtggcagtgaaaggcgagtgtgaagttaacctggggaagatcggtgcgtccagtacttcggccataaacctcccagagccgacccgcctcgcccgctgagaatttgggcactcgcctaggtccgagctactaccccttcccgacccgccggggtgctgacttggccgaccccacaatttctctgcacccccagggccaggaaagggccctgcccgtccacagctcctctccaccttaaccgcggccggacgccatctgacaacaggcgggaggaggggccgcccacgagggacgtcggccaggtccaggcctcgtggggtcaggaggggcccgcggggcaggggctcaggaccgcctccctacacctcggcactgcccggggcacggtagtcgtgaggcccggccaaccgcacgccgccccaggcccgcggagccccgcagaggcgagccctggccgggctcctgtctgtcggtacgcctggccggtacctgagagggcgcggaagaggcgcgtggccggcagcagcaggtaacacaagcacgacgcgatcatggccggccgcccgcgcccgcctccgctcctcactgcagccagcaggtcctccctcagctcggccccgcccccggcccggtccggcccacgtggtgccgccgccgcgcttcaacaacaactttattgggagcgcaggtctacgggtgcgcacgcaggaagtgggaggagccggttcccatggcaactagccacccctagcacccggctgccacccaggcgtcccgaattaaaattgagcgcctcactggaggccccatagtgttattcaaaggccacagtttattcccacttctgcagctgactaggtgtccaccttgttaccacactatagcctctccgcccctcagtttcctcacctgtaaaatgaagagctggactttctctaaggctccactgaaccttgacttctagcccttctcgacccagaaaggaagcgagttattcccccatttcccccgttttcctgcctctacttccctgtctcagattctaggtcacaaattgagtcctaccttgcttcaggaagtaagactttgtctccttccctactttctaaacgggccttcttttccctaatctagaaaaacagggtttcccattggtaaggaagtcaagaaagaaaggagagaggacaaagagaggagagagagaagggagagaggagagagacagaagagagaaacttccacaaggccagggaccagttctggctggttgtttgctcactttgaggtatctctaatacaatccaagcacctattgtaaccaagtacccagcttggaagttatattcttgttatatacttctatttctttatttttgttcagttaaccactaggcaccccccgacaccccagcaccccccatacacactgttagcatatctaattgtatgttcgcttaaaagttccagagactaaatcttgaaacaatataggcatctgtggaaatctccaccaggagattgattcaaggctacagttaatttataactcagcccagcccgagatgatgccagcccattcaccagatgggcagtaactcaagacaagtcatcagaactcgtcatgaagacctgcactgcctcaccccttgcataccctccatgccaaaacttcttaaagcctcgcattttgcttggaaatgtgaagcagctccattaaagcaaaagcctggatcgtttttccccactgctagctttggtttataataaagtcagtctccttctaccataccacgaccttgctcgttggttttgcaagcggccgaatctgcattcgctagcactactagccaccacataagcctttactgactggttgaacaaagcatatgtcactaaatgaaggccagttctgccatcacttctgtgccacctgcgacctctttgagtctctcttccccagtccccctcccccaatcttctaccccaaacaggctctgaaggagggactggacaatgcacccagtttcagtacccagtgtctgagttgcacgatttccagtttgtggctggagccttggttgttcagggaagccttctggggagtcaccagatcctggaccagctgggtacatcataacactgaaaggctaataggaggaagaaggagagagttagtattgtggccttcccactacttacccttagttctagaggtggcaatgtctgcctgccttcaggcaacagcacttatccctttgagatgaaacagaggcccagcaatctgaaggttgggaagctgcttagaaattagtgcacaaatggtggatctaccaaaggcgctcccgaggtcaggccccctcctttgatgtagcttaagtaaaaccctccttgtaccctccttccattttgtaccatgagttatccagaagtccaagttccaaatcagatcctaatcaagggtaacggttcccttatctccactgggaaaatgctttcaaaatacaaatttctaggccctactcccagagttctgatttagcagccctggaatgaggcccttaaacacttacttattccaatgcacggtttgggaacctctgctaaaggatccagtctcaactgggctgttcagtgcacagtgtgggcacaatgtgtcagcccaactga
